United States Patent Application Publication US 2018/0305689 A1 - sequence listing, part 167

SEQ ID NO: 2456765 - RNA, 19 nt, Artificial Sequence
  Description of Artificial Sequence: Synthetic oligonucleotide
  Antisense strand to SEQ ID NO: 2456764
ucauaugcuauauauuggc

SEQ ID NO: 2456766 - RNA, 19 nt, Artificial Sequence
  Description of Artificial Sequence: Synthetic oligonucleotide
  Sense strand starting at position 2929 of SEQ ID NO: 1887227
agcauaugauuagggaaau

SEQ ID NO: 2456767 - RNA, 19 nt, Artificial Sequence
  Description of Artificial Sequence: Synthetic oligonucleotide
  Antisense strand to SEQ ID NO: 2456766
auuucccuaaucauaugcu

SEQ ID NO: 2456768 - RNA, 19 nt, Artificial Sequence
  Description of Artificial Sequence: Synthetic oligonucleotide
  Sense strand starting at position 2930 of SEQ ID NO: 1887227
gcauaugauuagggaaaug

SEQ ID NO: 2456769 - RNA, 19 nt, Artificial Sequence
  Description of Artificial Sequence: Synthetic oligonucleotide
  Antisense strand to SEQ ID NO: 2456768
cauuucccuaaucauaugc

SEQ ID NO: 2456770 - RNA, 19 nt, Artificial Sequence
  Description of Artificial Sequence: Synthetic oligonucleotide
  Sense strand starting at position 2940 of SEQ ID NO: 1887227
agggaaaugugggagagau

SEQ ID NO: 2456771 - RNA, 19 nt, Artificial Sequence
  Description of Artificial Sequence: Synthetic oligonucleotide
  Antisense strand to SEQ ID NO: 2456770
aucucucccacauuucccu

SEQ ID NO: 2456772 - RNA, 19 nt, Artificial Sequence
  Description of Artificial Sequence: Synthetic oligonucleotide
  Sense strand starting at position 2959 of SEQ ID NO: 1887227
auauccaacuucgcugaua

SEQ ID NO: 2456773 - RNA, 19 nt, Artificial Sequence
  Description of Artificial Sequence: Synthetic oligonucleotide
  Antisense strand to SEQ ID NO: 2456772
uaucagcgaaguuggauau

SEQ ID NO: 2456774 - RNA, 19 nt, Artificial Sequence
  Description of Artificial Sequence: Synthetic oligonucleotide
  Sense strand starting at position 2961 of SEQ ID NO: 1887227
auccaacuucgcugauaaa

SEQ ID NO: 2456775 - RNA, 19 nt, Artificial Sequence
  Description of Artificial Sequence: Synthetic oligonucleotide
  Antisense strand to SEQ ID NO: 2456774
uuuaucagcgaaguuggau

SEQ ID NO: 2456776 - RNA, 19 nt, Artificial Sequence
  Description of Artificial Sequence: Synthetic oligonucleotide
  Sense strand starting at position 2994 of SEQ ID NO: 1887227
caaguagucugcucucaga

SEQ ID NO: 2456777 - RNA, 19 nt, Artificial Sequence
  Description of Artificial Sequence: Synthetic oligonucleotide
  Antisense strand to SEQ ID NO: 2456776
ucugagagcagacuacuug

SEQ ID NO: 2456778 - RNA, 19 nt, Artificial Sequence
  Description of Artificial Sequence: Synthetic oligonucleotide
  Sense strand starting at position 2997 of SEQ ID NO: 1887227
guagucugcucucagagua

SEQ ID NO: 2456779 - RNA, 19 nt, Artificial Sequence
  Description of Artificial Sequence: Synthetic oligonucleotide
  Antisense strand to SEQ ID NO: 2456778
uacucugagagcagacuac

SEQ ID NO: 2456780 - RNA, 19 nt, Artificial Sequence
  Description of Artificial Sequence: Synthetic oligonucleotide
  Sense strand starting at position 3167 of SEQ ID NO: 1887227
ccagcauccuugggaauga

SEQ ID NO: 2456781 - RNA, 19 nt, Artificial Sequence
  Description of Artificial Sequence: Synthetic oligonucleotide
  Antisense strand to SEQ ID NO: 2456780
ucauucccaaggaugcugg

SEQ ID NO: 2456782 - RNA, 19 nt, Artificial Sequence
  Description of Artificial Sequence: Synthetic oligonucleotide
  Sense strand starting at position 3177 of SEQ ID NO: 1887227
ugggaaugacucuggcuua

SEQ ID NO: 2456783 - RNA, 19 nt, Artificial Sequence
  Description of Artificial Sequence: Synthetic oligonucleotide
  Antisense strand to SEQ ID NO: 2456782
uaagccagagucauuccca

SEQ ID NO: 2456784 - RNA, 19 nt, Artificial Sequence
  Description of Artificial Sequence: Synthetic oligonucleotide
  Sense strand starting at position 3178 of SEQ ID NO: 1887227
gggaaugacucuggcuuac

SEQ ID NO: 2456785 - RNA, 19 nt, Artificial Sequence
  Description of Artificial Sequence: Synthetic oligonucleotide
  Antisense strand to SEQ ID NO: 2456784
guaagccagagucauuccc

SEQ ID NO: 2456786 - RNA, 19 nt, Artificial Sequence
  Description of Artificial Sequence: Synthetic oligonucleotide
  Sense strand starting at position 3187 of SEQ ID NO: 1887227
ucuggcuuacgcugaaaga

SEQ ID NO: 2456787 - RNA, 19 nt, Artificial Sequence
  Description of Artificial Sequence: Synthetic oligonucleotide
  Antisense strand to SEQ ID NO: 2456786
ucuuucagcguaagccaga

SEQ ID NO: 2456788 - RNA, 19 nt, Artificial Sequence
  Description of Artificial Sequence: Synthetic oligonucleotide
  Sense strand starting at position 3251 of SEQ ID NO: 1887227
ccgaauuacucacacaggu

SEQ ID NO: 2456789 - RNA, 19 nt, Artificial Sequence
  Description of Artificial Sequence: Synthetic oligonucleotide
  Antisense strand to SEQ ID NO: 2456788
accugugugaguaauucgg

SEQ ID NO: 2456790 - RNA, 19 nt, Artificial Sequence
  Description of Artificial Sequence: Synthetic oligonucleotide
  Sense strand starting at position 3423 of SEQ ID NO: 1887227
ccuucuguaucugagcaga

SEQ ID NO: 2456791 - RNA, 19 nt, Artificial Sequence
  Description of Artificial Sequence: Synthetic oligonucleotide
  Antisense strand to SEQ ID NO: 2456790
ucugcucagauacagaagg

SEQ ID NO: 2456792 - RNA, 19 nt, Artificial Sequence
  Description of Artificial Sequence: Synthetic oligonucleotide
  Sense strand starting at position 3453 of SEQ ID NO: 1887227
gcucauaugucaguuacca

SEQ ID NO: 2456793 - RNA, 19 nt, Artificial Sequence
  Description of Artificial Sequence: Synthetic oligonucleotide
  Antisense strand to SEQ ID NO: 2456792
ugguaacugacauaugagc

SEQ ID NO: 2456794 - RNA, 19 nt, Artificial Sequence
  Description of Artificial Sequence: Synthetic oligonucleotide
  Sense strand starting at position 3591 of SEQ ID NO: 1887227
uuaagaucgugcugucaau

SEQ ID NO: 2456795 - RNA, 19 nt, Artificial Sequence
  Description of Artificial Sequence: Synthetic oligonucleotide
  Antisense strand to SEQ ID NO: 2456794
auugacagcacgaucuuaa

SEQ ID NO: 2456796 - RNA, 19 nt, Artificial Sequence
  Description of Artificial Sequence: Synthetic oligonucleotide
  Sense strand starting at position 3601 of SEQ ID NO: 1887227
gcugucaauagguggcaaa

SEQ ID NO: 2456797 - RNA, 19 nt, Artificial Sequence
  Description of Artificial Sequence: Synthetic oligonucleotide
  Antisense strand to SEQ ID NO: 2456796
uuugccaccuauugacagc

SEQ ID NO: 2456798 - RNA, 19 nt, Artificial Sequence
  Description of Artificial Sequence: Synthetic oligonucleotide
  Sense strand starting at position 3635 of SEQ ID NO: 1887227
cagucugguuccugagugu

SEQ ID NO: 2456799 - RNA, 19 nt, Artificial Sequence
  Description of Artificial Sequence: Synthetic oligonucleotide
  Antisense strand to SEQ ID NO: 2456798
acacucaggaaccagacug

SEQ ID NO: 2456800 - RNA, 19 nt, Artificial Sequence
  Description of Artificial Sequence: Synthetic oligonucleotide
  Sense strand starting at position 3638 of SEQ ID NO: 1887227
ucugguuccugaguguaca

SEQ ID NO: 2456801 - RNA, 19 nt, Artificial Sequence
  Description of Artificial Sequence: Synthetic oligonucleotide
  Antisense strand to SEQ ID NO: 2456800
uguacacucaggaaccaga

SEQ ID NO: 2456802 - RNA, 19 nt, Artificial Sequence
  Description of Artificial Sequence: Synthetic oligonucleotide
  Sense strand starting at position 3668 of SEQ ID NO: 1887227
ugaggccgcucagauaauu

SEQ ID NO: 2456803 - RNA, 19 nt, Artificial Sequence
  Description of Artificial Sequence: Synthetic oligonucleotide
  Antisense strand to SEQ ID NO: 2456802
aauuaucugagcggccuca

SEQ ID NO: 2456804 - RNA, 19 nt, Artificial Sequence
  Description of Artificial Sequence: Synthetic oligonucleotide
  Sense strand starting at position 3690 of SEQ ID NO: 1887227
ucaguuucuuuacucuaga

SEQ ID NO: 2456805 - RNA, 19 nt, Artificial Sequence
  Description of Artificial Sequence: Synthetic oligonucleotide
  Antisense strand to SEQ ID NO: 2456804
ucuagaguaaagaaacuga

SEQ ID NO: 2456806 - RNA, 19 nt, Artificial Sequence
  Description of Artificial Sequence: Synthetic oligonucleotide
  Sense strand starting at position 3795 of SEQ ID NO: 1887227
gagcuuugcucguugccca

SEQ ID NO: 2456807 - RNA, 19 nt, Artificial Sequence
  Description of Artificial Sequence: Synthetic oligonucleotide
  Antisense strand to SEQ ID NO: 2456806
ugggcaacgagcaaagcuc

SEQ ID NO: 2456808 - RNA, 19 nt, Artificial Sequence
  Description of Artificial Sequence: Synthetic oligonucleotide
  Sense strand starting at position 3863 of SEQ ID NO: 1887227
ggguuaaauucuccugccu

SEQ ID NO: 2456809 - RNA, 19 nt, Artificial Sequence
  Description of Artificial Sequence: Synthetic oligonucleotide
  Antisense strand to SEQ ID NO: 2456808
aggcaggagaauuuaaccc

SEQ ID NO: 2456810 - RNA, 19 nt, Artificial Sequence
  Description of Artificial Sequence: Synthetic oligonucleotide
  Sense strand starting at position 3865 of SEQ ID NO: 1887227
guuaaauucuccugccuga

SEQ ID NO: 2456811 - RNA, 19 nt, Artificial Sequence
  Description of Artificial Sequence: Synthetic oligonucleotide
  Antisense strand to SEQ ID NO: 2456810
ucaggcaggagaauuuaac

SEQ ID NO: 2456812 - RNA, 19 nt, Artificial Sequence
  Description of Artificial Sequence: Synthetic oligonucleotide
  Sense strand starting at position 1 of SEQ ID NO: 1887228
caggcaaagccaugagauc

SEQ ID NO: 2456813 - RNA, 19 nt, Artificial Sequence
  Description of Artificial Sequence: Synthetic oligonucleotide
  Antisense strand to SEQ ID NO: 2456812
gaucucauggcuuugccug

SEQ ID NO: 2456814 - RNA, 19 nt, Artificial Sequence
  Description of Artificial Sequence: Synthetic oligonucleotide
  Sense strand starting at position 65 of SEQ ID NO: 1887228
cuagcuaaucuugaauguu

SEQ ID NO: 2456815 - RNA, 19 nt, Artificial Sequence
  Description of Artificial Sequence: Synthetic oligonucleotide
  Antisense strand to SEQ ID NO: 2456814
aacauucaagauuagcuag

SEQ ID NO: 2456816 - RNA, 19 nt, Artificial Sequence
  Description of Artificial Sequence: Synthetic oligonucleotide
  Sense strand starting at position 130 of SEQ ID NO: 1887228
caggauggguccucucaua

SEQ ID NO: 2456817 - RNA, 19 nt, Artificial Sequence
  Description of Artificial Sequence: Synthetic oligonucleotide
  Antisense strand to SEQ ID NO: 2456816
uaugagaggacccauccug

SEQ ID NO: 2456818 - RNA, 19 nt, Artificial Sequence
  Description of Artificial Sequence: Synthetic oligonucleotide
  Sense strand starting at position 236 of SEQ ID NO: 1887228
uuguuaaucugauugggag

SEQ ID NO: 2456819 - RNA, 19 nt, Artificial Sequence
  Description of Artificial Sequence: Synthetic oligonucleotide
  Antisense strand to SEQ ID NO: 2456818
cucccaaucagauuaacaa

SEQ ID NO: 2456820 - RNA, 19 nt, Artificial Sequence
  Description of Artificial Sequence: Synthetic oligonucleotide
  Sense strand starting at position 237 of SEQ ID NO: 1887228
uguuaaucugauugggaga

SEQ ID NO: 2456821 - RNA, 19 nt, Artificial Sequence
  Description of Artificial Sequence: Synthetic oligonucleotide
  Antisense strand to SEQ ID NO: 2456820
ucucccaaucagauuaaca

SEQ ID NO: 2456822 - RNA, 19 nt, Artificial Sequence
  Description of Artificial Sequence: Synthetic oligonucleotide
  Sense strand starting at position 250 of SEQ ID NO: 1887228
gggagaguuccaugggcag

SEQ ID NO: 2456823 - RNA, 19 nt, Artificial Sequence
  Description of Artificial Sequence: Synthetic oligonucleotide
  Antisense strand to SEQ ID NO: 2456822
cugcccauggaacucuccc

SEQ ID NO: 2456824 - RNA, 19 nt, Artificial Sequence
  Description of Artificial Sequence: Synthetic oligonucleotide
  Sense strand starting at position 252 of SEQ ID NO: 1887228
gagaguuccaugggcagau

SEQ ID NO: 2456825 - RNA, 19 nt, Artificial Sequence
  Description of Artificial Sequence: Synthetic oligonucleotide
  Antisense strand to SEQ ID NO: 2456824
aucugcccauggaacucuc

SEQ ID NO: 2456826 - RNA, 19 nt, Artificial Sequence
  Description of Artificial Sequence: Synthetic oligonucleotide
  Sense strand starting at position 253 of SEQ ID NO: 1887228
agaguuccaugggcagauu

SEQ ID NO: 2456827 - RNA, 19 nt, Artificial Sequence
  Description of Artificial Sequence: Synthetic oligonucleotide
  Antisense strand to SEQ ID NO: 2456826
aaucugcccauggaacucu

SEQ ID NO: 2456828 - RNA, 19 nt, Artificial Sequence
  Description of Artificial Sequence: Synthetic oligonucleotide
  Sense strand starting at position 386 of SEQ ID NO: 1887228
uugugcauuugugucagaa

SEQ ID NO: 2456829 - RNA, 19 nt, Artificial Sequence
  Description of Artificial Sequence: Synthetic oligonucleotide
  Antisense strand to SEQ ID NO: 2456828
uucugacacaaaugcacaa

SEQ ID NO: 2456830 - RNA, 19 nt, Artificial Sequence
  Description of Artificial Sequence: Synthetic oligonucleotide
  Sense strand starting at position 399 of SEQ ID NO: 1887228
ucagaauguuuaguuuaca

SEQ ID NO: 2456831 - RNA, 19 nt, Artificial Sequence
  Description of Artificial Sequence: Synthetic oligonucleotide
  Antisense strand to SEQ ID NO: 2456830
uguaaacuaaacauucuga

SEQ ID NO: 2456832 - RNA, 19 nt, Artificial Sequence
  Description of Artificial Sequence: Synthetic oligonucleotide
  Sense strand starting at position 517 of SEQ ID NO: 1887228
uaacuuacauguguggaca

SEQ ID NO: 2456833 - RNA, 19 nt, Artificial Sequence
  Description of Artificial Sequence: Synthetic oligonucleotide
  Antisense strand to SEQ ID NO: 2456832
uguccacacauguaaguua

SEQ ID NO: 2456834 - RNA, 19 nt, Artificial Sequence
  Description of Artificial Sequence: Synthetic oligonucleotide
  Sense strand starting at position 518 of SEQ ID NO: 1887228
aacuuacauguguggacaa

SEQ ID NO: 2456835 - RNA, 19 nt, Artificial Sequence
  Description of Artificial Sequence: Synthetic oligonucleotide
  Antisense strand to SEQ ID NO: 2456834
uuguccacacauguaaguu

SEQ ID NO: 2456836 - RNA, 19 nt, Artificial Sequence
  Description of Artificial Sequence: Synthetic oligonucleotide
  Sense strand starting at position 567 of SEQ ID NO: 1887228
gccugaacaugacuuuaaa

SEQ ID NO: 2456837 - RNA, 19 nt, Artificial Sequence
  Description of Artificial Sequence: Synthetic oligonucleotide
  Antisense strand to SEQ ID NO: 2456836
uuuaaagucauguucaggc

SEQ ID NO: 2456838 - RNA, 19 nt, Artificial Sequence
  Description of Artificial Sequence: Synthetic oligonucleotide
  Sense strand starting at position 735 of SEQ ID NO: 1887228
gucacuggucuuuauaauu

SEQ ID NO: 2456839 - RNA, 19 nt, Artificial Sequence
  Description of Artificial Sequence: Synthetic oligonucleotide
  Antisense strand to SEQ ID NO: 2456838
aauuauaaagaccagugac

SEQ ID NO: 2456840 - RNA, 19 nt, Artificial Sequence
  Description of Artificial Sequence: Synthetic oligonucleotide
  Sense strand starting at position 748 of SEQ ID NO: 1887228
auaauuguugugcaauaac

SEQ ID NO: 2456841 - RNA, 19 nt, Artificial Sequence
  Description of Artificial Sequence: Synthetic oligonucleotide
  Antisense strand to SEQ ID NO: 2456840
guuauugcacaacaauuau

SEQ ID NO: 2456842 - RNA, 19 nt, Artificial Sequence
  Description of Artificial Sequence: Synthetic oligonucleotide
  Sense strand starting at position 751 of SEQ ID NO: 1887228
auuguugugcaauaacuaa

SEQ ID NO: 2456843 - RNA, 19 nt, Artificial Sequence
  Description of Artificial Sequence: Synthetic oligonucleotide
  Antisense strand to SEQ ID NO: 2456842
uuaguuauugcacaacaau

SEQ ID NO: 2456844 - RNA, 19 nt, Artificial Sequence
  Description of Artificial Sequence: Synthetic oligonucleotide
  Sense strand starting at position 785 of SEQ ID NO: 1887228
ugcacuaucguguaaagag

SEQ ID NO: 2456845 - RNA, 19 nt, Artificial Sequence
  Description of Artificial Sequence: Synthetic oligonucleotide
  Antisense strand to SEQ ID NO: 2456844
cucuuuacacgauagugca

SEQ ID NO: 2456846 - RNA, 19 nt, Artificial Sequence
  Description of Artificial Sequence: Synthetic oligonucleotide
  Sense strand starting at position 1097 of SEQ ID NO: 1887228
uaaagaauccagugaaagu

SEQ ID NO: 2456847 - RNA, 19 nt, Artificial Sequence
  Description of Artificial Sequence: Synthetic oligonucleotide
  Antisense strand to SEQ ID NO: 2456846
acuuucacuggauucuuua

SEQ ID NO: 2456848 - RNA, 19 nt, Artificial Sequence
  Description of Artificial Sequence: Synthetic oligonucleotide
  Sense strand starting at position 1178 of SEQ ID NO: 1887228
guauaauguuaauucggga

SEQ ID NO: 2456849 - RNA, 19 nt, Artificial Sequence
  Description of Artificial Sequence: Synthetic oligonucleotide
  Antisense strand to SEQ ID NO: 2456848
ucccgaauuaacauuauac

SEQ ID NO: 2456850 - RNA, 19 nt, Artificial Sequence
  Description of Artificial Sequence: Synthetic oligonucleotide
  Sense strand starting at position 1183 of SEQ ID NO: 1887228
auguuaauucgggacaccu

SEQ ID NO: 2456851 - RNA, 19 nt, Artificial Sequence
  Description of Artificial Sequence: Synthetic oligonucleotide
  Antisense strand to SEQ ID NO: 2456850
aggugucccgaauuaacau

SEQ ID NO: 2456852 - RNA, 19 nt, Artificial Sequence
  Description of Artificial Sequence: Synthetic oligonucleotide
  Sense strand starting at position 1294 of SEQ ID NO: 1887228
gcccuuguggaagaucuuu

SEQ ID NO: 2456853 - RNA, 19 nt, Artificial Sequence
  Description of Artificial Sequence: Synthetic oligonucleotide
  Antisense strand to SEQ ID NO: 2456852
aaagaucuuccacaagggc

SEQ ID NO: 2456854 - RNA, 19 nt, Artificial Sequence
  Description of Artificial Sequence: Synthetic oligonucleotide
  Sense strand starting at position 1322 of SEQ ID NO: 1887228
cugaaucuggacuguguaa

SEQ ID NO: 2456855 - RNA, 19 nt, Artificial Sequence
  Description of Artificial Sequence: Synthetic oligonucleotide
  Antisense strand to SEQ ID NO: 2456854
uuacacaguccagauucag

SEQ ID NO: 2456856 - RNA, 19 nt, Artificial Sequence
  Description of Artificial Sequence: Synthetic oligonucleotide
  Sense strand starting at position 1324 of SEQ ID NO: 1887228
gaaucuggacuguguaacu

SEQ ID NO: 2456857 - RNA, 19 nt, Artificial Sequence
  Description of Artificial Sequence: Synthetic oligonucleotide
  Antisense strand to SEQ ID NO: 2456856
aguuacacaguccagauuc

SEQ ID NO: 2456858 - RNA, 19 nt, Artificial Sequence
  Description of Artificial Sequence: Synthetic oligonucleotide
  Sense strand starting at position 1411 of SEQ ID NO: 1887228
acuguuuaggagugacaga

SEQ ID NO: 2456859 - RNA, 19 nt, Artificial Sequence
  Description of Artificial Sequence: Synthetic oligonucleotide
  Antisense strand to SEQ ID NO: 2456858
ucugucacuccuaaacagu

SEQ ID NO: 2456860 - RNA, 19 nt, Artificial Sequence
  Description of Artificial Sequence: Synthetic oligonucleotide
  Sense strand starting at position 1412 of SEQ ID NO: 1887228
cuguuuaggagugacagau

SEQ ID NO: 2456861 - RNA, 19 nt, Artificial Sequence
  Description of Artificial Sequence: Synthetic oligonucleotide
  Antisense strand to SEQ ID NO: 2456860
aucugucacuccuaaacag

SEQ ID NO: 2456862 - RNA, 19 nt, Artificial Sequence
  Description of Artificial Sequence: Synthetic oligonucleotide
  Sense strand starting at position 1471 of SEQ ID NO: 1887228
cugcaugguuauuuguaaa

SEQ ID NO: 2456863 - RNA, 19 nt, Artificial Sequence
  Description of Artificial Sequence: Synthetic oligonucleotide
  Antisense strand to SEQ ID NO: 2456862
uuuacaaauaaccaugcag

SEQ ID NO: 2456864 - RNA, 19 nt, Artificial Sequence
  Description of Artificial Sequence: Synthetic oligonucleotide
  Sense strand starting at position 1501 of SEQ ID NO: 1887228
cccuuuagucaggaguuaa

SEQ ID NO: 2456865 - RNA, 19 nt, Artificial Sequence
  Description of Artificial Sequence: Synthetic oligonucleotide
  Antisense strand to SEQ ID NO: 2456864
uuaacuccugacuaaaggg

SEQ ID NO: 2456866 - RNA, 19 nt, Artificial Sequence
  Description of Artificial Sequence: Synthetic oligonucleotide
  Sense strand starting at position 1536 of SEQ ID NO: 1887228
accgaaucuguuuauguca

SEQ ID NO: 2456867 - RNA, 19 nt, Artificial Sequence
  Description of Artificial Sequence: Synthetic oligonucleotide
  Antisense strand to SEQ ID NO: 2456866
ugacauaaacagauucggu

SEQ ID NO: 2456868 - RNA, 19 nt, Artificial Sequence
  Description of Artificial Sequence: Synthetic oligonucleotide
  Sense strand starting at position 1598 of SEQ ID NO: 1887228
cuaaaucugcgcgucugau

SEQ ID NO: 2456869 - RNA, 19 nt, Artificial Sequence
  Description of Artificial Sequence: Synthetic oligonucleotide
  Antisense strand to SEQ ID NO: 2456868
aucagacgcgcagauuuag

SEQ ID NO: 2456870 - RNA, 19 nt, Artificial Sequence
  Description of Artificial Sequence: Synthetic oligonucleotide
  Sense strand starting at position 1634 of SEQ ID NO: 1887228
gggacuuaugucgaacuca

SEQ ID NO: 2456871 - RNA, 19 nt, Artificial Sequence
  Description of Artificial Sequence: Synthetic oligonucleotide
  Antisense strand to SEQ ID NO: 2456870
ugaguucgacauaaguccc

SEQ ID NO: 2456872 - RNA, 19 nt, Artificial Sequence
  Description of Artificial Sequence: Synthetic oligonucleotide
  Sense strand starting at position 2043 of SEQ ID NO: 1887228
cacuuuauugacgggaaug

SEQ ID NO: 2456873 - RNA, 19 nt, Artificial Sequence
  Description of Artificial Sequence: Synthetic oligonucleotide
  Antisense strand to SEQ ID NO: 2456872
cauucccgucaauaaagug

SEQ ID NO: 2456874 - RNA, 19 nt, Artificial Sequence
  Description of Artificial Sequence: Synthetic oligonucleotide
  Sense strand starting at position 2817 of SEQ ID NO: 1887228
ugaugcguucgcucuguga

SEQ ID NO: 2456875 - RNA, 19 nt, Artificial Sequence
  Description of Artificial Sequence: Synthetic oligonucleotide
  Antisense strand to SEQ ID NO: 2456874
ucacagagcgaacgcauca

SEQ ID NO: 2456876 - RNA, 19 nt, Artificial Sequence
  Description of Artificial Sequence: Synthetic oligonucleotide
  Sense strand starting at position 2932 of SEQ ID NO: 1887228
auuguaaggauucggugaa

SEQ ID NO: 2456877 - RNA, 19 nt, Artificial Sequence
  Description of Artificial Sequence: Synthetic oligonucleotide
  Antisense strand to SEQ ID NO: 2456876
uucaccgaauccuuacaau

SEQ ID NO: 2456878 - RNA, 19 nt, Artificial Sequence
  Description of Artificial Sequence: Synthetic oligonucleotide
  Sense strand starting at position 3051 of SEQ ID NO: 1887228
cuaacauagcgcuaugaac

SEQ ID NO: 2456879 - RNA, 19 nt, Artificial Sequence
  Description of Artificial Sequence: Synthetic oligonucleotide
  Antisense strand to SEQ ID NO: 2456878
guucauagcgcuauguuag

SEQ ID NO: 2456880 - RNA, 19 nt, Artificial Sequence
  Description of Artificial Sequence: Synthetic oligonucleotide
  Sense strand starting at position 3159 of SEQ ID NO: 1887228
gaugaaugauaguuugcuu

SEQ ID NO: 2456881 - RNA, 19 nt, Artificial Sequence
  Description of Artificial Sequence: Synthetic oligonucleotide
  Antisense strand to SEQ ID NO: 2456880
aagcaaacuaucauucauc

SEQ ID NO: 2456882 - RNA, 19 nt, Artificial Sequence
  Description of Artificial Sequence: Synthetic oligonucleotide
  Sense strand starting at position 3162 of SEQ ID NO: 1887228
gaaugauaguuugcuuaac

SEQ ID NO: 2456883 - RNA, 19 nt, Artificial Sequence
  Description of Artificial Sequence: Synthetic oligonucleotide
  Antisense strand to SEQ ID NO: 2456882
guuaagcaaacuaucauuc

SEQ ID NO: 2456884 - RNA, 19 nt, Artificial Sequence
  Description of Artificial Sequence: Synthetic oligonucleotide
  Sense strand starting at position 3309 of SEQ ID NO: 1887228
guaugugacagugaaauca

SEQ ID NO: 2456885 - RNA, 19 nt, Artificial Sequence
  Description of Artificial Sequence: Synthetic oligonucleotide
  Antisense strand to SEQ ID NO: 2456884
ugauuucacugucacauac

SEQ ID NO: 2456886 - RNA, 19 nt, Artificial Sequence
  Description of Artificial Sequence: Synthetic oligonucleotide
  Sense strand starting at position 3871 of SEQ ID NO: 1887228
auaaguguuccacagauug

SEQ ID NO: 2456887 - RNA, 19 nt, Artificial Sequence
  Description of Artificial Sequence: Synthetic oligonucleotide
  Antisense strand to SEQ ID NO: 2456886
caaucuguggaacacuuau

SEQ ID NO: 2456888 - RNA, 19 nt, Artificial Sequence
  Description of Artificial Sequence: Synthetic oligonucleotide
  Sense strand starting at position 3876 of SEQ ID NO: 1887228
uguuccacagauuguugaa

SEQ ID NO: 2456889 - RNA, 19 nt, Artificial Sequence
  Description of Artificial Sequence: Synthetic oligonucleotide
  Antisense strand to SEQ ID NO: 2456888
uucaacaaucuguggaaca

SEQ ID NO: 2456890 - RNA, 19 nt, Artificial Sequence
  Description of Artificial Sequence: Synthetic oligonucleotide
  Sense strand starting at position 3888 of SEQ ID NO: 1887228
uguugaaacgaagauguuu

SEQ ID NO: 2456891 - RNA, 19 nt, Artificial Sequence
  Description of Artificial Sequence: Synthetic oligonucleotide
  Antisense strand to SEQ ID NO: 2456890
aaacaucuucguuucaaca

SEQ ID NO: 2456892 - RNA, 19 nt, Artificial Sequence
  Description of Artificial Sequence: Synthetic oligonucleotide
  Sense strand starting at position 543 of SEQ ID NO: 1887229
gggaguguuccagaucuac

SEQ ID NO: 2456893 - RNA, 19 nt, Artificial Sequence
  Description of Artificial Sequence: Synthetic oligonucleotide
  Antisense strand to SEQ ID NO: 2456892
guagaucuggaacacuccc

SEQ ID NO: 2456894 - RNA, 19 nt, Artificial Sequence
  Description of Artificial Sequence: Synthetic oligonucleotide
  Sense strand starting at position 972 of SEQ ID NO: 1887229
uccauaucuccaugcugga

SEQ ID NO: 2456895 - RNA, 19 nt, Artificial Sequence
  Description of Artificial Sequence: Synthetic oligonucleotide
  Antisense strand to SEQ ID NO: 2456894
uccagcauggagauaugga

SEQ ID NO: 2456896 - RNA, 19 nt, Artificial Sequence
  Description of Artificial Sequence: Synthetic oligonucleotide
  Sense strand starting at position 1056 of SEQ ID NO: 1887229
gacacuucugacgggcaga

SEQ ID NO: 2456897 - RNA, 19 nt, Artificial Sequence
  Description of Artificial Sequence: Synthetic oligonucleotide
  Antisense strand to SEQ ID NO: 2456896
ucugcccgucagaaguguc

SEQ ID NO: 2456898 - RNA, 19 nt, Artificial Sequence
  Description of Artificial Sequence: Synthetic oligonucleotide
  Sense strand starting at position 1796 of SEQ ID NO: 1887229
agggaaaugugggagagau

SEQ ID NO: 2456899 - RNA, 19 nt, Artificial Sequence
  Description of Artificial Sequence: Synthetic oligonucleotide
  Antisense strand to SEQ ID NO: 2456898
aucucucccacauuucccu

SEQ ID NO: 2456900 - RNA, 19 nt, Artificial Sequence
  Description of Artificial Sequence: Synthetic oligonucleotide
  Sense strand starting at position 1815 of SEQ ID NO: 1887229
auauccaacuucgcugaua

SEQ ID NO: 2456901 - RNA, 19 nt, Artificial Sequence
  Description of Artificial Sequence: Synthetic oligonucleotide
  Antisense strand to SEQ ID NO: 2456900
uaucagcgaaguuggauau

SEQ ID NO: 2456902 - RNA, 19 nt, Artificial Sequence
  Description of Artificial Sequence: Synthetic oligonucleotide
  Sense strand starting at position 1817 of SEQ ID NO: 1887229
auccaacuucgcugauaaa

SEQ ID NO: 2456903 - RNA, 19 nt, Artificial Sequence
  Description of Artificial Sequence: Synthetic oligonucleotide
  Antisense strand to SEQ ID NO: 2456902
uuuaucagcgaaguuggau

SEQ ID NO: 2456904 - RNA, 19 nt, Artificial Sequence
  Description of Artificial Sequence: Synthetic oligonucleotide
  Sense strand starting at position 1850 of SEQ ID NO: 1887229
caaguagucugcucucaga

SEQ ID NO: 2456905 - RNA, 19 nt, Artificial Sequence
  Description of Artificial Sequence: Synthetic oligonucleotide
  Antisense strand to SEQ ID NO: 2456904
ucugagagcagacuacuug

SEQ ID NO: 2456906 - RNA, 19 nt, Artificial Sequence
  Description of Artificial Sequence: Synthetic oligonucleotide
  Sense strand starting at position 2033 of SEQ ID NO: 1887229
ugggaaugacucuggcuua

SEQ ID NO: 2456907 - RNA, 19 nt, Artificial Sequence
  Description of Artificial Sequence: Synthetic oligonucleotide
  Antisense strand to SEQ ID NO: 2456906
uaagccagagucauuccca

SEQ ID NO: 2456908 - RNA, 19 nt, Artificial Sequence
  Description of Artificial Sequence: Synthetic oligonucleotide
  Sense strand starting at position 2043 of SEQ ID NO: 1887229
ucuggcuuacgcugaaaga

SEQ ID NO: 2456909 - RNA, 19 nt, Artificial Sequence
  Description of Artificial Sequence: Synthetic oligonucleotide
  Antisense strand to SEQ ID NO: 2456908
ucuuucagcguaagccaga

SEQ ID NO: 2456910 - RNA, 19 nt, Artificial Sequence
  Description of Artificial Sequence: Synthetic oligonucleotide
  Sense strand starting at position 2309 of SEQ ID NO: 1887229
gcucauaugucaguuacca

SEQ ID NO: 2456911 - RNA, 19 nt, Artificial Sequence
  Description of Artificial Sequence: Synthetic oligonucleotide
  Antisense strand to SEQ ID NO: 2456910
ugguaacugacauaugagc

SEQ ID NO: 2456912 - RNA, 19 nt, Artificial Sequence
  Description of Artificial Sequence: Synthetic oligonucleotide
  Sense strand starting at position 2457 of SEQ ID NO: 1887229
gcugucaauagguggcaaa

SEQ ID NO: 2456913 - RNA, 19 nt, Artificial Sequence
  Description of Artificial Sequence: Synthetic oligonucleotide
  Antisense strand to SEQ ID NO: 2456912
uuugccaccuauugacagc

SEQ ID NO: 2456914 - RNA, 19 nt, Artificial Sequence
  Description of Artificial Sequence: Synthetic oligonucleotide
  Sense strand starting at position 2494 of SEQ ID NO: 1887229
ucugguuccugaguguaca

SEQ ID NO: 2456915 - RNA, 19 nt, Artificial Sequence
  Description of Artificial Sequence: Synthetic oligonucleotide
  Antisense strand to SEQ ID NO: 2456914
uguacacucaggaaccaga

SEQ ID NO: 2456916 - RNA, 19 nt, Artificial Sequence
  Description of Artificial Sequence: Synthetic oligonucleotide
  Sense strand starting at position 2546 of SEQ ID NO: 1887229
ucaguuucuuuacucuaga

SEQ ID NO: 2456917 - RNA, 19 nt, Artificial Sequence
  Description of Artificial Sequence: Synthetic oligonucleotide
  Antisense strand to SEQ ID NO: 2456916
ucuagaguaaagaaacuga

SEQ ID NO: 2456918 - RNA, 19 nt, Artificial Sequence
  Description of Artificial Sequence: Synthetic oligonucleotide
  Sense strand starting at position 2719 of SEQ ID NO: 1887229
ggguuaaauucuccugccu

SEQ ID NO: 2456919 - RNA, 19 nt, Artificial Sequence
  Description of Artificial Sequence: Synthetic oligonucleotide
  Antisense strand to SEQ ID NO: 2456918
aggcaggagaauuuaaccc

SEQ ID NO: 2456920 - RNA, 19 nt, Artificial Sequence
  Description of Artificial Sequence: Synthetic oligonucleotide
  Sense strand starting at position 2883 of SEQ ID NO: 1887229
aaguguugggauuauacga

SEQ ID NO: 2456921 - RNA, 19 nt, Artificial Sequence
  Description of Artificial Sequence: Synthetic oligonucleotide
  Antisense strand to SEQ ID NO: 2456920
ucguauaaucccaacacuu

SEQ ID NO: 2456922 - RNA, 19 nt, Artificial Sequence
  Description of Artificial Sequence: Synthetic oligonucleotide
  Sense strand starting at position 2941 of SEQ ID NO: 1887229
acaggugaugcauauccau

SEQ ID NO: 2456923 - RNA, 19 nt, Artificial Sequence
  Description of Artificial Sequence: Synthetic oligonucleotide
  Antisense strand to SEQ ID NO: 2456922
auggauaugcaucaccugu

SEQ ID NO: 2456924 - RNA, 19 nt, Artificial Sequence
  Description of Artificial Sequence: Synthetic oligonucleotide
  Sense strand starting at position 3023 of SEQ ID NO: 1887229
agccaagugccuuagaaug

SEQ ID NO: 2456925 - RNA, 19 nt, Artificial Sequence
  Description of Artificial Sequence: Synthetic oligonucleotide
  Antisense strand to SEQ ID NO: 2456924
cauucuaaggcacuuggcu

SEQ ID NO: 2456926 - RNA, 19 nt, Artificial Sequence
  Description of Artificial Sequence: Synthetic oligonucleotide
  Sense strand starting at position 3118 of SEQ ID NO: 1887229
cucugacaucaguguugca

SEQ ID NO: 2456927 - RNA, 19 nt, Artificial Sequence
  Description of Artificial Sequence: Synthetic oligonucleotide
  Antisense strand to SEQ ID NO: 2456926
ugcaacacugaugucagag

SEQ ID NO: 2456928 - RNA, 19 nt, Artificial Sequence
  Description of Artificial Sequence: Synthetic oligonucleotide
  Sense strand starting at position 3185 of SEQ ID NO: 1887229
augaaacagcucuggcuau

SEQ ID NO: 2456929 - RNA, 19 nt, Artificial Sequence
  Description of Artificial Sequence: Synthetic oligonucleotide
  Antisense strand to SEQ ID NO: 2456928
auagccagagcuguuucau

SEQ ID NO: 2456930 - RNA, 19 nt, Artificial Sequence
  Description of Artificial Sequence: Synthetic oligonucleotide
  Sense strand starting at position 3199 of SEQ ID NO: 1887229
gcuauuaagcaagggugaa

SEQ ID NO: 2456931 - RNA, 19 nt, Artificial Sequence
  Description of Artificial Sequence: Synthetic oligonucleotide
  Antisense strand to SEQ ID NO: 2456930
uucacccuugcuuaauagc

SEQ ID NO: 2456932 - RNA, 19 nt, Artificial Sequence
  Description of Artificial Sequence: Synthetic oligonucleotide
  Sense strand starting at position 3200 of SEQ ID NO: 1887229
cuauuaagcaagggugaaa

SEQ ID NO: 2456933 - RNA, 19 nt, Artificial Sequence
  Description of Artificial Sequence: Synthetic oligonucleotide
  Antisense strand to SEQ ID NO: 2456932
uuucacccuugcuuaauag

SEQ ID NO: 2456934 - RNA, 19 nt, Artificial Sequence
  Description of Artificial Sequence: Synthetic oligonucleotide
  Sense strand starting at position 3265 of SEQ ID NO: 1887229
agggaucucuuagcccaua

SEQ ID NO: 2456935 - RNA, 19 nt, Artificial Sequence
  Description of Artificial Sequence: Synthetic oligonucleotide
  Antisense strand to SEQ ID NO: 2456934
uaugggcuaagagaucccu

SEQ ID NO: 2456936 - RNA, 19 nt, Artificial Sequence
  Description of Artificial Sequence: Synthetic oligonucleotide
  Sense strand starting at position 3270 of SEQ ID NO: 1887229
ucucuuagcccauagugaa

SEQ ID NO: 2456937 - RNA, 19 nt, Artificial Sequence
  Description of Artificial Sequence: Synthetic oligonucleotide
  Antisense strand to SEQ ID NO: 2456936
uucacuaugggcuaagaga

SEQ ID NO: 2456938 - RNA, 19 nt, Artificial Sequence
  Description of Artificial Sequence: Synthetic oligonucleotide
  Sense strand starting at position 3350 of SEQ ID NO: 1887229
ccauuugacucaggaaaug

SEQ ID NO: 2456939 - RNA, 19 nt, Artificial Sequence
  Description of Artificial Sequence: Synthetic oligonucleotide
  Antisense strand to SEQ ID NO: 2456938
cauuuccugagucaaaugg

SEQ ID NO: 2456940 - RNA, 19 nt, Artificial Sequence
  Description of Artificial Sequence: Synthetic oligonucleotide
  Sense strand starting at position 3375 of SEQ ID NO: 1887229
ggaagcaaugguuacguuu

SEQ ID NO: 2456941 - RNA, 19 nt, Artificial Sequence
  Description of Artificial Sequence: Synthetic oligonucleotide
  Antisense strand to SEQ ID NO: 2456940
aaacguaaccauugcuucc

SEQ ID NO: 2456942 - RNA, 19 nt, Artificial Sequence
  Description of Artificial Sequence: Synthetic oligonucleotide
  Sense strand starting at position 3381 of SEQ ID NO: 1887229
aaugguuacguuuggguaa

SEQ ID NO: 2456943 - RNA, 19 nt, Artificial Sequence
  Description of Artificial Sequence: Synthetic oligonucleotide
  Antisense strand to SEQ ID NO: 2456942
uuacccaaacguaaccauu

SEQ ID NO: 2456944 - RNA, 19 nt, Artificial Sequence
  Description of Artificial Sequence: Synthetic oligonucleotide
  Sense strand starting at position 3384 of SEQ ID NO: 1887229
gguuacguuuggguaagaa

SEQ ID NO: 2456945 - RNA, 19 nt, Artificial Sequence
  Description of Artificial Sequence: Synthetic oligonucleotide
  Antisense strand to SEQ ID NO: 2456944
uucuuacccaaacguaacc

SEQ ID NO: 2456946 - RNA, 19 nt, Artificial Sequence
  Description of Artificial Sequence: Synthetic oligonucleotide
  Sense strand starting at position 3422 of SEQ ID NO: 1887229
gcaggucucgagaguguua

SEQ ID NO: 2456947 - RNA, 19 nt, Artificial Sequence
  Description of Artificial Sequence: Synthetic oligonucleotide
  Antisense strand to SEQ ID NO: 2456946
uaacacucucgagaccugc

SEQ ID NO: 2456948 - RNA, 19 nt, Artificial Sequence
  Description of Artificial Sequence: Synthetic oligonucleotide
  Sense strand starting at position 3474 of SEQ ID NO: 1887229
agagaagacuucucugguc

SEQ ID NO: 2456949 - RNA, 19 nt, Artificial Sequence
  Description of Artificial Sequence: Synthetic oligonucleotide
  Antisense strand to SEQ ID NO: 2456948
gaccagagaagucuucucu

SEQ ID NO: 2456950 - RNA, 19 nt, Artificial Sequence
  Description of Artificial Sequence: Synthetic oligonucleotide
  Sense strand starting at position 3476 of SEQ ID NO: 1887229
agaagacuucucugguccu

SEQ ID NO: 2456951 - RNA, 19 nt, Artificial Sequence
  Description of Artificial Sequence: Synthetic oligonucleotide
  Antisense strand to SEQ ID NO: 2456950
aggaccagagaagucuucu

SEQ ID NO: 2456952 - RNA, 19 nt, Artificial Sequence
  Description of Artificial Sequence: Synthetic oligonucleotide
  Sense strand starting at position 3483 of SEQ ID NO: 1887229
uucucugguccuuggauua

SEQ ID NO: 2456953 - RNA, 19 nt, Artificial Sequence
  Description of Artificial Sequence: Synthetic oligonucleotide
  Antisense strand to SEQ ID NO: 2456952
uaauccaaggaccagagaa

SEQ ID NO: 2456954 - RNA, 19 nt, Artificial Sequence
  Description of Artificial Sequence: Synthetic oligonucleotide
  Sense strand starting at position 3514 of SEQ ID NO: 1887229
cuaaaucagcccugaagga

SEQ ID NO: 2456955 - RNA, 19 nt, Artificial Sequence
  Description of Artificial Sequence: Synthetic oligonucleotide
  Antisense strand to SEQ ID NO: 2456954
uccuucagggcugauuuag

SEQ ID NO: 2456956 - RNA, 19 nt, Artificial Sequence
  Description of Artificial Sequence: Synthetic oligonucleotide
  Sense strand starting at position 3699 of SEQ ID NO: 1887229
caaauaaauuaggaguuga

SEQ ID NO: 2456957 - RNA, 19 nt, Artificial Sequence
  Description of Artificial Sequence: Synthetic oligonucleotide
  Antisense strand to SEQ ID NO: 2456956
ucaacuccuaauuuauuug

SEQ ID NO: 2456958 - RNA, 19 nt, Artificial Sequence
  Description of Artificial Sequence: Synthetic oligonucleotide
  Sense strand starting at position 3707 of SEQ ID NO: 1887229
uuaggaguugaauguggua

SEQ ID NO: 2456959 - RNA, 19 nt, Artificial Sequence
  Description of Artificial Sequence: Synthetic oligonucleotide
  Antisense strand to SEQ ID NO: 2456958
uaccacauucaacuccuaa

SEQ ID NO: 2456960 - RNA, 19 nt, Artificial Sequence
  Description of Artificial Sequence: Synthetic oligonucleotide
  Sense strand starting at position 3709 of SEQ ID NO: 1887229
aggaguugaaugugguaaa

SEQ ID NO: 2456961 - RNA, 19 nt, Artificial Sequence
  Description of Artificial Sequence: Synthetic oligonucleotide
  Antisense strand to SEQ ID NO: 2456960
uuuaccacauucaacuccu

SEQ ID NO: 2456962 - RNA, 19 nt, Artificial Sequence
  Description of Artificial Sequence: Synthetic oligonucleotide
  Sense strand starting at position 3728 of SEQ ID NO: 1887229
gagcauacccuuugggaua

SEQ ID NO: 2456963 - RNA, 19 nt, Artificial Sequence
  Description of Artificial Sequence: Synthetic oligonucleotide
  Antisense strand to SEQ ID NO: 2456962
uaucccaaaggguaugcuc

SEQ ID NO: 2456964 - RNA, 19 nt, Artificial Sequence
  Description of Artificial Sequence: Synthetic oligonucleotide
  Sense strand starting at position 3867 of SEQ ID NO: 1887229
guuauuaacucaucuagua

SEQ ID NO: 2456965 - RNA, 19 nt, Artificial Sequence
  Description of Artificial Sequence: Synthetic oligonucleotide
  Antisense strand to SEQ ID NO: 2456964
uacuagaugaguuaauaac

SEQ ID NO: 2456966 - RNA, 19 nt, Artificial Sequence
  Description of Artificial Sequence: Synthetic oligonucleotide
  Sense strand starting at position 3903 of SEQ ID NO: 1887229
cuagaaacauggcuguaga

SEQ ID NO: 2456967 - RNA, 19 nt, Artificial Sequence
  Description of Artificial Sequence: Synthetic oligonucleotide
  Antisense strand to SEQ ID NO: 2456966
ucuacagccauguuucuag

SEQ ID NO: 2456968 - RNA, 19 nt, Artificial Sequence
  Description of Artificial Sequence: Synthetic oligonucleotide
  Sense strand starting at position 3904 of SEQ ID NO: 1887229
uagaaacauggcuguagau

SEQ ID NO: 2456969 - RNA, 19 nt, Artificial Sequence
  Description of Artificial Sequence: Synthetic oligonucleotide
  Antisense strand to SEQ ID NO: 2456968
aucuacagccauguuucua

SEQ ID NO: 2456970 - RNA, 19 nt, Artificial Sequence
  Description of Artificial Sequence: Synthetic oligonucleotide
  Sense strand starting at position 3927 of SEQ ID NO: 1887229
auauaagcuggcuacaaua

SEQ ID NO: 2456971 - RNA, 19 nt, Artificial Sequence
  Description of Artificial Sequence: Synthetic oligonucleotide
  Antisense strand to SEQ ID NO: 2456970
uauuguagccagcuuauau

SEQ ID NO: 2456972 - RNA, 19 nt, Artificial Sequence
  Description of Artificial Sequence: Synthetic oligonucleotide
  Sense strand starting at position 125 of SEQ ID NO: 1887230
uugugcauuugugucagaa

SEQ ID NO: 2456973 - RNA, 19 nt, Artificial Sequence
  Description of Artificial Sequence: Synthetic oligonucleotide
  Antisense strand to SEQ ID NO: 2456972
uucugacacaaaugcacaa

SEQ ID NO: 2456974 - RNA, 19 nt, Artificial Sequence
  Description of Artificial Sequence: Synthetic oligonucleotide
  Sense strand starting at position 138 of SEQ ID NO: 1887230
ucagaauguuuaguuuaca

SEQ ID NO: 2456975 - RNA, 19 nt, Artificial Sequence
  Description of Artificial Sequence: Synthetic oligonucleotide
  Antisense strand to SEQ ID NO: 2456974
uguaaacuaaacauucuga

SEQ ID NO: 2456976 - RNA, 19 nt, Artificial Sequence
  Description of Artificial Sequence: Synthetic oligonucleotide
  Sense strand starting at position 256 of SEQ ID NO: 1887230
uaacuuacauguguggaca

SEQ ID NO: 2456977 - RNA, 19 nt, Artificial Sequence
  Description of Artificial Sequence: Synthetic oligonucleotide
  Antisense strand to SEQ ID NO: 2456976
uguccacacauguaaguua

SEQ ID NO: 2456978 - RNA, 19 nt, Artificial Sequence
  Description of Artificial Sequence: Synthetic oligonucleotide
  Sense strand starting at position 257 of SEQ ID NO: 1887230
aacuuacauguguggacaa

SEQ ID NO: 2456979 - RNA, 19 nt, Artificial Sequence
  Description of Artificial Sequence: Synthetic oligonucleotide
  Antisense strand to SEQ ID NO: 2456978
uuguccacacauguaaguu

SEQ ID NO: 2456980 - RNA, 19 nt, Artificial Sequence
  Description of Artificial Sequence: Synthetic oligonucleotide
  Sense strand starting at position 306 of SEQ ID NO: 1887230
gccugaacaugacuuuaaa

SEQ ID NO: 2456981 - RNA, 19 nt, Artificial Sequence
  Description of Artificial Sequence: Synthetic oligonucleotide
  Antisense strand to SEQ ID NO: 2456980
uuuaaagucauguucaggc

SEQ ID NO: 2456982 - RNA, 19 nt, Artificial Sequence
  Description of Artificial Sequence: Synthetic oligonucleotide
  Sense strand starting at position 474 of SEQ ID NO: 1887230
gucacuggucuuuauaauu

SEQ ID NO: 2456983 - RNA, 19 nt, Artificial Sequence
  Description of Artificial Sequence: Synthetic oligonucleotide
  Antisense strand to SEQ ID NO: 2456982
aauuauaaagaccagugac

SEQ ID NO: 2456984 - RNA, 19 nt, Artificial Sequence
  Description of Artificial Sequence: Synthetic oligonucleotide
  Sense strand starting at position 487 of SEQ ID NO: 1887230
auaauuguugugcaauaac

SEQ ID NO: 2456985 - RNA, 19 nt, Artificial Sequence
  Description of Artificial Sequence: Synthetic oligonucleotide
  Antisense strand to SEQ ID NO: 2456984
guuauugcacaacaauuau

SEQ ID NO: 2456986 - RNA, 19 nt, Artificial Sequence
  Description of Artificial Sequence: Synthetic oligonucleotide
  Sense strand starting at position 490 of SEQ ID NO: 1887230
auuguugugcaauaacuaa

SEQ ID NO: 2456987 - RNA, 19 nt, Artificial Sequence
  Description of Artificial Sequence: Synthetic oligonucleotide
  Antisense strand to SEQ ID NO: 2456986
uuaguuauugcacaacaau

SEQ ID NO: 2456988 - RNA, 19 nt, Artificial Sequence
  Description of Artificial Sequence: Synthetic oligonucleotide
  Sense strand starting at position 524 of SEQ ID NO: 1887230
ugcacuaucguguaaagag

SEQ ID NO: 2456989 - RNA, 19 nt, Artificial Sequence
  Description of Artificial Sequence: Synthetic oligonucleotide
  Antisense strand to SEQ ID NO: 2456988
cucuuuacacgauagugca

SEQ ID NO: 2456990 - RNA, 19 nt, Artificial Sequence
  Description of Artificial Sequence: Synthetic oligonucleotide
  Sense strand starting at position 836 of SEQ ID NO: 1887230
uaaagaauccagugaaagu

SEQ ID NO: 2456991 - RNA, 19 nt, Artificial Sequence
  Description of Artificial Sequence: Synthetic oligonucleotide
  Antisense strand to SEQ ID NO: 2456990
acuuucacuggauucuuua

SEQ ID NO: 2456992 - RNA, 19 nt, Artificial Sequence
  Description of Artificial Sequence: Synthetic oligonucleotide
  Sense strand starting at position 917 of SEQ ID NO: 1887230
guauaauguuaauucggga

SEQ ID NO: 2456993 - RNA, 19 nt, Artificial Sequence
  Description of Artificial Sequence: Synthetic oligonucleotide
  Antisense strand to SEQ ID NO: 2456992
ucccgaauuaacauuauac

SEQ ID NO: 2456994 - RNA, 19 nt, Artificial Sequence
  Description of Artificial Sequence: Synthetic oligonucleotide
  Sense strand starting at position 922 of SEQ ID NO: 1887230
auguuaauucgggacaccu

SEQ ID NO: 2456995 - RNA, 19 nt, Artificial Sequence
  Description of Artificial Sequence: Synthetic oligonucleotide
  Antisense strand to SEQ ID NO: 2456994
aggugucccgaauuaacau

SEQ ID NO: 2456996 - RNA, 19 nt, Artificial Sequence
  Description of Artificial Sequence: Synthetic oligonucleotide
  Sense strand starting at position 1033 of SEQ ID NO: 1887230
gcccuuguggaagaucuuu

SEQ ID NO: 2456997 - RNA, 19 nt, Artificial Sequence
  Description of Artificial Sequence: Synthetic oligonucleotide
  Antisense strand to SEQ ID NO: 2456996
aaagaucuuccacaagggc

SEQ ID NO: 2456998 - RNA, 19 nt, Artificial Sequence
  Description of Artificial Sequence: Synthetic oligonucleotide
  Sense strand starting at position 1061 of SEQ ID NO: 1887230
cugaaucuggacuguguaa

SEQ ID NO: 2456999 - RNA, 19 nt, Artificial Sequence
  Description of Artificial Sequence: Synthetic oligonucleotide
  Antisense strand to SEQ ID NO: 2456998
uuacacaguccagauucag

SEQ ID NO: 2457000 - RNA, 19 nt, Artificial Sequence
  Description of Artificial Sequence: Synthetic oligonucleotide
  Sense strand starting at position 1063 of SEQ ID NO: 1887230
gaaucuggacuguguaacu

SEQ ID NO: 2457001 - RNA, 19 nt, Artificial Sequence
  Description of Artificial Sequence: Synthetic oligonucleotide
  Antisense strand to SEQ ID NO: 2457000
aguuacacaguccagauuc

SEQ ID NO: 2457002 - RNA, 19 nt, Artificial Sequence
  Description of Artificial Sequence: Synthetic oligonucleotide
  Sense strand starting at position 1150 of SEQ ID NO: 1887230
acuguuuaggagugacaga

SEQ ID NO: 2457003 - RNA, 19 nt, Artificial Sequence
  Description of Artificial Sequence: Synthetic oligonucleotide
  Antisense strand to SEQ ID NO: 2457002
ucugucacuccuaaacagu

SEQ ID NO: 2457004 - RNA, 19 nt, Artificial Sequence
  Description of Artificial Sequence: Synthetic oligonucleotide
  Sense strand starting at position 1151 of SEQ ID NO: 1887230
cuguuuaggagugacagau

SEQ ID NO: 2457005 - RNA, 19 nt, Artificial Sequence
  Description of Artificial Sequence: Synthetic oligonucleotide
  Antisense strand to SEQ ID NO: 2457004
aucugucacuccuaaacag

SEQ ID NO: 2457006 - RNA, 19 nt, Artificial Sequence
  Description of Artificial Sequence: Synthetic oligonucleotide
  Sense strand starting at position 1210 of SEQ ID NO: 1887230
cugcaugguuauuuguaaa

SEQ ID NO: 2457007 - RNA, 19 nt, Artificial Sequence
  Description of Artificial Sequence: Synthetic oligonucleotide
  Antisense strand to SEQ ID NO: 2457006
uuuacaaauaaccaugcag

SEQ ID NO: 2457008 - RNA, 19 nt, Artificial Sequence
  Description of Artificial Sequence: Synthetic oligonucleotide
  Sense strand starting at position 1240 of SEQ ID NO: 1887230
cccuuuagucaggaguuaa

SEQ ID NO: 2457009 - RNA, 19 nt, Artificial Sequence
  Description of Artificial Sequence: Synthetic oligonucleotide
  Antisense strand to SEQ ID NO: 2457008
uuaacuccugacuaaaggg

SEQ ID NO: 2457010 - RNA, 19 nt, Artificial Sequence
  Description of Artificial Sequence: Synthetic oligonucleotide
  Sense strand starting at position 1275 of SEQ ID NO: 1887230
accgaaucuguuuauguca

SEQ ID NO: 2457011 - RNA, 19 nt, Artificial Sequence
  Description of Artificial Sequence: Synthetic oligonucleotide
  Antisense strand to SEQ ID NO: 2457010
ugacauaaacagauucggu

SEQ ID NO: 2457012 - RNA, 19 nt, Artificial Sequence
  Description of Artificial Sequence: Synthetic oligonucleotide
  Sense strand starting at position 1337 of SEQ ID NO: 1887230
cuaaaucugcgcgucugau

SEQ ID NO: 2457013 - RNA, 19 nt, Artificial Sequence
  Description of Artificial Sequence: Synthetic oligonucleotide
  Antisense strand to SEQ ID NO: 2457012
aucagacgcgcagauuuag

SEQ ID NO: 2457014 - RNA, 19 nt, Artificial Sequence
  Description of Artificial Sequence: Synthetic oligonucleotide
  Sense strand starting at position 1373 of SEQ ID NO: 1887230
gggacuuaugucgaacuca

SEQ ID NO: 2457015 - RNA, 19 nt, Artificial Sequence
  Description of Artificial Sequence: Synthetic oligonucleotide
  Antisense strand to SEQ ID NO: 2457014
ugaguucgacauaaguccc

SEQ ID NO: 2457016 - RNA, 19 nt, Artificial Sequence
  Description of Artificial Sequence: Synthetic oligonucleotide
  Sense strand starting at position 1409 of SEQ ID NO: 1887230
gcgcgauacacucagggaa

SEQ ID NO: 2457017 - RNA, 19 nt, Artificial Sequence
  Description of Artificial Sequence: Synthetic oligonucleotide
  Antisense strand to SEQ ID NO: 2457016
uucccugaguguaucgcgc

SEQ ID NO: 2457018 - RNA, 19 nt, Artificial Sequence
  Description of Artificial Sequence: Synthetic oligonucleotide
  Sense strand starting at position 1782 of SEQ ID NO: 1887230
cacuuuauugacgggaaug

SEQ ID NO: 2457019 - RNA, 19 nt, Artificial Sequence
  Description of Artificial Sequence: Synthetic oligonucleotide
  Antisense strand to SEQ ID NO: 2457018
cauucccgucaauaaagug

SEQ ID NO: 2457020 - RNA, 19 nt, Artificial Sequence
  Description of Artificial Sequence: Synthetic oligonucleotide
  Sense strand starting at position 2503 of SEQ ID NO: 1887230
guagaaagagcuuguauug

SEQ ID NO: 2457021 - RNA, 19 nt, Artificial Sequence
  Description of Artificial Sequence: Synthetic oligonucleotide
  Antisense strand to SEQ ID NO: 2457020
caauacaagcucuuucuac

SEQ ID NO: 2457022 - RNA, 19 nt, Artificial Sequence
  Description of Artificial Sequence: Synthetic oligonucleotide
  Sense strand starting at position 2556 of SEQ ID NO: 1887230
ugaugcguucgcucuguga

SEQ ID NO: 2457023 - RNA, 19 nt, Artificial Sequence
  Description of Artificial Sequence: Synthetic oligonucleotide
  Antisense strand to SEQ ID NO: 2457022
ucacagagcgaacgcauca

SEQ ID NO: 2457024 - RNA, 19 nt, Artificial Sequence
  Description of Artificial Sequence: Synthetic oligonucleotide
  Sense strand starting at position 2671 of SEQ ID NO: 1887230
auuguaaggauucggugaa

SEQ ID NO: 2457025 - RNA, 19 nt, Artificial Sequence
  Description of Artificial Sequence: Synthetic oligonucleotide
  Antisense strand to SEQ ID NO: 2457024
uucaccgaauccuuacaau

SEQ ID NO: 2457026 - RNA, 19 nt, Artificial Sequence
  Description of Artificial Sequence: Synthetic oligonucleotide
  Sense strand starting at position 2790 of SEQ ID NO: 1887230
cuaacauagcgcuaugaac

SEQ ID NO: 2457027 - RNA, 19 nt, Artificial Sequence
  Description of Artificial Sequence: Synthetic oligonucleotide
  Antisense strand to SEQ ID NO: 2457026
guucauagcgcuauguuag

SEQ ID NO: 2457028 - RNA, 19 nt, Artificial Sequence
  Description of Artificial Sequence: Synthetic oligonucleotide
  Sense strand starting at position 2851 of SEQ ID NO: 1887230
gaaagcuucgcagaguuga

SEQ ID NO: 2457029 - RNA, 19 nt, Artificial Sequence
  Description of Artificial Sequence: Synthetic oligonucleotide
  Antisense strand to SEQ ID NO: 2457028
ucaacucugcgaagcuuuc

SEQ ID NO: 2457030 - RNA, 19 nt, Artificial Sequence
  Description of Artificial Sequence: Synthetic oligonucleotide
  Sense strand starting at position 2898 of SEQ ID NO: 1887230
gaugaaugauaguuugcuu

SEQ ID NO: 2457031 - RNA, 19 nt, Artificial Sequence
  Description of Artificial Sequence: Synthetic oligonucleotide
  Antisense strand to SEQ ID NO: 2457030
aagcaaacuaucauucauc

SEQ ID NO: 2457032 - RNA, 19 nt, Artificial Sequence
  Description of Artificial Sequence: Synthetic oligonucleotide
  Sense strand starting at position 2901 of SEQ ID NO: 1887230
gaaugauaguuugcuuaac

SEQ ID NO: 2457033 - RNA, 19 nt, Artificial Sequence
  Description of Artificial Sequence: Synthetic oligonucleotide
  Antisense strand to SEQ ID NO: 2457032
guuaagcaaacuaucauuc

SEQ ID NO: 2457034 - RNA, 19 nt, Artificial Sequence
  Description of Artificial Sequence: Synthetic oligonucleotide
  Sense strand starting at position 2903 of SEQ ID NO: 1887230
augauaguuugcuuaacug

SEQ ID NO: 2457035 - RNA, 19 nt, Artificial Sequence
  Description of Artificial Sequence: Synthetic oligonucleotide
  Antisense strand to SEQ ID NO: 2457034
caguuaagcaaacuaucau

SEQ ID NO: 2457036 - RNA, 19 nt, Artificial Sequence
  Description of Artificial Sequence: Synthetic oligonucleotide
  Sense strand starting at position 3048 of SEQ ID NO: 1887230
guaugugacagugaaauca

SEQ ID NO: 2457037 - RNA, 19 nt, Artificial Sequence
  Description of Artificial Sequence: Synthetic oligonucleotide
  Antisense strand to SEQ ID NO: 2457036
ugauuucacugucacauac

SEQ ID NO: 2457038 - RNA, 19 nt, Artificial Sequence
  Description of Artificial Sequence: Synthetic oligonucleotide
  Sense strand starting at position 3076 of SEQ ID NO: 1887230
auggguuuguaguugaaug

SEQ ID NO: 2457039 - RNA, 19 nt, Artificial Sequence
  Description of Artificial Sequence: Synthetic oligonucleotide
  Antisense strand to SEQ ID NO: 2457038
cauucaacuacaaacccau

SEQ ID NO: 2457040 - RNA, 19 nt, Artificial Sequence
  Description of Artificial Sequence: Synthetic oligonucleotide
  Sense strand starting at position 3471 of SEQ ID NO: 1887230
uugacaaguguuuaguagu

SEQ ID NO: 2457041 - RNA, 19 nt, Artificial Sequence
  Description of Artificial Sequence: Synthetic oligonucleotide
  Antisense strand to SEQ ID NO: 2457040
acuacuaaacacuugucaa

SEQ ID NO: 2457042 - RNA, 19 nt, Artificial Sequence
  Description of Artificial Sequence: Synthetic oligonucleotide
  Sense strand starting at position 3562 of SEQ ID NO: 1887230
uugggcaauguaugaaagu

SEQ ID NO: 2457043 - RNA, 19 nt, Artificial Sequence
  Description of Artificial Sequence: Synthetic oligonucleotide
  Antisense strand to SEQ ID NO: 2457042
acuuucauacauugcccaa

SEQ ID NO: 2457044 - RNA, 19 nt, Artificial Sequence
  Description of Artificial Sequence: Synthetic oligonucleotide
  Sense strand starting at position 3610 of SEQ ID NO: 1887230
auaaguguuccacagauug

SEQ ID NO: 2457045 - RNA, 19 nt, Artificial Sequence
  Description of Artificial Sequence: Synthetic oligonucleotide
  Antisense strand to SEQ ID NO: 2457044
caaucuguggaacacuuau

SEQ ID NO: 2457046 - RNA, 19 nt, Artificial Sequence
  Description of Artificial Sequence: Synthetic oligonucleotide
  Sense strand starting at position 3615 of SEQ ID NO: 1887230
uguuccacagauuguugaa

SEQ ID NO: 2457047 - RNA, 19 nt, Artificial Sequence
  Description of Artificial Sequence: Synthetic oligonucleotide
  Antisense strand to SEQ ID NO: 2457046
uucaacaaucuguggaaca

SEQ ID NO: 2457048 - RNA, 19 nt, Artificial Sequence
  Description of Artificial Sequence: Synthetic oligonucleotide
  Sense strand starting at position 3627 of SEQ ID NO: 1887230
uguugaaacgaagauguuu

SEQ ID NO: 2457049 - RNA, 19 nt, Artificial Sequence
  Description of Artificial Sequence: Synthetic oligonucleotide
  Antisense strand to SEQ ID NO: 2457048
aaacaucuucguuucaaca

SEQ ID NO: 2457050 - RNA, 19 nt, Artificial Sequence
  Description of Artificial Sequence: Synthetic oligonucleotide
  Sense strand starting at position 3784 of SEQ ID NO: 1887230
uguuaagauuaugccucaa

SEQ ID NO: 2457051 - RNA, 19 nt, Artificial Sequence
  Description of Artificial Sequence: Synthetic oligonucleotide
  Antisense strand to SEQ ID NO: 2457050
uugaggcauaaucuuaaca

SEQ ID NO: 2457052 - RNA, 19 nt, Artificial Sequence
  Description of Artificial Sequence: Synthetic oligonucleotide
  Sense strand starting at position 378 of SEQ ID NO: 1887231
ugagcugagaucuggaaac

SEQ ID NO: 2457053 - RNA, 19 nt, Artificial Sequence
  Description of Artificial Sequence: Synthetic oligonucleotide
  Antisense strand to SEQ ID NO: 2457052
guuuccagaucucagcuca

SEQ ID NO: 2457054 - RNA, 19 nt, Artificial Sequence
  Description of Artificial Sequence: Synthetic oligonucleotide
  Sense strand starting at position 756 of SEQ ID NO: 1887231
gaugaagucacccgaagag

SEQ ID NO: 2457055 - RNA, 19 nt, Artificial Sequence
  Description of Artificial Sequence: Synthetic oligonucleotide
  Antisense strand to SEQ ID NO: 2457054
cucuucgggugacuucauc

SEQ ID NO: 2457056 - RNA, 19 nt, Artificial Sequence
  Description of Artificial Sequence: Synthetic oligonucleotide
  Sense strand starting at position 871 of SEQ ID NO: 1887231
gaauuaauguaagaaggaa

SEQ ID NO: 2457057 - RNA, 19 nt, Artificial Sequence
  Description of Artificial Sequence: Synthetic oligonucleotide
  Antisense strand to SEQ ID NO: 2457056
uuccuucuuacauuaauuc

SEQ ID NO: 2457058 - RNA, 19 nt, Artificial Sequence
  Description of Artificial Sequence: Synthetic oligonucleotide
  Sense strand starting at position 1365 of SEQ ID NO: 1887231
ggaagaagucauuggugau

SEQ ID NO: 2457059 - RNA, 19 nt, Artificial Sequence
  Description of Artificial Sequence: Synthetic oligonucleotide
  Antisense strand to SEQ ID NO: 2457058
aucaccaaugacuucuucc

SEQ ID NO: 2457060 - RNA, 19 nt, Artificial Sequence
  Description of Artificial Sequence: Synthetic oligonucleotide
  Sense strand starting at position 1366 of SEQ ID NO: 1887231
gaagaagucauuggugaug

SEQ ID NO: 2457061 - RNA, 19 nt, Artificial Sequence
  Description of Artificial Sequence: Synthetic oligonucleotide
  Antisense strand to SEQ ID NO: 2457060
caucaccaaugacuucuuc

SEQ ID NO: 2457062 - RNA, 19 nt, Artificial Sequence
  Description of Artificial Sequence: Synthetic oligonucleotide
  Sense strand starting at position 1372 of SEQ ID NO: 1887231
gucauuggugaugaugagu

SEQ ID NO: 2457063 - RNA, 19 nt, Artificial Sequence
  Description of Artificial Sequence: Synthetic oligonucleotide
  Antisense strand to SEQ ID NO: 2457062
acucaucaucaccaaugac

SEQ ID NO: 2457064 - RNA, 19 nt, Artificial Sequence
  Description of Artificial Sequence: Synthetic oligonucleotide
  Sense strand starting at position 1377 of SEQ ID NO: 1887231
uggugaugaugaguuucuu

SEQ ID NO: 2457065 - RNA, 19 nt, Artificial Sequence
  Description of Artificial Sequence: Synthetic oligonucleotide
  Antisense strand to SEQ ID NO: 2457064
aagaaacucaucaucacca

SEQ ID NO: 2457066 - RNA, 19 nt, Artificial Sequence
  Description of Artificial Sequence: Synthetic oligonucleotide
  Sense strand starting at position 1553 of SEQ ID NO: 1887231
ccaccaugugcacaagacu

SEQ ID NO: 2457067 - RNA, 19 nt, Artificial Sequence
  Description of Artificial Sequence: Synthetic oligonucleotide
  Antisense strand to SEQ ID NO: 2457066
agucuugugcacauggugg

SEQ ID NO: 2457068 - RNA, 19 nt, Artificial Sequence
  Description of Artificial Sequence: Synthetic oligonucleotide
  Sense strand starting at position 1572 of SEQ ID NO: 1887231
gcagauauuuacugaugug

SEQ ID NO: 2457069 - RNA, 19 nt, Artificial Sequence
  Description of Artificial Sequence: Synthetic oligonucleotide
  Antisense strand to SEQ ID NO: 2457068
cacaucaguaaauaucugc

SEQ ID NO: 2457070 - RNA, 19 nt, Artificial Sequence
  Description of Artificial Sequence: Synthetic oligonucleotide
  Sense strand starting at position 1575 of SEQ ID NO: 1887231
gauauuuacugaugugcaa

SEQ ID NO: 2457071 - RNA, 19 nt, Artificial Sequence
  Description of Artificial Sequence: Synthetic oligonucleotide
  Antisense strand to SEQ ID NO: 2457070
uugcacaucaguaaauauc

SEQ ID NO: 2457072 - RNA, 19 nt, Artificial Sequence
  Description of Artificial Sequence: Synthetic oligonucleotide
  Sense strand starting at position 1587 of SEQ ID NO: 1887231
ugugcaauguuuccugaga

SEQ ID NO: 2457073 - RNA, 19 nt, Artificial Sequence
  Description of Artificial Sequence: Synthetic oligonucleotide
  Antisense strand to SEQ ID NO: 2457072
ucucaggaaacauugcaca

SEQ ID NO: 2457074 - RNA, 19 nt, Artificial Sequence
  Description of Artificial Sequence: Synthetic oligonucleotide
  Sense strand starting at position 1588 of SEQ ID NO: 1887231
gugcaauguuuccugagaa

SEQ ID NO: 2457075 - RNA, 19 nt, Artificial Sequence
  Description of Artificial Sequence: Synthetic oligonucleotide
  Antisense strand to SEQ ID NO: 2457074
uucucaggaaacauugcac

SEQ ID NO: 2457076 - RNA, 19 nt, Artificial Sequence
  Description of Artificial Sequence: Synthetic oligonucleotide
  Sense strand starting at position 1596 of SEQ ID NO: 1887231
uuuccugagaagugaggau

SEQ ID NO: 2457077 - RNA, 19 nt, Artificial Sequence
  Description of Artificial Sequence: Synthetic oligonucleotide
  Antisense strand to SEQ ID NO: 2457076
auccucacuucucaggaaa

SEQ ID NO: 2457078 - RNA, 19 nt, Artificial Sequence
  Description of Artificial Sequence: Synthetic oligonucleotide
  Sense strand starting at position 1611 of SEQ ID NO: 1887231
ggauuaaaguuaucaaacg

SEQ ID NO: 2457079 - RNA, 19 nt, Artificial Sequence
  Description of Artificial Sequence: Synthetic oligonucleotide
  Antisense strand to SEQ ID NO: 2457078
cguuugauaacuuuaaucc

SEQ ID NO: 2457080 - RNA, 19 nt, Artificial Sequence
  Description of Artificial Sequence: Synthetic oligonucleotide
  Sense strand starting at position 1612 of SEQ ID NO: 1887231
gauuaaaguuaucaaacga

SEQ ID NO: 2457081 - RNA, 19 nt, Artificial Sequence
  Description of Artificial Sequence: Synthetic oligonucleotide
  Antisense strand to SEQ ID NO: 2457080
ucguuugauaacuuuaauc

SEQ ID NO: 2457082 - RNA, 19 nt, Artificial Sequence
  Description of Artificial Sequence: Synthetic oligonucleotide
  Sense strand starting at position 1641 of SEQ ID NO: 1887231
agagcccauuuguauuauu

SEQ ID NO: 2457083 - RNA, 19 nt, Artificial Sequence
  Description of Artificial Sequence: Synthetic oligonucleotide
  Antisense strand to SEQ ID NO: 2457082
aauaauacaaaugggcucu

SEQ ID NO: 2457084 - RNA, 19 nt, Artificial Sequence
  Description of Artificial Sequence: Synthetic oligonucleotide
  Sense strand starting at position 1665 of SEQ ID NO: 1887231
gccuaaauuccagaaagca

SEQ ID NO: 2457085 - RNA, 19 nt, Artificial Sequence
  Description of Artificial Sequence: Synthetic oligonucleotide
  Antisense strand to SEQ ID NO: 2457084
ugcuuucuggaauuuaggc

SEQ ID NO: 2457086 - RNA, 19 nt, Artificial Sequence
  Description of Artificial Sequence: Synthetic oligonucleotide
  Sense strand starting at position 1802 of SEQ ID NO: 1887231
cauagcuauguuuguggau

SEQ ID NO: 2457087 - RNA, 19 nt, Artificial Sequence
  Description of Artificial Sequence: Synthetic oligonucleotide
  Antisense strand to SEQ ID NO: 2457086
auccacaaacauagcuaug

SEQ ID NO: 2457088 - RNA, 19 nt, Artificial Sequence
  Description of Artificial Sequence: Synthetic oligonucleotide
  Sense strand starting at position 1803 of SEQ ID NO: 1887231
auagcuauguuuguggaua

SEQ ID NO: 2457089 - RNA, 19 nt, Artificial Sequence
  Description of Artificial Sequence: Synthetic oligonucleotide
  Antisense strand to SEQ ID NO: 2457088
uauccacaaacauagcuau

SEQ ID NO: 2457090 - RNA, 19 nt, Artificial Sequence
  Description of Artificial Sequence: Synthetic oligonucleotide
  Sense strand starting at position 1811 of SEQ ID NO: 1887231
guuuguggauaucugcuaa

SEQ ID NO: 2457091 - RNA, 19 nt, Artificial Sequence
  Description of Artificial Sequence: Synthetic oligonucleotide
  Antisense strand to SEQ ID NO: 2457090
uuagcagauauccacaaac

SEQ ID NO: 2457092 - RNA, 19 nt, Artificial Sequence
  Description of Artificial Sequence: Synthetic oligonucleotide
  Sense strand starting at position 1843 of SEQ ID NO: 1887231
aauguaagugaucgucaga

SEQ ID NO: 2457093 - RNA, 19 nt, Artificial Sequence
  Description of Artificial Sequence: Synthetic oligonucleotide
  Antisense strand to SEQ ID NO: 2457092
ucugacgaucacuuacauu

SEQ ID NO: 2457094 - RNA, 19 nt, Artificial Sequence
  Description of Artificial Sequence: Synthetic oligonucleotide
  Sense strand starting at position 1846 of SEQ ID NO: 1887231
guaagugaucgucagaaag

SEQ ID NO: 2457095 - RNA, 19 nt, Artificial Sequence
  Description of Artificial Sequence: Synthetic oligonucleotide
  Antisense strand to SEQ ID NO: 2457094
cuuucugacgaucacuuac

SEQ ID NO: 2457096 - RNA, 19 nt, Artificial Sequence
  Description of Artificial Sequence: Synthetic oligonucleotide
  Sense strand starting at position 1875 of SEQ ID NO: 1887231
gagcaaucaggguguugca

SEQ ID NO: 2457097 - RNA, 19 nt, Artificial Sequence
  Description of Artificial Sequence: Synthetic oligonucleotide
  Antisense strand to SEQ ID NO: 2457096
ugcaacacccugauugcuc

SEQ ID NO: 2457098 - RNA, 19 nt, Artificial Sequence
  Description of Artificial Sequence: Synthetic oligonucleotide
  Sense strand starting at position 1899 of SEQ ID NO: 1887231
ugauuacgcagagacguua

SEQ ID NO: 2457099 - RNA, 19 nt, Artificial Sequence
  Description of Artificial Sequence: Synthetic oligonucleotide
  Antisense strand to SEQ ID NO: 2457098
uaacgucucugcguaauca

SEQ ID NO: 2457100 - RNA, 19 nt, Artificial Sequence
  Description of Artificial Sequence: Synthetic oligonucleotide
  Sense strand starting at position 1907 of SEQ ID NO: 1887231
cagagacguuaaucacguu

SEQ ID NO: 2457101 - RNA, 19 nt, Artificial Sequence
  Description of Artificial Sequence: Synthetic oligonucleotide
  Antisense strand to SEQ ID NO: 2457100
aacgugauuaacgucucug

SEQ ID NO: 2457102 - RNA, 19 nt, Artificial Sequence
  Description of Artificial Sequence: Synthetic oligonucleotide
  Sense strand starting at position 2061 of SEQ ID NO: 1887231
guucauaacgcgcugguau

SEQ ID NO: 2457103 - RNA, 19 nt, Artificial Sequence
  Description of Artificial Sequence: Synthetic oligonucleotide
  Antisense strand to SEQ ID NO: 2457102
auaccagcgcguuaugaac

SEQ ID NO: 2457104 - RNA, 19 nt, Artificial Sequence
  Description of Artificial Sequence: Synthetic oligonucleotide
  Sense strand starting at position 2473 of SEQ ID NO: 1887231
agacguaauuauuccaaca

SEQ ID NO: 2457105 - RNA, 19 nt, Artificial Sequence
  Description of Artificial Sequence: Synthetic oligonucleotide
  Antisense strand to SEQ ID NO: 2457104
uguuggaauaauuacgucu

SEQ ID NO: 2457106 - RNA, 19 nt, Artificial Sequence
  Description of Artificial Sequence: Synthetic oligonucleotide
  Sense strand starting at position 2592 of SEQ ID NO: 1887231
uuagguucccgucaugaag

SEQ ID NO: 2457107 - RNA, 19 nt, Artificial Sequence
  Description of Artificial Sequence: Synthetic oligonucleotide
  Antisense strand to SEQ ID NO: 2457106
cuucaugacgggaaccuaa

SEQ ID NO: 2457108 - RNA, 19 nt, Artificial Sequence
  Description of Artificial Sequence: Synthetic oligonucleotide
  Sense strand starting at position 2610 of SEQ ID NO: 1887231
gguaaucagaaggguuucu

SEQ ID NO: 2457109 - RNA, 19 nt, Artificial Sequence
  Description of Artificial Sequence: Synthetic oligonucleotide
  Antisense strand to SEQ ID NO: 2457108
agaaacccuucugauuacc

SEQ ID NO: 2457110 - RNA, 19 nt, Artificial Sequence
  Description of Artificial Sequence: Synthetic oligonucleotide
  Sense strand starting at position 2834 of SEQ ID NO: 1887231
guaucucacacauggagga

SEQ ID NO: 2457111 - RNA, 19 nt, Artificial Sequence
  Description of Artificial Sequence: Synthetic oligonucleotide
  Antisense strand to SEQ ID NO: 2457110
uccuccaugugugagauac

SEQ ID NO: 2457112 - RNA, 19 nt, Artificial Sequence
  Description of Artificial Sequence: Synthetic oligonucleotide
  Sense strand starting at position 3047 of SEQ ID NO: 1887231
uaaggaaagucuuuggauc

SEQ ID NO: 2457113 - RNA, 19 nt, Artificial Sequence
  Description of Artificial Sequence: Synthetic oligonucleotide
  Antisense strand to SEQ ID NO: 2457112
gauccaaagacuuuccuua

SEQ ID NO: 2457114 - RNA, 19 nt, Artificial Sequence
  Description of Artificial Sequence: Synthetic oligonucleotide
  Sense strand starting at position 3322 of SEQ ID NO: 1887231
gagugcugacagcgacuua

SEQ ID NO: 2457115 - RNA, 19 nt, Artificial Sequence
  Description of Artificial Sequence: Synthetic oligonucleotide
  Antisense strand to SEQ ID NO: 2457114
uaagucgcugucagcacuc

SEQ ID NO: 2457116 - RNA, 19 nt, Artificial Sequence
  Description of Artificial Sequence: Synthetic oligonucleotide
  Sense strand starting at position 3323 of SEQ ID NO: 1887231
agugcugacagcgacuuaa

SEQ ID NO: 2457117 - RNA, 19 nt, Artificial Sequence
  Description of Artificial Sequence: Synthetic oligonucleotide
  Antisense strand to SEQ ID NO: 2457116
uuaagucgcugucagcacu

SEQ ID NO: 2457118 - RNA, 19 nt, Artificial Sequence
  Description of Artificial Sequence: Synthetic oligonucleotide
  Sense strand starting at position 3327 of SEQ ID NO: 1887231
cugacagcgacuuaauaug

SEQ ID NO: 2457119 - RNA, 19 nt, Artificial Sequence
  Description of Artificial Sequence: Synthetic oligonucleotide
  Antisense strand to SEQ ID NO: 2457118
cauauuaagucgcugucag

SEQ ID NO: 2457120 - RNA, 19 nt, Artificial Sequence
  Description of Artificial Sequence: Synthetic oligonucleotide
  Sense strand starting at position 3335 of SEQ ID NO: 1887231
gacuuaauaugcgcuggaa

SEQ ID NO: 2457121 - RNA, 19 nt, Artificial Sequence
  Description of Artificial Sequence: Synthetic oligonucleotide
  Antisense strand to SEQ ID NO: 2457120
uuccagcgcauauuaaguc

SEQ ID NO: 2457122 - RNA, 19 nt, Artificial Sequence
  Description of Artificial Sequence: Synthetic oligonucleotide
  Sense strand starting at position 3337 of SEQ ID NO: 1887231
cuuaauaugcgcuggaauc

SEQ ID NO: 2457123 - RNA, 19 nt, Artificial Sequence
  Description of Artificial Sequence: Synthetic oligonucleotide
  Antisense strand to SEQ ID NO: 2457122
gauuccagcgcauauuaag

SEQ ID NO: 2457124 - RNA, 19 nt, Artificial Sequence
  Description of Artificial Sequence: Synthetic oligonucleotide
  Sense strand starting at position 3338 of SEQ ID NO: 1887231
uuaauaugcgcuggaauca

SEQ ID NO: 2457125 - RNA, 19 nt, Artificial Sequence
  Description of Artificial Sequence: Synthetic oligonucleotide
  Antisense strand to SEQ ID NO: 2457124
ugauuccagcgcauauuaa

SEQ ID NO: 2457126 - RNA, 19 nt, Artificial Sequence
  Description of Artificial Sequence: Synthetic oligonucleotide
  Sense strand starting at position 3463 of SEQ ID NO: 1887231
uucccauugugcuuuauau

SEQ ID NO: 2457127 - RNA, 19 nt, Artificial Sequence
  Description of Artificial Sequence: Synthetic oligonucleotide
  Antisense strand to SEQ ID NO: 2457126
auauaaagcacaaugggaa

SEQ ID NO: 2457128 - RNA, 19 nt, Artificial Sequence
  Description of Artificial Sequence: Synthetic oligonucleotide
  Sense strand starting at position 3465 of SEQ ID NO: 1887231
cccauugugcuuuauaucu

SEQ ID NO: 2457129 - RNA, 19 nt, Artificial Sequence
  Description of Artificial Sequence: Synthetic oligonucleotide
  Antisense strand to SEQ ID NO: 2457128
agauauaaagcacaauggg

SEQ ID NO: 2457130 - RNA, 19 nt, Artificial Sequence
  Description of Artificial Sequence: Synthetic oligonucleotide
  Sense strand starting at position 3904 of SEQ ID NO: 1887231
agacuuggguucucacuau

SEQ ID NO: 2457131 - RNA, 19 nt, Artificial Sequence
  Description of Artificial Sequence: Synthetic oligonucleotide
  Antisense strand to SEQ ID NO: 2457130
auagugagaacccaagucu

SEQ ID NO: 2457132 - RNA, 19 nt, Artificial Sequence
  Description of Artificial Sequence: Synthetic oligonucleotide
  Sense strand starting at position 59 of SEQ ID NO: 1887232
caacuuauugguuggguga

SEQ ID NO: 2457133 - RNA, 19 nt, Artificial Sequence
  Description of Artificial Sequence: Synthetic oligonucleotide
  Antisense strand to SEQ ID NO: 2457132
ucacccaaccaauaaguug

SEQ ID NO: 2457134 - RNA, 19 nt, Artificial Sequence
  Description of Artificial Sequence: Synthetic oligonucleotide
  Sense strand starting at position 60 of SEQ ID NO: 1887232
aacuuauugguugggugaa

SEQ ID NO: 2457135 - RNA, 19 nt, Artificial Sequence
  Description of Artificial Sequence: Synthetic oligonucleotide
  Antisense strand to SEQ ID NO: 2457134
uucacccaaccaauaaguu

SEQ ID NO: 2457136 - RNA, 19 nt, Artificial Sequence
  Description of Artificial Sequence: Synthetic oligonucleotide
  Sense strand starting at position 73 of SEQ ID NO: 1887232
ggugaaugaacucaacgua

SEQ ID NO: 2457137 - RNA, 19 nt, Artificial Sequence
  Description of Artificial Sequence: Synthetic oligonucleotide
  Antisense strand to SEQ ID NO: 2457136
uacguugaguucauucacc

SEQ ID NO: 2457138 - RNA, 19 nt, Artificial Sequence
  Description of Artificial Sequence: Synthetic oligonucleotide
  Sense strand starting at position 134 of SEQ ID NO: 1887232
gcaggaaacuguccuaaga

SEQ ID NO: 2457139 - RNA, 19 nt, Artificial Sequence
  Description of Artificial Sequence: Synthetic oligonucleotide
  Antisense strand to SEQ ID NO: 2457138
ucuuaggacaguuuccugc

SEQ ID NO: 2457140 - RNA, 19 nt, Artificial Sequence
  Description of Artificial Sequence: Synthetic oligonucleotide
  Sense strand starting at position 234 of SEQ ID NO: 1887232
gggagcuaguugucuagaa

SEQ ID NO: 2457141 - RNA, 19 nt, Artificial Sequence
  Description of Artificial Sequence: Synthetic oligonucleotide
  Antisense strand to SEQ ID NO: 2457140
uucuagacaacuagcuccc

SEQ ID NO: 2457142 - RNA, 19 nt, Artificial Sequence
  Description of Artificial Sequence: Synthetic oligonucleotide
  Sense strand starting at position 235 of SEQ ID NO: 1887232
ggagcuaguugucuagaac

SEQ ID NO: 2457143 - RNA, 19 nt, Artificial Sequence
  Description of Artificial Sequence: Synthetic oligonucleotide
  Antisense strand to SEQ ID NO: 2457142
guucuagacaacuagcucc

SEQ ID NO: 2457144 - RNA, 19 nt, Artificial Sequence
  Description of Artificial Sequence: Synthetic oligonucleotide
  Sense strand starting at position 236 of SEQ ID NO: 1887232
gagcuaguugucuagaacu

SEQ ID NO: 2457145 - RNA, 19 nt, Artificial Sequence
  Description of Artificial Sequence: Synthetic oligonucleotide
  Antisense strand to SEQ ID NO: 2457144
aguucuagacaacuagcuc

SEQ ID NO: 2457146 - RNA, 19 nt, Artificial Sequence
  Description of Artificial Sequence: Synthetic oligonucleotide
  Sense strand starting at position 238 of SEQ ID NO: 1887232
gcuaguugucuagaacuug

SEQ ID NO: 2457147 - RNA, 19 nt, Artificial Sequence
  Description of Artificial Sequence: Synthetic oligonucleotide
  Antisense strand to SEQ ID NO: 2457146
caaguucuagacaacuagc

SEQ ID NO: 2457148 - RNA, 19 nt, Artificial Sequence
  Description of Artificial Sequence: Synthetic oligonucleotide
  Sense strand starting at position 354 of SEQ ID NO: 1887232
ugcugagucagaugaguga

SEQ ID NO: 2457149 - RNA, 19 nt, Artificial Sequence
  Description of Artificial Sequence: Synthetic oligonucleotide
  Antisense strand to SEQ ID NO: 2457148
ucacucaucugacucagca

SEQ ID NO: 2457150 - RNA, 19 nt, Artificial Sequence
  Description of Artificial Sequence: Synthetic oligonucleotide
  Sense strand starting at position 385 of SEQ ID NO: 1887232
gaaagugagugagugauca

SEQ ID NO: 2457151 - RNA, 19 nt, Artificial Sequence
  Description of Artificial Sequence: Synthetic oligonucleotide
  Antisense strand to SEQ ID NO: 2457150
ugaucacucacucacuuuc

SEQ ID NO: 2457152 - RNA, 19 nt, Artificial Sequence
  Description of Artificial Sequence: Synthetic oligonucleotide
  Sense strand starting at position 389 of SEQ ID NO: 1887232
gugagugagugaucaagua

SEQ ID NO: 2457153 - RNA, 19 nt, Artificial Sequence
  Description of Artificial Sequence: Synthetic oligonucleotide
  Antisense strand to SEQ ID NO: 2457152
uacuugaucacucacucac

SEQ ID NO: 2457154 - RNA, 19 nt, Artificial Sequence
  Description of Artificial Sequence: Synthetic oligonucleotide
  Sense strand starting at position 401 of SEQ ID NO: 1887232
ucaaguagcguguuugcga

SEQ ID NO: 2457155 - RNA, 19 nt, Artificial Sequence
  Description of Artificial Sequence: Synthetic oligonucleotide
  Antisense strand to SEQ ID NO: 2457154
ucgcaaacacgcuacuuga

SEQ ID NO: 2457156 - RNA, 19 nt, Artificial Sequence
  Description of Artificial Sequence: Synthetic oligonucleotide
  Sense strand starting at position 453 of SEQ ID NO: 1887232
ugugcugacuucucacaac

SEQ ID NO: 2457157 - RNA, 19 nt, Artificial Sequence
  Description of Artificial Sequence: Synthetic oligonucleotide
  Antisense strand to SEQ ID NO: 2457156
guugugagaagucagcaca

SEQ ID NO: 2457158 - RNA, 19 nt, Artificial Sequence
  Description of Artificial Sequence: Synthetic oligonucleotide
  Sense strand starting at position 505 of SEQ ID NO: 1887232
accgaccucucauuguaga

SEQ ID NO: 2457159 - RNA, 19 nt, Artificial Sequence
  Description of Artificial Sequence: Synthetic oligonucleotide
  Antisense strand to SEQ ID NO: 2457158
ucuacaaugagaggucggu

SEQ ID NO: 2457160 - RNA, 19 nt, Artificial Sequence
  Description of Artificial Sequence: Synthetic oligonucleotide
  Sense strand starting at position 506 of SEQ ID NO: 1887232
ccgaccucucauuguagaa

SEQ ID NO: 2457161 - RNA, 19 nt, Artificial Sequence
  Description of Artificial Sequence: Synthetic oligonucleotide
  Antisense strand to SEQ ID NO: 2457160
uucuacaaugagaggucgg

SEQ ID NO: 2457162 - RNA, 19 nt, Artificial Sequence
  Description of Artificial Sequence: Synthetic oligonucleotide
  Sense strand starting at position 530 of SEQ ID NO: 1887232
ggguguucucacuaaacag

SEQ ID NO: 2457163 - RNA, 19 nt, Artificial Sequence
  Description of Artificial Sequence: Synthetic oligonucleotide
  Antisense strand to SEQ ID NO: 2457162
cuguuuagugagaacaccc

SEQ ID NO: 2457164 - RNA, 19 nt, Artificial Sequence
  Description of Artificial Sequence: Synthetic oligonucleotide
  Sense strand starting at position 656 of SEQ ID NO: 1887232
auaccuucccuuugauguu

SEQ ID NO: 2457165 - RNA, 19 nt, Artificial Sequence
  Description of Artificial Sequence: Synthetic oligonucleotide
  Antisense strand to SEQ ID NO: 2457164
aacaucaaagggaagguau

SEQ ID NO: 2457166 - RNA, 19 nt, Artificial Sequence
  Description of Artificial Sequence: Synthetic oligonucleotide
  Sense strand starting at position 893 of SEQ ID NO: 1887232
acaugagcuccuggauuaa

SEQ ID NO: 2457167 - RNA, 19 nt, Artificial Sequence
  Description of Artificial Sequence: Synthetic oligonucleotide
  Antisense strand to SEQ ID NO: 2457166
uuaauccaggagcucaugu

SEQ ID NO: 2457168 - RNA, 19 nt, Artificial Sequence
  Description of Artificial Sequence: Synthetic oligonucleotide
  Sense strand starting at position 915 of SEQ ID NO: 1887232
ucuucuugcccuuacgaaa

SEQ ID NO: 2457169 - RNA, 19 nt, Artificial Sequence
  Description of Artificial Sequence: Synthetic oligonucleotide
  Antisense strand to SEQ ID NO: 2457168
uuucguaagggcaagaaga

SEQ ID NO: 2457170 - RNA, 19 nt, Artificial Sequence
  Description of Artificial Sequence: Synthetic oligonucleotide
  Sense strand starting at position 1216 of SEQ ID NO: 1887232
cuucaucuccgaggaguug

SEQ ID NO: 2457171 - RNA, 19 nt, Artificial Sequence
  Description of Artificial Sequence: Synthetic oligonucleotide
  Antisense strand to SEQ ID NO: 2457170
caacuccucggagaugaag

SEQ ID NO: 2457172 - RNA, 19 nt, Artificial Sequence
  Description of Artificial Sequence: Synthetic oligonucleotide
  Sense strand starting at position 1551 of SEQ ID NO: 1887232
ccuaguggucaaugugaac

SEQ ID NO: 2457173 - RNA, 19 nt, Artificial Sequence
  Description of Artificial Sequence: Synthetic oligonucleotide
  Antisense strand to SEQ ID NO: 2457172
guucacauugaccacuagg

SEQ ID NO: 2457174 - RNA, 19 nt, Artificial Sequence
  Description of Artificial Sequence: Synthetic oligonucleotide
  Sense strand starting at position 2123 of SEQ ID NO: 1887232
ggaagcuuccauuggucau

SEQ ID NO: 2457175 - RNA, 19 nt, Artificial Sequence
  Description of Artificial Sequence: Synthetic oligonucleotide
  Antisense strand to SEQ ID NO: 2457174
augaccaauggaagcuucc

SEQ ID NO: 2457176 - RNA, 19 nt, Artificial Sequence
  Description of Artificial Sequence: Synthetic oligonucleotide
  Sense strand starting at position 2387 of SEQ ID NO: 1887232
auagcuagagucugaguua

SEQ ID NO: 2457177 - RNA, 19 nt, Artificial Sequence
  Description of Artificial Sequence: Synthetic oligonucleotide
  Antisense strand to SEQ ID NO: 2457176
uaacucagacucuagcuau

SEQ ID NO: 2457178 - RNA, 19 nt, Artificial Sequence
  Description of Artificial Sequence: Synthetic oligonucleotide
  Sense strand starting at position 2390 of SEQ ID NO: 1887232
gcuagagucugaguuacug

SEQ ID NO: 2457179 - RNA, 19 nt, Artificial Sequence
  Description of Artificial Sequence: Synthetic oligonucleotide
  Antisense strand to SEQ ID NO: 2457178
caguaacucagacucuagc

SEQ ID NO: 2457180 - RNA, 19 nt, Artificial Sequence
  Description of Artificial Sequence: Synthetic oligonucleotide
  Sense strand starting at position 2394 of SEQ ID NO: 1887232
gagucugaguuacugguua

SEQ ID NO: 2457181 - RNA, 19 nt, Artificial Sequence
  Description of Artificial Sequence: Synthetic oligonucleotide
  Antisense strand to SEQ ID NO: 2457180
uaaccaguaacucagacuc

SEQ ID NO: 2457182 - RNA, 19 nt, Artificial Sequence
  Description of Artificial Sequence: Synthetic oligonucleotide
  Sense strand starting at position 2396 of SEQ ID NO: 1887232
gucugaguuacugguuaaa

SEQ ID NO: 2457183 - RNA, 19 nt, Artificial Sequence
  Description of Artificial Sequence: Synthetic oligonucleotide
  Antisense strand to SEQ ID NO: 2457182
uuuaaccaguaacucagac

SEQ ID NO: 2457184 - RNA, 19 nt, Artificial Sequence
  Description of Artificial Sequence: Synthetic oligonucleotide
  Sense strand starting at position 2398 of SEQ ID NO: 1887232
cugaguuacugguuaaacu

SEQ ID NO: 2457185 - RNA, 19 nt, Artificial Sequence
  Description of Artificial Sequence: Synthetic oligonucleotide
  Antisense strand to SEQ ID NO: 2457184
aguuuaaccaguaacucag

SEQ ID NO: 2457186 - RNA, 19 nt, Artificial Sequence
  Description of Artificial Sequence: Synthetic oligonucleotide
  Sense strand starting at position 2399 of SEQ ID NO: 1887232
ugaguuacugguuaaacuu

SEQ ID NO: 2457187 - RNA, 19 nt, Artificial Sequence
  Description of Artificial Sequence: Synthetic oligonucleotide
  Antisense strand to SEQ ID NO: 2457186
aaguuuaaccaguaacuca

SEQ ID NO: 2457188 - RNA, 19 nt, Artificial Sequence
  Description of Artificial Sequence: Synthetic oligonucleotide
  Sense strand starting at position 2422 of SEQ ID NO: 1887232
ugagacacauugcuauaga

SEQ ID NO: 2457189 - RNA, 19 nt, Artificial Sequence
  Description of Artificial Sequence: Synthetic oligonucleotide
  Antisense strand to SEQ ID NO: 2457188
ucuauagcaaugugucuca

SEQ ID NO: 2457190 - RNA, 19 nt, Artificial Sequence
  Description of Artificial Sequence: Synthetic oligonucleotide
  Sense strand starting at position 2806 of SEQ ID NO: 1887232
gagaauggcucacugaaug

SEQ ID NO: 2457191 - RNA, 19 nt, Artificial Sequence
  Description of Artificial Sequence: Synthetic oligonucleotide
  Antisense strand to SEQ ID NO: 2457190
cauucagugagccauucuc

SEQ ID NO: 2457192 - RNA, 19 nt, Artificial Sequence
  Description of Artificial Sequence: Synthetic oligonucleotide
  Sense strand starting at position 2822 of SEQ ID NO: 1887232
auggaaccauguucuauau

SEQ ID NO: 2457193 - RNA, 19 nt, Artificial Sequence
  Description of Artificial Sequence: Synthetic oligonucleotide
  Antisense strand to SEQ ID NO: 2457192
auauagaacaugguuccau

SEQ ID NO: 2457194 - RNA, 19 nt, Artificial Sequence
  Description of Artificial Sequence: Synthetic oligonucleotide
  Sense strand starting at position 2842 of SEQ ID NO: 1887232
ugucaaauuccagggcaau

SEQ ID NO: 2457195 - RNA, 19 nt, Artificial Sequence
  Description of Artificial Sequence: Synthetic oligonucleotide
  Antisense strand to SEQ ID NO: 2457194
auugcccuggaauuugaca

SEQ ID NO: 2457196 - RNA, 19 nt, Artificial Sequence
  Description of Artificial Sequence: Synthetic oligonucleotide
  Sense strand starting at position 2843 of SEQ ID NO: 1887232
gucaaauuccagggcaauc

SEQ ID NO: 2457197 - RNA, 19 nt, Artificial Sequence
  Description of Artificial Sequence: Synthetic oligonucleotide
  Antisense strand to SEQ ID NO: 2457196
gauugcccuggaauuugac

SEQ ID NO: 2457198 - RNA, 19 nt, Artificial Sequence
  Description of Artificial Sequence: Synthetic oligonucleotide
  Sense strand starting at position 2912 of SEQ ID NO: 1887232
ggaauuccuccaugcccaa

SEQ ID NO: 2457199 - RNA, 19 nt, Artificial Sequence
  Description of Artificial Sequence: Synthetic oligonucleotide
  Antisense strand to SEQ ID NO: 2457198
uugggcauggaggaauucc

SEQ ID NO: 2457200 - RNA, 19 nt, Artificial Sequence
  Description of Artificial Sequence: Synthetic oligonucleotide
  Sense strand starting at position 3003 of SEQ ID NO: 1887232
gaacacuuaggucgugaga

SEQ ID NO: 2457201 - RNA, 19 nt, Artificial Sequence
  Description of Artificial Sequence: Synthetic oligonucleotide
  Antisense strand to SEQ ID NO: 2457200
ucucacgaccuaaguguuc

SEQ ID NO: 2457202 - RNA, 19 nt, Artificial Sequence
  Description of Artificial Sequence: Synthetic oligonucleotide
  Sense strand starting at position 3006 of SEQ ID NO: 1887232
cacuuaggucgugagaaca

SEQ ID NO: 2457203 - RNA, 19 nt, Artificial Sequence
  Description of Artificial Sequence: Synthetic oligonucleotide
  Antisense strand to SEQ ID NO: 2457202
uguucucacgaccuaagug

SEQ ID NO: 2457204 - RNA, 19 nt, Artificial Sequence
  Description of Artificial Sequence: Synthetic oligonucleotide
  Sense strand starting at position 3069 of SEQ ID NO: 1887232
cgugggucucuggaugaga

SEQ ID NO: 2457205 - RNA, 19 nt, Artificial Sequence
  Description of Artificial Sequence: Synthetic oligonucleotide
  Antisense strand to SEQ ID NO: 2457204
ucucauccagagacccacg

SEQ ID NO: 2457206 - RNA, 19 nt, Artificial Sequence
  Description of Artificial Sequence: Synthetic oligonucleotide
  Sense strand starting at position 3298 of SEQ ID NO: 1887232
gacuuagaguggucugcau

SEQ ID NO: 2457207 - RNA, 19 nt, Artificial Sequence
  Description of Artificial Sequence: Synthetic oligonucleotide
  Antisense strand to SEQ ID NO: 2457206
augcagaccacucuaaguc

SEQ ID NO: 2457208 - RNA, 19 nt, Artificial Sequence
  Description of Artificial Sequence: Synthetic oligonucleotide
  Sense strand starting at position 3302 of SEQ ID NO: 1887232
uagaguggucugcauccau

SEQ ID NO: 2457209 - RNA, 19 nt, Artificial Sequence
  Description of Artificial Sequence: Synthetic oligonucleotide
  Antisense strand to SEQ ID NO: 2457208
auggaugcagaccacucua

SEQ ID NO: 2457210 - RNA, 19 nt, Artificial Sequence
  Description of Artificial Sequence: Synthetic oligonucleotide
  Sense strand starting at position 3857 of SEQ ID NO: 1887232
guuguuuccaugugagaug

SEQ ID NO: 2457211 - RNA, 19 nt, Artificial Sequence
  Description of Artificial Sequence: Synthetic oligonucleotide
  Antisense strand to SEQ ID NO: 2457210
caucucacauggaaacaac

SEQ ID NO: 2457212 - RNA, 19 nt, Artificial Sequence
  Description of Artificial Sequence: Synthetic oligonucleotide
  Sense strand starting at position 728 of SEQ ID NO: 1887233
gacaguaucucugagggag

SEQ ID NO: 2457213 - RNA, 19 nt, Artificial Sequence
  Description of Artificial Sequence: Synthetic oligonucleotide
  Antisense strand to SEQ ID NO: 2457212
cucccucagagauacuguc

SEQ ID NO: 2457214 - RNA, 19 nt, Artificial Sequence
  Description of Artificial Sequence: Synthetic oligonucleotide
  Sense strand starting at position 753 of SEQ ID NO: 1887233
cugguaagaggccaguaaa

SEQ ID NO: 2457215 - RNA, 19 nt, Artificial Sequence
  Description of Artificial Sequence: Synthetic oligonucleotide
  Antisense strand to SEQ ID NO: 2457214
uuuacuggccucuuaccag

SEQ ID NO: 2457216 - RNA, 19 nt, Artificial Sequence
  Description of Artificial Sequence: Synthetic oligonucleotide
  Sense strand starting at position 785 of SEQ ID NO: 1887233
gcacucccucuggauagaa

SEQ ID NO: 2457217 - RNA, 19 nt, Artificial Sequence
  Description of Artificial Sequence: Synthetic oligonucleotide
  Antisense strand to SEQ ID NO: 2457216
uucuauccagagggagugc

SEQ ID NO: 2457218 - RNA, 19 nt, Artificial Sequence
  Description of Artificial Sequence: Synthetic oligonucleotide
  Sense strand starting at position 824 of SEQ ID NO: 1887233
ugguuuacuugaguucugu

SEQ ID NO: 2457219 - RNA, 19 nt, Artificial Sequence
  Description of Artificial Sequence: Synthetic oligonucleotide
  Antisense strand to SEQ ID NO: 2457218
acagaacucaaguaaacca

SEQ ID NO: 2457220 - RNA, 19 nt, Artificial Sequence
  Description of Artificial Sequence: Synthetic oligonucleotide
  Sense strand starting at position 830 of SEQ ID NO: 1887233
acuugaguucuguagucaa

SEQ ID NO: 2457221 - RNA, 19 nt, Artificial Sequence
  Description of Artificial Sequence: Synthetic oligonucleotide
  Antisense strand to SEQ ID NO: 2457220
uugacuacagaacucaagu

SEQ ID NO: 2457222 - RNA, 19 nt, Artificial Sequence
  Description of Artificial Sequence: Synthetic oligonucleotide
  Sense strand starting at position 833 of SEQ ID NO: 1887233
ugaguucuguagucaaguc

SEQ ID NO: 2457223 - RNA, 19 nt, Artificial Sequence
  Description of Artificial Sequence: Synthetic oligonucleotide
  Antisense strand to SEQ ID NO: 2457222
gacuugacuacagaacuca

SEQ ID NO: 2457224 - RNA, 19 nt, Artificial Sequence
  Description of Artificial Sequence: Synthetic oligonucleotide
  Sense strand starting at position 849 of SEQ ID NO: 1887233
guccacucagcagacaaua

SEQ ID NO: 2457225 - RNA, 19 nt, Artificial Sequence
  Description of Artificial Sequence: Synthetic oligonucleotide
  Antisense strand to SEQ ID NO: 2457224
uauugucugcugaguggac

SEQ ID NO: 2457226 - RNA, 19 nt, Artificial Sequence
  Description of Artificial Sequence: Synthetic oligonucleotide
  Sense strand starting at position 963 of SEQ ID NO: 1887233
cuucuuugguguccagcaa

SEQ ID NO: 2457227 - RNA, 19 nt, Artificial Sequence
  Description of Artificial Sequence: Synthetic oligonucleotide
  Antisense strand to SEQ ID NO: 2457226
uugcuggacaccaaagaag

SEQ ID NO: 2457228 - RNA, 19 nt, Artificial Sequence
  Description of Artificial Sequence: Synthetic oligonucleotide
  Sense strand starting at position 964 of SEQ ID NO: 1887233
uucuuugguguccagcaaa

SEQ ID NO: 2457229 - RNA, 19 nt, Artificial Sequence
  Description of Artificial Sequence: Synthetic oligonucleotide
  Antisense strand to SEQ ID NO: 2457228
uuugcuggacaccaaagaa

SEQ ID NO: 2457230 - RNA, 19 nt, Artificial Sequence
  Description of Artificial Sequence: Synthetic oligonucleotide
  Sense strand starting at position 1363 of SEQ ID NO: 1887233
aggcaaucugugugcacuu

SEQ ID NO: 2457231 - RNA, 19 nt, Artificial Sequence
  Description of Artificial Sequence: Synthetic oligonucleotide
  Antisense strand to SEQ ID NO: 2457230
aagugcacacagauugccu

SEQ ID NO: 2457232 - RNA, 19 nt, Artificial Sequence
  Description of Artificial Sequence: Synthetic oligonucleotide
  Sense strand starting at position 1387 of SEQ ID NO: 1887233
cuggcauuccagugggaac

SEQ ID NO: 2457233 - RNA, 19 nt, Artificial Sequence
  Description of Artificial Sequence: Synthetic oligonucleotide
  Antisense strand to SEQ ID NO: 2457232
guucccacuggaaugccag

SEQ ID NO: 2457234 - RNA, 19 nt, Artificial Sequence
  Description of Artificial Sequence: Synthetic oligonucleotide
  Sense strand starting at position 1388 of SEQ ID NO: 1887233
uggcauuccagugggaaca

SEQ ID NO: 2457235 - RNA, 19 nt, Artificial Sequence
  Description of Artificial Sequence: Synthetic oligonucleotide
  Antisense strand to SEQ ID NO: 2457234
uguucccacuggaaugcca

SEQ ID NO: 2457236 - RNA, 19 nt, Artificial Sequence
  Description of Artificial Sequence: Synthetic oligonucleotide
  Sense strand starting at position 1389 of SEQ ID NO: 1887233
ggcauuccagugggaacaa

SEQ ID NO: 2457237 - RNA, 19 nt, Artificial Sequence
  Description of Artificial Sequence: Synthetic oligonucleotide
  Antisense strand to SEQ ID NO: 2457236
uuguucccacuggaaugcc

SEQ ID NO: 2457238 - RNA, 19 nt, Artificial Sequence
  Description of Artificial Sequence: Synthetic oligonucleotide
  Sense strand starting at position 1439 of SEQ ID NO: 1887233
guuucuuucuugcucacau

SEQ ID NO: 2457239 - RNA, 19 nt, Artificial Sequence
  Description of Artificial Sequence: Synthetic oligonucleotide
  Antisense strand to SEQ ID NO: 2457238
augugagcaagaaagaaac

SEQ ID NO: 2457240 - RNA, 19 nt, Artificial Sequence
  Description of Artificial Sequence: Synthetic oligonucleotide
  Sense strand starting at position 1452 of SEQ ID NO: 1887233
ucacaugccagucgugaca

SEQ ID NO: 2457241 - RNA, 19 nt, Artificial Sequence
  Description of Artificial Sequence: Synthetic oligonucleotide
  Antisense strand to SEQ ID NO: 2457240
ugucacgacuggcauguga

SEQ ID NO: 2457242 - RNA, 19 nt, Artificial Sequence
  Description of Artificial Sequence: Synthetic oligonucleotide
  Sense strand starting at position 1829 of SEQ ID NO: 1887233
gaggaaugaugcucuagac

SEQ ID NO: 2457243 - RNA, 19 nt, Artificial Sequence
  Description of Artificial Sequence: Synthetic oligonucleotide
  Antisense strand to SEQ ID NO: 2457242
gucuagagcaucauuccuc

SEQ ID NO: 2457244 - RNA, 19 nt, Artificial Sequence
  Description of Artificial Sequence: Synthetic oligonucleotide
  Sense strand starting at position 1847 of SEQ ID NO: 1887233
cugggcucucagcaggaua

SEQ ID NO: 2457245 - RNA, 19 nt, Artificial Sequence
  Description of Artificial Sequence: Synthetic oligonucleotide
  Antisense strand to SEQ ID NO: 2457244
uauccugcugagagcccag

SEQ ID NO: 2457246 - RNA, 19 nt, Artificial Sequence
  Description of Artificial Sequence: Synthetic oligonucleotide
  Sense strand starting at position 1986 of SEQ ID NO: 1887233
ccaucauaggcuuguggga

SEQ ID NO: 2457247 - RNA, 19 nt, Artificial Sequence
  Description of Artificial Sequence: Synthetic oligonucleotide
  Antisense strand to SEQ ID NO: 2457246
ucccacaagccuaugaugg

SEQ ID NO: 2457248 - RNA, 19 nt, Artificial Sequence
  Description of Artificial Sequence: Synthetic oligonucleotide
  Sense strand starting at position 2002 of SEQ ID NO: 1887233
ggacuucuuacggauacga

SEQ ID NO: 2457249 - RNA, 19 nt, Artificial Sequence
  Description of Artificial Sequence: Synthetic oligonucleotide
  Antisense strand to SEQ ID NO: 2457248
ucguauccguaagaagucc

SEQ ID NO: 2457250 - RNA, 19 nt, Artificial Sequence
  Description of Artificial Sequence: Synthetic oligonucleotide
  Sense strand starting at position 2004 of SEQ ID NO: 1887233
acuucuuacggauacgaaa

SEQ ID NO: 2457251 - RNA, 19 nt, Artificial Sequence
  Description of Artificial Sequence: Synthetic oligonucleotide
  Antisense strand to SEQ ID NO: 2457250
uuucguauccguaagaagu

SEQ ID NO: 2457252 - RNA, 19 nt, Artificial Sequence
  Description of Artificial Sequence: Synthetic oligonucleotide
  Sense strand starting at position 2062 of SEQ ID NO: 1887233
acuuguuuccggcaaagca

SEQ ID NO: 2457253 - RNA, 19 nt, Artificial Sequence
  Description of Artificial Sequence: Synthetic oligonucleotide
  Antisense strand to SEQ ID NO: 2457252
ugcuuugccggaaacaagu

SEQ ID NO: 2457254 - RNA, 19 nt, Artificial Sequence
  Description of Artificial Sequence: Synthetic oligonucleotide
  Sense strand starting at position 2087 of SEQ ID NO: 1887233
uuucgucucuuauugcaga

SEQ ID NO: 2457255 - RNA, 19 nt, Artificial Sequence
  Description of Artificial Sequence: Synthetic oligonucleotide
  Antisense strand to SEQ ID NO: 2457254
ucugcaauaagagacgaaa

SEQ ID NO: 2457256 - RNA, 19 nt, Artificial Sequence
  Description of Artificial Sequence: Synthetic oligonucleotide
  Sense strand starting at position 2220 of SEQ ID NO: 1887233
ucgucuacuuacucacauu

SEQ ID NO: 2457257 - RNA, 19 nt, Artificial Sequence
  Description of Artificial Sequence: Synthetic oligonucleotide
  Antisense strand to SEQ ID NO: 2457256
aaugugaguaaguagacga

SEQ ID NO: 2457258 - RNA, 19 nt, Artificial Sequence
  Description of Artificial Sequence: Synthetic oligonucleotide
  Sense strand starting at position 2609 of SEQ ID NO: 1887233
cacgcaaauucuuugugga

SEQ ID NO: 2457259 - RNA, 19 nt, Artificial Sequence
  Description of Artificial Sequence: Synthetic oligonucleotide
  Antisense strand to SEQ ID NO: 2457258
uccacaaagaauuugcgug

SEQ ID NO: 2457260 - RNA, 19 nt, Artificial Sequence
  Description of Artificial Sequence: Synthetic oligonucleotide
  Sense strand starting at position 2610 of SEQ ID NO: 1887233
acgcaaauucuuuguggag

SEQ ID NO: 2457261 - RNA, 19 nt, Artificial Sequence
  Description of Artificial Sequence: Synthetic oligonucleotide
  Antisense strand to SEQ ID NO: 2457260
cuccacaaagaauuugcgu

SEQ ID NO: 2457262 - RNA, 19 nt, Artificial Sequence
  Description of Artificial Sequence: Synthetic oligonucleotide
  Sense strand starting at position 2625 of SEQ ID NO: 1887233
ggagcaagcaugugacuuu

SEQ ID NO: 2457263 - RNA, 19 nt, Artificial Sequence
  Description of Artificial Sequence: Synthetic oligonucleotide
  Antisense strand to SEQ ID NO: 2457262
aaagucacaugcuugcucc

SEQ ID NO: 2457264 - RNA, 19 nt, Artificial Sequence
  Description of Artificial Sequence: Synthetic oligonucleotide
  Sense strand starting at position 2628 of SEQ ID NO: 1887233
gcaagcaugugacuuucuu

SEQ ID NO: 2457265 - RNA, 19 nt, Artificial Sequence
  Description of Artificial Sequence: Synthetic oligonucleotide
  Antisense strand to SEQ ID NO: 2457264
aagaaagucacaugcuugc

SEQ ID NO: 2457266 - RNA, 19 nt, Artificial Sequence
  Description of Artificial Sequence: Synthetic oligonucleotide
  Sense strand starting at position 3320 of SEQ ID NO: 1887233
uuggacuggccacaugauu

SEQ ID NO: 2457267 - RNA, 19 nt, Artificial Sequence
  Description of Artificial Sequence: Synthetic oligonucleotide
  Antisense strand to SEQ ID NO: 2457266
aaucauguggccaguccaa

SEQ ID NO: 2457268 - RNA, 19 nt, Artificial Sequence
  Description of Artificial Sequence: Synthetic oligonucleotide
  Sense strand starting at position 3328 of SEQ ID NO: 1887233
gccacaugauuccuggacu

SEQ ID NO: 2457269 - RNA, 19 nt, Artificial Sequence
  Description of Artificial Sequence: Synthetic oligonucleotide
  Antisense strand to SEQ ID NO: 2457268
aguccaggaaucauguggc

SEQ ID NO: 2457270 - RNA, 19 nt, Artificial Sequence
  Description of Artificial Sequence: Synthetic oligonucleotide
  Sense strand starting at position 3384 of SEQ ID NO: 1887233
ggcccaggaauguguauau

SEQ ID NO: 2457271 - RNA, 19 nt, Artificial Sequence
  Description of Artificial Sequence: Synthetic oligonucleotide
  Antisense strand to SEQ ID NO: 2457270
auauacacauuccugggcc

SEQ ID NO: 2457272 - RNA, 19 nt, Artificial Sequence
  Description of Artificial Sequence: Synthetic oligonucleotide
  Sense strand starting at position 3418 of SEQ ID NO: 1887233
guggcucugauguaauaau

SEQ ID NO: 2457273 - RNA, 19 nt, Artificial Sequence
  Description of Artificial Sequence: Synthetic oligonucleotide
  Antisense strand to SEQ ID NO: 2457272
auuauuacaucagagccac

SEQ ID NO: 2457274 - RNA, 19 nt, Artificial Sequence
  Description of Artificial Sequence: Synthetic oligonucleotide
  Sense strand starting at position 3475 of SEQ ID NO: 1887233
aaacaagacucuggugaga

SEQ ID NO: 2457275 - RNA, 19 nt, Artificial Sequence
  Description of Artificial Sequence: Synthetic oligonucleotide
  Antisense strand to SEQ ID NO: 2457274
ucucaccagagucuuguuu

SEQ ID NO: 2457276 - RNA, 19 nt, Artificial Sequence
  Description of Artificial Sequence: Synthetic oligonucleotide
  Sense strand starting at position 3477 of SEQ ID NO: 1887233
acaagacucuggugagaaa

SEQ ID NO: 2457277 - RNA, 19 nt, Artificial Sequence
  Description of Artificial Sequence: Synthetic oligonucleotide
  Antisense strand to SEQ ID NO: 2457276
uuucucaccagagucuugu

SEQ ID NO: 2457278 - RNA, 19 nt, Artificial Sequence
  Description of Artificial Sequence: Synthetic oligonucleotide
  Sense strand starting at position 3510 of SEQ ID NO: 1887233
gagcucagaucucuaguua

SEQ ID NO: 2457279 - RNA, 19 nt, Artificial Sequence
  Description of Artificial Sequence: Synthetic oligonucleotide
  Antisense strand to SEQ ID NO: 2457278
uaacuagagaucugagcuc

SEQ ID NO: 2457280 - RNA, 19 nt, Artificial Sequence
  Description of Artificial Sequence: Synthetic oligonucleotide
  Sense strand starting at position 3511 of SEQ ID NO: 1887233
agcucagaucucuaguuag

SEQ ID NO: 2457281 - RNA, 19 nt, Artificial Sequence
  Description of Artificial Sequence: Synthetic oligonucleotide
  Antisense strand to SEQ ID NO: 2457280
cuaacuagagaucugagcu

SEQ ID NO: 2457282 - RNA, 19 nt, Artificial Sequence
  Description of Artificial Sequence: Synthetic oligonucleotide
  Sense strand starting at position 3527 of SEQ ID NO: 1887233
uagccuaacgugugguaua

SEQ ID NO: 2457283 - RNA, 19 nt, Artificial Sequence
  Description of Artificial Sequence: Synthetic oligonucleotide
  Antisense strand to SEQ ID NO: 2457282
uauaccacacguuaggcua

SEQ ID NO: 2457284 - RNA, 19 nt, Artificial Sequence
  Description of Artificial Sequence: Synthetic oligonucleotide
  Sense strand starting at position 3572 of SEQ ID NO: 1887233
ugacauacuggguggauca

SEQ ID NO: 2457285 - RNA, 19 nt, Artificial Sequence
  Description of Artificial Sequence: Synthetic oligonucleotide
  Antisense strand to SEQ ID NO: 2457284
ugauccacccaguauguca

SEQ ID NO: 2457286 - RNA, 19 nt, Artificial Sequence
  Description of Artificial Sequence: Synthetic oligonucleotide
  Sense strand starting at position 3606 of SEQ ID NO: 1887233
ggcuguuguaugcauugua

SEQ ID NO: 2457287 - RNA, 19 nt, Artificial Sequence
  Description of Artificial Sequence: Synthetic oligonucleotide
  Antisense strand to SEQ ID NO: 2457286
uacaaugcauacaacagcc

SEQ ID NO: 2457288 - RNA, 19 nt, Artificial Sequence
  Description of Artificial Sequence: Synthetic oligonucleotide
  Sense strand starting at position 3609 of SEQ ID NO: 1887233
uguuguaugcauuguagga

SEQ ID NO: 2457289 - RNA, 19 nt, Artificial Sequence
  Description of Artificial Sequence: Synthetic oligonucleotide
  Antisense strand to SEQ ID NO: 2457288
uccuacaaugcauacaaca

SEQ ID NO: 2457290 - RNA, 19 nt, Artificial Sequence
  Description of Artificial Sequence: Synthetic oligonucleotide
  Sense strand starting at position 3613 of SEQ ID NO: 1887233
guaugcauuguaggauauu

SEQ ID NO: 2457291 - RNA, 19 nt, Artificial Sequence
  Description of Artificial Sequence: Synthetic oligonucleotide
  Antisense strand to SEQ ID NO: 2457290
aauauccuacaaugcauac

SEQ ID NO: 2457292 - RNA, 19 nt, Artificial Sequence
  Description of Artificial Sequence: Synthetic oligonucleotide
  Sense strand starting at position 203 of SEQ ID NO: 1887234
gacaguaucucugagggag

SEQ ID NO: 2457293 - RNA, 19 nt, Artificial Sequence
  Description of Artificial Sequence: Synthetic oligonucleotide
  Antisense strand to SEQ ID NO: 2457292
cucccucagagauacuguc

SEQ ID NO: 2457294 - RNA, 19 nt, Artificial Sequence
  Description of Artificial Sequence: Synthetic oligonucleotide
  Sense strand starting at position 228 of SEQ ID NO: 1887234
cugguaagaggccaguaaa

SEQ ID NO: 2457295 - RNA, 19 nt, Artificial Sequence
  Description of Artificial Sequence: Synthetic oligonucleotide
  Antisense strand to SEQ ID NO: 2457294
uuuacuggccucuuaccag

SEQ ID NO: 2457296 - RNA, 19 nt, Artificial Sequence
  Description of Artificial Sequence: Synthetic oligonucleotide
  Sense strand starting at position 260 of SEQ ID NO: 1887234
gcacucccucuggauagaa

SEQ ID NO: 2457297 - RNA, 19 nt, Artificial Sequence
  Description of Artificial Sequence: Synthetic oligonucleotide
  Antisense strand to SEQ ID NO: 2457296
uucuauccagagggagugc

SEQ ID NO: 2457298 - RNA, 19 nt, Artificial Sequence
  Description of Artificial Sequence: Synthetic oligonucleotide
  Sense strand starting at position 299 of SEQ ID NO: 1887234
ugguuuacuugaguucugu

SEQ ID NO: 2457299 - RNA, 19 nt, Artificial Sequence
  Description of Artificial Sequence: Synthetic oligonucleotide
  Antisense strand to SEQ ID NO: 2457298
acagaacucaaguaaacca

SEQ ID NO: 2457300 - RNA, 19 nt, Artificial Sequence
  Description of Artificial Sequence: Synthetic oligonucleotide
  Sense strand starting at position 305 of SEQ ID NO: 1887234
acuugaguucuguagucaa

SEQ ID NO: 2457301 - RNA, 19 nt, Artificial Sequence
  Description of Artificial Sequence: Synthetic oligonucleotide
  Antisense strand to SEQ ID NO: 2457300
uugacuacagaacucaagu

SEQ ID NO: 2457302 - RNA, 19 nt, Artificial Sequence
  Description of Artificial Sequence: Synthetic oligonucleotide
  Sense strand starting at position 308 of SEQ ID NO: 1887234
ugaguucuguagucaaguc

SEQ ID NO: 2457303 - RNA, 19 nt, Artificial Sequence
  Description of Artificial Sequence: Synthetic oligonucleotide
  Antisense strand to SEQ ID NO: 2457302
gacuugacuacagaacuca

SEQ ID NO: 2457304 - RNA, 19 nt, Artificial Sequence
  Description of Artificial Sequence: Synthetic oligonucleotide
  Sense strand starting at position 324 of SEQ ID NO: 1887234
guccacucagcagacaaua

SEQ ID NO: 2457305 - RNA, 19 nt, Artificial Sequence
  Description of Artificial Sequence: Synthetic oligonucleotide
  Antisense strand to SEQ ID NO: 2457304
uauugucugcugaguggac

SEQ ID NO: 2457306 - RNA, 19 nt, Artificial Sequence
  Description of Artificial Sequence: Synthetic oligonucleotide
  Sense strand starting at position 438 of SEQ ID NO: 1887234
cuucuuugguguccagcaa

SEQ ID NO: 2457307 - RNA, 19 nt, Artificial Sequence
  Description of Artificial Sequence: Synthetic oligonucleotide
  Antisense strand to SEQ ID NO: 2457306
uugcuggacaccaaagaag

SEQ ID NO: 2457308 - RNA, 19 nt, Artificial Sequence
  Description of Artificial Sequence: Synthetic oligonucleotide
  Sense strand starting at position 439 of SEQ ID NO: 1887234
uucuuugguguccagcaaa

SEQ ID NO: 2457309 - RNA, 19 nt, Artificial Sequence
  Description of Artificial Sequence: Synthetic oligonucleotide
  Antisense strand to SEQ ID NO: 2457308
uuugcuggacaccaaagaa

SEQ ID NO: 2457310 - RNA, 19 nt, Artificial Sequence
  Description of Artificial Sequence: Synthetic oligonucleotide
  Sense strand starting at position 862 of SEQ ID NO: 1887234
cuggcauuccagugggaac

SEQ ID NO: 2457311 - RNA, 19 nt, Artificial Sequence
  Description of Artificial Sequence: Synthetic oligonucleotide
  Antisense strand to SEQ ID NO: 2457310
guucccacuggaaugccag

SEQ ID NO: 2457312 - RNA, 19 nt, Artificial Sequence
  Description of Artificial Sequence: Synthetic oligonucleotide
  Sense strand starting at position 863 of SEQ ID NO: 1887234
uggcauuccagugggaaca

SEQ ID NO: 2457313 - RNA, 19 nt, Artificial Sequence
  Description of Artificial Sequence: Synthetic oligonucleotide
  Antisense strand to SEQ ID NO: 2457312
uguucccacuggaaugcca

SEQ ID NO: 2457314 - RNA, 19 nt, Artificial Sequence
  Description of Artificial Sequence: Synthetic oligonucleotide
  Sense strand starting at position 864 of SEQ ID NO: 1887234
ggcauuccagugggaacaa

SEQ ID NO: 2457315 - RNA, 19 nt, Artificial Sequence
  Description of Artificial Sequence: Synthetic oligonucleotide
  Antisense strand to SEQ ID NO: 2457314
uuguucccacuggaaugcc

SEQ ID NO: 2457316 - RNA, 19 nt, Artificial Sequence
  Description of Artificial Sequence: Synthetic oligonucleotide
  Sense strand starting at position 927 of SEQ ID NO: 1887234
ucacaugccagucgugaca

SEQ ID NO: 2457317 - RNA, 19 nt, Artificial Sequence
  Description of Artificial Sequence: Synthetic oligonucleotide
  Antisense strand to SEQ ID NO: 2457316
ugucacgacuggcauguga

SEQ ID NO: 2457318 - RNA, 19 nt, Artificial Sequence
  Description of Artificial Sequence: Synthetic oligonucleotide
  Sense strand starting at position 1304 of SEQ ID NO: 1887234
gaggaaugaugcucuagac

SEQ ID NO: 2457319 - RNA, 19 nt, Artificial Sequence
  Description of Artificial Sequence: Synthetic oligonucleotide
  Antisense strand to SEQ ID NO: 2457318
gucuagagcaucauuccuc

SEQ ID NO: 2457320 - RNA, 19 nt, Artificial Sequence
  Description of Artificial Sequence: Synthetic oligonucleotide
  Sense strand starting at position 1322 of SEQ ID NO: 1887234
cugggcucucagcaggaua

SEQ ID NO: 2457321 - RNA, 19 nt, Artificial Sequence
  Description of Artificial Sequence: Synthetic oligonucleotide
  Antisense strand to SEQ ID NO: 2457320
uauccugcugagagcccag

SEQ ID NO: 2457322 - RNA, 19 nt, Artificial Sequence
  Description of Artificial Sequence: Synthetic oligonucleotide
  Sense strand starting at position 1461 of SEQ ID NO: 1887234
ccaucauaggcuuguggga

SEQ ID NO: 2457323 - RNA, 19 nt, Artificial Sequence
  Description of Artificial Sequence: Synthetic oligonucleotide
  Antisense strand to SEQ ID NO: 2457322
ucccacaagccuaugaugg

SEQ ID NO: 2457324 - RNA, 19 nt, Artificial Sequence
  Description of Artificial Sequence: Synthetic oligonucleotide
  Sense strand starting at position 1477 of SEQ ID NO: 1887234
ggacuucuuacggauacga

SEQ ID NO: 2457325 - RNA, 19 nt, Artificial Sequence
  Description of Artificial Sequence: Synthetic oligonucleotide
  Antisense strand to SEQ ID NO: 2457324
ucguauccguaagaagucc

SEQ ID NO: 2457326 - RNA, 19 nt, Artificial Sequence
  Description of Artificial Sequence: Synthetic oligonucleotide
  Sense strand starting at position 1479 of SEQ ID NO: 1887234
acuucuuacggauacgaaa

SEQ ID NO: 2457327 - RNA, 19 nt, Artificial Sequence
  Description of Artificial Sequence: Synthetic oligonucleotide
  Antisense strand to SEQ ID NO: 2457326
uuucguauccguaagaagu

SEQ ID NO: 2457328 - RNA, 19 nt, Artificial Sequence
  Description of Artificial Sequence: Synthetic oligonucleotide
  Sense strand starting at position 1537 of SEQ ID NO: 1887234
acuuguuuccggcaaagca

SEQ ID NO: 2457329 - RNA, 19 nt, Artificial Sequence
  Description of Artificial Sequence: Synthetic oligonucleotide
  Antisense strand to SEQ ID NO: 2457328
ugcuuugccggaaacaagu

SEQ ID NO: 2457330 - RNA, 19 nt, Artificial Sequence
  Description of Artificial Sequence: Synthetic oligonucleotide
  Sense strand starting at position 1695 of SEQ ID NO: 1887234
ucgucuacuuacucacauu

SEQ ID NO: 2457331 - RNA, 19 nt, Artificial Sequence
  Description of Artificial Sequence: Synthetic oligonucleotide
  Antisense strand to SEQ ID NO: 2457330
aaugugaguaaguagacga

SEQ ID NO: 2457332 - RNA, 19 nt, Artificial Sequence
  Description of Artificial Sequence: Synthetic oligonucleotide
  Sense strand starting at position 2084 of SEQ ID NO: 1887234
cacgcaaauucuuugugga

SEQ ID NO: 2457333 - RNA, 19 nt, Artificial Sequence
  Description of Artificial Sequence: Synthetic oligonucleotide
  Antisense strand to SEQ ID NO: 2457332
uccacaaagaauuugcgug

SEQ ID NO: 2457334 - RNA, 19 nt, Artificial Sequence
  Description of Artificial Sequence: Synthetic oligonucleotide
  Sense strand starting at position 2085 of SEQ ID NO: 1887234
acgcaaauucuuuguggag

SEQ ID NO: 2457335 - RNA, 19 nt, Artificial Sequence
  Description of Artificial Sequence: Synthetic oligonucleotide
  Antisense strand to SEQ ID NO: 2457334
cuccacaaagaauuugcgu

SEQ ID NO: 2457336 - RNA, 19 nt, Artificial Sequence
  Description of Artificial Sequence: Synthetic oligonucleotide
  Sense strand starting at position 2100 of SEQ ID NO: 1887234
ggagcaagcaugugacuuu

SEQ ID NO: 2457337 - RNA, 19 nt, Artificial Sequence
  Description of Artificial Sequence: Synthetic oligonucleotide
  Antisense strand to SEQ ID NO: 2457336
aaagucacaugcuugcucc

SEQ ID NO: 2457338 - RNA, 19 nt, Artificial Sequence
  Description of Artificial Sequence: Synthetic oligonucleotide
  Sense strand starting at position 2103 of SEQ ID NO: 1887234
gcaagcaugugacuuucuu

SEQ ID NO: 2457339 - RNA, 19 nt, Artificial Sequence
  Description of Artificial Sequence: Synthetic oligonucleotide
  Antisense strand to SEQ ID NO: 2457338
aagaaagucacaugcuugc

SEQ ID NO: 2457340 - RNA, 19 nt, Artificial Sequence
  Description of Artificial Sequence: Synthetic oligonucleotide
  Sense strand starting at position 2795 of SEQ ID NO: 1887234
uuggacuggccacaugauu

SEQ ID NO: 2457341 - RNA, 19 nt, Artificial Sequence
  Description of Artificial Sequence: Synthetic oligonucleotide
  Antisense strand to SEQ ID NO: 2457340
aaucauguggccaguccaa

SEQ ID NO: 2457342 - RNA, 19 nt, Artificial Sequence
  Description of Artificial Sequence: Synthetic oligonucleotide
  Sense strand starting at position 2803 of SEQ ID NO: 1887234
gccacaugauuccuggacu

SEQ ID NO: 2457343 - RNA, 19 nt, Artificial Sequence
  Description of Artificial Sequence: Synthetic oligonucleotide
  Antisense strand to SEQ ID NO: 2457342
aguccaggaaucauguggc

SEQ ID NO: 2457344 - RNA, 19 nt, Artificial Sequence
  Description of Artificial Sequence: Synthetic oligonucleotide
  Sense strand starting at position 2859 of SEQ ID NO: 1887234
ggcccaggaauguguauau

SEQ ID NO: 2457345 - RNA, 19 nt, Artificial Sequence
  Description of Artificial Sequence: Synthetic oligonucleotide
  Antisense strand to SEQ ID NO: 2457344
auauacacauuccugggcc

SEQ ID NO: 2457346 - RNA, 19 nt, Artificial Sequence
  Description of Artificial Sequence: Synthetic oligonucleotide
  Sense strand starting at position 2893 of SEQ ID NO: 1887234
guggcucugauguaauaau

SEQ ID NO: 2457347 - RNA, 19 nt, Artificial Sequence
  Description of Artificial Sequence: Synthetic oligonucleotide
  Antisense strand to SEQ ID NO: 2457346
auuauuacaucagagccac

SEQ ID NO: 2457348 - RNA, 19 nt, Artificial Sequence
  Description of Artificial Sequence: Synthetic oligonucleotide
  Sense strand starting at position 2985 of SEQ ID NO: 1887234
gagcucagaucucuaguua

SEQ ID NO: 2457349 - RNA, 19 nt, Artificial Sequence
  Description of Artificial Sequence: Synthetic oligonucleotide
  Antisense strand to SEQ ID NO: 2457348
uaacuagagaucugagcuc

SEQ ID NO: 2457350 - RNA, 19 nt, Artificial Sequence
  Description of Artificial Sequence: Synthetic oligonucleotide
  Sense strand starting at position 2986 of SEQ ID NO: 1887234
agcucagaucucuaguuag

SEQ ID NO: 2457351 - RNA, 19 nt, Artificial Sequence
  Description of Artificial Sequence: Synthetic oligonucleotide
  Antisense strand to SEQ ID NO: 2457350
cuaacuagagaucugagcu

SEQ ID NO: 2457352 - RNA, 19 nt, Artificial Sequence
  Description of Artificial Sequence: Synthetic oligonucleotide
  Sense strand starting at position 3047 of SEQ ID NO: 1887234
ugacauacuggguggauca

SEQ ID NO: 2457353 - RNA, 19 nt, Artificial Sequence
  Description of Artificial Sequence: Synthetic oligonucleotide
  Antisense strand to SEQ ID NO: 2457352
ugauccacccaguauguca

SEQ ID NO: 2457354 - RNA, 19 nt, Artificial Sequence
  Description of Artificial Sequence: Synthetic oligonucleotide
  Sense strand starting at position 3084 of SEQ ID NO: 1887234
uguuguaugcauuguagga

SEQ ID NO: 2457355 - RNA, 19 nt, Artificial Sequence
  Description of Artificial Sequence: Synthetic oligonucleotide
  Antisense strand to SEQ ID NO: 2457354
uccuacaaugcauacaaca

SEQ ID NO: 2457356 - RNA, 19 nt, Artificial Sequence
  Description of Artificial Sequence: Synthetic oligonucleotide
  Sense strand starting at position 3088 of SEQ ID NO: 1887234
guaugcauuguaggauauu

SEQ ID NO: 2457357 - RNA, 19 nt, Artificial Sequence
  Description of Artificial Sequence: Synthetic oligonucleotide
  Antisense strand to SEQ ID NO: 2457356
aauauccuacaaugcauac

SEQ ID NO: 2457358 - RNA, 19 nt, Artificial Sequence
  Description of Artificial Sequence: Synthetic oligonucleotide
  Sense strand starting at position 3491 of SEQ ID NO: 1887234
cucaguaacugcuuguaua

SEQ ID NO: 2457359 - RNA, 19 nt, Artificial Sequence
  Description of Artificial Sequence: Synthetic oligonucleotide
  Antisense strand to SEQ ID NO: 2457358
uauacaagcaguuacugag

SEQ ID NO: 2457360 - RNA, 19 nt, Artificial Sequence
  Description of Artificial Sequence: Synthetic oligonucleotide
  Sense strand starting at position 3492 of SEQ ID NO: 1887234
ucaguaacugcuuguauaa

SEQ ID NO: 2457361 - RNA, 19 nt, Artificial Sequence
  Description of Artificial Sequence: Synthetic oligonucleotide
  Antisense strand to SEQ ID NO: 2457360
uuauacaagcaguuacuga

SEQ ID NO: 2457362 - RNA, 19 nt, Artificial Sequence
  Description of Artificial Sequence: Synthetic oligonucleotide
  Sense strand starting at position 3502 of SEQ ID NO: 1887234
cuuguauaacuuugggcaa

SEQ ID NO: 2457363 - RNA, 19 nt, Artificial Sequence
  Description of Artificial Sequence: Synthetic oligonucleotide
  Antisense strand to SEQ ID NO: 2457362
uugcccaaaguuauacaag

SEQ ID NO: 2457364 - RNA, 19 nt, Artificial Sequence
  Description of Artificial Sequence: Synthetic oligonucleotide
  Sense strand starting at position 3543 of SEQ ID NO: 1887234
uuacuuacucagcagcaga

SEQ ID NO: 2457365 - RNA, 19 nt, Artificial Sequence
  Description of Artificial Sequence: Synthetic oligonucleotide
  Antisense strand to SEQ ID NO: 2457364
ucugcugcugaguaaguaa

SEQ ID NO: 2457366 - RNA, 19 nt, Artificial Sequence
  Description of Artificial Sequence: Synthetic oligonucleotide
  Sense strand starting at position 3901 of SEQ ID NO: 1887234
uuaugagagugcuuggcaa

SEQ ID NO: 2457367 - RNA, 19 nt, Artificial Sequence
  Description of Artificial Sequence: Synthetic oligonucleotide
  Antisense strand to SEQ ID NO: 2457366
uugccaagcacucucauaa

SEQ ID NO: 2457368 - RNA, 19 nt, Artificial Sequence
  Description of Artificial Sequence: Synthetic oligonucleotide
  Sense strand starting at position 3949 of SEQ ID NO: 1887234
uuccauuaucugggcaauc

SEQ ID NO: 2457369 - RNA, 19 nt, Artificial Sequence
  Description of Artificial Sequence: Synthetic oligonucleotide
  Antisense strand to SEQ ID NO: 2457368
gauugcccagauaauggaa

SEQ ID NO: 2457370 - RNA, 19 nt, Artificial Sequence
  Description of Artificial Sequence: Synthetic oligonucleotide
  Sense strand starting at position 3951 of SEQ ID NO: 1887234
ccauuaucugggcaaucgu

SEQ ID NO: 2457371 - RNA, 19 nt, Artificial Sequence
  Description of Artificial Sequence: Synthetic oligonucleotide
  Antisense strand to SEQ ID NO: 2457370
acgauugcccagauaaugg

SEQ ID NO: 2457372 - RNA, 19 nt, Artificial Sequence
  Description of Artificial Sequence: Synthetic oligonucleotide
  Sense strand starting at position 479 of SEQ ID NO: 1887235
uuggacuggccacaugauu

SEQ ID NO: 2457373 - RNA, 19 nt, Artificial Sequence
  Description of Artificial Sequence: Synthetic oligonucleotide
  Antisense strand to SEQ ID NO: 2457372
aaucauguggccaguccaa

SEQ ID NO: 2457374 - RNA, 19 nt, Artificial Sequence
  Description of Artificial Sequence: Synthetic oligonucleotide
  Sense strand starting at position 487 of SEQ ID NO: 1887235
gccacaugauuccuggacu

SEQ ID NO: 2457375 - RNA, 19 nt, Artificial Sequence
  Description of Artificial Sequence: Synthetic oligonucleotide
  Antisense strand to SEQ ID NO: 2457374
aguccaggaaucauguggc

SEQ ID NO: 2457376 - RNA, 19 nt, Artificial Sequence
  Description of Artificial Sequence: Synthetic oligonucleotide
  Sense strand starting at position 543 of SEQ ID NO: 1887235
ggcccaggaauguguauau

SEQ ID NO: 2457377 - RNA, 19 nt, Artificial Sequence
  Description of Artificial Sequence: Synthetic oligonucleotide
  Antisense strand to SEQ ID NO: 2457376
auauacacauuccugggcc

SEQ ID NO: 2457378 - RNA, 19 nt, Artificial Sequence
  Description of Artificial Sequence: Synthetic oligonucleotide
  Sense strand starting at position 577 of SEQ ID NO: 1887235
guggcucugauguaauaau

SEQ ID NO: 2457379 - RNA, 19 nt, Artificial Sequence
  Description of Artificial Sequence: Synthetic oligonucleotide
  Antisense strand to SEQ ID NO: 2457378
auuauuacaucagagccac

SEQ ID NO: 2457380 - RNA, 19 nt, Artificial Sequence
  Description of Artificial Sequence: Synthetic oligonucleotide
  Sense strand starting at position 669 of SEQ ID NO: 1887235
gagcucagaucucuaguua

SEQ ID NO: 2457381 - RNA, 19 nt, Artificial Sequence
  Description of Artificial Sequence: Synthetic oligonucleotide
  Antisense strand to SEQ ID NO: 2457380
uaacuagagaucugagcuc

SEQ ID NO: 2457382 - RNA, 19 nt, Artificial Sequence
  Description of Artificial Sequence: Synthetic oligonucleotide
  Sense strand starting at position 670 of SEQ ID NO: 1887235
agcucagaucucuaguuag

SEQ ID NO: 2457383 - RNA, 19 nt, Artificial Sequence
  Description of Artificial Sequence: Synthetic oligonucleotide
  Antisense strand to SEQ ID NO: 2457382
cuaacuagagaucugagcu

SEQ ID NO: 2457384 - RNA, 19 nt, Artificial Sequence
  Description of Artificial Sequence: Synthetic oligonucleotide
  Sense strand starting at position 731 of SEQ ID NO: 1887235
ugacauacuggguggauca

SEQ ID NO: 2457385 - RNA, 19 nt, Artificial Sequence
  Description of Artificial Sequence: Synthetic oligonucleotide
  Antisense strand to SEQ ID NO: 2457384
ugauccacccaguauguca

SEQ ID NO: 2457386 - RNA, 19 nt, Artificial Sequence
  Description of Artificial Sequence: Synthetic oligonucleotide
  Sense strand starting at position 772 of SEQ ID NO: 1887235
guaugcauuguaggauauu

SEQ ID NO: 2457387 - RNA, 19 nt, Artificial Sequence
  Description of Artificial Sequence: Synthetic oligonucleotide
  Antisense strand to SEQ ID NO: 2457386
aauauccuacaaugcauac

SEQ ID NO: 2457388 - RNA, 19 nt, Artificial Sequence
  Description of Artificial Sequence: Synthetic oligonucleotide
  Sense strand starting at position 1176 of SEQ ID NO: 1887235
ucaguaacugcuuguauaa

SEQ ID NO: 2457389 - RNA, 19 nt, Artificial Sequence
  Description of Artificial Sequence: Synthetic oligonucleotide
  Antisense strand to SEQ ID NO: 2457388
uuauacaagcaguuacuga

SEQ ID NO: 2457390 - RNA, 19 nt, Artificial Sequence
  Description of Artificial Sequence: Synthetic oligonucleotide
  Sense strand starting at position 1186 of SEQ ID NO: 1887235
cuuguauaacuuugggcaa

SEQ ID NO: 2457391 - RNA, 19 nt, Artificial Sequence
  Description of Artificial Sequence: Synthetic oligonucleotide
  Antisense strand to SEQ ID NO: 2457390
uugcccaaaguuauacaag

SEQ ID NO: 2457392 - RNA, 19 nt, Artificial Sequence
  Description of Artificial Sequence: Synthetic oligonucleotide
  Sense strand starting at position 1227 of SEQ ID NO: 1887235
uuacuuacucagcagcaga

SEQ ID NO: 2457393 - RNA, 19 nt, Artificial Sequence
  Description of Artificial Sequence: Synthetic oligonucleotide
  Antisense strand to SEQ ID NO: 2457392
ucugcugcugaguaaguaa

SEQ ID NO: 2457394 - RNA, 19 nt, Artificial Sequence
  Description of Artificial Sequence: Synthetic oligonucleotide
  Sense strand starting at position 1585 of SEQ ID NO: 1887235
uuaugagagugcuuggcaa

SEQ ID NO: 2457395 - RNA, 19 nt, Artificial Sequence
  Description of Artificial Sequence: Synthetic oligonucleotide
  Antisense strand to SEQ ID NO: 2457394
uugccaagcacucucauaa

SEQ ID NO: 2457396 - RNA, 19 nt, Artificial Sequence
  Description of Artificial Sequence: Synthetic oligonucleotide
  Sense strand starting at position 1633 of SEQ ID NO: 1887235
uuccauuaucugggcaauc

SEQ ID NO: 2457397 - RNA, 19 nt, Artificial Sequence
  Description of Artificial Sequence: Synthetic oligonucleotide
  Antisense strand to SEQ ID NO: 2457396
gauugcccagauaauggaa

SEQ ID NO: 2457398 - RNA, 19 nt, Artificial Sequence
  Description of Artificial Sequence: Synthetic oligonucleotide
  Sense strand starting at position 1635 of SEQ ID NO: 1887235
ccauuaucugggcaaucgu

SEQ ID NO: 2457399 - RNA, 19 nt, Artificial Sequence
  Description of Artificial Sequence: Synthetic oligonucleotide
  Antisense strand to SEQ ID NO: 2457398
acgauugcccagauaaugg

SEQ ID NO: 2457400 - RNA, 19 nt, Artificial Sequence
  Description of Artificial Sequence: Synthetic oligonucleotide
  Sense strand starting at position 1906 of SEQ ID NO: 1887235
ccagauuuguauuaaacag

SEQ ID NO: 2457401 - RNA, 19 nt, Artificial Sequence
  Description of Artificial Sequence: Synthetic oligonucleotide
  Antisense strand to SEQ ID NO: 2457400
cuguuuaauacaaaucugg

SEQ ID NO: 2457402 - RNA, 19 nt, Artificial Sequence
  Description of Artificial Sequence: Synthetic oligonucleotide
  Sense strand starting at position 2082 of SEQ ID NO: 1887235
gauccacgcugguuacaau

SEQ ID NO: 2457403 - RNA, 19 nt, Artificial Sequence
  Description of Artificial Sequence: Synthetic oligonucleotide
  Antisense strand to SEQ ID NO: 2457402
auuguaaccagcguggauc

SEQ ID NO: 2457404 - RNA, 19 nt, Artificial Sequence
  Description of Artificial Sequence: Synthetic oligonucleotide
  Sense strand starting at position 2126 of SEQ ID NO: 1887235
gggcaaagacgcuacucau

SEQ ID NO: 2457405 - RNA, 19 nt, Artificial Sequence
  Description of Artificial Sequence: Synthetic oligonucleotide
  Antisense strand to SEQ ID NO: 2457404
augaguagcgucuuugccc

SEQ ID NO: 2457406 - RNA, 19 nt, Artificial Sequence
  Description of Artificial Sequence: Synthetic oligonucleotide
  Sense strand starting at position 2202 of SEQ ID NO: 1887235
cuuguaugucaacacguau

SEQ ID NO: 2457407 - RNA, 19 nt, Artificial Sequence
  Description of Artificial Sequence: Synthetic oligonucleotide
  Antisense strand to SEQ ID NO: 2457406
auacguguugacauacaag

SEQ ID NO: 2457408 - RNA, 19 nt, Artificial Sequence
  Description of Artificial Sequence: Synthetic oligonucleotide
  Sense strand starting at position 2209 of SEQ ID NO: 1887235
gucaacacguauucucaua

SEQ ID NO: 2457409 - RNA, 19 nt, Artificial Sequence
  Description of Artificial Sequence: Synthetic oligonucleotide
  Antisense strand to SEQ ID NO: 2457408
uaugagaauacguguugac

SEQ ID NO: 2457410 - RNA, 19 nt, Artificial Sequence
  Description of Artificial Sequence: Synthetic oligonucleotide
  Sense strand starting at position 2277 of SEQ ID NO: 1887235
ugugcuuucucauuucuag

SEQ ID NO: 2457411 - RNA, 19 nt, Artificial Sequence
  Description of Artificial Sequence: Synthetic oligonucleotide
  Antisense strand to SEQ ID NO: 2457410
cuagaaaugagaaagcaca

SEQ ID NO: 2457412 - RNA, 19 nt, Artificial Sequence
  Description of Artificial Sequence: Synthetic oligonucleotide
  Sense strand starting at position 2280 of SEQ ID NO: 1887235
gcuuucucauuucuaguga

SEQ ID NO: 2457413 - RNA, 19 nt, Artificial Sequence
  Description of Artificial Sequence: Synthetic oligonucleotide
  Antisense strand to SEQ ID NO: 2457412
ucacuagaaaugagaaagc

SEQ ID NO: 2457414 - RNA, 19 nt, Artificial Sequence
  Description of Artificial Sequence: Synthetic oligonucleotide
  Sense strand starting at position 2333 of SEQ ID NO: 1887235
uguuaagggcuccaucuau

SEQ ID NO: 2457415 - RNA, 19 nt, Artificial Sequence
  Description of Artificial Sequence: Synthetic oligonucleotide
  Antisense strand to SEQ ID NO: 2457414
auagauggagcccuuaaca

SEQ ID NO: 2457416 - RNA, 19 nt, Artificial Sequence
  Description of Artificial Sequence: Synthetic oligonucleotide
  Sense strand starting at position 2452 of SEQ ID NO: 1887235
uacggcuuuccagaaguuu

SEQ ID NO: 2457417 - RNA, 19 nt, Artificial Sequence
  Description of Artificial Sequence: Synthetic oligonucleotide
  Antisense strand to SEQ ID NO: 2457416
aaacuucuggaaagccgua

SEQ ID NO: 2457418 - RNA, 19 nt, Artificial Sequence
  Description of Artificial Sequence: Synthetic oligonucleotide
  Sense strand starting at position 2569 of SEQ ID NO: 1887235
acuccugaugcugaauuaa

SEQ ID NO: 2457419 - RNA, 19 nt, Artificial Sequence
  Description of Artificial Sequence: Synthetic oligonucleotide
  Antisense strand to SEQ ID NO: 2457418
uuaauucagcaucaggagu

SEQ ID NO: 2457420 - RNA, 19 nt, Artificial Sequence
  Description of Artificial Sequence: Synthetic oligonucleotide
  Sense strand starting at position 2838 of SEQ ID NO: 1887235
ccgagauuaucgucaccac

SEQ ID NO: 2457421 - RNA, 19 nt, Artificial Sequence
  Description of Artificial Sequence: Synthetic oligonucleotide
  Antisense strand to SEQ ID NO: 2457420
guggugacgauaaucucgg

SEQ ID NO: 2457422 - RNA, 19 nt, Artificial Sequence
  Description of Artificial Sequence: Synthetic oligonucleotide
  Sense strand starting at position 2839 of SEQ ID NO: 1887235
cgagauuaucgucaccacu

SEQ ID NO: 2457423 - RNA, 19 nt, Artificial Sequence
  Description of Artificial Sequence: Synthetic oligonucleotide
  Antisense strand to SEQ ID NO: 2457422
aguggugacgauaaucucg

SEQ ID NO: 2457424 - RNA, 19 nt, Artificial Sequence
  Description of Artificial Sequence: Synthetic oligonucleotide
  Sense strand starting at position 2853 of SEQ ID NO: 1887235
ccacuucgucucugaggaa

SEQ ID NO: 2457425 - RNA, 19 nt, Artificial Sequence
  Description of Artificial Sequence: Synthetic oligonucleotide
  Antisense strand to SEQ ID NO: 2457424
uuccucagagacgaagugg

SEQ ID NO: 2457426 - RNA, 19 nt, Artificial Sequence
  Description of Artificial Sequence: Synthetic oligonucleotide
  Sense strand starting at position 2871 of SEQ ID NO: 1887235
agggaagccaaguauguua

SEQ ID NO: 2457427 - RNA, 19 nt, Artificial Sequence
  Description of Artificial Sequence: Synthetic oligonucleotide
  Antisense strand to SEQ ID NO: 2457426
uaacauacuuggcuucccu

SEQ ID NO: 2457428 - RNA, 19 nt, Artificial Sequence
  Description of Artificial Sequence: Synthetic oligonucleotide
  Sense strand starting at position 2883 of SEQ ID NO: 1887235
uauguuagugucgugucaa

SEQ ID NO: 2457429 - RNA, 19 nt, Artificial Sequence
  Description of Artificial Sequence: Synthetic oligonucleotide
  Antisense strand to SEQ ID NO: 2457428
uugacacgacacuaacaua

SEQ ID NO: 2457430 - RNA, 19 nt, Artificial Sequence
  Description of Artificial Sequence: Synthetic oligonucleotide
  Sense strand starting at position 3059 of SEQ ID NO: 1887235
gcaaucucuccggaacucu

SEQ ID NO: 2457431 - RNA, 19 nt, Artificial Sequence
  Description of Artificial Sequence: Synthetic oligonucleotide
  Antisense strand to SEQ ID NO: 2457430
agaguuccggagagauugc

SEQ ID NO: 2457432 - RNA, 19 nt, Artificial Sequence
  Description of Artificial Sequence: Synthetic oligonucleotide
  Sense strand starting at position 3095 of SEQ ID NO: 1887235
gcuggugggaaauguaguu

SEQ ID NO: 2457433 - RNA, 19 nt, Artificial Sequence
  Description of Artificial Sequence: Synthetic oligonucleotide
  Antisense strand to SEQ ID NO: 2457432
aacuacauuucccaccagc

SEQ ID NO: 2457434 - RNA, 19 nt, Artificial Sequence
  Description of Artificial Sequence: Synthetic oligonucleotide
  Sense strand starting at position 3216 of SEQ ID NO: 1887235
aaaccaggccugugaagaa

SEQ ID NO: 2457435 - RNA, 19 nt, Artificial Sequence
  Description of Artificial Sequence: Synthetic oligonucleotide
  Antisense strand to SEQ ID NO: 2457434
uucuucacaggccugguuu

SEQ ID NO: 2457436 - RNA, 19 nt, Artificial Sequence
  Description of Artificial Sequence: Synthetic oligonucleotide
  Sense strand starting at position 3265 of SEQ ID NO: 1887235
ucacuucugccagaaaguc

SEQ ID NO: 2457437 - RNA, 19 nt, Artificial Sequence
  Description of Artificial Sequence: Synthetic oligonucleotide
  Antisense strand to SEQ ID NO: 2457436
gacuuucuggcagaaguga

SEQ ID NO: 2457438 - RNA, 19 nt, Artificial Sequence
  Description of Artificial Sequence: Synthetic oligonucleotide
  Sense strand starting at position 3273 of SEQ ID NO: 1887235
gccagaaagucauugagcu

SEQ ID NO: 2457439 - RNA, 19 nt, Artificial Sequence
  Description of Artificial Sequence: Synthetic oligonucleotide
  Antisense strand to SEQ ID NO: 2457438
agcucaaugacuuucuggc

SEQ ID NO: 2457440 - RNA, 19 nt, Artificial Sequence
  Description of Artificial Sequence: Synthetic oligonucleotide
  Sense strand starting at position 3274 of SEQ ID NO: 1887235
ccagaaagucauugagcuu

SEQ ID NO: 2457441 - RNA, 19 nt, Artificial Sequence
  Description of Artificial Sequence: Synthetic oligonucleotide
  Antisense strand to SEQ ID NO: 2457440
aagcucaaugacuuucugg

SEQ ID NO: 2457442 - RNA, 19 nt, Artificial Sequence
  Description of Artificial Sequence: Synthetic oligonucleotide
  Sense strand starting at position 3376 of SEQ ID NO: 1887235
cgaguaucuuuguuaauug

SEQ ID NO: 2457443 - RNA, 19 nt, Artificial Sequence
  Description of Artificial Sequence: Synthetic oligonucleotide
  Antisense strand to SEQ ID NO: 2457442
caauuaacaaagauacucg

SEQ ID NO: 2457444 - RNA, 19 nt, Artificial Sequence
  Description of Artificial Sequence: Synthetic oligonucleotide
  Sense strand starting at position 3388 of SEQ ID NO: 1887235
uuaauugcucugcggauuu

SEQ ID NO: 2457445 - RNA, 19 nt, Artificial Sequence
  Description of Artificial Sequence: Synthetic oligonucleotide
  Antisense strand to SEQ ID NO: 2457444
aaauccgcagagcaauuaa

SEQ ID NO: 2457446 - RNA, 19 nt, Artificial Sequence
  Description of Artificial Sequence: Synthetic oligonucleotide
  Sense strand starting at position 3457 of SEQ ID NO: 1887235
aggagagauuccgagggaa

SEQ ID NO: 2457447 - RNA, 19 nt, Artificial Sequence
  Description of Artificial Sequence: Synthetic oligonucleotide
  Antisense strand to SEQ ID NO: 2457446
uucccucggaaucucuccu

SEQ ID NO: 2457448 - RNA, 19 nt, Artificial Sequence
  Description of Artificial Sequence: Synthetic oligonucleotide
  Sense strand starting at position 3625 of SEQ ID NO: 1887235
agugucacgagcugaauua

SEQ ID NO: 2457449 - RNA, 19 nt, Artificial Sequence
  Description of Artificial Sequence: Synthetic oligonucleotide
  Antisense strand to SEQ ID NO: 2457448
uaauucagcucgugacacu

SEQ ID NO: 2457450 - RNA, 19 nt, Artificial Sequence
  Description of Artificial Sequence: Synthetic oligonucleotide
  Sense strand starting at position 3795 of SEQ ID NO: 1887235
gugcaaucauaacuuauug

SEQ ID NO: 2457451 - RNA, 19 nt, Artificial Sequence
  Description of Artificial Sequence: Synthetic oligonucleotide
  Antisense strand to SEQ ID NO: 2457450
caauaaguuaugauugcac

SEQ ID NO: 2457452 - RNA, 19 nt, Artificial Sequence
  Description of Artificial Sequence: Synthetic oligonucleotide
  Sense strand starting at position 62 of SEQ ID NO: 1887236
cuuggcaugucgcgagaaa

SEQ ID NO: 2457453 - RNA, 19 nt, Artificial Sequence
  Description of Artificial Sequence: Synthetic oligonucleotide
  Antisense strand to SEQ ID NO: 2457452
uuucucgcgacaugccaag

SEQ ID NO: 2457454 - RNA, 19 nt, Artificial Sequence
  Description of Artificial Sequence: Synthetic oligonucleotide
  Sense strand starting at position 63 of SEQ ID NO: 1887236
uuggcaugucgcgagaaag

SEQ ID NO: 2457455 - RNA, 19 nt, Artificial Sequence
  Description of Artificial Sequence: Synthetic oligonucleotide
  Antisense strand to SEQ ID NO: 2457454
cuuucucgcgacaugccaa

SEQ ID NO: 2457456 - RNA, 19 nt, Artificial Sequence
  Description of Artificial Sequence: Synthetic oligonucleotide
  Sense strand starting at position 65 of SEQ ID NO: 1887236
ggcaugucgcgagaaaggu

SEQ ID NO: 2457457 - RNA, 19 nt, Artificial Sequence
  Description of Artificial Sequence: Synthetic oligonucleotide
  Antisense strand to SEQ ID NO: 2457456
accuuucucgcgacaugcc

SEQ ID NO: 2457458 - RNA, 19 nt, Artificial Sequence
  Description of Artificial Sequence: Synthetic oligonucleotide
  Sense strand starting at position 66 of SEQ ID NO: 1887236
gcaugucgcgagaaagguu

SEQ ID NO: 2457459 - RNA, 19 nt, Artificial Sequence
  Description of Artificial Sequence: Synthetic oligonucleotide
  Antisense strand to SEQ ID NO: 2457458
aaccuuucucgcgacaugc

SEQ ID NO: 2457460 - RNA, 19 nt, Artificial Sequence
  Description of Artificial Sequence: Synthetic oligonucleotide
  Sense strand starting at position 1688 of SEQ ID NO: 1887236
aaaccuuucucgcgacaug

SEQ ID NO: 2457461 - RNA, 19 nt, Artificial Sequence
  Description of Artificial Sequence: Synthetic oligonucleotide
  Antisense strand to SEQ ID NO: 2457460
caugucgcgagaaagguuu

SEQ ID NO: 2457462 - RNA, 19 nt, Artificial Sequence
  Description of Artificial Sequence: Synthetic oligonucleotide
  Sense strand starting at position 1986 of SEQ ID NO: 1887236
cugaaaguauagucuuaac

SEQ ID NO: 2457463 - RNA, 19 nt, Artificial Sequence
  Description of Artificial Sequence: Synthetic oligonucleotide
  Antisense strand to SEQ ID NO: 2457462
guuaagacuauacuuucag

SEQ ID NO: 2457464 - RNA, 19 nt, Artificial Sequence
  Description of Artificial Sequence: Synthetic oligonucleotide
  Sense strand starting at position 71 of SEQ ID NO: 1887237
gcaguguagcgagaaaggu

SEQ ID NO: 2457465 - RNA, 19 nt, Artificial Sequence
  Description of Artificial Sequence: Synthetic oligonucleotide
  Antisense strand to SEQ ID NO: 2457464
accuuucucgcuacacugc

SEQ ID NO: 2457466 - RNA, 19 nt, Artificial Sequence
  Description of Artificial Sequence: Synthetic oligonucleotide
  Sense strand starting at position 67 of SEQ ID NO: 1887238
uuggcaaugucgcgagaaa

SEQ ID NO: 2457467 - RNA, 19 nt, Artificial Sequence
  Description of Artificial Sequence: Synthetic oligonucleotide
  Antisense strand to SEQ ID NO: 2457466
uuucucgcgacauugccaa

SEQ ID NO: 2457468 - RNA, 19 nt, Artificial Sequence
  Description of Artificial Sequence: Synthetic oligonucleotide
  Sense strand starting at position 68 of SEQ ID NO: 1887238
uggcaaugucgcgagaaag

SEQ ID NO: 2457469 - RNA, 19 nt, Artificial Sequence
  Description of Artificial Sequence: Synthetic oligonucleotide
  Antisense strand to SEQ ID NO: 2457468
cuuucucgcgacauugcca

SEQ ID NO: 2457470 - RNA, 19 nt, Artificial Sequence
  Description of Artificial Sequence: Synthetic oligonucleotide
  Sense strand starting at position 2448 of SEQ ID NO: 1887238
caaugaguugggcgugaug

SEQ ID NO: 2457471 - RNA, 19 nt, Artificial Sequence
  Description of Artificial Sequence: Synthetic oligonucleotide
  Antisense strand to SEQ ID NO: 2457470
caucacgcccaacucauug

SEQ ID NO: 2457472 - RNA, 19 nt, Artificial Sequence
  Description of Artificial Sequence: Synthetic oligonucleotide
  Sense strand starting at position 71 of SEQ ID NO: 1887239
gcaguguagcgagaaaggu

SEQ ID NO: 2457473 - RNA, 19 nt, Artificial Sequence
  Description of Artificial Sequence: Synthetic oligonucleotide
  Antisense strand to SEQ ID NO: 2457472
accuuucucgcuacacugc

SEQ ID NO: 2457474 - RNA, 19 nt, Artificial Sequence
  Description of Artificial Sequence: Synthetic oligonucleotide
  Sense strand starting at position 67 of SEQ ID NO: 1887240
uuggcaaugucgcgagaaa

SEQ ID NO: 2457475 - RNA, 19 nt, Artificial Sequence
  Description of Artificial Sequence: Synthetic oligonucleotide
  Antisense strand to SEQ ID NO: 2457474
uuucucgcgacauugccaa

SEQ ID NO: 2457476 - RNA, 19 nt, Artificial Sequence
  Description of Artificial Sequence: Synthetic oligonucleotide
  Sense strand starting at position 68 of SEQ ID NO: 1887240
uggcaaugucgcgagaaag

SEQ ID NO: 2457477 - RNA, 19 nt, Artificial Sequence
  Description of Artificial Sequence: Synthetic oligonucleotide
  Antisense strand to SEQ ID NO: 2457476
cuuucucgcgacauugcca

SEQ ID NO: 2457478 - RNA, 19 nt, Artificial Sequence
  Description of Artificial Sequence: Synthetic oligonucleotide
  Sense strand starting at position 2448 of SEQ ID NO: 1887240
caaugaguugggcgugaug

SEQ ID NO: 2457479 - RNA, 19 nt, Artificial Sequence
  Description of Artificial Sequence: Synthetic oligonucleotide
  Antisense strand to SEQ ID NO: 2457478
caucacgcccaacucauug

SEQ ID NO: 2457480 - RNA, 19 nt, Artificial Sequence
  Description of Artificial Sequence: Synthetic oligonucleotide
  Sense strand starting at position 61 of SEQ ID NO: 1887241
cuuggcaugucgcgagaaa

SEQ ID NO: 2457481 - RNA, 19 nt, Artificial Sequence
  Description of Artificial Sequence: Synthetic oligonucleotide
  Antisense strand to SEQ ID NO: 2457480
uuucucgcgacaugccaag

SEQ ID NO: 2457482 - RNA, 19 nt, Artificial Sequence
  Description of Artificial Sequence: Synthetic oligonucleotide
  Sense strand starting at position 62 of SEQ ID NO: 1887241
uuggcaugucgcgagaaag

SEQ ID NO: 2457483 - RNA, 19 nt, Artificial Sequence
  Description of Artificial Sequence: Synthetic oligonucleotide
  Antisense strand to SEQ ID NO: 2457482
cuuucucgcgacaugccaa

SEQ ID NO: 2457484 - RNA, 19 nt, Artificial Sequence
  Description of Artificial Sequence: Synthetic oligonucleotide
  Sense strand starting at position 64 of SEQ ID NO: 1887241
ggcaugucgcgagaaaggu

SEQ ID NO: 2457485 - RNA, 19 nt, Artificial Sequence
  Description of Artificial Sequence: Synthetic oligonucleotide
  Antisense strand to SEQ ID NO: 2457484
accuuucucgcgacaugcc

SEQ ID NO: 2457486 - RNA, 19 nt, Artificial Sequence
  Description of Artificial Sequence: Synthetic oligonucleotide
  Sense strand starting at position 65 of SEQ ID NO: 1887241
gcaugucgcgagaaagguu

SEQ ID NO: 2457487 - RNA, 19 nt, Artificial Sequence
  Description of Artificial Sequence: Synthetic oligonucleotide
  Antisense strand to SEQ ID NO: 2457486
aaccuuucucgcgacaugc

SEQ ID NO: 2457488 - RNA, 19 nt, Artificial Sequence
  Description of Artificial Sequence: Synthetic oligonucleotide
  Sense strand starting at position 1687 of SEQ ID NO: 1887241
aaaccuuucucgcgacaug

SEQ ID NO: 2457489 - RNA, 19 nt, Artificial Sequence
  Description of Artificial Sequence: Synthetic oligonucleotide
  Antisense strand to SEQ ID NO: 2457488
caugucgcgagaaagguuu

SEQ ID NO: 2457490 - RNA, 19 nt, Artificial Sequence
  Description of Artificial Sequence: Synthetic oligonucleotide
  Sense strand starting at position 1985 of SEQ ID NO: 1887241
cugaaaguauagucuuaac

SEQ ID NO: 2457491 - RNA, 19 nt, Artificial Sequence
  Description of Artificial Sequence: Synthetic oligonucleotide
  Antisense strand to SEQ ID NO: 2457490
guuaagacuauacuuucag

SEQ ID NO: 2457492 - RNA, 19 nt, Artificial Sequence
  Description of Artificial Sequence: Synthetic oligonucleotide
  Sense strand starting at position 889 of SEQ ID NO: 1887242
ggauaaagcugcuauauaa

SEQ ID NO: 2457493 - RNA, 19 nt, Artificial Sequence
  Description of Artificial Sequence: Synthetic oligonucleotide
  Antisense strand to SEQ ID NO: 2457492
uuauauagcagcuuuaucc

SEQ ID NO: 2457494 - RNA, 19 nt, Artificial Sequence
  Description of Artificial Sequence: Synthetic oligonucleotide
  Sense strand starting at position 963 of SEQ ID NO: 1887242
aggcacgaguucugaucau

SEQ ID NO: 2457495 - RNA, 19 nt, Artificial Sequence
  Description of Artificial Sequence: Synthetic oligonucleotide
  Antisense strand to SEQ ID NO: 2457494
augaucagaacucgugccu

SEQ ID NO: 2457496 - RNA, 19 nt, Artificial Sequence
  Description of Artificial Sequence: Synthetic oligonucleotide
  Sense strand starting at position 969 of SEQ ID NO: 1887242
gaguucugaucauaccgaa

SEQ ID NO: 2457497 - RNA, 19 nt, Artificial Sequence
  Description of Artificial Sequence: Synthetic oligonucleotide
  Antisense strand to SEQ ID NO: 2457496
uucgguaugaucagaacuc

SEQ ID NO: 2457498 - RNA, 19 nt, Artificial Sequence
  Description of Artificial Sequence: Synthetic oligonucleotide
  Sense strand starting at position 972 of SEQ ID NO: 1887242
uucugaucauaccgaaagu

SEQ ID NO: 2457499 - RNA, 19 nt, Artificial Sequence
  Description of Artificial Sequence: Synthetic oligonucleotide
  Antisense strand to SEQ ID NO: 2457498
acuuucgguaugaucagaa

SEQ ID NO: 2457500 - RNA, 19 nt, Artificial Sequence
  Description of Artificial Sequence: Synthetic oligonucleotide
  Sense strand starting at position 981 of SEQ ID NO: 1887242
uaccgaaaguguuuaguuu

SEQ ID NO: 2457501 - RNA, 19 nt, Artificial Sequence
  Description of Artificial Sequence: Synthetic oligonucleotide
  Antisense strand to SEQ ID NO: 2457500
aaacuaaacacuuucggua

SEQ ID NO: 2457502 - RNA, 19 nt, Artificial Sequence
  Description of Artificial Sequence: Synthetic oligonucleotide
  Sense strand starting at position 1014 of SEQ ID NO: 1887242
uuucuugggcuccauaaca

SEQ ID NO: 2457503 - RNA, 19 nt, Artificial Sequence
  Description of Artificial Sequence: Synthetic oligonucleotide
  Antisense strand to SEQ ID NO: 2457502
uguuauggagcccaagaaa

SEQ ID NO: 2457504 - RNA, 19 nt, Artificial Sequence
  Description of Artificial Sequence: Synthetic oligonucleotide
  Sense strand starting at position 1040 of SEQ ID NO: 1887242
cagacuuuguggcuuaaau

SEQ ID NO: 2457505 - RNA, 19 nt, Artificial Sequence
  Description of Artificial Sequence: Synthetic oligonucleotide
  Antisense strand to SEQ ID NO: 2457504
auuuaagccacaaagucug

SEQ ID NO: 2457506 - RNA, 19 nt, Artificial Sequence
  Description of Artificial Sequence: Synthetic oligonucleotide
  Sense strand starting at position 1042 of SEQ ID NO: 1887242
gacuuuguggcuuaaauaa

SEQ ID NO: 2457507 - RNA, 19 nt, Artificial Sequence
  Description of Artificial Sequence: Synthetic oligonucleotide
  Antisense strand to SEQ ID NO: 2457506
uuauuuaagccacaaaguc

SEQ ID NO: 2457508 - RNA, 19 nt, Artificial Sequence
  Description of Artificial Sequence: Synthetic oligonucleotide
  Sense strand starting at position 99 of SEQ ID NO: 1887243
uugggaauaccuuguccau

SEQ ID NO: 2457509 - RNA, 19 nt, Artificial Sequence
  Description of Artificial Sequence: Synthetic oligonucleotide
  Antisense strand to SEQ ID NO: 2457508
auggacaagguauucccaa

SEQ ID NO: 2457510 - RNA, 19 nt, Artificial Sequence
  Description of Artificial Sequence: Synthetic oligonucleotide
  Sense strand starting at position 114 of SEQ ID NO: 1887243
ccaucacgucaugguaaga

SEQ ID NO: 2457511 - RNA, 19 nt, Artificial Sequence
  Description of Artificial Sequence: Synthetic oligonucleotide
  Antisense strand to SEQ ID NO: 2457510
ucuuaccaugacgugaugg

SEQ ID NO: 2457512 - RNA, 19 nt, Artificial Sequence
  Description of Artificial Sequence: Synthetic oligonucleotide
  Sense strand starting at position 135 of SEQ ID NO: 1887243
gaagcagacuaugugguau

SEQ ID NO: 2457513 - RNA, 19 nt, Artificial Sequence
  Description of Artificial Sequence: Synthetic oligonucleotide
  Antisense strand to SEQ ID NO: 2457512
auaccacauagucugcuuc

SEQ ID NO: 2457514 - RNA, 19 nt, Artificial Sequence
  Description of Artificial Sequence: Synthetic oligonucleotide
  Sense strand starting at position 187 of SEQ ID NO: 1887243
ucuuucugaaucugggaga

SEQ ID NO: 2457515 - RNA, 19 nt, Artificial Sequence
  Description of Artificial Sequence: Synthetic oligonucleotide
  Antisense strand to SEQ ID NO: 2457514
ucucccagauucagaaaga

SEQ ID NO: 2457516 - RNA, 19 nt, Artificial Sequence
  Description of Artificial Sequence: Synthetic oligonucleotide
  Sense strand starting at position 319 of SEQ ID NO: 1887243
gccucuuuagacugaacau

SEQ ID NO: 2457517 - RNA, 19 nt, Artificial Sequence
  Description of Artificial Sequence: Synthetic oligonucleotide
  Antisense strand to SEQ ID NO: 2457516
auguucagucuaaagaggc

SEQ ID NO: 2457518 - RNA, 19 nt, Artificial Sequence
  Description of Artificial Sequence: Synthetic oligonucleotide
  Sense strand starting at position 349 of SEQ ID NO: 1887243
agcugugagcagcaaucaa

SEQ ID NO: 2457519 - RNA, 19 nt, Artificial Sequence
  Description of Artificial Sequence: Synthetic oligonucleotide
  Antisense strand to SEQ ID NO: 2457518
uugauugcugcucacagcu

SEQ ID NO: 2457520 - RNA, 19 nt, Artificial Sequence
  Description of Artificial Sequence: Synthetic oligonucleotide
  Sense strand starting at position 370 of SEQ ID NO: 1887243
ucuaguaauguugaacuaa

SEQ ID NO: 2457521 - RNA, 19 nt, Artificial Sequence
  Description of Artificial Sequence: Synthetic oligonucleotide
  Antisense strand to SEQ ID NO: 2457520
uuaguucaacauuacuaga

SEQ ID NO: 2457522 - RNA, 19 nt, Artificial Sequence
  Description of Artificial Sequence: Synthetic oligonucleotide
  Sense strand starting at position 628 of SEQ ID NO: 1887243
ucaccauucgcaugaugau

SEQ ID NO: 2457523 - RNA, 19 nt, Artificial Sequence
  Description of Artificial Sequence: Synthetic oligonucleotide
  Antisense strand to SEQ ID NO: 2457522
aucaucaugcgaaugguga

SEQ ID NO: 2457524 - RNA, 19 nt, Artificial Sequence
  Description of Artificial Sequence: Synthetic oligonucleotide
  Sense strand starting at position 653 of SEQ ID NO: 1887243
caguaaugcccaggaucau

SEQ ID NO: 2457525 - RNA, 19 nt, Artificial Sequence
  Description of Artificial Sequence: Synthetic oligonucleotide
  Antisense strand to SEQ ID NO: 2457524
augauccugggcauuacug

SEQ ID NO: 2457526 - RNA, 19 nt, Artificial Sequence
  Description of Artificial Sequence: Synthetic oligonucleotide
  Sense strand starting at position 681 of SEQ ID NO: 1887243
cggguuaacaaguauguga

SEQ ID NO: 2457527 - RNA, 19 nt, Artificial Sequence
  Description of Artificial Sequence: Synthetic oligonucleotide
  Antisense strand to SEQ ID NO: 2457526
ucacauacuuguuaacccg

SEQ ID NO: 2457528 - RNA, 19 nt, Artificial Sequence
  Description of Artificial Sequence: Synthetic oligonucleotide
  Sense strand starting at position 683 of SEQ ID NO: 1887243
gguuaacaaguaugugaac

SEQ ID NO: 2457529 - RNA, 19 nt, Artificial Sequence
  Description of Artificial Sequence: Synthetic oligonucleotide
  Antisense strand to SEQ ID NO: 2457528
guucacauacuuguuaacc

SEQ ID NO: 2457530 - RNA, 19 nt, Artificial Sequence
  Description of Artificial Sequence: Synthetic oligonucleotide
  Sense strand starting at position 692 of SEQ ID NO: 1887243
guaugugaaccuggucaug

SEQ ID NO: 2457531 - RNA, 19 nt, Artificial Sequence
  Description of Artificial Sequence: Synthetic oligonucleotide
  Antisense strand to SEQ ID NO: 2457530
caugaccagguucacauac

SEQ ID NO: 2457532 - RNA, 19 nt, Artificial Sequence
  Description of Artificial Sequence: Synthetic oligonucleotide
  Sense strand starting at position 694 of SEQ ID NO: 1887243
augugaaccuggucaugua

SEQ ID NO: 2457533 - RNA, 19 nt, Artificial Sequence
  Description of Artificial Sequence: Synthetic oligonucleotide
  Antisense strand to SEQ ID NO: 2457532
uacaugaccagguucacau

SEQ ID NO: 2457534 - RNA, 19 nt, Artificial Sequence
  Description of Artificial Sequence: Synthetic oligonucleotide
  Sense strand starting at position 751 of SEQ ID NO: 1887243
auuucuucuugcguuaugu

SEQ ID NO: 2457535 - RNA, 19 nt, Artificial Sequence
  Description of Artificial Sequence: Synthetic oligonucleotide
  Antisense strand to SEQ ID NO: 2457534
acauaacgcaagaagaaau

SEQ ID NO: 2457536 - RNA, 19 nt, Artificial Sequence
  Description of Artificial Sequence: Synthetic oligonucleotide
  Sense strand starting at position 762 of SEQ ID NO: 1887243
cguuaugugaaccagagga

SEQ ID NO: 2457537 - RNA, 19 nt, Artificial Sequence
  Description of Artificial Sequence: Synthetic oligonucleotide
  Antisense strand to SEQ ID NO: 2457536
uccucugguucacauaacg

SEQ ID NO: 2457538 - RNA, 19 nt, Artificial Sequence
  Description of Artificial Sequence: Synthetic oligonucleotide
  Sense strand starting at position 815 of SEQ ID NO: 1887243
gcuggacgugaugaucaua

SEQ ID NO: 2457539 - RNA, 19 nt, Artificial Sequence
  Description of Artificial Sequence: Synthetic oligonucleotide
  Antisense strand to SEQ ID NO: 2457538
uaugaucaucacguccagc

SEQ ID NO: 2457540 - RNA, 19 nt, Artificial Sequence
  Description of Artificial Sequence: Synthetic oligonucleotide
  Sense strand starting at position 902 of SEQ ID NO: 1887243
caaguucuugacugaguga

SEQ ID NO: 2457541 - RNA, 19 nt, Artificial Sequence
  Description of Artificial Sequence: Synthetic oligonucleotide
  Antisense strand to SEQ ID NO: 2457540
ucacucagucaagaacuug

SEQ ID NO: 2457542 - RNA, 19 nt, Artificial Sequence
  Description of Artificial Sequence: Synthetic oligonucleotide
  Sense strand starting at position 1585 of SEQ ID NO: 1887243
cguuacuggaguugaaaua

SEQ ID NO: 2457543 - RNA, 19 nt, Artificial Sequence
  Description of Artificial Sequence: Synthetic oligonucleotide
  Antisense strand to SEQ ID NO: 2457542
uauuucaacuccaguaacg

SEQ ID NO: 2457544 - RNA, 19 nt, Artificial Sequence
  Description of Artificial Sequence: Synthetic oligonucleotide
  Sense strand starting at position 1605 of SEQ ID NO: 1887243
gaagauuaagcuggaaugu

SEQ ID NO: 2457545 - RNA, 19 nt, Artificial Sequence
  Description of Artificial Sequence: Synthetic oligonucleotide
  Antisense strand to SEQ ID NO: 2457544
acauuccagcuuaaucuuc

SEQ ID NO: 2457546 - RNA, 19 nt, Artificial Sequence
  Description of Artificial Sequence: Synthetic oligonucleotide
  Sense strand starting at position 1652 of SEQ ID NO: 1887243
gaggauaagguuugucaag

SEQ ID NO: 2457547 - RNA, 19 nt, Artificial Sequence
  Description of Artificial Sequence: Synthetic oligonucleotide
  Antisense strand to SEQ ID NO: 2457546
cuugacaaaccuuauccuc

SEQ ID NO: 2457548 - RNA, 19 nt, Artificial Sequence
  Description of Artificial Sequence: Synthetic oligonucleotide
  Sense strand starting at position 1654 of SEQ ID NO: 1887243
ggauaagguuugucaagga

SEQ ID NO: 2457549 - RNA, 19 nt, Artificial Sequence
  Description of Artificial Sequence: Synthetic oligonucleotide
  Antisense strand to SEQ ID NO: 2457548
uccuugacaaaccuuaucc

SEQ ID NO: 2457550 - RNA, 19 nt, Artificial Sequence
  Description of Artificial Sequence: Synthetic oligonucleotide
  Sense strand starting at position 1658 of SEQ ID NO: 1887243
aagguuugucaaggauagg

SEQ ID NO: 2457551 - RNA, 19 nt, Artificial Sequence
  Description of Artificial Sequence: Synthetic oligonucleotide
  Antisense strand to SEQ ID NO: 2457550
ccuauccuugacaaaccuu

SEQ ID NO: 2457552 - RNA, 19 nt, Artificial Sequence
  Description of Artificial Sequence: Synthetic oligonucleotide
  Sense strand starting at position 1777 of SEQ ID NO: 1887243
gaaggaaacuuacuuuguu

SEQ ID NO: 2457553 - RNA, 19 nt, Artificial Sequence
  Description of Artificial Sequence: Synthetic oligonucleotide
  Antisense strand to SEQ ID NO: 2457552
aacaaaguaaguuuccuuc

SEQ ID NO: 2457554 - RNA, 19 nt, Artificial Sequence
  Description of Artificial Sequence: Synthetic oligonucleotide
  Sense strand starting at position 1781 of SEQ ID NO: 1887243
gaaacuuacuuuguuggca

SEQ ID NO: 2457555 - RNA, 19 nt, Artificial Sequence
  Description of Artificial Sequence: Synthetic oligonucleotide
  Antisense strand to SEQ ID NO: 2457554
ugccaacaaaguaaguuuc

SEQ ID NO: 2457556 - RNA, 19 nt, Artificial Sequence
  Description of Artificial Sequence: Synthetic oligonucleotide
  Sense strand starting at position 2103 of SEQ ID NO: 1887243
ugccuuucccaauagaagu

SEQ ID NO: 2457557 - RNA, 19 nt, Artificial Sequence
  Description of Artificial Sequence: Synthetic oligonucleotide
  Antisense strand to SEQ ID NO: 2457556
acuucuauugggaaaggca

SEQ ID NO: 2457558 - RNA, 19 nt, Artificial Sequence
  Description of Artificial Sequence: Synthetic oligonucleotide
  Sense strand starting at position 2178 of SEQ ID NO: 1887243
acacaaaggucuguaacua

SEQ ID NO: 2457559 - RNA, 19 nt, Artificial Sequence
  Description of Artificial Sequence: Synthetic oligonucleotide
  Antisense strand to SEQ ID NO: 2457558
uaguuacagaccuuugugu

SEQ ID NO: 2457560 - RNA, 19 nt, Artificial Sequence
  Description of Artificial Sequence: Synthetic oligonucleotide
  Sense strand starting at position 2193 of SEQ ID NO: 1887243
acuaaagcagccuguaauu

SEQ ID NO: 2457561 - RNA, 19 nt, Artificial Sequence
  Description of Artificial Sequence: Synthetic oligonucleotide
  Antisense strand to SEQ ID NO: 2457560
aauuacaggcugcuuuagu

SEQ ID NO: 2457562 - RNA, 19 nt, Artificial Sequence
  Description of Artificial Sequence: Synthetic oligonucleotide
  Sense strand starting at position 2251 of SEQ ID NO: 1887243
aguuuaagucaaggaaccu

SEQ ID NO: 2457563 - RNA, 19 nt, Artificial Sequence
  Description of Artificial Sequence: Synthetic oligonucleotide
  Antisense strand to SEQ ID NO: 2457562
agguuccuugacuuaaacu

SEQ ID NO: 2457564 - RNA, 19 nt, Artificial Sequence
  Description of Artificial Sequence: Synthetic oligonucleotide
  Sense strand starting at position 2357 of SEQ ID NO: 1887243
gggcaaucaugggugauuc

SEQ ID NO: 2457565 - RNA, 19 nt, Artificial Sequence
  Description of Artificial Sequence: Synthetic oligonucleotide
  Antisense strand to SEQ ID NO: 2457564
gaaucacccaugauugccc

SEQ ID NO: 2457566 - RNA, 19 nt, Artificial Sequence
  Description of Artificial Sequence: Synthetic oligonucleotide
  Sense strand starting at position 2411 of SEQ ID NO: 1887243
acacguguaguccugcauu

SEQ ID NO: 2457567 - RNA, 19 nt, Artificial Sequence
  Description of Artificial Sequence: Synthetic oligonucleotide
  Antisense strand to SEQ ID NO: 2457566
aaugcaggacuacacgugu

SEQ ID NO: 2457568 - RNA, 19 nt, Artificial Sequence
  Description of Artificial Sequence: Synthetic oligonucleotide
  Sense strand starting at position 2413 of SEQ ID NO: 1887243
acguguaguccugcauuac

SEQ ID NO: 2457569 - RNA, 19 nt, Artificial Sequence
  Description of Artificial Sequence: Synthetic oligonucleotide
  Antisense strand to SEQ ID NO: 2457568
guaaugcaggacuacacgu

SEQ ID NO: 2457570 - RNA, 19 nt, Artificial Sequence
  Description of Artificial Sequence: Synthetic oligonucleotide
  Sense strand starting at position 3478 of SEQ ID NO: 1887243
aauucuuaugcauagguga

SEQ ID NO: 2457571 - RNA, 19 nt, Artificial Sequence
  Description of Artificial Sequence: Synthetic oligonucleotide
  Antisense strand to SEQ ID NO: 2457570
ucaccuaugcauaagaauu

SEQ ID NO: 2457572 - RNA, 19 nt, Artificial Sequence
  Description of Artificial Sequence: Synthetic oligonucleotide
  Sense strand starting at position 3595 of SEQ ID NO: 1887243
ggaagacagucugugaacu

SEQ ID NO: 2457573 - RNA, 19 nt, Artificial Sequence
  Description of Artificial Sequence: Synthetic oligonucleotide
  Antisense strand to SEQ ID NO: 2457572
aguucacagacugucuucc

SEQ ID NO: 2457574 - RNA, 19 nt, Artificial Sequence
  Description of Artificial Sequence: Synthetic oligonucleotide
  Sense strand starting at position 3607 of SEQ ID NO: 1887243
gugaacugcuuuccuauau

SEQ ID NO: 2457575 - RNA, 19 nt, Artificial Sequence
  Description of Artificial Sequence: Synthetic oligonucleotide
  Antisense strand to SEQ ID NO: 2457574
auauaggaaagcaguucac

SEQ ID NO: 2457576 - RNA, 19 nt, Artificial Sequence
  Description of Artificial Sequence: Synthetic oligonucleotide
  Sense strand starting at position 3730 of SEQ ID NO: 1887243
aguuauuaccgauagcuca

SEQ ID NO: 2457577 - RNA, 19 nt, Artificial Sequence
  Description of Artificial Sequence: Synthetic oligonucleotide
  Antisense strand to SEQ ID NO: 2457576
ugagcuaucgguaauaacu

SEQ ID NO: 2457578 - RNA, 19 nt, Artificial Sequence
  Description of Artificial Sequence: Synthetic oligonucleotide
  Sense strand starting at position 3783 of SEQ ID NO: 1887243
cccaacuguuccuugagca

SEQ ID NO: 2457579 - RNA, 19 nt, Artificial Sequence
  Description of Artificial Sequence: Synthetic oligonucleotide
  Antisense strand to SEQ ID NO: 2457578
ugcucaaggaacaguuggg

SEQ ID NO: 2457580 - RNA, 19 nt, Artificial Sequence
  Description of Artificial Sequence: Synthetic oligonucleotide
  Sense strand starting at position 3791 of SEQ ID NO: 1887243
uuccuugagcaguaugaaa

SEQ ID NO: 2457581 - RNA, 19 nt, Artificial Sequence
  Description of Artificial Sequence: Synthetic oligonucleotide
  Antisense strand to SEQ ID NO: 2457580
uuucauacugcucaaggaa

SEQ ID NO: 2457582 - RNA, 19 nt, Artificial Sequence
  Description of Artificial Sequence: Synthetic oligonucleotide
  Sense strand starting at position 3911 of SEQ ID NO: 1887243
cguucucacccucaaggau

SEQ ID NO: 2457583 - RNA, 19 nt, Artificial Sequence
  Description of Artificial Sequence: Synthetic oligonucleotide
  Antisense strand to SEQ ID NO: 2457582
auccuugagggugagaacg

SEQ ID NO: 2457584 - RNA, 19 nt, Artificial Sequence
  Description of Artificial Sequence: Synthetic oligonucleotide
  Sense strand starting at position 3923 of SEQ ID NO: 1887243
caaggauuguucccgauag

SEQ ID NO: 2457585 - RNA, 19 nt, Artificial Sequence
  Description of Artificial Sequence: Synthetic oligonucleotide
  Antisense strand to SEQ ID NO: 2457584
cuaucgggaacaauccuug

SEQ ID NO: 2457586 - RNA, 19 nt, Artificial Sequence
  Description of Artificial Sequence: Synthetic oligonucleotide
  Sense strand starting at position 3925 of SEQ ID NO: 1887243
aggauuguucccgauagca

SEQ ID NO: 2457587 - RNA, 19 nt, Artificial Sequence
  Description of Artificial Sequence: Synthetic oligonucleotide
  Antisense strand to SEQ ID NO: 2457586
ugcuaucgggaacaauccu

SEQ ID NO: 2457588 - RNA, 19 nt, Artificial Sequence
  Description of Artificial Sequence: Synthetic oligonucleotide
  Sense strand starting at position 599 of SEQ ID NO: 1887244
aauucuuaugcauagguga

SEQ ID NO: 2457589 - RNA, 19 nt, Artificial Sequence
  Description of Artificial Sequence: Synthetic oligonucleotide
  Antisense strand to SEQ ID NO: 2457588
ucaccuaugcauaagaauu

SEQ ID NO: 2457590 - RNA, 19 nt, Artificial Sequence
  Description of Artificial Sequence: Synthetic oligonucleotide
  Sense strand starting at position 716 of SEQ ID NO: 1887244
ggaagacagucugugaacu

SEQ ID NO: 2457591 - RNA, 19 nt, Artificial Sequence
  Description of Artificial Sequence: Synthetic oligonucleotide
  Antisense strand to SEQ ID NO: 2457590
aguucacagacugucuucc

SEQ ID NO: 2457592 - RNA, 19 nt, Artificial Sequence
  Description of Artificial Sequence: Synthetic oligonucleotide
  Sense strand starting at position 728 of SEQ ID NO: 1887244
gugaacugcuuuccuauau

SEQ ID NO: 2457593 - RNA, 19 nt, Artificial Sequence
  Description of Artificial Sequence: Synthetic oligonucleotide
  Antisense strand to SEQ ID NO: 2457592
auauaggaaagcaguucac

SEQ ID NO: 2457594 - RNA, 19 nt, Artificial Sequence
  Description of Artificial Sequence: Synthetic oligonucleotide
  Sense strand starting at position 851 of SEQ ID NO: 1887244
aguuauuaccgauagcuca

SEQ ID NO: 2457595 - RNA, 19 nt, Artificial Sequence
  Description of Artificial Sequence: Synthetic oligonucleotide
  Antisense strand to SEQ ID NO: 2457594
ugagcuaucgguaauaacu

SEQ ID NO: 2457596 - RNA, 19 nt, Artificial Sequence
  Description of Artificial Sequence: Synthetic oligonucleotide
  Sense strand starting at position 904 of SEQ ID NO: 1887244
cccaacuguuccuugagca

SEQ ID NO: 2457597 - RNA, 19 nt, Artificial Sequence
  Description of Artificial Sequence: Synthetic oligonucleotide
  Antisense strand to SEQ ID NO: 2457596
ugcucaaggaacaguuggg

SEQ ID NO: 2457598 - RNA, 19 nt, Artificial Sequence
  Description of Artificial Sequence: Synthetic oligonucleotide
  Sense strand starting at position 908 of SEQ ID NO: 1887244
acuguuccuugagcaguau

SEQ ID NO: 2457599 - RNA, 19 nt, Artificial Sequence
  Description of Artificial Sequence: Synthetic oligonucleotide
  Antisense strand to SEQ ID NO: 2457598
auacugcucaaggaacagu

SEQ ID NO: 2457600 - RNA, 19 nt, Artificial Sequence
  Description of Artificial Sequence: Synthetic oligonucleotide
  Sense strand starting at position 912 of SEQ ID NO: 1887244
uuccuugagcaguaugaaa

SEQ ID NO: 2457601 - RNA, 19 nt, Artificial Sequence
  Description of Artificial Sequence: Synthetic oligonucleotide
  Antisense strand to SEQ ID NO: 2457600
uuucauacugcucaaggaa

SEQ ID NO: 2457602 - RNA, 19 nt, Artificial Sequence
  Description of Artificial Sequence: Synthetic oligonucleotide
  Sense strand starting at position 1032 of SEQ ID NO: 1887244
cguucucacccucaaggau

SEQ ID NO: 2457603 - RNA, 19 nt, Artificial Sequence
  Description of Artificial Sequence: Synthetic oligonucleotide
  Antisense strand to SEQ ID NO: 2457602
auccuugagggugagaacg

SEQ ID NO: 2457604 - RNA, 19 nt, Artificial Sequence
  Description of Artificial Sequence: Synthetic oligonucleotide
  Sense strand starting at position 1044 of SEQ ID NO: 1887244
caaggauuguucccgauag

SEQ ID NO: 2457605 - RNA, 19 nt, Artificial Sequence
  Description of Artificial Sequence: Synthetic oligonucleotide
  Antisense strand to SEQ ID NO: 2457604
cuaucgggaacaauccuug

SEQ ID NO: 2457606 - RNA, 19 nt, Artificial Sequence
  Description of Artificial Sequence: Synthetic oligonucleotide
  Sense strand starting at position 1046 of SEQ ID NO: 1887244
aggauuguucccgauagca

SEQ ID NO: 2457607 - RNA, 19 nt, Artificial Sequence
  Description of Artificial Sequence: Synthetic oligonucleotide
  Antisense strand to SEQ ID NO: 2457606
ugcuaucgggaacaauccu

SEQ ID NO: 2457608 - RNA, 19 nt, Artificial Sequence
  Description of Artificial Sequence: Synthetic oligonucleotide
  Sense strand starting at position 1048 of SEQ ID NO: 1887244
gauuguucccgauagcagu

SEQ ID NO: 2457609 - RNA, 19 nt, Artificial Sequence
  Description of Artificial Sequence: Synthetic oligonucleotide
  Antisense strand to SEQ ID NO: 2457608
acugcuaucgggaacaauc

SEQ ID NO: 2457610 - RNA, 19 nt, Artificial Sequence
  Description of Artificial Sequence: Synthetic oligonucleotide
  Sense strand starting at position 1561 of SEQ ID NO: 1887244
caauuugcguuugagaaac

SEQ ID NO: 2457611 - RNA, 19 nt, Artificial Sequence
  Description of Artificial Sequence: Synthetic oligonucleotide
  Antisense strand to SEQ ID NO: 2457610
guuucucaaacgcaaauug

SEQ ID NO: 2457612 - RNA, 19 nt, Artificial Sequence
  Description of Artificial Sequence: Synthetic oligonucleotide
  Sense strand starting at position 1583 of SEQ ID NO: 1887244
cacgcagagugagugaauu

SEQ ID NO: 2457613 - RNA, 19 nt, Artificial Sequence
  Description of Artificial Sequence: Synthetic oligonucleotide
  Antisense strand to SEQ ID NO: 2457612
aauucacucacucugcgug

SEQ ID NO: 2457614 - RNA, 19 nt, Artificial Sequence
  Description of Artificial Sequence: Synthetic oligonucleotide
  Sense strand starting at position 2029 of SEQ ID NO: 1887244
uaaguaacuccagggauac

SEQ ID NO: 2457615 - RNA, 19 nt, Artificial Sequence
  Description of Artificial Sequence: Synthetic oligonucleotide
  Antisense strand to SEQ ID NO: 2457614
guaucccuggaguuacuua

SEQ ID NO: 2457616 - RNA, 19 nt, Artificial Sequence
  Description of Artificial Sequence: Synthetic oligonucleotide
  Sense strand starting at position 2042 of SEQ ID NO: 1887244
ggauacgacuaugaaacaa

SEQ ID NO: 2457617 - RNA, 19 nt, Artificial Sequence
  Description of Artificial Sequence: Synthetic oligonucleotide
  Antisense strand to SEQ ID NO: 2457616
uuguuucauagucguaucc

SEQ ID NO: 2457618 - RNA, 19 nt, Artificial Sequence
  Description of Artificial Sequence: Synthetic oligonucleotide
  Sense strand starting at position 2070 of SEQ ID NO: 1887244
gaaugaacgcuugauacuu

SEQ ID NO: 2457619 - RNA, 19 nt, Artificial Sequence
  Description of Artificial Sequence: Synthetic oligonucleotide
  Antisense strand to SEQ ID NO: 2457618
aaguaucaagcguucauuc

SEQ ID NO: 2457620 - RNA, 19 nt, Artificial Sequence
  Description of Artificial Sequence: Synthetic oligonucleotide
  Sense strand starting at position 2078 of SEQ ID NO: 1887244
gcuugauacuuuccagaaa

SEQ ID NO: 2457621 - RNA, 19 nt, Artificial Sequence
  Description of Artificial Sequence: Synthetic oligonucleotide
  Antisense strand to SEQ ID NO: 2457620
uuucuggaaaguaucaagc

SEQ ID NO: 2457622 - RNA, 19 nt, Artificial Sequence
  Description of Artificial Sequence: Synthetic oligonucleotide
  Sense strand starting at position 2256 of SEQ ID NO: 1887244
gcauguagcuucccagaac

SEQ ID NO: 2457623 - RNA, 19 nt, Artificial Sequence
  Description of Artificial Sequence: Synthetic oligonucleotide
  Antisense strand to SEQ ID NO: 2457622
guucugggaagcuacaugc

SEQ ID NO: 2457624 - RNA, 19 nt, Artificial Sequence
  Description of Artificial Sequence: Synthetic oligonucleotide
  Sense strand starting at position 2580 of SEQ ID NO: 1887244
ggcuuauagcgccaaagag

SEQ ID NO: 2457625 - RNA, 19 nt, Artificial Sequence
  Description of Artificial Sequence: Synthetic oligonucleotide
  Antisense strand to SEQ ID NO: 2457624
cucuuuggcgcuauaagcc

SEQ ID NO: 2457626 - RNA, 19 nt, Artificial Sequence
  Description of Artificial Sequence: Synthetic oligonucleotide
  Sense strand starting at position 2598 of SEQ ID NO: 1887244
gcacuaaagacucgcgaug

SEQ ID NO: 2457627 - RNA, 19 nt, Artificial Sequence
  Description of Artificial Sequence: Synthetic oligonucleotide
  Antisense strand to SEQ ID NO: 2457626
caucgcgagucuuuagugc

SEQ ID NO: 2457628 - RNA, 19 nt, Artificial Sequence
  Description of Artificial Sequence: Synthetic oligonucleotide
  Sense strand starting at position 2624 of SEQ ID NO: 1887244
cuuagagcugauuggguaa

SEQ ID NO: 2457629 - RNA, 19 nt, Artificial Sequence
  Description of Artificial Sequence: Synthetic oligonucleotide
  Antisense strand to SEQ ID NO: 2457628
uuacccaaucagcucuaag

SEQ ID NO: 2457630 - RNA, 19 nt, Artificial Sequence
  Description of Artificial Sequence: Synthetic oligonucleotide
  Sense strand starting at position 2666 of SEQ ID NO: 1887244
aacgguaguuagguuuaau

SEQ ID NO: 2457631 - RNA, 19 nt, Artificial Sequence
  Description of Artificial Sequence: Synthetic oligonucleotide
  Antisense strand to SEQ ID NO: 2457630
auuaaaccuaacuaccguu

SEQ ID NO: 2457632 - RNA, 19 nt, Artificial Sequence
  Description of Artificial Sequence: Synthetic oligonucleotide
  Sense strand starting at position 2944 of SEQ ID NO: 1887244
cguuuauuugcucaggcca

SEQ ID NO: 2457633 - RNA, 19 nt, Artificial Sequence
  Description of Artificial Sequence: Synthetic oligonucleotide
  Antisense strand to SEQ ID NO: 2457632
uggccugagcaaauaaacg

SEQ ID NO: 2457634 - RNA, 19 nt, Artificial Sequence
  Description of Artificial Sequence: Synthetic oligonucleotide
  Sense strand starting at position 3090 of SEQ ID NO: 1887244
uuuggauugacucgggagu

SEQ ID NO: 2457635 - RNA, 19 nt, Artificial Sequence
  Description of Artificial Sequence: Synthetic oligonucleotide
  Antisense strand to SEQ ID NO: 2457634
acucccgagucaauccaaa

SEQ ID NO: 2457636 - RNA, 19 nt, Artificial Sequence
  Description of Artificial Sequence: Synthetic oligonucleotide
  Sense strand starting at position 3091 of SEQ ID NO: 1887244
uuggauugacucgggaguu

SEQ ID NO: 2457637 - RNA, 19 nt, Artificial Sequence
  Description of Artificial Sequence: Synthetic oligonucleotide
  Antisense strand to SEQ ID NO: 2457636
aacucccgagucaauccaa

SEQ ID NO: 2457638 - RNA, 19 nt, Artificial Sequence
  Description of Artificial Sequence: Synthetic oligonucleotide
  Sense strand starting at position 3116 of SEQ ID NO: 1887244
agcuaaguucuagagugcu

SEQ ID NO: 2457639 - RNA, 19 nt, Artificial Sequence
  Description of Artificial Sequence: Synthetic oligonucleotide
  Antisense strand to SEQ ID NO: 2457638
agcacucuagaacuuagcu

SEQ ID NO: 2457640 - RNA, 19 nt, Artificial Sequence
  Description of Artificial Sequence: Synthetic oligonucleotide
  Sense strand starting at position 3138 of SEQ ID NO: 1887244
gcaggauuugcucggucga

SEQ ID NO: 2457641 - RNA, 19 nt, Artificial Sequence
  Description of Artificial Sequence: Synthetic oligonucleotide
  Antisense strand to SEQ ID NO: 2457640
ucgaccgagcaaauccugc

SEQ ID NO: 2457642 - RNA, 19 nt, Artificial Sequence
  Description of Artificial Sequence: Synthetic oligonucleotide
  Sense strand starting at position 3139 of SEQ ID NO: 1887244
caggauuugcucggucgaa

SEQ ID NO: 2457643 - RNA, 19 nt, Artificial Sequence
  Description of Artificial Sequence: Synthetic oligonucleotide
  Antisense strand to SEQ ID NO: 2457642
uucgaccgagcaaauccug

SEQ ID NO: 2457644 - RNA, 19 nt, Artificial Sequence
  Description of Artificial Sequence: Synthetic oligonucleotide
  Sense strand starting at position 3140 of SEQ ID NO: 1887244
aggauuugcucggucgaac

SEQ ID NO: 2457645 - RNA, 19 nt, Artificial Sequence
  Description of Artificial Sequence: Synthetic oligonucleotide
  Antisense strand to SEQ ID NO: 2457644
guucgaccgagcaaauccu

SEQ ID NO: 2457646 - RNA, 19 nt, Artificial Sequence
  Description of Artificial Sequence: Synthetic oligonucleotide
  Sense strand starting at position 3166 of SEQ ID NO: 1887244
cagagaggaaugugguuua

SEQ ID NO: 2457647 - RNA, 19 nt, Artificial Sequence
  Description of Artificial Sequence: Synthetic oligonucleotide
  Antisense strand to SEQ ID NO: 2457646
uaaaccacauuccucucug

SEQ ID NO: 2457648 - RNA, 19 nt, Artificial Sequence
  Description of Artificial Sequence: Synthetic oligonucleotide
  Sense strand starting at position 3169 of SEQ ID NO: 1887244
agaggaaugugguuuauca

SEQ ID NO: 2457649 - RNA, 19 nt, Artificial Sequence
  Description of Artificial Sequence: Synthetic oligonucleotide
  Antisense strand to SEQ ID NO: 2457648
ugauaaaccacauuccucu

SEQ ID NO: 2457650 - RNA, 19 nt, Artificial Sequence
  Description of Artificial Sequence: Synthetic oligonucleotide
  Sense strand starting at position 3173 of SEQ ID NO: 1887244
gaaugugguuuaucaauaa

SEQ ID NO: 2457651 - RNA, 19 nt, Artificial Sequence
  Description of Artificial Sequence: Synthetic oligonucleotide
  Antisense strand to SEQ ID NO: 2457650
uuauugauaaaccacauuc

SEQ ID NO: 2457652 - RNA, 19 nt, Artificial Sequence
  Description of Artificial Sequence: Synthetic oligonucleotide
  Sense strand starting at position 3177 of SEQ ID NO: 1887244
gugguuuaucaauaacaca

SEQ ID NO: 2457653 - RNA, 19 nt, Artificial Sequence
  Description of Artificial Sequence: Synthetic oligonucleotide
  Antisense strand to SEQ ID NO: 2457652
uguguuauugauaaaccac

SEQ ID NO: 2457654 - RNA, 19 nt, Artificial Sequence
  Description of Artificial Sequence: Synthetic oligonucleotide
  Sense strand starting at position 3540 of SEQ ID NO: 1887244
ggaagugucagaggaagua

SEQ ID NO: 2457655 - RNA, 19 nt, Artificial Sequence
  Description of Artificial Sequence: Synthetic oligonucleotide
  Antisense strand to SEQ ID NO: 2457654
uacuuccucugacacuucc

SEQ ID NO: 2457656 - RNA, 19 nt, Artificial Sequence
  Description of Artificial Sequence: Synthetic oligonucleotide
  Sense strand starting at position 3578 of SEQ ID NO: 1887244
ccucuuuaccugcgacacu

SEQ ID NO: 2457657 - RNA, 19 nt, Artificial Sequence
  Description of Artificial Sequence: Synthetic oligonucleotide
  Antisense strand to SEQ ID NO: 2457656
agugucgcagguaaagagg

SEQ ID NO: 2457658 - RNA, 19 nt, Artificial Sequence
  Description of Artificial Sequence: Synthetic oligonucleotide
  Sense strand starting at position 3664 of SEQ ID NO: 1887244
cuccaagauucgcuaguuu

SEQ ID NO: 2457659 - RNA, 19 nt, Artificial Sequence
  Description of Artificial Sequence: Synthetic oligonucleotide
  Antisense strand to SEQ ID NO: 2457658
aaacuagcgaaucuuggag

SEQ ID NO: 2457660 - RNA, 19 nt, Artificial Sequence
  Description of Artificial Sequence: Synthetic oligonucleotide
  Sense strand starting at position 3781 of SEQ ID NO: 1887244
gagaaagguuucuuaacac

SEQ ID NO: 2457661 - RNA, 19 nt, Artificial Sequence
  Description of Artificial Sequence: Synthetic oligonucleotide
  Antisense strand to SEQ ID NO: 2457660
guguuaagaaaccuuucuc

SEQ ID NO: 2457662 - RNA, 19 nt, Artificial Sequence
  Description of Artificial Sequence: Synthetic oligonucleotide
  Sense strand starting at position 3888 of SEQ ID NO: 1887244
cccuuugacggugaaauug

SEQ ID NO: 2457663 - RNA, 19 nt, Artificial Sequence
  Description of Artificial Sequence: Synthetic oligonucleotide
  Antisense strand to SEQ ID NO: 2457662
caauuucaccgucaaaggg

SEQ ID NO: 2457664 - RNA, 19 nt, Artificial Sequence
  Description of Artificial Sequence: Synthetic oligonucleotide
  Sense strand starting at position 3896 of SEQ ID NO: 1887244
cggugaaauugauugugca

SEQ ID NO: 2457665 - RNA, 19 nt, Artificial Sequence
  Description of Artificial Sequence: Synthetic oligonucleotide
  Antisense strand to SEQ ID NO: 2457664
ugcacaaucaauuucaccg

SEQ ID NO: 2457666 - RNA, 19 nt, Artificial Sequence
  Description of Artificial Sequence: Synthetic oligonucleotide
  Sense strand starting at position 3897 of SEQ ID NO: 1887244
ggugaaauugauugugcac

SEQ ID NO: 2457667 - RNA, 19 nt, Artificial Sequence
  Description of Artificial Sequence: Synthetic oligonucleotide
  Antisense strand to SEQ ID NO: 2457666
gugcacaaucaauuucacc

SEQ ID NO: 2457668 - RNA, 19 nt, Artificial Sequence
  Description of Artificial Sequence: Synthetic oligonucleotide
  Sense strand starting at position 715 of SEQ ID NO: 1887245
agucaaucacaggguaaga

SEQ ID NO: 2457669 - RNA, 19 nt, Artificial Sequence
  Description of Artificial Sequence: Synthetic oligonucleotide
  Antisense strand to SEQ ID NO: 2457668
ucuuacccugugauugacu

SEQ ID NO: 2457670 - RNA, 19 nt, Artificial Sequence
  Description of Artificial Sequence: Synthetic oligonucleotide
  Sense strand starting at position 1019 of SEQ ID NO: 1887245
aggcauuucugaugacagu

SEQ ID NO: 2457671 - RNA, 19 nt, Artificial Sequence
  Description of Artificial Sequence: Synthetic oligonucleotide
  Antisense strand to SEQ ID NO: 2457670
acugucaucagaaaugccu

SEQ ID NO: 2457672 - RNA, 19 nt, Artificial Sequence
  Description of Artificial Sequence: Synthetic oligonucleotide
  Sense strand starting at position 1150 of SEQ ID NO: 1887245
gcuucucaguagguuguaa

SEQ ID NO: 2457673 - RNA, 19 nt, Artificial Sequence
  Description of Artificial Sequence: Synthetic oligonucleotide
  Antisense strand to SEQ ID NO: 2457672
uuacaaccuacugagaagc

SEQ ID NO: 2457674 - RNA, 19 nt, Artificial Sequence
  Description of Artificial Sequence: Synthetic oligonucleotide
  Sense strand starting at position 1152 of SEQ ID NO: 1887245
uucucaguagguuguaauu

SEQ ID NO: 2457675 - RNA, 19 nt, Artificial Sequence
  Description of Artificial Sequence: Synthetic oligonucleotide
  Antisense strand to SEQ ID NO: 2457674
aauuacaaccuacugagaa

SEQ ID NO: 2457676 - RNA, 19 nt, Artificial Sequence
  Description of Artificial Sequence: Synthetic oligonucleotide
  Sense strand starting at position 1659 of SEQ ID NO: 1887245
aaaucaguaucucugggau

SEQ ID NO: 2457677 - RNA, 19 nt, Artificial Sequence
  Description of Artificial Sequence: Synthetic oligonucleotide
  Antisense strand to SEQ ID NO: 2457676
aucccagagauacugauuu

SEQ ID NO: 2457678 - RNA, 19 nt, Artificial Sequence
  Description of Artificial Sequence: Synthetic oligonucleotide
  Sense strand starting at position 1662 of SEQ ID NO: 1887245
ucaguaucucugggauagg

SEQ ID NO: 2457679 - RNA, 19 nt, Artificial Sequence
  Description of Artificial Sequence: Synthetic oligonucleotide
  Antisense strand to SEQ ID NO: 2457678
ccuaucccagagauacuga

SEQ ID NO: 2457680 - RNA, 19 nt, Artificial Sequence
  Description of Artificial Sequence: Synthetic oligonucleotide
  Sense strand starting at position 1665 of SEQ ID NO: 1887245
guaucucugggauaggcua

SEQ ID NO: 2457681 - RNA, 19 nt, Artificial Sequence
  Description of Artificial Sequence: Synthetic oligonucleotide
  Antisense strand to SEQ ID NO: 2457680
uagccuaucccagagauac

SEQ ID NO: 2457682 - RNA, 19 nt, Artificial Sequence
  Description of Artificial Sequence: Synthetic oligonucleotide
  Sense strand starting at position 1696 of SEQ ID NO: 1887245
guauuagguuaaccaaauc

SEQ ID NO: 2457683 - RNA, 19 nt, Artificial Sequence
  Description of Artificial Sequence: Synthetic oligonucleotide
  Antisense strand to SEQ ID NO: 2457682
gauuugguuaaccuaauac

SEQ ID NO: 2457684 - RNA, 19 nt, Artificial Sequence
  Description of Artificial Sequence: Synthetic oligonucleotide
  Sense strand starting at position 1713 of SEQ ID NO: 1887245
uccaauugccaauauucga

SEQ ID NO: 2457685 - RNA, 19 nt, Artificial Sequence
  Description of Artificial Sequence: Synthetic oligonucleotide
  Antisense strand to SEQ ID NO: 2457684
ucgaauauuggcaauugga

SEQ ID NO: 2457686 - RNA, 19 nt, Artificial Sequence
  Description of Artificial Sequence: Synthetic oligonucleotide
  Sense strand starting at position 1916 of SEQ ID NO: 1887245
ugaagacuugacugcaauc

SEQ ID NO: 2457687 - RNA, 19 nt, Artificial Sequence
  Description of Artificial Sequence: Synthetic oligonucleotide
  Antisense strand to SEQ ID NO: 2457686
gauugcagucaagucuuca

SEQ ID NO: 2457688 - RNA, 19 nt, Artificial Sequence
  Description of Artificial Sequence: Synthetic oligonucleotide
  Sense strand starting at position 2082 of SEQ ID NO: 1887245
ggagacauuucuuaacgaa

SEQ ID NO: 2457689 - RNA, 19 nt, Artificial Sequence
  Description of Artificial Sequence: Synthetic oligonucleotide
  Antisense strand to SEQ ID NO: 2457688
uucguuaagaaaugucucc

SEQ ID NO: 2457690 - RNA, 19 nt, Artificial Sequence
  Description of Artificial Sequence: Synthetic oligonucleotide
  Sense strand starting at position 2085 of SEQ ID NO: 1887245
gacauuucuuaacgaagga

SEQ ID NO: 2457691 - RNA, 19 nt, Artificial Sequence
  Description of Artificial Sequence: Synthetic oligonucleotide
  Antisense strand to SEQ ID NO: 2457690
uccuucguuaagaaauguc

SEQ ID NO: 2457692 - RNA, 19 nt, Artificial Sequence
  Description of Artificial Sequence: Synthetic oligonucleotide
  Sense strand starting at position 2089 of SEQ ID NO: 1887245
uuucuuaacgaaggaguuu

SEQ ID NO: 2457693 - RNA, 19 nt, Artificial Sequence
  Description of Artificial Sequence: Synthetic oligonucleotide
  Antisense strand to SEQ ID NO: 2457692
aaacuccuucguuaagaaa

SEQ ID NO: 2457694 - RNA, 19 nt, Artificial Sequence
  Description of Artificial Sequence: Synthetic oligonucleotide
  Sense strand starting at position 2100 of SEQ ID NO: 1887245
aggaguuuguuucugcauu

SEQ ID NO: 2457695 - RNA, 19 nt, Artificial Sequence
  Description of Artificial Sequence: Synthetic oligonucleotide
  Antisense strand to SEQ ID NO: 2457694
aaugcagaaacaaacuccu

SEQ ID NO: 2457696 - RNA, 19 nt, Artificial Sequence
  Description of Artificial Sequence: Synthetic oligonucleotide
  Sense strand starting at position 2102 of SEQ ID NO: 1887245
gaguuuguuucugcauuau

SEQ ID NO: 2457697 - RNA, 19 nt, Artificial Sequence
  Description of Artificial Sequence: Synthetic oligonucleotide
  Antisense strand to SEQ ID NO: 2457696
auaaugcagaaacaaacuc

SEQ ID NO: 2457698 - RNA, 19 nt, Artificial Sequence
  Description of Artificial Sequence: Synthetic oligonucleotide
  Sense strand starting at position 2108 of SEQ ID NO: 1887245
guuucugcauuaucaguuu

SEQ ID NO: 2457699 - RNA, 19 nt, Artificial Sequence
  Description of Artificial Sequence: Synthetic oligonucleotide
  Antisense strand to SEQ ID NO: 2457698
aaacugauaaugcagaaac

SEQ ID NO: 2457700 - RNA, 19 nt, Artificial Sequence
  Description of Artificial Sequence: Synthetic oligonucleotide
  Sense strand starting at position 2114 of SEQ ID NO: 1887245
gcauuaucaguuugcuuua

SEQ ID NO: 2457701 - RNA, 19 nt, Artificial Sequence
  Description of Artificial Sequence: Synthetic oligonucleotide
  Antisense strand to SEQ ID NO: 2457700
uaaagcaaacugauaaugc

SEQ ID NO: 2457702 - RNA, 19 nt, Artificial Sequence
  Description of Artificial Sequence: Synthetic oligonucleotide
  Sense strand starting at position 2136 of SEQ ID NO: 1887245
gcaguucuagguuaggacu

SEQ ID NO: 2457703 - RNA, 19 nt, Artificial Sequence
  Description of Artificial Sequence: Synthetic oligonucleotide
  Antisense strand to SEQ ID NO: 2457702
aguccuaaccuagaacugc

SEQ ID NO: 2457704 - RNA, 19 nt, Artificial Sequence
  Description of Artificial Sequence: Synthetic oligonucleotide
  Sense strand starting at position 2207 of SEQ ID NO: 1887245
acaugauaacguuacccua

SEQ ID NO: 2457705 - RNA, 19 nt, Artificial Sequence
  Description of Artificial Sequence: Synthetic oligonucleotide
  Antisense strand to SEQ ID NO: 2457704
uaggguaacguuaucaugu

SEQ ID NO: 2457706 - RNA, 19 nt, Artificial Sequence
  Description of Artificial Sequence: Synthetic oligonucleotide
  Sense strand starting at position 2209 of SEQ ID NO: 1887245
augauaacguuacccuaaa

SEQ ID NO: 2457707 - RNA, 19 nt, Artificial Sequence
  Description of Artificial Sequence: Synthetic oligonucleotide
  Antisense strand to SEQ ID NO: 2457706
uuuaggguaacguuaucau

SEQ ID NO: 2457708 - RNA, 19 nt, Artificial Sequence
  Description of Artificial Sequence: Synthetic oligonucleotide
  Sense strand starting at position 2263 of SEQ ID NO: 1887245
acgccaauuuccgugcauu

SEQ ID NO: 2457709 - RNA, 19 nt, Artificial Sequence
  Description of Artificial Sequence: Synthetic oligonucleotide
  Antisense strand to SEQ ID NO: 2457708
aaugcacggaaauuggcgu

SEQ ID NO: 2457710 - RNA, 19 nt, Artificial Sequence
  Description of Artificial Sequence: Synthetic oligonucleotide
  Sense strand starting at position 2264 of SEQ ID NO: 1887245
cgccaauuuccgugcauuc

SEQ ID NO: 2457711 - RNA, 19 nt, Artificial Sequence
  Description of Artificial Sequence: Synthetic oligonucleotide
  Antisense strand to SEQ ID NO: 2457710
gaaugcacggaaauuggcg

SEQ ID NO: 2457712 - RNA, 19 nt, Artificial Sequence
  Description of Artificial Sequence: Synthetic oligonucleotide
  Sense strand starting at position 2534 of SEQ ID NO: 1887245
ucgaauaagucuuccagua

SEQ ID NO: 2457713 - RNA, 19 nt, Artificial Sequence
  Description of Artificial Sequence: Synthetic oligonucleotide
  Antisense strand to SEQ ID NO: 2457712
uacuggaagacuuauucga

SEQ ID NO: 2457714 - RNA, 19 nt, Artificial Sequence
  Description of Artificial Sequence: Synthetic oligonucleotide
  Sense strand starting at position 3084 of SEQ ID NO: 1887245
ugggaacuuuccgccaagu

SEQ ID NO: 2457715 - RNA, 19 nt, Artificial Sequence
  Description of Artificial Sequence: Synthetic oligonucleotide
  Antisense strand to SEQ ID NO: 2457714
acuuggcggaaaguuccca

SEQ ID NO: 2457716 - RNA, 19 nt, Artificial Sequence
  Description of Artificial Sequence: Synthetic oligonucleotide
  Sense strand starting at position 3086 of SEQ ID NO: 1887245
ggaacuuuccgccaaguaa

SEQ ID NO: 2457717 - RNA, 19 nt, Artificial Sequence
  Description of Artificial Sequence: Synthetic oligonucleotide
  Antisense strand to SEQ ID NO: 2457716
uuacuuggcggaaaguucc

SEQ ID NO: 2457718 - RNA, 19 nt, Artificial Sequence
  Description of Artificial Sequence: Synthetic oligonucleotide
  Sense strand starting at position 3170 of SEQ ID NO: 1887245
ccgggaauucugggucaca

SEQ ID NO: 2457719 - RNA, 19 nt, Artificial Sequence
  Description of Artificial Sequence: Synthetic oligonucleotide
  Antisense strand to SEQ ID NO: 2457718
ugugacccagaauucccgg

SEQ ID NO: 2457720 - RNA, 19 nt, Artificial Sequence
  Description of Artificial Sequence: Synthetic oligonucleotide
  Sense strand starting at position 3171 of SEQ ID NO: 1887245
cgggaauucugggucacaa

SEQ ID NO: 2457721 - RNA, 19 nt, Artificial Sequence
  Description of Artificial Sequence: Synthetic oligonucleotide
  Antisense strand to SEQ ID NO: 2457720
uugugacccagaauucccg

SEQ ID NO: 2457722 - RNA, 19 nt, Artificial Sequence
  Description of Artificial Sequence: Synthetic oligonucleotide
  Sense strand starting at position 3304 of SEQ ID NO: 1887245
uccgauugguccucuagua

SEQ ID NO: 2457723 - RNA, 19 nt, Artificial Sequence
  Description of Artificial Sequence: Synthetic oligonucleotide
  Antisense strand to SEQ ID NO: 2457722
uacuagaggaccaaucgga

SEQ ID NO: 2457724 - RNA, 19 nt, Artificial Sequence
  Description of Artificial Sequence: Synthetic oligonucleotide
  Sense strand starting at position 3354 of SEQ ID NO: 1887245
ugagaugacacacgugaaa

SEQ ID NO: 2457725 - RNA, 19 nt, Artificial Sequence
  Description of Artificial Sequence: Synthetic oligonucleotide
  Antisense strand to SEQ ID NO: 2457724
uuucacgugugucaucuca

SEQ ID NO: 2457726 - RNA, 19 nt, Artificial Sequence
  Description of Artificial Sequence: Synthetic oligonucleotide
  Sense strand starting at position 3366 of SEQ ID NO: 1887245
cgugaaagccuguagagcu

SEQ ID NO: 2457727 - RNA, 19 nt, Artificial Sequence
  Description of Artificial Sequence: Synthetic oligonucleotide
  Antisense strand to SEQ ID NO: 2457726
agcucuacaggcuuucacg

SEQ ID NO: 2457728 - RNA, 19 nt, Artificial Sequence
  Description of Artificial Sequence: Synthetic oligonucleotide
  Sense strand starting at position 3407 of SEQ ID NO: 1887245
ccuaguagcuccuccugaa

SEQ ID NO: 2457729 - RNA, 19 nt, Artificial Sequence
  Description of Artificial Sequence: Synthetic oligonucleotide
  Antisense strand to SEQ ID NO: 2457728
uucaggaggagcuacuagg

SEQ ID NO: 2457730 - RNA, 19 nt, Artificial Sequence
  Description of Artificial Sequence: Synthetic oligonucleotide
  Sense strand starting at position 3411 of SEQ ID NO: 1887245
guagcuccuccugaaucua

SEQ ID NO: 2457731 - RNA, 19 nt, Artificial Sequence
  Description of Artificial Sequence: Synthetic oligonucleotide
  Antisense strand to SEQ ID NO: 2457730
uagauucaggaggagcuac

SEQ ID NO: 2457732 - RNA, 19 nt, Artificial Sequence
  Description of Artificial Sequence: Synthetic oligonucleotide
  Sense strand starting at position 3420 of SEQ ID NO: 1887245
ccugaaucuauugagcguu

SEQ ID NO: 2457733 - RNA, 19 nt, Artificial Sequence
  Description of Artificial Sequence: Synthetic oligonucleotide
  Antisense strand to SEQ ID NO: 2457732
aacgcucaauagauucagg

SEQ ID NO: 2457734 - RNA, 19 nt, Artificial Sequence
  Description of Artificial Sequence: Synthetic oligonucleotide
  Sense strand starting at position 3426 of SEQ ID NO: 1887245
ucuauugagcguugccaaa

SEQ ID NO: 2457735 - RNA, 19 nt, Artificial Sequence
  Description of Artificial Sequence: Synthetic oligonucleotide
  Antisense strand to SEQ ID NO: 2457734
uuuggcaacgcucaauaga

SEQ ID NO: 2457736 - RNA, 19 nt, Artificial Sequence
  Description of Artificial Sequence: Synthetic oligonucleotide
  Sense strand starting at position 3428 of SEQ ID NO: 1887245
uauugagcguugccaaaua

SEQ ID NO: 2457737 - RNA, 19 nt, Artificial Sequence
  Description of Artificial Sequence: Synthetic oligonucleotide
  Antisense strand to SEQ ID NO: 2457736
uauuuggcaacgcucaaua

SEQ ID NO: 2457738 - RNA, 19 nt, Artificial Sequence
  Description of Artificial Sequence: Synthetic oligonucleotide
  Sense strand starting at position 3544 of SEQ ID NO: 1887245
gcugacgucuuaucuagau

SEQ ID NO: 2457739 - RNA, 19 nt, Artificial Sequence
  Description of Artificial Sequence: Synthetic oligonucleotide
  Antisense strand to SEQ ID NO: 2457738
aucuagauaagacgucagc

SEQ ID NO: 2457740 - RNA, 19 nt, Artificial Sequence
  Description of Artificial Sequence: Synthetic oligonucleotide
  Sense strand starting at position 3763 of SEQ ID NO: 1887245
acguuauaccaagggaaag

SEQ ID NO: 2457741 - RNA, 19 nt, Artificial Sequence
  Description of Artificial Sequence: Synthetic oligonucleotide
  Antisense strand to SEQ ID NO: 2457740
cuuucccuugguauaacgu

SEQ ID NO: 2457742 - RNA, 19 nt, Artificial Sequence
  Description of Artificial Sequence: Synthetic oligonucleotide
  Sense strand starting at position 3764 of SEQ ID NO: 1887245
cguuauaccaagggaaaga

SEQ ID NO: 2457743 - RNA, 19 nt, Artificial Sequence
  Description of Artificial Sequence: Synthetic oligonucleotide
  Antisense strand to SEQ ID NO: 2457742
ucuuucccuugguauaacg

SEQ ID NO: 2457744 - RNA, 19 nt, Artificial Sequence
  Description of Artificial Sequence: Synthetic oligonucleotide
  Sense strand starting at position 3829 of SEQ ID NO: 1887245
uugagcuggccucagaaau

SEQ ID NO: 2457745 - RNA, 19 nt, Artificial Sequence
  Description of Artificial Sequence: Synthetic oligonucleotide
  Antisense strand to SEQ ID NO: 2457744
auuucugaggccagcucaa

SEQ ID NO: 2457746 - RNA, 19 nt, Artificial Sequence
  Description of Artificial Sequence: Synthetic oligonucleotide
  Sense strand starting at position 3841 of SEQ ID NO: 1887245
cagaaauaaguguaggguu

SEQ ID NO: 2457747 - RNA, 19 nt, Artificial Sequence
  Description of Artificial Sequence: Synthetic oligonucleotide
  Antisense strand to SEQ ID NO: 2457746
aacccuacacuuauuucug

SEQ ID NO: 2457748 - RNA, 19 nt, Artificial Sequence
  Description of Artificial Sequence: Synthetic oligonucleotide
  Sense strand starting at position 188 of SEQ ID NO: 1887246
agucaaucacaggguaaga

SEQ ID NO: 2457749 - RNA, 19 nt, Artificial Sequence
  Description of Artificial Sequence: Synthetic oligonucleotide
  Antisense strand to SEQ ID NO: 2457748
ucuuacccugugauugacu

SEQ ID NO: 2457750 - RNA, 19 nt, Artificial Sequence
  Description of Artificial Sequence: Synthetic oligonucleotide
  Sense strand starting at position 492 of SEQ ID NO: 1887246
aggcauuucugaugacagu

SEQ ID NO: 2457751 - RNA, 19 nt, Artificial Sequence
  Description of Artificial Sequence: Synthetic oligonucleotide
  Antisense strand to SEQ ID NO: 2457750
acugucaucagaaaugccu

SEQ ID NO: 2457752 - RNA, 19 nt, Artificial Sequence
  Description of Artificial Sequence: Synthetic oligonucleotide
  Sense strand starting at position 623 of SEQ ID NO: 1887246
gcuucucaguagguuguaa

SEQ ID NO: 2457753 - RNA, 19 nt, Artificial Sequence
  Description of Artificial Sequence: Synthetic oligonucleotide
  Antisense strand to SEQ ID NO: 2457752
uuacaaccuacugagaagc

SEQ ID NO: 2457754 - RNA, 19 nt, Artificial Sequence
  Description of Artificial Sequence: Synthetic oligonucleotide
  Sense strand starting at position 625 of SEQ ID NO: 1887246
uucucaguagguuguaauu

SEQ ID NO: 2457755 - RNA, 19 nt, Artificial Sequence
  Description of Artificial Sequence: Synthetic oligonucleotide
  Antisense strand to SEQ ID NO: 2457754
aauuacaaccuacugagaa

SEQ ID NO: 2457756 - RNA, 19 nt, Artificial Sequence
  Description of Artificial Sequence: Synthetic oligonucleotide
  Sense strand starting at position 1132 of SEQ ID NO: 1887246
aaaucaguaucucugggau

SEQ ID NO: 2457757 - RNA, 19 nt, Artificial Sequence
  Description of Artificial Sequence: Synthetic oligonucleotide
  Antisense strand to SEQ ID NO: 2457756
aucccagagauacugauuu

SEQ ID NO: 2457758 - RNA, 19 nt, Artificial Sequence
  Description of Artificial Sequence: Synthetic oligonucleotide
  Sense strand starting at position 1135 of SEQ ID NO: 1887246
ucaguaucucugggauagg

SEQ ID NO: 2457759 - RNA, 19 nt, Artificial Sequence
  Description of Artificial Sequence: Synthetic oligonucleotide
  Antisense strand to SEQ ID NO: 2457758
ccuaucccagagauacuga

SEQ ID NO: 2457760 - RNA, 19 nt, Artificial Sequence
  Description of Artificial Sequence: Synthetic oligonucleotide
  Sense strand starting at position 1138 of SEQ ID NO: 1887246
guaucucugggauaggcua

SEQ ID NO: 2457761 - RNA, 19 nt, Artificial Sequence
  Description of Artificial Sequence: Synthetic oligonucleotide
  Antisense strand to SEQ ID NO: 2457760
uagccuaucccagagauac

SEQ ID NO: 2457762 - RNA, 19 nt, Artificial Sequence
  Description of Artificial Sequence: Synthetic oligonucleotide
  Sense strand starting at position 1169 of SEQ ID NO: 1887246
guauuagguuaaccaaauc

SEQ ID NO: 2457763 - RNA, 19 nt, Artificial Sequence
  Description of Artificial Sequence: Synthetic oligonucleotide
  Antisense strand to SEQ ID NO: 2457762
gauuugguuaaccuaauac

SEQ ID NO: 2457764 - RNA, 19 nt, Artificial Sequence
  Description of Artificial Sequence: Synthetic oligonucleotide
  Sense strand starting at position 1186 of SEQ ID NO: 1887246
uccaauugccaauauucga

SEQ ID NO: 2457765 - RNA, 19 nt, Artificial Sequence
  Description of Artificial Sequence: Synthetic oligonucleotide
  Antisense strand to SEQ ID NO: 2457764
ucgaauauuggcaauugga

SEQ ID NO: 2457766 - RNA, 19 nt, Artificial Sequence
  Description of Artificial Sequence: Synthetic oligonucleotide
  Sense strand starting at position 1389 of SEQ ID NO: 1887246
ugaagacuugacugcaauc

SEQ ID NO: 2457767 - RNA, 19 nt, Artificial Sequence
  Description of Artificial Sequence: Synthetic oligonucleotide
  Antisense strand to SEQ ID NO: 2457766
gauugcagucaagucuuca

SEQ ID NO: 2457768 - RNA, 19 nt, Artificial Sequence
  Description of Artificial Sequence: Synthetic oligonucleotide
  Sense strand starting at position 1555 of SEQ ID NO: 1887246
ggagacauuucuuaacgaa

SEQ ID NO: 2457769 - RNA, 19 nt, Artificial Sequence
  Description of Artificial Sequence: Synthetic oligonucleotide
  Antisense strand to SEQ ID NO: 2457768
uucguuaagaaaugucucc

SEQ ID NO: 2457770 - RNA, 19 nt, Artificial Sequence
  Description of Artificial Sequence: Synthetic oligonucleotide
  Sense strand starting at position 1558 of SEQ ID NO: 1887246
gacauuucuuaacgaagga

SEQ ID NO: 2457771 - RNA, 19 nt, Artificial Sequence
  Description of Artificial Sequence: Synthetic oligonucleotide
  Antisense strand to SEQ ID NO: 2457770
uccuucguuaagaaauguc

SEQ ID NO: 2457772 - RNA, 19 nt, Artificial Sequence
  Description of Artificial Sequence: Synthetic oligonucleotide
  Sense strand starting at position 1562 of SEQ ID NO: 1887246
uuucuuaacgaaggaguuu

SEQ ID NO: 2457773 - RNA, 19 nt, Artificial Sequence
  Description of Artificial Sequence: Synthetic oligonucleotide
  Antisense strand to SEQ ID NO: 2457772
aaacuccuucguuaagaaa

SEQ ID NO: 2457774 - RNA, 19 nt, Artificial Sequence
  Description of Artificial Sequence: Synthetic oligonucleotide
  Sense strand starting at position 1573 of SEQ ID NO: 1887246
aggaguuuguuucugcauu

SEQ ID NO: 2457775 - RNA, 19 nt, Artificial Sequence
  Description of Artificial Sequence: Synthetic oligonucleotide
  Antisense strand to SEQ ID NO: 2457774
aaugcagaaacaaacuccu

SEQ ID NO: 2457776 - RNA, 19 nt, Artificial Sequence
  Description of Artificial Sequence: Synthetic oligonucleotide
  Sense strand starting at position 1575 of SEQ ID NO: 1887246
gaguuuguuucugcauuau

SEQ ID NO: 2457777 - RNA, 19 nt, Artificial Sequence
  Description of Artificial Sequence: Synthetic oligonucleotide
  Antisense strand to SEQ ID NO: 2457776
auaaugcagaaacaaacuc

SEQ ID NO: 2457778 - RNA, 19 nt, Artificial Sequence
  Description of Artificial Sequence: Synthetic oligonucleotide
  Sense strand starting at position 1581 of SEQ ID NO: 1887246
guuucugcauuaucaguuu

SEQ ID NO: 2457779 - RNA, 19 nt, Artificial Sequence
  Description of Artificial Sequence: Synthetic oligonucleotide
  Antisense strand to SEQ ID NO: 2457778
aaacugauaaugcagaaac

SEQ ID NO: 2457780 - RNA, 19 nt, Artificial Sequence
  Description of Artificial Sequence: Synthetic oligonucleotide
  Sense strand starting at position 1609 of SEQ ID NO: 1887246
gcaguucuagguuaggacu

SEQ ID NO: 2457781 - RNA, 19 nt, Artificial Sequence
  Description of Artificial Sequence: Synthetic oligonucleotide
  Antisense strand to SEQ ID NO: 2457780
aguccuaaccuagaacugc

SEQ ID NO: 2457782 - RNA, 19 nt, Artificial Sequence
  Description of Artificial Sequence: Synthetic oligonucleotide
  Sense strand starting at position 1680 of SEQ ID NO: 1887246
acaugauaacguuacccua

SEQ ID NO: 2457783 - RNA, 19 nt, Artificial Sequence
  Description of Artificial Sequence: Synthetic oligonucleotide
  Antisense strand to SEQ ID NO: 2457782
uaggguaacguuaucaugu

SEQ ID NO: 2457784 - RNA, 19 nt, Artificial Sequence
  Description of Artificial Sequence: Synthetic oligonucleotide
  Sense strand starting at position 1682 of SEQ ID NO: 1887246
augauaacguuacccuaaa

SEQ ID NO: 2457785 - RNA, 19 nt, Artificial Sequence
  Description of Artificial Sequence: Synthetic oligonucleotide
  Antisense strand to SEQ ID NO: 2457784
uuuaggguaacguuaucau

SEQ ID NO: 2457786 - RNA, 19 nt, Artificial Sequence
  Description of Artificial Sequence: Synthetic oligonucleotide
  Sense strand starting at position 1736 of SEQ ID NO: 1887246
acgccaauuuccgugcauu

SEQ ID NO: 2457787 - RNA, 19 nt, Artificial Sequence
  Description of Artificial Sequence: Synthetic oligonucleotide
  Antisense strand to SEQ ID NO: 2457786
aaugcacggaaauuggcgu

SEQ ID NO: 2457788 - RNA, 19 nt, Artificial Sequence
  Description of Artificial Sequence: Synthetic oligonucleotide
  Sense strand starting at position 1737 of SEQ ID NO: 1887246
cgccaauuuccgugcauuc

SEQ ID NO: 2457789 - RNA, 19 nt, Artificial Sequence
  Description of Artificial Sequence: Synthetic oligonucleotide
  Antisense strand to SEQ ID NO: 2457788
gaaugcacggaaauuggcg

SEQ ID NO: 2457790 - RNA, 19 nt, Artificial Sequence
  Description of Artificial Sequence: Synthetic oligonucleotide
  Sense strand starting at position 2007 of SEQ ID NO: 1887246
ucgaauaagucuuccagua

SEQ ID NO: 2457791 - RNA, 19 nt, Artificial Sequence
  Description of Artificial Sequence: Synthetic oligonucleotide
  Antisense strand to SEQ ID NO: 2457790
uacuggaagacuuauucga

SEQ ID NO: 2457792 - RNA, 19 nt, Artificial Sequence
  Description of Artificial Sequence: Synthetic oligonucleotide
  Sense strand starting at position 2557 of SEQ ID NO: 1887246
ugggaacuuuccgccaagu

SEQ ID NO: 2457793 - RNA, 19 nt, Artificial Sequence
  Description of Artificial Sequence: Synthetic oligonucleotide
  Antisense strand to SEQ ID NO: 2457792
acuuggcggaaaguuccca

SEQ ID NO: 2457794 - RNA, 19 nt, Artificial Sequence
  Description of Artificial Sequence: Synthetic oligonucleotide
  Sense strand starting at position 2559 of SEQ ID NO: 1887246
ggaacuuuccgccaaguaa

SEQ ID NO: 2457795 - RNA, 19 nt, Artificial Sequence
  Description of Artificial Sequence: Synthetic oligonucleotide
  Antisense strand to SEQ ID NO: 2457794
uuacuuggcggaaaguucc

SEQ ID NO: 2457796 - RNA, 19 nt, Artificial Sequence
  Description of Artificial Sequence: Synthetic oligonucleotide
  Sense strand starting at position 2643 of SEQ ID NO: 1887246
ccgggaauucugggucaca

SEQ ID NO: 2457797 - RNA, 19 nt, Artificial Sequence
  Description of Artificial Sequence: Synthetic oligonucleotide
  Antisense strand to SEQ ID NO: 2457796
ugugacccagaauucccgg

SEQ ID NO: 2457798 - RNA, 19 nt, Artificial Sequence
  Description of Artificial Sequence: Synthetic oligonucleotide
  Sense strand starting at position 2644 of SEQ ID NO: 1887246
cgggaauucugggucacaa

SEQ ID NO: 2457799 - RNA, 19 nt, Artificial Sequence
  Description of Artificial Sequence: Synthetic oligonucleotide
  Antisense strand to SEQ ID NO: 2457798
uugugacccagaauucccg

SEQ ID NO: 2457800 - RNA, 19 nt, Artificial Sequence
  Description of Artificial Sequence: Synthetic oligonucleotide
  Sense strand starting at position 2777 of SEQ ID NO: 1887246
uccgauugguccucuagua

SEQ ID NO: 2457801 - RNA, 19 nt, Artificial Sequence
  Description of Artificial Sequence: Synthetic oligonucleotide
  Antisense strand to SEQ ID NO: 2457800
uacuagaggaccaaucgga

SEQ ID NO: 2457802 - RNA, 19 nt, Artificial Sequence
  Description of Artificial Sequence: Synthetic oligonucleotide
  Sense strand starting at position 2827 of SEQ ID NO: 1887246
ugagaugacacacgugaaa

SEQ ID NO: 2457803 - RNA, 19 nt, Artificial Sequence
  Description of Artificial Sequence: Synthetic oligonucleotide
  Antisense strand to SEQ ID NO: 2457802
uuucacgugugucaucuca

SEQ ID NO: 2457804 - RNA, 19 nt, Artificial Sequence
  Description of Artificial Sequence: Synthetic oligonucleotide
  Sense strand starting at position 2839 of SEQ ID NO: 1887246
cgugaaagccuguagagcu

SEQ ID NO: 2457805 - RNA, 19 nt, Artificial Sequence
  Description of Artificial Sequence: Synthetic oligonucleotide
  Antisense strand to SEQ ID NO: 2457804
agcucuacaggcuuucacg

SEQ ID NO: 2457806 - RNA, 19 nt, Artificial Sequence
  Description of Artificial Sequence: Synthetic oligonucleotide
  Sense strand starting at position 2880 of SEQ ID NO: 1887246
ccuaguagcuccuccugaa

SEQ ID NO: 2457807 - RNA, 19 nt, Artificial Sequence
  Description of Artificial Sequence: Synthetic oligonucleotide
  Antisense strand to SEQ ID NO: 2457806
uucaggaggagcuacuagg

SEQ ID NO: 2457808 - RNA, 19 nt, Artificial Sequence
  Description of Artificial Sequence: Synthetic oligonucleotide
  Sense strand starting at position 2884 of SEQ ID NO: 1887246
guagcuccuccugaaucua

SEQ ID NO: 2457809 - RNA, 19 nt, Artificial Sequence
  Description of Artificial Sequence: Synthetic oligonucleotide
  Antisense strand to SEQ ID NO: 2457808
uagauucaggaggagcuac

SEQ ID NO: 2457810 - RNA, 19 nt, Artificial Sequence
  Description of Artificial Sequence: Synthetic oligonucleotide
  Sense strand starting at position 2893 of SEQ ID NO: 1887246
ccugaaucuauugagcguu

SEQ ID NO: 2457811 - RNA, 19 nt, Artificial Sequence
  Description of Artificial Sequence: Synthetic oligonucleotide
  Antisense strand to SEQ ID NO: 2457810
aacgcucaauagauucagg

SEQ ID NO: 2457812 - RNA, 19 nt, Artificial Sequence
  Description of Artificial Sequence: Synthetic oligonucleotide
  Sense strand starting at position 2901 of SEQ ID NO: 1887246
uauugagcguugccaaaua

SEQ ID NO: 2457813 - RNA, 19 nt, Artificial Sequence
  Description of Artificial Sequence: Synthetic oligonucleotide
  Antisense strand to SEQ ID NO: 2457812
uauuuggcaacgcucaaua

SEQ ID NO: 2457814 - RNA, 19 nt, Artificial Sequence
  Description of Artificial Sequence: Synthetic oligonucleotide
  Sense strand starting at position 3017 of SEQ ID NO: 1887246
gcugacgucuuaucuagau

SEQ ID NO: 2457815 - RNA, 19 nt, Artificial Sequence
  Description of Artificial Sequence: Synthetic oligonucleotide
  Antisense strand to SEQ ID NO: 2457814
aucuagauaagacgucagc

SEQ ID NO: 2457816 - RNA, 19 nt, Artificial Sequence
  Description of Artificial Sequence: Synthetic oligonucleotide
  Sense strand starting at position 3236 of SEQ ID NO: 1887246
acguuauaccaagggaaag

SEQ ID NO: 2457817 - RNA, 19 nt, Artificial Sequence
  Description of Artificial Sequence: Synthetic oligonucleotide
  Antisense strand to SEQ ID NO: 2457816
cuuucccuugguauaacgu

SEQ ID NO: 2457818 - RNA, 19 nt, Artificial Sequence
  Description of Artificial Sequence: Synthetic oligonucleotide
  Sense strand starting at position 3237 of SEQ ID NO: 1887246
cguuauaccaagggaaaga

SEQ ID NO: 2457819 - RNA, 19 nt, Artificial Sequence
  Description of Artificial Sequence: Synthetic oligonucleotide
  Antisense strand to SEQ ID NO: 2457818
ucuuucccuugguauaacg

SEQ ID NO: 2457820 - RNA, 19 nt, Artificial Sequence
  Description of Artificial Sequence: Synthetic oligonucleotide
  Sense strand starting at position 3302 of SEQ ID NO: 1887246
uugagcuggccucagaaau

SEQ ID NO: 2457821 - RNA, 19 nt, Artificial Sequence
  Description of Artificial Sequence: Synthetic oligonucleotide
  Antisense strand to SEQ ID NO: 2457820
auuucugaggccagcucaa

SEQ ID NO: 2457822 - RNA, 19 nt, Artificial Sequence
  Description of Artificial Sequence: Synthetic oligonucleotide
  Sense strand starting at position 3314 of SEQ ID NO: 1887246
cagaaauaaguguaggguu

SEQ ID NO: 2457823 - RNA, 19 nt, Artificial Sequence
  Description of Artificial Sequence: Synthetic oligonucleotide
  Antisense strand to SEQ ID NO: 2457822
aacccuacacuuauuucug

SEQ ID NO: 2457824 - RNA, 19 nt, Artificial Sequence
  Description of Artificial Sequence: Synthetic oligonucleotide
  Sense strand starting at position 3936 of SEQ ID NO: 1887246
ggaggaggugucuggaacu

SEQ ID NO: 2457825 - RNA, 19 nt, Artificial Sequence
  Description of Artificial Sequence: Synthetic oligonucleotide
  Antisense strand to SEQ ID NO: 2457824
aguuccagacaccuccucc

SEQ ID NO: 2457826 - RNA, 19 nt, Artificial Sequence
  Description of Artificial Sequence: Synthetic oligonucleotide
  Sense strand starting at position 3981 of SEQ ID NO: 1887246
ggaugucagcuagggcauu

SEQ ID NO: 2457827 - RNA, 19 nt, Artificial Sequence
  Description of Artificial Sequence: Synthetic oligonucleotide
  Antisense strand to SEQ ID NO: 2457826
aaugcccuagcugacaucc

SEQ ID NO: 2457828 - RNA, 19 nt, Artificial Sequence
  Description of Artificial Sequence: Synthetic oligonucleotide
  Sense strand starting at position 13 of SEQ ID NO: 1887247
ugacuucugcccugagcau

SEQ ID NO: 2457829 - RNA, 19 nt, Artificial Sequence
  Description of Artificial Sequence: Synthetic oligonucleotide
  Antisense strand to SEQ ID NO: 2457828
augcucagggcagaaguca

SEQ ID NO: 2457830 - RNA, 19 nt, Artificial Sequence
  Description of Artificial Sequence: Synthetic oligonucleotide
  Sense strand starting at position 51 of SEQ ID NO: 1887247
aagacaaguucuugacuga

SEQ ID NO: 2457831 - RNA, 19 nt, Artificial Sequence
  Description of Artificial Sequence: Synthetic oligonucleotide
  Antisense strand to SEQ ID NO: 2457830
ucagucaagaacuugucuu

SEQ ID NO: 2457832 - RNA, 19 nt, Artificial Sequence
  Description of Artificial Sequence: Synthetic oligonucleotide
  Sense strand starting at position 55 of SEQ ID NO: 1887247
caaguucuugacugaguga

SEQ ID NO: 2457833 - RNA, 19 nt, Artificial Sequence
  Description of Artificial Sequence: Synthetic oligonucleotide
  Antisense strand to SEQ ID NO: 2457832
ucacucagucaagaacuug

SEQ ID NO: 2457834 - RNA, 19 nt, Artificial Sequence
  Description of Artificial Sequence: Synthetic oligonucleotide
  Sense strand starting at position 738 of SEQ ID NO: 1887247
cguuacuggaguugaaaua

SEQ ID NO: 2457835 - RNA, 19 nt, Artificial Sequence
  Description of Artificial Sequence: Synthetic oligonucleotide
  Antisense strand to SEQ ID NO: 2457834
uauuucaacuccaguaacg

SEQ ID NO: 2457836 - RNA, 19 nt, Artificial Sequence
  Description of Artificial Sequence: Synthetic oligonucleotide
  Sense strand starting at position 758 of SEQ ID NO: 1887247
gaagauuaagcuggaaugu

SEQ ID NO: 2457837 - RNA, 19 nt, Artificial Sequence
  Description of Artificial Sequence: Synthetic oligonucleotide
  Antisense strand to SEQ ID NO: 2457836
acauuccagcuuaaucuuc

SEQ ID NO: 2457838 - RNA, 19 nt, Artificial Sequence
  Description of Artificial Sequence: Synthetic oligonucleotide
  Sense strand starting at position 805 of SEQ ID NO: 1887247
gaggauaagguuugucaag

SEQ ID NO: 2457839 - RNA, 19 nt, Artificial Sequence
  Description of Artificial Sequence: Synthetic oligonucleotide
  Antisense strand to SEQ ID NO: 2457838
cuugacaaaccuuauccuc

SEQ ID NO: 2457840 - RNA, 19 nt, Artificial Sequence
  Description of Artificial Sequence: Synthetic oligonucleotide
  Sense strand starting at position 807 of SEQ ID NO: 1887247
ggauaagguuugucaagga

SEQ ID NO: 2457841 - RNA, 19 nt, Artificial Sequence
  Description of Artificial Sequence: Synthetic oligonucleotide
  Antisense strand to SEQ ID NO: 2457840
uccuugacaaaccuuaucc

SEQ ID NO: 2457842 - RNA, 19 nt, Artificial Sequence
  Description of Artificial Sequence: Synthetic oligonucleotide
  Sense strand starting at position 811 of SEQ ID NO: 1887247
aagguuugucaaggauagg

SEQ ID NO: 2457843 - RNA, 19 nt, Artificial Sequence
  Description of Artificial Sequence: Synthetic oligonucleotide
  Antisense strand to SEQ ID NO: 2457842
ccuauccuugacaaaccuu

SEQ ID NO: 2457844 - RNA, 19 nt, Artificial Sequence
  Description of Artificial Sequence: Synthetic oligonucleotide
  Sense strand starting at position 930 of SEQ ID NO: 1887247
gaaggaaacuuacuuuguu

SEQ ID NO: 2457845 - RNA, 19 nt, Artificial Sequence
  Description of Artificial Sequence: Synthetic oligonucleotide
  Antisense strand to SEQ ID NO: 2457844
aacaaaguaaguuuccuuc

SEQ ID NO: 2457846 - RNA, 19 nt, Artificial Sequence
  Description of Artificial Sequence: Synthetic oligonucleotide
  Sense strand starting at position 934 of SEQ ID NO: 1887247
gaaacuuacuuuguuggca

SEQ ID NO: 2457847 - RNA, 19 nt, Artificial Sequence
  Description of Artificial Sequence: Synthetic oligonucleotide
  Antisense strand to SEQ ID NO: 2457846
ugccaacaaaguaaguuuc

SEQ ID NO: 2457848 - RNA, 19 nt, Artificial Sequence
  Description of Artificial Sequence: Synthetic oligonucleotide
  Sense strand starting at position 1177 of SEQ ID NO: 1887247
agccaauucucuuauggga

SEQ ID NO: 2457849 - RNA, 19 nt, Artificial Sequence
  Description of Artificial Sequence: Synthetic oligonucleotide
  Antisense strand to SEQ ID NO: 2457848
ucccauaagagaauuggcu

SEQ ID NO: 2457850 - RNA, 19 nt, Artificial Sequence
  Description of Artificial Sequence: Synthetic oligonucleotide
  Sense strand starting at position 1179 of SEQ ID NO: 1887247
ccaauucucuuaugggaaa

SEQ ID NO: 2457851 - RNA, 19 nt, Artificial Sequence
  Description of Artificial Sequence: Synthetic oligonucleotide
  Antisense strand to SEQ ID NO: 2457850
uuucccauaagagaauugg

SEQ ID NO: 2457852 - RNA, 19 nt, Artificial Sequence
  Description of Artificial Sequence: Synthetic oligonucleotide
  Sense strand starting at position 1253 of SEQ ID NO: 1887247
aguugccuuucccaauaga

SEQ ID NO: 2457853 - RNA, 19 nt, Artificial Sequence
  Description of Artificial Sequence: Synthetic oligonucleotide
  Antisense strand to SEQ ID NO: 2457852
ucuauugggaaaggcaacu

SEQ ID NO: 2457854 - RNA, 19 nt, Artificial Sequence
  Description of Artificial Sequence: Synthetic oligonucleotide
  Sense strand starting at position 1256 of SEQ ID NO: 1887247
ugccuuucccaauagaagu

SEQ ID NO: 2457855 - RNA, 19 nt, Artificial Sequence
  Description of Artificial Sequence: Synthetic oligonucleotide
  Antisense strand to SEQ ID NO: 2457854
acuucuauugggaaaggca

SEQ ID NO: 2457856 - RNA, 19 nt, Artificial Sequence
  Description of Artificial Sequence: Synthetic oligonucleotide
  Sense strand starting at position 1302 of SEQ ID NO: 1887247
ccaaucaaguccuagaaag

SEQ ID NO: 2457857 - RNA, 19 nt, Artificial Sequence
  Description of Artificial Sequence: Synthetic oligonucleotide
  Antisense strand to SEQ ID NO: 2457856
cuuucuaggacuugauugg

SEQ ID NO: 2457858 - RNA, 19 nt, Artificial Sequence
  Description of Artificial Sequence: Synthetic oligonucleotide
  Sense strand starting at position 1331 of SEQ ID NO: 1887247
acacaaaggucuguaacua

SEQ ID NO: 2457859 - RNA, 19 nt, Artificial Sequence
  Description of Artificial Sequence: Synthetic oligonucleotide
  Antisense strand to SEQ ID NO: 2457858
uaguuacagaccuuugugu

SEQ ID NO: 2457860 - RNA, 19 nt, Artificial Sequence
  Description of Artificial Sequence: Synthetic oligonucleotide
  Sense strand starting at position 1346 of SEQ ID NO: 1887247
acuaaagcagccuguaauu

SEQ ID NO: 2457861 - RNA, 19 nt, Artificial Sequence
  Description of Artificial Sequence: Synthetic oligonucleotide
  Antisense strand to SEQ ID NO: 2457860
aauuacaggcugcuuuagu

SEQ ID NO: 2457862 - RNA, 19 nt, Artificial Sequence
  Description of Artificial Sequence: Synthetic oligonucleotide
  Sense strand starting at position 1404 of SEQ ID NO: 1887247
aguuuaagucaaggaaccu

SEQ ID NO: 2457863 - RNA, 19 nt, Artificial Sequence
  Description of Artificial Sequence: Synthetic oligonucleotide
  Antisense strand to SEQ ID NO: 2457862
agguuccuugacuuaaacu

SEQ ID NO: 2457864 - RNA, 19 nt, Artificial Sequence
  Description of Artificial Sequence: Synthetic oligonucleotide
  Sense strand starting at position 1510 of SEQ ID NO: 1887247
gggcaaucaugggugauuc

SEQ ID NO: 2457865 - RNA, 19 nt, Artificial Sequence
  Description of Artificial Sequence: Synthetic oligonucleotide
  Antisense strand to SEQ ID NO: 2457864
gaaucacccaugauugccc

SEQ ID NO: 2457866 - RNA, 19 nt, Artificial Sequence
  Description of Artificial Sequence: Synthetic oligonucleotide
  Sense strand starting at position 1564 of SEQ ID NO: 1887247
acacguguaguccugcauu

SEQ ID NO: 2457867 - RNA, 19 nt, Artificial Sequence
  Description of Artificial Sequence: Synthetic oligonucleotide
  Antisense strand to SEQ ID NO: 2457866
aaugcaggacuacacgugu

SEQ ID NO: 2457868 - RNA, 19 nt, Artificial Sequence
  Description of Artificial Sequence: Synthetic oligonucleotide
  Sense strand starting at position 1566 of SEQ ID NO: 1887247
acguguaguccugcauuac

SEQ ID NO: 2457869 - RNA, 19 nt, Artificial Sequence
  Description of Artificial Sequence: Synthetic oligonucleotide
  Antisense strand to SEQ ID NO: 2457868
guaaugcaggacuacacgu

SEQ ID NO: 2457870 - RNA, 19 nt, Artificial Sequence
  Description of Artificial Sequence: Synthetic oligonucleotide
  Sense strand starting at position 2036 of SEQ ID NO: 1887247
ggcagaacguugugcauuu

SEQ ID NO: 2457871 - RNA, 19 nt, Artificial Sequence
  Description of Artificial Sequence: Synthetic oligonucleotide
  Antisense strand to SEQ ID NO: 2457870
aaaugcacaacguucugcc

SEQ ID NO: 2457872 - RNA, 19 nt, Artificial Sequence
  Description of Artificial Sequence: Synthetic oligonucleotide
  Sense strand starting at position 2625 of SEQ ID NO: 1887247
cgagcaaauucuuaugcau

SEQ ID NO: 2457873 - RNA, 19 nt, Artificial Sequence
  Description of Artificial Sequence: Synthetic oligonucleotide
  Antisense strand to SEQ ID NO: 2457872
augcauaagaauuugcucg

SEQ ID NO: 2457874 - RNA, 19 nt, Artificial Sequence
  Description of Artificial Sequence: Synthetic oligonucleotide
  Sense strand starting at position 2627 of SEQ ID NO: 1887247
agcaaauucuuaugcauag

SEQ ID NO: 2457875 - RNA, 19 nt, Artificial Sequence
  Description of Artificial Sequence: Synthetic oligonucleotide
  Antisense strand to SEQ ID NO: 2457874
cuaugcauaagaauuugcu

SEQ ID NO: 2457876 - RNA, 19 nt, Artificial Sequence
  Description of Artificial Sequence: Synthetic oligonucleotide
  Sense strand starting at position 2631 of SEQ ID NO: 1887247
aauucuuaugcauagguga

SEQ ID NO: 2457877 - RNA, 19 nt, Artificial Sequence
  Description of Artificial Sequence: Synthetic oligonucleotide
  Antisense strand to SEQ ID NO: 2457876
ucaccuaugcauaagaauu

SEQ ID NO: 2457878 - RNA, 19 nt, Artificial Sequence
  Description of Artificial Sequence: Synthetic oligonucleotide
  Sense strand starting at position 2748 of SEQ ID NO: 1887247
ggaagacagucugugaacu

SEQ ID NO: 2457879 - RNA, 19 nt, Artificial Sequence
  Description of Artificial Sequence: Synthetic oligonucleotide
  Antisense strand to SEQ ID NO: 2457878
aguucacagacugucuucc

SEQ ID NO: 2457880 - RNA, 19 nt, Artificial Sequence
  Description of Artificial Sequence: Synthetic oligonucleotide
  Sense strand starting at position 2760 of SEQ ID NO: 1887247
gugaacugcuuuccuauau

SEQ ID NO: 2457881 - RNA, 19 nt, Artificial Sequence
  Description of Artificial Sequence: Synthetic oligonucleotide
  Antisense strand to SEQ ID NO: 2457880
auauaggaaagcaguucac

SEQ ID NO: 2457882 - RNA, 19 nt, Artificial Sequence
  Description of Artificial Sequence: Synthetic oligonucleotide
  Sense strand starting at position 2877 of SEQ ID NO: 1887247
aaagucaguuauuaccgau

SEQ ID NO: 2457883 - RNA, 19 nt, Artificial Sequence
  Description of Artificial Sequence: Synthetic oligonucleotide
  Antisense strand to SEQ ID NO: 2457882
aucgguaauaacugacuuu

SEQ ID NO: 2457884 - RNA, 19 nt, Artificial Sequence
  Description of Artificial Sequence: Synthetic oligonucleotide
  Sense strand starting at position 2883 of SEQ ID NO: 1887247
aguuauuaccgauagcuca

SEQ ID NO: 2457885 - RNA, 19 nt, Artificial Sequence
  Description of Artificial Sequence: Synthetic oligonucleotide
  Antisense strand to SEQ ID NO: 2457884
ugagcuaucgguaauaacu

SEQ ID NO: 2457886 - RNA, 19 nt, Artificial Sequence
  Description of Artificial Sequence: Synthetic oligonucleotide
  Sense strand starting at position 2936 of SEQ ID NO: 1887247
cccaacuguuccuugagca

SEQ ID NO: 2457887 - RNA, 19 nt, Artificial Sequence
  Description of Artificial Sequence: Synthetic oligonucleotide
  Antisense strand to SEQ ID NO: 2457886
ugcucaaggaacaguuggg

SEQ ID NO: 2457888 - RNA, 19 nt, Artificial Sequence
  Description of Artificial Sequence: Synthetic oligonucleotide
  Sense strand starting at position 2940 of SEQ ID NO: 1887247
acuguuccuugagcaguau

SEQ ID NO: 2457889 - RNA, 19 nt, Artificial Sequence
  Description of Artificial Sequence: Synthetic oligonucleotide
  Antisense strand to SEQ ID NO: 2457888
auacugcucaaggaacagu

SEQ ID NO: 2457890 - RNA, 19 nt, Artificial Sequence
  Description of Artificial Sequence: Synthetic oligonucleotide
  Sense strand starting at position 2944 of SEQ ID NO: 1887247
uuccuugagcaguaugaaa

SEQ ID NO: 2457891 - RNA, 19 nt, Artificial Sequence
  Description of Artificial Sequence: Synthetic oligonucleotide
  Antisense strand to SEQ ID NO: 2457890
uuucauacugcucaaggaa

SEQ ID NO: 2457892 - RNA, 19 nt, Artificial Sequence
  Description of Artificial Sequence: Synthetic oligonucleotide
  Sense strand starting at position 3064 of SEQ ID NO: 1887247
cguucucacccucaaggau

SEQ ID NO: 2457893 - RNA, 19 nt, Artificial Sequence
  Description of Artificial Sequence: Synthetic oligonucleotide
  Antisense strand to SEQ ID NO: 2457892
auccuugagggugagaacg

SEQ ID NO: 2457894 - RNA, 19 nt, Artificial Sequence
  Description of Artificial Sequence: Synthetic oligonucleotide
  Sense strand starting at position 3076 of SEQ ID NO: 1887247
caaggauuguucccgauag

SEQ ID NO: 2457895 - RNA, 19 nt, Artificial Sequence
  Description of Artificial Sequence: Synthetic oligonucleotide
  Antisense strand to SEQ ID NO: 2457894
cuaucgggaacaauccuug

SEQ ID NO: 2457896 - RNA, 19 nt, Artificial Sequence
  Description of Artificial Sequence: Synthetic oligonucleotide
  Sense strand starting at position 3077 of SEQ ID NO: 1887247
aaggauuguucccgauagc

SEQ ID NO: 2457897 - RNA, 19 nt, Artificial Sequence
  Description of Artificial Sequence: Synthetic oligonucleotide
  Antisense strand to SEQ ID NO: 2457896
gcuaucgggaacaauccuu

SEQ ID NO: 2457898 - RNA, 19 nt, Artificial Sequence
  Description of Artificial Sequence: Synthetic oligonucleotide
  Sense strand starting at position 3078 of SEQ ID NO: 1887247
aggauuguucccgauagca

SEQ ID NO: 2457899 - RNA, 19 nt, Artificial Sequence
  Description of Artificial Sequence: Synthetic oligonucleotide
  Antisense strand to SEQ ID NO: 2457898
ugcuaucgggaacaauccu

SEQ ID NO: 2457900 - RNA, 19 nt, Artificial Sequence
  Description of Artificial Sequence: Synthetic oligonucleotide
  Sense strand starting at position 3080 of SEQ ID NO: 1887247
gauuguucccgauagcagu

SEQ ID NO: 2457901 - RNA, 19 nt, Artificial Sequence
  Description of Artificial Sequence: Synthetic oligonucleotide
  Antisense strand to SEQ ID NO: 2457900
acugcuaucgggaacaauc

SEQ ID NO: 2457902 - RNA, 19 nt, Artificial Sequence
  Description of Artificial Sequence: Synthetic oligonucleotide
  Sense strand starting at position 3588 of SEQ ID NO: 1887247
ggacacaauuugcguuuga

SEQ ID NO: 2457903 - RNA, 19 nt, Artificial Sequence
  Description of Artificial Sequence: Synthetic oligonucleotide
  Antisense strand to SEQ ID NO: 2457902
ucaaacgcaaauugugucc

SEQ ID NO: 2457904 - RNA, 19 nt, Artificial Sequence
  Description of Artificial Sequence: Synthetic oligonucleotide
  Sense strand starting at position 3593 of SEQ ID NO: 1887247
caauuugcguuugagaaac

SEQ ID NO: 2457905 - RNA, 19 nt, Artificial Sequence
  Description of Artificial Sequence: Synthetic oligonucleotide
  Antisense strand to SEQ ID NO: 2457904
guuucucaaacgcaaauug

SEQ ID NO: 2457906 - RNA, 19 nt, Artificial Sequence
  Description of Artificial Sequence: Synthetic oligonucleotide
  Sense strand starting at position 3615 of SEQ ID NO: 1887247
cacgcagagugagugaauu

SEQ ID NO: 2457907 - RNA, 19 nt, Artificial Sequence
  Description of Artificial Sequence: Synthetic oligonucleotide
  Antisense strand to SEQ ID NO: 2457906
aauucacucacucugcgug

SEQ ID NO: 2457908 - RNA, 19 nt, Artificial Sequence
  Description of Artificial Sequence: Synthetic oligonucleotide
  Sense strand starting at position 58 of SEQ ID NO: 1887248
cgagaaguugaugguccuu

SEQ ID NO: 2457909 - RNA, 19 nt, Artificial Sequence
  Description of Artificial Sequence: Synthetic oligonucleotide
  Antisense strand to SEQ ID NO: 2457908
aaggaccaucaacuucucg

SEQ ID NO: 2457910 - RNA, 19 nt, Artificial Sequence
  Description of Artificial Sequence: Synthetic oligonucleotide
  Sense strand starting at position 60 of SEQ ID NO: 1887248
agaaguugaugguccuuga

SEQ ID NO: 2457911 - RNA, 19 nt, Artificial Sequence
  Description of Artificial Sequence: Synthetic oligonucleotide
  Antisense strand to SEQ ID NO: 2457910
ucaaggaccaucaacuucu

SEQ ID NO: 2457912 - RNA, 19 nt, Artificial Sequence
  Description of Artificial Sequence: Synthetic oligonucleotide
  Sense strand starting at position 134 of SEQ ID NO: 1887248
ugacauguuaguggagauu

SEQ ID NO: 2457913 - RNA, 19 nt, Artificial Sequence
  Description of Artificial Sequence: Synthetic oligonucleotide
  Antisense strand to SEQ ID NO: 2457912
aaucuccacuaacauguca

SEQ ID NO: 2457914 - RNA, 19 nt, Artificial Sequence
  Description of Artificial Sequence: Synthetic oligonucleotide
  Sense strand starting at position 351 of SEQ ID NO: 1887248
uugggaauaccuuguccau

SEQ ID NO: 2457915 - RNA, 19 nt, Artificial Sequence
  Description of Artificial Sequence: Synthetic oligonucleotide
  Antisense strand to SEQ ID NO: 2457914
auggacaagguauucccaa

SEQ ID NO: 2457916 - RNA, 19 nt, Artificial Sequence
  Description of Artificial Sequence: Synthetic oligonucleotide
  Sense strand starting at position 366 of SEQ ID NO: 1887248
ccaucacgucaugguaaga

SEQ ID NO: 2457917 - RNA, 19 nt, Artificial Sequence
  Description of Artificial Sequence: Synthetic oligonucleotide
  Antisense strand to SEQ ID NO: 2457916
ucuuaccaugacgugaugg

SEQ ID NO: 2457918 - RNA, 19 nt, Artificial Sequence
  Description of Artificial Sequence: Synthetic oligonucleotide
  Sense strand starting at position 387 of SEQ ID NO: 1887248
gaagcagacuaugugguau

SEQ ID NO: 2457919 - RNA, 19 nt, Artificial Sequence
  Description of Artificial Sequence: Synthetic oligonucleotide
  Antisense strand to SEQ ID NO: 2457918
auaccacauagucugcuuc

SEQ ID NO: 2457920 - RNA, 19 nt, Artificial Sequence
  Description of Artificial Sequence: Synthetic oligonucleotide
  Sense strand starting at position 439 of SEQ ID NO: 1887248
ucuuucugaaucugggaga

SEQ ID NO: 2457921 - RNA, 19 nt, Artificial Sequence
  Description of Artificial Sequence: Synthetic oligonucleotide
  Antisense strand to SEQ ID NO: 2457920
ucucccagauucagaaaga

SEQ ID NO: 2457922 - RNA, 19 nt, Artificial Sequence
  Description of Artificial Sequence: Synthetic oligonucleotide
  Sense strand starting at position 495 of SEQ ID NO: 1887248
gcuacuucuuaugcuagga

SEQ ID NO: 2457923 - RNA, 19 nt, Artificial Sequence
  Description of Artificial Sequence: Synthetic oligonucleotide
  Antisense strand to SEQ ID NO: 2457922
uccuagcauaagaaguagc

SEQ ID NO: 2457924 - RNA, 19 nt, Artificial Sequence
  Description of Artificial Sequence: Synthetic oligonucleotide
  Sense strand starting at position 571 of SEQ ID NO: 1887248
gccucuuuagacugaacau

SEQ ID NO: 2457925 - RNA, 19 nt, Artificial Sequence
  Description of Artificial Sequence: Synthetic oligonucleotide
  Antisense strand to SEQ ID NO: 2457924
auguucagucuaaagaggc

SEQ ID NO: 2457926 - RNA, 19 nt, Artificial Sequence
  Description of Artificial Sequence: Synthetic oligonucleotide
  Sense strand starting at position 601 of SEQ ID NO: 1887248
agcugugagcagcaaucaa

SEQ ID NO: 2457927 - RNA, 19 nt, Artificial Sequence
  Description of Artificial Sequence: Synthetic oligonucleotide
  Antisense strand to SEQ ID NO: 2457926
uugauugcugcucacagcu

SEQ ID NO: 2457928 - RNA, 19 nt, Artificial Sequence
  Description of Artificial Sequence: Synthetic oligonucleotide
  Sense strand starting at position 622 of SEQ ID NO: 1887248
ucuaguaauguugaacuaa

SEQ ID NO: 2457929 - RNA, 19 nt, Artificial Sequence
  Description of Artificial Sequence: Synthetic oligonucleotide
  Antisense strand to SEQ ID NO: 2457928
uuaguucaacauuacuaga

SEQ ID NO: 2457930 - RNA, 19 nt, Artificial Sequence
  Description of Artificial Sequence: Synthetic oligonucleotide
  Sense strand starting at position 880 of SEQ ID NO: 1887248
ucaccauucgcaugaugau

SEQ ID NO: 2457931 - RNA, 19 nt, Artificial Sequence
  Description of Artificial Sequence: Synthetic oligonucleotide
  Antisense strand to SEQ ID NO: 2457930
aucaucaugcgaaugguga

SEQ ID NO: 2457932 - RNA, 19 nt, Artificial Sequence
  Description of Artificial Sequence: Synthetic oligonucleotide
  Sense strand starting at position 905 of SEQ ID NO: 1887248
caguaaugcccaggaucau

SEQ ID NO: 2457933 - RNA, 19 nt, Artificial Sequence
  Description of Artificial Sequence: Synthetic oligonucleotide
  Antisense strand to SEQ ID NO: 2457932
augauccugggcauuacug

SEQ ID NO: 2457934 - RNA, 19 nt, Artificial Sequence
  Description of Artificial Sequence: Synthetic oligonucleotide
  Sense strand starting at position 933 of SEQ ID NO: 1887248
cggguuaacaaguauguga

SEQ ID NO: 2457935 - RNA, 19 nt, Artificial Sequence
  Description of Artificial Sequence: Synthetic oligonucleotide
  Antisense strand to SEQ ID NO: 2457934
ucacauacuuguuaacccg

SEQ ID NO: 2457936 - RNA, 19 nt, Artificial Sequence
  Description of Artificial Sequence: Synthetic oligonucleotide
  Sense strand starting at position 935 of SEQ ID NO: 1887248
gguuaacaaguaugugaac

SEQ ID NO: 2457937 - RNA, 19 nt, Artificial Sequence
  Description of Artificial Sequence: Synthetic oligonucleotide
  Antisense strand to SEQ ID NO: 2457936
guucacauacuuguuaacc

SEQ ID NO: 2457938 - RNA, 19 nt, Artificial Sequence
  Description of Artificial Sequence: Synthetic oligonucleotide
  Sense strand starting at position 944 of SEQ ID NO: 1887248
guaugugaaccuggucaug

SEQ ID NO: 2457939 - RNA, 19 nt, Artificial Sequence
  Description of Artificial Sequence: Synthetic oligonucleotide
  Antisense strand to SEQ ID NO: 2457938
caugaccagguucacauac

SEQ ID NO: 2457940 - RNA, 19 nt, Artificial Sequence
  Description of Artificial Sequence: Synthetic oligonucleotide
  Sense strand starting at position 946 of SEQ ID NO: 1887248
augugaaccuggucaugua

SEQ ID NO: 2457941 - RNA, 19 nt, Artificial Sequence
  Description of Artificial Sequence: Synthetic oligonucleotide
  Antisense strand to SEQ ID NO: 2457940
uacaugaccagguucacau

SEQ ID NO: 2457942 - RNA, 19 nt, Artificial Sequence
  Description of Artificial Sequence: Synthetic oligonucleotide
  Sense strand starting at position 1003 of SEQ ID NO: 1887248
auuucuucuugcguuaugu

SEQ ID NO: 2457943 - RNA, 19 nt, Artificial Sequence
  Description of Artificial Sequence: Synthetic oligonucleotide
  Antisense strand to SEQ ID NO: 2457942
acauaacgcaagaagaaau

SEQ ID NO: 2457944 - RNA, 19 nt, Artificial Sequence
  Description of Artificial Sequence: Synthetic oligonucleotide
  Sense strand starting at position 1014 of SEQ ID NO: 1887248
cguuaugugaaccagagga

SEQ ID NO: 2457945 - RNA, 19 nt, Artificial Sequence
  Description of Artificial Sequence: Synthetic oligonucleotide
  Antisense strand to SEQ ID NO: 2457944
uccucugguucacauaacg

SEQ ID NO: 2457946 - RNA, 19 nt, Artificial Sequence
  Description of Artificial Sequence: Synthetic oligonucleotide
  Sense strand starting at position 1063 of SEQ ID NO: 1887248
ucaugcuggacgugaugau

SEQ ID NO: 2457947 - RNA, 19 nt, Artificial Sequence
  Description of Artificial Sequence: Synthetic oligonucleotide
  Antisense strand to SEQ ID NO: 2457946
aucaucacguccagcauga

SEQ ID NO: 2457948 - RNA, 19 nt, Artificial Sequence
  Description of Artificial Sequence: Synthetic oligonucleotide
  Sense strand starting at position 1067 of SEQ ID NO: 1887248
gcuggacgugaugaucaua

SEQ ID NO: 2457949 - RNA, 19 nt, Artificial Sequence
  Description of Artificial Sequence: Synthetic oligonucleotide
  Antisense strand to SEQ ID NO: 2457948
uaugaucaucacguccagc

SEQ ID NO: 2457950 - RNA, 19 nt, Artificial Sequence
  Description of Artificial Sequence: Synthetic oligonucleotide
  Sense strand starting at position 1154 of SEQ ID NO: 1887248
caaguucuugacugaguga

SEQ ID NO: 2457951 - RNA, 19 nt, Artificial Sequence
  Description of Artificial Sequence: Synthetic oligonucleotide
  Antisense strand to SEQ ID NO: 2457950
ucacucagucaagaacuug

SEQ ID NO: 2457952 - RNA, 19 nt, Artificial Sequence
  Description of Artificial Sequence: Synthetic oligonucleotide
  Sense strand starting at position 1837 of SEQ ID NO: 1887248
cguuacuggaguugaaaua

SEQ ID NO: 2457953 - RNA, 19 nt, Artificial Sequence
  Description of Artificial Sequence: Synthetic oligonucleotide
  Antisense strand to SEQ ID NO: 2457952
uauuucaacuccaguaacg

SEQ ID NO: 2457954 - RNA, 19 nt, Artificial Sequence
  Description of Artificial Sequence: Synthetic oligonucleotide
  Sense strand starting at position 1857 of SEQ ID NO: 1887248
gaagauuaagcuggaaugu

SEQ ID NO: 2457955 - RNA, 19 nt, Artificial Sequence
  Description of Artificial Sequence: Synthetic oligonucleotide
  Antisense strand to SEQ ID NO: 2457954
acauuccagcuuaaucuuc

SEQ ID NO: 2457956 - RNA, 19 nt, Artificial Sequence
  Description of Artificial Sequence: Synthetic oligonucleotide
  Sense strand starting at position 1904 of SEQ ID NO: 1887248
gaggauaagguuugucaag

SEQ ID NO: 2457957 - RNA, 19 nt, Artificial Sequence
  Description of Artificial Sequence: Synthetic oligonucleotide
  Antisense strand to SEQ ID NO: 2457956
cuugacaaaccuuauccuc

SEQ ID NO: 2457958 - RNA, 19 nt, Artificial Sequence
  Description of Artificial Sequence: Synthetic oligonucleotide
  Sense strand starting at position 1906 of SEQ ID NO: 1887248
ggauaagguuugucaagga

SEQ ID NO: 2457959 - RNA, 19 nt, Artificial Sequence
  Description of Artificial Sequence: Synthetic oligonucleotide
  Antisense strand to SEQ ID NO: 2457958
uccuugacaaaccuuaucc

SEQ ID NO: 2457960 - RNA, 19 nt, Artificial Sequence
  Description of Artificial Sequence: Synthetic oligonucleotide
  Sense strand starting at position 1910 of SEQ ID NO: 1887248
aagguuugucaaggauagg

SEQ ID NO: 2457961 - RNA, 19 nt, Artificial Sequence
  Description of Artificial Sequence: Synthetic oligonucleotide
  Antisense strand to SEQ ID NO: 2457960
ccuauccuugacaaaccuu

SEQ ID NO: 2457962 - RNA, 19 nt, Artificial Sequence
  Description of Artificial Sequence: Synthetic oligonucleotide
  Sense strand starting at position 2029 of SEQ ID NO: 1887248
gaaggaaacuuacuuuguu

SEQ ID NO: 2457963 - RNA, 19 nt, Artificial Sequence
  Description of Artificial Sequence: Synthetic oligonucleotide
  Antisense strand to SEQ ID NO: 2457962
aacaaaguaaguuuccuuc

SEQ ID NO: 2457964 - RNA, 19 nt, Artificial Sequence
  Description of Artificial Sequence: Synthetic oligonucleotide
  Sense strand starting at position 2033 of SEQ ID NO: 1887248
gaaacuuacuuuguuggca

SEQ ID NO: 2457965 - RNA, 19 nt, Artificial Sequence
  Description of Artificial Sequence: Synthetic oligonucleotide
  Antisense strand to SEQ ID NO: 2457964
ugccaacaaaguaaguuuc

SEQ ID NO: 2457966 - RNA, 19 nt, Artificial Sequence
  Description of Artificial Sequence: Synthetic oligonucleotide
  Sense strand starting at position 2355 of SEQ ID NO: 1887248
ugccuuucccaauagaagu

SEQ ID NO: 2457967 - RNA, 19 nt, Artificial Sequence
  Description of Artificial Sequence: Synthetic oligonucleotide
  Antisense strand to SEQ ID NO: 2457966
acuucuauugggaaaggca

SEQ ID NO: 2457968 - RNA, 19 nt, Artificial Sequence
  Description of Artificial Sequence: Synthetic oligonucleotide
  Sense strand starting at position 2430 of SEQ ID NO: 1887248
acacaaaggucuguaacua

SEQ ID NO: 2457969 - RNA, 19 nt, Artificial Sequence
  Description of Artificial Sequence: Synthetic oligonucleotide
  Antisense strand to SEQ ID NO: 2457968
uaguuacagaccuuugugu

SEQ ID NO: 2457970 - RNA, 19 nt, Artificial Sequence
  Description of Artificial Sequence: Synthetic oligonucleotide
  Sense strand starting at position 2445 of SEQ ID NO: 1887248
acuaaagcagccuguaauu

SEQ ID NO: 2457971 - RNA, 19 nt, Artificial Sequence
  Description of Artificial Sequence: Synthetic oligonucleotide
  Antisense strand to SEQ ID NO: 2457970
aauuacaggcugcuuuagu

SEQ ID NO: 2457972 - RNA, 19 nt, Artificial Sequence
  Description of Artificial Sequence: Synthetic oligonucleotide
  Sense strand starting at position 2503 of SEQ ID NO: 1887248
aguuuaagucaaggaaccu

SEQ ID NO: 2457973 - RNA, 19 nt, Artificial Sequence
  Description of Artificial Sequence: Synthetic oligonucleotide
  Antisense strand to SEQ ID NO: 2457972
agguuccuugacuuaaacu

SEQ ID NO: 2457974 - RNA, 19 nt, Artificial Sequence
  Description of Artificial Sequence: Synthetic oligonucleotide
  Sense strand starting at position 2609 of SEQ ID NO: 1887248
gggcaaucaugggugauuc

SEQ ID NO: 2457975 - RNA, 19 nt, Artificial Sequence
  Description of Artificial Sequence: Synthetic oligonucleotide
  Antisense strand to SEQ ID NO: 2457974
gaaucacccaugauugccc

SEQ ID NO: 2457976 - RNA, 19 nt, Artificial Sequence
  Description of Artificial Sequence: Synthetic oligonucleotide
  Sense strand starting at position 2663 of SEQ ID NO: 1887248
acacguguaguccugcauu

SEQ ID NO: 2457977 - RNA, 19 nt, Artificial Sequence
  Description of Artificial Sequence: Synthetic oligonucleotide
  Antisense strand to SEQ ID NO: 2457976
aaugcaggacuacacgugu

SEQ ID NO: 2457978 - RNA, 19 nt, Artificial Sequence
  Description of Artificial Sequence: Synthetic oligonucleotide
  Sense strand starting at position 2665 of SEQ ID NO: 1887248
acguguaguccugcauuac

SEQ ID NO: 2457979 - RNA, 19 nt, Artificial Sequence
  Description of Artificial Sequence: Synthetic oligonucleotide
  Antisense strand to SEQ ID NO: 2457978
guaaugcaggacuacacgu

SEQ ID NO: 2457980 - RNA, 19 nt, Artificial Sequence
  Description of Artificial Sequence: Synthetic oligonucleotide
  Sense strand starting at position 3730 of SEQ ID NO: 1887248
aauucuuaugcauagguga

SEQ ID NO: 2457981 - RNA, 19 nt, Artificial Sequence
  Description of Artificial Sequence: Synthetic oligonucleotide
  Antisense strand to SEQ ID NO: 2457980
ucaccuaugcauaagaauu

SEQ ID NO: 2457982 - RNA, 19 nt, Artificial Sequence
  Description of Artificial Sequence: Synthetic oligonucleotide
  Sense strand starting at position 3847 of SEQ ID NO: 1887248
ggaagacagucugugaacu

SEQ ID NO: 2457983 - RNA, 19 nt, Artificial Sequence
  Description of Artificial Sequence: Synthetic oligonucleotide
  Antisense strand to SEQ ID NO: 2457982
aguucacagacugucuucc

SEQ ID NO: 2457984 - RNA, 19 nt, Artificial Sequence
  Description of Artificial Sequence: Synthetic oligonucleotide
  Sense strand starting at position 3859 of SEQ ID NO: 1887248
gugaacugcuuuccuauau

SEQ ID NO: 2457985 - RNA, 19 nt, Artificial Sequence
  Description of Artificial Sequence: Synthetic oligonucleotide
  Antisense strand to SEQ ID NO: 2457984
auauaggaaagcaguucac

SEQ ID NO: 2457986 - RNA, 19 nt, Artificial Sequence
  Description of Artificial Sequence: Synthetic oligonucleotide
  Sense strand starting at position 3982 of SEQ ID NO: 1887248
aguuauuaccgauagcuca

SEQ ID NO: 2457987 - RNA, 19 nt, Artificial Sequence
  Description of Artificial Sequence: Synthetic oligonucleotide
  Antisense strand to SEQ ID NO: 2457986
ugagcuaucgguaauaacu

SEQ ID NO: 2457988 - RNA, 19 nt, Artificial Sequence
  Description of Artificial Sequence: Synthetic oligonucleotide
  Sense strand starting at position 20 of SEQ ID NO: 1887249
cuacauguacugcauuaca

SEQ ID NO: 2457989 - RNA, 19 nt, Artificial Sequence
  Description of Artificial Sequence: Synthetic oligonucleotide
  Antisense strand to SEQ ID NO: 2457988
uguaaugcaguacauguag

SEQ ID NO: 2457990 - RNA, 19 nt, Artificial Sequence
  Description of Artificial Sequence: Synthetic oligonucleotide
  Sense strand starting at position 175 of SEQ ID NO: 1887249
uggccuaccuccuuaugga

SEQ ID NO: 2457991 - RNA, 19 nt, Artificial Sequence
  Description of Artificial Sequence: Synthetic oligonucleotide
  Antisense strand to SEQ ID NO: 2457990
uccauaaggagguaggcca

SEQ ID NO: 2457992 - RNA, 19 nt, Artificial Sequence
  Description of Artificial Sequence: Synthetic oligonucleotide
  Sense strand starting at position 228 of SEQ ID NO: 1887249
uaggcaucugcccauagga

SEQ ID NO: 2457993 - RNA, 19 nt, Artificial Sequence
  Description of Artificial Sequence: Synthetic oligonucleotide
  Antisense strand to SEQ ID NO: 2457992
uccuaugggcagaugccua

SEQ ID NO: 2457994 - RNA, 19 nt, Artificial Sequence
  Description of Artificial Sequence: Synthetic oligonucleotide
  Sense strand starting at position 253 of SEQ ID NO: 1887249
aucgcuauauccuuugaca

SEQ ID NO: 2457995 - RNA, 19 nt, Artificial Sequence
  Description of Artificial Sequence: Synthetic oligonucleotide
  Antisense strand to SEQ ID NO: 2457994
ugucaaaggauauagcgau

SEQ ID NO: 2457996 - RNA, 19 nt, Artificial Sequence
  Description of Artificial Sequence: Synthetic oligonucleotide
  Sense strand starting at position 255 of SEQ ID NO: 1887249
cgcuauauccuuugacaga

SEQ ID NO: 2457997 - RNA, 19 nt, Artificial Sequence
  Description of Artificial Sequence: Synthetic oligonucleotide
  Antisense strand to SEQ ID NO: 2457996
ucugucaaaggauauagcg

SEQ ID NO: 2457998 - RNA, 19 nt, Artificial Sequence
  Description of Artificial Sequence: Synthetic oligonucleotide
  Sense strand starting at position 290 of SEQ ID NO: 1887249
ugugguagugcucaggaca

SEQ ID NO: 2457999 - RNA, 19 nt, Artificial Sequence
  Description of Artificial Sequence: Synthetic oligonucleotide
  Antisense strand to SEQ ID NO: 2457998
uguccugagcacuaccaca

SEQ ID NO: 2458000 - RNA, 19 nt, Artificial Sequence
  Description of Artificial Sequence: Synthetic oligonucleotide
  Sense strand starting at position 411 of SEQ ID NO: 1887249
cucugauguccuuagcaug

SEQ ID NO: 2458001 - RNA, 19 nt, Artificial Sequence
  Description of Artificial Sequence: Synthetic oligonucleotide
  Antisense strand to SEQ ID NO: 2458000
caugcuaaggacaucagag

SEQ ID NO: 2458002 - RNA, 19 nt, Artificial Sequence
  Description of Artificial Sequence: Synthetic oligonucleotide
  Sense strand starting at position 457 of SEQ ID NO: 1887249
ucuugucacuugccaguau

SEQ ID NO: 2458003 - RNA, 19 nt, Artificial Sequence
  Description of Artificial Sequence: Synthetic oligonucleotide
  Antisense strand to SEQ ID NO: 2458002
auacuggcaagugacaaga

SEQ ID NO: 2458004 - RNA, 19 nt, Artificial Sequence
  Description of Artificial Sequence: Synthetic oligonucleotide
  Sense strand starting at position 461 of SEQ ID NO: 1887249
gucacuugccaguaugacu

SEQ ID NO: 2458005 - RNA, 19 nt, Artificial Sequence
  Description of Artificial Sequence: Synthetic oligonucleotide
  Antisense strand to SEQ ID NO: 2458004
agucauacuggcaagugac

SEQ ID NO: 2458006 - RNA, 19 nt, Artificial Sequence
  Description of Artificial Sequence: Synthetic oligonucleotide
  Sense strand starting at position 604 of SEQ ID NO: 1887249
aguccaaucccuuggcaga

SEQ ID NO: 2458007 - RNA, 19 nt, Artificial Sequence
  Description of Artificial Sequence: Synthetic oligonucleotide
  Antisense strand to SEQ ID NO: 2458006
ucugccaagggauuggacu

SEQ ID NO: 2458008 - RNA, 19 nt, Artificial Sequence
  Description of Artificial Sequence: Synthetic oligonucleotide
  Sense strand starting at position 605 of SEQ ID NO: 1887249
guccaaucccuuggcagau

SEQ ID NO: 2458009 - RNA, 19 nt, Artificial Sequence
  Description of Artificial Sequence: Synthetic oligonucleotide
  Antisense strand to SEQ ID NO: 2458008
aucugccaagggauuggac

SEQ ID NO: 2458010 - RNA, 19 nt, Artificial Sequence
  Description of Artificial Sequence: Synthetic oligonucleotide
  Sense strand starting at position 753 of SEQ ID NO: 1887249
agggaucucuucuaaauaa

SEQ ID NO: 2458011 - RNA, 19 nt, Artificial Sequence
  Description of Artificial Sequence: Synthetic oligonucleotide
  Antisense strand to SEQ ID NO: 2458010
uuauuuagaagagaucccu

SEQ ID NO: 2458012 - RNA, 19 nt, Artificial Sequence
  Description of Artificial Sequence: Synthetic oligonucleotide
  Sense strand starting at position 872 of SEQ ID NO: 1887249
ggccuugguaggcaagauu

SEQ ID NO: 2458013 - RNA, 19 nt, Artificial Sequence
  Description of Artificial Sequence: Synthetic oligonucleotide
  Antisense strand to SEQ ID NO: 2458012
aaucuugccuaccaaggcc

SEQ ID NO: 2458014 - RNA, 19 nt, Artificial Sequence
  Description of Artificial Sequence: Synthetic oligonucleotide
  Sense strand starting at position 945 of SEQ ID NO: 1887249
uaagguugugguuaggaau

SEQ ID NO: 2458015 - RNA, 19 nt, Artificial Sequence
  Description of Artificial Sequence: Synthetic oligonucleotide
  Antisense strand to SEQ ID NO: 2458014
auuccuaaccacaaccuua

SEQ ID NO: 2458016 - RNA, 19 nt, Artificial Sequence
  Description of Artificial Sequence: Synthetic oligonucleotide
  Sense strand starting at position 952 of SEQ ID NO: 1887249
gugguuaggaauggugcaa

SEQ ID NO: 2458017 - RNA, 19 nt, Artificial Sequence
  Description of Artificial Sequence: Synthetic oligonucleotide
  Antisense strand to SEQ ID NO: 2458016
uugcaccauuccuaaccac

SEQ ID NO: 2458018 - RNA, 19 nt, Artificial Sequence
  Description of Artificial Sequence: Synthetic oligonucleotide
  Sense strand starting at position 1042 of SEQ ID NO: 1887249
ccuuaaaugcuuugagcuu

SEQ ID NO: 2458019 - RNA, 19 nt, Artificial Sequence
  Description of Artificial Sequence: Synthetic oligonucleotide
  Antisense strand to SEQ ID NO: 2458018
aagcucaaagcauuuaagg

SEQ ID NO: 2458020 - RNA, 19 nt, Artificial Sequence
  Description of Artificial Sequence: Synthetic oligonucleotide
  Sense strand starting at position 1113 of SEQ ID NO: 1887249
cagggaaguuuacaagcua

SEQ ID NO: 2458021 - RNA, 19 nt, Artificial Sequence
  Description of Artificial Sequence: Synthetic oligonucleotide
  Antisense strand to SEQ ID NO: 2458020
uagcuuguaaacuucccug

SEQ ID NO: 2458022 - RNA, 19 nt, Artificial Sequence
  Description of Artificial Sequence: Synthetic oligonucleotide
  Sense strand starting at position 1905 of SEQ ID NO: 1887249
agucaaucacaggguaaga

SEQ ID NO: 2458023 - RNA, 19 nt, Artificial Sequence
  Description of Artificial Sequence: Synthetic oligonucleotide
  Antisense strand to SEQ ID NO: 2458022
ucuuacccugugauugacu

SEQ ID NO: 2458024 - RNA, 19 nt, Artificial Sequence
  Description of Artificial Sequence: Synthetic oligonucleotide
  Sense strand starting at position 2209 of SEQ ID NO: 1887249
aggcauuucugaugacagu

SEQ ID NO: 2458025 - RNA, 19 nt, Artificial Sequence
  Description of Artificial Sequence: Synthetic oligonucleotide
  Antisense strand to SEQ ID NO: 2458024
acugucaucagaaaugccu

SEQ ID NO: 2458026 - RNA, 19 nt, Artificial Sequence
  Description of Artificial Sequence: Synthetic oligonucleotide
  Sense strand starting at position 2340 of SEQ ID NO: 1887249
gcuucucaguagguuguaa

SEQ ID NO: 2458027 - RNA, 19 nt, Artificial Sequence
  Description of Artificial Sequence: Synthetic oligonucleotide
  Antisense strand to SEQ ID NO: 2458026
uuacaaccuacugagaagc

SEQ ID NO: 2458028 - RNA, 19 nt, Artificial Sequence
  Description of Artificial Sequence: Synthetic oligonucleotide
  Sense strand starting at position 2342 of SEQ ID NO: 1887249
uucucaguagguuguaauu

SEQ ID NO: 2458029 - RNA, 19 nt, Artificial Sequence
  Description of Artificial Sequence: Synthetic oligonucleotide
  Antisense strand to SEQ ID NO: 2458028
aauuacaaccuacugagaa

SEQ ID NO: 2458030 - RNA, 19 nt, Artificial Sequence
  Description of Artificial Sequence: Synthetic oligonucleotide
  Sense strand starting at position 2849 of SEQ ID NO: 1887249
aaaucaguaucucugggau

SEQ ID NO: 2458031 - RNA, 19 nt, Artificial Sequence
  Description of Artificial Sequence: Synthetic oligonucleotide
  Antisense strand to SEQ ID NO: 2458030
aucccagagauacugauuu

SEQ ID NO: 2458032 - RNA, 19 nt, Artificial Sequence
  Description of Artificial Sequence: Synthetic oligonucleotide
  Sense strand starting at position 2852 of SEQ ID NO: 1887249
ucaguaucucugggauagg

SEQ ID NO: 2458033 - RNA, 19 nt, Artificial Sequence
  Description of Artificial Sequence: Synthetic oligonucleotide
  Antisense strand to SEQ ID NO: 2458032
ccuaucccagagauacuga

SEQ ID NO: 2458034 - RNA, 19 nt, Artificial Sequence
  Description of Artificial Sequence: Synthetic oligonucleotide
  Sense strand starting at position 2855 of SEQ ID NO: 1887249
guaucucugggauaggcua

SEQ ID NO: 2458035 - RNA, 19 nt, Artificial Sequence
  Description of Artificial Sequence: Synthetic oligonucleotide
  Antisense strand to SEQ ID NO: 2458034
uagccuaucccagagauac

SEQ ID NO: 2458036 - RNA, 19 nt, Artificial Sequence
  Description of Artificial Sequence: Synthetic oligonucleotide
  Sense strand starting at position 2886 of SEQ ID NO: 1887249
guauuagguuaaccaaauc

SEQ ID NO: 2458037 - RNA, 19 nt, Artificial Sequence
  Description of Artificial Sequence: Synthetic oligonucleotide
  Antisense strand to SEQ ID NO: 2458036
gauuugguuaaccuaauac

SEQ ID NO: 2458038 - RNA, 19 nt, Artificial Sequence
  Description of Artificial Sequence: Synthetic oligonucleotide
  Sense strand starting at position 2903 of SEQ ID NO: 1887249
uccaauugccaauauucga

SEQ ID NO: 2458039 - RNA, 19 nt, Artificial Sequence
  Description of Artificial Sequence: Synthetic oligonucleotide
  Antisense strand to SEQ ID NO: 2458038
ucgaauauuggcaauugga

SEQ ID NO: 2458040 - RNA, 19 nt, Artificial Sequence
  Description of Artificial Sequence: Synthetic oligonucleotide
  Sense strand starting at position 3106 of SEQ ID NO: 1887249
ugaagacuugacugcaauc

SEQ ID NO: 2458041 - RNA, 19 nt, Artificial Sequence
  Description of Artificial Sequence: Synthetic oligonucleotide
  Antisense strand to SEQ ID NO: 2458040
gauugcagucaagucuuca

SEQ ID NO: 2458042 - RNA, 19 nt, Artificial Sequence
  Description of Artificial Sequence: Synthetic oligonucleotide
  Sense strand starting at position 3272 of SEQ ID NO: 1887249
ggagacauuucuuaacgaa

SEQ ID NO: 2458043 - RNA, 19 nt, Artificial Sequence
  Description of Artificial Sequence: Synthetic oligonucleotide
  Antisense strand to SEQ ID NO: 2458042
uucguuaagaaaugucucc

SEQ ID NO: 2458044 - RNA, 19 nt, Artificial Sequence
  Description of Artificial Sequence: Synthetic oligonucleotide
  Sense strand starting at position 3275 of SEQ ID NO: 1887249
gacauuucuuaacgaagga

SEQ ID NO: 2458045 - RNA, 19 nt, Artificial Sequence
  Description of Artificial Sequence: Synthetic oligonucleotide
  Antisense strand to SEQ ID NO: 2458044
uccuucguuaagaaauguc

SEQ ID NO: 2458046 - RNA, 19 nt, Artificial Sequence
  Description of Artificial Sequence: Synthetic oligonucleotide
  Sense strand starting at position 3279 of SEQ ID NO: 1887249
uuucuuaacgaaggaguuu

SEQ ID NO: 2458047 - RNA, 19 nt, Artificial Sequence
  Description of Artificial Sequence: Synthetic oligonucleotide
  Antisense strand to SEQ ID NO: 2458046
aaacuccuucguuaagaaa

SEQ ID NO: 2458048 - RNA, 19 nt, Artificial Sequence
  Description of Artificial Sequence: Synthetic oligonucleotide
  Sense strand starting at position 3290 of SEQ ID NO: 1887249
aggaguuuguuucugcauu

SEQ ID NO: 2458049 - RNA, 19 nt, Artificial Sequence
  Description of Artificial Sequence: Synthetic oligonucleotide
  Antisense strand to SEQ ID NO: 2458048
aaugcagaaacaaacuccu

SEQ ID NO: 2458050 - RNA, 19 nt, Artificial Sequence
  Description of Artificial Sequence: Synthetic oligonucleotide
  Sense strand starting at position 3292 of SEQ ID NO: 1887249
gaguuuguuucugcauuau

SEQ ID NO: 2458051 - RNA, 19 nt, Artificial Sequence
  Description of Artificial Sequence: Synthetic oligonucleotide
  Antisense strand to SEQ ID NO: 2458050
auaaugcagaaacaaacuc

SEQ ID NO: 2458052 - RNA, 19 nt, Artificial Sequence
  Description of Artificial Sequence: Synthetic oligonucleotide
  Sense strand starting at position 3298 of SEQ ID NO: 1887249
guuucugcauuaucaguuu

SEQ ID NO: 2458053 - RNA, 19 nt, Artificial Sequence
  Description of Artificial Sequence: Synthetic oligonucleotide
  Antisense strand to SEQ ID NO: 2458052
aaacugauaaugcagaaac

SEQ ID NO: 2458054 - RNA, 19 nt, Artificial Sequence
  Description of Artificial Sequence: Synthetic oligonucleotide
  Sense strand starting at position 3304 of SEQ ID NO: 1887249
gcauuaucaguuugcuuua

SEQ ID NO: 2458055 - RNA, 19 nt, Artificial Sequence
  Description of Artificial Sequence: Synthetic oligonucleotide
  Antisense strand to SEQ ID NO: 2458054
uaaagcaaacugauaaugc

SEQ ID NO: 2458056 - RNA, 19 nt, Artificial Sequence
  Description of Artificial Sequence: Synthetic oligonucleotide
  Sense strand starting at position 3326 of SEQ ID NO: 1887249
gcaguucuagguuaggacu

SEQ ID NO: 2458057 - RNA, 19 nt, Artificial Sequence
  Description of Artificial Sequence: Synthetic oligonucleotide
  Antisense strand to SEQ ID NO: 2458056
aguccuaaccuagaacugc

SEQ ID NO: 2458058 - RNA, 19 nt, Artificial Sequence
  Description of Artificial Sequence: Synthetic oligonucleotide
  Sense strand starting at position 3397 of SEQ ID NO: 1887249
acaugauaacguuacccua

SEQ ID NO: 2458059 - RNA, 19 nt, Artificial Sequence
  Description of Artificial Sequence: Synthetic oligonucleotide
  Antisense strand to SEQ ID NO: 2458058
uaggguaacguuaucaugu

SEQ ID NO: 2458060 - RNA, 19 nt, Artificial Sequence
  Description of Artificial Sequence: Synthetic oligonucleotide
  Sense strand starting at position 3399 of SEQ ID NO: 1887249
augauaacguuacccuaaa

SEQ ID NO: 2458061 - RNA, 19 nt, Artificial Sequence
  Description of Artificial Sequence: Synthetic oligonucleotide
  Antisense strand to SEQ ID NO: 2458060
uuuaggguaacguuaucau

SEQ ID NO: 2458062 - RNA, 19 nt, Artificial Sequence
  Description of Artificial Sequence: Synthetic oligonucleotide
  Sense strand starting at position 3453 of SEQ ID NO: 1887249
acgccaauuuccgugcauu

SEQ ID NO: 2458063 - RNA, 19 nt, Artificial Sequence
  Description of Artificial Sequence: Synthetic oligonucleotide
  Antisense strand to SEQ ID NO: 2458062
aaugcacggaaauuggcgu

SEQ ID NO: 2458064 - RNA, 19 nt, Artificial Sequence
  Description of Artificial Sequence: Synthetic oligonucleotide
  Sense strand starting at position 3454 of SEQ ID NO: 1887249
cgccaauuuccgugcauuc

SEQ ID NO: 2458065 - RNA, 19 nt, Artificial Sequence
  Description of Artificial Sequence: Synthetic oligonucleotide
  Antisense strand to SEQ ID NO: 2458064
gaaugcacggaaauuggcg

SEQ ID NO: 2458066 - RNA, 19 nt, Artificial Sequence
  Description of Artificial Sequence: Synthetic oligonucleotide
  Sense strand starting at position 3724 of SEQ ID NO: 1887249
ucgaauaagucuuccagua

SEQ ID NO: 2458067 - RNA, 19 nt, Artificial Sequence
  Description of Artificial Sequence: Synthetic oligonucleotide
  Antisense strand to SEQ ID NO: 2458066
uacuggaagacuuauucga

SEQ ID NO: 2458068 - RNA, 19 nt, Artificial Sequence
  Description of Artificial Sequence: Synthetic oligonucleotide
  Sense strand starting at position 77 of SEQ ID NO: 1887250
ugaccaagcugcuuaaagu

SEQ ID NO: 2458069 - RNA, 19 nt, Artificial Sequence
  Description of Artificial Sequence: Synthetic oligonucleotide
  Antisense strand to SEQ ID NO: 2458068
acuuuaagcagcuugguca

SEQ ID NO: 2458070 - RNA, 19 nt, Artificial Sequence
  Description of Artificial Sequence: Synthetic oligonucleotide
  Sense strand starting at position 78 of SEQ ID NO: 1887250
gaccaagcugcuuaaagua

SEQ ID NO: 2458071 - RNA, 19 nt, Artificial Sequence
  Description of Artificial Sequence: Synthetic oligonucleotide
  Antisense strand to SEQ ID NO: 2458070
uacuuuaagcagcuugguc

SEQ ID NO: 2458072 - RNA, 19 nt, Artificial Sequence
  Description of Artificial Sequence: Synthetic oligonucleotide
  Sense strand starting at position 117 of SEQ ID NO: 1887250
ggauaugagggccagugua

SEQ ID NO: 2458073 - RNA, 19 nt, Artificial Sequence
  Description of Artificial Sequence: Synthetic oligonucleotide
  Antisense strand to SEQ ID NO: 2458072
uacacuggcccucauaucc

SEQ ID NO: 2458074 - RNA, 19 nt, Artificial Sequence
  Description of Artificial Sequence: Synthetic oligonucleotide
  Sense strand starting at position 302 of SEQ ID NO: 1887250
cugucuguaagguggaaau

SEQ ID NO: 2458075 - RNA, 19 nt, Artificial Sequence
  Description of Artificial Sequence: Synthetic oligonucleotide
  Antisense strand to SEQ ID NO: 2458074
auuuccaccuuacagacag

SEQ ID NO: 2458076 - RNA, 19 nt, Artificial Sequence
  Description of Artificial Sequence: Synthetic oligonucleotide
  Sense strand starting at position 325 of SEQ ID NO: 1887250
ucaguuugcaaacgauaag

SEQ ID NO: 2458077 - RNA, 19 nt, Artificial Sequence
  Description of Artificial Sequence: Synthetic oligonucleotide
  Antisense strand to SEQ ID NO: 2458076
cuuaucguuugcaaacuga

SEQ ID NO: 2458078 - RNA, 19 nt, Artificial Sequence
  Description of Artificial Sequence: Synthetic oligonucleotide
  Sense strand starting at position 328 of SEQ ID NO: 1887250
guuugcaaacgauaagaaa

SEQ ID NO: 2458079 - RNA, 19 nt, Artificial Sequence
  Description of Artificial Sequence: Synthetic oligonucleotide
  Antisense strand to SEQ ID NO: 2458078
uuucuuaucguuugcaaac

SEQ ID NO: 2458080 - RNA, 19 nt, Artificial Sequence
  Description of Artificial Sequence: Synthetic oligonucleotide
  Sense strand starting at position 404 of SEQ ID NO: 1887250
uuccauauacugugagaca

SEQ ID NO: 2458081 - RNA, 19 nt, Artificial Sequence
  Description of Artificial Sequence: Synthetic oligonucleotide
  Antisense strand to SEQ ID NO: 2458080
ugucucacaguauauggaa

SEQ ID NO: 2458082 - RNA, 19 nt, Artificial Sequence
  Description of Artificial Sequence: Synthetic oligonucleotide
  Sense strand starting at position 416 of SEQ ID NO: 1887250
ugagacauuuguuaaguga

SEQ ID NO: 2458083 - RNA, 19 nt, Artificial Sequence
  Description of Artificial Sequence: Synthetic oligonucleotide
  Antisense strand to SEQ ID NO: 2458082
ucacuuaacaaaugucuca

SEQ ID NO: 2458084 - RNA, 19 nt, Artificial Sequence
  Description of Artificial Sequence: Synthetic oligonucleotide
  Sense strand starting at position 432 of SEQ ID NO: 1887250
ugacaucuauuguuuauca

SEQ ID NO: 2458085 - RNA, 19 nt, Artificial Sequence
  Description of Artificial Sequence: Synthetic oligonucleotide
  Antisense strand to SEQ ID NO: 2458084
ugauaaacaauagauguca

SEQ ID NO: 2458086 - RNA, 19 nt, Artificial Sequence
  Description of Artificial Sequence: Synthetic oligonucleotide
  Sense strand starting at position 481 of SEQ ID NO: 1887250
guuggauauuuaggauauu

SEQ ID NO: 2458087 - RNA, 19 nt, Artificial Sequence
  Description of Artificial Sequence: Synthetic oligonucleotide
  Antisense strand to SEQ ID NO: 2458086
aauauccuaaauauccaac

SEQ ID NO: 2458088 - RNA, 19 nt, Artificial Sequence
  Description of Artificial Sequence: Synthetic oligonucleotide
  Sense strand starting at position 491 of SEQ ID NO: 1887250
uaggauauuugaggauauu

SEQ ID NO: 2458089 - RNA, 19 nt, Artificial Sequence
  Description of Artificial Sequence: Synthetic oligonucleotide
  Antisense strand to SEQ ID NO: 2458088
aauauccucaaauauccua

SEQ ID NO: 2458090 - RNA, 19 nt, Artificial Sequence
  Description of Artificial Sequence: Synthetic oligonucleotide
  Sense strand starting at position 500 of SEQ ID NO: 1887250
ugaggauauuccuuuauga

SEQ ID NO: 2458091 - RNA, 19 nt, Artificial Sequence
  Description of Artificial Sequence: Synthetic oligonucleotide
  Antisense strand to SEQ ID NO: 2458090
ucauaaaggaauauccuca

SEQ ID NO: 2458092 - RNA, 19 nt, Artificial Sequence
  Description of Artificial Sequence: Synthetic oligonucleotide
  Sense strand starting at position 502 of SEQ ID NO: 1887250
aggauauuccuuuaugagc

SEQ ID NO: 2458093 - RNA, 19 nt, Artificial Sequence
  Description of Artificial Sequence: Synthetic oligonucleotide
  Antisense strand to SEQ ID NO: 2458092
gcucauaaaggaauauccu

SEQ ID NO: 2458094 - RNA, 19 nt, Artificial Sequence
  Description of Artificial Sequence: Synthetic oligonucleotide
  Sense strand starting at position 565 of SEQ ID NO: 1887250
uugaguguuacagagagua

SEQ ID NO: 2458095 - RNA, 19 nt, Artificial Sequence
  Description of Artificial Sequence: Synthetic oligonucleotide
  Antisense strand to SEQ ID NO: 2458094
uacucucuguaacacucaa

SEQ ID NO: 2458096 - RNA, 19 nt, Artificial Sequence
  Description of Artificial Sequence: Synthetic oligonucleotide
  Sense strand starting at position 567 of SEQ ID NO: 1887250
gaguguuacagagaguagu

SEQ ID NO: 2458097 - RNA, 19 nt, Artificial Sequence
  Description of Artificial Sequence: Synthetic oligonucleotide
  Antisense strand to SEQ ID NO: 2458096
acuacucucuguaacacuc

SEQ ID NO: 2458098 - RNA, 19 nt, Artificial Sequence
  Description of Artificial Sequence: Synthetic oligonucleotide
  Sense strand starting at position 573 of SEQ ID NO: 1887250
uacagagaguagucugaag

SEQ ID NO: 2458099 - RNA, 19 nt, Artificial Sequence
  Description of Artificial Sequence: Synthetic oligonucleotide
  Antisense strand to SEQ ID NO: 2458098
cuucagacuacucucugua

SEQ ID NO: 2458100 - RNA, 19 nt, Artificial Sequence
  Description of Artificial Sequence: Synthetic oligonucleotide
  Sense strand starting at position 575 of SEQ ID NO: 1887250
cagagaguagucugaagau

SEQ ID NO: 2458101 - RNA, 19 nt, Artificial Sequence
  Description of Artificial Sequence: Synthetic oligonucleotide
  Antisense strand to SEQ ID NO: 2458100
aucuucagacuacucucug

SEQ ID NO: 2458102 - RNA, 19 nt, Artificial Sequence
  Description of Artificial Sequence: Synthetic oligonucleotide
  Sense strand starting at position 653 of SEQ ID NO: 1887250
uguguaaagaaaggauauu

SEQ ID NO: 2458103 - RNA, 19 nt, Artificial Sequence
  Description of Artificial Sequence: Synthetic oligonucleotide
  Antisense strand to SEQ ID NO: 2458102
aauauccuuucuuuacaca

SEQ ID NO: 2458104 - RNA, 19 nt, Artificial Sequence
  Description of Artificial Sequence: Synthetic oligonucleotide
  Sense strand starting at position 693 of SEQ ID NO: 1887250
cugcuaagaguuugcuaaa

SEQ ID NO: 2458105 - RNA, 19 nt, Artificial Sequence
  Description of Artificial Sequence: Synthetic oligonucleotide
  Antisense strand to SEQ ID NO: 2458104
uuuagcaaacucuuagcag

SEQ ID NO: 2458106 - RNA, 19 nt, Artificial Sequence
  Description of Artificial Sequence: Synthetic oligonucleotide
  Sense strand starting at position 694 of SEQ ID NO: 1887250
ugcuaagaguuugcuaaag

SEQ ID NO: 2458107 - RNA, 19 nt, Artificial Sequence
  Description of Artificial Sequence: Synthetic oligonucleotide
  Antisense strand to SEQ ID NO: 2458106
cuuuagcaaacucuuagca

SEQ ID NO: 2458108 - RNA, 19 nt, Artificial Sequence
  Description of Artificial Sequence: Synthetic oligonucleotide
  Sense strand starting at position 991 of SEQ ID NO: 1887250
uuaaguugccuauguagga

SEQ ID NO: 2458109 - RNA, 19 nt, Artificial Sequence
  Description of Artificial Sequence: Synthetic oligonucleotide
  Antisense strand to SEQ ID NO: 2458108
uccuacauaggcaacuuaa

SEQ ID NO: 2458110 - RNA, 19 nt, Artificial Sequence
  Description of Artificial Sequence: Synthetic oligonucleotide
  Sense strand starting at position 1008 of SEQ ID NO: 1887250
gagcauuuaugccauugga

SEQ ID NO: 2458111 - RNA, 19 nt, Artificial Sequence
  Description of Artificial Sequence: Synthetic oligonucleotide
  Antisense strand to SEQ ID NO: 2458110
uccaauggcauaaaugcuc

SEQ ID NO: 2458112 - RNA, 19 nt, Artificial Sequence
  Description of Artificial Sequence: Synthetic oligonucleotide
  Sense strand starting at position 1016 of SEQ ID NO: 1887250
augccauuggauugguaga

SEQ ID NO: 2458113 - RNA, 19 nt, Artificial Sequence
  Description of Artificial Sequence: Synthetic oligonucleotide
  Antisense strand to SEQ ID NO: 2458112
ucuaccaauccaauggcau

SEQ ID NO: 2458114 - RNA, 19 nt, Artificial Sequence
  Description of Artificial Sequence: Synthetic oligonucleotide
  Sense strand starting at position 1018 of SEQ ID NO: 1887250
gccauuggauugguagacu

SEQ ID NO: 2458115 - RNA, 19 nt, Artificial Sequence
  Description of Artificial Sequence: Synthetic oligonucleotide
  Antisense strand to SEQ ID NO: 2458114
agucuaccaauccaauggc

SEQ ID NO: 2458116 - RNA, 19 nt, Artificial Sequence
  Description of Artificial Sequence: Synthetic oligonucleotide
  Sense strand starting at position 1098 of SEQ ID NO: 1887250
agagccucugcugacauaa

SEQ ID NO: 2458117 - RNA, 19 nt, Artificial Sequence
  Description of Artificial Sequence: Synthetic oligonucleotide
  Antisense strand to SEQ ID NO: 2458116
uuaugucagcagaggcucu

SEQ ID NO: 2458118 - RNA, 19 nt, Artificial Sequence
  Description of Artificial Sequence: Synthetic oligonucleotide
  Sense strand starting at position 1230 of SEQ ID NO: 1887250
cauuuaugauguuaguuga

SEQ ID NO: 2458119 - RNA, 19 nt, Artificial Sequence
  Description of Artificial Sequence: Synthetic oligonucleotide
  Antisense strand to SEQ ID NO: 2458118
ucaacuaacaucauaaaug

SEQ ID NO: 2458120 - RNA, 19 nt, Artificial Sequence
  Description of Artificial Sequence: Synthetic oligonucleotide
  Sense strand starting at position 1233 of SEQ ID NO: 1887250
uuaugauguuaguugagac

SEQ ID NO: 2458121 - RNA, 19 nt, Artificial Sequence
  Description of Artificial Sequence: Synthetic oligonucleotide
  Antisense strand to SEQ ID NO: 2458120
gucucaacuaacaucauaa

SEQ ID NO: 2458122 - RNA, 19 nt, Artificial Sequence
  Description of Artificial Sequence: Synthetic oligonucleotide
  Sense strand starting at position 1337 of SEQ ID NO: 1887250
agcaaauaucaugguuaau

SEQ ID NO: 2458123 - RNA, 19 nt, Artificial Sequence
  Description of Artificial Sequence: Synthetic oligonucleotide
  Antisense strand to SEQ ID NO: 2458122
auuaaccaugauauuugcu

SEQ ID NO: 2458124 - RNA, 19 nt, Artificial Sequence
  Description of Artificial Sequence: Synthetic oligonucleotide
  Sense strand starting at position 1737 of SEQ ID NO: 1887250
uguaguccuccaugaagaa

SEQ ID NO: 2458125 - RNA, 19 nt, Artificial Sequence
  Description of Artificial Sequence: Synthetic oligonucleotide
  Antisense strand to SEQ ID NO: 2458124
uucuucauggaggacuaca

SEQ ID NO: 2458126 - RNA, 19 nt, Artificial Sequence
  Description of Artificial Sequence: Synthetic oligonucleotide
  Sense strand starting at position 1738 of SEQ ID NO: 1887250
guaguccuccaugaagaau

SEQ ID NO: 2458127 - RNA, 19 nt, Artificial Sequence
  Description of Artificial Sequence: Synthetic oligonucleotide
  Antisense strand to SEQ ID NO: 2458126
auucuucauggaggacuac

SEQ ID NO: 2458128 - RNA, 19 nt, Artificial Sequence
  Description of Artificial Sequence: Synthetic oligonucleotide
  Sense strand starting at position 1794 of SEQ ID NO: 1887250
acaugagaauaucaguaau

SEQ ID NO: 2458129 - RNA, 19 nt, Artificial Sequence
  Description of Artificial Sequence: Synthetic oligonucleotide
  Antisense strand to SEQ ID NO: 2458128
auuacugauauucucaugu

SEQ ID NO: 2458130 - RNA, 19 nt, Artificial Sequence
  Description of Artificial Sequence: Synthetic oligonucleotide
  Sense strand starting at position 1900 of SEQ ID NO: 1887250
agaaucagcucagagagaa

SEQ ID NO: 2458131 - RNA, 19 nt, Artificial Sequence
  Description of Artificial Sequence: Synthetic oligonucleotide
  Antisense strand to SEQ ID NO: 2458130
uucucucugagcugauucu

SEQ ID NO: 2458132 - RNA, 19 nt, Artificial Sequence
  Description of Artificial Sequence: Synthetic oligonucleotide
  Sense strand starting at position 2641 of SEQ ID NO: 1887250
acaagagucucgguauguu

SEQ ID NO: 2458133 - RNA, 19 nt, Artificial Sequence
  Description of Artificial Sequence: Synthetic oligonucleotide
  Antisense strand to SEQ ID NO: 2458132
aacauaccgagacucuugu

SEQ ID NO: 2458134 - RNA, 19 nt, Artificial Sequence
  Description of Artificial Sequence: Synthetic oligonucleotide
  Sense strand starting at position 3063 of SEQ ID NO: 1887250
uacuguaccuggccuagaa

SEQ ID NO: 2458135 - RNA, 19 nt, Artificial Sequence
  Description of Artificial Sequence: Synthetic oligonucleotide
  Antisense strand to SEQ ID NO: 2458134
uucuaggccagguacagua

SEQ ID NO: 2458136 - RNA, 19 nt, Artificial Sequence
  Description of Artificial Sequence: Synthetic oligonucleotide
  Sense strand starting at position 3524 of SEQ ID NO: 1887250
ggaaauuaacugcagagcu

SEQ ID NO: 2458137 - RNA, 19 nt, Artificial Sequence
  Description of Artificial Sequence: Synthetic oligonucleotide
  Antisense strand to SEQ ID NO: 2458136
agcucugcaguuaauuucc

SEQ ID NO: 2458138 - RNA, 19 nt, Artificial Sequence
  Description of Artificial Sequence: Synthetic oligonucleotide
  Sense strand starting at position 3550 of SEQ ID NO: 1887250
gaacuugagguaugauuac

SEQ ID NO: 2458139 - RNA, 19 nt, Artificial Sequence
  Description of Artificial Sequence: Synthetic oligonucleotide
  Antisense strand to SEQ ID NO: 2458138
guaaucauaccucaaguuc

SEQ ID NO: 2458140 - RNA, 19 nt, Artificial Sequence
  Description of Artificial Sequence: Synthetic oligonucleotide
  Sense strand starting at position 3556 of SEQ ID NO: 1887250
gagguaugauuaccagauu

SEQ ID NO: 2458141 - RNA, 19 nt, Artificial Sequence
  Description of Artificial Sequence: Synthetic oligonucleotide
  Antisense strand to SEQ ID NO: 2458140
aaucugguaaucauaccuc

SEQ ID NO: 2458142 - RNA, 19 nt, Artificial Sequence
  Description of Artificial Sequence: Synthetic oligonucleotide
  Sense strand starting at position 3557 of SEQ ID NO: 1887250
agguaugauuaccagauuu

SEQ ID NO: 2458143 - RNA, 19 nt, Artificial Sequence
  Description of Artificial Sequence: Synthetic oligonucleotide
  Antisense strand to SEQ ID NO: 2458142
aaaucugguaaucauaccu

SEQ ID NO: 2458144 - RNA, 19 nt, Artificial Sequence
  Description of Artificial Sequence: Synthetic oligonucleotide
  Sense strand starting at position 3628 of SEQ ID NO: 1887250
guacuaccuuuagauuuac

SEQ ID NO: 2458145 - RNA, 19 nt, Artificial Sequence
  Description of Artificial Sequence: Synthetic oligonucleotide
  Antisense strand to SEQ ID NO: 2458144
guaaaucuaaagguaguac

SEQ ID NO: 2458146 - RNA, 19 nt, Artificial Sequence
  Description of Artificial Sequence: Synthetic oligonucleotide
  Sense strand starting at position 3676 of SEQ ID NO: 1887250
gggcaaagcauggguaauu

SEQ ID NO: 2458147 - RNA, 19 nt, Artificial Sequence
  Description of Artificial Sequence: Synthetic oligonucleotide
  Antisense strand to SEQ ID NO: 2458146
aauuacccaugcuuugccc

SEQ ID NO: 2458148 - RNA, 19 nt, Artificial Sequence
  Description of Artificial Sequence: Synthetic oligonucleotide
  Sense strand starting at position 628 of SEQ ID NO: 1887251
guucuaaugccacaagugu

SEQ ID NO: 2458149 - RNA, 19 nt, Artificial Sequence
  Description of Artificial Sequence: Synthetic oligonucleotide
  Antisense strand to SEQ ID NO: 2458148
acacuuguggcauuagaac

SEQ ID NO: 2458150 - RNA, 19 nt, Artificial Sequence
  Description of Artificial Sequence: Synthetic oligonucleotide
  Sense strand starting at position 636 of SEQ ID NO: 1887251
gccacaaguguugggauua

SEQ ID NO: 2458151 - RNA, 19 nt, Artificial Sequence
  Description of Artificial Sequence: Synthetic oligonucleotide
  Antisense strand to SEQ ID NO: 2458150
uaaucccaacacuuguggc

SEQ ID NO: 2458152 - RNA, 19 nt, Artificial Sequence
  Description of Artificial Sequence: Synthetic oligonucleotide
  Sense strand starting at position 775 of SEQ ID NO: 1887251
gaaguugcaucacugggau

SEQ ID NO: 2458153 - RNA, 19 nt, Artificial Sequence
  Description of Artificial Sequence: Synthetic oligonucleotide
  Antisense strand to SEQ ID NO: 2458152
aucccagugaugcaacuuc

SEQ ID NO: 2458154 - RNA, 19 nt, Artificial Sequence
  Description of Artificial Sequence: Synthetic oligonucleotide
  Sense strand starting at position 833 of SEQ ID NO: 1887251
uggcucuuaagccagagua

SEQ ID NO: 2458155 - RNA, 19 nt, Artificial Sequence
  Description of Artificial Sequence: Synthetic oligonucleotide
  Antisense strand to SEQ ID NO: 2458154
uacucuggcuuaagagcca

SEQ ID NO: 2458156 - RNA, 19 nt, Artificial Sequence
  Description of Artificial Sequence: Synthetic oligonucleotide
  Sense strand starting at position 835 of SEQ ID NO: 1887251
gcucuuaagccagaguacu

SEQ ID NO: 2458157 - RNA, 19 nt, Artificial Sequence
  Description of Artificial Sequence: Synthetic oligonucleotide
  Antisense strand to SEQ ID NO: 2458156
aguacucuggcuuaagagc

SEQ ID NO: 2458158 - RNA, 19 nt, Artificial Sequence
  Description of Artificial Sequence: Synthetic oligonucleotide
  Sense strand starting at position 1220 of SEQ ID NO: 1887251
cuaauuaaugguggagugu

SEQ ID NO: 2458159 - RNA, 19 nt, Artificial Sequence
  Description of Artificial Sequence: Synthetic oligonucleotide
  Antisense strand to SEQ ID NO: 2458158
acacuccaccauuaauuag

SEQ ID NO: 2458160 - RNA, 19 nt, Artificial Sequence
  Description of Artificial Sequence: Synthetic oligonucleotide
  Sense strand starting at position 1221 of SEQ ID NO: 1887251
uaauuaaugguggagugua

SEQ ID NO: 2458161 - RNA, 19 nt, Artificial Sequence
  Description of Artificial Sequence: Synthetic oligonucleotide
  Antisense strand to SEQ ID NO: 2458160
uacacuccaccauuaauua

SEQ ID NO: 2458162 - RNA, 19 nt, Artificial Sequence
  Description of Artificial Sequence: Synthetic oligonucleotide
  Sense strand starting at position 1272 of SEQ ID NO: 1887251
accaaugacuggcauuuaa

SEQ ID NO: 2458163 - RNA, 19 nt, Artificial Sequence
  Description of Artificial Sequence: Synthetic oligonucleotide
  Antisense strand to SEQ ID NO: 2458162
uuaaaugccagucauuggu

SEQ ID NO: 2458164 - RNA, 19 nt, Artificial Sequence
  Description of Artificial Sequence: Synthetic oligonucleotide
  Sense strand starting at position 1531 of SEQ ID NO: 1887251
agaucugcacuuuggcaua

SEQ ID NO: 2458165 - RNA, 19 nt, Artificial Sequence
  Description of Artificial Sequence: Synthetic oligonucleotide
  Antisense strand to SEQ ID NO: 2458164
uaugccaaagugcagaucu

SEQ ID NO: 2458166 - RNA, 19 nt, Artificial Sequence
  Description of Artificial Sequence: Synthetic oligonucleotide
  Sense strand starting at position 1536 of SEQ ID NO: 1887251
ugcacuuuggcauaaacuu

SEQ ID NO: 2458167 - RNA, 19 nt, Artificial Sequence
  Description of Artificial Sequence: Synthetic oligonucleotide
  Antisense strand to SEQ ID NO: 2458166
aaguuuaugccaaagugca

SEQ ID NO: 2458168 - RNA, 19 nt, Artificial Sequence
  Description of Artificial Sequence: Synthetic oligonucleotide
  Sense strand starting at position 1932 of SEQ ID NO: 1887251
gagauugcaucacugagau

SEQ ID NO: 2458169 - RNA, 19 nt, Artificial Sequence
  Description of Artificial Sequence: Synthetic oligonucleotide
  Antisense strand to SEQ ID NO: 2458168
aucucagugaugcaaucuc

SEQ ID NO: 2458170 - RNA, 19 nt, Artificial Sequence
  Description of Artificial Sequence: Synthetic oligonucleotide
  Sense strand starting at position 2035 of SEQ ID NO: 1887251
uuugcaucccaaugagcaa

SEQ ID NO: 2458171 - RNA, 19 nt, Artificial Sequence
  Description of Artificial Sequence: Synthetic oligonucleotide
  Antisense strand to SEQ ID NO: 2458170
uugcucauugggaugcaaa

SEQ ID NO: 2458172 - RNA, 19 nt, Artificial Sequence
  Description of Artificial Sequence: Synthetic oligonucleotide
  Sense strand starting at position 2179 of SEQ ID NO: 1887251
aaggguguuccuugccuga

SEQ ID NO: 2458173 - RNA, 19 nt, Artificial Sequence
  Description of Artificial Sequence: Synthetic oligonucleotide
  Antisense strand to SEQ ID NO: 2458172
ucaggcaaggaacacccuu

SEQ ID NO: 2458174 - RNA, 19 nt, Artificial Sequence
  Description of Artificial Sequence: Synthetic oligonucleotide
  Sense strand starting at position 2181 of SEQ ID NO: 1887251
ggguguuccuugccugaag

SEQ ID NO: 2458175 - RNA, 19 nt, Artificial Sequence
  Description of Artificial Sequence: Synthetic oligonucleotide
  Antisense strand to SEQ ID NO: 2458174
cuucaggcaaggaacaccc

SEQ ID NO: 2458176 - RNA, 19 nt, Artificial Sequence
  Description of Artificial Sequence: Synthetic oligonucleotide
  Sense strand starting at position 2272 of SEQ ID NO: 1887251
gaaagcaaucauggaguua

SEQ ID NO: 2458177 - RNA, 19 nt, Artificial Sequence
  Description of Artificial Sequence: Synthetic oligonucleotide
  Antisense strand to SEQ ID NO: 2458176
uaacuccaugauugcuuuc

SEQ ID NO: 2458178 - RNA, 19 nt, Artificial Sequence
  Description of Artificial Sequence: Synthetic oligonucleotide
  Sense strand starting at position 2310 of SEQ ID NO: 1887251
cgaggaagcuuucuccaaa

SEQ ID NO: 2458179 - RNA, 19 nt, Artificial Sequence
  Description of Artificial Sequence: Synthetic oligonucleotide
  Antisense strand to SEQ ID NO: 2458178
uuuggagaaagcuuccucg

SEQ ID NO: 2458180 - RNA, 19 nt, Artificial Sequence
  Description of Artificial Sequence: Synthetic oligonucleotide
  Sense strand starting at position 2313 of SEQ ID NO: 1887251
ggaagcuuucuccaaauau

SEQ ID NO: 2458181 - RNA, 19 nt, Artificial Sequence
  Description of Artificial Sequence: Synthetic oligonucleotide
  Antisense strand to SEQ ID NO: 2458180
auauuuggagaaagcuucc

SEQ ID NO: 2458182 - RNA, 19 nt, Artificial Sequence
  Description of Artificial Sequence: Synthetic oligonucleotide
  Sense strand starting at position 2329 of SEQ ID NO: 1887251
uauguugagucucucagau

SEQ ID NO: 2458183 - RNA, 19 nt, Artificial Sequence
  Description of Artificial Sequence: Synthetic oligonucleotide
  Antisense strand to SEQ ID NO: 2458182
aucugagagacucaacaua

SEQ ID NO: 2458184 - RNA, 19 nt, Artificial Sequence
  Description of Artificial Sequence: Synthetic oligonucleotide
  Sense strand starting at position 2426 of SEQ ID NO: 1887251
accucuuuguucccaguau

SEQ ID NO: 2458185 - RNA, 19 nt, Artificial Sequence
  Description of Artificial Sequence: Synthetic oligonucleotide
  Antisense strand to SEQ ID NO: 2458184
auacugggaacaaagaggu

SEQ ID NO: 2458186 - RNA, 19 nt, Artificial Sequence
  Description of Artificial Sequence: Synthetic oligonucleotide
  Sense strand starting at position 2430 of SEQ ID NO: 1887251
cuuuguucccaguaucauu

SEQ ID NO: 2458187 - RNA, 19 nt, Artificial Sequence
  Description of Artificial Sequence: Synthetic oligonucleotide
  Antisense strand to SEQ ID NO: 2458186
aaugauacugggaacaaag

SEQ ID NO: 2458188 - RNA, 19 nt, Artificial Sequence
  Description of Artificial Sequence: Synthetic oligonucleotide
  Sense strand starting at position 2623 of SEQ ID NO: 1887251
uuccuaguguuaguaaagu

SEQ ID NO: 2458189 - RNA, 19 nt, Artificial Sequence
  Description of Artificial Sequence: Synthetic oligonucleotide
  Antisense strand to SEQ ID NO: 2458188
acuuuacuaacacuaggaa

SEQ ID NO: 2458190 - RNA, 19 nt, Artificial Sequence
  Description of Artificial Sequence: Synthetic oligonucleotide
  Sense strand starting at position 2697 of SEQ ID NO: 1887251
uggagauguccggaagcuc

SEQ ID NO: 2458191 - RNA, 19 nt, Artificial Sequence
  Description of Artificial Sequence: Synthetic oligonucleotide
  Antisense strand to SEQ ID NO: 2458190
gagcuuccggacaucucca

SEQ ID NO: 2458192 - RNA, 19 nt, Artificial Sequence
  Description of Artificial Sequence: Synthetic oligonucleotide
  Sense strand starting at position 2714 of SEQ ID NO: 1887251
ucuuaaggccucuguauuu

SEQ ID NO: 2458193 - RNA, 19 nt, Artificial Sequence
  Description of Artificial Sequence: Synthetic oligonucleotide
  Antisense strand to SEQ ID NO: 2458192
aaauacagaggccuuaaga

SEQ ID NO: 2458194 - RNA, 19 nt, Artificial Sequence
  Description of Artificial Sequence: Synthetic oligonucleotide
  Sense strand starting at position 2721 of SEQ ID NO: 1887251
gccucuguauuucugaaau

SEQ ID NO: 2458195 - RNA, 19 nt, Artificial Sequence
  Description of Artificial Sequence: Synthetic oligonucleotide
  Antisense strand to SEQ ID NO: 2458194
auuucagaaauacagaggc

SEQ ID NO: 2458196 - RNA, 19 nt, Artificial Sequence
  Description of Artificial Sequence: Synthetic oligonucleotide
  Sense strand starting at position 2771 of SEQ ID NO: 1887251
gucagauuuauauggugcu

SEQ ID NO: 2458197 - RNA, 19 nt, Artificial Sequence
  Description of Artificial Sequence: Synthetic oligonucleotide
  Antisense strand to SEQ ID NO: 2458196
agcaccauauaaaucugac

SEQ ID NO: 2458198 - RNA, 19 nt, Artificial Sequence
  Description of Artificial Sequence: Synthetic oligonucleotide
  Sense strand starting at position 2794 of SEQ ID NO: 1887251
agacucaagucacugcuaa

SEQ ID NO: 2458199 - RNA, 19 nt, Artificial Sequence
  Description of Artificial Sequence: Synthetic oligonucleotide
  Antisense strand to SEQ ID NO: 2458198
uuagcagugacuugagucu

SEQ ID NO: 2458200 - RNA, 19 nt, Artificial Sequence
  Description of Artificial Sequence: Synthetic oligonucleotide
  Sense strand starting at position 2890 of SEQ ID NO: 1887251
cuccgaacagcuuauaaca

SEQ ID NO: 2458201 - RNA, 19 nt, Artificial Sequence
  Description of Artificial Sequence: Synthetic oligonucleotide
  Antisense strand to SEQ ID NO: 2458200
uguuauaagcuguucggag

SEQ ID NO: 2458202 - RNA, 19 nt, Artificial Sequence
  Description of Artificial Sequence: Synthetic oligonucleotide
  Sense strand starting at position 2956 of SEQ ID NO: 1887251
uugguaauggccugauaca

SEQ ID NO: 2458203 - RNA, 19 nt, Artificial Sequence
  Description of Artificial Sequence: Synthetic oligonucleotide
  Antisense strand to SEQ ID NO: 2458202
uguaucaggccauuaccaa

SEQ ID NO: 2458204 - RNA, 19 nt, Artificial Sequence
  Description of Artificial Sequence: Synthetic oligonucleotide
  Sense strand starting at position 2957 of SEQ ID NO: 1887251
ugguaauggccugauacag

SEQ ID NO: 2458205 - RNA, 19 nt, Artificial Sequence
  Description of Artificial Sequence: Synthetic oligonucleotide
  Antisense strand to SEQ ID NO: 2458204
cuguaucaggccauuacca

SEQ ID NO: 2458206 - RNA, 19 nt, Artificial Sequence
  Description of Artificial Sequence: Synthetic oligonucleotide
  Sense strand starting at position 3097 of SEQ ID NO: 1887251
ccuccuuguugagugaguu

SEQ ID NO: 2458207 - RNA, 19 nt, Artificial Sequence
  Description of Artificial Sequence: Synthetic oligonucleotide
  Antisense strand to SEQ ID NO: 2458206
aacucacucaacaaggagg

SEQ ID NO: 2458208 - RNA, 19 nt, Artificial Sequence
  Description of Artificial Sequence: Synthetic oligonucleotide
  Sense strand starting at position 3101 of SEQ ID NO: 1887251
cuuguugagugaguucuca

SEQ ID NO: 2458209 - RNA, 19 nt, Artificial Sequence
  Description of Artificial Sequence: Synthetic oligonucleotide
  Antisense strand to SEQ ID NO: 2458208
ugagaacucacucaacaag

SEQ ID NO: 2458210 - RNA, 19 nt, Artificial Sequence
  Description of Artificial Sequence: Synthetic oligonucleotide
  Sense strand starting at position 3122 of SEQ ID NO: 1887251
agaucuaguuguuuaaagu

SEQ ID NO: 2458211 - RNA, 19 nt, Artificial Sequence
  Description of Artificial Sequence: Synthetic oligonucleotide
  Antisense strand to SEQ ID NO: 2458210
acuuuaaacaacuagaucu

SEQ ID NO: 2458212 - RNA, 19 nt, Artificial Sequence
  Description of Artificial Sequence: Synthetic oligonucleotide
  Sense strand starting at position 3123 of SEQ ID NO: 1887251
gaucuaguuguuuaaagug

SEQ ID NO: 2458213 - RNA, 19 nt, Artificial Sequence
  Description of Artificial Sequence: Synthetic oligonucleotide
  Antisense strand to SEQ ID NO: 2458212
cacuuuaaacaacuagauc

SEQ ID NO: 2458214 - RNA, 19 nt, Artificial Sequence
  Description of Artificial Sequence: Synthetic oligonucleotide
  Sense strand starting at position 3635 of SEQ ID NO: 1887251
ccauuucccguauguaugu

SEQ ID NO: 2458215 - RNA, 19 nt, Artificial Sequence
  Description of Artificial Sequence: Synthetic oligonucleotide
  Antisense strand to SEQ ID NO: 2458214
acauacauacgggaaaugg

SEQ ID NO: 2458216 - RNA, 19 nt, Artificial Sequence
  Description of Artificial Sequence: Synthetic oligonucleotide
  Sense strand starting at position 3713 of SEQ ID NO: 1887251
uuugcaucacagugacaca

SEQ ID NO: 2458217 - RNA, 19 nt, Artificial Sequence
  Description of Artificial Sequence: Synthetic oligonucleotide
  Antisense strand to SEQ ID NO: 2458216
ugugucacugugaugcaaa

SEQ ID NO: 2458218 - RNA, 19 nt, Artificial Sequence
  Description of Artificial Sequence: Synthetic oligonucleotide
  Sense strand starting at position 3770 of SEQ ID NO: 1887251
uagauuuguugauagacuu

SEQ ID NO: 2458219 - RNA, 19 nt, Artificial Sequence
  Description of Artificial Sequence: Synthetic oligonucleotide
  Antisense strand to SEQ ID NO: 2458218
aagucuaucaacaaaucua

SEQ ID NO: 2458220 - RNA, 19 nt, Artificial Sequence
  Description of Artificial Sequence: Synthetic oligonucleotide
  Sense strand starting at position 3776 of SEQ ID NO: 1887251
uguugauagacuuguugac

SEQ ID NO: 2458221 - RNA, 19 nt, Artificial Sequence
  Description of Artificial Sequence: Synthetic oligonucleotide
  Antisense strand to SEQ ID NO: 2458220
gucaacaagucuaucaaca

SEQ ID NO: 2458222 - RNA, 19 nt, Artificial Sequence
  Description of Artificial Sequence: Synthetic oligonucleotide
  Sense strand starting at position 3778 of SEQ ID NO: 1887251
uugauagacuuguugacua

SEQ ID NO: 2458223 - RNA, 19 nt, Artificial Sequence
  Description of Artificial Sequence: Synthetic oligonucleotide
  Antisense strand to SEQ ID NO: 2458222
uagucaacaagucuaucaa

SEQ ID NO: 2458224 - RNA, 19 nt, Artificial Sequence
  Description of Artificial Sequence: Synthetic oligonucleotide
  Sense strand starting at position 3783 of SEQ ID NO: 1887251
agacuuguugacuaaccga

SEQ ID NO: 2458225 - RNA, 19 nt, Artificial Sequence
  Description of Artificial Sequence: Synthetic oligonucleotide
  Antisense strand to SEQ ID NO: 2458224
ucgguuagucaacaagucu

SEQ ID NO: 2458226 - RNA, 19 nt, Artificial Sequence
  Description of Artificial Sequence: Synthetic oligonucleotide
  Sense strand starting at position 3786 of SEQ ID NO: 1887251
cuuguugacuaaccgaauu

SEQ ID NO: 2458227 - RNA, 19 nt, Artificial Sequence
  Description of Artificial Sequence: Synthetic oligonucleotide
  Antisense strand to SEQ ID NO: 2458226
aauucgguuagucaacaag

SEQ ID NO: 2458228 - RNA, 19 nt, Artificial Sequence
  Description of Artificial Sequence: Synthetic oligonucleotide
  Sense strand starting at position 184 of SEQ ID NO: 1887252
gugacagaguuggacucua

SEQ ID NO: 2458229 - RNA, 19 nt, Artificial Sequence
  Description of Artificial Sequence: Synthetic oligonucleotide
  Antisense strand to SEQ ID NO: 2458228
uagaguccaacucugucac

SEQ ID NO: 2458230 - RNA, 19 nt, Artificial Sequence
  Description of Artificial Sequence: Synthetic oligonucleotide
  Sense strand starting at position 368 of SEQ ID NO: 1887252
agaucuaguuuagagcaaa

SEQ ID NO: 2458231 - RNA, 19 nt, Artificial Sequence
  Description of Artificial Sequence: Synthetic oligonucleotide
  Antisense strand to SEQ ID NO: 2458230
uuugcucuaaacuagaucu

SEQ ID NO: 2458232 - RNA, 19 nt, Artificial Sequence
  Description of Artificial Sequence: Synthetic oligonucleotide
  Sense strand starting at position 412 of SEQ ID NO: 1887252
cccguagaagcucaaauaa

SEQ ID NO: 2458233 - RNA, 19 nt, Artificial Sequence
  Description of Artificial Sequence: Synthetic oligonucleotide
  Antisense strand to SEQ ID NO: 2458232
uuauuugagcuucuacggg

SEQ ID NO: 2458234 - RNA, 19 nt, Artificial Sequence
  Description of Artificial Sequence: Synthetic oligonucleotide
  Sense strand starting at position 423 of SEQ ID NO: 1887252
ucaaauaaguaucaguaca

SEQ ID NO: 2458235 - RNA, 19 nt, Artificial Sequence
  Description of Artificial Sequence: Synthetic oligonucleotide
  Antisense strand to SEQ ID NO: 2458234
uguacugauacuuauuuga

SEQ ID NO: 2458236 - RNA, 19 nt, Artificial Sequence
  Description of Artificial Sequence: Synthetic oligonucleotide
  Sense strand starting at position 1148 of SEQ ID NO: 1887252
acuccuggucuuggugaaa

SEQ ID NO: 2458237 - RNA, 19 nt, Artificial Sequence
  Description of Artificial Sequence: Synthetic oligonucleotide
  Antisense strand to SEQ ID NO: 2458236
uuucaccaagaccaggagu

SEQ ID NO: 2458238 - RNA, 19 nt, Artificial Sequence
  Description of Artificial Sequence: Synthetic oligonucleotide
  Sense strand starting at position 1788 of SEQ ID NO: 1887252
guucuaaugccacaagugu

SEQ ID NO: 2458239 - RNA, 19 nt, Artificial Sequence
  Description of Artificial Sequence: Synthetic oligonucleotide
  Antisense strand to SEQ ID NO: 2458238
acacuuguggcauuagaac

SEQ ID NO: 2458240 - RNA, 19 nt, Artificial Sequence
  Description of Artificial Sequence: Synthetic oligonucleotide
  Sense strand starting at position 1796 of SEQ ID NO: 1887252
gccacaaguguugggauua

SEQ ID NO: 2458241 - RNA, 19 nt, Artificial Sequence
  Description of Artificial Sequence: Synthetic oligonucleotide
  Antisense strand to SEQ ID NO: 2458240
uaaucccaacacuuguggc

SEQ ID NO: 2458242 - RNA, 19 nt, Artificial Sequence
  Description of Artificial Sequence: Synthetic oligonucleotide
  Sense strand starting at position 1919 of SEQ ID NO: 1887252
gccucaguaucacacagaa

SEQ ID NO: 2458243 - RNA, 19 nt, Artificial Sequence
  Description of Artificial Sequence: Synthetic oligonucleotide
  Antisense strand to SEQ ID NO: 2458242
uucugugugauacugaggc

SEQ ID NO: 2458244 - RNA, 19 nt, Artificial Sequence
  Description of Artificial Sequence: Synthetic oligonucleotide
  Sense strand starting at position 1935 of SEQ ID NO: 1887252
gaaguugcaucacugggau

SEQ ID NO: 2458245 - RNA, 19 nt, Artificial Sequence
  Description of Artificial Sequence: Synthetic oligonucleotide
  Antisense strand to SEQ ID NO: 2458244
aucccagugaugcaacuuc

SEQ ID NO: 2458246 - RNA, 19 nt, Artificial Sequence
  Description of Artificial Sequence: Synthetic oligonucleotide
  Sense strand starting at position 1993 of SEQ ID NO: 1887252
uggcucuuaagccagagua

SEQ ID NO: 2458247 - RNA, 19 nt, Artificial Sequence
  Description of Artificial Sequence: Synthetic oligonucleotide
  Antisense strand to SEQ ID NO: 2458246
uacucuggcuuaagagcca

SEQ ID NO: 2458248 - RNA, 19 nt, Artificial Sequence
  Description of Artificial Sequence: Synthetic oligonucleotide
  Sense strand starting at position 1995 of SEQ ID NO: 1887252
gcucuuaagccagaguacu

SEQ ID NO: 2458249 - RNA, 19 nt, Artificial Sequence
  Description of Artificial Sequence: Synthetic oligonucleotide
  Antisense strand to SEQ ID NO: 2458248
aguacucuggcuuaagagc

SEQ ID NO: 2458250 - RNA, 19 nt, Artificial Sequence
  Description of Artificial Sequence: Synthetic oligonucleotide
  Sense strand starting at position 2380 of SEQ ID NO: 1887252
cuaauuaaugguggagugu

SEQ ID NO: 2458251 - RNA, 19 nt, Artificial Sequence
  Description of Artificial Sequence: Synthetic oligonucleotide
  Antisense strand to SEQ ID NO: 2458250
acacuccaccauuaauuag

SEQ ID NO: 2458252 - RNA, 19 nt, Artificial Sequence
  Description of Artificial Sequence: Synthetic oligonucleotide
  Sense strand starting at position 2381 of SEQ ID NO: 1887252
uaauuaaugguggagugua

SEQ ID NO: 2458253 - RNA, 19 nt, Artificial Sequence
  Description of Artificial Sequence: Synthetic oligonucleotide
  Antisense strand to SEQ ID NO: 2458252
uacacuccaccauuaauua

SEQ ID NO: 2458254 - RNA, 19 nt, Artificial Sequence
  Description of Artificial Sequence: Synthetic oligonucleotide
  Sense strand starting at position 2432 of SEQ ID NO: 1887252
accaaugacuggcauuuaa

SEQ ID NO: 2458255 - RNA, 19 nt, Artificial Sequence
  Description of Artificial Sequence: Synthetic oligonucleotide
  Antisense strand to SEQ ID NO: 2458254
uuaaaugccagucauuggu

SEQ ID NO: 2458256 - RNA, 19 nt, Artificial Sequence
  Description of Artificial Sequence: Synthetic oligonucleotide
  Sense strand starting at position 2691 of SEQ ID NO: 1887252
agaucugcacuuuggcaua

SEQ ID NO: 2458257 - RNA, 19 nt, Artificial Sequence
  Description of Artificial Sequence: Synthetic oligonucleotide
  Antisense strand to SEQ ID NO: 2458256
uaugccaaagugcagaucu

SEQ ID NO: 2458258 - RNA, 19 nt, Artificial Sequence
  Description of Artificial Sequence: Synthetic oligonucleotide
  Sense strand starting at position 2696 of SEQ ID NO: 1887252
ugcacuuuggcauaaacuu

SEQ ID NO: 2458259 - RNA, 19 nt, Artificial Sequence
  Description of Artificial Sequence: Synthetic oligonucleotide
  Antisense strand to SEQ ID NO: 2458258
aaguuuaugccaaagugca

SEQ ID NO: 2458260 - RNA, 19 nt, Artificial Sequence
  Description of Artificial Sequence: Synthetic oligonucleotide
  Sense strand starting at position 3070 of SEQ ID NO: 1887252
ggagaagucucagaaccac

SEQ ID NO: 2458261 - RNA, 19 nt, Artificial Sequence
  Description of Artificial Sequence: Synthetic oligonucleotide
  Antisense strand to SEQ ID NO: 2458260
gugguucugagacuucucc

SEQ ID NO: 2458262 - RNA, 19 nt, Artificial Sequence
  Description of Artificial Sequence: Synthetic oligonucleotide
  Sense strand starting at position 3092 of SEQ ID NO: 1887252
gagauugcaucacugagau

SEQ ID NO: 2458263 - RNA, 19 nt, Artificial Sequence
  Description of Artificial Sequence: Synthetic oligonucleotide
  Antisense strand to SEQ ID NO: 2458262
aucucagugaugcaaucuc

SEQ ID NO: 2458264 - RNA, 19 nt, Artificial Sequence
  Description of Artificial Sequence: Synthetic oligonucleotide
  Sense strand starting at position 3105 of SEQ ID NO: 1887252
ugagaugcuucagacaggu

SEQ ID NO: 2458265 - RNA, 19 nt, Artificial Sequence
  Description of Artificial Sequence: Synthetic oligonucleotide
  Antisense strand to SEQ ID NO: 2458264
accugucugaagcaucuca

SEQ ID NO: 2458266 - RNA, 19 nt, Artificial Sequence
  Description of Artificial Sequence: Synthetic oligonucleotide
  Sense strand starting at position 3195 of SEQ ID NO: 1887252
uuugcaucccaaugagcaa

SEQ ID NO: 2458267 - RNA, 19 nt, Artificial Sequence
  Description of Artificial Sequence: Synthetic oligonucleotide
  Antisense strand to SEQ ID NO: 2458266
uugcucauugggaugcaaa

SEQ ID NO: 2458268 - RNA, 19 nt, Artificial Sequence
  Description of Artificial Sequence: Synthetic oligonucleotide
  Sense strand starting at position 3339 of SEQ ID NO: 1887252
aaggguguuccuugccuga

SEQ ID NO: 2458269 - RNA, 19 nt, Artificial Sequence
  Description of Artificial Sequence: Synthetic oligonucleotide
  Antisense strand to SEQ ID NO: 2458268
ucaggcaaggaacacccuu

SEQ ID NO: 2458270 - RNA, 19 nt, Artificial Sequence
  Description of Artificial Sequence: Synthetic oligonucleotide
  Sense strand starting at position 3341 of SEQ ID NO: 1887252
ggguguuccuugccugaag

SEQ ID NO: 2458271 - RNA, 19 nt, Artificial Sequence
  Description of Artificial Sequence: Synthetic oligonucleotide
  Antisense strand to SEQ ID NO: 2458270
cuucaggcaaggaacaccc

SEQ ID NO: 2458272 - RNA, 19 nt, Artificial Sequence
  Description of Artificial Sequence: Synthetic oligonucleotide
  Sense strand starting at position 3343 of SEQ ID NO: 1887252
guguuccuugccugaagca

SEQ ID NO: 2458273 - RNA, 19 nt, Artificial Sequence
  Description of Artificial Sequence: Synthetic oligonucleotide
  Antisense strand to SEQ ID NO: 2458272
ugcuucaggcaaggaacac

SEQ ID NO: 2458274 - RNA, 19 nt, Artificial Sequence
  Description of Artificial Sequence: Synthetic oligonucleotide
  Sense strand starting at position 3432 of SEQ ID NO: 1887252
gaaagcaaucauggaguua

SEQ ID NO: 2458275 - RNA, 19 nt, Artificial Sequence
  Description of Artificial Sequence: Synthetic oligonucleotide
  Antisense strand to SEQ ID NO: 2458274
uaacuccaugauugcuuuc

SEQ ID NO: 2458276 - RNA, 19 nt, Artificial Sequence
  Description of Artificial Sequence: Synthetic oligonucleotide
  Sense strand starting at position 3470 of SEQ ID NO: 1887252
cgaggaagcuuucuccaaa

SEQ ID NO: 2458277 - RNA, 19 nt, Artificial Sequence
  Description of Artificial Sequence: Synthetic oligonucleotide
  Antisense strand to SEQ ID NO: 2458276
uuuggagaaagcuuccucg

SEQ ID NO: 2458278 - RNA, 19 nt, Artificial Sequence
  Description of Artificial Sequence: Synthetic oligonucleotide
  Sense strand starting at position 3473 of SEQ ID NO: 1887252
ggaagcuuucuccaaauau

SEQ ID NO: 2458279 - RNA, 19 nt, Artificial Sequence
  Description of Artificial Sequence: Synthetic oligonucleotide
  Antisense strand to SEQ ID NO: 2458278
auauuuggagaaagcuucc

SEQ ID NO: 2458280 - RNA, 19 nt, Artificial Sequence
  Description of Artificial Sequence: Synthetic oligonucleotide
  Sense strand starting at position 3489 of SEQ ID NO: 1887252
uauguugagucucucagau

SEQ ID NO: 2458281 - RNA, 19 nt, Artificial Sequence
  Description of Artificial Sequence: Synthetic oligonucleotide
  Antisense strand to SEQ ID NO: 2458280
aucugagagacucaacaua

SEQ ID NO: 2458282 - RNA, 19 nt, Artificial Sequence
  Description of Artificial Sequence: Synthetic oligonucleotide
  Sense strand starting at position 3491 of SEQ ID NO: 1887252
uguugagucucucagauaa

SEQ ID NO: 2458283 - RNA, 19 nt, Artificial Sequence
  Description of Artificial Sequence: Synthetic oligonucleotide
  Antisense strand to SEQ ID NO: 2458282
uuaucugagagacucaaca

SEQ ID NO: 2458284 - RNA, 19 nt, Artificial Sequence
  Description of Artificial Sequence: Synthetic oligonucleotide
  Sense strand starting at position 3586 of SEQ ID NO: 1887252
accucuuuguucccaguau

SEQ ID NO: 2458285 - RNA, 19 nt, Artificial Sequence
  Description of Artificial Sequence: Synthetic oligonucleotide
  Antisense strand to SEQ ID NO: 2458284
auacugggaacaaagaggu

SEQ ID NO: 2458286 - RNA, 19 nt, Artificial Sequence
  Description of Artificial Sequence: Synthetic oligonucleotide
  Sense strand starting at position 3590 of SEQ ID NO: 1887252
cuuuguucccaguaucauu

SEQ ID NO: 2458287 - RNA, 19 nt, Artificial Sequence
  Description of Artificial Sequence: Synthetic oligonucleotide
  Antisense strand to SEQ ID NO: 2458286
aaugauacugggaacaaag

SEQ ID NO: 2458288 - RNA, 19 nt, Artificial Sequence
  Description of Artificial Sequence: Synthetic oligonucleotide
  Sense strand starting at position 3683 of SEQ ID NO: 1887252
ggagcauguugacaaauga

SEQ ID NO: 2458289 - RNA, 19 nt, Artificial Sequence
  Description of Artificial Sequence: Synthetic oligonucleotide
  Antisense strand to SEQ ID NO: 2458288
ucauuugucaacaugcucc

SEQ ID NO: 2458290 - RNA, 19 nt, Artificial Sequence
  Description of Artificial Sequence: Synthetic oligonucleotide
  Sense strand starting at position 3783 of SEQ ID NO: 1887252
uuccuaguguuaguaaagu

SEQ ID NO: 2458291 - RNA, 19 nt, Artificial Sequence
  Description of Artificial Sequence: Synthetic oligonucleotide
  Antisense strand to SEQ ID NO: 2458290
acuuuacuaacacuaggaa

SEQ ID NO: 2458292 - RNA, 19 nt, Artificial Sequence
  Description of Artificial Sequence: Synthetic oligonucleotide
  Sense strand starting at position 3808 of SEQ ID NO: 1887252
acugaaauauucgagcaua

SEQ ID NO: 2458293 - RNA, 19 nt, Artificial Sequence
  Description of Artificial Sequence: Synthetic oligonucleotide
  Antisense strand to SEQ ID NO: 2458292
uaugcucgaauauuucagu

SEQ ID NO: 2458294 - RNA, 19 nt, Artificial Sequence
  Description of Artificial Sequence: Synthetic oligonucleotide
  Sense strand starting at position 3857 of SEQ ID NO: 1887252
uggagauguccggaagcuc

SEQ ID NO: 2458295 - RNA, 19 nt, Artificial Sequence
  Description of Artificial Sequence: Synthetic oligonucleotide
  Antisense strand to SEQ ID NO: 2458294
gagcuuccggacaucucca

SEQ ID NO: 2458296 - RNA, 19 nt, Artificial Sequence
  Description of Artificial Sequence: Synthetic oligonucleotide
  Sense strand starting at position 3874 of SEQ ID NO: 1887252
ucuuaaggccucuguauuu

SEQ ID NO: 2458297 - RNA, 19 nt, Artificial Sequence
  Description of Artificial Sequence: Synthetic oligonucleotide
  Antisense strand to SEQ ID NO: 2458296
aaauacagaggccuuaaga

SEQ ID NO: 2458298 - RNA, 19 nt, Artificial Sequence
  Description of Artificial Sequence: Synthetic oligonucleotide
  Sense strand starting at position 3881 of SEQ ID NO: 1887252
gccucuguauuucugaaau

SEQ ID NO: 2458299 - RNA, 19 nt, Artificial Sequence
  Description of Artificial Sequence: Synthetic oligonucleotide
  Antisense strand to SEQ ID NO: 2458298
auuucagaaauacagaggc

SEQ ID NO: 2458300 - RNA, 19 nt, Artificial Sequence
  Description of Artificial Sequence: Synthetic oligonucleotide
  Sense strand starting at position 3931 of SEQ ID NO: 1887252
gucagauuuauauggugcu

SEQ ID NO: 2458301 - RNA, 19 nt, Artificial Sequence
  Description of Artificial Sequence: Synthetic oligonucleotide
  Antisense strand to SEQ ID NO: 2458300
agcaccauauaaaucugac

SEQ ID NO: 2458302 - RNA, 19 nt, Artificial Sequence
  Description of Artificial Sequence: Synthetic oligonucleotide
  Sense strand starting at position 3932 of SEQ ID NO: 1887252
ucagauuuauauggugcua

SEQ ID NO: 2458303 - RNA, 19 nt, Artificial Sequence
  Description of Artificial Sequence: Synthetic oligonucleotide
  Antisense strand to SEQ ID NO: 2458302
uagcaccauauaaaucuga

SEQ ID NO: 2458304 - RNA, 19 nt, Artificial Sequence
  Description of Artificial Sequence: Synthetic oligonucleotide
  Sense strand starting at position 3934 of SEQ ID NO: 1887252
agauuuauauggugcuaua

SEQ ID NO: 2458305 - RNA, 19 nt, Artificial Sequence
  Description of Artificial Sequence: Synthetic oligonucleotide
  Antisense strand to SEQ ID NO: 2458304
uauagcaccauauaaaucu

SEQ ID NO: 2458306 - RNA, 19 nt, Artificial Sequence
  Description of Artificial Sequence: Synthetic oligonucleotide
  Sense strand starting at position 3954 of SEQ ID NO: 1887252
agacucaagucacugcuaa

SEQ ID NO: 2458307 - RNA, 19 nt, Artificial Sequence
  Description of Artificial Sequence: Synthetic oligonucleotide
  Antisense strand to SEQ ID NO: 2458306
uuagcagugacuugagucu

SEQ ID NO: 2458308 - RNA, 19 nt, Artificial Sequence
  Description of Artificial Sequence: Synthetic oligonucleotide
  Sense strand starting at position 75 of SEQ ID NO: 1887254
gcaucaaaucaacgggaaa

SEQ ID NO: 2458309 - RNA, 19 nt, Artificial Sequence
  Description of Artificial Sequence: Synthetic oligonucleotide
  Antisense strand to SEQ ID NO: 2458308
uuucccguugauuugaugc

SEQ ID NO: 2458310 - RNA, 19 nt, Artificial Sequence
  Description of Artificial Sequence: Synthetic oligonucleotide
  Sense strand starting at position 178 of SEQ ID NO: 1887254
auacguauauaucuugaca

SEQ ID NO: 2458311 - RNA, 19 nt, Artificial Sequence
  Description of Artificial Sequence: Synthetic oligonucleotide
  Antisense strand to SEQ ID NO: 2458310
ugucaagauauauacguau

SEQ ID NO: 2458312 - RNA, 19 nt, Artificial Sequence
  Description of Artificial Sequence: Synthetic oligonucleotide
  Sense strand starting at position 181 of SEQ ID NO: 1887254
cguauauaucuugacauau

SEQ ID NO: 2458313 - RNA, 19 nt, Artificial Sequence
  Description of Artificial Sequence: Synthetic oligonucleotide
  Antisense strand to SEQ ID NO: 2458312
auaugucaagauauauacg

SEQ ID NO: 2458314 - RNA, 19 nt, Artificial Sequence
  Description of Artificial Sequence: Synthetic oligonucleotide
  Sense strand starting at position 256 of SEQ ID NO: 1887254
uccagcaaacaugguaauu

SEQ ID NO: 2458315 - RNA, 19 nt, Artificial Sequence
  Description of Artificial Sequence: Synthetic oligonucleotide
  Antisense strand to SEQ ID NO: 2458314
aauuaccauguuugcugga

SEQ ID NO: 2458316 - RNA, 19 nt, Artificial Sequence
  Description of Artificial Sequence: Synthetic oligonucleotide
  Sense strand starting at position 327 of SEQ ID NO: 1887254
gucuccgagucuccugaau

SEQ ID NO: 2458317 - RNA, 19 nt, Artificial Sequence
  Description of Artificial Sequence: Synthetic oligonucleotide
  Antisense strand to SEQ ID NO: 2458316
auucaggagacucggagac

SEQ ID NO: 2458318 - RNA, 19 nt, Artificial Sequence
  Description of Artificial Sequence: Synthetic oligonucleotide
  Sense strand starting at position 341 of SEQ ID NO: 1887254
ugaaucaggugucugagaa

SEQ ID NO: 2458319 - RNA, 19 nt, Artificial Sequence
  Description of Artificial Sequence: Synthetic oligonucleotide
  Antisense strand to SEQ ID NO: 2458318
uucucagacaccugauuca

SEQ ID NO: 2458320 - RNA, 19 nt, Artificial Sequence
  Description of Artificial Sequence: Synthetic oligonucleotide
  Sense strand starting at position 342 of SEQ ID NO: 1887254
gaaucaggugucugagaau

SEQ ID NO: 2458321 - RNA, 19 nt, Artificial Sequence
  Description of Artificial Sequence: Synthetic oligonucleotide
  Antisense strand to SEQ ID NO: 2458320
auucucagacaccugauuc

SEQ ID NO: 2458322 - RNA, 19 nt, Artificial Sequence
  Description of Artificial Sequence: Synthetic oligonucleotide
  Sense strand starting at position 447 of SEQ ID NO: 1887254
ggacgaugcuguucuuaca

SEQ ID NO: 2458323 - RNA, 19 nt, Artificial Sequence
  Description of Artificial Sequence: Synthetic oligonucleotide
  Antisense strand to SEQ ID NO: 2458322
uguaagaacagcaucgucc

SEQ ID NO: 2458324 - RNA, 19 nt, Artificial Sequence
  Description of Artificial Sequence: Synthetic oligonucleotide
  Sense strand starting at position 498 of SEQ ID NO: 1887254
gaagcuauuguaugcaaau

SEQ ID NO: 2458325 - RNA, 19 nt, Artificial Sequence
  Description of Artificial Sequence: Synthetic oligonucleotide
  Antisense strand to SEQ ID NO: 2458324
auuugcauacaauagcuuc

SEQ ID NO: 2458326 - RNA, 19 nt, Artificial Sequence
  Description of Artificial Sequence: Synthetic oligonucleotide
  Sense strand starting at position 517 of SEQ ID NO: 1887254
cucuuaaauuuguaaacga

SEQ ID NO: 2458327 - RNA, 19 nt, Artificial Sequence
  Description of Artificial Sequence: Synthetic oligonucleotide
  Antisense strand to SEQ ID NO: 2458326
ucguuuacaaauuuaagag

SEQ ID NO: 2458328 - RNA, 19 nt, Artificial Sequence
  Description of Artificial Sequence: Synthetic oligonucleotide
  Sense strand starting at position 598 of SEQ ID NO: 1887254
ugaacaaggcuguaacuua

SEQ ID NO: 2458329 - RNA, 19 nt, Artificial Sequence
  Description of Artificial Sequence: Synthetic oligonucleotide
  Antisense strand to SEQ ID NO: 2458328
uaaguuacagccuuguuca

SEQ ID NO: 2458330 - RNA, 19 nt, Artificial Sequence
  Description of Artificial Sequence: Synthetic oligonucleotide
  Sense strand starting at position 691 of SEQ ID NO: 1887254
uuaagaaauucucccggaa

SEQ ID NO: 2458331 - RNA, 19 nt, Artificial Sequence
  Description of Artificial Sequence: Synthetic oligonucleotide
  Antisense strand to SEQ ID NO: 2458330
uuccgggagaauuucuuaa

SEQ ID NO: 2458332 - RNA, 19 nt, Artificial Sequence
  Description of Artificial Sequence: Synthetic oligonucleotide
  Sense strand starting at position 710 of SEQ ID NO: 1887254
ggacauugauuuggaucuu

SEQ ID NO: 2458333 - RNA, 19 nt, Artificial Sequence
  Description of Artificial Sequence: Synthetic oligonucleotide
  Antisense strand to SEQ ID NO: 2458332
aagauccaaaucaaugucc

SEQ ID NO: 2458334 - RNA, 19 nt, Artificial Sequence
  Description of Artificial Sequence: Synthetic oligonucleotide
  Sense strand starting at position 716 of SEQ ID NO: 1887254
ugauuuggaucuugugaua

SEQ ID NO: 2458335 - RNA, 19 nt, Artificial Sequence
  Description of Artificial Sequence: Synthetic oligonucleotide
  Antisense strand to SEQ ID NO: 2458334
uaucacaagauccaaauca

SEQ ID NO: 2458336 - RNA, 19 nt, Artificial Sequence
  Description of Artificial Sequence: Synthetic oligonucleotide
  Sense strand starting at position 727 of SEQ ID NO: 1887254
uugugauaguguccucacu

SEQ ID NO: 2458337 - RNA, 19 nt, Artificial Sequence
  Description of Artificial Sequence: Synthetic oligonucleotide
  Antisense strand to SEQ ID NO: 2458336
agugaggacacuaucacaa

SEQ ID NO: 2458338 - RNA, 19 nt, Artificial Sequence
  Description of Artificial Sequence: Synthetic oligonucleotide
  Sense strand starting at position 729 of SEQ ID NO: 1887254
gugauaguguccucacuuc

SEQ ID NO: 2458339 - RNA, 19 nt, Artificial Sequence
  Description of Artificial Sequence: Synthetic oligonucleotide
  Antisense strand to SEQ ID NO: 2458338
gaagugaggacacuaucac

SEQ ID NO: 2458340 - RNA, 19 nt, Artificial Sequence
  Description of Artificial Sequence: Synthetic oligonucleotide
  Sense strand starting at position 736 of SEQ ID NO: 1887254
uguccucacuucgcaaauu

SEQ ID NO: 2458341 - RNA, 19 nt, Artificial Sequence
  Description of Artificial Sequence: Synthetic oligonucleotide
  Antisense strand to SEQ ID NO: 2458340
aauuugcgaagugaggaca

SEQ ID NO: 2458342 - RNA, 19 nt, Artificial Sequence
  Description of Artificial Sequence: Synthetic oligonucleotide
  Sense strand starting at position 811 of SEQ ID NO: 1887254
uaauuuaauugaggcgaau

SEQ ID NO: 2458343 - RNA, 19 nt, Artificial Sequence
  Description of Artificial Sequence: Synthetic oligonucleotide
  Antisense strand to SEQ ID NO: 2458342
auucgccucaauuaaauua

SEQ ID NO: 2458344 - RNA, 19 nt, Artificial Sequence
  Description of Artificial Sequence: Synthetic oligonucleotide
  Sense strand starting at position 947 of SEQ ID NO: 1887254
ucuucuaucccagagcaga

SEQ ID NO: 2458345 - RNA, 19 nt, Artificial Sequence
  Description of Artificial Sequence: Synthetic oligonucleotide
  Antisense strand to SEQ ID NO: 2458344
ucugcucugggauagaaga

SEQ ID NO: 2458346 - RNA, 19 nt, Artificial Sequence
  Description of Artificial Sequence: Synthetic oligonucleotide
  Sense strand starting at position 1010 of SEQ ID NO: 1887254
cacaaagguugugcucaaa

SEQ ID NO: 2458347 - RNA, 19 nt, Artificial Sequence
  Description of Artificial Sequence: Synthetic oligonucleotide
  Antisense strand to SEQ ID NO: 2458346
uuugagcacaaccuuugug

SEQ ID NO: 2458348 - RNA, 19 nt, Artificial Sequence
  Description of Artificial Sequence: Synthetic oligonucleotide
  Sense strand starting at position 1013 of SEQ ID NO: 1887254
aaagguugugcucaaauca

SEQ ID NO: 2458349 - RNA, 19 nt, Artificial Sequence
  Description of Artificial Sequence: Synthetic oligonucleotide
  Antisense strand to SEQ ID NO: 2458348
ugauuugagcacaaccuuu

SEQ ID NO: 2458350 - RNA, 19 nt, Artificial Sequence
  Description of Artificial Sequence: Synthetic oligonucleotide
  Sense strand starting at position 1443 of SEQ ID NO: 1887254
gcuggagaaugacuuguca

SEQ ID NO: 2458351 - RNA, 19 nt, Artificial Sequence
  Description of Artificial Sequence: Synthetic oligonucleotide
  Antisense strand to SEQ ID NO: 2458350
ugacaagucauucuccagc

SEQ ID NO: 2458352 - RNA, 19 nt, Artificial Sequence
  Description of Artificial Sequence: Synthetic oligonucleotide
  Sense strand starting at position 1447 of SEQ ID NO: 1887254
gagaaugacuugucagagc

SEQ ID NO: 2458353 - RNA, 19 nt, Artificial Sequence
  Description of Artificial Sequence: Synthetic oligonucleotide
  Antisense strand to SEQ ID NO: 2458352
gcucugacaagucauucuc

SEQ ID NO: 2458354 - RNA, 19 nt, Artificial Sequence
  Description of Artificial Sequence: Synthetic oligonucleotide
  Sense strand starting at position 1458 of SEQ ID NO: 1887254
gucagagcucaaggucgau

SEQ ID NO: 2458355 - RNA, 19 nt, Artificial Sequence
  Description of Artificial Sequence: Synthetic oligonucleotide
  Antisense strand to SEQ ID NO: 2458354
aucgaccuugagcucugac

SEQ ID NO: 2458356 - RNA, 19 nt, Artificial Sequence
  Description of Artificial Sequence: Synthetic oligonucleotide
  Sense strand starting at position 1626 of SEQ ID NO: 1887254
cgagcauguuaaucuauuu

SEQ ID NO: 2458357 - RNA, 19 nt, Artificial Sequence
  Description of Artificial Sequence: Synthetic oligonucleotide
  Antisense strand to SEQ ID NO: 2458356
aaauagauuaacaugcucg

SEQ ID NO: 2458358 - RNA, 19 nt, Artificial Sequence
  Description of Artificial Sequence: Synthetic oligonucleotide
  Sense strand starting at position 1857 of SEQ ID NO: 1887254
gguagauccuagucuagac

SEQ ID NO: 2458359 - RNA, 19 nt, Artificial Sequence
  Description of Artificial Sequence: Synthetic oligonucleotide
  Antisense strand to SEQ ID NO: 2458358
gucuagacuaggaucuacc

SEQ ID NO: 2458360 - RNA, 19 nt, Artificial Sequence
  Description of Artificial Sequence: Synthetic oligonucleotide
  Sense strand starting at position 1910 of SEQ ID NO: 1887254
acaagauucgcgcggagaa

SEQ ID NO: 2458361 - RNA, 19 nt, Artificial Sequence
  Description of Artificial Sequence: Synthetic oligonucleotide
  Antisense strand to SEQ ID NO: 2458360
uucuccgcgcgaaucuugu

SEQ ID NO: 2458362 - RNA, 19 nt, Artificial Sequence
  Description of Artificial Sequence: Synthetic oligonucleotide
  Sense strand starting at position 1911 of SEQ ID NO: 1887254
caagauucgcgcggagaag

SEQ ID NO: 2458363 - RNA, 19 nt, Artificial Sequence
  Description of Artificial Sequence: Synthetic oligonucleotide
  Antisense strand to SEQ ID NO: 2458362
cuucuccgcgcgaaucuug

SEQ ID NO: 2458364 - RNA, 19 nt, Artificial Sequence
  Description of Artificial Sequence: Synthetic oligonucleotide
  Sense strand starting at position 1949 of SEQ ID NO: 1887254
ccgagaguacgacaaacuu

SEQ ID NO: 2458365 - RNA, 19 nt, Artificial Sequence
  Description of Artificial Sequence: Synthetic oligonucleotide
  Antisense strand to SEQ ID NO: 2458364
aaguuugucguacucucgg

SEQ ID NO: 2458366 - RNA, 19 nt, Artificial Sequence
  Description of Artificial Sequence: Synthetic oligonucleotide
  Sense strand starting at position 2181 of SEQ ID NO: 1887254
uaaggugaggcggaguauu

SEQ ID NO: 2458367 - RNA, 19 nt, Artificial Sequence
  Description of Artificial Sequence: Synthetic oligonucleotide
  Antisense strand to SEQ ID NO: 2458366
aauacuccgccucaccuua

SEQ ID NO: 2458368 - RNA, 19 nt, Artificial Sequence
  Description of Artificial Sequence: Synthetic oligonucleotide
  Sense strand starting at position 2191 of SEQ ID NO: 1887254
cggaguauuuauuaaagag

SEQ ID NO: 2458369 - RNA, 19 nt, Artificial Sequence
  Description of Artificial Sequence: Synthetic oligonucleotide
  Antisense strand to SEQ ID NO: 2458368
cucuuuaauaaauacuccg

SEQ ID NO: 2458370 - RNA, 19 nt, Artificial Sequence
  Description of Artificial Sequence: Synthetic oligonucleotide
  Sense strand starting at position 3185 of SEQ ID NO: 1887254
uggcucagaguuugacaaa

SEQ ID NO: 2458371 - RNA, 19 nt, Artificial Sequence
  Description of Artificial Sequence: Synthetic oligonucleotide
  Antisense strand to SEQ ID NO: 2458370
uuugucaaacucugagcca

SEQ ID NO: 2458372 - RNA, 19 nt, Artificial Sequence
  Description of Artificial Sequence: Synthetic oligonucleotide
  Sense strand starting at position 3546 of SEQ ID NO: 1887254
cuucuugcagcuuaaguaa

SEQ ID NO: 2458373 - RNA, 19 nt, Artificial Sequence
  Description of Artificial Sequence: Synthetic oligonucleotide
  Antisense strand to SEQ ID NO: 2458372
uuacuuaagcugcaagaag

SEQ ID NO: 2458374 - RNA, 19 nt, Artificial Sequence
  Description of Artificial Sequence: Synthetic oligonucleotide
  Sense strand starting at position 3602 of SEQ ID NO: 1887254
gcgguaagucgagcagcaa

SEQ ID NO: 2458375 - RNA, 19 nt, Artificial Sequence
  Description of Artificial Sequence: Synthetic oligonucleotide
  Antisense strand to SEQ ID NO: 2458374
uugcugcucgacuuaccgc

SEQ ID NO: 2458376 - RNA, 19 nt, Artificial Sequence
  Description of Artificial Sequence: Synthetic oligonucleotide
  Sense strand starting at position 3603 of SEQ ID NO: 1887254
cgguaagucgagcagcaaa

SEQ ID NO: 2458377 - RNA, 19 nt, Artificial Sequence
  Description of Artificial Sequence: Synthetic oligonucleotide
  Antisense strand to SEQ ID NO: 2458376
uuugcugcucgacuuaccg

SEQ ID NO: 2458378 - RNA, 19 nt, Artificial Sequence
  Description of Artificial Sequence: Synthetic oligonucleotide
  Sense strand starting at position 3722 of SEQ ID NO: 1887254
gucagacugcaauaacuua

SEQ ID NO: 2458379 - RNA, 19 nt, Artificial Sequence
  Description of Artificial Sequence: Synthetic oligonucleotide
  Antisense strand to SEQ ID NO: 2458378
uaaguuauugcagucugac

SEQ ID NO: 2458380 - RNA, 19 nt, Artificial Sequence
  Description of Artificial Sequence: Synthetic oligonucleotide
  Sense strand starting at position 3762 of SEQ ID NO: 1887254
aaaguuaugagcugugguu

SEQ ID NO: 2458381 - RNA, 19 nt, Artificial Sequence
  Description of Artificial Sequence: Synthetic oligonucleotide
  Antisense strand to SEQ ID NO: 2458380
aaccacagcucauaacuuu

SEQ ID NO: 2458382 - RNA, 19 nt, Artificial Sequence
  Description of Artificial Sequence: Synthetic oligonucleotide
  Sense strand starting at position 3796 of SEQ ID NO: 1887254
gauggaguugugugcagag

SEQ ID NO: 2458383 - RNA, 19 nt, Artificial Sequence
  Description of Artificial Sequence: Synthetic oligonucleotide
  Antisense strand to SEQ ID NO: 2458382
cucugcacacaacuccauc

SEQ ID NO: 2458384 - RNA, 19 nt, Artificial Sequence
  Description of Artificial Sequence: Synthetic oligonucleotide
  Sense strand starting at position 3798 of SEQ ID NO: 1887254
uggaguugugugcagagga

SEQ ID NO: 2458385 - RNA, 19 nt, Artificial Sequence
  Description of Artificial Sequence: Synthetic oligonucleotide
  Antisense strand to SEQ ID NO: 2458384
uccucugcacacaacucca

SEQ ID NO: 2458386 - RNA, 19 nt, Artificial Sequence
  Description of Artificial Sequence: Synthetic oligonucleotide
  Sense strand starting at position 3799 of SEQ ID NO: 1887254
ggaguugugugcagaggaa

SEQ ID NO: 2458387 - RNA, 19 nt, Artificial Sequence
  Description of Artificial Sequence: Synthetic oligonucleotide
  Antisense strand to SEQ ID NO: 2458386
uuccucugcacacaacucc

SEQ ID NO: 2458388 - RNA, 19 nt, Artificial Sequence
  Description of Artificial Sequence: Synthetic oligonucleotide
  Sense strand starting at position 7 of SEQ ID NO: 1887253
gagagugaagcguaccaca

SEQ ID NO: 2458389 - RNA, 19 nt, Artificial Sequence
  Description of Artificial Sequence: Synthetic oligonucleotide
  Antisense strand to SEQ ID NO: 2458388
ugugguacgcuucacucuc

SEQ ID NO: 2458390 - RNA, 19 nt, Artificial Sequence
  Description of Artificial Sequence: Synthetic oligonucleotide
  Sense strand starting at position 192 of SEQ ID NO: 1887253
gcgcuuuaccugccuccaa

SEQ ID NO: 2458391 - RNA, 19 nt, Artificial Sequence
  Description of Artificial Sequence: Synthetic oligonucleotide
  Antisense strand to SEQ ID NO: 2458390
uuggaggcagguaaagcgc

SEQ ID NO: 2458392 - RNA, 19 nt, Artificial Sequence
  Description of Artificial Sequence: Synthetic oligonucleotide
  Sense strand starting at position 261 of SEQ ID NO: 1887253
agucgucucagggaaauag

SEQ ID NO: 2458393 - RNA, 19 nt, Artificial Sequence
  Description of Artificial Sequence: Synthetic oligonucleotide
  Antisense strand to SEQ ID NO: 2458392
cuauuucccugagacgacu

SEQ ID NO: 2458394 - RNA, 19 nt, Artificial Sequence
  Description of Artificial Sequence: Synthetic oligonucleotide
  Sense strand starting at position 341 of SEQ ID NO: 1887253
cagaguucacguggacaga

SEQ ID NO: 2458395 - RNA, 19 nt, Artificial Sequence
  Description of Artificial Sequence: Synthetic oligonucleotide
  Antisense strand to SEQ ID NO: 2458394
ucuguccacgugaacucug

SEQ ID NO: 2458396 - RNA, 19 nt, Artificial Sequence
  Description of Artificial Sequence: Synthetic oligonucleotide
  Sense strand starting at position 363 of SEQ ID NO: 1887253
uggauucugcgggaaacca

SEQ ID NO: 2458397 - RNA, 19 nt, Artificial Sequence
  Description of Artificial Sequence: Synthetic oligonucleotide
  Antisense strand to SEQ ID NO: 2458396
ugguuucccgcagaaucca

SEQ ID NO: 2458398 - RNA, 19 nt, Artificial Sequence
  Description of Artificial Sequence: Synthetic oligonucleotide
  Sense strand starting at position 420 of SEQ ID NO: 1887253
ucagaaguuuaggcacauu

SEQ ID NO: 2458399 - RNA, 19 nt, Artificial Sequence
  Description of Artificial Sequence: Synthetic oligonucleotide
  Antisense strand to SEQ ID NO: 2458398
aaugugccuaaacuucuga

SEQ ID NO: 2458400 - RNA, 19 nt, Artificial Sequence
  Description of Artificial Sequence: Synthetic oligonucleotide
  Sense strand starting at position 487 of SEQ ID NO: 1887253
augauuugacguugggcua

SEQ ID NO: 2458401 - RNA, 19 nt, Artificial Sequence
  Description of Artificial Sequence: Synthetic oligonucleotide
  Antisense strand to SEQ ID NO: 2458400
uagcccaacgucaaaucau

SEQ ID NO: 2458402 - RNA, 19 nt, Artificial Sequence
  Description of Artificial Sequence: Synthetic oligonucleotide
  Sense strand starting at position 488 of SEQ ID NO: 1887253
ugauuugacguugggcuaa

SEQ ID NO: 2458403 - RNA, 19 nt, Artificial Sequence
  Description of Artificial Sequence: Synthetic oligonucleotide
  Antisense strand to SEQ ID NO: 2458402
uuagcccaacgucaaauca

SEQ ID NO: 2458404 - RNA, 19 nt, Artificial Sequence
  Description of Artificial Sequence: Synthetic oligonucleotide
  Sense strand starting at position 615 of SEQ ID NO: 1887253
uagaaagauuuagauguag

SEQ ID NO: 2458405 - RNA, 19 nt, Artificial Sequence
  Description of Artificial Sequence: Synthetic oligonucleotide
  Antisense strand to SEQ ID NO: 2458404
cuacaucuaaaucuuucua

SEQ ID NO: 2458406 - RNA, 19 nt, Artificial Sequence
  Description of Artificial Sequence: Synthetic oligonucleotide
  Sense strand starting at position 662 of SEQ ID NO: 1887253
ccucguguucguccauacu

SEQ ID NO: 2458407 - RNA, 19 nt, Artificial Sequence
  Description of Artificial Sequence: Synthetic oligonucleotide
  Antisense strand to SEQ ID NO: 2458406
aguauggacgaacacgagg

SEQ ID NO: 2458408 - RNA, 19 nt, Artificial Sequence
  Description of Artificial Sequence: Synthetic oligonucleotide
  Sense strand starting at position 888 of SEQ ID NO: 1887253
uguccaaucauacgguaga

SEQ ID NO: 2458409 - RNA, 19 nt, Artificial Sequence
  Description of Artificial Sequence: Synthetic oligonucleotide
  Antisense strand to SEQ ID NO: 2458408
ucuaccguaugauuggaca

SEQ ID NO: 2458410 - RNA, 19 nt, Artificial Sequence
  Description of Artificial Sequence: Synthetic oligonucleotide
  Sense strand starting at position 995 of SEQ ID NO: 1887253
augagaugucuccacugcu

SEQ ID NO: 2458411 - RNA, 19 nt, Artificial Sequence
  Description of Artificial Sequence: Synthetic oligonucleotide
  Antisense strand to SEQ ID NO: 2458410
agcaguggagacaucucau

SEQ ID NO: 2458412 - RNA, 19 nt, Artificial Sequence
  Description of Artificial Sequence: Synthetic oligonucleotide
  Sense strand starting at position 1091 of SEQ ID NO: 1887253
cuaguaacuguuuaucugu

SEQ ID NO: 2458413 - RNA, 19 nt, Artificial Sequence
  Description of Artificial Sequence: Synthetic oligonucleotide
  Antisense strand to SEQ ID NO: 2458412
acagauaaacaguuacuag

SEQ ID NO: 2458414 - RNA, 19 nt, Artificial Sequence
  Description of Artificial Sequence: Synthetic oligonucleotide
  Sense strand starting at position 1207 of SEQ ID NO: 1887253
ggaccaguuucuguaauac

SEQ ID NO: 2458415 - RNA, 19 nt, Artificial Sequence
  Description of Artificial Sequence: Synthetic oligonucleotide
  Antisense strand to SEQ ID NO: 2458414
guauuacagaaacuggucc

SEQ ID NO: 2458416 - RNA, 19 nt, Artificial Sequence
  Description of Artificial Sequence: Synthetic oligonucleotide
  Sense strand starting at position 1307 of SEQ ID NO: 1887253
guuccaguccuagaacucu

SEQ ID NO: 2458417 - RNA, 19 nt, Artificial Sequence
  Description of Artificial Sequence: Synthetic oligonucleotide
  Antisense strand to SEQ ID NO: 2458416
agaguucuaggacuggaac

SEQ ID NO: 2458418 - RNA, 19 nt, Artificial Sequence
  Description of Artificial Sequence: Synthetic oligonucleotide
  Sense strand starting at position 1313 of SEQ ID NO: 1887253
guccuagaacucuguggaa

SEQ ID NO: 2458419 - RNA, 19 nt, Artificial Sequence
  Description of Artificial Sequence: Synthetic oligonucleotide
  Antisense strand to SEQ ID NO: 2458418
uuccacagaguucuaggac

SEQ ID NO: 2458420 - RNA, 19 nt, Artificial Sequence
  Description of Artificial Sequence: Synthetic oligonucleotide
  Sense strand starting at position 1315 of SEQ ID NO: 1887253
ccuagaacucuguggaaga

SEQ ID NO: 2458421 - RNA, 19 nt, Artificial Sequence
  Description of Artificial Sequence: Synthetic oligonucleotide
  Antisense strand to SEQ ID NO: 2458420
ucuuccacagaguucuagg

SEQ ID NO: 2458422 - RNA, 19 nt, Artificial Sequence
  Description of Artificial Sequence: Synthetic oligonucleotide
  Sense strand starting at position 1703 of SEQ ID NO: 1887253
agcgacaggcaucaugaaa

SEQ ID NO: 2458423 - RNA, 19 nt, Artificial Sequence
  Description of Artificial Sequence: Synthetic oligonucleotide
  Antisense strand to SEQ ID NO: 2458422
uuucaugaugccugucgcu

SEQ ID NO: 2458424 - RNA, 19 nt, Artificial Sequence
  Description of Artificial Sequence: Synthetic oligonucleotide
  Sense strand starting at position 2160 of SEQ ID NO: 1887253
acaggauaauuggucuuua

SEQ ID NO: 2458425 - RNA, 19 nt, Artificial Sequence
  Description of Artificial Sequence: Synthetic oligonucleotide
  Antisense strand to SEQ ID NO: 2458424
uaaagaccaauuauccugu

SEQ ID NO: 2458426 - RNA, 19 nt, Artificial Sequence
  Description of Artificial Sequence: Synthetic oligonucleotide
  Sense strand starting at position 2184 of SEQ ID NO: 1887253
gaccguuaccuucgaaauu

SEQ ID NO: 2458427 - RNA, 19 nt, Artificial Sequence
  Description of Artificial Sequence: Synthetic oligonucleotide
  Antisense strand to SEQ ID NO: 2458426
aauuucgaagguaacgguc

SEQ ID NO: 2458428 - RNA, 19 nt, Artificial Sequence
  Description of Artificial Sequence: Synthetic oligonucleotide
  Sense strand starting at position 2221 of SEQ ID NO: 1887253
cucuauuuccguggcuuga

SEQ ID NO: 2458429 - RNA, 19 nt, Artificial Sequence
  Description of Artificial Sequence: Synthetic oligonucleotide
  Antisense strand to SEQ ID NO: 2458428
ucaagccacggaaauagag

SEQ ID NO: 2458430 - RNA, 19 nt, Artificial Sequence
  Description of Artificial Sequence: Synthetic oligonucleotide
  Sense strand starting at position 2242 of SEQ ID NO: 1887253
gggacacuuucucugauua

SEQ ID NO: 2458431 - RNA, 19 nt, Artificial Sequence
  Description of Artificial Sequence: Synthetic oligonucleotide
  Antisense strand to SEQ ID NO: 2458430
uaaucagagaaaguguccc

SEQ ID NO: 2458432 - RNA, 19 nt, Artificial Sequence
  Description of Artificial Sequence: Synthetic oligonucleotide
  Sense strand starting at position 2243 of SEQ ID NO: 1887253
ggacacuuucucugauuaa

SEQ ID NO: 2458433 - RNA, 19 nt, Artificial Sequence
  Description of Artificial Sequence: Synthetic oligonucleotide
  Antisense strand to SEQ ID NO: 2458432
uuaaucagagaaagugucc

SEQ ID NO: 2458434 - RNA, 19 nt, Artificial Sequence
  Description of Artificial Sequence: Synthetic oligonucleotide
  Sense strand starting at position 2286 of SEQ ID NO: 1887253
ugggaucucuuagagggaa

SEQ ID NO: 2458435 - RNA, 19 nt, Artificial Sequence
  Description of Artificial Sequence: Synthetic oligonucleotide
  Antisense strand to SEQ ID NO: 2458434
uucccucuaagagauccca

SEQ ID NO: 2458436 - RNA, 19 nt, Artificial Sequence
  Description of Artificial Sequence: Synthetic oligonucleotide
  Sense strand starting at position 2298 of SEQ ID NO: 1887253
gagggaagcgcugguuaga

SEQ ID NO: 2458437 - RNA, 19 nt, Artificial Sequence
  Description of Artificial Sequence: Synthetic oligonucleotide
  Antisense strand to SEQ ID NO: 2458436
ucuaaccagcgcuucccuc

SEQ ID NO: 2458438 - RNA, 19 nt, Artificial Sequence
  Description of Artificial Sequence: Synthetic oligonucleotide
  Sense strand starting at position 2333 of SEQ ID NO: 1887253
augcaaucaucgccauuga

SEQ ID NO: 2458439 - RNA, 19 nt, Artificial Sequence
  Description of Artificial Sequence: Synthetic oligonucleotide
  Antisense strand to SEQ ID NO: 2458438
ucaauggcgaugauugcau

SEQ ID NO: 2458440 - RNA, 19 nt, Artificial Sequence
  Description of Artificial Sequence: Synthetic oligonucleotide
  Sense strand starting at position 2672 of SEQ ID NO: 1887253
gggcguucuagggaugagu

SEQ ID NO: 2458441 - RNA, 19 nt, Artificial Sequence
  Description of Artificial Sequence: Synthetic oligonucleotide
  Antisense strand to SEQ ID NO: 2458440
acucaucccuagaacgccc

SEQ ID NO: 2458442 - RNA, 19 nt, Artificial Sequence
  Description of Artificial Sequence: Synthetic oligonucleotide
  Sense strand starting at position 3257 of SEQ ID NO: 1887253
acaggugacaucuauucga

SEQ ID NO: 2458443 - RNA, 19 nt, Artificial Sequence
  Description of Artificial Sequence: Synthetic oligonucleotide
  Antisense strand to SEQ ID NO: 2458442
ucgaauagaugucaccugu

SEQ ID NO: 2458444 - RNA, 19 nt, Artificial Sequence
  Description of Artificial Sequence: Synthetic oligonucleotide
  Sense strand starting at position 3260 of SEQ ID NO: 1887253
ggugacaucuauucgauca

SEQ ID NO: 2458445 - RNA, 19 nt, Artificial Sequence
  Description of Artificial Sequence: Synthetic oligonucleotide
  Antisense strand to SEQ ID NO: 2458444
ugaucgaauagaugucacc

SEQ ID NO: 2458446 - RNA, 19 nt, Artificial Sequence
  Description of Artificial Sequence: Synthetic oligonucleotide
  Sense strand starting at position 3261 of SEQ ID NO: 1887253
gugacaucuauucgaucag

SEQ ID NO: 2458447 - RNA, 19 nt, Artificial Sequence
  Description of Artificial Sequence: Synthetic oligonucleotide
  Antisense strand to SEQ ID NO: 2458446
cugaucgaauagaugucac

SEQ ID NO: 2458448 - RNA, 19 nt, Artificial Sequence
  Description of Artificial Sequence: Synthetic oligonucleotide
  Sense strand starting at position 3267 of SEQ ID NO: 1887253
ucuauucgaucagucaaca

SEQ ID NO: 2458449 - RNA, 19 nt, Artificial Sequence
  Description of Artificial Sequence: Synthetic oligonucleotide
  Antisense strand to SEQ ID NO: 2458448
uguugacugaucgaauaga

SEQ ID NO: 2458450 - RNA, 19 nt, Artificial Sequence
  Description of Artificial Sequence: Synthetic oligonucleotide
  Sense strand starting at position 3272 of SEQ ID NO: 1887253
ucgaucagucaacagauau

SEQ ID NO: 2458451 - RNA, 19 nt, Artificial Sequence
  Description of Artificial Sequence: Synthetic oligonucleotide
  Antisense strand to SEQ ID NO: 2458450
auaucuguugacugaucga

SEQ ID NO: 2458452 - RNA, 19 nt, Artificial Sequence
  Description of Artificial Sequence: Synthetic oligonucleotide
  Sense strand starting at position 3286 of SEQ ID NO: 1887253
gauauuuauugcgcaccua

SEQ ID NO: 2458453 - RNA, 19 nt, Artificial Sequence
  Description of Artificial Sequence: Synthetic oligonucleotide
  Antisense strand to SEQ ID NO: 2458452
uaggugcgcaauaaauauc

SEQ ID NO: 2458454 - RNA, 19 nt, Artificial Sequence
  Description of Artificial Sequence: Synthetic oligonucleotide
  Sense strand starting at position 3384 of SEQ ID NO: 1887253
cgcucccuuccacaagaaa

SEQ ID NO: 2458455 - RNA, 19 nt, Artificial Sequence
  Description of Artificial Sequence: Synthetic oligonucleotide
  Antisense strand to SEQ ID NO: 2458454
uuucuuguggaagggagcg

SEQ ID NO: 2458456 - RNA, 19 nt, Artificial Sequence
  Description of Artificial Sequence: Synthetic oligonucleotide
  Sense strand starting at position 3403 of SEQ ID NO: 1887253
cucguguccggcgugaaga

SEQ ID NO: 2458457 - RNA, 19 nt, Artificial Sequence
  Description of Artificial Sequence: Synthetic oligonucleotide
  Antisense strand to SEQ ID NO: 2458456
ucuucacgccggacacgag

SEQ ID NO: 2458458 - RNA, 19 nt, Artificial Sequence
  Description of Artificial Sequence: Synthetic oligonucleotide
  Sense strand starting at position 3515 of SEQ ID NO: 1887253
ggagucuucuaccugcaag

SEQ ID NO: 2458459 - RNA, 19 nt, Artificial Sequence
  Description of Artificial Sequence: Synthetic oligonucleotide
  Antisense strand to SEQ ID NO: 2458458
cuugcagguagaagacucc

SEQ ID NO: 2458460 - RNA, 19 nt, Artificial Sequence
  Description of Artificial Sequence: Synthetic oligonucleotide
  Sense strand starting at position 3518 of SEQ ID NO: 1887253
gucuucuaccugcaaggga

SEQ ID NO: 2458461 - RNA, 19 nt, Artificial Sequence
  Description of Artificial Sequence: Synthetic oligonucleotide
  Antisense strand to SEQ ID NO: 2458460
ucccuugcagguagaagac

SEQ ID NO: 2458462 - RNA, 19 nt, Artificial Sequence
  Description of Artificial Sequence: Synthetic oligonucleotide
  Sense strand starting at position 3742 of SEQ ID NO: 1887253
uccuuaauucgccagguaa

SEQ ID NO: 2458463 - RNA, 19 nt, Artificial Sequence
  Description of Artificial Sequence: Synthetic oligonucleotide
  Antisense strand to SEQ ID NO: 2458462
uuaccuggcgaauuaagga

SEQ ID NO: 2458464 - RNA, 19 nt, Artificial Sequence
  Description of Artificial Sequence: Synthetic oligonucleotide
  Sense strand starting at position 3806 of SEQ ID NO: 1887253
gaguguuugcgagaaacuc

SEQ ID NO: 2458465 - RNA, 19 nt, Artificial Sequence
  Description of Artificial Sequence: Synthetic oligonucleotide
  Antisense strand to SEQ ID NO: 2458464
gaguuucucgcaaacacuc

SEQ ID NO: 2458466 - RNA, 19 nt, Artificial Sequence
  Description of Artificial Sequence: Synthetic oligonucleotide
  Sense strand starting at position 3962 of SEQ ID NO: 1887253
cucgguuucccgagggcuu

SEQ ID NO: 2458467 - RNA, 19 nt, Artificial Sequence
  Description of Artificial Sequence: Synthetic oligonucleotide
  Antisense strand to SEQ ID NO: 2458466
aagcccucgggaaaccgag

SEQ ID NO: 2458468 - RNA, 19 nt, Artificial Sequence
  Description of Artificial Sequence: Synthetic oligonucleotide
  Sense strand starting at position 111 of SEQ ID NO: 1887255
gcaggaguacagcaauguu

SEQ ID NO: 2458469 - RNA, 19 nt, Artificial Sequence
  Description of Artificial Sequence: Synthetic oligonucleotide
  Antisense strand to SEQ ID NO: 2458468
aacauugcuguacuccugc

SEQ ID NO: 2458470 - RNA, 19 nt, Artificial Sequence
  Description of Artificial Sequence: Synthetic oligonucleotide
  Sense strand starting at position 114 of SEQ ID NO: 1887255
ggaguacagcaauguucuu

SEQ ID NO: 2458471 - RNA, 19 nt, Artificial Sequence
  Description of Artificial Sequence: Synthetic oligonucleotide
  Antisense strand to SEQ ID NO: 2458470
aagaacauugcuguacucc

SEQ ID NO: 2458472 - RNA, 19 nt, Artificial Sequence
  Description of Artificial Sequence: Synthetic oligonucleotide
  Sense strand starting at position 502 of SEQ ID NO: 1887255
caauuaugcugauggagga

SEQ ID NO: 2458473 - RNA, 19 nt, Artificial Sequence
  Description of Artificial Sequence: Synthetic oligonucleotide
  Antisense strand to SEQ ID NO: 2458472
uccuccaucagcauaauug

SEQ ID NO: 2458474 - RNA, 19 nt, Artificial Sequence
  Description of Artificial Sequence: Synthetic oligonucleotide
  Sense strand starting at position 572 of SEQ ID NO: 1887255
aucauuaagccuugagaca

SEQ ID NO: 2458475 - RNA, 19 nt, Artificial Sequence
  Description of Artificial Sequence: Synthetic oligonucleotide
  Antisense strand to SEQ ID NO: 2458474
ugucucaaggcuuaaugau

SEQ ID NO: 2458476 - RNA, 19 nt, Artificial Sequence
  Description of Artificial Sequence: Synthetic oligonucleotide
  Sense strand starting at position 573 of SEQ ID NO: 1887255
ucauuaagccuugagacau

SEQ ID NO: 2458477 - RNA, 19 nt, Artificial Sequence
  Description of Artificial Sequence: Synthetic oligonucleotide
  Antisense strand to SEQ ID NO: 2458476
augucucaaggcuuaauga

SEQ ID NO: 2458478 - RNA, 19 nt, Artificial Sequence
  Description of Artificial Sequence: Synthetic oligonucleotide
  Sense strand starting at position 584 of SEQ ID NO: 1887255
ugagacauguauuauuucu

SEQ ID NO: 2458479 - RNA, 19 nt, Artificial Sequence
  Description of Artificial Sequence: Synthetic oligonucleotide
  Antisense strand to SEQ ID NO: 2458478
agaaauaauacaugucuca

SEQ ID NO: 2458480 - RNA, 19 nt, Artificial Sequence
  Description of Artificial Sequence: Synthetic oligonucleotide
  Sense strand starting at position 592 of SEQ ID NO: 1887255
guauuauuucuuugcagca

SEQ ID NO: 2458481 - RNA, 19 nt, Artificial Sequence
  Description of Artificial Sequence: Synthetic oligonucleotide
  Antisense strand to SEQ ID NO: 2458480
ugcugcaaagaaauaauac

SEQ ID NO: 2458482 - RNA, 19 nt, Artificial Sequence
  Description of Artificial Sequence: Synthetic oligonucleotide
  Sense strand starting at position 634 of SEQ ID NO: 1887255
ggcucaagcuauguacaca

SEQ ID NO: 2458483 - RNA, 19 nt, Artificial Sequence
  Description of Artificial Sequence: Synthetic oligonucleotide
  Antisense strand to SEQ ID NO: 2458482
uguguacauagcuugagcc

SEQ ID NO: 2458484 - RNA, 19 nt, Artificial Sequence
  Description of Artificial Sequence: Synthetic oligonucleotide
  Sense strand starting at position 658 of SEQ ID NO: 1887255
gaugacagguaucuaaugu

SEQ ID NO: 2458485 - RNA, 19 nt, Artificial Sequence
  Description of Artificial Sequence: Synthetic oligonucleotide
  Antisense strand to SEQ ID NO: 2458484
acauuagauaccugucauc

SEQ ID NO: 2458486 - RNA, 19 nt, Artificial Sequence
  Description of Artificial Sequence: Synthetic oligonucleotide
  Sense strand starting at position 683 of SEQ ID NO: 1887255
ucaugaagcucagcuguaa

SEQ ID NO: 2458487 - RNA, 19 nt, Artificial Sequence
  Description of Artificial Sequence: Synthetic oligonucleotide
  Antisense strand to SEQ ID NO: 2458486
uuacagcugagcuucauga

SEQ ID NO: 2458488 - RNA, 19 nt, Artificial Sequence
  Description of Artificial Sequence: Synthetic oligonucleotide
  Sense strand starting at position 687 of SEQ ID NO: 1887255
gaagcucagcuguaaugca

SEQ ID NO: 2458489 - RNA, 19 nt, Artificial Sequence
  Description of Artificial Sequence: Synthetic oligonucleotide
  Antisense strand to SEQ ID NO: 2458488
ugcauuacagcugagcuuc

SEQ ID NO: 2458490 - RNA, 19 nt, Artificial Sequence
  Description of Artificial Sequence: Synthetic oligonucleotide
  Sense strand starting at position 935 of SEQ ID NO: 1887255
guacucucaguuggcaauu

SEQ ID NO: 2458491 - RNA, 19 nt, Artificial Sequence
  Description of Artificial Sequence: Synthetic oligonucleotide
  Antisense strand to SEQ ID NO: 2458490
aauugccaacugagaguac

SEQ ID NO: 2458492 - RNA, 19 nt, Artificial Sequence
  Description of Artificial Sequence: Synthetic oligonucleotide
  Sense strand starting at position 1012 of SEQ ID NO: 1887255
agggaagcuugacaaagau

SEQ ID NO: 2458493 - RNA, 19 nt, Artificial Sequence
  Description of Artificial Sequence: Synthetic oligonucleotide
  Antisense strand to SEQ ID NO: 2458492
aucuuugucaagcuucccu

SEQ ID NO: 2458494 - RNA, 19 nt, Artificial Sequence
  Description of Artificial Sequence: Synthetic oligonucleotide
  Sense strand starting at position 1065 of SEQ ID NO: 1887255
cuugcuaucuaccaggaca

SEQ ID NO: 2458495 - RNA, 19 nt, Artificial Sequence
  Description of Artificial Sequence: Synthetic oligonucleotide
  Antisense strand to SEQ ID NO: 2458494
uguccugguagauagcaag

SEQ ID NO: 2458496 - RNA, 19 nt, Artificial Sequence
  Description of Artificial Sequence: Synthetic oligonucleotide
  Sense strand starting at position 1144 of SEQ ID NO: 1887255
ugcucugacccuugcuuaa

SEQ ID NO: 2458497 - RNA, 19 nt, Artificial Sequence
  Description of Artificial Sequence: Synthetic oligonucleotide
  Antisense strand to SEQ ID NO: 2458496
uuaagcaagggucagagca

SEQ ID NO: 2458498 - RNA, 19 nt, Artificial Sequence
  Description of Artificial Sequence: Synthetic oligonucleotide
  Sense strand starting at position 1522 of SEQ ID NO: 1887255
accacucuggucugggaua

SEQ ID NO: 2458499 - RNA, 19 nt, Artificial Sequence
  Description of Artificial Sequence: Synthetic oligonucleotide
  Antisense strand to SEQ ID NO: 2458498
uaucccagaccagaguggu

SEQ ID NO: 2458500 - RNA, 19 nt, Artificial Sequence
  Description of Artificial Sequence: Synthetic oligonucleotide
  Sense strand starting at position 1534 of SEQ ID NO: 1887255
ugggauaccuuggucccaa

SEQ ID NO: 2458501 - RNA, 19 nt, Artificial Sequence
  Description of Artificial Sequence: Synthetic oligonucleotide
  Antisense strand to SEQ ID NO: 2458500
uugggaccaagguauccca

SEQ ID NO: 2458502 - RNA, 19 nt, Artificial Sequence
  Description of Artificial Sequence: Synthetic oligonucleotide
  Sense strand starting at position 1535 of SEQ ID NO: 1887255
gggauaccuuggucccaaa

SEQ ID NO: 2458503 - RNA, 19 nt, Artificial Sequence
  Description of Artificial Sequence: Synthetic oligonucleotide
  Antisense strand to SEQ ID NO: 2458502
uuugggaccaagguauccc

SEQ ID NO: 2458504 - RNA, 19 nt, Artificial Sequence
  Description of Artificial Sequence: Synthetic oligonucleotide
  Sense strand starting at position 1636 of SEQ ID NO: 1887255
gggcaugguccacaaguca

SEQ ID NO: 2458505 - RNA, 19 nt, Artificial Sequence
  Description of Artificial Sequence: Synthetic oligonucleotide
  Antisense strand to SEQ ID NO: 2458504
ugacuuguggaccaugccc

SEQ ID NO: 2458506 - RNA, 19 nt, Artificial Sequence
  Description of Artificial Sequence: Synthetic oligonucleotide
  Sense strand starting at position 1968 of SEQ ID NO: 1887255
acagcauuuccuugucucu

SEQ ID NO: 2458507 - RNA, 19 nt, Artificial Sequence
  Description of Artificial Sequence: Synthetic oligonucleotide
  Antisense strand to SEQ ID NO: 2458506
agagacaaggaaaugcugu

SEQ ID NO: 2458508 - RNA, 19 nt, Artificial Sequence
  Description of Artificial Sequence: Synthetic oligonucleotide
  Sense strand starting at position 2040 of SEQ ID NO: 1887255
gcucuaauuggccucguua

SEQ ID NO: 2458509 - RNA, 19 nt, Artificial Sequence
  Description of Artificial Sequence: Synthetic oligonucleotide
  Antisense strand to SEQ ID NO: 2458508
uaacgaggccaauuagagc

SEQ ID NO: 2458510 - RNA, 19 nt, Artificial Sequence
  Description of Artificial Sequence: Synthetic oligonucleotide
  Sense strand starting at position 2635 of SEQ ID NO: 1887255
ccuuucguaauggguaaga

SEQ ID NO: 2458511 - RNA, 19 nt, Artificial Sequence
  Description of Artificial Sequence: Synthetic oligonucleotide
  Antisense strand to SEQ ID NO: 2458510
ucuuacccauuacgaaagg

SEQ ID NO: 2458512 - RNA, 19 nt, Artificial Sequence
  Description of Artificial Sequence: Synthetic oligonucleotide
  Sense strand starting at position 2645 of SEQ ID NO: 1887255
uggguaagagcucgaacuu

SEQ ID NO: 2458513 - RNA, 19 nt, Artificial Sequence
  Description of Artificial Sequence: Synthetic oligonucleotide
  Antisense strand to SEQ ID NO: 2458512
aaguucgagcucuuaccca

SEQ ID NO: 2458514 - RNA, 19 nt, Artificial Sequence
  Description of Artificial Sequence: Synthetic oligonucleotide
  Sense strand starting at position 2646 of SEQ ID NO: 1887255
ggguaagagcucgaacuuu

SEQ ID NO: 2458515 - RNA, 19 nt, Artificial Sequence
  Description of Artificial Sequence: Synthetic oligonucleotide
  Antisense strand to SEQ ID NO: 2458514
aaaguucgagcucuuaccc

SEQ ID NO: 2458516 - RNA, 19 nt, Artificial Sequence
  Description of Artificial Sequence: Synthetic oligonucleotide
  Sense strand starting at position 2709 of SEQ ID NO: 1887255
uuccucaucugggaaguga

SEQ ID NO: 2458517 - RNA, 19 nt, Artificial Sequence
  Description of Artificial Sequence: Synthetic oligonucleotide
  Antisense strand to SEQ ID NO: 2458516
ucacuucccagaugaggaa

SEQ ID NO: 2458518 - RNA, 19 nt, Artificial Sequence
  Description of Artificial Sequence: Synthetic oligonucleotide
  Sense strand starting at position 2713 of SEQ ID NO: 1887255
ucaucugggaagugauagu

SEQ ID NO: 2458519 - RNA, 19 nt, Artificial Sequence
  Description of Artificial Sequence: Synthetic oligonucleotide
  Antisense strand to SEQ ID NO: 2458518
acuaucacuucccagauga

SEQ ID NO: 2458520 - RNA, 19 nt, Artificial Sequence
  Description of Artificial Sequence: Synthetic oligonucleotide
  Sense strand starting at position 2746 of SEQ ID NO: 1887255
gauguuauggucuaagaug

SEQ ID NO: 2458521 - RNA, 19 nt, Artificial Sequence
  Description of Artificial Sequence: Synthetic oligonucleotide
  Antisense strand to SEQ ID NO: 2458520
caucuuagaccauaacauc

SEQ ID NO: 2458522 - RNA, 19 nt, Artificial Sequence
  Description of Artificial Sequence: Synthetic oligonucleotide
  Sense strand starting at position 2754 of SEQ ID NO: 1887255
ggucuaagauguuuguaaa

SEQ ID NO: 2458523 - RNA, 19 nt, Artificial Sequence
  Description of Artificial Sequence: Synthetic oligonucleotide
  Antisense strand to SEQ ID NO: 2458522
uuuacaaacaucuuagacc

SEQ ID NO: 2458524 - RNA, 19 nt, Artificial Sequence
  Description of Artificial Sequence: Synthetic oligonucleotide
  Sense strand starting at position 2755 of SEQ ID NO: 1887255
gucuaagauguuuguaaag

SEQ ID NO: 2458525 - RNA, 19 nt, Artificial Sequence
  Description of Artificial Sequence: Synthetic oligonucleotide
  Antisense strand to SEQ ID NO: 2458524
cuuuacaaacaucuuagac

SEQ ID NO: 2458526 - RNA, 19 nt, Artificial Sequence
  Description of Artificial Sequence: Synthetic oligonucleotide
  Sense strand starting at position 2757 of SEQ ID NO: 1887255
cuaagauguuuguaaagug

SEQ ID NO: 2458527 - RNA, 19 nt, Artificial Sequence
  Description of Artificial Sequence: Synthetic oligonucleotide
  Antisense strand to SEQ ID NO: 2458526
cacuuuacaaacaucuuag

SEQ ID NO: 2458528 - RNA, 19 nt, Artificial Sequence
  Description of Artificial Sequence: Synthetic oligonucleotide
  Sense strand starting at position 2828 of SEQ ID NO: 1887255
cacagcuagugaugaauga

SEQ ID NO: 2458529 - RNA, 19 nt, Artificial Sequence
  Description of Artificial Sequence: Synthetic oligonucleotide
  Antisense strand to SEQ ID NO: 2458528
ucauucaucacuagcugug

SEQ ID NO: 2458530 - RNA, 19 nt, Artificial Sequence
  Description of Artificial Sequence: Synthetic oligonucleotide
  Sense strand starting at position 3268 of SEQ ID NO: 1887255
ugccaaaucugguugcaug

SEQ ID NO: 2458531 - RNA, 19 nt, Artificial Sequence
  Description of Artificial Sequence: Synthetic oligonucleotide
  Antisense strand to SEQ ID NO: 2458530
caugcaaccagauuuggca

SEQ ID NO: 2458532 - RNA, 19 nt, Artificial Sequence
  Description of Artificial Sequence: Synthetic oligonucleotide
  Sense strand starting at position 3269 of SEQ ID NO: 1887255
gccaaaucugguugcaugu

SEQ ID NO: 2458533 - RNA, 19 nt, Artificial Sequence
  Description of Artificial Sequence: Synthetic oligonucleotide
  Antisense strand to SEQ ID NO: 2458532
acaugcaaccagauuuggc

SEQ ID NO: 2458534 - RNA, 19 nt, Artificial Sequence
  Description of Artificial Sequence: Synthetic oligonucleotide
  Sense strand starting at position 3295 of SEQ ID NO: 1887255
ucuagaaacgcuuguuuaa

SEQ ID NO: 2458535 - RNA, 19 nt, Artificial Sequence
  Description of Artificial Sequence: Synthetic oligonucleotide
  Antisense strand to SEQ ID NO: 2458534
uuaaacaagcguuucuaga

SEQ ID NO: 2458536 - RNA, 19 nt, Artificial Sequence
  Description of Artificial Sequence: Synthetic oligonucleotide
  Sense strand starting at position 3571 of SEQ ID NO: 1887255
ccugcugaaugagaaauuu

SEQ ID NO: 2458537 - RNA, 19 nt, Artificial Sequence
  Description of Artificial Sequence: Synthetic oligonucleotide
  Antisense strand to SEQ ID NO: 2458536
aaauuucucauucagcagg

SEQ ID NO: 2458538 - RNA, 19 nt, Artificial Sequence
  Description of Artificial Sequence: Synthetic oligonucleotide
  Sense strand starting at position 3699 of SEQ ID NO: 1887255
gacagcaaguugucugagu

SEQ ID NO: 2458539 - RNA, 19 nt, Artificial Sequence
  Description of Artificial Sequence: Synthetic oligonucleotide
  Antisense strand to SEQ ID NO: 2458538
acucagacaacuugcuguc

SEQ ID NO: 2458540 - RNA, 19 nt, Artificial Sequence
  Description of Artificial Sequence: Synthetic oligonucleotide
  Sense strand starting at position 3700 of SEQ ID NO: 1887255
acagcaaguugucugaguu

SEQ ID NO: 2458541 - RNA, 19 nt, Artificial Sequence
  Description of Artificial Sequence: Synthetic oligonucleotide
  Antisense strand to SEQ ID NO: 2458540
aacucagacaacuugcugu

SEQ ID NO: 2458542 - RNA, 19 nt, Artificial Sequence
  Description of Artificial Sequence: Synthetic oligonucleotide
  Sense strand starting at position 3701 of SEQ ID NO: 1887255
cagcaaguugucugaguuu

SEQ ID NO: 2458543 - RNA, 19 nt, Artificial Sequence
  Description of Artificial Sequence: Synthetic oligonucleotide
  Antisense strand to SEQ ID NO: 2458542
aaacucagacaacuugcug

SEQ ID NO: 2458544 - RNA, 19 nt, Artificial Sequence
  Description of Artificial Sequence: Synthetic oligonucleotide
  Sense strand starting at position 3749 of SEQ ID NO: 1887255
ggcacagaaucuucuuacu

SEQ ID NO: 2458545 - RNA, 19 nt, Artificial Sequence
  Description of Artificial Sequence: Synthetic oligonucleotide
  Antisense strand to SEQ ID NO: 2458544
aguaagaagauucugugcc

SEQ ID NO: 2458546 - RNA, 19 nt, Artificial Sequence
  Description of Artificial Sequence: Synthetic oligonucleotide
  Sense strand starting at position 3789 of SEQ ID NO: 1887255
ggucauugucaugaggacu

SEQ ID NO: 2458547 - RNA, 19 nt, Artificial Sequence
  Description of Artificial Sequence: Synthetic oligonucleotide
  Antisense strand to SEQ ID NO: 2458546
aguccucaugacaaugacc

SEQ ID NO: 2458548 - RNA, 19 nt, Artificial Sequence
  Description of Artificial Sequence: Synthetic oligonucleotide
  Sense strand starting at position 112 of SEQ ID NO: 1887256
gcaagagacugucuuuaua

SEQ ID NO: 2458549 - RNA, 19 nt, Artificial Sequence
  Description of Artificial Sequence: Synthetic oligonucleotide
  Antisense strand to SEQ ID NO: 2458548
uauaaagacagucucuugc

SEQ ID NO: 2458550 - RNA, 19 nt, Artificial Sequence
  Description of Artificial Sequence: Synthetic oligonucleotide
  Sense strand starting at position 1033 of SEQ ID NO: 1887256
gcacauucccacugggacu

SEQ ID NO: 2458551 - RNA, 19 nt, Artificial Sequence
  Description of Artificial Sequence: Synthetic oligonucleotide
  Antisense strand to SEQ ID NO: 2458550
agucccagugggaaugugc

SEQ ID NO: 2458552 - RNA, 19 nt, Artificial Sequence
  Description of Artificial Sequence: Synthetic oligonucleotide
  Sense strand starting at position 1192 of SEQ ID NO: 1887256
uguauuaagacuugcagag

SEQ ID NO: 2458553 - RNA, 19 nt, Artificial Sequence
  Description of Artificial Sequence: Synthetic oligonucleotide
  Antisense strand to SEQ ID NO: 2458552
cucugcaagucuuaauaca

SEQ ID NO: 2458554 - RNA, 19 nt, Artificial Sequence
  Description of Artificial Sequence: Synthetic oligonucleotide
  Sense strand starting at position 1196 of SEQ ID NO: 1887256
uuaagacuugcagagugua

SEQ ID NO: 2458555 - RNA, 19 nt, Artificial Sequence
  Description of Artificial Sequence: Synthetic oligonucleotide
  Antisense strand to SEQ ID NO: 2458554
uacacucugcaagucuuaa

SEQ ID NO: 2458556 - RNA, 19 nt, Artificial Sequence
  Description of Artificial Sequence: Synthetic oligonucleotide
  Sense strand starting at position 1199 of SEQ ID NO: 1887256
agacuugcagaguguaaac

SEQ ID NO: 2458557 - RNA, 19 nt, Artificial Sequence
  Description of Artificial Sequence: Synthetic oligonucleotide
  Antisense strand to SEQ ID NO: 2458556
guuuacacucugcaagucu

SEQ ID NO: 2458558 - RNA, 19 nt, Artificial Sequence
  Description of Artificial Sequence: Synthetic oligonucleotide
  Sense strand starting at position 2146 of SEQ ID NO: 1887256
cgacuuggucugagacgug

SEQ ID NO: 2458559 - RNA, 19 nt, Artificial Sequence
  Description of Artificial Sequence: Synthetic oligonucleotide
  Antisense strand to SEQ ID NO: 2458558
cacgucucagaccaagucg

SEQ ID NO: 2458560 - RNA, 19 nt, Artificial Sequence
  Description of Artificial Sequence: Synthetic oligonucleotide
  Sense strand starting at position 2183 of SEQ ID NO: 1887256
ugaagauguggcgagugaa

SEQ ID NO: 2458561 - RNA, 19 nt, Artificial Sequence
  Description of Artificial Sequence: Synthetic oligonucleotide
  Antisense strand to SEQ ID NO: 2458560
uucacucgccacaucuuca

SEQ ID NO: 2458562 - RNA, 19 nt, Artificial Sequence
  Description of Artificial Sequence: Synthetic oligonucleotide
  Sense strand starting at position 2247 of SEQ ID NO: 1887256
gagaucucuggcggagaga

SEQ ID NO: 2458563 - RNA, 19 nt, Artificial Sequence
  Description of Artificial Sequence: Synthetic oligonucleotide
  Antisense strand to SEQ ID NO: 2458562
ucucuccgccagagaucuc

SEQ ID NO: 2458564 - RNA, 19 nt, Artificial Sequence
  Description of Artificial Sequence: Synthetic oligonucleotide
  Sense strand starting at position 2303 of SEQ ID NO: 1887256
ucuacuguccuggaaaguu

SEQ ID NO: 2458565 - RNA, 19 nt, Artificial Sequence
  Description of Artificial Sequence: Synthetic oligonucleotide
  Antisense strand to SEQ ID NO: 2458564
aacuuuccaggacaguaga

SEQ ID NO: 2458566 - RNA, 19 nt, Artificial Sequence
  Description of Artificial Sequence: Synthetic oligonucleotide
  Sense strand starting at position 2389 of SEQ ID NO: 1887256
gcgagcguacucuucuaau

SEQ ID NO: 2458567 - RNA, 19 nt, Artificial Sequence
  Description of Artificial Sequence: Synthetic oligonucleotide
  Antisense strand to SEQ ID NO: 2458566
auuagaagaguacgcucgc

SEQ ID NO: 2458568 - RNA, 19 nt, Artificial Sequence
  Description of Artificial Sequence: Synthetic oligonucleotide
  Sense strand starting at position 2483 of SEQ ID NO: 1887256
uugguuucuuucucaggga

SEQ ID NO: 2458569 - RNA, 19 nt, Artificial Sequence
  Description of Artificial Sequence: Synthetic oligonucleotide
  Antisense strand to SEQ ID NO: 2458568
ucccugagaaagaaaccaa

SEQ ID NO: 2458570 - RNA, 19 nt, Artificial Sequence
  Description of Artificial Sequence: Synthetic oligonucleotide
  Sense strand starting at position 2513 of SEQ ID NO: 1887256
gagaacuccucuccgugaa

SEQ ID NO: 2458571 - RNA, 19 nt, Artificial Sequence
  Description of Artificial Sequence: Synthetic oligonucleotide
  Antisense strand to SEQ ID NO: 2458570
uucacggagaggaguucuc

SEQ ID NO: 2458572 - RNA, 19 nt, Artificial Sequence
  Description of Artificial Sequence: Synthetic oligonucleotide
  Sense strand starting at position 2517 of SEQ ID NO: 1887256
acuccucuccgugaacuua

SEQ ID NO: 2458573 - RNA, 19 nt, Artificial Sequence
  Description of Artificial Sequence: Synthetic oligonucleotide
  Antisense strand to SEQ ID NO: 2458572
uaaguucacggagaggagu

SEQ ID NO: 2458574 - RNA, 19 nt, Artificial Sequence
  Description of Artificial Sequence: Synthetic oligonucleotide
  Sense strand starting at position 2655 of SEQ ID NO: 1887256
ggcuguuugcccaggguga

SEQ ID NO: 2458575 - RNA, 19 nt, Artificial Sequence
  Description of Artificial Sequence: Synthetic oligonucleotide
  Antisense strand to SEQ ID NO: 2458574
ucacccugggcaaacagcc

SEQ ID NO: 2458576 - RNA, 19 nt, Artificial Sequence
  Description of Artificial Sequence: Synthetic oligonucleotide
  Sense strand starting at position 2691 of SEQ ID NO: 1887256
gggccagggcuacaauaau

SEQ ID NO: 2458577 - RNA, 19 nt, Artificial Sequence
  Description of Artificial Sequence: Synthetic oligonucleotide
  Antisense strand to SEQ ID NO: 2458576
auuauuguagcccuggccc

SEQ ID NO: 2458578 - RNA, 19 nt, Artificial Sequence
  Description of Artificial Sequence: Synthetic oligonucleotide
  Sense strand starting at position 2818 of SEQ ID NO: 1887256
cucuguuuagcuguuaguu

SEQ ID NO: 2458579 - RNA, 19 nt, Artificial Sequence
  Description of Artificial Sequence: Synthetic oligonucleotide
  Antisense strand to SEQ ID NO: 2458578
aacuaacagcuaaacagag

SEQ ID NO: 2458580 - RNA, 19 nt, Artificial Sequence
  Description of Artificial Sequence: Synthetic oligonucleotide
  Sense strand starting at position 2819 of SEQ ID NO: 1887256
ucuguuuagcuguuaguuu

SEQ ID NO: 2458581 - RNA, 19 nt, Artificial Sequence
  Description of Artificial Sequence: Synthetic oligonucleotide
  Antisense strand to SEQ ID NO: 2458580
aaacuaacagcuaaacaga

SEQ ID NO: 2458582 - RNA, 19 nt, Artificial Sequence
  Description of Artificial Sequence: Synthetic oligonucleotide
  Sense strand starting at position 2922 of SEQ ID NO: 1887256
gggucacuuacggaaaggu

SEQ ID NO: 2458583 - RNA, 19 nt, Artificial Sequence
  Description of Artificial Sequence: Synthetic oligonucleotide
  Antisense strand to SEQ ID NO: 2458582
accuuuccguaagugaccc

SEQ ID NO: 2458584 - RNA, 19 nt, Artificial Sequence
  Description of Artificial Sequence: Synthetic oligonucleotide
  Sense strand starting at position 2939 of SEQ ID NO: 1887256
gucagucaccugcaagauu

SEQ ID NO: 2458585 - RNA, 19 nt, Artificial Sequence
  Description of Artificial Sequence: Synthetic oligonucleotide
  Antisense strand to SEQ ID NO: 2458584
aaucuugcaggugacugac

SEQ ID NO: 2458586 - RNA, 19 nt, Artificial Sequence
  Description of Artificial Sequence: Synthetic oligonucleotide
  Sense strand starting at position 2994 of SEQ ID NO: 1887256
cucuccugggaucaaguua

SEQ ID NO: 2458587 - RNA, 19 nt, Artificial Sequence
  Description of Artificial Sequence: Synthetic oligonucleotide
  Antisense strand to SEQ ID NO: 2458586
uaacuugaucccaggagag

SEQ ID NO: 2458588 - RNA, 19 nt, Artificial Sequence
  Description of Artificial Sequence: Synthetic oligonucleotide
  Sense strand starting at position 3110 of SEQ ID NO: 1887256
gacguagccauguagaaac

SEQ ID NO: 2458589 - RNA, 19 nt, Artificial Sequence
  Description of Artificial Sequence: Synthetic oligonucleotide
  Antisense strand to SEQ ID NO: 2458588
guuucuacauggcuacguc

SEQ ID NO: 2458590 - RNA, 19 nt, Artificial Sequence
  Description of Artificial Sequence: Synthetic oligonucleotide
  Sense strand starting at position 3166 of SEQ ID NO: 1887256
gcuugacuccuguauaaga

SEQ ID NO: 2458591 - RNA, 19 nt, Artificial Sequence
  Description of Artificial Sequence: Synthetic oligonucleotide
  Antisense strand to SEQ ID NO: 2458590
ucuuauacaggagucaagc

SEQ ID NO: 2458592 - RNA, 19 nt, Artificial Sequence
  Description of Artificial Sequence: Synthetic oligonucleotide
  Sense strand starting at position 3168 of SEQ ID NO: 1887256
uugacuccuguauaagauu

SEQ ID NO: 2458593 - RNA, 19 nt, Artificial Sequence
  Description of Artificial Sequence: Synthetic oligonucleotide
  Antisense strand to SEQ ID NO: 2458592
aaucuuauacaggagucaa

SEQ ID NO: 2458594 - RNA, 19 nt, Artificial Sequence
  Description of Artificial Sequence: Synthetic oligonucleotide
  Sense strand starting at position 3176 of SEQ ID NO: 1887256
uguauaagauuccuccaag

SEQ ID NO: 2458595 - RNA, 19 nt, Artificial Sequence
  Description of Artificial Sequence: Synthetic oligonucleotide
  Antisense strand to SEQ ID NO: 2458594
cuuggaggaaucuuauaca

SEQ ID NO: 2458596 - RNA, 19 nt, Artificial Sequence
  Description of Artificial Sequence: Synthetic oligonucleotide
  Sense strand starting at position 3177 of SEQ ID NO: 1887256
guauaagauuccuccaaga

SEQ ID NO: 2458597 - RNA, 19 nt, Artificial Sequence
  Description of Artificial Sequence: Synthetic oligonucleotide
  Antisense strand to SEQ ID NO: 2458596
ucuuggaggaaucuuauac

SEQ ID NO: 2458598 - RNA, 19 nt, Artificial Sequence
  Description of Artificial Sequence: Synthetic oligonucleotide
  Sense strand starting at position 3204 of SEQ ID NO: 1887256
aggacuaacugccuggaaa

SEQ ID NO: 2458599 - RNA, 19 nt, Artificial Sequence
  Description of Artificial Sequence: Synthetic oligonucleotide
  Antisense strand to SEQ ID NO: 2458598
uuuccaggcaguuaguccu

SEQ ID NO: 2458600 - RNA, 19 nt, Artificial Sequence
  Description of Artificial Sequence: Synthetic oligonucleotide
  Sense strand starting at position 3263 of SEQ ID NO: 1887256
uaaugagaacuauguaguu

SEQ ID NO: 2458601 - RNA, 19 nt, Artificial Sequence
  Description of Artificial Sequence: Synthetic oligonucleotide
  Antisense strand to SEQ ID NO: 2458600
aacuacauaguucucauua

SEQ ID NO: 2458602 - RNA, 19 nt, Artificial Sequence
  Description of Artificial Sequence: Synthetic oligonucleotide
  Sense strand starting at position 3268 of SEQ ID NO: 1887256
agaacuauguaguuuacca

SEQ ID NO: 2458603 - RNA, 19 nt, Artificial Sequence
  Description of Artificial Sequence: Synthetic oligonucleotide
  Antisense strand to SEQ ID NO: 2458602
ugguaaacuacauaguucu

SEQ ID NO: 2458604 - RNA, 19 nt, Artificial Sequence
  Description of Artificial Sequence: Synthetic oligonucleotide
  Sense strand starting at position 3351 of SEQ ID NO: 1887256
cuguuauagcuguauagga

SEQ ID NO: 2458605 - RNA, 19 nt, Artificial Sequence
  Description of Artificial Sequence: Synthetic oligonucleotide
  Antisense strand to SEQ ID NO: 2458604
uccuauacagcuauaacag

SEQ ID NO: 2458606 - RNA, 19 nt, Artificial Sequence
  Description of Artificial Sequence: Synthetic oligonucleotide
  Sense strand starting at position 3353 of SEQ ID NO: 1887256
guuauagcuguauaggaag

SEQ ID NO: 2458607 - RNA, 19 nt, Artificial Sequence
  Description of Artificial Sequence: Synthetic oligonucleotide
  Antisense strand to SEQ ID NO: 2458606
cuuccuauacagcuauaac

SEQ ID NO: 2458608 - RNA, 19 nt, Artificial Sequence
  Description of Artificial Sequence: Synthetic oligonucleotide
  Sense strand starting at position 3389 of SEQ ID NO: 1887256
ugaccaugacuuuguuauu

SEQ ID NO: 2458609 - RNA, 19 nt, Artificial Sequence
  Description of Artificial Sequence: Synthetic oligonucleotide
  Antisense strand to SEQ ID NO: 2458608
aauaacaaagucaugguca

SEQ ID NO: 2458610 - RNA, 19 nt, Artificial Sequence
  Description of Artificial Sequence: Synthetic oligonucleotide
  Sense strand starting at position 3511 of SEQ ID NO: 1887256
augacauccugaguaacag

SEQ ID NO: 2458611 - RNA, 19 nt, Artificial Sequence
  Description of Artificial Sequence: Synthetic oligonucleotide
  Antisense strand to SEQ ID NO: 2458610
cuguuacucaggaugucau

SEQ ID NO: 2458612 - RNA, 19 nt, Artificial Sequence
  Description of Artificial Sequence: Synthetic oligonucleotide
  Sense strand starting at position 3523 of SEQ ID NO: 1887256
guaacagaaguaugaugau

SEQ ID NO: 2458613 - RNA, 19 nt, Artificial Sequence
  Description of Artificial Sequence: Synthetic oligonucleotide
  Antisense strand to SEQ ID NO: 2458612
aucaucauacuucuguuac

SEQ ID NO: 2458614 - RNA, 19 nt, Artificial Sequence
  Description of Artificial Sequence: Synthetic oligonucleotide
  Sense strand starting at position 3548 of SEQ ID NO: 1887256
gcagucuuucuugaaagag

SEQ ID NO: 2458615 - RNA, 19 nt, Artificial Sequence
  Description of Artificial Sequence: Synthetic oligonucleotide
  Antisense strand to SEQ ID NO: 2458614
cucuuucaagaaagacugc

SEQ ID NO: 2458616 - RNA, 19 nt, Artificial Sequence
  Description of Artificial Sequence: Synthetic oligonucleotide
  Sense strand starting at position 3608 of SEQ ID NO: 1887256
ggaaauauuugauaaucug

SEQ ID NO: 2458617 - RNA, 19 nt, Artificial Sequence
  Description of Artificial Sequence: Synthetic oligonucleotide
  Antisense strand to SEQ ID NO: 2458616
cagauuaucaaauauuucc

SEQ ID NO: 2458618 - RNA, 19 nt, Artificial Sequence
  Description of Artificial Sequence: Synthetic oligonucleotide
  Sense strand starting at position 3614 of SEQ ID NO: 1887256
auuugauaaucugugcugu

SEQ ID NO: 2458619 - RNA, 19 nt, Artificial Sequence
  Description of Artificial Sequence: Synthetic oligonucleotide
  Antisense strand to SEQ ID NO: 2458618
acagcacagauuaucaaau

SEQ ID NO: 2458620 - RNA, 19 nt, Artificial Sequence
  Description of Artificial Sequence: Synthetic oligonucleotide
  Sense strand starting at position 3640 of SEQ ID NO: 1887256
gguaacuacuagucacaug

SEQ ID NO: 2458621 - RNA, 19 nt, Artificial Sequence
  Description of Artificial Sequence: Synthetic oligonucleotide
  Antisense strand to SEQ ID NO: 2458620
caugugacuaguaguuacc

SEQ ID NO: 2458622 - RNA, 19 nt, Artificial Sequence
  Description of Artificial Sequence: Synthetic oligonucleotide
  Sense strand starting at position 3648 of SEQ ID NO: 1887256
cuagucacaugguuauuga

SEQ ID NO: 2458623 - RNA, 19 nt, Artificial Sequence
  Description of Artificial Sequence: Synthetic oligonucleotide
  Antisense strand to SEQ ID NO: 2458622
ucaauaaccaugugacuag

SEQ ID NO: 2458624 - RNA, 19 nt, Artificial Sequence
  Description of Artificial Sequence: Synthetic oligonucleotide
  Sense strand starting at position 3656 of SEQ ID NO: 1887256
augguuauugagcacuuaa

SEQ ID NO: 2458625 - RNA, 19 nt, Artificial Sequence
  Description of Artificial Sequence: Synthetic oligonucleotide
  Antisense strand to SEQ ID NO: 2458624
uuaagugcucaauaaccau

SEQ ID NO: 2458626 - RNA, 19 nt, Artificial Sequence
  Description of Artificial Sequence: Synthetic oligonucleotide
  Sense strand starting at position 3680 of SEQ ID NO: 1887256
ggcugaggugacugaagaa

SEQ ID NO: 2458627 - RNA, 19 nt, Artificial Sequence
  Description of Artificial Sequence: Synthetic oligonucleotide
  Antisense strand to SEQ ID NO: 2458626
uucuucagucaccucagcc

SEQ ID NO: 2458628 - RNA, 19 nt, Artificial Sequence
  Description of Artificial Sequence: Synthetic oligonucleotide
  Sense strand starting at position 23 of SEQ ID NO: 1887257
ugugaaauauagccaggua

SEQ ID NO: 2458629 - RNA, 19 nt, Artificial Sequence
  Description of Artificial Sequence: Synthetic oligonucleotide
  Antisense strand to SEQ ID NO: 2458628
uaccuggcuauauuucaca

SEQ ID NO: 2458630 - RNA, 19 nt, Artificial Sequence
  Description of Artificial Sequence: Synthetic oligonucleotide
  Sense strand starting at position 24 of SEQ ID NO: 1887257
gugaaauauagccagguac

SEQ ID NO: 2458631 - RNA, 19 nt, Artificial Sequence
  Description of Artificial Sequence: Synthetic oligonucleotide
  Antisense strand to SEQ ID NO: 2458630
guaccuggcuauauuucac

SEQ ID NO: 2458632 - RNA, 19 nt, Artificial Sequence
  Description of Artificial Sequence: Synthetic oligonucleotide
  Sense strand starting at position 444 of SEQ ID NO: 1887257
aacugauugccugaacugu

SEQ ID NO: 2458633 - RNA, 19 nt, Artificial Sequence
  Description of Artificial Sequence: Synthetic oligonucleotide
  Antisense strand to SEQ ID NO: 2458632
acaguucaggcaaucaguu

SEQ ID NO: 2458634 - RNA, 19 nt, Artificial Sequence
  Description of Artificial Sequence: Synthetic oligonucleotide
  Sense strand starting at position 690 of SEQ ID NO: 1887257
agcugugaugcuuagagag

SEQ ID NO: 2458635 - RNA, 19 nt, Artificial Sequence
  Description of Artificial Sequence: Synthetic oligonucleotide
  Antisense strand to SEQ ID NO: 2458634
cucucuaagcaucacagcu

SEQ ID NO: 2458636 - RNA, 19 nt, Artificial Sequence
  Description of Artificial Sequence: Synthetic oligonucleotide
  Sense strand starting at position 704 of SEQ ID NO: 1887257
gagagucuaugauuagcac

SEQ ID NO: 2458637 - RNA, 19 nt, Artificial Sequence
  Description of Artificial Sequence: Synthetic oligonucleotide
  Antisense strand to SEQ ID NO: 2458636
gugcuaaucauagacucuc

SEQ ID NO: 2458638 - RNA, 19 nt, Artificial Sequence
  Description of Artificial Sequence: Synthetic oligonucleotide
  Sense strand starting at position 705 of SEQ ID NO: 1887257
agagucuaugauuagcaca

SEQ ID NO: 2458639 - RNA, 19 nt, Artificial Sequence
  Description of Artificial Sequence: Synthetic oligonucleotide
  Antisense strand to SEQ ID NO: 2458638
ugugcuaaucauagacucu

SEQ ID NO: 2458640 - RNA, 19 nt, Artificial Sequence
  Description of Artificial Sequence: Synthetic oligonucleotide
  Sense strand starting at position 710 of SEQ ID NO: 1887257
cuaugauuagcacauguca

SEQ ID NO: 2458641 - RNA, 19 nt, Artificial Sequence
  Description of Artificial Sequence: Synthetic oligonucleotide
  Antisense strand to SEQ ID NO: 2458640
ugacaugugcuaaucauag

SEQ ID NO: 2458642 - RNA, 19 nt, Artificial Sequence
  Description of Artificial Sequence: Synthetic oligonucleotide
  Sense strand starting at position 737 of SEQ ID NO: 1887257
aggcuacaguuugcauaaa

SEQ ID NO: 2458643 - RNA, 19 nt, Artificial Sequence
  Description of Artificial Sequence: Synthetic oligonucleotide
  Antisense strand to SEQ ID NO: 2458642
uuuaugcaaacuguagccu

SEQ ID NO: 2458644 - RNA, 19 nt, Artificial Sequence
  Description of Artificial Sequence: Synthetic oligonucleotide
  Sense strand starting at position 859 of SEQ ID NO: 1887257
ucaucuauauagguauagu

SEQ ID NO: 2458645 - RNA, 19 nt, Artificial Sequence
  Description of Artificial Sequence: Synthetic oligonucleotide
  Antisense strand to SEQ ID NO: 2458644
acuauaccuauauagauga

SEQ ID NO: 2458646 - RNA, 19 nt, Artificial Sequence
  Description of Artificial Sequence: Synthetic oligonucleotide
  Sense strand starting at position 1009 of SEQ ID NO: 1887257
uuggaacuauuaccaguaa

SEQ ID NO: 2458647 - RNA, 19 nt, Artificial Sequence
  Description of Artificial Sequence: Synthetic oligonucleotide
  Antisense strand to SEQ ID NO: 2458646
uuacugguaauaguuccaa

SEQ ID NO: 2458648 - RNA, 19 nt, Artificial Sequence
  Description of Artificial Sequence: Synthetic oligonucleotide
  Sense strand starting at position 1050 of SEQ ID NO: 1887257
gccugagaacuuuaagcac

SEQ ID NO: 2458649 - RNA, 19 nt, Artificial Sequence
  Description of Artificial Sequence: Synthetic oligonucleotide
  Antisense strand to SEQ ID NO: 2458648
gugcuuaaaguucucaggc

SEQ ID NO: 2458650 - RNA, 19 nt, Artificial Sequence
  Description of Artificial Sequence: Synthetic oligonucleotide
  Sense strand starting at position 1053 of SEQ ID NO: 1887257
ugagaacuuuaagcacauu

SEQ ID NO: 2458651 - RNA, 19 nt, Artificial Sequence
  Description of Artificial Sequence: Synthetic oligonucleotide
  Antisense strand to SEQ ID NO: 2458650
aaugugcuuaaaguucuca

SEQ ID NO: 2458652 - RNA, 19 nt, Artificial Sequence
  Description of Artificial Sequence: Synthetic oligonucleotide
  Sense strand starting at position 1159 of SEQ ID NO: 1887257
acaagcacuugguugagau

SEQ ID NO: 2458653 - RNA, 19 nt, Artificial Sequence
  Description of Artificial Sequence: Synthetic oligonucleotide
  Antisense strand to SEQ ID NO: 2458652
aucucaaccaagugcuugu

SEQ ID NO: 2458654 - RNA, 19 nt, Artificial Sequence
  Description of Artificial Sequence: Synthetic oligonucleotide
  Sense strand starting at position 1160 of SEQ ID NO: 1887257
caagcacuugguugagaua

SEQ ID NO: 2458655 - RNA, 19 nt, Artificial Sequence
  Description of Artificial Sequence: Synthetic oligonucleotide
  Antisense strand to SEQ ID NO: 2458654
uaucucaaccaagugcuug

SEQ ID NO: 2458656 - RNA, 19 nt, Artificial Sequence
  Description of Artificial Sequence: Synthetic oligonucleotide
  Sense strand starting at position 1211 of SEQ ID NO: 1887257
agcuuauaugaaugacugu

SEQ ID NO: 2458657 - RNA, 19 nt, Artificial Sequence
  Description of Artificial Sequence: Synthetic oligonucleotide
  Antisense strand to SEQ ID NO: 2458656
acagucauucauauaagcu

SEQ ID NO: 2458658 - RNA, 19 nt, Artificial Sequence
  Description of Artificial Sequence: Synthetic oligonucleotide
  Sense strand starting at position 1220 of SEQ ID NO: 1887257
gaaugacugucagcaagau

SEQ ID NO: 2458659 - RNA, 19 nt, Artificial Sequence
  Description of Artificial Sequence: Synthetic oligonucleotide
  Antisense strand to SEQ ID NO: 2458658
aucuugcugacagucauuc

SEQ ID NO: 2458660 - RNA, 19 nt, Artificial Sequence
  Description of Artificial Sequence: Synthetic oligonucleotide
  Sense strand starting at position 1275 of SEQ ID NO: 1887257
aucgauauuaacuacggua

SEQ ID NO: 2458661 - RNA, 19 nt, Artificial Sequence
  Description of Artificial Sequence: Synthetic oligonucleotide
  Antisense strand to SEQ ID NO: 2458660
uaccguaguuaauaucgau

SEQ ID NO: 2458662 - RNA, 19 nt, Artificial Sequence
  Description of Artificial Sequence: Synthetic oligonucleotide
  Sense strand starting at position 1277 of SEQ ID NO: 1887257
cgauauuaacuacgguaac

SEQ ID NO: 2458663 - RNA, 19 nt, Artificial Sequence
  Description of Artificial Sequence: Synthetic oligonucleotide
  Antisense strand to SEQ ID NO: 2458662
guuaccguaguuaauaucg

SEQ ID NO: 2458664 - RNA, 19 nt, Artificial Sequence
  Description of Artificial Sequence: Synthetic oligonucleotide
  Sense strand starting at position 1381 of SEQ ID NO: 1887257
gucuaugacgacugucaga

SEQ ID NO: 2458665 - RNA, 19 nt, Artificial Sequence
  Description of Artificial Sequence: Synthetic oligonucleotide
  Antisense strand to SEQ ID NO: 2458664
ucugacagucgucauagac

SEQ ID NO: 2458666 - RNA, 19 nt, Artificial Sequence
  Description of Artificial Sequence: Synthetic oligonucleotide
  Sense strand starting at position 1388 of SEQ ID NO: 1887257
acgacugucagacaagagu

SEQ ID NO: 2458667 - RNA, 19 nt, Artificial Sequence
  Description of Artificial Sequence: Synthetic oligonucleotide
  Antisense strand to SEQ ID NO: 2458666
acucuugucugacagucgu

SEQ ID NO: 2458668 - RNA, 19 nt, Artificial Sequence
  Description of Artificial Sequence: Synthetic oligonucleotide
  Sense strand starting at position 1412 of SEQ ID NO: 1887257
gccaaaugucaagacugca

SEQ ID NO: 2458669 - RNA, 19 nt, Artificial Sequence
  Description of Artificial Sequence: Synthetic oligonucleotide
  Antisense strand to SEQ ID NO: 2458668
ugcagucuugacauuuggc

SEQ ID NO: 2458670 - RNA, 19 nt, Artificial Sequence
  Description of Artificial Sequence: Synthetic oligonucleotide
  Sense strand starting at position 1480 of SEQ ID NO: 1887257
aggugucacuuggucacaa

SEQ ID NO: 2458671 - RNA, 19 nt, Artificial Sequence
  Description of Artificial Sequence: Synthetic oligonucleotide
  Antisense strand to SEQ ID NO: 2458670
uugugaccaagugacaccu

SEQ ID NO: 2458672 - RNA, 19 nt, Artificial Sequence
  Description of Artificial Sequence: Synthetic oligonucleotide
  Sense strand starting at position 1530 of SEQ ID NO: 1887257
gggaaaccugccugauauc

SEQ ID NO: 2458673 - RNA, 19 nt, Artificial Sequence
  Description of Artificial Sequence: Synthetic oligonucleotide
  Antisense strand to SEQ ID NO: 2458672
gauaucaggcagguuuccc

SEQ ID NO: 2458674 - RNA, 19 nt, Artificial Sequence
  Description of Artificial Sequence: Synthetic oligonucleotide
  Sense strand starting at position 1629 of SEQ ID NO: 1887257
ccggaauucugagcaccaa

SEQ ID NO: 2458675 - RNA, 19 nt, Artificial Sequence
  Description of Artificial Sequence: Synthetic oligonucleotide
  Antisense strand to SEQ ID NO: 2458674
uuggugcucagaauuccgg

SEQ ID NO: 2458676 - RNA, 19 nt, Artificial Sequence
  Description of Artificial Sequence: Synthetic oligonucleotide
  Sense strand starting at position 1630 of SEQ ID NO: 1887257
cggaauucugagcaccaaa

SEQ ID NO: 2458677 - RNA, 19 nt, Artificial Sequence
  Description of Artificial Sequence: Synthetic oligonucleotide
  Antisense strand to SEQ ID NO: 2458676
uuuggugcucagaauuccg

SEQ ID NO: 2458678 - RNA, 19 nt, Artificial Sequence
  Description of Artificial Sequence: Synthetic oligonucleotide
  Sense strand starting at position 1751 of SEQ ID NO: 1887257
uugcgaguuaggcccgauu

SEQ ID NO: 2458679 - RNA, 19 nt, Artificial Sequence
  Description of Artificial Sequence: Synthetic oligonucleotide
  Antisense strand to SEQ ID NO: 2458678
aaucgggccuaacucgcaa

SEQ ID NO: 2458680 - RNA, 19 nt, Artificial Sequence
  Description of Artificial Sequence: Synthetic oligonucleotide
  Sense strand starting at position 1762 of SEQ ID NO: 1887257
gcccgauuacucuaggaua

SEQ ID NO: 2458681 - RNA, 19 nt, Artificial Sequence
  Description of Artificial Sequence: Synthetic oligonucleotide
  Antisense strand to SEQ ID NO: 2458680
uauccuagaguaaucgggc

SEQ ID NO: 2458682 - RNA, 19 nt, Artificial Sequence
  Description of Artificial Sequence: Synthetic oligonucleotide
  Sense strand starting at position 1764 of SEQ ID NO: 1887257
ccgauuacucuaggauacu

SEQ ID NO: 2458683 - RNA, 19 nt, Artificial Sequence
  Description of Artificial Sequence: Synthetic oligonucleotide
  Antisense strand to SEQ ID NO: 2458682
aguauccuagaguaaucgg

SEQ ID NO: 2458684 - RNA, 19 nt, Artificial Sequence
  Description of Artificial Sequence: Synthetic oligonucleotide
  Sense strand starting at position 2571 of SEQ ID NO: 1887257
ggagaaguguugagacaug

SEQ ID NO: 2458685 - RNA, 19 nt, Artificial Sequence
  Description of Artificial Sequence: Synthetic oligonucleotide
  Antisense strand to SEQ ID NO: 2458684
caugucucaacacuucucc

SEQ ID NO: 2458686 - RNA, 19 nt, Artificial Sequence
  Description of Artificial Sequence: Synthetic oligonucleotide
  Sense strand starting at position 2576 of SEQ ID NO: 1887257
aguguugagacaugggaaa

SEQ ID NO: 2458687 - RNA, 19 nt, Artificial Sequence
  Description of Artificial Sequence: Synthetic oligonucleotide
  Antisense strand to SEQ ID NO: 2458686
uuucccaugucucaacacu

SEQ ID NO: 2458688 - RNA, 19 nt, Artificial Sequence
  Description of Artificial Sequence: Synthetic oligonucleotide
  Sense strand starting at position 2622 of SEQ ID NO: 1887257
gagucugagaccugggauu

SEQ ID NO: 2458689 - RNA, 19 nt, Artificial Sequence
  Description of Artificial Sequence: Synthetic oligonucleotide
  Antisense strand to SEQ ID NO: 2458688
aaucccaggucucagacuc

SEQ ID NO: 2458690 - RNA, 19 nt, Artificial Sequence
  Description of Artificial Sequence: Synthetic oligonucleotide
  Sense strand starting at position 2669 of SEQ ID NO: 1887257
ggacauguugggcacguaa

SEQ ID NO: 2458691 - RNA, 19 nt, Artificial Sequence
  Description of Artificial Sequence: Synthetic oligonucleotide
  Antisense strand to SEQ ID NO: 2458690
uuacgugcccaacaugucc

SEQ ID NO: 2458692 - RNA, 19 nt, Artificial Sequence
  Description of Artificial Sequence: Synthetic oligonucleotide
  Sense strand starting at position 2684 of SEQ ID NO: 1887257
guaacuuaaucucccugua

SEQ ID NO: 2458693 - RNA, 19 nt, Artificial Sequence
  Description of Artificial Sequence: Synthetic oligonucleotide
  Antisense strand to SEQ ID NO: 2458692
uacagggagauuaaguuac

SEQ ID NO: 2458694 - RNA, 19 nt, Artificial Sequence
  Description of Artificial Sequence: Synthetic oligonucleotide
  Sense strand starting at position 2756 of SEQ ID NO: 1887257
aagauuaaaugacggauuu

SEQ ID NO: 2458695 - RNA, 19 nt, Artificial Sequence
  Description of Artificial Sequence: Synthetic oligonucleotide
  Antisense strand to SEQ ID NO: 2458694
aaauccgucauuuaaucuu

SEQ ID NO: 2458696 - RNA, 19 nt, Artificial Sequence
  Description of Artificial Sequence: Synthetic oligonucleotide
  Sense strand starting at position 3088 of SEQ ID NO: 1887257
ccucaagguauacggaaua

SEQ ID NO: 2458697 - RNA, 19 nt, Artificial Sequence
  Description of Artificial Sequence: Synthetic oligonucleotide
  Antisense strand to SEQ ID NO: 2458696
uauuccguauaccuugagg

SEQ ID NO: 2458698 - RNA, 19 nt, Artificial Sequence
  Description of Artificial Sequence: Synthetic oligonucleotide
  Sense strand starting at position 3216 of SEQ ID NO: 1887257
ccuuguuacagcugaggaa

SEQ ID NO: 2458699 - RNA, 19 nt, Artificial Sequence
  Description of Artificial Sequence: Synthetic oligonucleotide
  Antisense strand to SEQ ID NO: 2458698
uuccucagcuguaacaagg

SEQ ID NO: 2458700 - RNA, 19 nt, Artificial Sequence
  Description of Artificial Sequence: Synthetic oligonucleotide
  Sense strand starting at position 3267 of SEQ ID NO: 1887257
acaauagaugcucaguaua

SEQ ID NO: 2458701 - RNA, 19 nt, Artificial Sequence
  Description of Artificial Sequence: Synthetic oligonucleotide
  Antisense strand to SEQ ID NO: 2458700
uauacugagcaucuauugu

SEQ ID NO: 2458702 - RNA, 19 nt, Artificial Sequence
  Description of Artificial Sequence: Synthetic oligonucleotide
  Sense strand starting at position 3270 of SEQ ID NO: 1887257
auagaugcucaguauauug

SEQ ID NO: 2458703 - RNA, 19 nt, Artificial Sequence
  Description of Artificial Sequence: Synthetic oligonucleotide
  Antisense strand to SEQ ID NO: 2458702
caauauacugagcaucuau

SEQ ID NO: 2458704 - RNA, 19 nt, Artificial Sequence
  Description of Artificial Sequence: Synthetic oligonucleotide
  Sense strand starting at position 3280 of SEQ ID NO: 1887257
aguauauuggauugaauug

SEQ ID NO: 2458705 - RNA, 19 nt, Artificial Sequence
  Description of Artificial Sequence: Synthetic oligonucleotide
  Antisense strand to SEQ ID NO: 2458704
caauucaauccaauauacu

SEQ ID NO: 2458706 - RNA, 19 nt, Artificial Sequence
  Description of Artificial Sequence: Synthetic oligonucleotide
  Sense strand starting at position 3307 of SEQ ID NO: 1887257
acguucaauggguaagaga

SEQ ID NO: 2458707 - RNA, 19 nt, Artificial Sequence
  Description of Artificial Sequence: Synthetic oligonucleotide
  Antisense strand to SEQ ID NO: 2458706
ucucuuacccauugaacgu

SEQ ID NO: 2458708 - RNA, 19 nt, Artificial Sequence
  Description of Artificial Sequence: Synthetic oligonucleotide
  Sense strand starting at position 90 of SEQ ID NO: 1887258
gggagaauagcguggugau

SEQ ID NO: 2458709 - RNA, 19 nt, Artificial Sequence
  Description of Artificial Sequence: Synthetic oligonucleotide
  Antisense strand to SEQ ID NO: 2458708
aucaccacgcuauucuccc

SEQ ID NO: 2458710 - RNA, 19 nt, Artificial Sequence
  Description of Artificial Sequence: Synthetic oligonucleotide
  Sense strand starting at position 91 of SEQ ID NO: 1887258
ggagaauagcguggugauc

SEQ ID NO: 2458711 - RNA, 19 nt, Artificial Sequence
  Description of Artificial Sequence: Synthetic oligonucleotide
  Antisense strand to SEQ ID NO: 2458710
gaucaccacgcuauucucc

SEQ ID NO: 2458712 - RNA, 19 nt, Artificial Sequence
  Description of Artificial Sequence: Synthetic oligonucleotide
  Sense strand starting at position 190 of SEQ ID NO: 1887258
cgagaucuuccauaacuug

SEQ ID NO: 2458713 - RNA, 19 nt, Artificial Sequence
  Description of Artificial Sequence: Synthetic oligonucleotide
  Antisense strand to SEQ ID NO: 2458712
caaguuauggaagaucucg

SEQ ID NO: 2458714 - RNA, 19 nt, Artificial Sequence
  Description of Artificial Sequence: Synthetic oligonucleotide
  Sense strand starting at position 224 of SEQ ID NO: 1887258
caacuuuaacccggaugua

SEQ ID NO: 2458715 - RNA, 19 nt, Artificial Sequence
  Description of Artificial Sequence: Synthetic oligonucleotide
  Antisense strand to SEQ ID NO: 2458714
uacauccggguuaaaguug

SEQ ID NO: 2458716 - RNA, 19 nt, Artificial Sequence
  Description of Artificial Sequence: Synthetic oligonucleotide
  Sense strand starting at position 244 of SEQ ID NO: 1887258
gcaguuucucccuauugga

SEQ ID NO: 2458717 - RNA, 19 nt, Artificial Sequence
  Description of Artificial Sequence: Synthetic oligonucleotide
  Antisense strand to SEQ ID NO: 2458716
uccaauagggagaaacugc

SEQ ID NO: 2458718 - RNA, 19 nt, Artificial Sequence
  Description of Artificial Sequence: Synthetic oligonucleotide
  Sense strand starting at position 340 of SEQ ID NO: 1887258
ccagaaaucuggcaauuua

SEQ ID NO: 2458719 - RNA, 19 nt, Artificial Sequence
  Description of Artificial Sequence: Synthetic oligonucleotide
  Antisense strand to SEQ ID NO: 2458718
uaaauugccagauuucugg

SEQ ID NO: 2458720 - RNA, 19 nt, Artificial Sequence
  Description of Artificial Sequence: Synthetic oligonucleotide
  Sense strand starting at position 361 of SEQ ID NO: 1887258
uggacaaccuugccugaau

SEQ ID NO: 2458721 - RNA, 19 nt, Artificial Sequence
  Description of Artificial Sequence: Synthetic oligonucleotide
  Antisense strand to SEQ ID NO: 2458720
auucaggcaagguugucca

SEQ ID NO: 2458722 - RNA, 19 nt, Artificial Sequence
  Description of Artificial Sequence: Synthetic oligonucleotide
  Sense strand starting at position 387 of SEQ ID NO: 1887258
uugaaauuccacuguuaag

SEQ ID NO: 2458723 - RNA, 19 nt, Artificial Sequence
  Description of Artificial Sequence: Synthetic oligonucleotide
  Antisense strand to SEQ ID NO: 2458722
cuuaacaguggaauuucaa

SEQ ID NO: 2458724 - RNA, 19 nt, Artificial Sequence
  Description of Artificial Sequence: Synthetic oligonucleotide
  Sense strand starting at position 414 of SEQ ID NO: 1887258
auccaauucuggucaaaga

SEQ ID NO: 2458725 - RNA, 19 nt, Artificial Sequence
  Description of Artificial Sequence: Synthetic oligonucleotide
  Antisense strand to SEQ ID NO: 2458724
ucuuugaccagaauuggau

SEQ ID NO: 2458726 - RNA, 19 nt, Artificial Sequence
  Description of Artificial Sequence: Synthetic oligonucleotide
  Sense strand starting at position 433 of SEQ ID NO: 1887258
aaagaauacguguauaacc

SEQ ID NO: 2458727 - RNA, 19 nt, Artificial Sequence
  Description of Artificial Sequence: Synthetic oligonucleotide
  Antisense strand to SEQ ID NO: 2458726
gguuauacacguauucuuu

SEQ ID NO: 2458728 - RNA, 19 nt, Artificial Sequence
  Description of Artificial Sequence: Synthetic oligonucleotide
  Sense strand starting at position 435 of SEQ ID NO: 1887258
agaauacguguauaaccua

SEQ ID NO: 2458729 - RNA, 19 nt, Artificial Sequence
  Description of Artificial Sequence: Synthetic oligonucleotide
  Antisense strand to SEQ ID NO: 2458728
uagguuauacacguauucu

SEQ ID NO: 2458730 - RNA, 19 nt, Artificial Sequence
  Description of Artificial Sequence: Synthetic oligonucleotide
  Sense strand starting at position 488 of SEQ ID NO: 1887258
ucgaacugcauaggucaua

SEQ ID NO: 2458731 - RNA, 19 nt, Artificial Sequence
  Description of Artificial Sequence: Synthetic oligonucleotide
  Antisense strand to SEQ ID NO: 2458730
uaugaccuaugcaguucga

SEQ ID NO: 2458732 - RNA, 19 nt, Artificial Sequence
  Description of Artificial Sequence: Synthetic oligonucleotide
  Sense strand starting at position 537 of SEQ ID NO: 1887258
gugccaucucgguaaacau

SEQ ID NO: 2458733 - RNA, 19 nt, Artificial Sequence
  Description of Artificial Sequence: Synthetic oligonucleotide
  Antisense strand to SEQ ID NO: 2458732
auguuuaccgagauggcac

SEQ ID NO: 2458734 - RNA, 19 nt, Artificial Sequence
  Description of Artificial Sequence: Synthetic oligonucleotide
  Sense strand starting at position 544 of SEQ ID NO: 1887258
cucgguaaacaucagcaua

SEQ ID NO: 2458735 - RNA, 19 nt, Artificial Sequence
  Description of Artificial Sequence: Synthetic oligonucleotide
  Antisense strand to SEQ ID NO: 2458734
uaugcugauguuuaccgag

SEQ ID NO: 2458736 - RNA, 19 nt, Artificial Sequence
  Description of Artificial Sequence: Synthetic oligonucleotide
  Sense strand starting at position 729 of SEQ ID NO: 1887258
guguacuuaagugauacca

SEQ ID NO: 2458737 - RNA, 19 nt, Artificial Sequence
  Description of Artificial Sequence: Synthetic oligonucleotide
  Antisense strand to SEQ ID NO: 2458736
ugguaucacuuaaguacac

SEQ ID NO: 2458738 - RNA, 19 nt, Artificial Sequence
  Description of Artificial Sequence: Synthetic oligonucleotide
  Sense strand starting at position 849 of SEQ ID NO: 1887258
gcaauccucguuuauuaaa

SEQ ID NO: 2458739 - RNA, 19 nt, Artificial Sequence
  Description of Artificial Sequence: Synthetic oligonucleotide
  Antisense strand to SEQ ID NO: 2458738
uuuaauaaacgaggauugc

SEQ ID NO: 2458740 - RNA, 19 nt, Artificial Sequence
  Description of Artificial Sequence: Synthetic oligonucleotide
  Sense strand starting at position 1707 of SEQ ID NO: 1887258
uucggaugucuggagguaa

SEQ ID NO: 2458741 - RNA, 19 nt, Artificial Sequence
  Description of Artificial Sequence: Synthetic oligonucleotide
  Antisense strand to SEQ ID NO: 2458740
uuaccuccagacauccgaa

SEQ ID NO: 2458742 - RNA, 19 nt, Artificial Sequence
  Description of Artificial Sequence: Synthetic oligonucleotide
  Sense strand starting at position 1711 of SEQ ID NO: 1887258
gaugucuggagguaaguua

SEQ ID NO: 2458743 - RNA, 19 nt, Artificial Sequence
  Description of Artificial Sequence: Synthetic oligonucleotide
  Antisense strand to SEQ ID NO: 2458742
uaacuuaccuccagacauc

SEQ ID NO: 2458744 - RNA, 19 nt, Artificial Sequence
  Description of Artificial Sequence: Synthetic oligonucleotide
  Sense strand starting at position 1719 of SEQ ID NO: 1887258
gagguaaguuacccacgua

SEQ ID NO: 2458745 - RNA, 19 nt, Artificial Sequence
  Description of Artificial Sequence: Synthetic oligonucleotide
  Antisense strand to SEQ ID NO: 2458744
uacguggguaacuuaccuc

SEQ ID NO: 2458746 - RNA, 19 nt, Artificial Sequence
  Description of Artificial Sequence: Synthetic oligonucleotide
  Sense strand starting at position 1734 of SEQ ID NO: 1887258
cguagaugcggcaaucguu

SEQ ID NO: 2458747 - RNA, 19 nt, Artificial Sequence
  Description of Artificial Sequence: Synthetic oligonucleotide
  Antisense strand to SEQ ID NO: 2458746
aacgauugccgcaucuacg

SEQ ID NO: 2458748 - RNA, 19 nt, Artificial Sequence
  Description of Artificial Sequence: Synthetic oligonucleotide
  Sense strand starting at position 2142 of SEQ ID NO: 1887258
uaacgaacuuucguuaaag

SEQ ID NO: 2458749 - RNA, 19 nt, Artificial Sequence
  Description of Artificial Sequence: Synthetic oligonucleotide
  Antisense strand to SEQ ID NO: 2458748
cuuuaacgaaaguucguua

SEQ ID NO: 2458750 - RNA, 19 nt, Artificial Sequence
  Description of Artificial Sequence: Synthetic oligonucleotide
  Sense strand starting at position 2144 of SEQ ID NO: 1887258
acgaacuuucguuaaagga

SEQ ID NO: 2458751 - RNA, 19 nt, Artificial Sequence
  Description of Artificial Sequence: Synthetic oligonucleotide
  Antisense strand to SEQ ID NO: 2458750
uccuuuaacgaaaguucgu

SEQ ID NO: 2458752 - RNA, 19 nt, Artificial Sequence
  Description of Artificial Sequence: Synthetic oligonucleotide
  Sense strand starting at position 2153 of SEQ ID NO: 1887258
cguuaaaggagcuagucau

SEQ ID NO: 2458753 - RNA, 19 nt, Artificial Sequence
  Description of Artificial Sequence: Synthetic oligonucleotide
  Antisense strand to SEQ ID NO: 2458752
augacuagcuccuuuaacg

SEQ ID NO: 2458754 - RNA, 19 nt, Artificial Sequence
  Description of Artificial Sequence: Synthetic oligonucleotide
  Sense strand starting at position 2251 of SEQ ID NO: 1887258
ggugaaaccuagccuaaag

SEQ ID NO: 2458755 - RNA, 19 nt, Artificial Sequence
  Description of Artificial Sequence: Synthetic oligonucleotide
  Antisense strand to SEQ ID NO: 2458754
cuuuaggcuagguuucacc

SEQ ID NO: 2458756 - RNA, 19 nt, Artificial Sequence
  Description of Artificial Sequence: Synthetic oligonucleotide
  Sense strand starting at position 2280 of SEQ ID NO: 1887258
ccaugcucugcggcgauaa

SEQ ID NO: 2458757 - RNA, 19 nt, Artificial Sequence
  Description of Artificial Sequence: Synthetic oligonucleotide
  Antisense strand to SEQ ID NO: 2458756
uuaucgccgcagagcaugg

SEQ ID NO: 2458758 - RNA, 19 nt, Artificial Sequence
  Description of Artificial Sequence: Synthetic oligonucleotide
  Sense strand starting at position 2404 of SEQ ID NO: 1887258
ugaguugcgggugauugaa

SEQ ID NO: 2458759 - RNA, 19 nt, Artificial Sequence
  Description of Artificial Sequence: Synthetic oligonucleotide
  Antisense strand to SEQ ID NO: 2458758
uucaaucacccgcaacuca

SEQ ID NO: 2458760 - RNA, 19 nt, Artificial Sequence
  Description of Artificial Sequence: Synthetic oligonucleotide
  Sense strand starting at position 2481 of SEQ ID NO: 1887258
uuagacagaugugucuaau

SEQ ID NO: 2458761 - RNA, 19 nt, Artificial Sequence
  Description of Artificial Sequence: Synthetic oligonucleotide
  Antisense strand to SEQ ID NO: 2458760
auuagacacaucugucuaa

SEQ ID NO: 2458762 - RNA, 19 nt, Artificial Sequence
  Description of Artificial Sequence: Synthetic oligonucleotide
  Sense strand starting at position 2491 of SEQ ID NO: 1887258
gugucuaauuuagcgaaac

SEQ ID NO: 2458763 - RNA, 19 nt, Artificial Sequence
  Description of Artificial Sequence: Synthetic oligonucleotide
  Antisense strand to SEQ ID NO: 2458762
guuucgcuaaauuagacac

SEQ ID NO: 2458764 - RNA, 19 nt, Artificial Sequence
  Description of Artificial Sequence: Synthetic oligonucleotide
  Sense strand starting at position 2734 of SEQ ID NO: 1887258
cagaaugaaucguuucugu

SEQ ID NO: 2458765 - RNA, 19 nt, Artificial Sequence
  Description of Artificial Sequence: Synthetic oligonucleotide
  Antisense strand to SEQ ID NO: 2458764
acagaaacgauucauucug

SEQ ID NO: 2458766 - RNA, 19 nt, Artificial Sequence
  Description of Artificial Sequence: Synthetic oligonucleotide
  Sense strand starting at position 2928 of SEQ ID NO: 1887258
ucaggacugugauccuguu

SEQ ID NO: 2458767 - RNA, 19 nt, Artificial Sequence
  Description of Artificial Sequence: Synthetic oligonucleotide
  Antisense strand to SEQ ID NO: 2458766
aacaggaucacaguccuga

SEQ ID NO: 2458768 - RNA, 19 nt, Artificial Sequence
  Description of Artificial Sequence: Synthetic oligonucleotide
  Sense strand starting at position 2952 of SEQ ID NO: 1887258
gcggcauugggagauaaca

SEQ ID NO: 2458769 - RNA, 19 nt, Artificial Sequence
  Description of Artificial Sequence: Synthetic oligonucleotide
  Antisense strand to SEQ ID NO: 2458768
uguuaucucccaaugccgc

SEQ ID NO: 2458770 - RNA, 19 nt, Artificial Sequence
  Description of Artificial Sequence: Synthetic oligonucleotide
  Sense strand starting at position 3027 of SEQ ID NO: 1887258
uuuaaacgucgcuaaugaa

SEQ ID NO: 2458771 - RNA, 19 nt, Artificial Sequence
  Description of Artificial Sequence: Synthetic oligonucleotide
  Antisense strand to SEQ ID NO: 2458770
uucauuagcgacguuuaaa

SEQ ID NO: 2458772 - RNA, 19 nt, Artificial Sequence
  Description of Artificial Sequence: Synthetic oligonucleotide
  Sense strand starting at position 3459 of SEQ ID NO: 1887258
agucccuuuccgcaaggau

SEQ ID NO: 2458773 - RNA, 19 nt, Artificial Sequence
  Description of Artificial Sequence: Synthetic oligonucleotide
  Antisense strand to SEQ ID NO: 2458772
auccuugcggaaagggacu

SEQ ID NO: 2458774 - RNA, 19 nt, Artificial Sequence
  Description of Artificial Sequence: Synthetic oligonucleotide
  Sense strand starting at position 3900 of SEQ ID NO: 1887258
gugaaagcccguugaauuu

SEQ ID NO: 2458775 - RNA, 19 nt, Artificial Sequence
  Description of Artificial Sequence: Synthetic oligonucleotide
  Antisense strand to SEQ ID NO: 2458774
aaauucaacgggcuuucac

SEQ ID NO: 2458776 - RNA, 19 nt, Artificial Sequence
  Description of Artificial Sequence: Synthetic oligonucleotide
  Sense strand starting at position 3912 of SEQ ID NO: 1887258
ugaauuuguugagauagau

SEQ ID NO: 2458777 - RNA, 19 nt, Artificial Sequence
  Description of Artificial Sequence: Synthetic oligonucleotide
  Antisense strand to SEQ ID NO: 2458776
aucuaucucaacaaauuca

SEQ ID NO: 2458778 - RNA, 19 nt, Artificial Sequence
  Description of Artificial Sequence: Synthetic oligonucleotide
  Sense strand starting at position 3921 of SEQ ID NO: 1887258
ugagauagauugcaaauuu

SEQ ID NO: 2458779 - RNA, 19 nt, Artificial Sequence
  Description of Artificial Sequence: Synthetic oligonucleotide
  Antisense strand to SEQ ID NO: 2458778
aaauuugcaaucuaucuca

SEQ ID NO: 2458780 - RNA, 19 nt, Artificial Sequence
  Description of Artificial Sequence: Synthetic oligonucleotide
  Sense strand starting at position 3939 of SEQ ID NO: 1887258
uuacuuuagucuucccaga

SEQ ID NO: 2458781 - RNA, 19 nt, Artificial Sequence
  Description of Artificial Sequence: Synthetic oligonucleotide
  Antisense strand to SEQ ID NO: 2458780
ucugggaagacuaaaguaa

SEQ ID NO: 2458782 - RNA, 19 nt, Artificial Sequence
  Description of Artificial Sequence: Synthetic oligonucleotide
  Sense strand starting at position 3941 of SEQ ID NO: 1887258
acuuuagucuucccagaag

SEQ ID NO: 2458783 - RNA, 19 nt, Artificial Sequence
  Description of Artificial Sequence: Synthetic oligonucleotide
  Antisense strand to SEQ ID NO: 2458782
cuucugggaagacuaaagu

SEQ ID NO: 2458784 - RNA, 19 nt, Artificial Sequence
  Description of Artificial Sequence: Synthetic oligonucleotide
  Sense strand starting at position 3944 of SEQ ID NO: 1887258
uuagucuucccagaaguca

SEQ ID NO: 2458785 - RNA, 19 nt, Artificial Sequence
  Description of Artificial Sequence: Synthetic oligonucleotide
  Antisense strand to SEQ ID NO: 2458784
ugacuucugggaagacuaa

SEQ ID NO: 2458786 - RNA, 19 nt, Artificial Sequence
  Description of Artificial Sequence: Synthetic oligonucleotide
  Sense strand starting at position 3952 of SEQ ID NO: 1887258
cccagaagucacgguaaag

SEQ ID NO: 2458787 - RNA, 19 nt, Artificial Sequence
  Description of Artificial Sequence: Synthetic oligonucleotide
  Antisense strand to SEQ ID NO: 2458786
cuuuaccgugacuucuggg

SEQ ID NO: 2458788 - RNA, 19 nt, Artificial Sequence
  Description of Artificial Sequence: Synthetic oligonucleotide
  Sense strand starting at position 34 of SEQ ID NO: 1887259
aucagagaauuggucuaua

SEQ ID NO: 2458789 - RNA, 19 nt, Artificial Sequence
  Description of Artificial Sequence: Synthetic oligonucleotide
  Antisense strand to SEQ ID NO: 2458788
uauagaccaauucucugau

SEQ ID NO: 2458790 - RNA, 19 nt, Artificial Sequence
  Description of Artificial Sequence: Synthetic oligonucleotide
  Sense strand starting at position 78 of SEQ ID NO: 1887259
ugaaacauuugguaauuga

SEQ ID NO: 2458791 - RNA, 19 nt, Artificial Sequence
  Description of Artificial Sequence: Synthetic oligonucleotide
  Antisense strand to SEQ ID NO: 2458790
ucaauuaccaaauguuuca

SEQ ID NO: 2458792 - RNA, 19 nt, Artificial Sequence
  Description of Artificial Sequence: Synthetic oligonucleotide
  Sense strand starting at position 198 of SEQ ID NO: 1887259
gugcaauaccuguaacuuu

SEQ ID NO: 2458793 - RNA, 19 nt, Artificial Sequence
  Description of Artificial Sequence: Synthetic oligonucleotide
  Antisense strand to SEQ ID NO: 2458792
aaaguuacagguauugcac

SEQ ID NO: 2458794 - RNA, 19 nt, Artificial Sequence
  Description of Artificial Sequence: Synthetic oligonucleotide
  Sense strand starting at position 304 of SEQ ID NO: 1887259
aguugaacugauuguuucu

SEQ ID NO: 2458795 - RNA, 19 nt, Artificial Sequence
  Description of Artificial Sequence: Synthetic oligonucleotide
  Antisense strand to SEQ ID NO: 2458794
agaaacaaucaguucaacu

SEQ ID NO: 2458796 - RNA, 19 nt, Artificial Sequence
  Description of Artificial Sequence: Synthetic oligonucleotide
  Sense strand starting at position 310 of SEQ ID NO: 1887259
acugauuguuucucuaaga

SEQ ID NO: 2458797 - RNA, 19 nt, Artificial Sequence
  Description of Artificial Sequence: Synthetic oligonucleotide
  Antisense strand to SEQ ID NO: 2458796
ucuuagagaaacaaucagu

SEQ ID NO: 2458798 - RNA, 19 nt, Artificial Sequence
  Description of Artificial Sequence: Synthetic oligonucleotide
  Sense strand starting at position 311 of SEQ ID NO: 1887259
cugauuguuucucuaagag

SEQ ID NO: 2458799 - RNA, 19 nt, Artificial Sequence
  Description of Artificial Sequence: Synthetic oligonucleotide
  Antisense strand to SEQ ID NO: 2458798
cucuuagagaaacaaucag

SEQ ID NO: 2458800 - RNA, 19 nt, Artificial Sequence
  Description of Artificial Sequence: Synthetic oligonucleotide
  Sense strand starting at position 317 of SEQ ID NO: 1887259
guuucucuaagaggauagu

SEQ ID NO: 2458801 - RNA, 19 nt, Artificial Sequence
  Description of Artificial Sequence: Synthetic oligonucleotide
  Antisense strand to SEQ ID NO: 2458800
acuauccucuuagagaaac

SEQ ID NO: 2458802 - RNA, 19 nt, Artificial Sequence
  Description of Artificial Sequence: Synthetic oligonucleotide
  Sense strand starting at position 382 of SEQ ID NO: 1887259
gaaacuggucccuggagga

SEQ ID NO: 2458803 - RNA, 19 nt, Artificial Sequence
  Description of Artificial Sequence: Synthetic oligonucleotide
  Antisense strand to SEQ ID NO: 2458802
uccuccagggaccaguuuc

SEQ ID NO: 2458804 - RNA, 19 nt, Artificial Sequence
  Description of Artificial Sequence: Synthetic oligonucleotide
  Sense strand starting at position 392 of SEQ ID NO: 1887259
ccuggaggaucagccaaau

SEQ ID NO: 2458805 - RNA, 19 nt, Artificial Sequence
  Description of Artificial Sequence: Synthetic oligonucleotide
  Antisense strand to SEQ ID NO: 2458804
auuuggcugauccuccagg

SEQ ID NO: 2458806 - RNA, 19 nt, Artificial Sequence
  Description of Artificial Sequence: Synthetic oligonucleotide
  Sense strand starting at position 421 of SEQ ID NO: 1887259
cugcaauacuggccaauau

SEQ ID NO: 2458807 - RNA, 19 nt, Artificial Sequence
  Description of Artificial Sequence: Synthetic oligonucleotide
  Antisense strand to SEQ ID NO: 2458806
auauuggccaguauugcag

SEQ ID NO: 2458808 - RNA, 19 nt, Artificial Sequence
  Description of Artificial Sequence: Synthetic oligonucleotide
  Sense strand starting at position 422 of SEQ ID NO: 1887259
ugcaauacuggccaauauu

SEQ ID NO: 2458809 - RNA, 19 nt, Artificial Sequence
  Description of Artificial Sequence: Synthetic oligonucleotide
  Antisense strand to SEQ ID NO: 2458808
aauauuggccaguauugca

SEQ ID NO: 2458810 - RNA, 19 nt, Artificial Sequence
  Description of Artificial Sequence: Synthetic oligonucleotide
  Sense strand starting at position 478 of SEQ ID NO: 1887259
aaaugcagacguuggauaa

SEQ ID NO: 2458811 - RNA, 19 nt, Artificial Sequence
  Description of Artificial Sequence: Synthetic oligonucleotide
  Antisense strand to SEQ ID NO: 2458810
uuauccaacgucugcauuu

SEQ ID NO: 2458812 - RNA, 19 nt, Artificial Sequence
  Description of Artificial Sequence: Synthetic oligonucleotide
  Sense strand starting at position 479 of SEQ ID NO: 1887259
aaugcagacguuggauaaa

SEQ ID NO: 2458813 - RNA, 19 nt, Artificial Sequence
  Description of Artificial Sequence: Synthetic oligonucleotide
  Antisense strand to SEQ ID NO: 2458812
uuuauccaacgucugcauu

SEQ ID NO: 2458814 - RNA, 19 nt, Artificial Sequence
  Description of Artificial Sequence: Synthetic oligonucleotide
  Sense strand starting at position 704 of SEQ ID NO: 1887259
augaauuaggguuaugugu

SEQ ID NO: 2458815 - RNA, 19 nt, Artificial Sequence
  Description of Artificial Sequence: Synthetic oligonucleotide
  Antisense strand to SEQ ID NO: 2458814
acacauaacccuaauucau

SEQ ID NO: 2458816 - RNA, 19 nt, Artificial Sequence
  Description of Artificial Sequence: Synthetic oligonucleotide
  Sense strand starting at position 723 of SEQ ID NO: 1887259
cucggauucccagacauua

SEQ ID NO: 2458817 - RNA, 19 nt, Artificial Sequence
  Description of Artificial Sequence: Synthetic oligonucleotide
  Antisense strand to SEQ ID NO: 2458816
uaaugucugggaauccgag

SEQ ID NO: 2458818 - RNA, 19 nt, Artificial Sequence
  Description of Artificial Sequence: Synthetic oligonucleotide
  Sense strand starting at position 1689 of SEQ ID NO: 1887259
gguuguccaccuugaggga

SEQ ID NO: 2458819 - RNA, 19 nt, Artificial Sequence
  Description of Artificial Sequence: Synthetic oligonucleotide
  Antisense strand to SEQ ID NO: 2458818
ucccucaagguggacaacc

SEQ ID NO: 2458820 - RNA, 19 nt, Artificial Sequence
  Description of Artificial Sequence: Synthetic oligonucleotide
  Sense strand starting at position 1696 of SEQ ID NO: 1887259
caccuugagggaggucaua

SEQ ID NO: 2458821 - RNA, 19 nt, Artificial Sequence
  Description of Artificial Sequence: Synthetic oligonucleotide
  Antisense strand to SEQ ID NO: 2458820
uaugaccucccucaaggug

SEQ ID NO: 2458822 - RNA, 19 nt, Artificial Sequence
  Description of Artificial Sequence: Synthetic oligonucleotide
  Sense strand starting at position 3062 of SEQ ID NO: 1887259
cuuugaagugcccaucaua

SEQ ID NO: 2458823 - RNA, 19 nt, Artificial Sequence
  Description of Artificial Sequence: Synthetic oligonucleotide
  Antisense strand to SEQ ID NO: 2458822
uaugaugggcacuucaaag

SEQ ID NO: 2458824 - RNA, 19 nt, Artificial Sequence
  Description of Artificial Sequence: Synthetic oligonucleotide
  Sense strand starting at position 3065 of SEQ ID NO: 1887259
ugaagugcccaucauaaug

SEQ ID NO: 2458825 - RNA, 19 nt, Artificial Sequence
  Description of Artificial Sequence: Synthetic oligonucleotide
  Antisense strand to SEQ ID NO: 2458824
cauuaugaugggcacuuca

SEQ ID NO: 2458826 - RNA, 19 nt, Artificial Sequence
  Description of Artificial Sequence: Synthetic oligonucleotide
  Sense strand starting at position 3115 of SEQ ID NO: 1887259
aucuaauagcgcgcuuuaa

SEQ ID NO: 2458827 - RNA, 19 nt, Artificial Sequence
  Description of Artificial Sequence: Synthetic oligonucleotide
  Antisense strand to SEQ ID NO: 2458826
uuaaagcgcgcuauuagau

SEQ ID NO: 2458828 - RNA, 19 nt, Artificial Sequence
  Description of Artificial Sequence: Synthetic oligonucleotide
  Sense strand starting at position 3116 of SEQ ID NO: 1887259
ucuaauagcgcgcuuuaau

SEQ ID NO: 2458829 - RNA, 19 nt, Artificial Sequence
  Description of Artificial Sequence: Synthetic oligonucleotide
  Antisense strand to SEQ ID NO: 2458828
auuaaagcgcgcuauuaga

SEQ ID NO: 2458830 - RNA, 19 nt, Artificial Sequence
  Description of Artificial Sequence: Synthetic oligonucleotide
  Sense strand starting at position 3117 of SEQ ID NO: 1887259
cuaauagcgcgcuuuaauu

SEQ ID NO: 2458831 - RNA, 19 nt, Artificial Sequence
  Description of Artificial Sequence: Synthetic oligonucleotide
  Antisense strand to SEQ ID NO: 2458830
aauuaaagcgcgcuauuag

SEQ ID NO: 2458832 - RNA, 19 nt, Artificial Sequence
  Description of Artificial Sequence: Synthetic oligonucleotide
  Sense strand starting at position 3215 of SEQ ID NO: 1887259
gggcguuaagcauuaucgu

SEQ ID NO: 2458833 - RNA, 19 nt, Artificial Sequence
  Description of Artificial Sequence: Synthetic oligonucleotide
  Antisense strand to SEQ ID NO: 2458832
acgauaaugcuuaacgccc

SEQ ID NO: 2458834 - RNA, 19 nt, Artificial Sequence
  Description of Artificial Sequence: Synthetic oligonucleotide
  Sense strand starting at position 3223 of SEQ ID NO: 1887259
agcauuaucguuuaaucug

SEQ ID NO: 2458835 - RNA, 19 nt, Artificial Sequence
  Description of Artificial Sequence: Synthetic oligonucleotide
  Antisense strand to SEQ ID NO: 2458834
cagauuaaacgauaaugcu

SEQ ID NO: 2458836 - RNA, 19 nt, Artificial Sequence
  Description of Artificial Sequence: Synthetic oligonucleotide
  Sense strand starting at position 3258 of SEQ ID NO: 1887259
ggauguuaaccugguuauu

SEQ ID NO: 2458837 - RNA, 19 nt, Artificial Sequence
  Description of Artificial Sequence: Synthetic oligonucleotide
  Antisense strand to SEQ ID NO: 2458836
aauaaccagguuaacaucc

SEQ ID NO: 2458838 - RNA, 19 nt, Artificial Sequence
  Description of Artificial Sequence: Synthetic oligonucleotide
  Sense strand starting at position 3570 of SEQ ID NO: 1887259
guggauauaccagguauug

SEQ ID NO: 2458839 - RNA, 19 nt, Artificial Sequence
  Description of Artificial Sequence: Synthetic oligonucleotide
  Antisense strand to SEQ ID NO: 2458838
caauaccugguauauccac

SEQ ID NO: 2458840 - RNA, 19 nt, Artificial Sequence
  Description of Artificial Sequence: Synthetic oligonucleotide
  Sense strand starting at position 3582 of SEQ ID NO: 1887259
gguauuguaccguaugauu

SEQ ID NO: 2458841 - RNA, 19 nt, Artificial Sequence
  Description of Artificial Sequence: Synthetic oligonucleotide
  Antisense strand to SEQ ID NO: 2458840
aaucauacgguacaauacc

SEQ ID NO: 2458842 - RNA, 19 nt, Artificial Sequence
  Description of Artificial Sequence: Synthetic oligonucleotide
  Sense strand starting at position 3587 of SEQ ID NO: 1887259
uguaccguaugauugauuu

SEQ ID NO: 2458843 - RNA, 19 nt, Artificial Sequence
  Description of Artificial Sequence: Synthetic oligonucleotide
  Antisense strand to SEQ ID NO: 2458842
aaaucaaucauacgguaca

SEQ ID NO: 2458844 - RNA, 19 nt, Artificial Sequence
  Description of Artificial Sequence: Synthetic oligonucleotide
  Sense strand starting at position 3614 of SEQ ID NO: 1887259
auuugacaguaguugcuua

SEQ ID NO: 2458845 - RNA, 19 nt, Artificial Sequence
  Description of Artificial Sequence: Synthetic oligonucleotide
  Antisense strand to SEQ ID NO: 2458844
uaagcaacuacugucaaau

SEQ ID NO: 2458846 - RNA, 19 nt, Artificial Sequence
  Description of Artificial Sequence: Synthetic oligonucleotide
  Sense strand starting at position 3618 of SEQ ID NO: 1887259
gacaguaguugcuuaaauc

SEQ ID NO: 2458847 - RNA, 19 nt, Artificial Sequence
  Description of Artificial Sequence: Synthetic oligonucleotide
  Antisense strand to SEQ ID NO: 2458846
gauuuaagcaacuacuguc

SEQ ID NO: 2458848 - RNA, 19 nt, Artificial Sequence
  Description of Artificial Sequence: Synthetic oligonucleotide
  Sense strand starting at position 3619 of SEQ ID NO: 1887259
acaguaguugcuuaaaucu

SEQ ID NO: 2458849 - RNA, 19 nt, Artificial Sequence
  Description of Artificial Sequence: Synthetic oligonucleotide
  Antisense strand to SEQ ID NO: 2458848
agauuuaagcaacuacugu

SEQ ID NO: 2458850 - RNA, 19 nt, Artificial Sequence
  Description of Artificial Sequence: Synthetic oligonucleotide
  Sense strand starting at position 3667 of SEQ ID NO: 1887259
gauugaauaaguggugaug

SEQ ID NO: 2458851 - RNA, 19 nt, Artificial Sequence
  Description of Artificial Sequence: Synthetic oligonucleotide
  Antisense strand to SEQ ID NO: 2458850
caucaccacuuauucaauc

SEQ ID NO: 2458852 - RNA, 19 nt, Artificial Sequence
  Description of Artificial Sequence: Synthetic oligonucleotide
  Sense strand starting at position 3733 of SEQ ID NO: 1887259
agcugaugaguuuagguuu

SEQ ID NO: 2458853 - RNA, 19 nt, Artificial Sequence
  Description of Artificial Sequence: Synthetic oligonucleotide
  Antisense strand to SEQ ID NO: 2458852
aaaccuaaacucaucagcu

SEQ ID NO: 2458854 - RNA, 19 nt, Artificial Sequence
  Description of Artificial Sequence: Synthetic oligonucleotide
  Sense strand starting at position 3744 of SEQ ID NO: 1887259
uuagguuuccuguggaauu

SEQ ID NO: 2458855 - RNA, 19 nt, Artificial Sequence
  Description of Artificial Sequence: Synthetic oligonucleotide
  Antisense strand to SEQ ID NO: 2458854
aauuccacaggaaaccuaa

SEQ ID NO: 2458856 - RNA, 19 nt, Artificial Sequence
  Description of Artificial Sequence: Synthetic oligonucleotide
  Sense strand starting at position 3757 of SEQ ID NO: 1887259
ggaauuaggcacuagguuu

SEQ ID NO: 2458857 - RNA, 19 nt, Artificial Sequence
  Description of Artificial Sequence: Synthetic oligonucleotide
  Antisense strand to SEQ ID NO: 2458856
aaaccuagugccuaauucc

SEQ ID NO: 2458858 - RNA, 19 nt, Artificial Sequence
  Description of Artificial Sequence: Synthetic oligonucleotide
  Sense strand starting at position 3808 of SEQ ID NO: 1887259
uguuaucuuagguaagugu

SEQ ID NO: 2458859 - RNA, 19 nt, Artificial Sequence
  Description of Artificial Sequence: Synthetic oligonucleotide
  Antisense strand to SEQ ID NO: 2458858
acacuuaccuaagauaaca

SEQ ID NO: 2458860 - RNA, 19 nt, Artificial Sequence
  Description of Artificial Sequence: Synthetic oligonucleotide
  Sense strand starting at position 3829 of SEQ ID NO: 1887259
ccgugagccuaauuuccua

SEQ ID NO: 2458861 - RNA, 19 nt, Artificial Sequence
  Description of Artificial Sequence: Synthetic oligonucleotide
  Antisense strand to SEQ ID NO: 2458860
uaggaaauuaggcucacgg

SEQ ID NO: 2458862 - RNA, 19 nt, Artificial Sequence
  Description of Artificial Sequence: Synthetic oligonucleotide
  Sense strand starting at position 3879 of SEQ ID NO: 1887259
agugcauggcauugaauaa

SEQ ID NO: 2458863 - RNA, 19 nt, Artificial Sequence
  Description of Artificial Sequence: Synthetic oligonucleotide
  Antisense strand to SEQ ID NO: 2458862
uuauucaaugccaugcacu

SEQ ID NO: 2458864 - RNA, 19 nt, Artificial Sequence
  Description of Artificial Sequence: Synthetic oligonucleotide
  Sense strand starting at position 3900 of SEQ ID NO: 1887259
acucuaguauugucaugau

SEQ ID NO: 2458865 - RNA, 19 nt, Artificial Sequence
  Description of Artificial Sequence: Synthetic oligonucleotide
  Antisense strand to SEQ ID NO: 2458864
aucaugacaauacuagagu

SEQ ID NO: 2458866 - RNA, 19 nt, Artificial Sequence
  Description of Artificial Sequence: Synthetic oligonucleotide
  Sense strand starting at position 3904 of SEQ ID NO: 1887259
uaguauugucaugauuaga

SEQ ID NO: 2458867 - RNA, 19 nt, Artificial Sequence
  Description of Artificial Sequence: Synthetic oligonucleotide
  Antisense strand to SEQ ID NO: 2458866
ucuaaucaugacaauacua

SEQ ID NO: 2458868 - RNA, 19 nt, Artificial Sequence
  Description of Artificial Sequence: Synthetic oligonucleotide
  Sense strand starting at position 38 of SEQ ID NO: 1887260
caugauauagugugacuua

SEQ ID NO: 2458869 - RNA, 19 nt, Artificial Sequence
  Description of Artificial Sequence: Synthetic oligonucleotide
  Antisense strand to SEQ ID NO: 2458868
uaagucacacuauaucaug

SEQ ID NO: 2458870 - RNA, 19 nt, Artificial Sequence
  Description of Artificial Sequence: Synthetic oligonucleotide
  Sense strand starting at position 41 of SEQ ID NO: 1887260
gauauagugugacuuacaa

SEQ ID NO: 2458871 - RNA, 19 nt, Artificial Sequence
  Description of Artificial Sequence: Synthetic oligonucleotide
  Antisense strand to SEQ ID NO: 2458870
uuguaagucacacuauauc

SEQ ID NO: 2458872 - RNA, 19 nt, Artificial Sequence
  Description of Artificial Sequence: Synthetic oligonucleotide
  Sense strand starting at position 75 of SEQ ID NO: 1887260
caauauguagcaugagaua

SEQ ID NO: 2458873 - RNA, 19 nt, Artificial Sequence
  Description of Artificial Sequence: Synthetic oligonucleotide
  Antisense strand to SEQ ID NO: 2458872
uaucucaugcuacauauug

SEQ ID NO: 2458874 - RNA, 19 nt, Artificial Sequence
  Description of Artificial Sequence: Synthetic oligonucleotide
  Sense strand starting at position 552 of SEQ ID NO: 1887260
uaaugagaauuagugaguu

SEQ ID NO: 2458875 - RNA, 19 nt, Artificial Sequence
  Description of Artificial Sequence: Synthetic oligonucleotide
  Antisense strand to SEQ ID NO: 2458874
aacucacuaauucucauua

SEQ ID NO: 2458876 - RNA, 19 nt, Artificial Sequence
  Description of Artificial Sequence: Synthetic oligonucleotide
  Sense strand starting at position 558 of SEQ ID NO: 1887260
gaauuagugaguuaacgua

SEQ ID NO: 2458877 - RNA, 19 nt, Artificial Sequence
  Description of Artificial Sequence: Synthetic oligonucleotide
  Antisense strand to SEQ ID NO: 2458876
uacguuaacucacuaauuc

SEQ ID NO: 2458878 - RNA, 19 nt, Artificial Sequence
  Description of Artificial Sequence: Synthetic oligonucleotide
  Sense strand starting at position 565 of SEQ ID NO: 1887260
ugaguuaacguauaucaag

SEQ ID NO: 2458879 - RNA, 19 nt, Artificial Sequence
  Description of Artificial Sequence: Synthetic oligonucleotide
  Antisense strand to SEQ ID NO: 2458878
cuugauauacguuaacuca

SEQ ID NO: 2458880 - RNA, 19 nt, Artificial Sequence
  Description of Artificial Sequence: Synthetic oligonucleotide
  Sense strand starting at position 671 of SEQ ID NO: 1887260
aguggucaccuugaagagu

SEQ ID NO: 2458881 - RNA, 19 nt, Artificial Sequence
  Description of Artificial Sequence: Synthetic oligonucleotide
  Antisense strand to SEQ ID NO: 2458880
acucuucaaggugaccacu

SEQ ID NO: 2458882 - RNA, 19 nt, Artificial Sequence
  Description of Artificial Sequence: Synthetic oligonucleotide
  Sense strand starting at position 1119 of SEQ ID NO: 1887260
gcuggagauguguguauuu

SEQ ID NO: 2458883 - RNA, 19 nt, Artificial Sequence
  Description of Artificial Sequence: Synthetic oligonucleotide
  Antisense strand to SEQ ID NO: 2458882
aaauacacacaucuccagc

SEQ ID NO: 2458884 - RNA, 19 nt, Artificial Sequence
  Description of Artificial Sequence: Synthetic oligonucleotide
  Sense strand starting at position 1175 of SEQ ID NO: 1887260
uaacuuggcguccacaauu

SEQ ID NO: 2458885 - RNA, 19 nt, Artificial Sequence
  Description of Artificial Sequence: Synthetic oligonucleotide
  Antisense strand to SEQ ID NO: 2458884
aauuguggacgccaaguua

SEQ ID NO: 2458886 - RNA, 19 nt, Artificial Sequence
  Description of Artificial Sequence: Synthetic oligonucleotide
  Sense strand starting at position 1255 of SEQ ID NO: 1887260
gucugaaacaaguggaaca

SEQ ID NO: 2458887 - RNA, 19 nt, Artificial Sequence
  Description of Artificial Sequence: Synthetic oligonucleotide
  Antisense strand to SEQ ID NO: 2458886
uguuccacuuguuucagac

SEQ ID NO: 2458888 - RNA, 19 nt, Artificial Sequence
  Description of Artificial Sequence: Synthetic oligonucleotide
  Sense strand starting at position 1682 of SEQ ID NO: 1887260
guuugaggcuccuuaauaa

SEQ ID NO: 2458889 - RNA, 19 nt, Artificial Sequence
  Description of Artificial Sequence: Synthetic oligonucleotide
  Antisense strand to SEQ ID NO: 2458888
uuauuaaggagccucaaac

SEQ ID NO: 2458890 - RNA, 19 nt, Artificial Sequence
  Description of Artificial Sequence: Synthetic oligonucleotide
  Sense strand starting at position 1811 of SEQ ID NO: 1887260
cggguucuagaggaagguu

SEQ ID NO: 2458891 - RNA, 19 nt, Artificial Sequence
  Description of Artificial Sequence: Synthetic oligonucleotide
  Antisense strand to SEQ ID NO: 2458890
aaccuuccucuagaacccg

SEQ ID NO: 2458892 - RNA, 19 nt, Artificial Sequence
  Description of Artificial Sequence: Synthetic oligonucleotide
  Sense strand starting at position 1877 of SEQ ID NO: 1887260
cagguuuccuggccaggaa

SEQ ID NO: 2458893 - RNA, 19 nt, Artificial Sequence
  Description of Artificial Sequence: Synthetic oligonucleotide
  Antisense strand to SEQ ID NO: 2458892
uuccuggccaggaaaccug

SEQ ID NO: 2458894 - RNA, 19 nt, Artificial Sequence
  Description of Artificial Sequence: Synthetic oligonucleotide
  Sense strand starting at position 1907 of SEQ ID NO: 1887260
uugucuuaacaaugagcca

SEQ ID NO: 2458895 - RNA, 19 nt, Artificial Sequence
  Description of Artificial Sequence: Synthetic oligonucleotide
  Antisense strand to SEQ ID NO: 2458894
uggcucauuguuaagacaa

SEQ ID NO: 2458896 - RNA, 19 nt, Artificial Sequence
  Description of Artificial Sequence: Synthetic oligonucleotide
  Sense strand starting at position 2021 of SEQ ID NO: 1887260
aagggaaacuccuuguguu

SEQ ID NO: 2458897 - RNA, 19 nt, Artificial Sequence
  Description of Artificial Sequence: Synthetic oligonucleotide
  Antisense strand to SEQ ID NO: 2458896
aacacaaggaguuucccuu

SEQ ID NO: 2458898 - RNA, 19 nt, Artificial Sequence
  Description of Artificial Sequence: Synthetic oligonucleotide
  Sense strand starting at position 2022 of SEQ ID NO: 1887260
agggaaacuccuuguguuc

SEQ ID NO: 2458899 - RNA, 19 nt, Artificial Sequence
  Description of Artificial Sequence: Synthetic oligonucleotide
  Antisense strand to SEQ ID NO: 2458898
gaacacaaggaguuucccu

SEQ ID NO: 2458900 - RNA, 19 nt, Artificial Sequence
  Description of Artificial Sequence: Synthetic oligonucleotide
  Sense strand starting at position 2066 of SEQ ID NO: 1887260
cuuugaagccaauaucuga

SEQ ID NO: 2458901 - RNA, 19 nt, Artificial Sequence
  Description of Artificial Sequence: Synthetic oligonucleotide
  Antisense strand to SEQ ID NO: 2458900
ucagauauuggcuucaaag

SEQ ID NO: 2458902 - RNA, 19 nt, Artificial Sequence
  Description of Artificial Sequence: Synthetic oligonucleotide
  Sense strand starting at position 2125 of SEQ ID NO: 1887260
ucucaucuuggucagguua

SEQ ID NO: 2458903 - RNA, 19 nt, Artificial Sequence
  Description of Artificial Sequence: Synthetic oligonucleotide
  Antisense strand to SEQ ID NO: 2458902
uaaccugaccaagaugaga

SEQ ID NO: 2458904 - RNA, 19 nt, Artificial Sequence
  Description of Artificial Sequence: Synthetic oligonucleotide
  Sense strand starting at position 2701 of SEQ ID NO: 1887260
gagacauucucacucguug

SEQ ID NO: 2458905 - RNA, 19 nt, Artificial Sequence
  Description of Artificial Sequence: Synthetic oligonucleotide
  Antisense strand to SEQ ID NO: 2458904
caacgagugagaaugucuc

SEQ ID NO: 2458906 - RNA, 19 nt, Artificial Sequence
  Description of Artificial Sequence: Synthetic oligonucleotide
  Sense strand starting at position 2973 of SEQ ID NO: 1887260
ggccgauugcauucguauc

SEQ ID NO: 2458907 - RNA, 19 nt, Artificial Sequence
  Description of Artificial Sequence: Synthetic oligonucleotide
  Antisense strand to SEQ ID NO: 2458906
gauacgaaugcaaucggcc

SEQ ID NO: 2458908 - RNA, 19 nt, Artificial Sequence
  Description of Artificial Sequence: Synthetic oligonucleotide
  Sense strand starting at position 3140 of SEQ ID NO: 1887260
agcagcccuccauaaagua

SEQ ID NO: 2458909 - RNA, 19 nt, Artificial Sequence
  Description of Artificial Sequence: Synthetic oligonucleotide
  Antisense strand to SEQ ID NO: 2458908
uacuuuauggagggcugcu

SEQ ID NO: 2458910 - RNA, 19 nt, Artificial Sequence
  Description of Artificial Sequence: Synthetic oligonucleotide
  Sense strand starting at position 3150 of SEQ ID NO: 1887260
cauaaaguacugugaguua

SEQ ID NO: 2458911 - RNA, 19 nt, Artificial Sequence
  Description of Artificial Sequence: Synthetic oligonucleotide
  Antisense strand to SEQ ID NO: 2458910
uaacucacaguacuuuaug

SEQ ID NO: 2458912 - RNA, 19 nt, Artificial Sequence
  Description of Artificial Sequence: Synthetic oligonucleotide
  Sense strand starting at position 3194 of SEQ ID NO: 1887260
gguguugaacugugggaga

SEQ ID NO: 2458913 - RNA, 19 nt, Artificial Sequence
  Description of Artificial Sequence: Synthetic oligonucleotide
  Antisense strand to SEQ ID NO: 2458912
ucucccacaguucaacacc

SEQ ID NO: 2458914 - RNA, 19 nt, Artificial Sequence
  Description of Artificial Sequence: Synthetic oligonucleotide
  Sense strand starting at position 3366 of SEQ ID NO: 1887260
ggaacauacgucugagcag

SEQ ID NO: 2458915 - RNA, 19 nt, Artificial Sequence
  Description of Artificial Sequence: Synthetic oligonucleotide
  Antisense strand to SEQ ID NO: 2458914
cugcucagacguauguucc

SEQ ID NO: 2458916 - RNA, 19 nt, Artificial Sequence
  Description of Artificial Sequence: Synthetic oligonucleotide
  Sense strand starting at position 3389 of SEQ ID NO: 1887260
ggguaauacagacgacuga

SEQ ID NO: 2458917 - RNA, 19 nt, Artificial Sequence
  Description of Artificial Sequence: Synthetic oligonucleotide
  Antisense strand to SEQ ID NO: 2458916
ucagucgucuguauuaccc

SEQ ID NO: 2458918 - RNA, 19 nt, Artificial Sequence
  Description of Artificial Sequence: Synthetic oligonucleotide
  Sense strand starting at position 3402 of SEQ ID NO: 1887260
gacugaugguuuccuuuau

SEQ ID NO: 2458919 - RNA, 19 nt, Artificial Sequence
  Description of Artificial Sequence: Synthetic oligonucleotide
  Antisense strand to SEQ ID NO: 2458918
auaaaggaaaccaucaguc

SEQ ID NO: 2458920 - RNA, 19 nt, Artificial Sequence
  Description of Artificial Sequence: Synthetic oligonucleotide
  Sense strand starting at position 3471 of SEQ ID NO: 1887260
ggagaaacaucucuguuag

SEQ ID NO: 2458921 - RNA, 19 nt, Artificial Sequence
  Description of Artificial Sequence: Synthetic oligonucleotide
  Antisense strand to SEQ ID NO: 2458920
cuaacagagauguuucucc

SEQ ID NO: 2458922 - RNA, 19 nt, Artificial Sequence
  Description of Artificial Sequence: Synthetic oligonucleotide
  Sense strand starting at position 3472 of SEQ ID NO: 1887260
gagaaacaucucuguuagu

SEQ ID NO: 2458923 - RNA, 19 nt, Artificial Sequence
  Description of Artificial Sequence: Synthetic oligonucleotide
  Antisense strand to SEQ ID NO: 2458922
acuaacagagauguuucuc

SEQ ID NO: 2458924 - RNA, 19 nt, Artificial Sequence
  Description of Artificial Sequence: Synthetic oligonucleotide
  Sense strand starting at position 3473 of SEQ ID NO: 1887260
agaaacaucucuguuagua

SEQ ID NO: 2458925 - RNA, 19 nt, Artificial Sequence
  Description of Artificial Sequence: Synthetic oligonucleotide
  Antisense strand to SEQ ID NO: 2458924
uacuaacagagauguuucu

SEQ ID NO: 2458926 - RNA, 19 nt, Artificial Sequence
  Description of Artificial Sequence: Synthetic oligonucleotide
  Sense strand starting at position 3530 of SEQ ID NO: 1887260
ccuacagaugcucauaugu

SEQ ID NO: 2458927 - RNA, 19 nt, Artificial Sequence
  Description of Artificial Sequence: Synthetic oligonucleotide
  Antisense strand to SEQ ID NO: 2458926
acauaugagcaucuguagg

SEQ ID NO: 2458928 - RNA, 19 nt, Artificial Sequence
  Description of Artificial Sequence: Synthetic oligonucleotide
  Sense strand starting at position 3535 of SEQ ID NO: 1887260
agaugcucauauguuaacu

SEQ ID NO: 2458929 - RNA, 19 nt, Artificial Sequence
  Description of Artificial Sequence: Synthetic oligonucleotide
  Antisense strand to SEQ ID NO: 2458928
aguuaacauaugagcaucu

SEQ ID NO: 2458930 - RNA, 19 nt, Artificial Sequence
  Description of Artificial Sequence: Synthetic oligonucleotide
  Sense strand starting at position 3567 of SEQ ID NO: 1887260
cugaauugaucuguaucaa

SEQ ID NO: 2458931 - RNA, 19 nt, Artificial Sequence
  Description of Artificial Sequence: Synthetic oligonucleotide
  Antisense strand to SEQ ID NO: 2458930
uugauacagaucaauucag

SEQ ID NO: 2458932 - RNA, 19 nt, Artificial Sequence
  Description of Artificial Sequence: Synthetic oligonucleotide
  Sense strand starting at position 3644 of SEQ ID NO: 1887260
guacaauuauauuccugua

SEQ ID NO: 2458933 - RNA, 19 nt, Artificial Sequence
  Description of Artificial Sequence: Synthetic oligonucleotide
  Antisense strand to SEQ ID NO: 2458932
uacaggaauauaauuguac

SEQ ID NO: 2458934 - RNA, 19 nt, Artificial Sequence
  Description of Artificial Sequence: Synthetic oligonucleotide
  Sense strand starting at position 3689 of SEQ ID NO: 1887260
caaauaagugcacagugaa

SEQ ID NO: 2458935 - RNA, 19 nt, Artificial Sequence
  Description of Artificial Sequence: Synthetic oligonucleotide
  Antisense strand to SEQ ID NO: 2458934
uucacugugcacuuauuug

SEQ ID NO: 2458936 - RNA, 19 nt, Artificial Sequence
  Description of Artificial Sequence: Synthetic oligonucleotide
  Sense strand starting at position 3714 of SEQ ID NO: 1887260
uguucuuacccacaguacu

SEQ ID NO: 2458937 - RNA, 19 nt, Artificial Sequence
  Description of Artificial Sequence: Synthetic oligonucleotide
  Antisense strand to SEQ ID NO: 2458936
aguacuguggguaagaaca

SEQ ID NO: 2458938 - RNA, 19 nt, Artificial Sequence
  Description of Artificial Sequence: Synthetic oligonucleotide
  Sense strand starting at position 3725 of SEQ ID NO: 1887260
acaguacuagugugacuaa

SEQ ID NO: 2458939 - RNA, 19 nt, Artificial Sequence
  Description of Artificial Sequence: Synthetic oligonucleotide
  Antisense strand to SEQ ID NO: 2458938
uuagucacacuaguacugu

SEQ ID NO: 2458940 - RNA, 19 nt, Artificial Sequence
  Description of Artificial Sequence: Synthetic oligonucleotide
  Sense strand starting at position 3728 of SEQ ID NO: 1887260
guacuagugugacuaaaua

SEQ ID NO: 2458941 - RNA, 19 nt, Artificial Sequence
  Description of Artificial Sequence: Synthetic oligonucleotide
  Antisense strand to SEQ ID NO: 2458940
uauuuagucacacuaguac

SEQ ID NO: 2458942 - RNA, 19 nt, Artificial Sequence
  Description of Artificial Sequence: Synthetic oligonucleotide
  Sense strand starting at position 3768 of SEQ ID NO: 1887260
cuguguucugaagaaggca

SEQ ID NO: 2458943 - RNA, 19 nt, Artificial Sequence
  Description of Artificial Sequence: Synthetic oligonucleotide
  Antisense strand to SEQ ID NO: 2458942
ugccuucuucagaacacag

SEQ ID NO: 2458944 - RNA, 19 nt, Artificial Sequence
  Description of Artificial Sequence: Synthetic oligonucleotide
  Sense strand starting at position 3884 of SEQ ID NO: 1887260
acauuagaggcagguugaa

SEQ ID NO: 2458945 - RNA, 19 nt, Artificial Sequence
  Description of Artificial Sequence: Synthetic oligonucleotide
  Antisense strand to SEQ ID NO: 2458944
uucaaccugccucuaaugu

SEQ ID NO: 2458946 - RNA, 19 nt, Artificial Sequence
  Description of Artificial Sequence: Synthetic oligonucleotide
  Sense strand starting at position 3922 of SEQ ID NO: 1887260
acugguguggcaggauaau

SEQ ID NO: 2458947 - RNA, 19 nt, Artificial Sequence
  Description of Artificial Sequence: Synthetic oligonucleotide
  Antisense strand to SEQ ID NO: 2458946
auuauccugccacaccagu

SEQ ID NO: 2458948 - RNA, 19 nt, Artificial Sequence
  Description of Artificial Sequence: Synthetic oligonucleotide
  Sense strand starting at position 374 of SEQ ID NO: 1887261
gagaaaugcuguuuauauu

SEQ ID NO: 2458949 - RNA, 19 nt, Artificial Sequence
  Description of Artificial Sequence: Synthetic oligonucleotide
  Antisense strand to SEQ ID NO: 2458948
aauauaaacagcauuucuc

SEQ ID NO: 2458950 - RNA, 19 nt, Artificial Sequence
  Description of Artificial Sequence: Synthetic oligonucleotide
  Sense strand starting at position 542 of SEQ ID NO: 1887261
ggguguauauaacuguuaa

SEQ ID NO: 2458951 - RNA, 19 nt, Artificial Sequence
  Description of Artificial Sequence: Synthetic oligonucleotide
  Antisense strand to SEQ ID NO: 2458950
uuaacaguuauauacaccc

SEQ ID NO: 2458952 - RNA, 19 nt, Artificial Sequence
  Description of Artificial Sequence: Synthetic oligonucleotide
  Sense strand starting at position 948 of SEQ ID NO: 1887261
ucaacuuuguucuuggaau

SEQ ID NO: 2458953 - RNA, 19 nt, Artificial Sequence
  Description of Artificial Sequence: Synthetic oligonucleotide
  Antisense strand to SEQ ID NO: 2458952
auuccaagaacaaaguuga

SEQ ID NO: 2458954 - RNA, 19 nt, Artificial Sequence
  Description of Artificial Sequence: Synthetic oligonucleotide
  Sense strand starting at position 973 of SEQ ID NO: 1887261
uucuaauauccaggaugug

SEQ ID NO: 2458955 - RNA, 19 nt, Artificial Sequence
  Description of Artificial Sequence: Synthetic oligonucleotide
  Antisense strand to SEQ ID NO: 2458954
cacauccuggauauuagaa

SEQ ID NO: 2458956 - RNA, 19 nt, Artificial Sequence
  Description of Artificial Sequence: Synthetic oligonucleotide
  Sense strand starting at position 982 of SEQ ID NO: 1887261
ccaggaugugggcaacuua

SEQ ID NO: 2458957 - RNA, 19 nt, Artificial Sequence
  Description of Artificial Sequence: Synthetic oligonucleotide
  Antisense strand to SEQ ID NO: 2458956
uaaguugcccacauccugg

SEQ ID NO: 2458958 - RNA, 19 nt, Artificial Sequence
  Description of Artificial Sequence: Synthetic oligonucleotide
  Sense strand starting at position 1044 of SEQ ID NO: 1887261
uuccaacaagaacguuaua

SEQ ID NO: 2458959 - RNA, 19 nt, Artificial Sequence
  Description of Artificial Sequence: Synthetic oligonucleotide
  Antisense strand to SEQ ID NO: 2458958
uauaacguucuuguuggaa

SEQ ID NO: 2458960 - RNA, 19 nt, Artificial Sequence
  Description of Artificial Sequence: Synthetic oligonucleotide
  Sense strand starting at position 1057 of SEQ ID NO: 1887261
guuauagagcuguaauaug

SEQ ID NO: 2458961 - RNA, 19 nt, Artificial Sequence
  Description of Artificial Sequence: Synthetic oligonucleotide
  Antisense strand to SEQ ID NO: 2458960
cauauuacagcucuauaac

SEQ ID NO: 2458962 - RNA, 19 nt, Artificial Sequence
  Description of Artificial Sequence: Synthetic oligonucleotide
  Sense strand starting at position 1117 of SEQ ID NO: 1887261
acaauacguuccuugggau

SEQ ID NO: 2458963 - RNA, 19 nt, Artificial Sequence
  Description of Artificial Sequence: Synthetic oligonucleotide
  Antisense strand to SEQ ID NO: 2458962
aucccaaggaacguauugu

SEQ ID NO: 2458964 - RNA, 19 nt, Artificial Sequence
  Description of Artificial Sequence: Synthetic oligonucleotide
  Sense strand starting at position 1138 of SEQ ID NO: 1887261
aacaauauguuccuuggga

SEQ ID NO: 2458965 - RNA, 19 nt, Artificial Sequence
  Description of Artificial Sequence: Synthetic oligonucleotide
  Antisense strand to SEQ ID NO: 2458964
ucccaaggaacauauuguu

SEQ ID NO: 2458966 - RNA, 19 nt, Artificial Sequence
  Description of Artificial Sequence: Synthetic oligonucleotide
  Sense strand starting at position 1139 of SEQ ID NO: 1887261
acaauauguuccuugggau

SEQ ID NO: 2458967 - RNA, 19 nt, Artificial Sequence
  Description of Artificial Sequence: Synthetic oligonucleotide
  Antisense strand to SEQ ID NO: 2458966
aucccaaggaacauauugu

SEQ ID NO: 2458968 - RNA, 19 nt, Artificial Sequence
  Description of Artificial Sequence: Synthetic oligonucleotide
  Sense strand starting at position 1140 of SEQ ID NO: 1887261
caauauguuccuugggauc

SEQ ID NO: 2458969 - RNA, 19 nt, Artificial Sequence
  Description of Artificial Sequence: Synthetic oligonucleotide
  Antisense strand to SEQ ID NO: 2458968
gaucccaaggaacauauug

SEQ ID NO: 2458970 - RNA, 19 nt, Artificial Sequence
  Description of Artificial Sequence: Synthetic oligonucleotide
  Sense strand starting at position 1176 of SEQ ID NO: 1887261
ucaugcaguccuugggauu

SEQ ID NO: 2458971 - RNA, 19 nt, Artificial Sequence
  Description of Artificial Sequence: Synthetic oligonucleotide
  Antisense strand to SEQ ID NO: 2458970
aaucccaaggacugcauga

SEQ ID NO: 2458972 - RNA, 19 nt, Artificial Sequence
  Description of Artificial Sequence: Synthetic oligonucleotide
  Sense strand starting at position 1177 of SEQ ID NO: 1887261
caugcaguccuugggauua

SEQ ID NO: 2458973 - RNA, 19 nt, Artificial Sequence
  Description of Artificial Sequence: Synthetic oligonucleotide
  Antisense strand to SEQ ID NO: 2458972
uaaucccaaggacugcaug

SEQ ID NO: 2458974 - RNA, 19 nt, Artificial Sequence
  Description of Artificial Sequence: Synthetic oligonucleotide
  Sense strand starting at position 1746 of SEQ ID NO: 1887261
gcggcaaugcgaagugauu

SEQ ID NO: 2458975 - RNA, 19 nt, Artificial Sequence
  Description of Artificial Sequence: Synthetic oligonucleotide
  Antisense strand to SEQ ID NO: 2458974
aaucacuucgcauugccgc

SEQ ID NO: 2458976 - RNA, 19 nt, Artificial Sequence
  Description of Artificial Sequence: Synthetic oligonucleotide
  Sense strand starting at position 2197 of SEQ ID NO: 1887261
acuagauugcggugagacu

SEQ ID NO: 2458977 - RNA, 19 nt, Artificial Sequence
  Description of Artificial Sequence: Synthetic oligonucleotide
  Antisense strand to SEQ ID NO: 2458976
agucucaccgcaaucuagu

SEQ ID NO: 2458978 - RNA, 19 nt, Artificial Sequence
  Description of Artificial Sequence: Synthetic oligonucleotide
  Sense strand starting at position 2198 of SEQ ID NO: 1887261
cuagauugcggugagacuu

SEQ ID NO: 2458979 - RNA, 19 nt, Artificial Sequence
  Description of Artificial Sequence: Synthetic oligonucleotide
  Antisense strand to SEQ ID NO: 2458978
aagucucaccgcaaucuag

SEQ ID NO: 2458980 - RNA, 19 nt, Artificial Sequence
  Description of Artificial Sequence: Synthetic oligonucleotide
  Sense strand starting at position 2223 of SEQ ID NO: 1887261
ugcguaaacucacuacaac

SEQ ID NO: 2458981 - RNA, 19 nt, Artificial Sequence
  Description of Artificial Sequence: Synthetic oligonucleotide
  Antisense strand to SEQ ID NO: 2458980
guuguagugaguuuacgca

SEQ ID NO: 2458982 - RNA, 19 nt, Artificial Sequence
  Description of Artificial Sequence: Synthetic oligonucleotide
  Sense strand starting at position 2383 of SEQ ID NO: 1887261
uccuguacgccugauuaca

SEQ ID NO: 2458983 - RNA, 19 nt, Artificial Sequence
  Description of Artificial Sequence: Synthetic oligonucleotide
  Antisense strand to SEQ ID NO: 2458982
uguaaucaggcguacagga

SEQ ID NO: 2458984 - RNA, 19 nt, Artificial Sequence
  Description of Artificial Sequence: Synthetic oligonucleotide
  Sense strand starting at position 2983 of SEQ ID NO: 1887261
gagagucacuuccucgauc

SEQ ID NO: 2458985 - RNA, 19 nt, Artificial Sequence
  Description of Artificial Sequence: Synthetic oligonucleotide
  Antisense strand to SEQ ID NO: 2458984
gaucgaggaagugacucuc

SEQ ID NO: 2458986 - RNA, 19 nt, Artificial Sequence
  Description of Artificial Sequence: Synthetic oligonucleotide
  Sense strand starting at position 2985 of SEQ ID NO: 1887261
gagucacuuccucgaucca

SEQ ID NO: 2458987 - RNA, 19 nt, Artificial Sequence
  Description of Artificial Sequence: Synthetic oligonucleotide
  Antisense strand to SEQ ID NO: 2458986
uggaucgaggaagugacuc

SEQ ID NO: 2458988 - RNA, 19 nt, Artificial Sequence
  Description of Artificial Sequence: Synthetic oligonucleotide
  Sense strand starting at position 2986 of SEQ ID NO: 1887261
agucacuuccucgauccaa

SEQ ID NO: 2458989 - RNA, 19 nt, Artificial Sequence
  Description of Artificial Sequence: Synthetic oligonucleotide
  Antisense strand to SEQ ID NO: 2458988
uuggaucgaggaagugacu

SEQ ID NO: 2458990 - RNA, 19 nt, Artificial Sequence
  Description of Artificial Sequence: Synthetic oligonucleotide
  Sense strand starting at position 3275 of SEQ ID NO: 1887261
ggagggaacguguguuuga

SEQ ID NO: 2458991 - RNA, 19 nt, Artificial Sequence
  Description of Artificial Sequence: Synthetic oligonucleotide
  Antisense strand to SEQ ID NO: 2458990
ucaaacacacguucccucc

SEQ ID NO: 2458992 - RNA, 19 nt, Artificial Sequence
  Description of Artificial Sequence: Synthetic oligonucleotide
  Sense strand starting at position 3439 of SEQ ID NO: 1887261
ucuuauuugugacugccua

SEQ ID NO: 2458993 - RNA, 19 nt, Artificial Sequence
  Description of Artificial Sequence: Synthetic oligonucleotide
  Antisense strand to SEQ ID NO: 2458992
uaggcagucacaaauaaga

SEQ ID NO: 2458994 - RNA, 19 nt, Artificial Sequence
  Description of Artificial Sequence: Synthetic oligonucleotide
  Sense strand starting at position 3440 of SEQ ID NO: 1887261
cuuauuugugacugccuau

SEQ ID NO: 2458995 - RNA, 19 nt, Artificial Sequence
  Description of Artificial Sequence: Synthetic oligonucleotide
  Antisense strand to SEQ ID NO: 2458994
auaggcagucacaaauaag

SEQ ID NO: 2458996 - RNA, 19 nt, Artificial Sequence
  Description of Artificial Sequence: Synthetic oligonucleotide
  Sense strand starting at position 3464 of SEQ ID NO: 1887261
ugaagauucugggaagaaa

SEQ ID NO: 2458997 - RNA, 19 nt, Artificial Sequence
  Description of Artificial Sequence: Synthetic oligonucleotide
  Antisense strand to SEQ ID NO: 2458996
uuucuucccagaaucuuca

SEQ ID NO: 2458998 - RNA, 19 nt, Artificial Sequence
  Description of Artificial Sequence: Synthetic oligonucleotide
  Sense strand starting at position 3607 of SEQ ID NO: 1887261
uaagaauguggaugcagaa

SEQ ID NO: 2458999 - RNA, 19 nt, Artificial Sequence
  Description of Artificial Sequence: Synthetic oligonucleotide
  Antisense strand to SEQ ID NO: 2458998
uucugcauccacauucuua

SEQ ID NO: 2459000 - RNA, 19 nt, Artificial Sequence
  Description of Artificial Sequence: Synthetic oligonucleotide
  Sense strand starting at position 3620 of SEQ ID NO: 1887261
gcagaacaaucacugucua

SEQ ID NO: 2459001 - RNA, 19 nt, Artificial Sequence
  Description of Artificial Sequence: Synthetic oligonucleotide
  Antisense strand to SEQ ID NO: 2459000
uagacagugauuguucugc

SEQ ID NO: 2459002 - RNA, 19 nt, Artificial Sequence
  Description of Artificial Sequence: Synthetic oligonucleotide
  Sense strand starting at position 3625 of SEQ ID NO: 1887261
acaaucacugucuaaaguu

SEQ ID NO: 2459003 - RNA, 19 nt, Artificial Sequence
  Description of Artificial Sequence: Synthetic oligonucleotide
  Antisense strand to SEQ ID NO: 2459002
aacuuuagacagugauugu

SEQ ID NO: 2459004 - RNA, 19 nt, Artificial Sequence
  Description of Artificial Sequence: Synthetic oligonucleotide
  Sense strand starting at position 3667 of SEQ ID NO: 1887261
ucuugacucuugguuuaac

SEQ ID NO: 2459005 - RNA, 19 nt, Artificial Sequence
  Description of Artificial Sequence: Synthetic oligonucleotide
  Antisense strand to SEQ ID NO: 2459004
guuaaaccaagagucaaga

SEQ ID NO: 2459006 - RNA, 19 nt, Artificial Sequence
  Description of Artificial Sequence: Synthetic oligonucleotide
  Sense strand starting at position 3668 of SEQ ID NO: 1887261
cuugacucuugguuuaacu

SEQ ID NO: 2459007 - RNA, 19 nt, Artificial Sequence
  Description of Artificial Sequence: Synthetic oligonucleotide
  Antisense strand to SEQ ID NO: 2459006
aguuaaaccaagagucaag

SEQ ID NO: 2459008 - RNA, 19 nt, Artificial Sequence
  Description of Artificial Sequence: Synthetic oligonucleotide
  Sense strand starting at position 3670 of SEQ ID NO: 1887261
ugacucuugguuuaacuuu

SEQ ID NO: 2459009 - RNA, 19 nt, Artificial Sequence
  Description of Artificial Sequence: Synthetic oligonucleotide
  Antisense strand to SEQ ID NO: 2459008
aaaguuaaaccaagaguca

SEQ ID NO: 2459010 - RNA, 19 nt, Artificial Sequence
  Description of Artificial Sequence: Synthetic oligonucleotide
  Sense strand starting at position 3676 of SEQ ID NO: 1887261
uugguuuaacuuuaacagu

SEQ ID NO: 2459011 - RNA, 19 nt, Artificial Sequence
  Description of Artificial Sequence: Synthetic oligonucleotide
  Antisense strand to SEQ ID NO: 2459010
acuguuaaaguuaaaccaa

SEQ ID NO: 2459012 - RNA, 19 nt, Artificial Sequence
  Description of Artificial Sequence: Synthetic oligonucleotide
  Sense strand starting at position 3699 of SEQ ID NO: 1887261
aauagaaagugagugcuuu

SEQ ID NO: 2459013 - RNA, 19 nt, Artificial Sequence
  Description of Artificial Sequence: Synthetic oligonucleotide
  Antisense strand to SEQ ID NO: 2459012
aaagcacucacuuucuauu

SEQ ID NO: 2459014 - RNA, 19 nt, Artificial Sequence
  Description of Artificial Sequence: Synthetic oligonucleotide
  Sense strand starting at position 3700 of SEQ ID NO: 1887261
auagaaagugagugcuuua

SEQ ID NO: 2459015 - RNA, 19 nt, Artificial Sequence
  Description of Artificial Sequence: Synthetic oligonucleotide
  Antisense strand to SEQ ID NO: 2459014
uaaagcacucacuuucuau

SEQ ID NO: 2459016 - RNA, 19 nt, Artificial Sequence
  Description of Artificial Sequence: Synthetic oligonucleotide
  Sense strand starting at position 3703 of SEQ ID NO: 1887261
gaaagugagugcuuuauac

SEQ ID NO: 2459017 - RNA, 19 nt, Artificial Sequence
  Description of Artificial Sequence: Synthetic oligonucleotide
  Antisense strand to SEQ ID NO: 2459016
guauaaagcacucacuuuc

SEQ ID NO: 2459018 - RNA, 19 nt, Artificial Sequence
  Description of Artificial Sequence: Synthetic oligonucleotide
  Sense strand starting at position 3705 of SEQ ID NO: 1887261
aagugagugcuuuauacau

SEQ ID NO: 2459019 - RNA, 19 nt, Artificial Sequence
  Description of Artificial Sequence: Synthetic oligonucleotide
  Antisense strand to SEQ ID NO: 2459018
auguauaaagcacucacuu

SEQ ID NO: 2459020 - RNA, 19 nt, Artificial Sequence
  Description of Artificial Sequence: Synthetic oligonucleotide
  Sense strand starting at position 3716 of SEQ ID NO: 1887261
uuauacauuucggauauca

SEQ ID NO: 2459021 - RNA, 19 nt, Artificial Sequence
  Description of Artificial Sequence: Synthetic oligonucleotide
  Antisense strand to SEQ ID NO: 2459020
ugauauccgaaauguauaa

SEQ ID NO: 2459022 - RNA, 19 nt, Artificial Sequence
  Description of Artificial Sequence: Synthetic oligonucleotide
  Sense strand starting at position 3721 of SEQ ID NO: 1887261
cauuucggauaucagauau

SEQ ID NO: 2459023 - RNA, 19 nt, Artificial Sequence
  Description of Artificial Sequence: Synthetic oligonucleotide
  Antisense strand to SEQ ID NO: 2459022
auaucugauauccgaaaug

SEQ ID NO: 2459024 - RNA, 19 nt, Artificial Sequence
  Description of Artificial Sequence: Synthetic oligonucleotide
  Sense strand starting at position 3739 of SEQ ID NO: 1887261
ucuugagaguugguuacaa

SEQ ID NO: 2459025 - RNA, 19 nt, Artificial Sequence
  Description of Artificial Sequence: Synthetic oligonucleotide
  Antisense strand to SEQ ID NO: 2459024
uuguaaccaacucucaaga

SEQ ID NO: 2459026 - RNA, 19 nt, Artificial Sequence
  Description of Artificial Sequence: Synthetic oligonucleotide
  Sense strand starting at position 3782 of SEQ ID NO: 1887261
ccuacaguggguugcauaa

SEQ ID NO: 2459027 - RNA, 19 nt, Artificial Sequence
  Description of Artificial Sequence: Synthetic oligonucleotide
  Antisense strand to SEQ ID NO: 2459026
uuaugcaacccacuguagg

SEQ ID NO: 2459028 - RNA, 19 nt, Artificial Sequence
  Description of Artificial Sequence: Synthetic oligonucleotide
  Sense strand starting at position 821 of SEQ ID NO: 1887262
cguggauaguggucacugu

SEQ ID NO: 2459029 - RNA, 19 nt, Artificial Sequence
  Description of Artificial Sequence: Synthetic oligonucleotide
  Antisense strand to SEQ ID NO: 2459028
acagugaccacuauccacg

SEQ ID NO: 2459030 - RNA, 19 nt, Artificial Sequence
  Description of Artificial Sequence: Synthetic oligonucleotide
  Sense strand starting at position 822 of SEQ ID NO: 1887262
guggauaguggucacugua

SEQ ID NO: 2459031 - RNA, 19 nt, Artificial Sequence
  Description of Artificial Sequence: Synthetic oligonucleotide
  Antisense strand to SEQ ID NO: 2459030
uacagugaccacuauccac

SEQ ID NO: 2459032 - RNA, 19 nt, Artificial Sequence
  Description of Artificial Sequence: Synthetic oligonucleotide
  Sense strand starting at position 825 of SEQ ID NO: 1887262
gauaguggucacuguauua

SEQ ID NO: 2459033 - RNA, 19 nt, Artificial Sequence
  Description of Artificial Sequence: Synthetic oligonucleotide
  Antisense strand to SEQ ID NO: 2459032
uaauacagugaccacuauc

SEQ ID NO: 2459034 - RNA, 19 nt, Artificial Sequence
  Description of Artificial Sequence: Synthetic oligonucleotide
  Sense strand starting at position 838 of SEQ ID NO: 1887262
guauuagaugcauagcacu

SEQ ID NO: 2459035 - RNA, 19 nt, Artificial Sequence
  Description of Artificial Sequence: Synthetic oligonucleotide
  Antisense strand to SEQ ID NO: 2459034
agugcuaugcaucuaauac

SEQ ID NO: 2459036 - RNA, 19 nt, Artificial Sequence
  Description of Artificial Sequence: Synthetic oligonucleotide
  Sense strand starting at position 844 of SEQ ID NO: 1887262
gaugcauagcacuaguaug

SEQ ID NO: 2459037 - RNA, 19 nt, Artificial Sequence
  Description of Artificial Sequence: Synthetic oligonucleotide
  Antisense strand to SEQ ID NO: 2459036
cauacuagugcuaugcauc

SEQ ID NO: 2459038 - RNA, 19 nt, Artificial Sequence
  Description of Artificial Sequence: Synthetic oligonucleotide
  Sense strand starting at position 926 of SEQ ID NO: 1887262
guugaagucagaggaucau

SEQ ID NO: 2459039 - RNA, 19 nt, Artificial Sequence
  Description of Artificial Sequence: Synthetic oligonucleotide
  Antisense strand to SEQ ID NO: 2459038
augauccucugacuucaac

SEQ ID NO: 2459040 - RNA, 19 nt, Artificial Sequence
  Description of Artificial Sequence: Synthetic oligonucleotide
  Sense strand starting at position 1117 of SEQ ID NO: 1887262
cagguuggguaaugcagaa

SEQ ID NO: 2459041 - RNA, 19 nt, Artificial Sequence
  Description of Artificial Sequence: Synthetic oligonucleotide
  Antisense strand to SEQ ID NO: 2459040
uucugcauuacccaaccug

SEQ ID NO: 2459042 - RNA, 19 nt, Artificial Sequence
  Description of Artificial Sequence: Synthetic oligonucleotide
  Sense strand starting at position 1121 of SEQ ID NO: 1887262
uuggguaaugcagaaguga

SEQ ID NO: 2459043 - RNA, 19 nt, Artificial Sequence
  Description of Artificial Sequence: Synthetic oligonucleotide
  Antisense strand to SEQ ID NO: 2459042
ucacuucugcauuacccaa

SEQ ID NO: 2459044 - RNA, 19 nt, Artificial Sequence
  Description of Artificial Sequence: Synthetic oligonucleotide
  Sense strand starting at position 1129 of SEQ ID NO: 1887262
ugcagaagugaaugaugga

SEQ ID NO: 2459045 - RNA, 19 nt, Artificial Sequence
  Description of Artificial Sequence: Synthetic oligonucleotide
  Antisense strand to SEQ ID NO: 2459044
uccaucauucacuucugca

SEQ ID NO: 2459046 - RNA, 19 nt, Artificial Sequence
  Description of Artificial Sequence: Synthetic oligonucleotide
  Sense strand starting at position 1156 of SEQ ID NO: 1887262
cggcuuacccaucaaagga

SEQ ID NO: 2459047 - RNA, 19 nt, Artificial Sequence
  Description of Artificial Sequence: Synthetic oligonucleotide
  Antisense strand to SEQ ID NO: 2459046
uccuuugauggguaagccg

SEQ ID NO: 2459048 - RNA, 19 nt, Artificial Sequence
  Description of Artificial Sequence: Synthetic oligonucleotide
  Sense strand starting at position 1219 of SEQ ID NO: 1887262
guagauaugcaucacaauu

SEQ ID NO: 2459049 - RNA, 19 nt, Artificial Sequence
  Description of Artificial Sequence: Synthetic oligonucleotide
  Antisense strand to SEQ ID NO: 2459048
aauugugaugcauaucuac

SEQ ID NO: 2459050 - RNA, 19 nt, Artificial Sequence
  Description of Artificial Sequence: Synthetic oligonucleotide
  Sense strand starting at position 1221 of SEQ ID NO: 1887262
agauaugcaucacaauugu

SEQ ID NO: 2459051 - RNA, 19 nt, Artificial Sequence
  Description of Artificial Sequence: Synthetic oligonucleotide
  Antisense strand to SEQ ID NO: 2459050
acaauugugaugcauaucu

SEQ ID NO: 2459052 - RNA, 19 nt, Artificial Sequence
  Description of Artificial Sequence: Synthetic oligonucleotide
  Sense strand starting at position 1260 of SEQ ID NO: 1887262
uggucuauagucugggagu

SEQ ID NO: 2459053 - RNA, 19 nt, Artificial Sequence
  Description of Artificial Sequence: Synthetic oligonucleotide
  Antisense strand to SEQ ID NO: 2459052
acucccagacuauagacca

SEQ ID NO: 2459054 - RNA, 19 nt, Artificial Sequence
  Description of Artificial Sequence: Synthetic oligonucleotide
  Sense strand starting at position 1261 of SEQ ID NO: 1887262
ggucuauagucugggagug

SEQ ID NO: 2459055 - RNA, 19 nt, Artificial Sequence
  Description of Artificial Sequence: Synthetic oligonucleotide
  Antisense strand to SEQ ID NO: 2459054
cacucccagacuauagacc

SEQ ID NO: 2459056 - RNA, 19 nt, Artificial Sequence
  Description of Artificial Sequence: Synthetic oligonucleotide
  Sense strand starting at position 1262 of SEQ ID NO: 1887262
gucuauagucugggaguga

SEQ ID NO: 2459057 - RNA, 19 nt, Artificial Sequence
  Description of Artificial Sequence: Synthetic oligonucleotide
  Antisense strand to SEQ ID NO: 2459056
ucacucccagacuauagac

SEQ ID NO: 2459058 - RNA, 19 nt, Artificial Sequence
  Description of Artificial Sequence: Synthetic oligonucleotide
  Sense strand starting at position 1263 of SEQ ID NO: 1887262
ucuauagucugggagugaa

SEQ ID NO: 2459059 - RNA, 19 nt, Artificial Sequence
  Description of Artificial Sequence: Synthetic oligonucleotide
  Antisense strand to SEQ ID NO: 2459058
uucacucccagacuauaga

SEQ ID NO: 2459060 - RNA, 19 nt, Artificial Sequence
  Description of Artificial Sequence: Synthetic oligonucleotide
  Sense strand starting at position 1266 of SEQ ID NO: 1887262
auagucugggagugaaaga

SEQ ID NO: 2459061 - RNA, 19 nt, Artificial Sequence
  Description of Artificial Sequence: Synthetic oligonucleotide
  Antisense strand to SEQ ID NO: 2459060
ucuuucacucccagacuau

SEQ ID NO: 2459062 - RNA, 19 nt, Artificial Sequence
  Description of Artificial Sequence: Synthetic oligonucleotide
  Sense strand starting at position 1372 of SEQ ID NO: 1887262
ucccuauguugacugugua

SEQ ID NO: 2459063 - RNA, 19 nt, Artificial Sequence
  Description of Artificial Sequence: Synthetic oligonucleotide
  Antisense strand to SEQ ID NO: 2459062
uacacagucaacauaggga

SEQ ID NO: 2459064 - RNA, 19 nt, Artificial Sequence
  Description of Artificial Sequence: Synthetic oligonucleotide
  Sense strand starting at position 1373 of SEQ ID NO: 1887262
cccuauguugacuguguau

SEQ ID NO: 2459065 - RNA, 19 nt, Artificial Sequence
  Description of Artificial Sequence: Synthetic oligonucleotide
  Antisense strand to SEQ ID NO: 2459064
auacacagucaacauaggg

SEQ ID NO: 2459066 - RNA, 19 nt, Artificial Sequence
  Description of Artificial Sequence: Synthetic oligonucleotide
  Sense strand starting at position 1382 of SEQ ID NO: 1887262
gacuguguauccuaagguu

SEQ ID NO: 2459067 - RNA, 19 nt, Artificial Sequence
  Description of Artificial Sequence: Synthetic oligonucleotide
  Antisense strand to SEQ ID NO: 2459066
aaccuuaggauacacaguc

SEQ ID NO: 2459068 - RNA, 19 nt, Artificial Sequence
  Description of Artificial Sequence: Synthetic oligonucleotide
  Sense strand starting at position 1662 of SEQ ID NO: 1887262
ccgcgauccuacgagguaa

SEQ ID NO: 2459069 - RNA, 19 nt, Artificial Sequence
  Description of Artificial Sequence: Synthetic oligonucleotide
  Antisense strand to SEQ ID NO: 2459068
uuaccucguaggaucgcgg

SEQ ID NO: 2459070 - RNA, 19 nt, Artificial Sequence
  Description of Artificial Sequence: Synthetic oligonucleotide
  Sense strand starting at position 1716 of SEQ ID NO: 1887262
accucugaguucugagacu

SEQ ID NO: 2459071 - RNA, 19 nt, Artificial Sequence
  Description of Artificial Sequence: Synthetic oligonucleotide
  Antisense strand to SEQ ID NO: 2459070
agucucagaacucagaggu

SEQ ID NO: 2459072 - RNA, 19 nt, Artificial Sequence
  Description of Artificial Sequence: Synthetic oligonucleotide
  Sense strand starting at position 3495 of SEQ ID NO: 1887262
gcgucugucugguucagau

SEQ ID NO: 2459073 - RNA, 19 nt, Artificial Sequence
  Description of Artificial Sequence: Synthetic oligonucleotide
  Antisense strand to SEQ ID NO: 2459072
aucugaaccagacagacgc

SEQ ID NO: 2459074 - RNA, 19 nt, Artificial Sequence
  Description of Artificial Sequence: Synthetic oligonucleotide
  Sense strand starting at position 3513 of SEQ ID NO: 1887262
uauaaauacccaugugggu

SEQ ID NO: 2459075 - RNA, 19 nt, Artificial Sequence
  Description of Artificial Sequence: Synthetic oligonucleotide
  Antisense strand to SEQ ID NO: 2459074
acccacauggguauuuaua

SEQ ID NO: 2459076 - RNA, 19 nt, Artificial Sequence
  Description of Artificial Sequence: Synthetic oligonucleotide
  Sense strand starting at position 3663 of SEQ ID NO: 1887262
gggugaaugucacccugau

SEQ ID NO: 2459077 - RNA, 19 nt, Artificial Sequence
  Description of Artificial Sequence: Synthetic oligonucleotide
  Antisense strand to SEQ ID NO: 2459076
aucagggugacauucaccc

SEQ ID NO: 2459078 - RNA, 19 nt, Artificial Sequence
  Description of Artificial Sequence: Synthetic oligonucleotide
  Sense strand starting at position 3711 of SEQ ID NO: 1887262
aggccagacuugugcucua

SEQ ID NO: 2459079 - RNA, 19 nt, Artificial Sequence
  Description of Artificial Sequence: Synthetic oligonucleotide
  Antisense strand to SEQ ID NO: 2459078
uagagcacaagucuggccu

SEQ ID NO: 2459080 - RNA, 19 nt, Artificial Sequence
  Description of Artificial Sequence: Synthetic oligonucleotide
  Sense strand starting at position 3714 of SEQ ID NO: 1887262
ccagacuugugcucuaauc

SEQ ID NO: 2459081 - RNA, 19 nt, Artificial Sequence
  Description of Artificial Sequence: Synthetic oligonucleotide
  Antisense strand to SEQ ID NO: 2459080
gauuagagcacaagucugg

SEQ ID NO: 2459082 - RNA, 19 nt, Artificial Sequence
  Description of Artificial Sequence: Synthetic oligonucleotide
  Sense strand starting at position 3716 of SEQ ID NO: 1887262
agacuugugcucuaaucca

SEQ ID NO: 2459083 - RNA, 19 nt, Artificial Sequence
  Description of Artificial Sequence: Synthetic oligonucleotide
  Antisense strand to SEQ ID NO: 2459082
uggauuagagcacaagucu

SEQ ID NO: 2459084 - RNA, 19 nt, Artificial Sequence
  Description of Artificial Sequence: Synthetic oligonucleotide
  Sense strand starting at position 3873 of SEQ ID NO: 1887262
agaagaacucuuuguuguc

SEQ ID NO: 2459085 - RNA, 19 nt, Artificial Sequence
  Description of Artificial Sequence: Synthetic oligonucleotide
  Antisense strand to SEQ ID NO: 2459084
gacaacaaagaguucuucu

SEQ ID NO: 2459086 - RNA, 19 nt, Artificial Sequence
  Description of Artificial Sequence: Synthetic oligonucleotide
  Sense strand starting at position 18 of SEQ ID NO: 1887263
ucgauaugauaaugaagau

SEQ ID NO: 2459087 - RNA, 19 nt, Artificial Sequence
  Description of Artificial Sequence: Synthetic oligonucleotide
  Antisense strand to SEQ ID NO: 2459086
aucuucauuaucauaucga

SEQ ID NO: 2459088 - RNA, 19 nt, Artificial Sequence
  Description of Artificial Sequence: Synthetic oligonucleotide
  Sense strand starting at position 476 of SEQ ID NO: 1887263
gugacucccuaccaggaua

SEQ ID NO: 2459089 - RNA, 19 nt, Artificial Sequence
  Description of Artificial Sequence: Synthetic oligonucleotide
  Antisense strand to SEQ ID NO: 2459088
uauccugguagggagucac

SEQ ID NO: 2459090 - RNA, 19 nt, Artificial Sequence
  Description of Artificial Sequence: Synthetic oligonucleotide
  Sense strand starting at position 1087 of SEQ ID NO: 1887263
gggagcuguccucaaagca

SEQ ID NO: 2459091 - RNA, 19 nt, Artificial Sequence
  Description of Artificial Sequence: Synthetic oligonucleotide
  Antisense strand to SEQ ID NO: 2459090
ugcuuugaggacagcuccc

SEQ ID NO: 2459092 - RNA, 19 nt, Artificial Sequence
  Description of Artificial Sequence: Synthetic oligonucleotide
  Sense strand starting at position 1094 of SEQ ID NO: 1887263
guccucaaagcacgaauaa

SEQ ID NO: 2459093 - RNA, 19 nt, Artificial Sequence
  Description of Artificial Sequence: Synthetic oligonucleotide
  Antisense strand to SEQ ID NO: 2459092
uuauucgugcuuugaggac

SEQ ID NO: 2459094 - RNA, 19 nt, Artificial Sequence
  Description of Artificial Sequence: Synthetic oligonucleotide
  Sense strand starting at position 1095 of SEQ ID NO: 1887263
uccucaaagcacgaauaau

SEQ ID NO: 2459095 - RNA, 19 nt, Artificial Sequence
  Description of Artificial Sequence: Synthetic oligonucleotide
  Antisense strand to SEQ ID NO: 2459094
auuauucgugcuuugagga

SEQ ID NO: 2459096 - RNA, 19 nt, Artificial Sequence
  Description of Artificial Sequence: Synthetic oligonucleotide
  Sense strand starting at position 1104 of SEQ ID NO: 1887263
cacgaauaauccgggugga

SEQ ID NO: 2459097 - RNA, 19 nt, Artificial Sequence
  Description of Artificial Sequence: Synthetic oligonucleotide
  Antisense strand to SEQ ID NO: 2459096
uccacccggauuauucgug

SEQ ID NO: 2459098 - RNA, 19 nt, Artificial Sequence
  Description of Artificial Sequence: Synthetic oligonucleotide
  Sense strand starting at position 1105 of SEQ ID NO: 1887263
acgaauaauccggguggau

SEQ ID NO: 2459099 - RNA, 19 nt, Artificial Sequence
  Description of Artificial Sequence: Synthetic oligonucleotide
  Antisense strand to SEQ ID NO: 2459098
auccacccggauuauucgu

SEQ ID NO: 2459100 - RNA, 19 nt, Artificial Sequence
  Description of Artificial Sequence: Synthetic oligonucleotide
  Sense strand starting at position 1107 of SEQ ID NO: 1887263
gaauaauccggguggauca

SEQ ID NO: 2459101 - RNA, 19 nt, Artificial Sequence
  Description of Artificial Sequence: Synthetic oligonucleotide
  Antisense strand to SEQ ID NO: 2459100
ugauccacccggauuauuc

SEQ ID NO: 2459102 - RNA, 19 nt, Artificial Sequence
  Description of Artificial Sequence: Synthetic oligonucleotide
  Sense strand starting at position 1263 of SEQ ID NO: 1887263
gccacugccucccagagaa

SEQ ID NO: 2459103 - RNA, 19 nt, Artificial Sequence
  Description of Artificial Sequence: Synthetic oligonucleotide
  Antisense strand to SEQ ID NO: 2459102
uucucugggaggcaguggc

SEQ ID NO: 2459104 - RNA, 19 nt, Artificial Sequence
  Description of Artificial Sequence: Synthetic oligonucleotide
  Sense strand starting at position 2027 of SEQ ID NO: 1887263
gcggauuacacggauccaa

SEQ ID NO: 2459105 - RNA, 19 nt, Artificial Sequence
  Description of Artificial Sequence: Synthetic oligonucleotide
  Antisense strand to SEQ ID NO: 2459104
uuggauccguguaauccgc

SEQ ID NO: 2459106 - RNA, 19 nt, Artificial Sequence
  Description of Artificial Sequence: Synthetic oligonucleotide
  Sense strand starting at position 2736 of SEQ ID NO: 1887263
gcuggaguuuccuuccuuu

SEQ ID NO: 2459107 - RNA, 19 nt, Artificial Sequence
  Description of Artificial Sequence: Synthetic oligonucleotide
  Antisense strand to SEQ ID NO: 2459106
aaaggaaggaaacuccagc

SEQ ID NO: 2459108 - RNA, 19 nt, Artificial Sequence
  Description of Artificial Sequence: Synthetic oligonucleotide
  Sense strand starting at position 2955 of SEQ ID NO: 1887263
cgaguuggauuagauaaag

SEQ ID NO: 2459109 - RNA, 19 nt, Artificial Sequence
  Description of Artificial Sequence: Synthetic oligonucleotide
  Antisense strand to SEQ ID NO: 2459108
cuuuaucuaauccaacucg

SEQ ID NO: 2459110 - RNA, 19 nt, Artificial Sequence
  Description of Artificial Sequence: Synthetic oligonucleotide
  Sense strand starting at position 3054 of SEQ ID NO: 1887263
gccggauucuuucuuggga

SEQ ID NO: 2459111 - RNA, 19 nt, Artificial Sequence
  Description of Artificial Sequence: Synthetic oligonucleotide
  Antisense strand to SEQ ID NO: 2459110
ucccaagaaagaauccggc

SEQ ID NO: 2459112 - RNA, 19 nt, Artificial Sequence
  Description of Artificial Sequence: Synthetic oligonucleotide
  Sense strand starting at position 3056 of SEQ ID NO: 1887263
cggauucuuucuugggaga

SEQ ID NO: 2459113 - RNA, 19 nt, Artificial Sequence
  Description of Artificial Sequence: Synthetic oligonucleotide
  Antisense strand to SEQ ID NO: 2459112
ucucccaagaaagaauccg

SEQ ID NO: 2459114 - RNA, 19 nt, Artificial Sequence
  Description of Artificial Sequence: Synthetic oligonucleotide
  Sense strand starting at position 3057 of SEQ ID NO: 1887263
ggauucuuucuugggagac

SEQ ID NO: 2459115 - RNA, 19 nt, Artificial Sequence
  Description of Artificial Sequence: Synthetic oligonucleotide
  Antisense strand to SEQ ID NO: 2459114
gucucccaagaaagaaucc

SEQ ID NO: 2459116 - RNA, 19 nt, Artificial Sequence
  Description of Artificial Sequence: Synthetic oligonucleotide
  Sense strand starting at position 3076 of SEQ ID NO: 1887263
ggaguaaugcgucaggccu

SEQ ID NO: 2459117 - RNA, 19 nt, Artificial Sequence
  Description of Artificial Sequence: Synthetic oligonucleotide
  Antisense strand to SEQ ID NO: 2459116
aggccugacgcauuacucc

SEQ ID NO: 2459118 - RNA, 19 nt, Artificial Sequence
  Description of Artificial Sequence: Synthetic oligonucleotide
  Sense strand starting at position 3078 of SEQ ID NO: 1887263
aguaaugcgucaggccuaa

SEQ ID NO: 2459119 - RNA, 19 nt, Artificial Sequence
  Description of Artificial Sequence: Synthetic oligonucleotide
  Antisense strand to SEQ ID NO: 2459118
uuaggccugacgcauuacu

SEQ ID NO: 2459120 - RNA, 19 nt, Artificial Sequence
  Description of Artificial Sequence: Synthetic oligonucleotide
  Sense strand starting at position 3513 of SEQ ID NO: 1887263
gaagguuuguaucuauaaa

SEQ ID NO: 2459121 - RNA, 19 nt, Artificial Sequence
  Description of Artificial Sequence: Synthetic oligonucleotide
  Antisense strand to SEQ ID NO: 2459120
uuuauagauacaaaccuuc

SEQ ID NO: 2459122 - RNA, 19 nt, Artificial Sequence
  Description of Artificial Sequence: Synthetic oligonucleotide
  Sense strand starting at position 3645 of SEQ ID NO: 1887263
gcugguggacucuaagaag

SEQ ID NO: 2459123 - RNA, 19 nt, Artificial Sequence
  Description of Artificial Sequence: Synthetic oligonucleotide
  Antisense strand to SEQ ID NO: 2459122
cuucuuagaguccaccagc

SEQ ID NO: 2459124 - RNA, 19 nt, Artificial Sequence
  Description of Artificial Sequence: Synthetic oligonucleotide
  Sense strand starting at position 3648 of SEQ ID NO: 1887263
gguggacucuaagaaguag

SEQ ID NO: 2459125 - RNA, 19 nt, Artificial Sequence
  Description of Artificial Sequence: Synthetic oligonucleotide
  Antisense strand to SEQ ID NO: 2459124
cuacuucuuagaguccacc

SEQ ID NO: 2459126 - RNA, 19 nt, Artificial Sequence
  Description of Artificial Sequence: Synthetic oligonucleotide
  Sense strand starting at position 3809 of SEQ ID NO: 1887263
gaaaguugugacugccaag

SEQ ID NO: 2459127 - RNA, 19 nt, Artificial Sequence
  Description of Artificial Sequence: Synthetic oligonucleotide
  Antisense strand to SEQ ID NO: 2459126
cuuggcagucacaacuuuc

SEQ ID NO: 2459128 - RNA, 19 nt, Artificial Sequence
  Description of Artificial Sequence: Synthetic oligonucleotide
  Sense strand starting at position 3934 of SEQ ID NO: 1887263
gaagaauccuggcguagag

SEQ ID NO: 2459129 - RNA, 19 nt, Artificial Sequence
  Description of Artificial Sequence: Synthetic oligonucleotide
  Antisense strand to SEQ ID NO: 2459128
cucuacgccaggauucuuc

SEQ ID NO: 2459130 - RNA, 19 nt, Artificial Sequence
  Description of Artificial Sequence: Synthetic oligonucleotide
  Sense strand starting at position 1746 of SEQ ID NO: 1887264
gucucaucugucgaauggu

SEQ ID NO: 2459131 - RNA, 19 nt, Artificial Sequence
  Description of Artificial Sequence: Synthetic oligonucleotide
  Antisense strand to SEQ ID NO: 2459130
accauucgacagaugagac

SEQ ID NO: 2459132 - RNA, 19 nt, Artificial Sequence
  Description of Artificial Sequence: Synthetic oligonucleotide
  Sense strand starting at position 1749 of SEQ ID NO: 1887264
ucaucugucgaaugguuac

SEQ ID NO: 2459133 - RNA, 19 nt, Artificial Sequence
  Description of Artificial Sequence: Synthetic oligonucleotide
  Antisense strand to SEQ ID NO: 2459132
guaaccauucgacagauga

SEQ ID NO: 2459134 - RNA, 19 nt, Artificial Sequence
  Description of Artificial Sequence: Synthetic oligonucleotide
  Sense strand starting at position 1752 of SEQ ID NO: 1887264
ucugucgaaugguuacauu

SEQ ID NO: 2459135 - RNA, 19 nt, Artificial Sequence
  Description of Artificial Sequence: Synthetic oligonucleotide
  Antisense strand to SEQ ID NO: 2459134
aauguaaccauucgacaga

SEQ ID NO: 2459136 - RNA, 19 nt, Artificial Sequence
  Description of Artificial Sequence: Synthetic oligonucleotide
  Sense strand starting at position 1962 of SEQ ID NO: 1887264
cucaccugacucugaugaa

SEQ ID NO: 2459137 - RNA, 19 nt, Artificial Sequence
  Description of Artificial Sequence: Synthetic oligonucleotide
  Antisense strand to SEQ ID NO: 2459136
uucaucagagucaggugag

SEQ ID NO: 2459138 - RNA, 19 nt, Artificial Sequence
  Description of Artificial Sequence: Synthetic oligonucleotide
  Sense strand starting at position 1963 of SEQ ID NO: 1887264
ucaccugacucugaugaau

SEQ ID NO: 2459139 - RNA, 19 nt, Artificial Sequence
  Description of Artificial Sequence: Synthetic oligonucleotide
  Antisense strand to SEQ ID NO: 2459138
auucaucagagucagguga

SEQ ID NO: 2459140 - RNA, 19 nt, Artificial Sequence
  Description of Artificial Sequence: Synthetic oligonucleotide
  Sense strand starting at position 1965 of SEQ ID NO: 1887264
accugacucugaugaauca

SEQ ID NO: 2459141 - RNA, 19 nt, Artificial Sequence
  Description of Artificial Sequence: Synthetic oligonucleotide
  Antisense strand to SEQ ID NO: 2459140
ugauucaucagagucaggu

SEQ ID NO: 2459142 - RNA, 19 nt, Artificial Sequence
  Description of Artificial Sequence: Synthetic oligonucleotide
  Sense strand starting at position 2055 of SEQ ID NO: 1887264
guguguaacugccguagaa

SEQ ID NO: 2459143 - RNA, 19 nt, Artificial Sequence
  Description of Artificial Sequence: Synthetic oligonucleotide
  Antisense strand to SEQ ID NO: 2459142
uucuacggcaguuacacac

SEQ ID NO: 2459144 - RNA, 19 nt, Artificial Sequence
  Description of Artificial Sequence: Synthetic oligonucleotide
  Sense strand starting at position 2057 of SEQ ID NO: 1887264
guguaacugccguagaaca

SEQ ID NO: 2459145 - RNA, 19 nt, Artificial Sequence
  Description of Artificial Sequence: Synthetic oligonucleotide
  Antisense strand to SEQ ID NO: 2459144
uguucuacggcaguuacac

SEQ ID NO: 2459146 - RNA, 19 nt, Artificial Sequence
  Description of Artificial Sequence: Synthetic oligonucleotide
  Sense strand starting at position 2243 of SEQ ID NO: 1887264
acacguguauguggcuaaa

SEQ ID NO: 2459147 - RNA, 19 nt, Artificial Sequence
  Description of Artificial Sequence: Synthetic oligonucleotide
  Antisense strand to SEQ ID NO: 2459146
uuuagccacauacacgugu

SEQ ID NO: 2459148 - RNA, 19 nt, Artificial Sequence
  Description of Artificial Sequence: Synthetic oligonucleotide
  Sense strand starting at position 2245 of SEQ ID NO: 1887264
acguguauguggcuaaaca

SEQ ID NO: 2459149 - RNA, 19 nt, Artificial Sequence
  Description of Artificial Sequence: Synthetic oligonucleotide
  Antisense strand to SEQ ID NO: 2459148
uguuuagccacauacacgu

SEQ ID NO: 2459150 - RNA, 19 nt, Artificial Sequence
  Description of Artificial Sequence: Synthetic oligonucleotide
  Sense strand starting at position 2246 of SEQ ID NO: 1887264
cguguauguggcuaaacau

SEQ ID NO: 2459151 - RNA, 19 nt, Artificial Sequence
  Description of Artificial Sequence: Synthetic oligonucleotide
  Antisense strand to SEQ ID NO: 2459150
auguuuagccacauacacg

SEQ ID NO: 2459152 - RNA, 19 nt, Artificial Sequence
  Description of Artificial Sequence: Synthetic oligonucleotide
  Sense strand starting at position 2612 of SEQ ID NO: 1887264
agaggauccugugaggaaa

SEQ ID NO: 2459153 - RNA, 19 nt, Artificial Sequence
  Description of Artificial Sequence: Synthetic oligonucleotide
  Antisense strand to SEQ ID NO: 2459152
uuuccucacaggauccucu

SEQ ID NO: 2459154 - RNA, 19 nt, Artificial Sequence
  Description of Artificial Sequence: Synthetic oligonucleotide
  Sense strand starting at position 147 of SEQ ID NO: 1887265
aucccaaagugaucgaugu

SEQ ID NO: 2459155 - RNA, 19 nt, Artificial Sequence
  Description of Artificial Sequence: Synthetic oligonucleotide
  Antisense strand to SEQ ID NO: 2459154
acaucgaucacuuugggau

SEQ ID NO: 2459156 - RNA, 19 nt, Artificial Sequence
  Description of Artificial Sequence: Synthetic oligonucleotide
  Sense strand starting at position 148 of SEQ ID NO: 1887265
ucccaaagugaucgauguu

SEQ ID NO: 2459157 - RNA, 19 nt, Artificial Sequence
  Description of Artificial Sequence: Synthetic oligonucleotide
  Antisense strand to SEQ ID NO: 2459156
aacaucgaucacuuuggga

SEQ ID NO: 2459158 - RNA, 19 nt, Artificial Sequence
  Description of Artificial Sequence: Synthetic oligonucleotide
  Sense strand starting at position 149 of SEQ ID NO: 1887265
cccaaagugaucgauguug

SEQ ID NO: 2459159 - RNA, 19 nt, Artificial Sequence
  Description of Artificial Sequence: Synthetic oligonucleotide
  Antisense strand to SEQ ID NO: 2459158
caacaucgaucacuuuggg

SEQ ID NO: 2459160 - RNA, 19 nt, Artificial Sequence
  Description of Artificial Sequence: Synthetic oligonucleotide
  Sense strand starting at position 151 of SEQ ID NO: 1887265
caaagugaucgauguuguu

SEQ ID NO: 2459161 - RNA, 19 nt, Artificial Sequence
  Description of Artificial Sequence: Synthetic oligonucleotide
  Antisense strand to SEQ ID NO: 2459160
aacaacaucgaucacuuug

SEQ ID NO: 2459162 - RNA, 19 nt, Artificial Sequence
  Description of Artificial Sequence: Synthetic oligonucleotide
  Sense strand starting at position 451 of SEQ ID NO: 1887265
ccacguccauccuaugaga

SEQ ID NO: 2459163 - RNA, 19 nt, Artificial Sequence
  Description of Artificial Sequence: Synthetic oligonucleotide
  Antisense strand to SEQ ID NO: 2459162
ucucauaggauggacgugg

SEQ ID NO: 2459164 - RNA, 19 nt, Artificial Sequence
  Description of Artificial Sequence: Synthetic oligonucleotide
  Sense strand starting at position 453 of SEQ ID NO: 1887265
acguccauccuaugagaca

SEQ ID NO: 2459165 - RNA, 19 nt, Artificial Sequence
  Description of Artificial Sequence: Synthetic oligonucleotide
  Antisense strand to SEQ ID NO: 2459164
ugucucauaggauggacgu

SEQ ID NO: 2459166 - RNA, 19 nt, Artificial Sequence
  Description of Artificial Sequence: Synthetic oligonucleotide
  Sense strand starting at position 454 of SEQ ID NO: 1887265
cguccauccuaugagacaa

SEQ ID NO: 2459167 - RNA, 19 nt, Artificial Sequence
  Description of Artificial Sequence: Synthetic oligonucleotide
  Antisense strand to SEQ ID NO: 2459166
uugucucauaggauggacg

SEQ ID NO: 2459168 - RNA, 19 nt, Artificial Sequence
  Description of Artificial Sequence: Synthetic oligonucleotide
  Sense strand starting at position 1182 of SEQ ID NO: 1887265
gacugucccuccugggaau

SEQ ID NO: 2459169 - RNA, 19 nt, Artificial Sequence
  Description of Artificial Sequence: Synthetic oligonucleotide
  Antisense strand to SEQ ID NO: 2459168
auucccaggagggacaguc

SEQ ID NO: 2459170 - RNA, 19 nt, Artificial Sequence
  Description of Artificial Sequence: Synthetic oligonucleotide
  Sense strand starting at position 1183 of SEQ ID NO: 1887265
acugucccuccugggaaua

SEQ ID NO: 2459171 - RNA, 19 nt, Artificial Sequence
  Description of Artificial Sequence: Synthetic oligonucleotide
  Antisense strand to SEQ ID NO: 2459170
uauucccaggagggacagu

SEQ ID NO: 2459172 - RNA, 19 nt, Artificial Sequence
  Description of Artificial Sequence: Synthetic oligonucleotide
  Sense strand starting at position 1475 of SEQ ID NO: 1887265
gaucuauaccaguggcucu

SEQ ID NO: 2459173 - RNA, 19 nt, Artificial Sequence
  Description of Artificial Sequence: Synthetic oligonucleotide
  Antisense strand to SEQ ID NO: 2459172
agagccacugguauagauc

SEQ ID NO: 2459174 - RNA, 19 nt, Artificial Sequence
  Description of Artificial Sequence: Synthetic oligonucleotide
  Sense strand starting at position 1665 of SEQ ID NO: 1887265
agaugucucaucugucgaa

SEQ ID NO: 2459175 - RNA, 19 nt, Artificial Sequence
  Description of Artificial Sequence: Synthetic oligonucleotide
  Antisense strand to SEQ ID NO: 2459174
uucgacagaugagacaucu

SEQ ID NO: 2459176 - RNA, 19 nt, Artificial Sequence
  Description of Artificial Sequence: Synthetic oligonucleotide
  Sense strand starting at position 1666 of SEQ ID NO: 1887265
gaugucucaucugucgaau

SEQ ID NO: 2459177 - RNA, 19 nt, Artificial Sequence
  Description of Artificial Sequence: Synthetic oligonucleotide
  Antisense strand to SEQ ID NO: 2459176
auucgacagaugagacauc

SEQ ID NO: 2459178 - RNA, 19 nt, Artificial Sequence
  Description of Artificial Sequence: Synthetic oligonucleotide
  Sense strand starting at position 1978 of SEQ ID NO: 1887265
guguguaacugcuguagaa

SEQ ID NO: 2459179 - RNA, 19 nt, Artificial Sequence
  Description of Artificial Sequence: Synthetic oligonucleotide
  Antisense strand to SEQ ID NO: 2459178
uucuacagcaguuacacac

SEQ ID NO: 2459180 - RNA, 19 nt, Artificial Sequence
  Description of Artificial Sequence: Synthetic oligonucleotide
  Sense strand starting at position 1980 of SEQ ID NO: 1887265
guguaacugcuguagaaca

SEQ ID NO: 2459181 - RNA, 19 nt, Artificial Sequence
  Description of Artificial Sequence: Synthetic oligonucleotide
  Antisense strand to SEQ ID NO: 2459180
uguucuacagcaguuacac

SEQ ID NO: 2459182 - RNA, 19 nt, Artificial Sequence
  Description of Artificial Sequence: Synthetic oligonucleotide
  Sense strand starting at position 2139 of SEQ ID NO: 1887265
cugcaauguguuugugcau

SEQ ID NO: 2459183 - RNA, 19 nt, Artificial Sequence
  Description of Artificial Sequence: Synthetic oligonucleotide
  Antisense strand to SEQ ID NO: 2459182
augcacaaacacauugcag

SEQ ID NO: 2459184 - RNA, 19 nt, Artificial Sequence
  Description of Artificial Sequence: Synthetic oligonucleotide
  Sense strand starting at position 2511 of SEQ ID NO: 1887265
agaggaucuugugaggaaa

SEQ ID NO: 2459185 - RNA, 19 nt, Artificial Sequence
  Description of Artificial Sequence: Synthetic oligonucleotide
  Antisense strand to SEQ ID NO: 2459184
uuuccucacaagauccucu

SEQ ID NO: 2459186 - RNA, 19 nt, Artificial Sequence
  Description of Artificial Sequence: Synthetic oligonucleotide
  Sense strand starting at position 2513 of SEQ ID NO: 1887265
aggaucuugugaggaaagu

SEQ ID NO: 2459187 - RNA, 19 nt, Artificial Sequence
  Description of Artificial Sequence: Synthetic oligonucleotide
  Antisense strand to SEQ ID NO: 2459186
acuuuccucacaagauccu

SEQ ID NO: 2459188 - RNA, 19 nt, Artificial Sequence
  Description of Artificial Sequence: Synthetic oligonucleotide
  Sense strand starting at position 2931 of SEQ ID NO: 1887265
uugaauugcucuugucauu

SEQ ID NO: 2459189 - RNA, 19 nt, Artificial Sequence
  Description of Artificial Sequence: Synthetic oligonucleotide
  Antisense strand to SEQ ID NO: 2459188
aaugacaagagcaauucaa

SEQ ID NO: 2459190 - RNA, 19 nt, Artificial Sequence
  Description of Artificial Sequence: Synthetic oligonucleotide
  Sense strand starting at position 3693 of SEQ ID NO: 1887265
acuugcaguucuggaaacu

SEQ ID NO: 2459191 - RNA, 19 nt, Artificial Sequence
  Description of Artificial Sequence: Synthetic oligonucleotide
  Antisense strand to SEQ ID NO: 2459190
aguuuccagaacugcaagu

SEQ ID NO: 2459192 - RNA, 19 nt, Artificial Sequence
  Description of Artificial Sequence: Synthetic oligonucleotide
  Sense strand starting at position 3694 of SEQ ID NO: 1887265
cuugcaguucuggaaacuu

SEQ ID NO: 2459193 - RNA, 19 nt, Artificial Sequence
  Description of Artificial Sequence: Synthetic oligonucleotide
  Antisense strand to SEQ ID NO: 2459192
aaguuuccagaacugcaag

SEQ ID NO: 2459194 - RNA, 19 nt, Artificial Sequence
  Description of Artificial Sequence: Synthetic oligonucleotide
  Sense strand starting at position 18 of SEQ ID NO: 1887266
gaguucugauccuggaaag

SEQ ID NO: 2459195 - RNA, 19 nt, Artificial Sequence
  Description of Artificial Sequence: Synthetic oligonucleotide
  Antisense strand to SEQ ID NO: 2459194
cuuuccaggaucagaacuc

SEQ ID NO: 2459196 - RNA, 19 nt, Artificial Sequence
  Description of Artificial Sequence: Synthetic oligonucleotide
  Sense strand starting at position 19 of SEQ ID NO: 1887266
aguucugauccuggaaagg

SEQ ID NO: 2459197 - RNA, 19 nt, Artificial Sequence
  Description of Artificial Sequence: Synthetic oligonucleotide
  Antisense strand to SEQ ID NO: 2459196
ccuuuccaggaucagaacu

SEQ ID NO: 2459198 - RNA, 19 nt, Artificial Sequence
  Description of Artificial Sequence: Synthetic oligonucleotide
  Sense strand starting at position 481 of SEQ ID NO: 1887266
aucuaaauguuacacugua

SEQ ID NO: 2459199 - RNA, 19 nt, Artificial Sequence
  Description of Artificial Sequence: Synthetic oligonucleotide
  Antisense strand to SEQ ID NO: 2459198
uacaguguaacauuuagau

SEQ ID NO: 2459200 - RNA, 19 nt, Artificial Sequence
  Description of Artificial Sequence: Synthetic oligonucleotide
  Sense strand starting at position 499 of SEQ ID NO: 1887266
accugagaccuucggagaa

SEQ ID NO: 2459201 - RNA, 19 nt, Artificial Sequence
  Description of Artificial Sequence: Synthetic oligonucleotide
  Antisense strand to SEQ ID NO: 2459200
uucuccgaaggucucaggu

SEQ ID NO: 2459202 - RNA, 19 nt, Artificial Sequence
  Description of Artificial Sequence: Synthetic oligonucleotide
  Sense strand starting at position 501 of SEQ ID NO: 1887266
cugagaccuucggagaaua

SEQ ID NO: 2459203 - RNA, 19 nt, Artificial Sequence
  Description of Artificial Sequence: Synthetic oligonucleotide
  Antisense strand to SEQ ID NO: 2459202
uauucuccgaaggucucag

SEQ ID NO: 2459204 - RNA, 19 nt, Artificial Sequence
  Description of Artificial Sequence: Synthetic oligonucleotide
  Sense strand starting at position 889 of SEQ ID NO: 1887266
cccaguuuccuacgggaac

SEQ ID NO: 2459205 - RNA, 19 nt, Artificial Sequence
  Description of Artificial Sequence: Synthetic oligonucleotide
  Antisense strand to SEQ ID NO: 2459204
guucccguaggaaacuggg

SEQ ID NO: 2459206 - RNA, 19 nt, Artificial Sequence
  Description of Artificial Sequence: Synthetic oligonucleotide
  Sense strand starting at position 890 of SEQ ID NO: 1887266
ccaguuuccuacgggaaca

SEQ ID NO: 2459207 - RNA, 19 nt, Artificial Sequence
  Description of Artificial Sequence: Synthetic oligonucleotide
  Antisense strand to SEQ ID NO: 2459206
uguucccguaggaaacugg

SEQ ID NO: 2459208 - RNA, 19 nt, Artificial Sequence
  Description of Artificial Sequence: Synthetic oligonucleotide
  Sense strand starting at position 916 of SEQ ID NO: 1887266
uccugacugcucgguucua

SEQ ID NO: 2459209 - RNA, 19 nt, Artificial Sequence
  Description of Artificial Sequence: Synthetic oligonucleotide
  Antisense strand to SEQ ID NO: 2459208
uagaaccgagcagucagga

SEQ ID NO: 2459210 - RNA, 19 nt, Artificial Sequence
  Description of Artificial Sequence: Synthetic oligonucleotide
  Sense strand starting at position 1176 of SEQ ID NO: 1887266
guccuugguucuggagaac

SEQ ID NO: 2459211 - RNA, 19 nt, Artificial Sequence
  Description of Artificial Sequence: Synthetic oligonucleotide
  Antisense strand to SEQ ID NO: 2459210
guucuccagaaccaaggac

SEQ ID NO: 2459212 - RNA, 19 nt, Artificial Sequence
  Description of Artificial Sequence: Synthetic oligonucleotide
  Sense strand starting at position 1216 of SEQ ID NO: 1887266
ugggaacacucagggcaaa

SEQ ID NO: 2459213 - RNA, 19 nt, Artificial Sequence
  Description of Artificial Sequence: Synthetic oligonucleotide
  Antisense strand to SEQ ID NO: 2459212
uuugcccugaguguuccca

SEQ ID NO: 2459214 - RNA, 19 nt, Artificial Sequence
  Description of Artificial Sequence: Synthetic oligonucleotide
  Sense strand starting at position 1269 of SEQ ID NO: 1887266
aagaaauacuugcggagaa

SEQ ID NO: 2459215 - RNA, 19 nt, Artificial Sequence
  Description of Artificial Sequence: Synthetic oligonucleotide
  Antisense strand to SEQ ID NO: 2459214
uucuccgcaaguauuucuu

SEQ ID NO: 2459216 - RNA, 19 nt, Artificial Sequence
  Description of Artificial Sequence: Synthetic oligonucleotide
  Sense strand starting at position 1466 of SEQ ID NO: 1887266
acagauguguucugaggac

SEQ ID NO: 2459217 - RNA, 19 nt, Artificial Sequence
  Description of Artificial Sequence: Synthetic oligonucleotide
  Antisense strand to SEQ ID NO: 2459216
guccucagaacacaucugu

SEQ ID NO: 2459218 - RNA, 19 nt, Artificial Sequence
  Description of Artificial Sequence: Synthetic oligonucleotide
  Sense strand starting at position 1670 of SEQ ID NO: 1887266
uugggauucccaggccagu

SEQ ID NO: 2459219 - RNA, 19 nt, Artificial Sequence
  Description of Artificial Sequence: Synthetic oligonucleotide
  Antisense strand to SEQ ID NO: 2459218
acuggccugggaaucccaa

SEQ ID NO: 2459220 - RNA, 19 nt, Artificial Sequence
  Description of Artificial Sequence: Synthetic oligonucleotide
  Sense strand starting at position 2056 of SEQ ID NO: 1887266
cagugacauucugagauaa

SEQ ID NO: 2459221 - RNA, 19 nt, Artificial Sequence
  Description of Artificial Sequence: Synthetic oligonucleotide
  Antisense strand to SEQ ID NO: 2459220
uuaucucagaaugucacug

SEQ ID NO: 2459222 - RNA, 19 nt, Artificial Sequence
  Description of Artificial Sequence: Synthetic oligonucleotide
  Sense strand starting at position 2058 of SEQ ID NO: 1887266
gugacauucugagauaaag

SEQ ID NO: 2459223 - RNA, 19 nt, Artificial Sequence
  Description of Artificial Sequence: Synthetic oligonucleotide
  Antisense strand to SEQ ID NO: 2459222
cuuuaucucagaaugucac

SEQ ID NO: 2459224 - RNA, 19 nt, Artificial Sequence
  Description of Artificial Sequence: Synthetic oligonucleotide
  Sense strand starting at position 2154 of SEQ ID NO: 1887266
gcuugcgugccauguguuu

SEQ ID NO: 2459225 - RNA, 19 nt, Artificial Sequence
  Description of Artificial Sequence: Synthetic oligonucleotide
  Antisense strand to SEQ ID NO: 2459224
aaacacauggcacgcaagc

SEQ ID NO: 2459226 - RNA, 19 nt, Artificial Sequence
  Description of Artificial Sequence: Synthetic oligonucleotide
  Sense strand starting at position 2160 of SEQ ID NO: 1887266
gugccauguguuugcacau

SEQ ID NO: 2459227 - RNA, 19 nt, Artificial Sequence
  Description of Artificial Sequence: Synthetic oligonucleotide
  Antisense strand to SEQ ID NO: 2459226
augugcaaacacauggcac

SEQ ID NO: 2459228 - RNA, 19 nt, Artificial Sequence
  Description of Artificial Sequence: Synthetic oligonucleotide
  Sense strand starting at position 2189 of SEQ ID NO: 1887266
acauguauguagguaaaca

SEQ ID NO: 2459229 - RNA, 19 nt, Artificial Sequence
  Description of Artificial Sequence: Synthetic oligonucleotide
  Antisense strand to SEQ ID NO: 2459228
uguuuaccuacauacaugu

SEQ ID NO: 2459230 - RNA, 19 nt, Artificial Sequence
  Description of Artificial Sequence: Synthetic oligonucleotide
  Sense strand starting at position 2390 of SEQ ID NO: 1887266
agugauugcugcuguugga

SEQ ID NO: 2459231 - RNA, 19 nt, Artificial Sequence
  Description of Artificial Sequence: Synthetic oligonucleotide
  Antisense strand to SEQ ID NO: 2459230
uccaacagcagcaaucacu

SEQ ID NO: 2459232 - RNA, 19 nt, Artificial Sequence
  Description of Artificial Sequence: Synthetic oligonucleotide
  Sense strand starting at position 2423 of SEQ ID NO: 1887266
ugcgaauacuauuaccuaa

SEQ ID NO: 2459233 - RNA, 19 nt, Artificial Sequence
  Description of Artificial Sequence: Synthetic oligonucleotide
  Antisense strand to SEQ ID NO: 2459232
uuagguaauaguauucgca

SEQ ID NO: 2459234 - RNA, 19 nt, Artificial Sequence
  Description of Artificial Sequence: Synthetic oligonucleotide
  Sense strand starting at position 2425 of SEQ ID NO: 1887266
cgaauacuauuaccuaaug

SEQ ID NO: 2459235 - RNA, 19 nt, Artificial Sequence
  Description of Artificial Sequence: Synthetic oligonucleotide
  Antisense strand to SEQ ID NO: 2459234
cauuagguaauaguauucg

SEQ ID NO: 2459236 - RNA, 19 nt, Artificial Sequence
  Description of Artificial Sequence: Synthetic oligonucleotide
  Sense strand starting at position 2451 of SEQ ID NO: 1887266
uaguaucucuaaugguaug

SEQ ID NO: 2459237 - RNA, 19 nt, Artificial Sequence
  Description of Artificial Sequence: Synthetic oligonucleotide
  Antisense strand to SEQ ID NO: 2459236
cauaccauuagagauacua

SEQ ID NO: 2459238 - RNA, 19 nt, Artificial Sequence
  Description of Artificial Sequence: Synthetic oligonucleotide
  Sense strand starting at position 2456 of SEQ ID NO: 1887266
ucucuaaugguaugucuuu

SEQ ID NO: 2459239 - RNA, 19 nt, Artificial Sequence
  Description of Artificial Sequence: Synthetic oligonucleotide
  Antisense strand to SEQ ID NO: 2459238
aaagacauaccauuagaga

SEQ ID NO: 2459240 - RNA, 19 nt, Artificial Sequence
  Description of Artificial Sequence: Synthetic oligonucleotide
  Sense strand starting at position 2507 of SEQ ID NO: 1887266
cuccaugacccuugguuau

SEQ ID NO: 2459241 - RNA, 19 nt, Artificial Sequence
  Description of Artificial Sequence: Synthetic oligonucleotide
  Antisense strand to SEQ ID NO: 2459240
auaaccaagggucauggag

SEQ ID NO: 2459242 - RNA, 19 nt, Artificial Sequence
  Description of Artificial Sequence: Synthetic oligonucleotide
  Sense strand starting at position 2520 of SEQ ID NO: 1887266
gguuauuccagcuagagaa

SEQ ID NO: 2459243 - RNA, 19 nt, Artificial Sequence
  Description of Artificial Sequence: Synthetic oligonucleotide
  Antisense strand to SEQ ID NO: 2459242
uucucuagcuggaauaacc

SEQ ID NO: 2459244 - RNA, 19 nt, Artificial Sequence
  Description of Artificial Sequence: Synthetic oligonucleotide
  Sense strand starting at position 2603 of SEQ ID NO: 1887266
uggcuuauucgucauucca

SEQ ID NO: 2459245 - RNA, 19 nt, Artificial Sequence
  Description of Artificial Sequence: Synthetic oligonucleotide
  Antisense strand to SEQ ID NO: 2459244
uggaaugacgaauaagcca

SEQ ID NO: 2459246 - RNA, 19 nt, Artificial Sequence
  Description of Artificial Sequence: Synthetic oligonucleotide
  Sense strand starting at position 2739 of SEQ ID NO: 1887266
agccucaaguccugagaua

SEQ ID NO: 2459247 - RNA, 19 nt, Artificial Sequence
  Description of Artificial Sequence: Synthetic oligonucleotide
  Antisense strand to SEQ ID NO: 2459246
uaucucaggacuugaggcu

SEQ ID NO: 2459248 - RNA, 19 nt, Artificial Sequence
  Description of Artificial Sequence: Synthetic oligonucleotide
  Sense strand starting at position 2740 of SEQ ID NO: 1887266
gccucaaguccugagauag

SEQ ID NO: 2459249 - RNA, 19 nt, Artificial Sequence
  Description of Artificial Sequence: Synthetic oligonucleotide
  Antisense strand to SEQ ID NO: 2459248
cuaucucaggacuugaggc

SEQ ID NO: 2459250 - RNA, 19 nt, Artificial Sequence
  Description of Artificial Sequence: Synthetic oligonucleotide
  Sense strand starting at position 2926 of SEQ ID NO: 1887266
agaugacucuacugaacau

SEQ ID NO: 2459251 - RNA, 19 nt, Artificial Sequence
  Description of Artificial Sequence: Synthetic oligonucleotide
  Antisense strand to SEQ ID NO: 2459250
auguucaguagagucaucu

SEQ ID NO: 2459252 - RNA, 19 nt, Artificial Sequence
  Description of Artificial Sequence: Synthetic oligonucleotide
  Sense strand starting at position 3005 of SEQ ID NO: 1887266
gcaucugcauuguauugua

SEQ ID NO: 2459253 - RNA, 19 nt, Artificial Sequence
  Description of Artificial Sequence: Synthetic oligonucleotide
  Antisense strand to SEQ ID NO: 2459252
uacaauacaaugcagaugc

SEQ ID NO: 2459254 - RNA, 19 nt, Artificial Sequence
  Description of Artificial Sequence: Synthetic oligonucleotide
  Sense strand starting at position 3008 of SEQ ID NO: 1887266
ucugcauuguauuguauau

SEQ ID NO: 2459255 - RNA, 19 nt, Artificial Sequence
  Description of Artificial Sequence: Synthetic oligonucleotide
  Antisense strand to SEQ ID NO: 2459254
auauacaauacaaugcaga

SEQ ID NO: 2459256 - RNA, 19 nt, Artificial Sequence
  Description of Artificial Sequence: Synthetic oligonucleotide
  Sense strand starting at position 3010 of SEQ ID NO: 1887266
ugcauuguauuguauauca

SEQ ID NO: 2459257 - RNA, 19 nt, Artificial Sequence
  Description of Artificial Sequence: Synthetic oligonucleotide
  Antisense strand to SEQ ID NO: 2459256
ugauauacaauacaaugca

SEQ ID NO: 2459258 - RNA, 19 nt, Artificial Sequence
  Description of Artificial Sequence: Synthetic oligonucleotide
  Sense strand starting at position 3083 of SEQ ID NO: 1887266
uaaauacuaggcuguguua

SEQ ID NO: 2459259 - RNA, 19 nt, Artificial Sequence
  Description of Artificial Sequence: Synthetic oligonucleotide
  Antisense strand to SEQ ID NO: 2459258
uaacacagccuaguauuua

SEQ ID NO: 2459260 - RNA, 19 nt, Artificial Sequence
  Description of Artificial Sequence: Synthetic oligonucleotide
  Sense strand starting at position 3407 of SEQ ID NO: 1887266
uuggccauguuauaucaga

SEQ ID NO: 2459261 - RNA, 19 nt, Artificial Sequence
  Description of Artificial Sequence: Synthetic oligonucleotide
  Antisense strand to SEQ ID NO: 2459260
ucugauauaacauggccaa

SEQ ID NO: 2459262 - RNA, 19 nt, Artificial Sequence
  Description of Artificial Sequence: Synthetic oligonucleotide
  Sense strand starting at position 3558 of SEQ ID NO: 1887266
gggacauccucccuggacu

SEQ ID NO: 2459263 - RNA, 19 nt, Artificial Sequence
  Description of Artificial Sequence: Synthetic oligonucleotide
  Antisense strand to SEQ ID NO: 2459262
aguccagggaggauguccc

SEQ ID NO: 2459264 - RNA, 19 nt, Artificial Sequence
  Description of Artificial Sequence: Synthetic oligonucleotide
  Sense strand starting at position 3559 of SEQ ID NO: 1887266
ggacauccucccuggacua

SEQ ID NO: 2459265 - RNA, 19 nt, Artificial Sequence
  Description of Artificial Sequence: Synthetic oligonucleotide
  Antisense strand to SEQ ID NO: 2459264
uaguccagggaggaugucc

SEQ ID NO: 2459266 - RNA, 19 nt, Artificial Sequence
  Description of Artificial Sequence: Synthetic oligonucleotide
  Sense strand starting at position 3695 of SEQ ID NO: 1887266
cuuugaggucuuggaagaa

SEQ ID NO: 2459267 - RNA, 19 nt, Artificial Sequence
  Description of Artificial Sequence: Synthetic oligonucleotide
  Antisense strand to SEQ ID NO: 2459266
uucuuccaagaccucaaag

SEQ ID NO: 2459268 - RNA, 19 nt, Artificial Sequence
  Description of Artificial Sequence: Synthetic oligonucleotide
  Sense strand starting at position 3736 of SEQ ID NO: 1887266
ggguaaguuuccuccagga

SEQ ID NO: 2459269 - RNA, 19 nt, Artificial Sequence
  Description of Artificial Sequence: Synthetic oligonucleotide
  Antisense strand to SEQ ID NO: 2459268
uccuggaggaaacuuaccc

SEQ ID NO: 2459270 - RNA, 19 nt, Artificial Sequence
  Description of Artificial Sequence: Synthetic oligonucleotide
  Sense strand starting at position 3738 of SEQ ID NO: 1887266
guaaguuuccuccaggauc

SEQ ID NO: 2459271 - RNA, 19 nt, Artificial Sequence
  Description of Artificial Sequence: Synthetic oligonucleotide
  Antisense strand to SEQ ID NO: 2459270
gauccuggaggaaacuuac

SEQ ID NO: 2459272 - RNA, 19 nt, Artificial Sequence
  Description of Artificial Sequence: Synthetic oligonucleotide
  Sense strand starting at position 109 of SEQ ID NO: 1887267
ccagguuucucggucaaau

SEQ ID NO: 2459273 - RNA, 19 nt, Artificial Sequence
  Description of Artificial Sequence: Synthetic oligonucleotide
  Antisense strand to SEQ ID NO: 2459272
auuugaccgagaaaccugg

SEQ ID NO: 2459274 - RNA, 19 nt, Artificial Sequence
  Description of Artificial Sequence: Synthetic oligonucleotide
  Sense strand starting at position 111 of SEQ ID NO: 1887267
agguuucucggucaaauaa

SEQ ID NO: 2459275 - RNA, 19 nt, Artificial Sequence
  Description of Artificial Sequence: Synthetic oligonucleotide
  Antisense strand to SEQ ID NO: 2459274
uuauuugaccgagaaaccu

SEQ ID NO: 2459276 - RNA, 19 nt, Artificial Sequence
  Description of Artificial Sequence: Synthetic oligonucleotide
  Sense strand starting at position 175 of SEQ ID NO: 1887267
ccagcuauggauggacuaa

SEQ ID NO: 2459277 - RNA, 19 nt, Artificial Sequence
  Description of Artificial Sequence: Synthetic oligonucleotide
  Antisense strand to SEQ ID NO: 2459276
uuaguccauccauagcugg

SEQ ID NO: 2459278 - RNA, 19 nt, Artificial Sequence
  Description of Artificial Sequence: Synthetic oligonucleotide
  Sense strand starting at position 314 of SEQ ID NO: 1887267
cgcgacuuugcgaauguau

SEQ ID NO: 2459279 - RNA, 19 nt, Artificial Sequence
  Description of Artificial Sequence: Synthetic oligonucleotide
  Antisense strand to SEQ ID NO: 2459278
auacauucgcaaagucgcg

SEQ ID NO: 2459280 - RNA, 19 nt, Artificial Sequence
  Description of Artificial Sequence: Synthetic oligonucleotide
  Sense strand starting at position 316 of SEQ ID NO: 1887267
cgacuuugcgaauguauuc

SEQ ID NO: 2459281 - RNA, 19 nt, Artificial Sequence
  Description of Artificial Sequence: Synthetic oligonucleotide
  Antisense strand to SEQ ID NO: 2459280
gaauacauucgcaaagucg

SEQ ID NO: 2459282 - RNA, 19 nt, Artificial Sequence
  Description of Artificial Sequence: Synthetic oligonucleotide
  Sense strand starting at position 321 of SEQ ID NO: 1887267
uugcgaauguauucacgga

SEQ ID NO: 2459283 - RNA, 19 nt, Artificial Sequence
  Description of Artificial Sequence: Synthetic oligonucleotide
  Antisense strand to SEQ ID NO: 2459282
uccgugaauacauucgcaa

SEQ ID NO: 2459284 - RNA, 19 nt, Artificial Sequence
  Description of Artificial Sequence: Synthetic oligonucleotide
  Sense strand starting at position 372 of SEQ ID NO: 1887267
gaaagcugcccugguuauu

SEQ ID NO: 2459285 - RNA, 19 nt, Artificial Sequence
  Description of Artificial Sequence: Synthetic oligonucleotide
  Antisense strand to SEQ ID NO: 2459284
aauaaccagggcagcuuuc

SEQ ID NO: 2459286 - RNA, 19 nt, Artificial Sequence
  Description of Artificial Sequence: Synthetic oligonucleotide
  Sense strand starting at position 381 of SEQ ID NO: 1887267
ccugguuauuaucugguca

SEQ ID NO: 2459287 - RNA, 19 nt, Artificial Sequence
  Description of Artificial Sequence: Synthetic oligonucleotide
  Antisense strand to SEQ ID NO: 2459286
ugaccagauaauaaccagg

SEQ ID NO: 2459288 - RNA, 19 nt, Artificial Sequence
  Description of Artificial Sequence: Synthetic oligonucleotide
  Sense strand starting at position 385 of SEQ ID NO: 1887267
guuauuaucuggucaccuc

SEQ ID NO: 2459289 - RNA, 19 nt, Artificial Sequence
  Description of Artificial Sequence: Synthetic oligonucleotide
  Antisense strand to SEQ ID NO: 2459288
gaggugaccagauaauaac

SEQ ID NO: 2459290 - RNA, 19 nt, Artificial Sequence
  Description of Artificial Sequence: Synthetic oligonucleotide
  Sense strand starting at position 410 of SEQ ID NO: 1887267
ugcgcaaacguguccacaa

SEQ ID NO: 2459291 - RNA, 19 nt, Artificial Sequence
  Description of Artificial Sequence: Synthetic oligonucleotide
  Antisense strand to SEQ ID NO: 2459290
uuguggacacguuugcgca

SEQ ID NO: 2459292 - RNA, 19 nt, Artificial Sequence
  Description of Artificial Sequence: Synthetic oligonucleotide
  Sense strand starting at position 473 of SEQ ID NO: 1887267
gcagguauuugccugugga

SEQ ID NO: 2459293 - RNA, 19 nt, Artificial Sequence
  Description of Artificial Sequence: Synthetic oligonucleotide
  Antisense strand to SEQ ID NO: 2459292
uccacaggcaaauaccugc

SEQ ID NO: 2459294 - RNA, 19 nt, Artificial Sequence
  Description of Artificial Sequence: Synthetic oligonucleotide
  Sense strand starting at position 474 of SEQ ID NO: 1887267
cagguauuugccuguggaa

SEQ ID NO: 2459295 - RNA, 19 nt, Artificial Sequence
  Description of Artificial Sequence: Synthetic oligonucleotide
  Antisense strand to SEQ ID NO: 2459294
uuccacaggcaaauaccug

SEQ ID NO: 2459296 - RNA, 19 nt, Artificial Sequence
  Description of Artificial Sequence: Synthetic oligonucleotide
  Sense strand starting at position 526 of SEQ ID NO: 1887267
ugcgcagcucggagucaaa

SEQ ID NO: 2459297 - RNA, 19 nt, Artificial Sequence
  Description of Artificial Sequence: Synthetic oligonucleotide
  Antisense strand to SEQ ID NO: 2459296
uuugacuccgagcugcgca

SEQ ID NO: 2459298 - RNA, 19 nt, Artificial Sequence
  Description of Artificial Sequence: Synthetic oligonucleotide
  Sense strand starting at position 529 of SEQ ID NO: 1887267
gcagcucggagucaaagau

SEQ ID NO: 2459299 - RNA, 19 nt, Artificial Sequence
  Description of Artificial Sequence: Synthetic oligonucleotide
  Antisense strand to SEQ ID NO: 2459298
aucuuugacuccgagcugc

SEQ ID NO: 2459300 - RNA, 19 nt, Artificial Sequence
  Description of Artificial Sequence: Synthetic oligonucleotide
  Sense strand starting at position 537 of SEQ ID NO: 1887267
gagucaaagauucguucug

SEQ ID NO: 2459301 - RNA, 19 nt, Artificial Sequence
  Description of Artificial Sequence: Synthetic oligonucleotide
  Antisense strand to SEQ ID NO: 2459300
cagaacgaaucuuugacuc

SEQ ID NO: 2459302 - RNA, 19 nt, Artificial Sequence
  Description of Artificial Sequence: Synthetic oligonucleotide
  Sense strand starting at position 595 of SEQ ID NO: 1887267
gaacgaggucguggagaaa

SEQ ID NO: 2459303 - RNA, 19 nt, Artificial Sequence
  Description of Artificial Sequence: Synthetic oligonucleotide
  Antisense strand to SEQ ID NO: 2459302
uuucuccacgaccucguuc

SEQ ID NO: 2459304 - RNA, 19 nt, Artificial Sequence
  Description of Artificial Sequence: Synthetic oligonucleotide
  Sense strand starting at position 632 of SEQ ID NO: 1887267
ucacauaugcggugaugag

SEQ ID NO: 2459305 - RNA, 19 nt, Artificial Sequence
  Description of Artificial Sequence: Synthetic oligonucleotide
  Antisense strand to SEQ ID NO: 2459304
cucaucaccgcauauguga

SEQ ID NO: 2459306 - RNA, 19 nt, Artificial Sequence
  Description of Artificial Sequence: Synthetic oligonucleotide
  Sense strand starting at position 822 of SEQ ID NO: 1887267
gccugcaugggucaauguu

SEQ ID NO: 2459307 - RNA, 19 nt, Artificial Sequence
  Description of Artificial Sequence: Synthetic oligonucleotide
  Antisense strand to SEQ ID NO: 2459306
aacauugacccaugcaggc

SEQ ID NO: 2459308 - RNA, 19 nt, Artificial Sequence
  Description of Artificial Sequence: Synthetic oligonucleotide
  Sense strand starting at position 829 of SEQ ID NO: 1887267
ugggucaauguuggaugua

SEQ ID NO: 2459309 - RNA, 19 nt, Artificial Sequence
  Description of Artificial Sequence: Synthetic oligonucleotide
  Antisense strand to SEQ ID NO: 2459308
uacauccaacauugaccca

SEQ ID NO: 2459310 - RNA, 19 nt, Artificial Sequence
  Description of Artificial Sequence: Synthetic oligonucleotide
  Sense strand starting at position 861 of SEQ ID NO: 1887267
cgguuguacgggugggaau

SEQ ID NO: 2459311 - RNA, 19 nt, Artificial Sequence
  Description of Artificial Sequence: Synthetic oligonucleotide
  Antisense strand to SEQ ID NO: 2459310
auucccacccguacaaccg

SEQ ID NO: 2459312 - RNA, 19 nt, Artificial Sequence
  Description of Artificial Sequence: Synthetic oligonucleotide
  Sense strand starting at position 930 of SEQ ID NO: 1887267
caggaaucagccugagugu

SEQ ID NO: 2459313 - RNA, 19 nt, Artificial Sequence
  Description of Artificial Sequence: Synthetic oligonucleotide
  Antisense strand to SEQ ID NO: 2459312
acacucaggcugauuccug

SEQ ID NO: 2459314 - RNA, 19 nt, Artificial Sequence
  Description of Artificial Sequence: Synthetic oligonucleotide
  Sense strand starting at position 997 of SEQ ID NO: 1887267
ccgugcacaccuugaguua

SEQ ID NO: 2459315 - RNA, 19 nt, Artificial Sequence
  Description of Artificial Sequence: Synthetic oligonucleotide
  Antisense strand to SEQ ID NO: 2459314
uaacucaaggugugcacgg

SEQ ID NO: 2459316 - RNA, 19 nt, Artificial Sequence
  Description of Artificial Sequence: Synthetic oligonucleotide
  Sense strand starting at position 998 of SEQ ID NO: 1887267
cgugcacaccuugaguuau

SEQ ID NO: 2459317 - RNA, 19 nt, Artificial Sequence
  Description of Artificial Sequence: Synthetic oligonucleotide
  Antisense strand to SEQ ID NO: 2459316
auaacucaaggugugcacg

SEQ ID NO: 2459318 - RNA, 19 nt, Artificial Sequence
  Description of Artificial Sequence: Synthetic oligonucleotide
  Sense strand starting at position 1008 of SEQ ID NO: 1887267
uugaguuauagcucucgcu

SEQ ID NO: 2459319 - RNA, 19 nt, Artificial Sequence
  Description of Artificial Sequence: Synthetic oligonucleotide
  Antisense strand to SEQ ID NO: 2459318
agcgagagcuauaacucaa

SEQ ID NO: 2459320 - RNA, 19 nt, Artificial Sequence
  Description of Artificial Sequence: Synthetic oligonucleotide
  Sense strand starting at position 1147 of SEQ ID NO: 1887267
gaagacugaucacagaaga

SEQ ID NO: 2459321 - RNA, 19 nt, Artificial Sequence
  Description of Artificial Sequence: Synthetic oligonucleotide
  Antisense strand to SEQ ID NO: 2459320
ucuucugugaucagucuuc

SEQ ID NO: 2459322 - RNA, 19 nt, Artificial Sequence
  Description of Artificial Sequence: Synthetic oligonucleotide
  Sense strand starting at position 1242 of SEQ ID NO: 1887267
gugcgcuuccgagagauga

SEQ ID NO: 2459323 - RNA, 19 nt, Artificial Sequence
  Description of Artificial Sequence: Synthetic oligonucleotide
  Antisense strand to SEQ ID NO: 2459322
ucaucucucggaagcgcac

SEQ ID NO: 2459324 - RNA, 19 nt, Artificial Sequence
  Description of Artificial Sequence: Synthetic oligonucleotide
  Sense strand starting at position 1243 of SEQ ID NO: 1887267
ugcgcuuccgagagaugag

SEQ ID NO: 2459325 - RNA, 19 nt, Artificial Sequence
  Description of Artificial Sequence: Synthetic oligonucleotide
  Antisense strand to SEQ ID NO: 2459324
cucaucucucggaagcgca

SEQ ID NO: 2459326 - RNA, 19 nt, Artificial Sequence
  Description of Artificial Sequence: Synthetic oligonucleotide
  Sense strand starting at position 1244 of SEQ ID NO: 1887267
gcgcuuccgagagaugaga

SEQ ID NO: 2459327 - RNA, 19 nt, Artificial Sequence
  Description of Artificial Sequence: Synthetic oligonucleotide
  Antisense strand to SEQ ID NO: 2459326
ucucaucucucggaagcgc

SEQ ID NO: 2459328 - RNA, 19 nt, Artificial Sequence
  Description of Artificial Sequence: Synthetic oligonucleotide
  Sense strand starting at position 1301 of SEQ ID NO: 1887267
gccgguauuucggaagaag

SEQ ID NO: 2459329 - RNA, 19 nt, Artificial Sequence
  Description of Artificial Sequence: Synthetic oligonucleotide
  Antisense strand to SEQ ID NO: 2459328
cuucuuccgaaauaccggc

SEQ ID NO: 2459330 - RNA, 19 nt, Artificial Sequence
  Description of Artificial Sequence: Synthetic oligonucleotide
  Sense strand starting at position 1495 of SEQ ID NO: 1887267
cggagaacuccagguuccu

SEQ ID NO: 2459331 - RNA, 19 nt, Artificial Sequence
  Description of Artificial Sequence: Synthetic oligonucleotide
  Antisense strand to SEQ ID NO: 2459330
aggaaccuggaguucuccg

SEQ ID NO: 2459332 - RNA, 19 nt, Artificial Sequence
  Description of Artificial Sequence: Synthetic oligonucleotide
  Sense strand starting at position 1861 of SEQ ID NO: 1887267
gugucaaugcuuugcacuu

SEQ ID NO: 2459333 - RNA, 19 nt, Artificial Sequence
  Description of Artificial Sequence: Synthetic oligonucleotide
  Antisense strand to SEQ ID NO: 2459332
aagugcaaagcauugacac

SEQ ID NO: 2459334 - RNA, 19 nt, Artificial Sequence
  Description of Artificial Sequence: Synthetic oligonucleotide
  Sense strand starting at position 2057 of SEQ ID NO: 1887267
gcccgucauugguuaauau

SEQ ID NO: 2459335 - RNA, 19 nt, Artificial Sequence
  Description of Artificial Sequence: Synthetic oligonucleotide
  Antisense strand to SEQ ID NO: 2459334
auauuaaccaaugacgggc

SEQ ID NO: 2459336 - RNA, 19 nt, Artificial Sequence
  Description of Artificial Sequence: Synthetic oligonucleotide
  Sense strand starting at position 2058 of SEQ ID NO: 1887267
cccgucauugguuaauauu

SEQ ID NO: 2459337 - RNA, 19 nt, Artificial Sequence
  Description of Artificial Sequence: Synthetic oligonucleotide
  Antisense strand to SEQ ID NO: 2459336
aauauuaaccaaugacggg

SEQ ID NO: 2459338 - RNA, 19 nt, Artificial Sequence
  Description of Artificial Sequence: Synthetic oligonucleotide
  Sense strand starting at position 2150 of SEQ ID NO: 1887267
cuuggccugagcugucaaa

SEQ ID NO: 2459339 - RNA, 19 nt, Artificial Sequence
  Description of Artificial Sequence: Synthetic oligonucleotide
  Antisense strand to SEQ ID NO: 2459338
uuugacagcucaggccaag

SEQ ID NO: 2459340 - RNA, 19 nt, Artificial Sequence
  Description of Artificial Sequence: Synthetic oligonucleotide
  Sense strand starting at position 2268 of SEQ ID NO: 1887267
augugagauagucacaguu

SEQ ID NO: 2459341 - RNA, 19 nt, Artificial Sequence
  Description of Artificial Sequence: Synthetic oligonucleotide
  Antisense strand to SEQ ID NO: 2459340
aacugugacuaucucacau

SEQ ID NO: 2459342 - RNA, 19 nt, Artificial Sequence
  Description of Artificial Sequence: Synthetic oligonucleotide
  Sense strand starting at position 3520 of SEQ ID NO: 1887267
ggccuuaaagccugaagaa

SEQ ID NO: 2459343 - RNA, 19 nt, Artificial Sequence
  Description of Artificial Sequence: Synthetic oligonucleotide
  Antisense strand to SEQ ID NO: 2459342
uucuucaggcuuuaaggcc

SEQ ID NO: 2459344 - RNA, 19 nt, Artificial Sequence
  Description of Artificial Sequence: Synthetic oligonucleotide
  Sense strand starting at position 3521 of SEQ ID NO: 1887267
gccuuaaagccugaagaaa

SEQ ID NO: 2459345 - RNA, 19 nt, Artificial Sequence
  Description of Artificial Sequence: Synthetic oligonucleotide
  Antisense strand to SEQ ID NO: 2459344
uuucuucaggcuuuaaggc

SEQ ID NO: 2459346 - RNA, 19 nt, Artificial Sequence
  Description of Artificial Sequence: Synthetic oligonucleotide
  Sense strand starting at position 3566 of SEQ ID NO: 1887267
cgacucagccaccgagaau

SEQ ID NO: 2459347 - RNA, 19 nt, Artificial Sequence
  Description of Artificial Sequence: Synthetic oligonucleotide
  Antisense strand to SEQ ID NO: 2459346
auucucgguggcugagucg

SEQ ID NO: 2459348 - RNA, 19 nt, Artificial Sequence
  Description of Artificial Sequence: Synthetic oligonucleotide
  Sense strand starting at position 3676 of SEQ ID NO: 1887267
agauuuauuucugggagcu

SEQ ID NO: 2459349 - RNA, 19 nt, Artificial Sequence
  Description of Artificial Sequence: Synthetic oligonucleotide
  Antisense strand to SEQ ID NO: 2459348
agcucccagaaauaaaucu

SEQ ID NO: 2459350 - RNA, 19 nt, Artificial Sequence
  Description of Artificial Sequence: Synthetic oligonucleotide
  Sense strand starting at position 3884 of SEQ ID NO: 1887267
ugggaucuccugggagcaa

SEQ ID NO: 2459351 - RNA, 19 nt, Artificial Sequence
  Description of Artificial Sequence: Synthetic oligonucleotide
  Antisense strand to SEQ ID NO: 2459350
uugcucccaggagauccca

SEQ ID NO: 2459352 - RNA, 19 nt, Artificial Sequence
  Description of Artificial Sequence: Synthetic oligonucleotide
  Sense strand starting at position 421 of SEQ ID NO: 1887268
uuugcuuucgugccauauc

SEQ ID NO: 2459353 - RNA, 19 nt, Artificial Sequence
  Description of Artificial Sequence: Synthetic oligonucleotide
  Antisense strand to SEQ ID NO: 2459352
gauauggcacgaaagcaaa

SEQ ID NO: 2459354 - RNA, 19 nt, Artificial Sequence
  Description of Artificial Sequence: Synthetic oligonucleotide
  Sense strand starting at position 424 of SEQ ID NO: 1887268
gcuuucgugccauaucuuu

SEQ ID NO: 2459355 - RNA, 19 nt, Artificial Sequence
  Description of Artificial Sequence: Synthetic oligonucleotide
  Antisense strand to SEQ ID NO: 2459354
aaagauauggcacgaaagc

SEQ ID NO: 2459356 - RNA, 19 nt, Artificial Sequence
  Description of Artificial Sequence: Synthetic oligonucleotide
  Sense strand starting at position 430 of SEQ ID NO: 1887268
gugccauaucuuuguccau

SEQ ID NO: 2459357 - RNA, 19 nt, Artificial Sequence
  Description of Artificial Sequence: Synthetic oligonucleotide
  Antisense strand to SEQ ID NO: 2459356
auggacaaagauauggcac

SEQ ID NO: 2459358 - RNA, 19 nt, Artificial Sequence
  Description of Artificial Sequence: Synthetic oligonucleotide
  Sense strand starting at position 432 of SEQ ID NO: 1887268
gccauaucuuuguccaugu

SEQ ID NO: 2459359 - RNA, 19 nt, Artificial Sequence
  Description of Artificial Sequence: Synthetic oligonucleotide
  Antisense strand to SEQ ID NO: 2459358
acauggacaaagauauggc

SEQ ID NO: 2459360 - RNA, 19 nt, Artificial Sequence
  Description of Artificial Sequence: Synthetic oligonucleotide
  Sense strand starting at position 433 of SEQ ID NO: 1887268
ccauaucuuuguccauguu

SEQ ID NO: 2459361 - RNA, 19 nt, Artificial Sequence
  Description of Artificial Sequence: Synthetic oligonucleotide
  Antisense strand to SEQ ID NO: 2459360
aacauggacaaagauaugg

SEQ ID NO: 2459362 - RNA, 19 nt, Artificial Sequence
  Description of Artificial Sequence: Synthetic oligonucleotide
  Sense strand starting at position 597 of SEQ ID NO: 1887268
uguuuauuccaagagcuug

SEQ ID NO: 2459363 - RNA, 19 nt, Artificial Sequence
  Description of Artificial Sequence: Synthetic oligonucleotide
  Antisense strand to SEQ ID NO: 2459362
caagcucuuggaauaaaca

SEQ ID NO: 2459364 - RNA, 19 nt, Artificial Sequence
  Description of Artificial Sequence: Synthetic oligonucleotide
  Sense strand starting at position 602 of SEQ ID NO: 1887268
auuccaagagcuuguagca

SEQ ID NO: 2459365 - RNA, 19 nt, Artificial Sequence
  Description of Artificial Sequence: Synthetic oligonucleotide
  Antisense strand to SEQ ID NO: 2459364
ugcuacaagcucuuggaau

SEQ ID NO: 2459366 - RNA, 19 nt, Artificial Sequence
  Description of Artificial Sequence: Synthetic oligonucleotide
  Sense strand starting at position 934 of SEQ ID NO: 1887268
uggccaggcuaaucuuaua

SEQ ID NO: 2459367 - RNA, 19 nt, Artificial Sequence
  Description of Artificial Sequence: Synthetic oligonucleotide
  Antisense strand to SEQ ID NO: 2459366
uauaagauuagccuggcca

SEQ ID NO: 2459368 - RNA, 19 nt, Artificial Sequence
  Description of Artificial Sequence: Synthetic oligonucleotide
  Sense strand starting at position 983 of SEQ ID NO: 1887268
agcauauguuuccuguauu

SEQ ID NO: 2459369 - RNA, 19 nt, Artificial Sequence
  Description of Artificial Sequence: Synthetic oligonucleotide
  Antisense strand to SEQ ID NO: 2459368
aauacaggaaacauaugcu

SEQ ID NO: 2459370 - RNA, 19 nt, Artificial Sequence
  Description of Artificial Sequence: Synthetic oligonucleotide
  Sense strand starting at position 986 of SEQ ID NO: 1887268
auauguuuccuguauugaa

SEQ ID NO: 2459371 - RNA, 19 nt, Artificial Sequence
  Description of Artificial Sequence: Synthetic oligonucleotide
  Antisense strand to SEQ ID NO: 2459370
uucaauacaggaaacauau

SEQ ID NO: 2459372 - RNA, 19 nt, Artificial Sequence
  Description of Artificial Sequence: Synthetic oligonucleotide
  Sense strand starting at position 1040 of SEQ ID NO: 1887268
auggucugcuccuaauuua

SEQ ID NO: 2459373 - RNA, 19 nt, Artificial Sequence
  Description of Artificial Sequence: Synthetic oligonucleotide
  Antisense strand to SEQ ID NO: 2459372
uaaauuaggagcagaccau

SEQ ID NO: 2459374 - RNA, 19 nt, Artificial Sequence
  Description of Artificial Sequence: Synthetic oligonucleotide
  Sense strand starting at position 1446 of SEQ ID NO: 1887268
ccuacaguaugccagaaau

SEQ ID NO: 2459375 - RNA, 19 nt, Artificial Sequence
  Description of Artificial Sequence: Synthetic oligonucleotide
  Antisense strand to SEQ ID NO: 2459374
auuucuggcauacuguagg

SEQ ID NO: 2459376 - RNA, 19 nt, Artificial Sequence
  Description of Artificial Sequence: Synthetic oligonucleotide
  Sense strand starting at position 2194 of SEQ ID NO: 1887268
caaugacucuggugaggac

SEQ ID NO: 2459377 - RNA, 19 nt, Artificial Sequence
  Description of Artificial Sequence: Synthetic oligonucleotide
  Antisense strand to SEQ ID NO: 2459376
guccucaccagagucauug

SEQ ID NO: 2459378 - RNA, 19 nt, Artificial Sequence
  Description of Artificial Sequence: Synthetic oligonucleotide
  Sense strand starting at position 2244 of SEQ ID NO: 1887268
uaucuaguuccagguuaga

SEQ ID NO: 2459379 - RNA, 19 nt, Artificial Sequence
  Description of Artificial Sequence: Synthetic oligonucleotide
  Antisense strand to SEQ ID NO: 2459378
ucuaaccuggaacuagaua

SEQ ID NO: 2459380 - RNA, 19 nt, Artificial Sequence
  Description of Artificial Sequence: Synthetic oligonucleotide
  Sense strand starting at position 2636 of SEQ ID NO: 1887268
uuaacaaguuagcucugau

SEQ ID NO: 2459381 - RNA, 19 nt, Artificial Sequence
  Description of Artificial Sequence: Synthetic oligonucleotide
  Antisense strand to SEQ ID NO: 2459380
aucagagcuaacuuguuaa

SEQ ID NO: 2459382 - RNA, 19 nt, Artificial Sequence
  Description of Artificial Sequence: Synthetic oligonucleotide
  Sense strand starting at position 2704 of SEQ ID NO: 1887268
cuauuaguaucaccaugga

SEQ ID NO: 2459383 - RNA, 19 nt, Artificial Sequence
  Description of Artificial Sequence: Synthetic oligonucleotide
  Antisense strand to SEQ ID NO: 2459382
uccauggugauacuaauag

SEQ ID NO: 2459384 - RNA, 19 nt, Artificial Sequence
  Description of Artificial Sequence: Synthetic oligonucleotide
  Sense strand starting at position 2707 of SEQ ID NO: 1887268
uuaguaucaccauggaaau

SEQ ID NO: 2459385 - RNA, 19 nt, Artificial Sequence
  Description of Artificial Sequence: Synthetic oligonucleotide
  Antisense strand to SEQ ID NO: 2459384
auuuccauggugauacuaa

SEQ ID NO: 2459386 - RNA, 19 nt, Artificial Sequence
  Description of Artificial Sequence: Synthetic oligonucleotide
  Sense strand starting at position 2868 of SEQ ID NO: 1887268
cucaaauuauggcuaagga

SEQ ID NO: 2459387 - RNA, 19 nt, Artificial Sequence
  Description of Artificial Sequence: Synthetic oligonucleotide
  Antisense strand to SEQ ID NO: 2459386
uccuuagccauaauuugag

SEQ ID NO: 2459388 - RNA, 19 nt, Artificial Sequence
  Description of Artificial Sequence: Synthetic oligonucleotide
  Sense strand starting at position 2883 of SEQ ID NO: 1887268
aggauucccuuugccagaa

SEQ ID NO: 2459389 - RNA, 19 nt, Artificial Sequence
  Description of Artificial Sequence: Synthetic oligonucleotide
  Antisense strand to SEQ ID NO: 2459388
uucuggcaaagggaauccu

SEQ ID NO: 2459390 - RNA, 19 nt, Artificial Sequence
  Description of Artificial Sequence: Synthetic oligonucleotide
  Sense strand starting at position 2884 of SEQ ID NO: 1887268
ggauucccuuugccagaau

SEQ ID NO: 2459391 - RNA, 19 nt, Artificial Sequence
  Description of Artificial Sequence: Synthetic oligonucleotide
  Antisense strand to SEQ ID NO: 2459390
auucuggcaaagggaaucc

SEQ ID NO: 2459392 - RNA, 19 nt, Artificial Sequence
  Description of Artificial Sequence: Synthetic oligonucleotide
  Sense strand starting at position 3094 of SEQ ID NO: 1887268
uuaugccucuucucagagu

SEQ ID NO: 2459393 - RNA, 19 nt, Artificial Sequence
  Description of Artificial Sequence: Synthetic oligonucleotide
  Antisense strand to SEQ ID NO: 2459392
acucugagaagaggcauaa

SEQ ID NO: 2459394 - RNA, 19 nt, Artificial Sequence
  Description of Artificial Sequence: Synthetic oligonucleotide
  Sense strand starting at position 3103 of SEQ ID NO: 1887268
uucucagagugagaccauu

SEQ ID NO: 2459395 - RNA, 19 nt, Artificial Sequence
  Description of Artificial Sequence: Synthetic oligonucleotide
  Antisense strand to SEQ ID NO: 2459394
aauggucucacucugagaa

SEQ ID NO: 2459396 - RNA, 19 nt, Artificial Sequence
  Description of Artificial Sequence: Synthetic oligonucleotide
  Sense strand starting at position 3154 of SEQ ID NO: 1887268
uuuggaugcuuacaaauuu

SEQ ID NO: 2459397 - RNA, 19 nt, Artificial Sequence
  Description of Artificial Sequence: Synthetic oligonucleotide
  Antisense strand to SEQ ID NO: 2459396
aaauuuguaagcauccaaa

SEQ ID NO: 2459398 - RNA, 19 nt, Artificial Sequence
  Description of Artificial Sequence: Synthetic oligonucleotide
  Sense strand starting at position 3163 of SEQ ID NO: 1887268
uuacaaauuucgucuguuc

SEQ ID NO: 2459399 - RNA, 19 nt, Artificial Sequence
  Description of Artificial Sequence: Synthetic oligonucleotide
  Antisense strand to SEQ ID NO: 2459398
gaacagacgaaauuuguaa

SEQ ID NO: 2459400 - RNA, 19 nt, Artificial Sequence
  Description of Artificial Sequence: Synthetic oligonucleotide
  Sense strand starting at position 3172 of SEQ ID NO: 1887268
ucgucuguucuggaaaucu

SEQ ID NO: 2459401 - RNA, 19 nt, Artificial Sequence
  Description of Artificial Sequence: Synthetic oligonucleotide
  Antisense strand to SEQ ID NO: 2459400
agauuuccagaacagacga

SEQ ID NO: 2459402 - RNA, 19 nt, Artificial Sequence
  Description of Artificial Sequence: Synthetic oligonucleotide
  Sense strand starting at position 3181 of SEQ ID NO: 1887268
cuggaaaucuucucugaug

SEQ ID NO: 2459403 - RNA, 19 nt, Artificial Sequence
  Description of Artificial Sequence: Synthetic oligonucleotide
  Antisense strand to SEQ ID NO: 2459402
caucagagaagauuuccag

SEQ ID NO: 2459404 - RNA, 19 nt, Artificial Sequence
  Description of Artificial Sequence: Synthetic oligonucleotide
  Sense strand starting at position 3183 of SEQ ID NO: 1887268
ggaaaucuucucugaugca

SEQ ID NO: 2459405 - RNA, 19 nt, Artificial Sequence
  Description of Artificial Sequence: Synthetic oligonucleotide
  Antisense strand to SEQ ID NO: 2459404
ugcaucagagaagauuucc

SEQ ID NO: 2459406 - RNA, 19 nt, Artificial Sequence
  Description of Artificial Sequence: Synthetic oligonucleotide
  Sense strand starting at position 3192 of SEQ ID NO: 1887268
cucugaugcaaugggagau

SEQ ID NO: 2459407 - RNA, 19 nt, Artificial Sequence
  Description of Artificial Sequence: Synthetic oligonucleotide
  Antisense strand to SEQ ID NO: 2459406
aucucccauugcaucagag

SEQ ID NO: 2459408 - RNA, 19 nt, Artificial Sequence
  Description of Artificial Sequence: Synthetic oligonucleotide
  Sense strand starting at position 3198 of SEQ ID NO: 1887268
ugcaaugggagaugucaga

SEQ ID NO: 2459409 - RNA, 19 nt, Artificial Sequence
  Description of Artificial Sequence: Synthetic oligonucleotide
  Antisense strand to SEQ ID NO: 2459408
ucugacaucucccauugca

SEQ ID NO: 2459410 - RNA, 19 nt, Artificial Sequence
  Description of Artificial Sequence: Synthetic oligonucleotide
  Sense strand starting at position 3626 of SEQ ID NO: 1887268
cucuuuagcuaguccauau

SEQ ID NO: 2459411 - RNA, 19 nt, Artificial Sequence
  Description of Artificial Sequence: Synthetic oligonucleotide
  Antisense strand to SEQ ID NO: 2459410
auauggacuagcuaaagag

SEQ ID NO: 2459412 - RNA, 19 nt, Artificial Sequence
  Description of Artificial Sequence: Synthetic oligonucleotide
  Sense strand starting at position 3699 of SEQ ID NO: 1887268
guagcaauguuaccugcua

SEQ ID NO: 2459413 - RNA, 19 nt, Artificial Sequence
  Description of Artificial Sequence: Synthetic oligonucleotide
  Antisense strand to SEQ ID NO: 2459412
uagcagguaacauugcuac

SEQ ID NO: 2459414 - RNA, 19 nt, Artificial Sequence
  Description of Artificial Sequence: Synthetic oligonucleotide
  Sense strand starting at position 3733 of SEQ ID NO: 1887268
ucccgucaucaggagaacu

SEQ ID NO: 2459415 - RNA, 19 nt, Artificial Sequence
  Description of Artificial Sequence: Synthetic oligonucleotide
  Antisense strand to SEQ ID NO: 2459414
aguucuccugaugacggga

SEQ ID NO: 2459416 - RNA, 19 nt, Artificial Sequence
  Description of Artificial Sequence: Synthetic oligonucleotide
  Sense strand starting at position 3735 of SEQ ID NO: 1887268
ccgucaucaggagaacuca

SEQ ID NO: 2459417 - RNA, 19 nt, Artificial Sequence
  Description of Artificial Sequence: Synthetic oligonucleotide
  Antisense strand to SEQ ID NO: 2459416
ugaguucuccugaugacgg

SEQ ID NO: 2459418 - RNA, 19 nt, Artificial Sequence
  Description of Artificial Sequence: Synthetic oligonucleotide
  Sense strand starting at position 3754 of SEQ ID NO: 1887268
cuuucuguaccugagcuau

SEQ ID NO: 2459419 - RNA, 19 nt, Artificial Sequence
  Description of Artificial Sequence: Synthetic oligonucleotide
  Antisense strand to SEQ ID NO: 2459418
auagcucagguacagaaag

SEQ ID NO: 2459420 - RNA, 19 nt, Artificial Sequence
  Description of Artificial Sequence: Synthetic oligonucleotide
  Sense strand starting at position 3902 of SEQ ID NO: 1887268
aaggcauguuuccuaggga

SEQ ID NO: 2459421 - RNA, 19 nt, Artificial Sequence
  Description of Artificial Sequence: Synthetic oligonucleotide
  Antisense strand to SEQ ID NO: 2459420
ucccuaggaaacaugccuu

SEQ ID NO: 2459422 - RNA, 19 nt, Artificial Sequence
  Description of Artificial Sequence: Synthetic oligonucleotide
  Sense strand starting at position 3905 of SEQ ID NO: 1887268
gcauguuuccuagggagag

SEQ ID NO: 2459423 - RNA, 19 nt, Artificial Sequence
  Description of Artificial Sequence: Synthetic oligonucleotide
  Antisense strand to SEQ ID NO: 2459422
cucucccuaggaaacaugc

SEQ ID NO: 2459424 - RNA, 19 nt, Artificial Sequence
  Description of Artificial Sequence: Synthetic oligonucleotide
  Sense strand starting at position 3919 of SEQ ID NO: 1887268
gagaguccucucugauagu

SEQ ID NO: 2459425 - RNA, 19 nt, Artificial Sequence
  Description of Artificial Sequence: Synthetic oligonucleotide
  Antisense strand to SEQ ID NO: 2459424
acuaucagagaggacucuc

SEQ ID NO: 2459426 - RNA, 19 nt, Artificial Sequence
  Description of Artificial Sequence: Synthetic oligonucleotide
  Sense strand starting at position 3925 of SEQ ID NO: 1887268
ccucucugauagucuauua

SEQ ID NO: 2459427 - RNA, 19 nt, Artificial Sequence
  Description of Artificial Sequence: Synthetic oligonucleotide
  Antisense strand to SEQ ID NO: 2459426
uaauagacuaucagagagg

SEQ ID NO: 2459428 - RNA, 19 nt, Artificial Sequence
  Description of Artificial Sequence: Synthetic oligonucleotide
  Sense strand starting at position 3930 of SEQ ID NO: 1887268
cugauagucuauuaacuag

SEQ ID NO: 2459429 - RNA, 19 nt, Artificial Sequence
  Description of Artificial Sequence: Synthetic oligonucleotide
  Antisense strand to SEQ ID NO: 2459428
cuaguuaauagacuaucag

SEQ ID NO: 2459430 - RNA, 19 nt, Artificial Sequence
  Description of Artificial Sequence: Synthetic oligonucleotide
  Sense strand starting at position 3977 of SEQ ID NO: 1887268
uaacgauucuguguccuag

SEQ ID NO: 2459431 - RNA, 19 nt, Artificial Sequence
  Description of Artificial Sequence: Synthetic oligonucleotide
  Antisense strand to SEQ ID NO: 2459430
cuaggacacagaaucguua

SEQ ID NO: 2459432 - RNA, 19 nt, Artificial Sequence
  Description of Artificial Sequence: Synthetic oligonucleotide
  Sense strand starting at position 182 of SEQ ID NO: 1887269
aagagcaauugguuuccua

SEQ ID NO: 2459433 - RNA, 19 nt, Artificial Sequence
  Description of Artificial Sequence: Synthetic oligonucleotide
  Antisense strand to SEQ ID NO: 2459432
uaggaaaccaauugcucuu

SEQ ID NO: 2459434 - RNA, 19 nt, Artificial Sequence
  Description of Artificial Sequence: Synthetic oligonucleotide
  Sense strand starting at position 185 of SEQ ID NO: 1887269
agcaauugguuuccuagaa

SEQ ID NO: 2459435 - RNA, 19 nt, Artificial Sequence
  Description of Artificial Sequence: Synthetic oligonucleotide
  Antisense strand to SEQ ID NO: 2459434
uucuaggaaaccaauugcu

SEQ ID NO: 2459436 - RNA, 19 nt, Artificial Sequence
  Description of Artificial Sequence: Synthetic oligonucleotide
  Sense strand starting at position 186 of SEQ ID NO: 1887269
gcaauugguuuccuagaau

SEQ ID NO: 2459437 - RNA, 19 nt, Artificial Sequence
  Description of Artificial Sequence: Synthetic oligonucleotide
  Antisense strand to SEQ ID NO: 2459436
auucuaggaaaccaauugc

SEQ ID NO: 2459438 - RNA, 19 nt, Artificial Sequence
  Description of Artificial Sequence: Synthetic oligonucleotide
  Sense strand starting at position 189 of SEQ ID NO: 1887269
auugguuuccuagaauauu

SEQ ID NO: 2459439 - RNA, 19 nt, Artificial Sequence
  Description of Artificial Sequence: Synthetic oligonucleotide
  Antisense strand to SEQ ID NO: 2459438
aauauucuaggaaaccaau

SEQ ID NO: 2459440 - RNA, 19 nt, Artificial Sequence
  Description of Artificial Sequence: Synthetic oligonucleotide
  Sense strand starting at position 288 of SEQ ID NO: 1887269
gugccagguacagagaaua

SEQ ID NO: 2459441 - RNA, 19 nt, Artificial Sequence
  Description of Artificial Sequence: Synthetic oligonucleotide
  Antisense strand to SEQ ID NO: 2459440
uauucucuguaccuggcac

SEQ ID NO: 2459442 - RNA, 19 nt, Artificial Sequence
  Description of Artificial Sequence: Synthetic oligonucleotide
  Sense strand starting at position 336 of SEQ ID NO: 1887269
gccugagaucagcagcuua

SEQ ID NO: 2459443 - RNA, 19 nt, Artificial Sequence
  Description of Artificial Sequence: Synthetic oligonucleotide
  Antisense strand to SEQ ID NO: 2459442
uaagcugcugaucucaggc

SEQ ID NO: 2459444 - RNA, 19 nt, Artificial Sequence
  Description of Artificial Sequence: Synthetic oligonucleotide
  Sense strand starting at position 385 of SEQ ID NO: 1887269
ggguuaagaguguguauua

SEQ ID NO: 2459445 - RNA, 19 nt, Artificial Sequence
  Description of Artificial Sequence: Synthetic oligonucleotide
  Antisense strand to SEQ ID NO: 2459444
uaauacacacucuuaaccc

SEQ ID NO: 2459446 - RNA, 19 nt, Artificial Sequence
  Description of Artificial Sequence: Synthetic oligonucleotide
  Sense strand starting at position 386 of SEQ ID NO: 1887269
gguuaagaguguguauuau

SEQ ID NO: 2459447 - RNA, 19 nt, Artificial Sequence
  Description of Artificial Sequence: Synthetic oligonucleotide
  Antisense strand to SEQ ID NO: 2459446
auaauacacacucuuaacc

SEQ ID NO: 2459448 - RNA, 19 nt, Artificial Sequence
  Description of Artificial Sequence: Synthetic oligonucleotide
  Sense strand starting at position 907 of SEQ ID NO: 1887269
gauggagugcaaugucaca

SEQ ID NO: 2459449 - RNA, 19 nt, Artificial Sequence
  Description of Artificial Sequence: Synthetic oligonucleotide
  Antisense strand to SEQ ID NO: 2459448
ugugacauugcacuccauc

SEQ ID NO: 2459450 - RNA, 19 nt, Artificial Sequence
  Description of Artificial Sequence: Synthetic oligonucleotide
  Sense strand starting at position 2082 of SEQ ID NO: 1887269
gcggauuuagauugucacu

SEQ ID NO: 2459451 - RNA, 19 nt, Artificial Sequence
  Description of Artificial Sequence: Synthetic oligonucleotide
  Antisense strand to SEQ ID NO: 2459450
agugacaaucuaaauccgc

SEQ ID NO: 2459452 - RNA, 19 nt, Artificial Sequence
  Description of Artificial Sequence: Synthetic oligonucleotide
  Sense strand starting at position 2428 of SEQ ID NO: 1887269
guguguccgcgacucugaa

SEQ ID NO: 2459453 - RNA, 19 nt, Artificial Sequence
  Description of Artificial Sequence: Synthetic oligonucleotide
  Antisense strand to SEQ ID NO: 2459452
uucagagucgcggacacac

SEQ ID NO: 2459454 - RNA, 19 nt, Artificial Sequence
  Description of Artificial Sequence: Synthetic oligonucleotide
  Sense strand starting at position 2649 of SEQ ID NO: 1887269
caucgcugacccugaugaa

SEQ ID NO: 2459455 - RNA, 19 nt, Artificial Sequence
  Description of Artificial Sequence: Synthetic oligonucleotide
  Antisense strand to SEQ ID NO: 2459454
uucaucagggucagcgaug

SEQ ID NO: 2459456 - RNA, 19 nt, Artificial Sequence
  Description of Artificial Sequence: Synthetic oligonucleotide
  Sense strand starting at position 2650 of SEQ ID NO: 1887269
aucgcugacccugaugaaa

SEQ ID NO: 2459457 - RNA, 19 nt, Artificial Sequence
  Description of Artificial Sequence: Synthetic oligonucleotide
  Antisense strand to SEQ ID NO: 2459456
uuucaucagggucagcgau

SEQ ID NO: 2459458 - RNA, 19 nt, Artificial Sequence
  Description of Artificial Sequence: Synthetic oligonucleotide
  Sense strand starting at position 2661 of SEQ ID NO: 1887269
ugaugaaauuaugugguuu

SEQ ID NO: 2459459 - RNA, 19 nt, Artificial Sequence
  Description of Artificial Sequence: Synthetic oligonucleotide
  Antisense strand to SEQ ID NO: 2459458
aaaccacauaauuucauca

SEQ ID NO: 2459460 - RNA, 19 nt, Artificial Sequence
  Description of Artificial Sequence: Synthetic oligonucleotide
  Sense strand starting at position 2685 of SEQ ID NO: 1887269
guagguaugccuuagaaca

SEQ ID NO: 2459461 - RNA, 19 nt, Artificial Sequence
  Description of Artificial Sequence: Synthetic oligonucleotide
  Antisense strand to SEQ ID NO: 2459460
uguucuaaggcauaccuac

SEQ ID NO: 2459462 - RNA, 19 nt, Artificial Sequence
  Description of Artificial Sequence: Synthetic oligonucleotide
  Sense strand starting at position 2708 of SEQ ID NO: 1887269
aaguguuguuaagccuaaa

SEQ ID NO: 2459463 - RNA, 19 nt, Artificial Sequence
  Description of Artificial Sequence: Synthetic oligonucleotide
  Antisense strand to SEQ ID NO: 2459462
uuuaggcuuaacaacacuu

SEQ ID NO: 2459464 - RNA, 19 nt, Artificial Sequence
  Description of Artificial Sequence: Synthetic oligonucleotide
  Sense strand starting at position 2711 of SEQ ID NO: 1887269
uguuguuaagccuaaacuu

SEQ ID NO: 2459465 - RNA, 19 nt, Artificial Sequence
  Description of Artificial Sequence: Synthetic oligonucleotide
  Antisense strand to SEQ ID NO: 2459464
aaguuuaggcuuaacaaca

SEQ ID NO: 2459466 - RNA, 19 nt, Artificial Sequence
  Description of Artificial Sequence: Synthetic oligonucleotide
  Sense strand starting at position 2762 of SEQ ID NO: 1887269
cgugcuugguguuugaaga

SEQ ID NO: 2459467 - RNA, 19 nt, Artificial Sequence
  Description of Artificial Sequence: Synthetic oligonucleotide
  Antisense strand to SEQ ID NO: 2459466
ucuucaaacaccaagcacg

SEQ ID NO: 2459468 - RNA, 19 nt, Artificial Sequence
  Description of Artificial Sequence: Synthetic oligonucleotide
  Sense strand starting at position 2763 of SEQ ID NO: 1887269
gugcuugguguuugaagau

SEQ ID NO: 2459469 - RNA, 19 nt, Artificial Sequence
  Description of Artificial Sequence: Synthetic oligonucleotide
  Antisense strand to SEQ ID NO: 2459468
aucuucaaacaccaagcac

SEQ ID NO: 2459470 - RNA, 19 nt, Artificial Sequence
  Description of Artificial Sequence: Synthetic oligonucleotide
  Sense strand starting at position 2769 of SEQ ID NO: 1887269
gguguuugaagaugcaaac

SEQ ID NO: 2459471 - RNA, 19 nt, Artificial Sequence
  Description of Artificial Sequence: Synthetic oligonucleotide
  Antisense strand to SEQ ID NO: 2459470
guuugcaucuucaaacacc

SEQ ID NO: 2459472 - RNA, 19 nt, Artificial Sequence
  Description of Artificial Sequence: Synthetic oligonucleotide
  Sense strand starting at position 3012 of SEQ ID NO: 1887269
aggagaauagcgugaacua

SEQ ID NO: 2459473 - RNA, 19 nt, Artificial Sequence
  Description of Artificial Sequence: Synthetic oligonucleotide
  Antisense strand to SEQ ID NO: 2459472
uaguucacgcuauucuccu

SEQ ID NO: 2459474 - RNA, 19 nt, Artificial Sequence
  Description of Artificial Sequence: Synthetic oligonucleotide
  Sense strand starting at position 3013 of SEQ ID NO: 1887269
ggagaauagcgugaacuag

SEQ ID NO: 2459475 - RNA, 19 nt, Artificial Sequence
  Description of Artificial Sequence: Synthetic oligonucleotide
  Antisense strand to SEQ ID NO: 2459474
cuaguucacgcuauucucc

SEQ ID NO: 2459476 - RNA, 19 nt, Artificial Sequence
  Description of Artificial Sequence: Synthetic oligonucleotide
  Sense strand starting at position 3187 of SEQ ID NO: 1887269
gggaugacguguuuguaga

SEQ ID NO: 2459477 - RNA, 19 nt, Artificial Sequence
  Description of Artificial Sequence: Synthetic oligonucleotide
  Antisense strand to SEQ ID NO: 2459476
ucuacaaacacgucauccc

SEQ ID NO: 2459478 - RNA, 19 nt, Artificial Sequence
  Description of Artificial Sequence: Synthetic oligonucleotide
  Sense strand starting at position 3188 of SEQ ID NO: 1887269
ggaugacguguuuguagaa

SEQ ID NO: 2459479 - RNA, 19 nt, Artificial Sequence
  Description of Artificial Sequence: Synthetic oligonucleotide
  Antisense strand to SEQ ID NO: 2459478
uucuacaaacacgucaucc

SEQ ID NO: 2459480 - RNA, 19 nt, Artificial Sequence
  Description of Artificial Sequence: Synthetic oligonucleotide
  Sense strand starting at position 3189 of SEQ ID NO: 1887269
gaugacguguuuguagaau

SEQ ID NO: 2459481 - RNA, 19 nt, Artificial Sequence
  Description of Artificial Sequence: Synthetic oligonucleotide
  Antisense strand to SEQ ID NO: 2459480
auucuacaaacacgucauc

SEQ ID NO: 2459482 - RNA, 19 nt, Artificial Sequence
  Description of Artificial Sequence: Synthetic oligonucleotide
  Sense strand starting at position 3195 of SEQ ID NO: 1887269
guguuuguagaaugcugau

SEQ ID NO: 2459483 - RNA, 19 nt, Artificial Sequence
  Description of Artificial Sequence: Synthetic oligonucleotide
  Antisense strand to SEQ ID NO: 2459482
aucagcauucuacaaacac

SEQ ID NO: 2459484 - RNA, 19 nt, Artificial Sequence
  Description of Artificial Sequence: Synthetic oligonucleotide
  Sense strand starting at position 3201 of SEQ ID NO: 1887269
guagaaugcugauaauaaa

SEQ ID NO: 2459485 - RNA, 19 nt, Artificial Sequence
  Description of Artificial Sequence: Synthetic oligonucleotide
  Antisense strand to SEQ ID NO: 2459484
uuuauuaucagcauucuac

SEQ ID NO: 2459486 - RNA, 19 nt, Artificial Sequence
  Description of Artificial Sequence: Synthetic oligonucleotide
  Sense strand starting at position 3218 of SEQ ID NO: 1887269
aauggaaaugcaggaguuu

SEQ ID NO: 2459487 - RNA, 19 nt, Artificial Sequence
  Description of Artificial Sequence: Synthetic oligonucleotide
  Antisense strand to SEQ ID NO: 2459486
aaacuccugcauuuccauu

SEQ ID NO: 2459488 - RNA, 19 nt, Artificial Sequence
  Description of Artificial Sequence: Synthetic oligonucleotide
  Sense strand starting at position 3238 of SEQ ID NO: 1887269
uguucucaagaguacaguu

SEQ ID NO: 2459489 - RNA, 19 nt, Artificial Sequence
  Description of Artificial Sequence: Synthetic oligonucleotide
  Antisense strand to SEQ ID NO: 2459488
aacuguacucuugagaaca

SEQ ID NO: 2459490 - RNA, 19 nt, Artificial Sequence
  Description of Artificial Sequence: Synthetic oligonucleotide
  Sense strand starting at position 3411 of SEQ ID NO: 1887269
gcaauagcagauuauauua

SEQ ID NO: 2459491 - RNA, 19 nt, Artificial Sequence
  Description of Artificial Sequence: Synthetic oligonucleotide
  Antisense strand to SEQ ID NO: 2459490
uaauauaaucugcuauugc

SEQ ID NO: 2459492 - RNA, 19 nt, Artificial Sequence
  Description of Artificial Sequence: Synthetic oligonucleotide
  Sense strand starting at position 3435 of SEQ ID NO: 1887269
uaguguggaccuggaugaa

SEQ ID NO: 2459493 - RNA, 19 nt, Artificial Sequence
  Description of Artificial Sequence: Synthetic oligonucleotide
  Antisense strand to SEQ ID NO: 2459492
uucauccagguccacacua

SEQ ID NO: 2459494 - RNA, 19 nt, Artificial Sequence
  Description of Artificial Sequence: Synthetic oligonucleotide
  Sense strand starting at position 3450 of SEQ ID NO: 1887269
ugaagaaugaucugugacg

SEQ ID NO: 2459495 - RNA, 19 nt, Artificial Sequence
  Description of Artificial Sequence: Synthetic oligonucleotide
  Antisense strand to SEQ ID NO: 2459494
cgucacagaucauucuuca

SEQ ID NO: 2459496 - RNA, 19 nt, Artificial Sequence
  Description of Artificial Sequence: Synthetic oligonucleotide
  Sense strand starting at position 3461 of SEQ ID NO: 1887269
cugugacgccucugaauga

SEQ ID NO: 2459497 - RNA, 19 nt, Artificial Sequence
  Description of Artificial Sequence: Synthetic oligonucleotide
  Antisense strand to SEQ ID NO: 2459496
ucauucagaggcgucacag

SEQ ID NO: 2459498 - RNA, 19 nt, Artificial Sequence
  Description of Artificial Sequence: Synthetic oligonucleotide
  Sense strand starting at position 3489 of SEQ ID NO: 1887269
cuaagaacccaguaguucu

SEQ ID NO: 2459499 - RNA, 19 nt, Artificial Sequence
  Description of Artificial Sequence: Synthetic oligonucleotide
  Antisense strand to SEQ ID NO: 2459498
agaacuacuggguucuuag

SEQ ID NO: 2459500 - RNA, 19 nt, Artificial Sequence
  Description of Artificial Sequence: Synthetic oligonucleotide
  Sense strand starting at position 3512 of SEQ ID NO: 1887269
ccaugacagugcuugaaug

SEQ ID NO: 2459501 - RNA, 19 nt, Artificial Sequence
  Description of Artificial Sequence: Synthetic oligonucleotide
  Antisense strand to SEQ ID NO: 2459500
cauucaagcacugucaugg

SEQ ID NO: 2459502 - RNA, 19 nt, Artificial Sequence
  Description of Artificial Sequence: Synthetic oligonucleotide
  Sense strand starting at position 3530 of SEQ ID NO: 1887269
gguugucuugugcauauga

SEQ ID NO: 2459503 - RNA, 19 nt, Artificial Sequence
  Description of Artificial Sequence: Synthetic oligonucleotide
  Antisense strand to SEQ ID NO: 2459502
ucauaugcacaagacaacc

SEQ ID NO: 2459504 - RNA, 19 nt, Artificial Sequence
  Description of Artificial Sequence: Synthetic oligonucleotide
  Sense strand starting at position 3532 of SEQ ID NO: 1887269
uugucuugugcauaugaga

SEQ ID NO: 2459505 - RNA, 19 nt, Artificial Sequence
  Description of Artificial Sequence: Synthetic oligonucleotide
  Antisense strand to SEQ ID NO: 2459504
ucucauaugcacaagacaa

SEQ ID NO: 2459506 - RNA, 19 nt, Artificial Sequence
  Description of Artificial Sequence: Synthetic oligonucleotide
  Sense strand starting at position 3572 of SEQ ID NO: 1887269
uugguucuaguguggaaga

SEQ ID NO: 2459507 - RNA, 19 nt, Artificial Sequence
  Description of Artificial Sequence: Synthetic oligonucleotide
  Antisense strand to SEQ ID NO: 2459506
ucuuccacacuagaaccaa

SEQ ID NO: 2459508 - RNA, 19 nt, Artificial Sequence
  Description of Artificial Sequence: Synthetic oligonucleotide
  Sense strand starting at position 3574 of SEQ ID NO: 1887269
gguucuaguguggaagaga

SEQ ID NO: 2459509 - RNA, 19 nt, Artificial Sequence
  Description of Artificial Sequence: Synthetic oligonucleotide
  Antisense strand to SEQ ID NO: 2459508
ucucuuccacacuagaacc

SEQ ID NO: 2459510 - RNA, 19 nt, Artificial Sequence
  Description of Artificial Sequence: Synthetic oligonucleotide
  Sense strand starting at position 3577 of SEQ ID NO: 1887269
ucuaguguggaagagagua

SEQ ID NO: 2459511 - RNA, 19 nt, Artificial Sequence
  Description of Artificial Sequence: Synthetic oligonucleotide
  Antisense strand to SEQ ID NO: 2459510
uacucucuuccacacuaga

SEQ ID NO: 2459512 - RNA, 19 nt, Artificial Sequence
  Description of Artificial Sequence: Synthetic oligonucleotide
  Sense strand starting at position 139 of SEQ ID NO: 1887270
gagggcguauguuucuaau

SEQ ID NO: 2459513 - RNA, 19 nt, Artificial Sequence
  Description of Artificial Sequence: Synthetic oligonucleotide
  Antisense strand to SEQ ID NO: 2459512
auuagaaacauacgcccuc

SEQ ID NO: 2459514 - RNA, 19 nt, Artificial Sequence
  Description of Artificial Sequence: Synthetic oligonucleotide
  Sense strand starting at position 172 of SEQ ID NO: 1887270
acagguuauuucguauuac

SEQ ID NO: 2459515 - RNA, 19 nt, Artificial Sequence
  Description of Artificial Sequence: Synthetic oligonucleotide
  Antisense strand to SEQ ID NO: 2459514
guaauacgaaauaaccugu

SEQ ID NO: 2459516 - RNA, 19 nt, Artificial Sequence
  Description of Artificial Sequence: Synthetic oligonucleotide
  Sense strand starting at position 184 of SEQ ID NO: 1887270
guauuacuguuugcauuga

SEQ ID NO: 2459517 - RNA, 19 nt, Artificial Sequence
  Description of Artificial Sequence: Synthetic oligonucleotide
  Antisense strand to SEQ ID NO: 2459516
ucaaugcaaacaguaauac

SEQ ID NO: 2459518 - RNA, 19 nt, Artificial Sequence
  Description of Artificial Sequence: Synthetic oligonucleotide
  Sense strand starting at position 195 of SEQ ID NO: 1887270
ugcauugaauaucuugaaa

SEQ ID NO: 2459519 - RNA, 19 nt, Artificial Sequence
  Description of Artificial Sequence: Synthetic oligonucleotide
  Antisense strand to SEQ ID NO: 2459518
uuucaagauauucaaugca

SEQ ID NO: 2459520 - RNA, 19 nt, Artificial Sequence
  Description of Artificial Sequence: Synthetic oligonucleotide
  Sense strand starting at position 307 of SEQ ID NO: 1887270
guguguuuaccacugcuuu

SEQ ID NO: 2459521 - RNA, 19 nt, Artificial Sequence
  Description of Artificial Sequence: Synthetic oligonucleotide
  Antisense strand to SEQ ID NO: 2459520
aaagcagugguaaacacac

SEQ ID NO: 2459522 - RNA, 19 nt, Artificial Sequence
  Description of Artificial Sequence: Synthetic oligonucleotide
  Sense strand starting at position 357 of SEQ ID NO: 1887270
gcuggauaacugggcuaaa

SEQ ID NO: 2459523 - RNA, 19 nt, Artificial Sequence
  Description of Artificial Sequence: Synthetic oligonucleotide
  Antisense strand to SEQ ID NO: 2459522
uuuagcccaguuauccagc

SEQ ID NO: 2459524 - RNA, 19 nt, Artificial Sequence
  Description of Artificial Sequence: Synthetic oligonucleotide
  Sense strand starting at position 423 of SEQ ID NO: 1887270
ggaagaaucuucccagcug

SEQ ID NO: 2459525 - RNA, 19 nt, Artificial Sequence
  Description of Artificial Sequence: Synthetic oligonucleotide
  Antisense strand to SEQ ID NO: 2459524
cagcugggaagauucuucc

SEQ ID NO: 2459526 - RNA, 19 nt, Artificial Sequence
  Description of Artificial Sequence: Synthetic oligonucleotide
  Sense strand starting at position 627 of SEQ ID NO: 1887270
agcuuuagcggacaguuaa

SEQ ID NO: 2459527 - RNA, 19 nt, Artificial Sequence
  Description of Artificial Sequence: Synthetic oligonucleotide
  Antisense strand to SEQ ID NO: 2459526
uuaacuguccgcuaaagcu

SEQ ID NO: 2459528 - RNA, 19 nt, Artificial Sequence
  Description of Artificial Sequence: Synthetic oligonucleotide
  Sense strand starting at position 703 of SEQ ID NO: 1887270
agugguuuccacuagcuga

SEQ ID NO: 2459529 - RNA, 19 nt, Artificial Sequence
  Description of Artificial Sequence: Synthetic oligonucleotide
  Antisense strand to SEQ ID NO: 2459528
ucagcuaguggaaaccacu

SEQ ID NO: 2459530 - RNA, 19 nt, Artificial Sequence
  Description of Artificial Sequence: Synthetic oligonucleotide
  Sense strand starting at position 931 of SEQ ID NO: 1887270
agaaucuucccucgaggaa

SEQ ID NO: 2459531 - RNA, 19 nt, Artificial Sequence
  Description of Artificial Sequence: Synthetic oligonucleotide
  Antisense strand to SEQ ID NO: 2459530
uuccucgagggaagauucu

SEQ ID NO: 2459532 - RNA, 19 nt, Artificial Sequence
  Description of Artificial Sequence: Synthetic oligonucleotide
  Sense strand starting at position 989 of SEQ ID NO: 1887270
agcuaaagcucccuaguaa

SEQ ID NO: 2459533 - RNA, 19 nt, Artificial Sequence
  Description of Artificial Sequence: Synthetic oligonucleotide
  Antisense strand to SEQ ID NO: 2459532
uuacuagggagcuuuagcu

SEQ ID NO: 2459534 - RNA, 19 nt, Artificial Sequence
  Description of Artificial Sequence: Synthetic oligonucleotide
  Sense strand starting at position 990 of SEQ ID NO: 1887270
gcuaaagcucccuaguaaa

SEQ ID NO: 2459535 - RNA, 19 nt, Artificial Sequence
  Description of Artificial Sequence: Synthetic oligonucleotide
  Antisense strand to SEQ ID NO: 2459534
uuuacuagggagcuuuagc

SEQ ID NO: 2459536 - RNA, 19 nt, Artificial Sequence
  Description of Artificial Sequence: Synthetic oligonucleotide
  Sense strand starting at position 1001 of SEQ ID NO: 1887270
cuaguaaacgugcagauca

SEQ ID NO: 2459537 - RNA, 19 nt, Artificial Sequence
  Description of Artificial Sequence: Synthetic oligonucleotide
  Antisense strand to SEQ ID NO: 2459536
ugaucugcacguuuacuag

SEQ ID NO: 2459538 - RNA, 19 nt, Artificial Sequence
  Description of Artificial Sequence: Synthetic oligonucleotide
  Sense strand starting at position 1003 of SEQ ID NO: 1887270
aguaaacgugcagaucaaa

SEQ ID NO: 2459539 - RNA, 19 nt, Artificial Sequence
  Description of Artificial Sequence: Synthetic oligonucleotide
  Antisense strand to SEQ ID NO: 2459538
uuugaucugcacguuuacu

SEQ ID NO: 2459540 - RNA, 19 nt, Artificial Sequence
  Description of Artificial Sequence: Synthetic oligonucleotide
  Sense strand starting at position 1739 of SEQ ID NO: 1887270
gcccguaguccuucugcga

SEQ ID NO: 2459541 - RNA, 19 nt, Artificial Sequence
  Description of Artificial Sequence: Synthetic oligonucleotide
  Antisense strand to SEQ ID NO: 2459540
ucgcagaaggacuacgggc

SEQ ID NO: 2459542 - RNA, 19 nt, Artificial Sequence
  Description of Artificial Sequence: Synthetic oligonucleotide
  Sense strand starting at position 1788 of SEQ ID NO: 1887270
ucgagcauuucugaagaaa

SEQ ID NO: 2459543 - RNA, 19 nt, Artificial Sequence
  Description of Artificial Sequence: Synthetic oligonucleotide
  Antisense strand to SEQ ID NO: 2459542
uuucuucagaaaugcucga

SEQ ID NO: 2459544 - RNA, 19 nt, Artificial Sequence
  Description of Artificial Sequence: Synthetic oligonucleotide
  Sense strand starting at position 1852 of SEQ ID NO: 1887270
accgguagguccuugaguu

SEQ ID NO: 2459545 - RNA, 19 nt, Artificial Sequence
  Description of Artificial Sequence: Synthetic oligonucleotide
  Antisense strand to SEQ ID NO: 2459544
aacucaaggaccuaccggu

SEQ ID NO: 2459546 - RNA, 19 nt, Artificial Sequence
  Description of Artificial Sequence: Synthetic oligonucleotide
  Sense strand starting at position 2257 of SEQ ID NO: 1887270
ggaauagcuguaugauaac

SEQ ID NO: 2459547 - RNA, 19 nt, Artificial Sequence
  Description of Artificial Sequence: Synthetic oligonucleotide
  Antisense strand to SEQ ID NO: 2459546
guuaucauacagcuauucc

SEQ ID NO: 2459548 - RNA, 19 nt, Artificial Sequence
  Description of Artificial Sequence: Synthetic oligonucleotide
  Sense strand starting at position 2382 of SEQ ID NO: 1887270
cggcauaaucucgggaucu

SEQ ID NO: 2459549 - RNA, 19 nt, Artificial Sequence
  Description of Artificial Sequence: Synthetic oligonucleotide
  Antisense strand to SEQ ID NO: 2459548
agaucccgagauuaugccg

SEQ ID NO: 2459550 - RNA, 19 nt, Artificial Sequence
  Description of Artificial Sequence: Synthetic oligonucleotide
  Sense strand starting at position 2384 of SEQ ID NO: 1887270
gcauaaucucgggaucuuu

SEQ ID NO: 2459551 - RNA, 19 nt, Artificial Sequence
  Description of Artificial Sequence: Synthetic oligonucleotide
  Antisense strand to SEQ ID NO: 2459550
aaagaucccgagauuaugc

SEQ ID NO: 2459552 - RNA, 19 nt, Artificial Sequence
  Description of Artificial Sequence: Synthetic oligonucleotide
  Sense strand starting at position 2394 of SEQ ID NO: 1887270
gggaucuuugaaggcagau

SEQ ID NO: 2459553 - RNA, 19 nt, Artificial Sequence
  Description of Artificial Sequence: Synthetic oligonucleotide
  Antisense strand to SEQ ID NO: 2459552
aucugccuucaaagauccc

SEQ ID NO: 2459554 - RNA, 19 nt, Artificial Sequence
  Description of Artificial Sequence: Synthetic oligonucleotide
  Sense strand starting at position 2481 of SEQ ID NO: 1887270
gcuguaacgagucaaaguc

SEQ ID NO: 2459555 - RNA, 19 nt, Artificial Sequence
  Description of Artificial Sequence: Synthetic oligonucleotide
  Antisense strand to SEQ ID NO: 2459554
gacuuugacucguuacagc

SEQ ID NO: 2459556 - RNA, 19 nt, Artificial Sequence
  Description of Artificial Sequence: Synthetic oligonucleotide
  Sense strand starting at position 2520 of SEQ ID NO: 1887270
cagagauucccaggugcug

SEQ ID NO: 2459557 - RNA, 19 nt, Artificial Sequence
  Description of Artificial Sequence: Synthetic oligonucleotide
  Antisense strand to SEQ ID NO: 2459556
cagcaccugggaaucucug

SEQ ID NO: 2459558 - RNA, 19 nt, Artificial Sequence
  Description of Artificial Sequence: Synthetic oligonucleotide
  Sense strand starting at position 2569 of SEQ ID NO: 1887270
ucucuuacaguuugugaac

SEQ ID NO: 2459559 - RNA, 19 nt, Artificial Sequence
  Description of Artificial Sequence: Synthetic oligonucleotide
  Antisense strand to SEQ ID NO: 2459558
guucacaaacuguaagaga

SEQ ID NO: 2459560 - RNA, 19 nt, Artificial Sequence
  Description of Artificial Sequence: Synthetic oligonucleotide
  Sense strand starting at position 2610 of SEQ ID NO: 1887270
cacagacaacguugcuaaa

SEQ ID NO: 2459561 - RNA, 19 nt, Artificial Sequence
  Description of Artificial Sequence: Synthetic oligonucleotide
  Antisense strand to SEQ ID NO: 2459560
uuuagcaacguugucugug

SEQ ID NO: 2459562 - RNA, 19 nt, Artificial Sequence
  Description of Artificial Sequence: Synthetic oligonucleotide
  Sense strand starting at position 2803 of SEQ ID NO: 1887270
uguugaggauuccuuucga

SEQ ID NO: 2459563 - RNA, 19 nt, Artificial Sequence
  Description of Artificial Sequence: Synthetic oligonucleotide
  Antisense strand to SEQ ID NO: 2459562
ucgaaaggaauccucaaca

SEQ ID NO: 2459564 - RNA, 19 nt, Artificial Sequence
  Description of Artificial Sequence: Synthetic oligonucleotide
  Sense strand starting at position 2884 of SEQ ID NO: 1887270
ucaccuacagugugugauu

SEQ ID NO: 2459565 - RNA, 19 nt, Artificial Sequence
  Description of Artificial Sequence: Synthetic oligonucleotide
  Antisense strand to SEQ ID NO: 2459564
aaucacacacuguagguga

SEQ ID NO: 2459566 - RNA, 19 nt, Artificial Sequence
  Description of Artificial Sequence: Synthetic oligonucleotide
  Sense strand starting at position 3009 of SEQ ID NO: 1887270
uucagaggguuugcagaua

SEQ ID NO: 2459567 - RNA, 19 nt, Artificial Sequence
  Description of Artificial Sequence: Synthetic oligonucleotide
  Antisense strand to SEQ ID NO: 2459566
uaucugcaaacccucugaa

SEQ ID NO: 2459568 - RNA, 19 nt, Artificial Sequence
  Description of Artificial Sequence: Synthetic oligonucleotide
  Sense strand starting at position 3029 of SEQ ID NO: 1887270
guagauguucuaugcuuua

SEQ ID NO: 2459569 - RNA, 19 nt, Artificial Sequence
  Description of Artificial Sequence: Synthetic oligonucleotide
  Antisense strand to SEQ ID NO: 2459568
uaaagcauagaacaucuac

SEQ ID NO: 2459570 - RNA, 19 nt, Artificial Sequence
  Description of Artificial Sequence: Synthetic oligonucleotide
  Sense strand starting at position 3403 of SEQ ID NO: 1887270
guaccugucuggucucuaa

SEQ ID NO: 2459571 - RNA, 19 nt, Artificial Sequence
  Description of Artificial Sequence: Synthetic oligonucleotide
  Antisense strand to SEQ ID NO: 2459570
uuagagaccagacagguac

SEQ ID NO: 2459572 - RNA, 19 nt, Artificial Sequence
  Description of Artificial Sequence: Synthetic oligonucleotide
  Sense strand starting at position 3495 of SEQ ID NO: 1887270
uuaacaguuccaugguaug

SEQ ID NO: 2459573 - RNA, 19 nt, Artificial Sequence
  Description of Artificial Sequence: Synthetic oligonucleotide
  Antisense strand to SEQ ID NO: 2459572
cauaccauggaacuguuaa

SEQ ID NO: 2459574 - RNA, 19 nt, Artificial Sequence
  Description of Artificial Sequence: Synthetic oligonucleotide
  Sense strand starting at position 3539 of SEQ ID NO: 1887270
uuuguaucaguguggugau

SEQ ID NO: 2459575 - RNA, 19 nt, Artificial Sequence
  Description of Artificial Sequence: Synthetic oligonucleotide
  Antisense strand to SEQ ID NO: 2459574
aucaccacacugauacaaa

SEQ ID NO: 2459576 - RNA, 19 nt, Artificial Sequence
  Description of Artificial Sequence: Synthetic oligonucleotide
  Sense strand starting at position 3552 of SEQ ID NO: 1887270
ggugauucagaggguauac

SEQ ID NO: 2459577 - RNA, 19 nt, Artificial Sequence
  Description of Artificial Sequence: Synthetic oligonucleotide
  Antisense strand to SEQ ID NO: 2459576
guauacccucugaaucacc

SEQ ID NO: 2459578 - RNA, 19 nt, Artificial Sequence
  Description of Artificial Sequence: Synthetic oligonucleotide
  Sense strand starting at position 3573 of SEQ ID NO: 1887270
gggauucuagaacgcacuu

SEQ ID NO: 2459579 - RNA, 19 nt, Artificial Sequence
  Description of Artificial Sequence: Synthetic oligonucleotide
  Antisense strand to SEQ ID NO: 2459578
aagugcguucuagaauccc

SEQ ID NO: 2459580 - RNA, 19 nt, Artificial Sequence
  Description of Artificial Sequence: Synthetic oligonucleotide
  Sense strand starting at position 3606 of SEQ ID NO: 1887270
gcuuguguaacuucuguuu

SEQ ID NO: 2459581 - RNA, 19 nt, Artificial Sequence
  Description of Artificial Sequence: Synthetic oligonucleotide
  Antisense strand to SEQ ID NO: 2459580
aaacagaaguuacacaagc

SEQ ID NO: 2459582 - RNA, 19 nt, Artificial Sequence
  Description of Artificial Sequence: Synthetic oligonucleotide
  Sense strand starting at position 3637 of SEQ ID NO: 1887270
guuuguaucaugggaugau

SEQ ID NO: 2459583 - RNA, 19 nt, Artificial Sequence
  Description of Artificial Sequence: Synthetic oligonucleotide
  Antisense strand to SEQ ID NO: 2459582
aucaucccaugauacaaac

SEQ ID NO: 2459584 - RNA, 19 nt, Artificial Sequence
  Description of Artificial Sequence: Synthetic oligonucleotide
  Sense strand starting at position 3640 of SEQ ID NO: 1887270
uguaucaugggaugauagu

SEQ ID NO: 2459585 - RNA, 19 nt, Artificial Sequence
  Description of Artificial Sequence: Synthetic oligonucleotide
  Antisense strand to SEQ ID NO: 2459584
acuaucaucccaugauaca

SEQ ID NO: 2459586 - RNA, 19 nt, Artificial Sequence
  Description of Artificial Sequence: Synthetic oligonucleotide
  Sense strand starting at position 3679 of SEQ ID NO: 1887270
gguauuucaugaggugaua

SEQ ID NO: 2459587 - RNA, 19 nt, Artificial Sequence
  Description of Artificial Sequence: Synthetic oligonucleotide
  Antisense strand to SEQ ID NO: 2459586
uaucaccucaugaaauacc

SEQ ID NO: 2459588 - RNA, 19 nt, Artificial Sequence
  Description of Artificial Sequence: Synthetic oligonucleotide
  Sense strand starting at position 3690 of SEQ ID NO: 1887270
aggugauacguguauggag

SEQ ID NO: 2459589 - RNA, 19 nt, Artificial Sequence
  Description of Artificial Sequence: Synthetic oligonucleotide
  Antisense strand to SEQ ID NO: 2459588
cuccauacacguaucaccu

SEQ ID NO: 2459590 - RNA, 19 nt, Artificial Sequence
  Description of Artificial Sequence: Synthetic oligonucleotide
  Sense strand starting at position 3729 of SEQ ID NO: 1887270
uuaagugaucuacaucuug

SEQ ID NO: 2459591 - RNA, 19 nt, Artificial Sequence
  Description of Artificial Sequence: Synthetic oligonucleotide
  Antisense strand to SEQ ID NO: 2459590
caagauguagaucacuuaa

SEQ ID NO: 2459592 - RNA, 19 nt, Artificial Sequence
  Description of Artificial Sequence: Synthetic oligonucleotide
  Sense strand starting at position 42 of SEQ ID NO: 1887271
uaggguugguuucucauga

SEQ ID NO: 2459593 - RNA, 19 nt, Artificial Sequence
  Description of Artificial Sequence: Synthetic oligonucleotide
  Antisense strand to SEQ ID NO: 2459592
ucaugagaaaccaacccua

SEQ ID NO: 2459594 - RNA, 19 nt, Artificial Sequence
  Description of Artificial Sequence: Synthetic oligonucleotide
  Sense strand starting at position 141 of SEQ ID NO: 1887271
guaucaggacacuagucau

SEQ ID NO: 2459595 - RNA, 19 nt, Artificial Sequence
  Description of Artificial Sequence: Synthetic oligonucleotide
  Antisense strand to SEQ ID NO: 2459594
augacuaguguccugauac

SEQ ID NO: 2459596 - RNA, 19 nt, Artificial Sequence
  Description of Artificial Sequence: Synthetic oligonucleotide
  Sense strand starting at position 144 of SEQ ID NO: 1887271
ucaggacacuagucauauu

SEQ ID NO: 2459597 - RNA, 19 nt, Artificial Sequence
  Description of Artificial Sequence: Synthetic oligonucleotide
  Antisense strand to SEQ ID NO: 2459596
aauaugacuaguguccuga

SEQ ID NO: 2459598 - RNA, 19 nt, Artificial Sequence
  Description of Artificial Sequence: Synthetic oligonucleotide
  Sense strand starting at position 196 of SEQ ID NO: 1887271
uuaaucaucucugucaagu

SEQ ID NO: 2459599 - RNA, 19 nt, Artificial Sequence
  Description of Artificial Sequence: Synthetic oligonucleotide
  Antisense strand to SEQ ID NO: 2459598
acuugacagagaugauuaa

SEQ ID NO: 2459600 - RNA, 19 nt, Artificial Sequence
  Description of Artificial Sequence: Synthetic oligonucleotide
  Sense strand starting at position 386 of SEQ ID NO: 1887271
ggcugauuuagcuguggaa

SEQ ID NO: 2459601 - RNA, 19 nt, Artificial Sequence
  Description of Artificial Sequence: Synthetic oligonucleotide
  Antisense strand to SEQ ID NO: 2459600
uuccacagcuaaaucagcc

SEQ ID NO: 2459602 - RNA, 19 nt, Artificial Sequence
  Description of Artificial Sequence: Synthetic oligonucleotide
  Sense strand starting at position 535 of SEQ ID NO: 1887271
cagacaacguucuugaaau

SEQ ID NO: 2459603 - RNA, 19 nt, Artificial Sequence
  Description of Artificial Sequence: Synthetic oligonucleotide
  Antisense strand to SEQ ID NO: 2459602
auuucaagaacguugucug

SEQ ID NO: 2459604 - RNA, 19 nt, Artificial Sequence
  Description of Artificial Sequence: Synthetic oligonucleotide
  Sense strand starting at position 541 of SEQ ID NO: 1887271
acguucuugaaauaagugu

SEQ ID NO: 2459605 - RNA, 19 nt, Artificial Sequence
  Description of Artificial Sequence: Synthetic oligonucleotide
  Antisense strand to SEQ ID NO: 2459604
acacuuauuucaagaacgu

SEQ ID NO: 2459606 - RNA, 19 nt, Artificial Sequence
  Description of Artificial Sequence: Synthetic oligonucleotide
  Sense strand starting at position 548 of SEQ ID NO: 1887271
ugaaauaaguguuucguga

SEQ ID NO: 2459607 - RNA, 19 nt, Artificial Sequence
  Description of Artificial Sequence: Synthetic oligonucleotide
  Antisense strand to SEQ ID NO: 2459606
ucacgaaacacuuauuuca

SEQ ID NO: 2459608 - RNA, 19 nt, Artificial Sequence
  Description of Artificial Sequence: Synthetic oligonucleotide
  Sense strand starting at position 570 of SEQ ID NO: 1887271
gaaugaaacugagagggaa

SEQ ID NO: 2459609 - RNA, 19 nt, Artificial Sequence
  Description of Artificial Sequence: Synthetic oligonucleotide
  Antisense strand to SEQ ID NO: 2459608
uucccucucaguuucauuc

SEQ ID NO: 2459610 - RNA, 19 nt, Artificial Sequence
  Description of Artificial Sequence: Synthetic oligonucleotide
  Sense strand starting at position 692 of SEQ ID NO: 1887271
aaaugaggccuauggaugu

SEQ ID NO: 2459611 - RNA, 19 nt, Artificial Sequence
  Description of Artificial Sequence: Synthetic oligonucleotide
  Antisense strand to SEQ ID NO: 2459610
acauccauaggccucauuu

SEQ ID NO: 2459612 - RNA, 19 nt, Artificial Sequence
  Description of Artificial Sequence: Synthetic oligonucleotide
  Sense strand starting at position 696 of SEQ ID NO: 1887271
gaggccuauggauguguaa

SEQ ID NO: 2459613 - RNA, 19 nt, Artificial Sequence
  Description of Artificial Sequence: Synthetic oligonucleotide
  Antisense strand to SEQ ID NO: 2459612
uuacacauccauaggccuc

SEQ ID NO: 2459614 - RNA, 19 nt, Artificial Sequence
  Description of Artificial Sequence: Synthetic oligonucleotide
  Sense strand starting at position 698 of SEQ ID NO: 1887271
ggccuauggauguguaaau

SEQ ID NO: 2459615 - RNA, 19 nt, Artificial Sequence
  Description of Artificial Sequence: Synthetic oligonucleotide
  Antisense strand to SEQ ID NO: 2459614
auuuacacauccauaggcc

SEQ ID NO: 2459616 - RNA, 19 nt, Artificial Sequence
  Description of Artificial Sequence: Synthetic oligonucleotide
  Sense strand starting at position 699 of SEQ ID NO: 1887271
gccuauggauguguaaaug

SEQ ID NO: 2459617 - RNA, 19 nt, Artificial Sequence
  Description of Artificial Sequence: Synthetic oligonucleotide
  Antisense strand to SEQ ID NO: 2459616
cauuuacacauccauaggc

SEQ ID NO: 2459618 - RNA, 19 nt, Artificial Sequence
  Description of Artificial Sequence: Synthetic oligonucleotide
  Sense strand starting at position 801 of SEQ ID NO: 1887271
gugucuucgguucauaaga

SEQ ID NO: 2459619 - RNA, 19 nt, Artificial Sequence
  Description of Artificial Sequence: Synthetic oligonucleotide
  Antisense strand to SEQ ID NO: 2459618
ucuuaugaaccgaagacac

SEQ ID NO: 2459620 - RNA, 19 nt, Artificial Sequence
  Description of Artificial Sequence: Synthetic oligonucleotide
  Sense strand starting at position 859 of SEQ ID NO: 1887271
gugggagagaauuguaaau

SEQ ID NO: 2459621 - RNA, 19 nt, Artificial Sequence
  Description of Artificial Sequence: Synthetic oligonucleotide
  Antisense strand to SEQ ID NO: 2459620
auuuacaauucucucccac

SEQ ID NO: 2459622 - RNA, 19 nt, Artificial Sequence
  Description of Artificial Sequence: Synthetic oligonucleotide
  Sense strand starting at position 944 of SEQ ID NO: 1887271
agcugugagccguauaaga

SEQ ID NO: 2459623 - RNA, 19 nt, Artificial Sequence
  Description of Artificial Sequence: Synthetic oligonucleotide
  Antisense strand to SEQ ID NO: 2459622
ucuuauacggcucacagcu

SEQ ID NO: 2459624 - RNA, 19 nt, Artificial Sequence
  Description of Artificial Sequence: Synthetic oligonucleotide
  Sense strand starting at position 946 of SEQ ID NO: 1887271
cugugagccguauaagaug

SEQ ID NO: 2459625 - RNA, 19 nt, Artificial Sequence
  Description of Artificial Sequence: Synthetic oligonucleotide
  Antisense strand to SEQ ID NO: 2459624
caucuuauacggcucacag

SEQ ID NO: 2459626 - RNA, 19 nt, Artificial Sequence
  Description of Artificial Sequence: Synthetic oligonucleotide
  Sense strand starting at position 976 of SEQ ID NO: 1887271
gucgucacucuagaaauua

SEQ ID NO: 2459627 - RNA, 19 nt, Artificial Sequence
  Description of Artificial Sequence: Synthetic oligonucleotide
  Antisense strand to SEQ ID NO: 2459626
uaauuucuagagugacgac

SEQ ID NO: 2459628 - RNA, 19 nt, Artificial Sequence
  Description of Artificial Sequence: Synthetic oligonucleotide
  Sense strand starting at position 1014 of SEQ ID NO: 1887271
uugaaaguuccugagcuuu

SEQ ID NO: 2459629 - RNA, 19 nt, Artificial Sequence
  Description of Artificial Sequence: Synthetic oligonucleotide
  Antisense strand to SEQ ID NO: 2459628
aaagcucaggaacuuucaa

SEQ ID NO: 2459630 - RNA, 19 nt, Artificial Sequence
  Description of Artificial Sequence: Synthetic oligonucleotide
  Sense strand starting at position 1025 of SEQ ID NO: 1887271
ugagcuuuggaaggaaaug

SEQ ID NO: 2459631 - RNA, 19 nt, Artificial Sequence
  Description of Artificial Sequence: Synthetic oligonucleotide
  Antisense strand to SEQ ID NO: 2459630
cauuuccuuccaaagcuca

SEQ ID NO: 2459632 - RNA, 19 nt, Artificial Sequence
  Description of Artificial Sequence: Synthetic oligonucleotide
  Sense strand starting at position 1558 of SEQ ID NO: 1887271
ugaggaagguagcuuuagu

SEQ ID NO: 2459633 - RNA, 19 nt, Artificial Sequence
  Description of Artificial Sequence: Synthetic oligonucleotide
  Antisense strand to SEQ ID NO: 2459632
acuaaagcuaccuuccuca

SEQ ID NO: 2459634 - RNA, 19 nt, Artificial Sequence
  Description of Artificial Sequence: Synthetic oligonucleotide
  Sense strand starting at position 1584 of SEQ ID NO: 1887271
ggguuuggaguugaaccua

SEQ ID NO: 2459635 - RNA, 19 nt, Artificial Sequence
  Description of Artificial Sequence: Synthetic oligonucleotide
  Antisense strand to SEQ ID NO: 2459634
uagguucaacuccaaaccc

SEQ ID NO: 2459636 - RNA, 19 nt, Artificial Sequence
  Description of Artificial Sequence: Synthetic oligonucleotide
  Sense strand starting at position 2410 of SEQ ID NO: 1887271
cucauuucuugagacuggu

SEQ ID NO: 2459637 - RNA, 19 nt, Artificial Sequence
  Description of Artificial Sequence: Synthetic oligonucleotide
  Antisense strand to SEQ ID NO: 2459636
accagucucaagaaaugag

SEQ ID NO: 2459638 - RNA, 19 nt, Artificial Sequence
  Description of Artificial Sequence: Synthetic oligonucleotide
  Sense strand starting at position 2531 of SEQ ID NO: 1887271
uguugugucagccagaaac

SEQ ID NO: 2459639 - RNA, 19 nt, Artificial Sequence
  Description of Artificial Sequence: Synthetic oligonucleotide
  Antisense strand to SEQ ID NO: 2459638
guuucuggcugacacaaca

SEQ ID NO: 2459640 - RNA, 19 nt, Artificial Sequence
  Description of Artificial Sequence: Synthetic oligonucleotide
  Sense strand starting at position 2559 of SEQ ID NO: 1887271
cguccucaucuggacuaua

SEQ ID NO: 2459641 - RNA, 19 nt, Artificial Sequence
  Description of Artificial Sequence: Synthetic oligonucleotide
  Antisense strand to SEQ ID NO: 2459640
uauaguccagaugaggacg

SEQ ID NO: 2459642 - RNA, 19 nt, Artificial Sequence
  Description of Artificial Sequence: Synthetic oligonucleotide
  Sense strand starting at position 2597 of SEQ ID NO: 1887271
ccucgaugccuauugcagu

SEQ ID NO: 2459643 - RNA, 19 nt, Artificial Sequence
  Description of Artificial Sequence: Synthetic oligonucleotide
  Antisense strand to SEQ ID NO: 2459642
acugcaauaggcaucgagg

SEQ ID NO: 2459644 - RNA, 19 nt, Artificial Sequence
  Description of Artificial Sequence: Synthetic oligonucleotide
  Sense strand starting at position 2707 of SEQ ID NO: 1887271
uggcguuccagguaaauga

SEQ ID NO: 2459645 - RNA, 19 nt, Artificial Sequence
  Description of Artificial Sequence: Synthetic oligonucleotide
  Antisense strand to SEQ ID NO: 2459644
ucauuuaccuggaacgcca

SEQ ID NO: 2459646 - RNA, 19 nt, Artificial Sequence
  Description of Artificial Sequence: Synthetic oligonucleotide
  Sense strand starting at position 2770 of SEQ ID NO: 1887271
cuuuccuccguuuggaaga

SEQ ID NO: 2459647 - RNA, 19 nt, Artificial Sequence
  Description of Artificial Sequence: Synthetic oligonucleotide
  Antisense strand to SEQ ID NO: 2459646
ucuuccaaacggaggaaag

SEQ ID NO: 2459648 - RNA, 19 nt, Artificial Sequence
  Description of Artificial Sequence: Synthetic oligonucleotide
  Sense strand starting at position 2914 of SEQ ID NO: 1887271
agaguucuaauguaaugug

SEQ ID NO: 2459649 - RNA, 19 nt, Artificial Sequence
  Description of Artificial Sequence: Synthetic oligonucleotide
  Antisense strand to SEQ ID NO: 2459648
cacauuacauuagaacucu

SEQ ID NO: 2459650 - RNA, 19 nt, Artificial Sequence
  Description of Artificial Sequence: Synthetic oligonucleotide
  Sense strand starting at position 2954 of SEQ ID NO: 1887271
ggaaacaggucuuucugca

SEQ ID NO: 2459651 - RNA, 19 nt, Artificial Sequence
  Description of Artificial Sequence: Synthetic oligonucleotide
  Antisense strand to SEQ ID NO: 2459650
ugcagaaagaccuguuucc

SEQ ID NO: 2459652 - RNA, 19 nt, Artificial Sequence
  Description of Artificial Sequence: Synthetic oligonucleotide
  Sense strand starting at position 2959 of SEQ ID NO: 1887271
caggucuuucugcaguauu

SEQ ID NO: 2459653 - RNA, 19 nt, Artificial Sequence
  Description of Artificial Sequence: Synthetic oligonucleotide
  Antisense strand to SEQ ID NO: 2459652
aauacugcagaaagaccug

SEQ ID NO: 2459654 - RNA, 19 nt, Artificial Sequence
  Description of Artificial Sequence: Synthetic oligonucleotide
  Sense strand starting at position 2971 of SEQ ID NO: 1887271
caguauucccuuugguuag

SEQ ID NO: 2459655 - RNA, 19 nt, Artificial Sequence
  Description of Artificial Sequence: Synthetic oligonucleotide
  Antisense strand to SEQ ID NO: 2459654
cuaaccaaagggaauacug

SEQ ID NO: 2459656 - RNA, 19 nt, Artificial Sequence
  Description of Artificial Sequence: Synthetic oligonucleotide
  Sense strand starting at position 2973 of SEQ ID NO: 1887271
guauucccuuugguuagau

SEQ ID NO: 2459657 - RNA, 19 nt, Artificial Sequence
  Description of Artificial Sequence: Synthetic oligonucleotide
  Antisense strand to SEQ ID NO: 2459656
aucuaaccaaagggaauac

SEQ ID NO: 2459658 - RNA, 19 nt, Artificial Sequence
  Description of Artificial Sequence: Synthetic oligonucleotide
  Sense strand starting at position 3030 of SEQ ID NO: 1887271
cucucaagaucaguugaac

SEQ ID NO: 2459659 - RNA, 19 nt, Artificial Sequence
  Description of Artificial Sequence: Synthetic oligonucleotide
  Antisense strand to SEQ ID NO: 2459658
guucaacugaucuugagag

SEQ ID NO: 2459660 - RNA, 19 nt, Artificial Sequence
  Description of Artificial Sequence: Synthetic oligonucleotide
  Sense strand starting at position 3042 of SEQ ID NO: 1887271
guugaacaauuccuuauga

SEQ ID NO: 2459661 - RNA, 19 nt, Artificial Sequence
  Description of Artificial Sequence: Synthetic oligonucleotide
  Antisense strand to SEQ ID NO: 2459660
ucauaaggaauuguucaac

SEQ ID NO: 2459662 - RNA, 19 nt, Artificial Sequence
  Description of Artificial Sequence: Synthetic oligonucleotide
  Sense strand starting at position 3053 of SEQ ID NO: 1887271
ccuuaugaguuucuagcca

SEQ ID NO: 2459663 - RNA, 19 nt, Artificial Sequence
  Description of Artificial Sequence: Synthetic oligonucleotide
  Antisense strand to SEQ ID NO: 2459662
uggcuagaaacucauaagg

SEQ ID NO: 2459664 - RNA, 19 nt, Artificial Sequence
  Description of Artificial Sequence: Synthetic oligonucleotide
  Sense strand starting at position 3057 of SEQ ID NO: 1887271
augaguuucuagccagaca

SEQ ID NO: 2459665 - RNA, 19 nt, Artificial Sequence
  Description of Artificial Sequence: Synthetic oligonucleotide
  Antisense strand to SEQ ID NO: 2459664
ugucuggcuagaaacucau

SEQ ID NO: 2459666 - RNA, 19 nt, Artificial Sequence
  Description of Artificial Sequence: Synthetic oligonucleotide
  Sense strand starting at position 3082 of SEQ ID NO: 1887271
gcaaaccuuugaccggaaa

SEQ ID NO: 2459667 - RNA, 19 nt, Artificial Sequence
  Description of Artificial Sequence: Synthetic oligonucleotide
  Antisense strand to SEQ ID NO: 2459666
uuuccggucaaagguuugc

SEQ ID NO: 2459668 - RNA, 19 nt, Artificial Sequence
  Description of Artificial Sequence: Synthetic oligonucleotide
  Sense strand starting at position 3534 of SEQ ID NO: 1887271
aagcaaggcucugauuuga

SEQ ID NO: 2459669 - RNA, 19 nt, Artificial Sequence
  Description of Artificial Sequence: Synthetic oligonucleotide
  Antisense strand to SEQ ID NO: 2459668
ucaaaucagagccuugcuu

SEQ ID NO: 2459670 - RNA, 19 nt, Artificial Sequence
  Description of Artificial Sequence: Synthetic oligonucleotide
  Sense strand starting at position 3570 of SEQ ID NO: 1887271
gccauuguuccauacaucu

SEQ ID NO: 2459671 - RNA, 19 nt, Artificial Sequence
  Description of Artificial Sequence: Synthetic oligonucleotide
  Antisense strand to SEQ ID NO: 2459670
agauguauggaacaauggc

SEQ ID NO: 2459672 - RNA, 19 nt, Artificial Sequence
  Description of Artificial Sequence: Synthetic oligonucleotide
  Sense strand starting at position 618 of SEQ ID NO: 1887272
gauucucaggcccgaaaga

SEQ ID NO: 2459673 - RNA, 19 nt, Artificial Sequence
  Description of Artificial Sequence: Synthetic oligonucleotide
  Antisense strand to SEQ ID NO: 2459672
ucuuucgggccugagaauc

SEQ ID NO: 2459674 - RNA, 19 nt, Artificial Sequence
  Description of Artificial Sequence: Synthetic oligonucleotide
  Sense strand starting at position 629 of SEQ ID NO: 1887272
ccgaaagagugcuucagua

SEQ ID NO: 2459675 - RNA, 19 nt, Artificial Sequence
  Description of Artificial Sequence: Synthetic oligonucleotide
  Antisense strand to SEQ ID NO: 2459674
uacugaagcacucuuucgg

SEQ ID NO: 2459676 - RNA, 19 nt, Artificial Sequence
  Description of Artificial Sequence: Synthetic oligonucleotide
  Sense strand starting at position 642 of SEQ ID NO: 1887272
ucaguaggaaucuguguua

SEQ ID NO: 2459677 - RNA, 19 nt, Artificial Sequence
  Description of Artificial Sequence: Synthetic oligonucleotide
  Antisense strand to SEQ ID NO: 2459676
uaacacagauuccuacuga

SEQ ID NO: 2459678 - RNA, 19 nt, Artificial Sequence
  Description of Artificial Sequence: Synthetic oligonucleotide
  Sense strand starting at position 743 of SEQ ID NO: 1887272
accuaaggcucacugauua

SEQ ID NO: 2459679 - RNA, 19 nt, Artificial Sequence
  Description of Artificial Sequence: Synthetic oligonucleotide
  Antisense strand to SEQ ID NO: 2459678
uaaucagugagccuuaggu

SEQ ID NO: 2459680 - RNA, 19 nt, Artificial Sequence
  Description of Artificial Sequence: Synthetic oligonucleotide
  Sense strand starting at position 755 of SEQ ID NO: 1887272
cugauuaagucuuaggaaa

SEQ ID NO: 2459681 - RNA, 19 nt, Artificial Sequence
  Description of Artificial Sequence: Synthetic oligonucleotide
  Antisense strand to SEQ ID NO: 2459680
uuuccuaagacuuaaucag

SEQ ID NO: 2459682 - RNA, 19 nt, Artificial Sequence
  Description of Artificial Sequence: Synthetic oligonucleotide
  Sense strand starting at position 757 of SEQ ID NO: 1887272
gauuaagucuuaggaaaug

SEQ ID NO: 2459683 - RNA, 19 nt, Artificial Sequence
  Description of Artificial Sequence: Synthetic oligonucleotide
  Antisense strand to SEQ ID NO: 2459682
cauuuccuaagacuuaauc

SEQ ID NO: 2459684 - RNA, 19 nt, Artificial Sequence
  Description of Artificial Sequence: Synthetic oligonucleotide
  Sense strand starting at position 805 of SEQ ID NO: 1887272
uucguccuccaagagguua

SEQ ID NO: 2459685 - RNA, 19 nt, Artificial Sequence
  Description of Artificial Sequence: Synthetic oligonucleotide
  Antisense strand to SEQ ID NO: 2459684
uaaccucuuggaggacgaa

SEQ ID NO: 2459686 - RNA, 19 nt, Artificial Sequence
  Description of Artificial Sequence: Synthetic oligonucleotide
  Sense strand starting at position 1012 of SEQ ID NO: 1887272
cacucagagccugguagua

SEQ ID NO: 2459687 - RNA, 19 nt, Artificial Sequence
  Description of Artificial Sequence: Synthetic oligonucleotide
  Antisense strand to SEQ ID NO: 2459686
uacuaccaggcucugagug

SEQ ID NO: 2459688 - RNA, 19 nt, Artificial Sequence
  Description of Artificial Sequence: Synthetic oligonucleotide
  Sense strand starting at position 1014 of SEQ ID NO: 1887272
cucagagccugguaguaaa

SEQ ID NO: 2459689 - RNA, 19 nt, Artificial Sequence
  Description of Artificial Sequence: Synthetic oligonucleotide
  Antisense strand to SEQ ID NO: 2459688
uuuacuaccaggcucugag

SEQ ID NO: 2459690 - RNA, 19 nt, Artificial Sequence
  Description of Artificial Sequence: Synthetic oligonucleotide
  Sense strand starting at position 1042 of SEQ ID NO: 1887272
agaauaaggucguuccgga

SEQ ID NO: 2459691 - RNA, 19 nt, Artificial Sequence
  Description of Artificial Sequence: Synthetic oligonucleotide
  Antisense strand to SEQ ID NO: 2459690
uccggaacgaccuuauucu

SEQ ID NO: 2459692 - RNA, 19 nt, Artificial Sequence
  Description of Artificial Sequence: Synthetic oligonucleotide
  Sense strand starting at position 1180 of SEQ ID NO: 1887272
cagaguggcuuucugcaau

SEQ ID NO: 2459693 - RNA, 19 nt, Artificial Sequence
  Description of Artificial Sequence: Synthetic oligonucleotide
  Antisense strand to SEQ ID NO: 2459692
auugcagaaagccacucug

SEQ ID NO: 2459694 - RNA, 19 nt, Artificial Sequence
  Description of Artificial Sequence: Synthetic oligonucleotide
  Sense strand starting at position 1214 of SEQ ID NO: 1887272
gggccaggcuguguaagaa

SEQ ID NO: 2459695 - RNA, 19 nt, Artificial Sequence
  Description of Artificial Sequence: Synthetic oligonucleotide
  Antisense strand to SEQ ID NO: 2459694
uucuuacacagccuggccc

SEQ ID NO: 2459696 - RNA, 19 nt, Artificial Sequence
  Description of Artificial Sequence: Synthetic oligonucleotide
  Sense strand starting at position 1222 of SEQ ID NO: 1887272
cuguguaagaagugguguu

SEQ ID NO: 2459697 - RNA, 19 nt, Artificial Sequence
  Description of Artificial Sequence: Synthetic oligonucleotide
  Antisense strand to SEQ ID NO: 2459696
aacaccacuucuuacacag

SEQ ID NO: 2459698 - RNA, 19 nt, Artificial Sequence
  Description of Artificial Sequence: Synthetic oligonucleotide
  Sense strand starting at position 1223 of SEQ ID NO: 1887272
uguguaagaagugguguuu

SEQ ID NO: 2459699 - RNA, 19 nt, Artificial Sequence
  Description of Artificial Sequence: Synthetic oligonucleotide
  Antisense strand to SEQ ID NO: 2459698
aaacaccacuucuuacaca

SEQ ID NO: 2459700 - RNA, 19 nt, Artificial Sequence
  Description of Artificial Sequence: Synthetic oligonucleotide
  Sense strand starting at position 1236 of SEQ ID NO: 1887272
guguuuguuggccuuguca

SEQ ID NO: 2459701 - RNA, 19 nt, Artificial Sequence
  Description of Artificial Sequence: Synthetic oligonucleotide
  Antisense strand to SEQ ID NO: 2459700
ugacaaggccaacaaacac

SEQ ID NO: 2459702 - RNA, 19 nt, Artificial Sequence
  Description of Artificial Sequence: Synthetic oligonucleotide
  Sense strand starting at position 1238 of SEQ ID NO: 1887272
guuuguuggccuugucaaa

SEQ ID NO: 2459703 - RNA, 19 nt, Artificial Sequence
  Description of Artificial Sequence: Synthetic oligonucleotide
  Antisense strand to SEQ ID NO: 2459702
uuugacaaggccaacaaac

SEQ ID NO: 2459704 - RNA, 19 nt, Artificial Sequence
  Description of Artificial Sequence: Synthetic oligonucleotide
  Sense strand starting at position 1251 of SEQ ID NO: 1887272
gucaaacagcuguaagaaa

SEQ ID NO: 2459705 - RNA, 19 nt, Artificial Sequence
  Description of Artificial Sequence: Synthetic oligonucleotide
  Antisense strand to SEQ ID NO: 2459704
uuucuuacagcuguuugac

SEQ ID NO: 2459706 - RNA, 19 nt, Artificial Sequence
  Description of Artificial Sequence: Synthetic oligonucleotide
  Sense strand starting at position 1281 of SEQ ID NO: 1887272
agggaugucguaggcaaua

SEQ ID NO: 2459707 - RNA, 19 nt, Artificial Sequence
  Description of Artificial Sequence: Synthetic oligonucleotide
  Antisense strand to SEQ ID NO: 2459706
uauugccuacgacaucccu

SEQ ID NO: 2459708 - RNA, 19 nt, Artificial Sequence
  Description of Artificial Sequence: Synthetic oligonucleotide
  Sense strand starting at position 1283 of SEQ ID NO: 1887272
ggaugucguaggcaauaca

SEQ ID NO: 2459709 - RNA, 19 nt, Artificial Sequence
  Description of Artificial Sequence: Synthetic oligonucleotide
  Antisense strand to SEQ ID NO: 2459708
uguauugccuacgacaucc

SEQ ID NO: 2459710 - RNA, 19 nt, Artificial Sequence
  Description of Artificial Sequence: Synthetic oligonucleotide
  Sense strand starting at position 1470 of SEQ ID NO: 1887272
cagacuuugugccuucgua

SEQ ID NO: 2459711 - RNA, 19 nt, Artificial Sequence
  Description of Artificial Sequence: Synthetic oligonucleotide
  Antisense strand to SEQ ID NO: 2459710
uacgaaggcacaaagucug

SEQ ID NO: 2459712 - RNA, 19 nt, Artificial Sequence
  Description of Artificial Sequence: Synthetic oligonucleotide
  Sense strand starting at position 1533 of SEQ ID NO: 1887272
cccguaggcaucugggaau

SEQ ID NO: 2459713 - RNA, 19 nt, Artificial Sequence
  Description of Artificial Sequence: Synthetic oligonucleotide
  Antisense strand to SEQ ID NO: 2459712
auucccagaugccuacggg

SEQ ID NO: 2459714 - RNA, 19 nt, Artificial Sequence
  Description of Artificial Sequence: Synthetic oligonucleotide
  Sense strand starting at position 1630 of SEQ ID NO: 1887272
gguggacauuggcgagaaa

SEQ ID NO: 2459715 - RNA, 19 nt, Artificial Sequence
  Description of Artificial Sequence: Synthetic oligonucleotide
  Antisense strand to SEQ ID NO: 2459714
uuucucgccaauguccacc

SEQ ID NO: 2459716 - RNA, 19 nt, Artificial Sequence
  Description of Artificial Sequence: Synthetic oligonucleotide
  Sense strand starting at position 1757 of SEQ ID NO: 1887272
cgcggacugucugauaaac

SEQ ID NO: 2459717 - RNA, 19 nt, Artificial Sequence
  Description of Artificial Sequence: Synthetic oligonucleotide
  Antisense strand to SEQ ID NO: 2459716
guuuaucagacaguccgcg

SEQ ID NO: 2459718 - RNA, 19 nt, Artificial Sequence
  Description of Artificial Sequence: Synthetic oligonucleotide
  Sense strand starting at position 1759 of SEQ ID NO: 1887272
cggacugucugauaaacga

SEQ ID NO: 2459719 - RNA, 19 nt, Artificial Sequence
  Description of Artificial Sequence: Synthetic oligonucleotide
  Antisense strand to SEQ ID NO: 2459718
ucguuuaucagacaguccg

SEQ ID NO: 2459720 - RNA, 19 nt, Artificial Sequence
  Description of Artificial Sequence: Synthetic oligonucleotide
  Sense strand starting at position 1784 of SEQ ID NO: 1887272
gggcaccucccauagguua

SEQ ID NO: 2459721 - RNA, 19 nt, Artificial Sequence
  Description of Artificial Sequence: Synthetic oligonucleotide
  Antisense strand to SEQ ID NO: 2459720
uaaccuaugggaggugccc

SEQ ID NO: 2459722 - RNA, 19 nt, Artificial Sequence
  Description of Artificial Sequence: Synthetic oligonucleotide
  Sense strand starting at position 1947 of SEQ ID NO: 1887272
cggccauagcuguagaaca

SEQ ID NO: 2459723 - RNA, 19 nt, Artificial Sequence
  Description of Artificial Sequence: Synthetic oligonucleotide
  Antisense strand to SEQ ID NO: 2459722
uguucuacagcuauggccg

SEQ ID NO: 2459724 - RNA, 19 nt, Artificial Sequence
  Description of Artificial Sequence: Synthetic oligonucleotide
  Sense strand starting at position 2205 of SEQ ID NO: 1887272
ggauuugcgucaaggauug

SEQ ID NO: 2459725 - RNA, 19 nt, Artificial Sequence
  Description of Artificial Sequence: Synthetic oligonucleotide
  Antisense strand to SEQ ID NO: 2459724
caauccuugacgcaaaucc

SEQ ID NO: 2459726 - RNA, 19 nt, Artificial Sequence
  Description of Artificial Sequence: Synthetic oligonucleotide
  Sense strand starting at position 2272 of SEQ ID NO: 1887272
ccggccaauuuccaaagau

SEQ ID NO: 2459727 - RNA, 19 nt, Artificial Sequence
  Description of Artificial Sequence: Synthetic oligonucleotide
  Antisense strand to SEQ ID NO: 2459726
aucuuuggaaauuggccgg

SEQ ID NO: 2459728 - RNA, 19 nt, Artificial Sequence
  Description of Artificial Sequence: Synthetic oligonucleotide
  Sense strand starting at position 2292 of SEQ ID NO: 1887272
ccggucuucucucaaaguu

SEQ ID NO: 2459729 - RNA, 19 nt, Artificial Sequence
  Description of Artificial Sequence: Synthetic oligonucleotide
  Antisense strand to SEQ ID NO: 2459728
aacuuugagagaagaccgg

SEQ ID NO: 2459730 - RNA, 19 nt, Artificial Sequence
  Description of Artificial Sequence: Synthetic oligonucleotide
  Sense strand starting at position 2457 of SEQ ID NO: 1887272
uccgccuucuuuguaugau

SEQ ID NO: 2459731 - RNA, 19 nt, Artificial Sequence
  Description of Artificial Sequence: Synthetic oligonucleotide
  Antisense strand to SEQ ID NO: 2459730
aucauacaaagaaggcgga

SEQ ID NO: 2459732 - RNA, 19 nt, Artificial Sequence
  Description of Artificial Sequence: Synthetic oligonucleotide
  Sense strand starting at position 3587 of SEQ ID NO: 1887272
cgugucuccgccuagggau

SEQ ID NO: 2459733 - RNA, 19 nt, Artificial Sequence
  Description of Artificial Sequence: Synthetic oligonucleotide
  Antisense strand to SEQ ID NO: 2459732
aucccuaggcggagacacg

SEQ ID NO: 2459734 - RNA, 19 nt, Artificial Sequence
  Description of Artificial Sequence: Synthetic oligonucleotide
  Sense strand starting at position 3649 of SEQ ID NO: 1887272
cucuccaguccaugaauga

SEQ ID NO: 2459735 - RNA, 19 nt, Artificial Sequence
  Description of Artificial Sequence: Synthetic oligonucleotide
  Antisense strand to SEQ ID NO: 2459734
ucauucauggacuggagag

SEQ ID NO: 2459736 - RNA, 19 nt, Artificial Sequence
  Description of Artificial Sequence: Synthetic oligonucleotide
  Sense strand starting at position 3650 of SEQ ID NO: 1887272
ucuccaguccaugaaugau

SEQ ID NO: 2459737 - RNA, 19 nt, Artificial Sequence
  Description of Artificial Sequence: Synthetic oligonucleotide
  Antisense strand to SEQ ID NO: 2459736
aucauucauggacuggaga

SEQ ID NO: 2459738 - RNA, 19 nt, Artificial Sequence
  Description of Artificial Sequence: Synthetic oligonucleotide
  Sense strand starting at position 530 of SEQ ID NO: 1887273
agaacacucuucguuggau

SEQ ID NO: 2459739 - RNA, 19 nt, Artificial Sequence
  Description of Artificial Sequence: Synthetic oligonucleotide
  Antisense strand to SEQ ID NO: 2459738
auccaacgaagaguguucu

SEQ ID NO: 2459740 - RNA, 19 nt, Artificial Sequence
  Description of Artificial Sequence: Synthetic oligonucleotide
  Sense strand starting at position 531 of SEQ ID NO: 1887273
gaacacucuucguuggauu

SEQ ID NO: 2459741 - RNA, 19 nt, Artificial Sequence
  Description of Artificial Sequence: Synthetic oligonucleotide
  Antisense strand to SEQ ID NO: 2459740
aauccaacgaagaguguuc

SEQ ID NO: 2459742 - RNA, 19 nt, Artificial Sequence
  Description of Artificial Sequence: Synthetic oligonucleotide
  Sense strand starting at position 681 of SEQ ID NO: 1887273
aggauauauuucuaggcau

SEQ ID NO: 2459743 - RNA, 19 nt, Artificial Sequence
  Description of Artificial Sequence: Synthetic oligonucleotide
  Antisense strand to SEQ ID NO: 2459742
augccuagaaauauauccu

SEQ ID NO: 2459744 - RNA, 19 nt, Artificial Sequence
  Description of Artificial Sequence: Synthetic oligonucleotide
  Sense strand starting at position 828 of SEQ ID NO: 1887273
gggagcauucuguguucag

SEQ ID NO: 2459745 - RNA, 19 nt, Artificial Sequence
  Description of Artificial Sequence: Synthetic oligonucleotide
  Antisense strand to SEQ ID NO: 2459744
cugaacacagaaugcuccc

SEQ ID NO: 2459746 - RNA, 19 nt, Artificial Sequence
  Description of Artificial Sequence: Synthetic oligonucleotide
  Sense strand starting at position 829 of SEQ ID NO: 1887273
ggagcauucuguguucaga

SEQ ID NO: 2459747 - RNA, 19 nt, Artificial Sequence
  Description of Artificial Sequence: Synthetic oligonucleotide
  Antisense strand to SEQ ID NO: 2459746
ucugaacacagaaugcucc

SEQ ID NO: 2459748 - RNA, 19 nt, Artificial Sequence
  Description of Artificial Sequence: Synthetic oligonucleotide
  Sense strand starting at position 907 of SEQ ID NO: 1887273
guauuaaagggcugagaau

SEQ ID NO: 2459749 - RNA, 19 nt, Artificial Sequence
  Description of Artificial Sequence: Synthetic oligonucleotide
  Antisense strand to SEQ ID NO: 2459748
auucucagcccuuuaauac

SEQ ID NO: 2459750 - RNA, 19 nt, Artificial Sequence
  Description of Artificial Sequence: Synthetic oligonucleotide
  Sense strand starting at position 958 of SEQ ID NO: 1887273
agcaucauuucccuaguuu

SEQ ID NO: 2459751 - RNA, 19 nt, Artificial Sequence
  Description of Artificial Sequence: Synthetic oligonucleotide
  Antisense strand to SEQ ID NO: 2459750
aaacuagggaaaugaugcu

SEQ ID NO: 2459752 - RNA, 19 nt, Artificial Sequence
  Description of Artificial Sequence: Synthetic oligonucleotide
  Sense strand starting at position 1005 of SEQ ID NO: 1887273
ucauaaucuccguagcauu

SEQ ID NO: 2459753 - RNA, 19 nt, Artificial Sequence
  Description of Artificial Sequence: Synthetic oligonucleotide
  Antisense strand to SEQ ID NO: 2459752
aaugcuacggagauuauga

SEQ ID NO: 2459754 - RNA, 19 nt, Artificial Sequence
  Description of Artificial Sequence: Synthetic oligonucleotide
  Sense strand starting at position 1029 of SEQ ID NO: 1887273
aucauaucagccuguggaa

SEQ ID NO: 2459755 - RNA, 19 nt, Artificial Sequence
  Description of Artificial Sequence: Synthetic oligonucleotide
  Antisense strand to SEQ ID NO: 2459754
uuccacaggcugauaugau

SEQ ID NO: 2459756 - RNA, 19 nt, Artificial Sequence
  Description of Artificial Sequence: Synthetic oligonucleotide
  Sense strand starting at position 1031 of SEQ ID NO: 1887273
cauaucagccuguggaaau

SEQ ID NO: 2459757 - RNA, 19 nt, Artificial Sequence
  Description of Artificial Sequence: Synthetic oligonucleotide
  Antisense strand to SEQ ID NO: 2459756
auuuccacaggcugauaug

SEQ ID NO: 2459758 - RNA, 19 nt, Artificial Sequence
  Description of Artificial Sequence: Synthetic oligonucleotide
  Sense strand starting at position 1061 of SEQ ID NO: 1887273
guugaugugagccaaccuu

SEQ ID NO: 2459759 - RNA, 19 nt, Artificial Sequence
  Description of Artificial Sequence: Synthetic oligonucleotide
  Antisense strand to SEQ ID NO: 2459758
aagguuggcucacaucaac

SEQ ID NO: 2459760 - RNA, 19 nt, Artificial Sequence
  Description of Artificial Sequence: Synthetic oligonucleotide
  Sense strand starting at position 1079 of SEQ ID NO: 1887273
ugucuuacuuuagcugaga

SEQ ID NO: 2459761 - RNA, 19 nt, Artificial Sequence
  Description of Artificial Sequence: Synthetic oligonucleotide
  Antisense strand to SEQ ID NO: 2459760
ucucagcuaaaguaagaca

SEQ ID NO: 2459762 - RNA, 19 nt, Artificial Sequence
  Description of Artificial Sequence: Synthetic oligonucleotide
  Sense strand starting at position 1080 of SEQ ID NO: 1887273
gucuuacuuuagcugagaa

SEQ ID NO: 2459763 - RNA, 19 nt, Artificial Sequence
  Description of Artificial Sequence: Synthetic oligonucleotide
  Antisense strand to SEQ ID NO: 2459762
uucucagcuaaaguaagac

SEQ ID NO: 2459764 - RNA, 19 nt, Artificial Sequence
  Description of Artificial Sequence: Synthetic oligonucleotide
  Sense strand starting at position 1185 of SEQ ID NO: 1887273
aaaugauagcgauggagac

SEQ ID NO: 2459765 - RNA, 19 nt, Artificial Sequence
  Description of Artificial Sequence: Synthetic oligonucleotide
  Antisense strand to SEQ ID NO: 2459764
gucuccaucgcuaucauuu

SEQ ID NO: 2459766 - RNA, 19 nt, Artificial Sequence
  Description of Artificial Sequence: Synthetic oligonucleotide
  Sense strand starting at position 1186 of SEQ ID NO: 1887273
aaugauagcgauggagaca

SEQ ID NO: 2459767 - RNA, 19 nt, Artificial Sequence
  Description of Artificial Sequence: Synthetic oligonucleotide
  Antisense strand to SEQ ID NO: 2459766
ugucuccaucgcuaucauu

SEQ ID NO: 2459768 - RNA, 19 nt, Artificial Sequence
  Description of Artificial Sequence: Synthetic oligonucleotide
  Sense strand starting at position 1199 of SEQ ID NO: 1887273
gagacacauuaguuguuga

SEQ ID NO: 2459769 - RNA, 19 nt, Artificial Sequence
  Description of Artificial Sequence: Synthetic oligonucleotide
  Antisense strand to SEQ ID NO: 2459768
ucaacaacuaaugugucuc

SEQ ID NO: 2459770 - RNA, 19 nt, Artificial Sequence
  Description of Artificial Sequence: Synthetic oligonucleotide
  Sense strand starting at position 1291 of SEQ ID NO: 1887273
uuuacuugaagagguagua

SEQ ID NO: 2459771 - RNA, 19 nt, Artificial Sequence
  Description of Artificial Sequence: Synthetic oligonucleotide
  Antisense strand to SEQ ID NO: 2459770
uacuaccucuucaaguaaa

SEQ ID NO: 2459772 - RNA, 19 nt, Artificial Sequence
  Description of Artificial Sequence: Synthetic oligonucleotide
  Sense strand starting at position 1356 of SEQ ID NO: 1887273
acauuauacccacgucagu

SEQ ID NO: 2459773 - RNA, 19 nt, Artificial Sequence
  Description of Artificial Sequence: Synthetic oligonucleotide
  Antisense strand to SEQ ID NO: 2459772
acugacguggguauaaugu

SEQ ID NO: 2459774 - RNA, 19 nt, Artificial Sequence
  Description of Artificial Sequence: Synthetic oligonucleotide
  Sense strand starting at position 1379 of SEQ ID NO: 1887273
uggcuuugauacuuuacau

SEQ ID NO: 2459775 - RNA, 19 nt, Artificial Sequence
  Description of Artificial Sequence: Synthetic oligonucleotide
  Antisense strand to SEQ ID NO: 2459774
auguaaaguaucaaagcca

SEQ ID NO: 2459776 - RNA, 19 nt, Artificial Sequence
  Description of Artificial Sequence: Synthetic oligonucleotide
  Sense strand starting at position 1816 of SEQ ID NO: 1887273
aagacaagucugcgcaaua

SEQ ID NO: 2459777 - RNA, 19 nt, Artificial Sequence
  Description of Artificial Sequence: Synthetic oligonucleotide
  Antisense strand to SEQ ID NO: 2459776
uauugcgcagacuugucuu

SEQ ID NO: 2459778 - RNA, 19 nt, Artificial Sequence
  Description of Artificial Sequence: Synthetic oligonucleotide
  Sense strand starting at position 1817 of SEQ ID NO: 1887273
agacaagucugcgcaauau

SEQ ID NO: 2459779 - RNA, 19 nt, Artificial Sequence
  Description of Artificial Sequence: Synthetic oligonucleotide
  Antisense strand to SEQ ID NO: 2459778
auauugcgcagacuugucu

SEQ ID NO: 2459780 - RNA, 19 nt, Artificial Sequence
  Description of Artificial Sequence: Synthetic oligonucleotide
  Sense strand starting at position 2176 of SEQ ID NO: 1887273
ugucaaaggucauuagauc

SEQ ID NO: 2459781 - RNA, 19 nt, Artificial Sequence
  Description of Artificial Sequence: Synthetic oligonucleotide
  Antisense strand to SEQ ID NO: 2459780
gaucuaaugaccuuugaca

SEQ ID NO: 2459782 - RNA, 19 nt, Artificial Sequence
  Description of Artificial Sequence: Synthetic oligonucleotide
  Sense strand starting at position 2532 of SEQ ID NO: 1887273
acagcaauagcagaacuuu

SEQ ID NO: 2459783 - RNA, 19 nt, Artificial Sequence
  Description of Artificial Sequence: Synthetic oligonucleotide
  Antisense strand to SEQ ID NO: 2459782
aaaguucugcuauugcugu

SEQ ID NO: 2459784 - RNA, 19 nt, Artificial Sequence
  Description of Artificial Sequence: Synthetic oligonucleotide
  Sense strand starting at position 2660 of SEQ ID NO: 1887273
ucacauaaugacuguggaa

SEQ ID NO: 2459785 - RNA, 19 nt, Artificial Sequence
  Description of Artificial Sequence: Synthetic oligonucleotide
  Antisense strand to SEQ ID NO: 2459784
uuccacagucauuauguga

SEQ ID NO: 2459786 - RNA, 19 nt, Artificial Sequence
  Description of Artificial Sequence: Synthetic oligonucleotide
  Sense strand starting at position 2662 of SEQ ID NO: 1887273
acauaaugacuguggaacu

SEQ ID NO: 2459787 - RNA, 19 nt, Artificial Sequence
  Description of Artificial Sequence: Synthetic oligonucleotide
  Antisense strand to SEQ ID NO: 2459786
aguuccacagucauuaugu

SEQ ID NO: 2459788 - RNA, 19 nt, Artificial Sequence
  Description of Artificial Sequence: Synthetic oligonucleotide
  Sense strand starting at position 2760 of SEQ ID NO: 1887273
agagcccuucccugagaau

SEQ ID NO: 2459789 - RNA, 19 nt, Artificial Sequence
  Description of Artificial Sequence: Synthetic oligonucleotide
  Antisense strand to SEQ ID NO: 2459788
auucucagggaagggcucu

SEQ ID NO: 2459790 - RNA, 19 nt, Artificial Sequence
  Description of Artificial Sequence: Synthetic oligonucleotide
  Sense strand starting at position 2795 of SEQ ID NO: 1887273
agggaaucuguccgauccu

SEQ ID NO: 2459791 - RNA, 19 nt, Artificial Sequence
  Description of Artificial Sequence: Synthetic oligonucleotide
  Antisense strand to SEQ ID NO: 2459790
aggaucggacagauucccu

SEQ ID NO: 2459792 - RNA, 19 nt, Artificial Sequence
  Description of Artificial Sequence: Synthetic oligonucleotide
  Sense strand starting at position 2809 of SEQ ID NO: 1887273
auccuagauugcucaggua

SEQ ID NO: 2459793 - RNA, 19 nt, Artificial Sequence
  Description of Artificial Sequence: Synthetic oligonucleotide
  Antisense strand to SEQ ID NO: 2459792
uaccugagcaaucuaggau

SEQ ID NO: 2459794 - RNA, 19 nt, Artificial Sequence
  Description of Artificial Sequence: Synthetic oligonucleotide
  Sense strand starting at position 2886 of SEQ ID NO: 1887273
aaaccugguugagugagaa

SEQ ID NO: 2459795 - RNA, 19 nt, Artificial Sequence
  Description of Artificial Sequence: Synthetic oligonucleotide
  Antisense strand to SEQ ID NO: 2459794
uucucacucaaccagguuu

SEQ ID NO: 2459796 - RNA, 19 nt, Artificial Sequence
  Description of Artificial Sequence: Synthetic oligonucleotide
  Sense strand starting at position 2967 of SEQ ID NO: 1887273
uugcgaugccuguuucugu

SEQ ID NO: 2459797 - RNA, 19 nt, Artificial Sequence
  Description of Artificial Sequence: Synthetic oligonucleotide
  Antisense strand to SEQ ID NO: 2459796
acagaaacaggcaucgcaa

SEQ ID NO: 2459798 - RNA, 19 nt, Artificial Sequence
  Description of Artificial Sequence: Synthetic oligonucleotide
  Sense strand starting at position 3310 of SEQ ID NO: 1887273
guugcugacuggccuagaa

SEQ ID NO: 2459799 - RNA, 19 nt, Artificial Sequence
  Description of Artificial Sequence: Synthetic oligonucleotide
  Antisense strand to SEQ ID NO: 2459798
uucuaggccagucagcaac

SEQ ID NO: 2459800 - RNA, 19 nt, Artificial Sequence
  Description of Artificial Sequence: Synthetic oligonucleotide
  Sense strand starting at position 3312 of SEQ ID NO: 1887273
ugcugacuggccuagaacu

SEQ ID NO: 2459801 - RNA, 19 nt, Artificial Sequence
  Description of Artificial Sequence: Synthetic oligonucleotide
  Antisense strand to SEQ ID NO: 2459800
aguucuaggccagucagca

SEQ ID NO: 2459802 - RNA, 19 nt, Artificial Sequence
  Description of Artificial Sequence: Synthetic oligonucleotide
  Sense strand starting at position 3436 of SEQ ID NO: 1887273
guugguuuaucaucacuug

SEQ ID NO: 2459803 - RNA, 19 nt, Artificial Sequence
  Description of Artificial Sequence: Synthetic oligonucleotide
  Antisense strand to SEQ ID NO: 2459802
caagugaugauaaaccaac

SEQ ID NO: 2459804 - RNA, 19 nt, Artificial Sequence
  Description of Artificial Sequence: Synthetic oligonucleotide
  Sense strand starting at position 3439 of SEQ ID NO: 1887273
gguuuaucaucacuugcaa

SEQ ID NO: 2459805 - RNA, 19 nt, Artificial Sequence
  Description of Artificial Sequence: Synthetic oligonucleotide
  Antisense strand to SEQ ID NO: 2459804
uugcaagugaugauaaacc

SEQ ID NO: 2459806 - RNA, 19 nt, Artificial Sequence
  Description of Artificial Sequence: Synthetic oligonucleotide
  Sense strand starting at position 3521 of SEQ ID NO: 1887273
ugagaaaguccaugacauc

SEQ ID NO: 2459807 - RNA, 19 nt, Artificial Sequence
  Description of Artificial Sequence: Synthetic oligonucleotide
  Antisense strand to SEQ ID NO: 2459806
gaugucauggacuuucuca

SEQ ID NO: 2459808 - RNA, 19 nt, Artificial Sequence
  Description of Artificial Sequence: Synthetic oligonucleotide
  Sense strand starting at position 3530 of SEQ ID NO: 1887273
ccaugacaucccuaaggcu

SEQ ID NO: 2459809 - RNA, 19 nt, Artificial Sequence
  Description of Artificial Sequence: Synthetic oligonucleotide
  Antisense strand to SEQ ID NO: 2459808
agccuuagggaugucaugg

SEQ ID NO: 2459810 - RNA, 19 nt, Artificial Sequence
  Description of Artificial Sequence: Synthetic oligonucleotide
  Sense strand starting at position 3556 of SEQ ID NO: 1887273
gugaguagcuaggcuagaa

SEQ ID NO: 2459811 - RNA, 19 nt, Artificial Sequence
  Description of Artificial Sequence: Synthetic oligonucleotide
  Antisense strand to SEQ ID NO: 2459810
uucuagccuagcuacucac

SEQ ID NO: 2459812 - RNA, 19 nt, Artificial Sequence
  Description of Artificial Sequence: Synthetic oligonucleotide
  Sense strand starting at position 3560 of SEQ ID NO: 1887273
guagcuaggcuagaauuaa

SEQ ID NO: 2459813 - RNA, 19 nt, Artificial Sequence
  Description of Artificial Sequence: Synthetic oligonucleotide
  Antisense strand to SEQ ID NO: 2459812
uuaauucuagccuagcuac

SEQ ID NO: 2459814 - RNA, 19 nt, Artificial Sequence
  Description of Artificial Sequence: Synthetic oligonucleotide
  Sense strand starting at position 3677 of SEQ ID NO: 1887273
uccucaguuggagggaaau

SEQ ID NO: 2459815 - RNA, 19 nt, Artificial Sequence
  Description of Artificial Sequence: Synthetic oligonucleotide
  Antisense strand to SEQ ID NO: 2459814
auuucccuccaacugagga

SEQ ID NO: 2459816 - RNA, 19 nt, Artificial Sequence
  Description of Artificial Sequence: Synthetic oligonucleotide
  Sense strand starting at position 3824 of SEQ ID NO: 1887273
agaguuguuagaggugaaa

SEQ ID NO: 2459817 - RNA, 19 nt, Artificial Sequence
  Description of Artificial Sequence: Synthetic oligonucleotide
  Antisense strand to SEQ ID NO: 2459816
uuucaccucuaacaacucu

SEQ ID NO: 2459818 - RNA, 19 nt, Artificial Sequence
  Description of Artificial Sequence: Synthetic oligonucleotide
  Sense strand starting at position 108 of SEQ ID NO: 1887274
guggaugaacuguaaagua

SEQ ID NO: 2459819 - RNA, 19 nt, Artificial Sequence
  Description of Artificial Sequence: Synthetic oligonucleotide
  Antisense strand to SEQ ID NO: 2459818
uacuuuacaguucauccac

SEQ ID NO: 2459820 - RNA, 19 nt, Artificial Sequence
  Description of Artificial Sequence: Synthetic oligonucleotide
  Sense strand starting at position 250 of SEQ ID NO: 1887274
gccuuuaggugcugaggau

SEQ ID NO: 2459821 - RNA, 19 nt, Artificial Sequence
  Description of Artificial Sequence: Synthetic oligonucleotide
  Antisense strand to SEQ ID NO: 2459820
auccucagcaccuaaaggc

SEQ ID NO: 2459822 - RNA, 19 nt, Artificial Sequence
  Description of Artificial Sequence: Synthetic oligonucleotide
  Sense strand starting at position 356 of SEQ ID NO: 1887274
uccuuauucuuguccagac

SEQ ID NO: 2459823 - RNA, 19 nt, Artificial Sequence
  Description of Artificial Sequence: Synthetic oligonucleotide
  Antisense strand to SEQ ID NO: 2459822
gucuggacaagaauaagga

SEQ ID NO: 2459824 - RNA, 19 nt, Artificial Sequence
  Description of Artificial Sequence: Synthetic oligonucleotide
  Sense strand starting at position 357 of SEQ ID NO: 1887274
ccuuauucuuguccagacu

SEQ ID NO: 2459825 - RNA, 19 nt, Artificial Sequence
  Description of Artificial Sequence: Synthetic oligonucleotide
  Antisense strand to SEQ ID NO: 2459824
agucuggacaagaauaagg

SEQ ID NO: 2459826 - RNA, 19 nt, Artificial Sequence
  Description of Artificial Sequence: Synthetic oligonucleotide
  Sense strand starting at position 369 of SEQ ID NO: 1887274
ccagacuccuggccuuaga

SEQ ID NO: 2459827 - RNA, 19 nt, Artificial Sequence
  Description of Artificial Sequence: Synthetic oligonucleotide
  Antisense strand to SEQ ID NO: 2459826
ucuaaggccaggagucugg

SEQ ID NO: 2459828 - RNA, 19 nt, Artificial Sequence
  Description of Artificial Sequence: Synthetic oligonucleotide
  Sense strand starting at position 382 of SEQ ID NO: 1887274
cuuagaaucucaggccuca

SEQ ID NO: 2459829 - RNA, 19 nt, Artificial Sequence
  Description of Artificial Sequence: Synthetic oligonucleotide
  Antisense strand to SEQ ID NO: 2459828
ugaggccugagauucuaag

SEQ ID NO: 2459830 - RNA, 19 nt, Artificial Sequence
  Description of Artificial Sequence: Synthetic oligonucleotide
  Sense strand starting at position 394 of SEQ ID NO: 1887274
ggccucaucuuccucagua

SEQ ID NO: 2459831 - RNA, 19 nt, Artificial Sequence
  Description of Artificial Sequence: Synthetic oligonucleotide
  Antisense strand to SEQ ID NO: 2459830
uacugaggaagaugaggcc

SEQ ID NO: 2459832 - RNA, 19 nt, Artificial Sequence
  Description of Artificial Sequence: Synthetic oligonucleotide
  Sense strand starting at position 398 of SEQ ID NO: 1887274
ucaucuuccucaguaagua

SEQ ID NO: 2459833 - RNA, 19 nt, Artificial Sequence
  Description of Artificial Sequence: Synthetic oligonucleotide
  Antisense strand to SEQ ID NO: 2459832
uacuuacugaggaagauga

SEQ ID NO: 2459834 - RNA, 19 nt, Artificial Sequence
  Description of Artificial Sequence: Synthetic oligonucleotide
  Sense strand starting at position 408 of SEQ ID NO: 1887274
caguaaguagagugacuau

SEQ ID NO: 2459835 - RNA, 19 nt, Artificial Sequence
  Description of Artificial Sequence: Synthetic oligonucleotide
  Antisense strand to SEQ ID NO: 2459834
auagucacucuacuuacug

SEQ ID NO: 2459836 - RNA, 19 nt, Artificial Sequence
  Description of Artificial Sequence: Synthetic oligonucleotide
  Sense strand starting at position 411 of SEQ ID NO: 1887274
uaaguagagugacuauaau

SEQ ID NO: 2459837 - RNA, 19 nt, Artificial Sequence
  Description of Artificial Sequence: Synthetic oligonucleotide
  Antisense strand to SEQ ID NO: 2459836
auuauagucacucuacuua

SEQ ID NO: 2459838 - RNA, 19 nt, Artificial Sequence
  Description of Artificial Sequence: Synthetic oligonucleotide
  Sense strand starting at position 431 of SEQ ID NO: 1887274
ugucauccacacugggaua

SEQ ID NO: 2459839 - RNA, 19 nt, Artificial Sequence
  Description of Artificial Sequence: Synthetic oligonucleotide
  Antisense strand to SEQ ID NO: 2459838
uaucccaguguggaugaca

SEQ ID NO: 2459840 - RNA, 19 nt, Artificial Sequence
  Description of Artificial Sequence: Synthetic oligonucleotide
  Sense strand starting at position 445 of SEQ ID NO: 1887274
ggauacugcugagagcaaa

SEQ ID NO: 2459841 - RNA, 19 nt, Artificial Sequence
  Description of Artificial Sequence: Synthetic oligonucleotide
  Antisense strand to SEQ ID NO: 2459840
uuugcucucagcaguaucc

SEQ ID NO: 2459842 - RNA, 19 nt, Artificial Sequence
  Description of Artificial Sequence: Synthetic oligonucleotide
  Sense strand starting at position 464 of SEQ ID NO: 1887274
acgggaagcugcuauuaau

SEQ ID NO: 2459843 - RNA, 19 nt, Artificial Sequence
  Description of Artificial Sequence: Synthetic oligonucleotide
  Antisense strand to SEQ ID NO: 2459842
auuaauagcagcuucccgu

SEQ ID NO: 2459844 - RNA, 19 nt, Artificial Sequence
  Description of Artificial Sequence: Synthetic oligonucleotide
  Sense strand starting at position 621 of SEQ ID NO: 1887274
ucaggaucccaguaguucu

SEQ ID NO: 2459845 - RNA, 19 nt, Artificial Sequence
  Description of Artificial Sequence: Synthetic oligonucleotide
  Antisense strand to SEQ ID NO: 2459844
agaacuacugggauccuga

SEQ ID NO: 2459846 - RNA, 19 nt, Artificial Sequence
  Description of Artificial Sequence: Synthetic oligonucleotide
  Sense strand starting at position 628 of SEQ ID NO: 1887274
cccaguaguucuucuaacu

SEQ ID NO: 2459847 - RNA, 19 nt, Artificial Sequence
  Description of Artificial Sequence: Synthetic oligonucleotide
  Antisense strand to SEQ ID NO: 2459846
aguuagaagaacuacuggg

SEQ ID NO: 2459848 - RNA, 19 nt, Artificial Sequence
  Description of Artificial Sequence: Synthetic oligonucleotide
  Sense strand starting at position 689 of SEQ ID NO: 1887274
gcacauccauaugacagaa

SEQ ID NO: 2459849 - RNA, 19 nt, Artificial Sequence
  Description of Artificial Sequence: Synthetic oligonucleotide
  Antisense strand to SEQ ID NO: 2459848
uucugucauauggaugugc

SEQ ID NO: 2459850 - RNA, 19 nt, Artificial Sequence
  Description of Artificial Sequence: Synthetic oligonucleotide
  Sense strand starting at position 722 of SEQ ID NO: 1887274
gggcgagaaucccuagguu

SEQ ID NO: 2459851 - RNA, 19 nt, Artificial Sequence
  Description of Artificial Sequence: Synthetic oligonucleotide
  Antisense strand to SEQ ID NO: 2459850
aaccuagggauucucgccc

SEQ ID NO: 2459852 - RNA, 19 nt, Artificial Sequence
  Description of Artificial Sequence: Synthetic oligonucleotide
  Sense strand starting at position 725 of SEQ ID NO: 1887274
cgagaaucccuagguuuga

SEQ ID NO: 2459853 - RNA, 19 nt, Artificial Sequence
  Description of Artificial Sequence: Synthetic oligonucleotide
  Antisense strand to SEQ ID NO: 2459852
ucaaaccuagggauucucg

SEQ ID NO: 2459854 - RNA, 19 nt, Artificial Sequence
  Description of Artificial Sequence: Synthetic oligonucleotide
  Sense strand starting at position 738 of SEQ ID NO: 1887274
guuugagucuuggcugguu

SEQ ID NO: 2459855 - RNA, 19 nt, Artificial Sequence
  Description of Artificial Sequence: Synthetic oligonucleotide
  Antisense strand to SEQ ID NO: 2459854
aaccagccaagacucaaac

SEQ ID NO: 2459856 - RNA, 19 nt, Artificial Sequence
  Description of Artificial Sequence: Synthetic oligonucleotide
  Sense strand starting at position 794 of SEQ ID NO: 1887274
ucaguuucucccuguggau

SEQ ID NO: 2459857 - RNA, 19 nt, Artificial Sequence
  Description of Artificial Sequence: Synthetic oligonucleotide
  Antisense strand to SEQ ID NO: 2459856
auccacagggagaaacuga

SEQ ID NO: 2459858 - RNA, 19 nt, Artificial Sequence
  Description of Artificial Sequence: Synthetic oligonucleotide
  Sense strand starting at position 796 of SEQ ID NO: 1887274
aguuucucccuguggauaa

SEQ ID NO: 2459859 - RNA, 19 nt, Artificial Sequence
  Description of Artificial Sequence: Synthetic oligonucleotide
  Antisense strand to SEQ ID NO: 2459858
uuauccacagggagaaacu

SEQ ID NO: 2459860 - RNA, 19 nt, Artificial Sequence
  Description of Artificial Sequence: Synthetic oligonucleotide
  Sense strand starting at position 797 of SEQ ID NO: 1887274
guuucucccuguggauaau

SEQ ID NO: 2459861 - RNA, 19 nt, Artificial Sequence
  Description of Artificial Sequence: Synthetic oligonucleotide
  Antisense strand to SEQ ID NO: 2459860
auuauccacagggagaaac

SEQ ID NO: 2459862 - RNA, 19 nt, Artificial Sequence
  Description of Artificial Sequence: Synthetic oligonucleotide
  Sense strand starting at position 832 of SEQ ID NO: 1887274
gcuuccugagguugggaua

SEQ ID NO: 2459863 - RNA, 19 nt, Artificial Sequence
  Description of Artificial Sequence: Synthetic oligonucleotide
  Antisense strand to SEQ ID NO: 2459862
uaucccaaccucaggaagc

SEQ ID NO: 2459864 - RNA, 19 nt, Artificial Sequence
  Description of Artificial Sequence: Synthetic oligonucleotide
  Sense strand starting at position 980 of SEQ ID NO: 1887274
gauauaaagugagacauac

SEQ ID NO: 2459865 - RNA, 19 nt, Artificial Sequence
  Description of Artificial Sequence: Synthetic oligonucleotide
  Antisense strand to SEQ ID NO: 2459864
guaugucucacuuuauauc

SEQ ID NO: 2459866 - RNA, 19 nt, Artificial Sequence
  Description of Artificial Sequence: Synthetic oligonucleotide
  Sense strand starting at position 1707 of SEQ ID NO: 1887274
uccugaugugcccaagaag

SEQ ID NO: 2459867 - RNA, 19 nt, Artificial Sequence
  Description of Artificial Sequence: Synthetic oligonucleotide
  Antisense strand to SEQ ID NO: 2459866
cuucuugggcacaucagga

SEQ ID NO: 2459868 - RNA, 19 nt, Artificial Sequence
  Description of Artificial Sequence: Synthetic oligonucleotide
  Sense strand starting at position 2368 of SEQ ID NO: 1887274
cagggaguuccagguugua

SEQ ID NO: 2459869 - RNA, 19 nt, Artificial Sequence
  Description of Artificial Sequence: Synthetic oligonucleotide
  Antisense strand to SEQ ID NO: 2459868
uacaaccuggaacucccug

SEQ ID NO: 2459870 - RNA, 19 nt, Artificial Sequence
  Description of Artificial Sequence: Synthetic oligonucleotide
  Sense strand starting at position 2371 of SEQ ID NO: 1887274
ggaguuccagguuguauga

SEQ ID NO: 2459871 - RNA, 19 nt, Artificial Sequence
  Description of Artificial Sequence: Synthetic oligonucleotide
  Antisense strand to SEQ ID NO: 2459870
ucauacaaccuggaacucc

SEQ ID NO: 2459872 - RNA, 19 nt, Artificial Sequence
  Description of Artificial Sequence: Synthetic oligonucleotide
  Sense strand starting at position 2381 of SEQ ID NO: 1887274
guuguaugaccugguucag

SEQ ID NO: 2459873 - RNA, 19 nt, Artificial Sequence
  Description of Artificial Sequence: Synthetic oligonucleotide
  Antisense strand to SEQ ID NO: 2459872
cugaaccaggucauacaac

SEQ ID NO: 2459874 - RNA, 19 nt, Artificial Sequence
  Description of Artificial Sequence: Synthetic oligonucleotide
  Sense strand starting at position 2387 of SEQ ID NO: 1887274
ugaccugguucagggaaga

SEQ ID NO: 2459875 - RNA, 19 nt, Artificial Sequence
  Description of Artificial Sequence: Synthetic oligonucleotide
  Antisense strand to SEQ ID NO: 2459874
ucuucccugaaccagguca

SEQ ID NO: 2459876 - RNA, 19 nt, Artificial Sequence
  Description of Artificial Sequence: Synthetic oligonucleotide
  Sense strand starting at position 2411 of SEQ ID NO: 1887274
aggagaagguaagaaagau

SEQ ID NO: 2459877 - RNA, 19 nt, Artificial Sequence
  Description of Artificial Sequence: Synthetic oligonucleotide
  Antisense strand to SEQ ID NO: 2459876
aucuuucuuaccuucuccu

SEQ ID NO: 2459878 - RNA, 19 nt, Artificial Sequence
  Description of Artificial Sequence: Synthetic oligonucleotide
  Sense strand starting at position 2420 of SEQ ID NO: 1887274
uaagaaagauccuucggcu

SEQ ID NO: 2459879 - RNA, 19 nt, Artificial Sequence
  Description of Artificial Sequence: Synthetic oligonucleotide
  Antisense strand to SEQ ID NO: 2459878
agccgaaggaucuuucuua

SEQ ID NO: 2459880 - RNA, 19 nt, Artificial Sequence
  Description of Artificial Sequence: Synthetic oligonucleotide
  Sense strand starting at position 2423 of SEQ ID NO: 1887274
gaaagauccuucggcuucu

SEQ ID NO: 2459881 - RNA, 19 nt, Artificial Sequence
  Description of Artificial Sequence: Synthetic oligonucleotide
  Antisense strand to SEQ ID NO: 2459880
agaagccgaaggaucuuuc

SEQ ID NO: 2459882 - RNA, 19 nt, Artificial Sequence
  Description of Artificial Sequence: Synthetic oligonucleotide
  Sense strand starting at position 2482 of SEQ ID NO: 1887274
gccgguagcacguucugaa

SEQ ID NO: 2459883 - RNA, 19 nt, Artificial Sequence
  Description of Artificial Sequence: Synthetic oligonucleotide
  Antisense strand to SEQ ID NO: 2459882
uucagaacgugcuaccggc

SEQ ID NO: 2459884 - RNA, 19 nt, Artificial Sequence
  Description of Artificial Sequence: Synthetic oligonucleotide
  Sense strand starting at position 2492 of SEQ ID NO: 1887274
cguucugaagcccaucauu

SEQ ID NO: 2459885 - RNA, 19 nt, Artificial Sequence
  Description of Artificial Sequence: Synthetic oligonucleotide
  Antisense strand to SEQ ID NO: 2459884
aaugaugggcuucagaacg

SEQ ID NO: 2459886 - RNA, 19 nt, Artificial Sequence
  Description of Artificial Sequence: Synthetic oligonucleotide
  Sense strand starting at position 2511 of SEQ ID NO: 1887274
accaaugauugccaagcau

SEQ ID NO: 2459887 - RNA, 19 nt, Artificial Sequence
  Description of Artificial Sequence: Synthetic oligonucleotide
  Antisense strand to SEQ ID NO: 2459886
augcuuggcaaucauuggu

SEQ ID NO: 2459888 - RNA, 19 nt, Artificial Sequence
  Description of Artificial Sequence: Synthetic oligonucleotide
  Sense strand starting at position 38 of SEQ ID NO: 1887275
cuggguuugguaugaauag

SEQ ID NO: 2459889 - RNA, 19 nt, Artificial Sequence
  Description of Artificial Sequence: Synthetic oligonucleotide
  Antisense strand to SEQ ID NO: 2459888
cuauucauaccaaacccag

SEQ ID NO: 2459890 - RNA, 19 nt, Artificial Sequence
  Description of Artificial Sequence: Synthetic oligonucleotide
  Sense strand starting at position 39 of SEQ ID NO: 1887275
uggguuugguaugaauaga

SEQ ID NO: 2459891 - RNA, 19 nt, Artificial Sequence
  Description of Artificial Sequence: Synthetic oligonucleotide
  Antisense strand to SEQ ID NO: 2459890
ucuauucauaccaaaccca

SEQ ID NO: 2459892 - RNA, 19 nt, Artificial Sequence
  Description of Artificial Sequence: Synthetic oligonucleotide
  Sense strand starting at position 236 of SEQ ID NO: 1887275
cggagucaucuggagguga

SEQ ID NO: 2459893 - RNA, 19 nt, Artificial Sequence
  Description of Artificial Sequence: Synthetic oligonucleotide
  Antisense strand to SEQ ID NO: 2459892
ucaccuccagaugacuccg

SEQ ID NO: 2459894 - RNA, 19 nt, Artificial Sequence
  Description of Artificial Sequence: Synthetic oligonucleotide
  Sense strand starting at position 237 of SEQ ID NO: 1887275
ggagucaucuggaggugag

SEQ ID NO: 2459895 - RNA, 19 nt, Artificial Sequence
  Description of Artificial Sequence: Synthetic oligonucleotide
  Antisense strand to SEQ ID NO: 2459894
cucaccuccagaugacucc

SEQ ID NO: 2459896 - RNA, 19 nt, Artificial Sequence
  Description of Artificial Sequence: Synthetic oligonucleotide
  Sense strand starting at position 238 of SEQ ID NO: 1887275
gagucaucuggaggugaga

SEQ ID NO: 2459897 - RNA, 19 nt, Artificial Sequence
  Description of Artificial Sequence: Synthetic oligonucleotide
  Antisense strand to SEQ ID NO: 2459896
ucucaccuccagaugacuc

SEQ ID NO: 2459898 - RNA, 19 nt, Artificial Sequence
  Description of Artificial Sequence: Synthetic oligonucleotide
  Sense strand starting at position 253 of SEQ ID NO: 1887275
gagagugugucggucagga

SEQ ID NO: 2459899 - RNA, 19 nt, Artificial Sequence
  Description of Artificial Sequence: Synthetic oligonucleotide
  Antisense strand to SEQ ID NO: 2459898
uccugaccgacacacucuc

SEQ ID NO: 2459900 - RNA, 19 nt, Artificial Sequence
  Description of Artificial Sequence: Synthetic oligonucleotide
  Sense strand starting at position 344 of SEQ ID NO: 1887275
gcccgaguuccugguuauu

SEQ ID NO: 2459901 - RNA, 19 nt, Artificial Sequence
  Description of Artificial Sequence: Synthetic oligonucleotide
  Antisense strand to SEQ ID NO: 2459900
aauaaccaggaacucgggc

SEQ ID NO: 2459902 - RNA, 19 nt, Artificial Sequence
  Description of Artificial Sequence: Synthetic oligonucleotide
  Sense strand starting at position 438 of SEQ ID NO: 1887275
gagugcugcucugaggaga

SEQ ID NO: 2459903 - RNA, 19 nt, Artificial Sequence
  Description of Artificial Sequence: Synthetic oligonucleotide
  Antisense strand to SEQ ID NO: 2459902
ucuccucagagcagcacuc

SEQ ID NO: 2459904 - RNA, 19 nt, Artificial Sequence
  Description of Artificial Sequence: Synthetic oligonucleotide
  Sense strand starting at position 461 of SEQ ID NO: 1887275
gagggaaucucagccgcau

SEQ ID NO: 2459905 - RNA, 19 nt, Artificial Sequence
  Description of Artificial Sequence: Synthetic oligonucleotide
  Antisense strand to SEQ ID NO: 2459904
augcggcugagauucccuc

SEQ ID NO: 2459906 - RNA, 19 nt, Artificial Sequence
  Description of Artificial Sequence: Synthetic oligonucleotide
  Sense strand starting at position 663 of SEQ ID NO: 1887275
cggaacucugcucauggaa

SEQ ID NO: 2459907 - RNA, 19 nt, Artificial Sequence
  Description of Artificial Sequence: Synthetic oligonucleotide
  Antisense strand to SEQ ID NO: 2459906
uuccaugagcagaguuccg

SEQ ID NO: 2459908 - RNA, 19 nt, Artificial Sequence
  Description of Artificial Sequence: Synthetic oligonucleotide
  Sense strand starting at position 665 of SEQ ID NO: 1887275
gaacucugcucauggaaag

SEQ ID NO: 2459909 - RNA, 19 nt, Artificial Sequence
  Description of Artificial Sequence: Synthetic oligonucleotide
  Antisense strand to SEQ ID NO: 2459908
cuuuccaugagcagaguuc

SEQ ID NO: 2459910 - RNA, 19 nt, Artificial Sequence
  Description of Artificial Sequence: Synthetic oligonucleotide
  Sense strand starting at position 815 of SEQ ID NO: 1887275
caggauuuguuagguauga

SEQ ID NO: 2459911 - RNA, 19 nt, Artificial Sequence
  Description of Artificial Sequence: Synthetic oligonucleotide
  Antisense strand to SEQ ID NO: 2459910
ucauaccuaacaaauccug

SEQ ID NO: 2459912 - RNA, 19 nt, Artificial Sequence
  Description of Artificial Sequence: Synthetic oligonucleotide
  Sense strand starting at position 850 of SEQ ID NO: 1887275
acaguuuccuuuccuggaa

SEQ ID NO: 2459913 - RNA, 19 nt, Artificial Sequence
  Description of Artificial Sequence: Synthetic oligonucleotide
  Antisense strand to SEQ ID NO: 2459912
uuccaggaaaggaaacugu

SEQ ID NO: 2459914 - RNA, 19 nt, Artificial Sequence
  Description of Artificial Sequence: Synthetic oligonucleotide
  Sense strand starting at position 2198 of SEQ ID NO: 1887275
guaccuugggcggaggauu

SEQ ID NO: 2459915 - RNA, 19 nt, Artificial Sequence
  Description of Artificial Sequence: Synthetic oligonucleotide
  Antisense strand to SEQ ID NO: 2459914
aauccuccgcccaagguac

SEQ ID NO: 2459916 - RNA, 19 nt, Artificial Sequence
  Description of Artificial Sequence: Synthetic oligonucleotide
  Sense strand starting at position 2298 of SEQ ID NO: 1887275
ugaacaucaucccggaguu

SEQ ID NO: 2459917 - RNA, 19 nt, Artificial Sequence
  Description of Artificial Sequence: Synthetic oligonucleotide
  Antisense strand to SEQ ID NO: 2459916
aacuccgggaugauguuca

SEQ ID NO: 2459918 - RNA, 19 nt, Artificial Sequence
  Description of Artificial Sequence: Synthetic oligonucleotide
  Sense strand starting at position 3247 of SEQ ID NO: 1887275
uuuccaauuuccucagcga

SEQ ID NO: 2459919 - RNA, 19 nt, Artificial Sequence
  Description of Artificial Sequence: Synthetic oligonucleotide
  Antisense strand to SEQ ID NO: 2459918
ucgcugaggaaauuggaaa

SEQ ID NO: 2459920 - RNA, 19 nt, Artificial Sequence
  Description of Artificial Sequence: Synthetic oligonucleotide
  Sense strand starting at position 3521 of SEQ ID NO: 1887275
cacggaugcucagagauaa

SEQ ID NO: 2459921 - RNA, 19 nt, Artificial Sequence
  Description of Artificial Sequence: Synthetic oligonucleotide
  Antisense strand to SEQ ID NO: 2459920
uuaucucugagcauccgug

SEQ ID NO: 2459922 - RNA, 19 nt, Artificial Sequence
  Description of Artificial Sequence: Synthetic oligonucleotide
  Sense strand starting at position 3538 of SEQ ID NO: 1887275
aaggaaacgucucucuaca

SEQ ID NO: 2459923 - RNA, 19 nt, Artificial Sequence
  Description of Artificial Sequence: Synthetic oligonucleotide
  Antisense strand to SEQ ID NO: 2459922
uguagagagacguuuccuu

SEQ ID NO: 2459924 - RNA, 19 nt, Artificial Sequence
  Description of Artificial Sequence: Synthetic oligonucleotide
  Sense strand starting at position 3659 of SEQ ID NO: 1887275
cccuaugaugcccauaguu

SEQ ID NO: 2459925 - RNA, 19 nt, Artificial Sequence
  Description of Artificial Sequence: Synthetic oligonucleotide
  Antisense strand to SEQ ID NO: 2459924
aacuaugggcaucauaggg

SEQ ID NO: 2459926 - RNA, 19 nt, Artificial Sequence
  Description of Artificial Sequence: Synthetic oligonucleotide
  Sense strand starting at position 3661 of SEQ ID NO: 1887275
cuaugaugcccauaguuga

SEQ ID NO: 2459927 - RNA, 19 nt, Artificial Sequence
  Description of Artificial Sequence: Synthetic oligonucleotide
  Antisense strand to SEQ ID NO: 2459926
ucaacuaugggcaucauag

SEQ ID NO: 2459928 - RNA, 19 nt, Artificial Sequence
  Description of Artificial Sequence: Synthetic oligonucleotide
  Sense strand starting at position 3668 of SEQ ID NO: 1887275
gcccauaguugacuaggaa

SEQ ID NO: 2459929 - RNA, 19 nt, Artificial Sequence
  Description of Artificial Sequence: Synthetic oligonucleotide
  Antisense strand to SEQ ID NO: 2459928
uuccuagucaacuaugggc

SEQ ID NO: 2459930 - RNA, 19 nt, Artificial Sequence
  Description of Artificial Sequence: Synthetic oligonucleotide
  Sense strand starting at position 3671 of SEQ ID NO: 1887275
cauaguugacuaggaaguu

SEQ ID NO: 2459931 - RNA, 19 nt, Artificial Sequence
  Description of Artificial Sequence: Synthetic oligonucleotide
  Antisense strand to SEQ ID NO: 2459930
aacuuccuagucaacuaug

SEQ ID NO: 2459932 - RNA, 19 nt, Artificial Sequence
  Description of Artificial Sequence: Synthetic oligonucleotide
  Sense strand starting at position 3672 of SEQ ID NO: 1887275
auaguugacuaggaaguua

SEQ ID NO: 2459933 - RNA, 19 nt, Artificial Sequence
  Description of Artificial Sequence: Synthetic oligonucleotide
  Antisense strand to SEQ ID NO: 2459932
uaacuuccuagucaacuau

SEQ ID NO: 2459934 - RNA, 19 nt, Artificial Sequence
  Description of Artificial Sequence: Synthetic oligonucleotide
  Sense strand starting at position 3703 of SEQ ID NO: 1887275
uaauguauauggccagaga

SEQ ID NO: 2459935 - RNA, 19 nt, Artificial Sequence
  Description of Artificial Sequence: Synthetic oligonucleotide
  Antisense strand to SEQ ID NO: 2459934
ucucuggccauauacauua

SEQ ID NO: 2459936 - RNA, 19 nt, Artificial Sequence
  Description of Artificial Sequence: Synthetic oligonucleotide
  Sense strand starting at position 3706 of SEQ ID NO: 1887275
uguauauggccagagacau

SEQ ID NO: 2459937 - RNA, 19 nt, Artificial Sequence
  Description of Artificial Sequence: Synthetic oligonucleotide
  Antisense strand to SEQ ID NO: 2459936
augucucuggccauauaca

SEQ ID NO: 2459938 - RNA, 19 nt, Artificial Sequence
  Description of Artificial Sequence: Synthetic oligonucleotide
  Sense strand starting at position 380 of SEQ ID NO: 1887276
gggacagggucuugccauu

SEQ ID NO: 2459939 - RNA, 19 nt, Artificial Sequence
  Description of Artificial Sequence: Synthetic oligonucleotide
  Antisense strand to SEQ ID NO: 2459938
aauggcaagacccuguccc

SEQ ID NO: 2459940 - RNA, 19 nt, Artificial Sequence
  Description of Artificial Sequence: Synthetic oligonucleotide
  Sense strand starting at position 791 of SEQ ID NO: 1887276
gguagauuccguugugcag

SEQ ID NO: 2459941 - RNA, 19 nt, Artificial Sequence
  Description of Artificial Sequence: Synthetic oligonucleotide
  Antisense strand to SEQ ID NO: 2459940
cugcacaacggaaucuacc

SEQ ID NO: 2459942 - RNA, 19 nt, Artificial Sequence
  Description of Artificial Sequence: Synthetic oligonucleotide
  Sense strand starting at position 827 of SEQ ID NO: 1887276
cgcggagucuugucauuca

SEQ ID NO: 2459943 - RNA, 19 nt, Artificial Sequence
  Description of Artificial Sequence: Synthetic oligonucleotide
  Antisense strand to SEQ ID NO: 2459942
ugaaugacaagacuccgcg

SEQ ID NO: 2459944 - RNA, 19 nt, Artificial Sequence
  Description of Artificial Sequence: Synthetic oligonucleotide
  Sense strand starting at position 877 of SEQ ID NO: 1887276
cgaacaacaguuuguagau

SEQ ID NO: 2459945 - RNA, 19 nt, Artificial Sequence
  Description of Artificial Sequence: Synthetic oligonucleotide
  Antisense strand to SEQ ID NO: 2459944
aucuacaaacuguuguucg

SEQ ID NO: 2459946 - RNA, 19 nt, Artificial Sequence
  Description of Artificial Sequence: Synthetic oligonucleotide
  Sense strand starting at position 900 of SEQ ID NO: 1887276
ggcugcucucaucgagcaa

SEQ ID NO: 2459947 - RNA, 19 nt, Artificial Sequence
  Description of Artificial Sequence: Synthetic oligonucleotide
  Antisense strand to SEQ ID NO: 2459946
uugcucgaugagagcagcc

SEQ ID NO: 2459948 - RNA, 19 nt, Artificial Sequence
  Description of Artificial Sequence: Synthetic oligonucleotide
  Sense strand starting at position 901 of SEQ ID NO: 1887276
gcugcucucaucgagcaaa

SEQ ID NO: 2459949 - RNA, 19 nt, Artificial Sequence
  Description of Artificial Sequence: Synthetic oligonucleotide
  Antisense strand to SEQ ID NO: 2459948
uuugcucgaugagagcagc

SEQ ID NO: 2459950 - RNA, 19 nt, Artificial Sequence
  Description of Artificial Sequence: Synthetic oligonucleotide
  Sense strand starting at position 904 of SEQ ID NO: 1887276
gcucucaucgagcaaacau

SEQ ID NO: 2459951 - RNA, 19 nt, Artificial Sequence
  Description of Artificial Sequence: Synthetic oligonucleotide
  Antisense strand to SEQ ID NO: 2459950
auguuugcucgaugagagc

SEQ ID NO: 2459952 - RNA, 19 nt, Artificial Sequence
  Description of Artificial Sequence: Synthetic oligonucleotide
  Sense strand starting at position 1080 of SEQ ID NO: 1887276
aagggcugcucugaagaaa

SEQ ID NO: 2459953 - RNA, 19 nt, Artificial Sequence
  Description of Artificial Sequence: Synthetic oligonucleotide
  Antisense strand to SEQ ID NO: 2459952
uuucuucagagcagcccuu

SEQ ID NO: 2459954 - RNA, 19 nt, Artificial Sequence
  Description of Artificial Sequence: Synthetic oligonucleotide
  Sense strand starting at position 1221 of SEQ ID NO: 1887276
gccgucucaaggcagaauu

SEQ ID NO: 2459955 - RNA, 19 nt, Artificial Sequence
  Description of Artificial Sequence: Synthetic oligonucleotide
  Antisense strand to SEQ ID NO: 2459954
aauucugccuugagacggc

SEQ ID NO: 2459956 - RNA, 19 nt, Artificial Sequence
  Description of Artificial Sequence: Synthetic oligonucleotide
  Sense strand starting at position 1301 of SEQ ID NO: 1887276
ccacauucucaaggaugau

SEQ ID NO: 2459957 - RNA, 19 nt, Artificial Sequence
  Description of Artificial Sequence: Synthetic oligonucleotide
  Antisense strand to SEQ ID NO: 2459956
aucauccuugagaaugugg

SEQ ID NO: 2459958 - RNA, 19 nt, Artificial Sequence
  Description of Artificial Sequence: Synthetic oligonucleotide
  Sense strand starting at position 1310 of SEQ ID NO: 1887276
caaggaugaucuuuaggug

SEQ ID NO: 2459959 - RNA, 19 nt, Artificial Sequence
  Description of Artificial Sequence: Synthetic oligonucleotide
  Antisense strand to SEQ ID NO: 2459958
caccuaaagaucauccuug

SEQ ID NO: 2459960 - RNA, 19 nt, Artificial Sequence
  Description of Artificial Sequence: Synthetic oligonucleotide
  Sense strand starting at position 1313 of SEQ ID NO: 1887276
ggaugaucuuuaggugaaa

SEQ ID NO: 2459961 - RNA, 19 nt, Artificial Sequence
  Description of Artificial Sequence: Synthetic oligonucleotide
  Antisense strand to SEQ ID NO: 2459960
uuucaccuaaagaucaucc

SEQ ID NO: 2459962 - RNA, 19 nt, Artificial Sequence
  Description of Artificial Sequence: Synthetic oligonucleotide
  Sense strand starting at position 1314 of SEQ ID NO: 1887276
gaugaucuuuaggugaaau

SEQ ID NO: 2459963 - RNA, 19 nt, Artificial Sequence
  Description of Artificial Sequence: Synthetic oligonucleotide
  Antisense strand to SEQ ID NO: 2459962
auuucaccuaaagaucauc

SEQ ID NO: 2459964 - RNA, 19 nt, Artificial Sequence
  Description of Artificial Sequence: Synthetic oligonucleotide
  Sense strand starting at position 1322 of SEQ ID NO: 1887276
uuaggugaaaucgacugua

SEQ ID NO: 2459965 - RNA, 19 nt, Artificial Sequence
  Description of Artificial Sequence: Synthetic oligonucleotide
  Antisense strand to SEQ ID NO: 2459964
uacagucgauuucaccuaa

SEQ ID NO: 2459966 - RNA, 19 nt, Artificial Sequence
  Description of Artificial Sequence: Synthetic oligonucleotide
  Sense strand starting at position 1325 of SEQ ID NO: 1887276
ggugaaaucgacuguaggu

SEQ ID NO: 2459967 - RNA, 19 nt, Artificial Sequence
  Description of Artificial Sequence: Synthetic oligonucleotide
  Antisense strand to SEQ ID NO: 2459966
accuacagucgauuucacc

SEQ ID NO: 2459968 - RNA, 19 nt, Artificial Sequence
  Description of Artificial Sequence: Synthetic oligonucleotide
  Sense strand starting at position 1453 of SEQ ID NO: 1887276
cacgguaauucuccagaaa

SEQ ID NO: 2459969 - RNA, 19 nt, Artificial Sequence
  Description of Artificial Sequence: Synthetic oligonucleotide
  Antisense strand to SEQ ID NO: 2459968
uuucuggagaauuaccgug

SEQ ID NO: 2459970 - RNA, 19 nt, Artificial Sequence
  Description of Artificial Sequence: Synthetic oligonucleotide
  Sense strand starting at position 1454 of SEQ ID NO: 1887276
acgguaauucuccagaaau

SEQ ID NO: 2459971 - RNA, 19 nt, Artificial Sequence
  Description of Artificial Sequence: Synthetic oligonucleotide
  Antisense strand to SEQ ID NO: 2459970
auuucuggagaauuaccgu

SEQ ID NO: 2459972 - RNA, 19 nt, Artificial Sequence
  Description of Artificial Sequence: Synthetic oligonucleotide
  Sense strand starting at position 1511 of SEQ ID NO: 1887276
cuaguacuguccuuuguga

SEQ ID NO: 2459973 - RNA, 19 nt, Artificial Sequence
  Description of Artificial Sequence: Synthetic oligonucleotide
  Antisense strand to SEQ ID NO: 2459972
ucacaaaggacaguacuag

SEQ ID NO: 2459974 - RNA, 19 nt, Artificial Sequence
  Description of Artificial Sequence: Synthetic oligonucleotide
  Sense strand starting at position 1552 of SEQ ID NO: 1887276
ggucacaaccaaugaucau

SEQ ID NO: 2459975 - RNA, 19 nt, Artificial Sequence
  Description of Artificial Sequence: Synthetic oligonucleotide
  Antisense strand to SEQ ID NO: 2459974
augaucauugguugugacc

SEQ ID NO: 2459976 - RNA, 19 nt, Artificial Sequence
  Description of Artificial Sequence: Synthetic oligonucleotide
  Sense strand starting at position 1561 of SEQ ID NO: 1887276
caaugaucaugcuggcaag

SEQ ID NO: 2459977 - RNA, 19 nt, Artificial Sequence
  Description of Artificial Sequence: Synthetic oligonucleotide
  Antisense strand to SEQ ID NO: 2459976
cuugccagcaugaucauug

SEQ ID NO: 2459978 - RNA, 19 nt, Artificial Sequence
  Description of Artificial Sequence: Synthetic oligonucleotide
  Sense strand starting at position 1619 of SEQ ID NO: 1887276
cgugaugguuuggaggaca

SEQ ID NO: 2459979 - RNA, 19 nt, Artificial Sequence
  Description of Artificial Sequence: Synthetic oligonucleotide
  Antisense strand to SEQ ID NO: 2459978
uguccuccaaaccaucacg

SEQ ID NO: 2459980 - RNA, 19 nt, Artificial Sequence
  Description of Artificial Sequence: Synthetic oligonucleotide
  Sense strand starting at position 1728 of SEQ ID NO: 1887276
agcacucgcaccugaagau

SEQ ID NO: 2459981 - RNA, 19 nt, Artificial Sequence
  Description of Artificial Sequence: Synthetic oligonucleotide
  Antisense strand to SEQ ID NO: 2459980
aucuucaggugcgagugcu

SEQ ID NO: 2459982 - RNA, 19 nt, Artificial Sequence
  Description of Artificial Sequence: Synthetic oligonucleotide
  Sense strand starting at position 1740 of SEQ ID NO: 1887276
ugaagaugcugccacaguu

SEQ ID NO: 2459983 - RNA, 19 nt, Artificial Sequence
  Description of Artificial Sequence: Synthetic oligonucleotide
  Antisense strand to SEQ ID NO: 2459982
aacuguggcagcaucuuca

SEQ ID NO: 2459984 - RNA, 19 nt, Artificial Sequence
  Description of Artificial Sequence: Synthetic oligonucleotide
  Sense strand starting at position 1753 of SEQ ID NO: 1887276
acaguuggcugcccagaau

SEQ ID NO: 2459985 - RNA, 19 nt, Artificial Sequence
  Description of Artificial Sequence: Synthetic oligonucleotide
  Antisense strand to SEQ ID NO: 2459984
auucugggcagccaacugu

SEQ ID NO: 2459986 - RNA, 19 nt, Artificial Sequence
  Description of Artificial Sequence: Synthetic oligonucleotide
  Sense strand starting at position 1858 of SEQ ID NO: 1887276
cccagaugucugcagagca

SEQ ID NO: 2459987 - RNA, 19 nt, Artificial Sequence
  Description of Artificial Sequence: Synthetic oligonucleotide
  Antisense strand to SEQ ID NO: 2459986
ugcucugcagacaucuggg

SEQ ID NO: 2459988 - RNA, 19 nt, Artificial Sequence
  Description of Artificial Sequence: Synthetic oligonucleotide
  Sense strand starting at position 2887 of SEQ ID NO: 1887276
cucacuugugcagguguaa

SEQ ID NO: 2459989 - RNA, 19 nt, Artificial Sequence
  Description of Artificial Sequence: Synthetic oligonucleotide
  Antisense strand to SEQ ID NO: 2459988
uuacaccugcacaagugag

SEQ ID NO: 2459990 - RNA, 19 nt, Artificial Sequence
  Description of Artificial Sequence: Synthetic oligonucleotide
  Sense strand starting at position 2919 of SEQ ID NO: 1887276
gcgaguucaggcuggucaa

SEQ ID NO: 2459991 - RNA, 19 nt, Artificial Sequence
  Description of Artificial Sequence: Synthetic oligonucleotide
  Antisense strand to SEQ ID NO: 2459990
uugaccagccugaacucgc

SEQ ID NO: 2459992 - RNA, 19 nt, Artificial Sequence
  Description of Artificial Sequence: Synthetic oligonucleotide
  Sense strand starting at position 2920 of SEQ ID NO: 1887276
cgaguucaggcuggucaaa

SEQ ID NO: 2459993 - RNA, 19 nt, Artificial Sequence
  Description of Artificial Sequence: Synthetic oligonucleotide
  Antisense strand to SEQ ID NO: 2459992
uuugaccagccugaacucg

SEQ ID NO: 2459994 - RNA, 19 nt, Artificial Sequence
  Description of Artificial Sequence: Synthetic oligonucleotide
  Sense strand starting at position 3233 of SEQ ID NO: 1887276
gcggcuuucgagaggcgaa

SEQ ID NO: 2459995 - RNA, 19 nt, Artificial Sequence
  Description of Artificial Sequence: Synthetic oligonucleotide
  Antisense strand to SEQ ID NO: 2459994
uucgccucucgaaagccgc

SEQ ID NO: 2459996 - RNA, 19 nt, Artificial Sequence
  Description of Artificial Sequence: Synthetic oligonucleotide
  Sense strand starting at position 3234 of SEQ ID NO: 1887276
cggcuuucgagaggcgaaa

SEQ ID NO: 2459997 - RNA, 19 nt, Artificial Sequence
  Description of Artificial Sequence: Synthetic oligonucleotide
  Antisense strand to SEQ ID NO: 2459996
uuucgccucucgaaagccg

SEQ ID NO: 2459998 - RNA, 19 nt, Artificial Sequence
  Description of Artificial Sequence: Synthetic oligonucleotide
  Sense strand starting at position 3245 of SEQ ID NO: 1887276
aggcgaaacugucuuccuu

SEQ ID NO: 2459999 - RNA, 19 nt, Artificial Sequence
  Description of Artificial Sequence: Synthetic oligonucleotide
  Antisense strand to SEQ ID NO: 2459998
aaggaagacaguuucgccu

SEQ ID NO: 2460000 - RNA, 19 nt, Artificial Sequence
  Description of Artificial Sequence: Synthetic oligonucleotide
  Sense strand starting at position 3247 of SEQ ID NO: 1887276
gcgaaacugucuuccuugu

SEQ ID NO: 2460001 - RNA, 19 nt, Artificial Sequence
  Description of Artificial Sequence: Synthetic oligonucleotide
  Antisense strand to SEQ ID NO: 2460000
acaaggaagacaguuucgc

SEQ ID NO: 2460002 - RNA, 19 nt, Artificial Sequence
  Description of Artificial Sequence: Synthetic oligonucleotide
  Sense strand starting at position 3517 of SEQ ID NO: 1887276
agccuuucuccugagaugu

SEQ ID NO: 2460003 - RNA, 19 nt, Artificial Sequence
  Description of Artificial Sequence: Synthetic oligonucleotide
  Antisense strand to SEQ ID NO: 2460002
acaucucaggagaaaggcu

SEQ ID NO: 2460004 - RNA, 19 nt, Artificial Sequence
  Description of Artificial Sequence: Synthetic oligonucleotide
  Sense strand starting at position 3519 of SEQ ID NO: 1887276
ccuuucuccugagauguau

SEQ ID NO: 2460005 - RNA, 19 nt, Artificial Sequence
  Description of Artificial Sequence: Synthetic oligonucleotide
  Antisense strand to SEQ ID NO: 2460004
auacaucucaggagaaagg

SEQ ID NO: 2460006 - RNA, 19 nt, Artificial Sequence
  Description of Artificial Sequence: Synthetic oligonucleotide
  Sense strand starting at position 3635 of SEQ ID NO: 1887276
gcggucaagugucagcaau

SEQ ID NO: 2460007 - RNA, 19 nt, Artificial Sequence
  Description of Artificial Sequence: Synthetic oligonucleotide
  Antisense strand to SEQ ID NO: 2460006
auugcugacacuugaccgc

SEQ ID NO: 2460008 - RNA, 19 nt, Artificial Sequence
  Description of Artificial Sequence: Synthetic oligonucleotide
  Sense strand starting at position 3637 of SEQ ID NO: 1887276
ggucaagugucagcaaugu

SEQ ID NO: 2460009 - RNA, 19 nt, Artificial Sequence
  Description of Artificial Sequence: Synthetic oligonucleotide
  Antisense strand to SEQ ID NO: 2460008
acauugcugacacuugacc

SEQ ID NO: 2460010 - RNA, 19 nt, Artificial Sequence
  Description of Artificial Sequence: Synthetic oligonucleotide
  Sense strand starting at position 3646 of SEQ ID NO: 1887276
ucagcaaugucguggugua

SEQ ID NO: 2460011 - RNA, 19 nt, Artificial Sequence
  Description of Artificial Sequence: Synthetic oligonucleotide
  Antisense strand to SEQ ID NO: 2460010
uacaccacgacauugcuga

SEQ ID NO: 2460012 - RNA, 19 nt, Artificial Sequence
  Description of Artificial Sequence: Synthetic oligonucleotide
  Sense strand starting at position 3647 of SEQ ID NO: 1887276
cagcaaugucgugguguag

SEQ ID NO: 2460013 - RNA, 19 nt, Artificial Sequence
  Description of Artificial Sequence: Synthetic oligonucleotide
  Antisense strand to SEQ ID NO: 2460012
cuacaccacgacauugcug

SEQ ID NO: 2460014 - RNA, 19 nt, Artificial Sequence
  Description of Artificial Sequence: Synthetic oligonucleotide
  Sense strand starting at position 3765 of SEQ ID NO: 1887276
ucuccuuccucucguagau

SEQ ID NO: 2460015 - RNA, 19 nt, Artificial Sequence
  Description of Artificial Sequence: Synthetic oligonucleotide
  Antisense strand to SEQ ID NO: 2460014
aucuacgagaggaaggaga

SEQ ID NO: 2460016 - RNA, 19 nt, Artificial Sequence
  Description of Artificial Sequence: Synthetic oligonucleotide
  Sense strand starting at position 152 of SEQ ID NO: 1887277
guucuagauguuugguaca

SEQ ID NO: 2460017 - RNA, 19 nt, Artificial Sequence
  Description of Artificial Sequence: Synthetic oligonucleotide
  Antisense strand to SEQ ID NO: 2460016
uguaccaaacaucuagaac

SEQ ID NO: 2460018 - RNA, 19 nt, Artificial Sequence
  Description of Artificial Sequence: Synthetic oligonucleotide
  Sense strand starting at position 154 of SEQ ID NO: 1887277
ucuagauguuugguacagu

SEQ ID NO: 2460019 - RNA, 19 nt, Artificial Sequence
  Description of Artificial Sequence: Synthetic oligonucleotide
  Antisense strand to SEQ ID NO: 2460018
acuguaccaaacaucuaga

SEQ ID NO: 2460020 - RNA, 19 nt, Artificial Sequence
  Description of Artificial Sequence: Synthetic oligonucleotide
  Sense strand starting at position 205 of SEQ ID NO: 1887277
gcuucuagaacacgugaaa

SEQ ID NO: 2460021 - RNA, 19 nt, Artificial Sequence
  Description of Artificial Sequence: Synthetic oligonucleotide
  Antisense strand to SEQ ID NO: 2460020
uuucacguguucuagaagc

SEQ ID NO: 2460022 - RNA, 19 nt, Artificial Sequence
  Description of Artificial Sequence: Synthetic oligonucleotide
  Sense strand starting at position 255 of SEQ ID NO: 1887277
aggauauccugucuaguuu

SEQ ID NO: 2460023 - RNA, 19 nt, Artificial Sequence
  Description of Artificial Sequence: Synthetic oligonucleotide
  Antisense strand to SEQ ID NO: 2460022
aaacuagacaggauauccu

SEQ ID NO: 2460024 - RNA, 19 nt, Artificial Sequence
  Description of Artificial Sequence: Synthetic oligonucleotide
  Sense strand starting at position 262 of SEQ ID NO: 1887277
ccugucuaguuucuugaaa

SEQ ID NO: 2460025 - RNA, 19 nt, Artificial Sequence
  Description of Artificial Sequence: Synthetic oligonucleotide
  Antisense strand to SEQ ID NO: 2460024
uuucaagaaacuagacagg

SEQ ID NO: 2460026 - RNA, 19 nt, Artificial Sequence
  Description of Artificial Sequence: Synthetic oligonucleotide
  Sense strand starting at position 263 of SEQ ID NO: 1887277
cugucuaguuucuugaaau

SEQ ID NO: 2460027 - RNA, 19 nt, Artificial Sequence
  Description of Artificial Sequence: Synthetic oligonucleotide
  Antisense strand to SEQ ID NO: 2460026
auuucaagaaacuagacag

SEQ ID NO: 2460028 - RNA, 19 nt, Artificial Sequence
  Description of Artificial Sequence: Synthetic oligonucleotide
  Sense strand starting at position 274 of SEQ ID NO: 1887277
cuugaaauuucugugcuua

SEQ ID NO: 2460029 - RNA, 19 nt, Artificial Sequence
  Description of Artificial Sequence: Synthetic oligonucleotide
  Antisense strand to SEQ ID NO: 2460028
uaagcacagaaauuucaag

SEQ ID NO: 2460030 - RNA, 19 nt, Artificial Sequence
  Description of Artificial Sequence: Synthetic oligonucleotide
  Sense strand starting at position 282 of SEQ ID NO: 1887277
uucugugcuuaauuagaaa

SEQ ID NO: 2460031 - RNA, 19 nt, Artificial Sequence
  Description of Artificial Sequence: Synthetic oligonucleotide
  Antisense strand to SEQ ID NO: 2460030
uuucuaauuaagcacagaa

SEQ ID NO: 2460032 - RNA, 19 nt, Artificial Sequence
  Description of Artificial Sequence: Synthetic oligonucleotide
  Sense strand starting at position 1179 of SEQ ID NO: 1887277
ugcuaccugugaguaauau

SEQ ID NO: 2460033 - RNA, 19 nt, Artificial Sequence
  Description of Artificial Sequence: Synthetic oligonucleotide
  Antisense strand to SEQ ID NO: 2460032
auauuacucacagguagca

SEQ ID NO: 2460034 - RNA, 19 nt, Artificial Sequence
  Description of Artificial Sequence: Synthetic oligonucleotide
  Sense strand starting at position 1180 of SEQ ID NO: 1887277
gcuaccugugaguaauauu

SEQ ID NO: 2460035 - RNA, 19 nt, Artificial Sequence
  Description of Artificial Sequence: Synthetic oligonucleotide
  Antisense strand to SEQ ID NO: 2460034
aauauuacucacagguagc

SEQ ID NO: 2460036 - RNA, 19 nt, Artificial Sequence
  Description of Artificial Sequence: Synthetic oligonucleotide
  Sense strand starting at position 1219 of SEQ ID NO: 1887277
gauuccacucccgauguaa

SEQ ID NO: 2460037 - RNA, 19 nt, Artificial Sequence
  Description of Artificial Sequence: Synthetic oligonucleotide
  Antisense strand to SEQ ID NO: 2460036
uuacaucgggaguggaauc

SEQ ID NO: 2460038 - RNA, 19 nt, Artificial Sequence
  Description of Artificial Sequence: Synthetic oligonucleotide
  Sense strand starting at position 1221 of SEQ ID NO: 1887277
uuccacucccgauguaauu

SEQ ID NO: 2460039 - RNA, 19 nt, Artificial Sequence
  Description of Artificial Sequence: Synthetic oligonucleotide
  Antisense strand to SEQ ID NO: 2460038
aauuacaucgggaguggaa

SEQ ID NO: 2460040 - RNA, 19 nt, Artificial Sequence
  Description of Artificial Sequence: Synthetic oligonucleotide
  Sense strand starting at position 1230 of SEQ ID NO: 1887277
cgauguaauuucguguauu

SEQ ID NO: 2460041 - RNA, 19 nt, Artificial Sequence
  Description of Artificial Sequence: Synthetic oligonucleotide
  Antisense strand to SEQ ID NO: 2460040
aauacacgaaauuacaucg

SEQ ID NO: 2460042 - RNA, 19 nt, Artificial Sequence
  Description of Artificial Sequence: Synthetic oligonucleotide
  Sense strand starting at position 1231 of SEQ ID NO: 1887277
gauguaauuucguguauuu

SEQ ID NO: 2460043 - RNA, 19 nt, Artificial Sequence
  Description of Artificial Sequence: Synthetic oligonucleotide
  Antisense strand to SEQ ID NO: 2460042
aaauacacgaaauuacauc

SEQ ID NO: 2460044 - RNA, 19 nt, Artificial Sequence
  Description of Artificial Sequence: Synthetic oligonucleotide
  Sense strand starting at position 1402 of SEQ ID NO: 1887277
uccagcaagcccuagaaau

SEQ ID NO: 2460045 - RNA, 19 nt, Artificial Sequence
  Description of Artificial Sequence: Synthetic oligonucleotide
  Antisense strand to SEQ ID NO: 2460044
auuucuagggcuugcugga

SEQ ID NO: 2460046 - RNA, 19 nt, Artificial Sequence
  Description of Artificial Sequence: Synthetic oligonucleotide
  Sense strand starting at position 1435 of SEQ ID NO: 1887277
guguguagacauggacaca

SEQ ID NO: 2460047 - RNA, 19 nt, Artificial Sequence
  Description of Artificial Sequence: Synthetic oligonucleotide
  Antisense strand to SEQ ID NO: 2460046
uguguccaugucuacacac

SEQ ID NO: 2460048 - RNA, 19 nt, Artificial Sequence
  Description of Artificial Sequence: Synthetic oligonucleotide
  Sense strand starting at position 2390 of SEQ ID NO: 1887277
gggcuguguggagaaguga

SEQ ID NO: 2460049 - RNA, 19 nt, Artificial Sequence
  Description of Artificial Sequence: Synthetic oligonucleotide
  Antisense strand to SEQ ID NO: 2460048
ucacuucuccacacagccc

SEQ ID NO: 2460050 - RNA, 19 nt, Artificial Sequence
  Description of Artificial Sequence: Synthetic oligonucleotide
  Sense strand starting at position 3109 of SEQ ID NO: 1887277
gggagagguugcucuucca

SEQ ID NO: 2460051 - RNA, 19 nt, Artificial Sequence
  Description of Artificial Sequence: Synthetic oligonucleotide
  Antisense strand to SEQ ID NO: 2460050
uggaagagcaaccucuccc

SEQ ID NO: 2460052 - RNA, 19 nt, Artificial Sequence
  Description of Artificial Sequence: Synthetic oligonucleotide
  Sense strand starting at position 3112 of SEQ ID NO: 1887277
agagguugcucuuccauuu

SEQ ID NO: 2460053 - RNA, 19 nt, Artificial Sequence
  Description of Artificial Sequence: Synthetic oligonucleotide
  Antisense strand to SEQ ID NO: 2460052
aaauggaagagcaaccucu

SEQ ID NO: 2460054 - RNA, 19 nt, Artificial Sequence
  Description of Artificial Sequence: Synthetic oligonucleotide
  Sense strand starting at position 3230 of SEQ ID NO: 1887277
gagggcugugagcagaaau

SEQ ID NO: 2460055 - RNA, 19 nt, Artificial Sequence
  Description of Artificial Sequence: Synthetic oligonucleotide
  Antisense strand to SEQ ID NO: 2460054
auuucugcucacagcccuc

SEQ ID NO: 2460056 - RNA, 19 nt, Artificial Sequence
  Description of Artificial Sequence: Synthetic oligonucleotide
  Sense strand starting at position 3252 of SEQ ID NO: 1887277
augagaucuaacuggcugu

SEQ ID NO: 2460057 - RNA, 19 nt, Artificial Sequence
  Description of Artificial Sequence: Synthetic oligonucleotide
  Antisense strand to SEQ ID NO: 2460056
acagccaguuagaucucau

SEQ ID NO: 2460058 - RNA, 19 nt, Artificial Sequence
  Description of Artificial Sequence: Synthetic oligonucleotide
  Sense strand starting at position 3253 of SEQ ID NO: 1887277
ugagaucuaacuggcuguu

SEQ ID NO: 2460059 - RNA, 19 nt, Artificial Sequence
  Description of Artificial Sequence: Synthetic oligonucleotide
  Antisense strand to SEQ ID NO: 2460058
aacagccaguuagaucuca

SEQ ID NO: 2460060 - RNA, 19 nt, Artificial Sequence
  Description of Artificial Sequence: Synthetic oligonucleotide
  Sense strand starting at position 3255 of SEQ ID NO: 1887277
agaucuaacuggcuguuua

SEQ ID NO: 2460061 - RNA, 19 nt, Artificial Sequence
  Description of Artificial Sequence: Synthetic oligonucleotide
  Antisense strand to SEQ ID NO: 2460060
uaaacagccaguuagaucu

SEQ ID NO: 2460062 - RNA, 19 nt, Artificial Sequence
  Description of Artificial Sequence: Synthetic oligonucleotide
  Sense strand starting at position 3256 of SEQ ID NO: 1887277
gaucuaacuggcuguuuau

SEQ ID NO: 2460063 - RNA, 19 nt, Artificial Sequence
  Description of Artificial Sequence: Synthetic oligonucleotide
  Antisense strand to SEQ ID NO: 2460062
auaaacagccaguuagauc

SEQ ID NO: 2460064 - RNA, 19 nt, Artificial Sequence
  Description of Artificial Sequence: Synthetic oligonucleotide
  Sense strand starting at position 3259 of SEQ ID NO: 1887277
cuaacuggcuguuuaugua

SEQ ID NO: 2460065 - RNA, 19 nt, Artificial Sequence
  Description of Artificial Sequence: Synthetic oligonucleotide
  Antisense strand to SEQ ID NO: 2460064
uacauaaacagccaguuag

SEQ ID NO: 2460066 - RNA, 19 nt, Artificial Sequence
  Description of Artificial Sequence: Synthetic oligonucleotide
  Sense strand starting at position 3358 of SEQ ID NO: 1887277
ucaagcaauugggcuuaau

SEQ ID NO: 2460067 - RNA, 19 nt, Artificial Sequence
  Description of Artificial Sequence: Synthetic oligonucleotide
  Antisense strand to SEQ ID NO: 2460066
auuaagcccaauugcuuga

SEQ ID NO: 2460068 - RNA, 19 nt, Artificial Sequence
  Description of Artificial Sequence: Synthetic oligonucleotide
  Sense strand starting at position 3408 of SEQ ID NO: 1887277
cuuggaaaguguuuguagu

SEQ ID NO: 2460069 - RNA, 19 nt, Artificial Sequence
  Description of Artificial Sequence: Synthetic oligonucleotide
  Antisense strand to SEQ ID NO: 2460068
acuacaaacacuuuccaag

SEQ ID NO: 2460070 - RNA, 19 nt, Artificial Sequence
  Description of Artificial Sequence: Synthetic oligonucleotide
  Sense strand starting at position 3409 of SEQ ID NO: 1887277
uuggaaaguguuuguaguu

SEQ ID NO: 2460071 - RNA, 19 nt, Artificial Sequence
  Description of Artificial Sequence: Synthetic oligonucleotide
  Antisense strand to SEQ ID NO: 2460070
aacuacaaacacuuuccaa

SEQ ID NO: 2460072 - RNA, 19 nt, Artificial Sequence
  Description of Artificial Sequence: Synthetic oligonucleotide
  Sense strand starting at position 3410 of SEQ ID NO: 1887277
uggaaaguguuuguaguuu

SEQ ID NO: 2460073 - RNA, 19 nt, Artificial Sequence
  Description of Artificial Sequence: Synthetic oligonucleotide
  Antisense strand to SEQ ID NO: 2460072
aaacuacaaacacuuucca

SEQ ID NO: 2460074 - RNA, 19 nt, Artificial Sequence
  Description of Artificial Sequence: Synthetic oligonucleotide
  Sense strand starting at position 3450 of SEQ ID NO: 1887277
uucccuuugucaccacgaa

SEQ ID NO: 2460075 - RNA, 19 nt, Artificial Sequence
  Description of Artificial Sequence: Synthetic oligonucleotide
  Antisense strand to SEQ ID NO: 2460074
uucguggugacaaagggaa

SEQ ID NO: 2460076 - RNA, 19 nt, Artificial Sequence
  Description of Artificial Sequence: Synthetic oligonucleotide
  Sense strand starting at position 3451 of SEQ ID NO: 1887277
ucccuuugucaccacgaau

SEQ ID NO: 2460077 - RNA, 19 nt, Artificial Sequence
  Description of Artificial Sequence: Synthetic oligonucleotide
  Antisense strand to SEQ ID NO: 2460076
auucguggugacaaaggga

SEQ ID NO: 2460078 - RNA, 19 nt, Artificial Sequence
  Description of Artificial Sequence: Synthetic oligonucleotide
  Sense strand starting at position 3454 of SEQ ID NO: 1887277
cuuugucaccacgaauaug

SEQ ID NO: 2460079 - RNA, 19 nt, Artificial Sequence
  Description of Artificial Sequence: Synthetic oligonucleotide
  Antisense strand to SEQ ID NO: 2460078
cauauucguggugacaaag

SEQ ID NO: 2460080 - RNA, 19 nt, Artificial Sequence
  Description of Artificial Sequence: Synthetic oligonucleotide
  Sense strand starting at position 3567 of SEQ ID NO: 1887277
cuguuugcccuugaucuuu

SEQ ID NO: 2460081 - RNA, 19 nt, Artificial Sequence
  Description of Artificial Sequence: Synthetic oligonucleotide
  Antisense strand to SEQ ID NO: 2460080
aaagaucaagggcaaacag

SEQ ID NO: 2460082 - RNA, 19 nt, Artificial Sequence
  Description of Artificial Sequence: Synthetic oligonucleotide
  Sense strand starting at position 3609 of SEQ ID NO: 1887277
ccagcaaacguuuaaaggu

SEQ ID NO: 2460083 - RNA, 19 nt, Artificial Sequence
  Description of Artificial Sequence: Synthetic oligonucleotide
  Antisense strand to SEQ ID NO: 2460082
accuuuaaacguuugcugg

SEQ ID NO: 2460084 - RNA, 19 nt, Artificial Sequence
  Description of Artificial Sequence: Synthetic oligonucleotide
  Sense strand starting at position 3617 of SEQ ID NO: 1887277
cguuuaaaggucgaccuua

SEQ ID NO: 2460085 - RNA, 19 nt, Artificial Sequence
  Description of Artificial Sequence: Synthetic oligonucleotide
  Antisense strand to SEQ ID NO: 2460084
uaaggucgaccuuuaaacg

SEQ ID NO: 2460086 - RNA, 19 nt, Artificial Sequence
  Description of Artificial Sequence: Synthetic oligonucleotide
  Sense strand starting at position 3622 of SEQ ID NO: 1887277
aaaggucgaccuuaccaua

SEQ ID NO: 2460087 - RNA, 19 nt, Artificial Sequence
  Description of Artificial Sequence: Synthetic oligonucleotide
  Antisense strand to SEQ ID NO: 2460086
uaugguaaggucgaccuuu

SEQ ID NO: 2460088 - RNA, 19 nt, Artificial Sequence
  Description of Artificial Sequence: Synthetic oligonucleotide
  Sense strand starting at position 3719 of SEQ ID NO: 1887277
cucagaaacccuggccuua

SEQ ID NO: 2460089 - RNA, 19 nt, Artificial Sequence
  Description of Artificial Sequence: Synthetic oligonucleotide
  Antisense strand to SEQ ID NO: 2460088
uaaggccaggguuucugag

SEQ ID NO: 2460090 - RNA, 19 nt, Artificial Sequence
  Description of Artificial Sequence: Synthetic oligonucleotide
  Sense strand starting at position 3880 of SEQ ID NO: 1887277
auacuuaaggccgaaacua

SEQ ID NO: 2460091 - RNA, 19 nt, Artificial Sequence
  Description of Artificial Sequence: Synthetic oligonucleotide
  Antisense strand to SEQ ID NO: 2460090
uaguuucggccuuaaguau

SEQ ID NO: 2460092 - RNA, 19 nt, Artificial Sequence
  Description of Artificial Sequence: Synthetic oligonucleotide
  Sense strand starting at position 3920 of SEQ ID NO: 1887277
auuauuuacuaggaugaag

SEQ ID NO: 2460093 - RNA, 19 nt, Artificial Sequence
  Description of Artificial Sequence: Synthetic oligonucleotide
  Antisense strand to SEQ ID NO: 2460092
cuucauccuaguaaauaau

SEQ ID NO: 2460094 - RNA, 19 nt, Artificial Sequence
  Description of Artificial Sequence: Synthetic oligonucleotide
  Sense strand starting at position 3946 of SEQ ID NO: 1887277
aguacucagugucuuuaau

SEQ ID NO: 2460095 - RNA, 19 nt, Artificial Sequence
  Description of Artificial Sequence: Synthetic oligonucleotide
  Antisense strand to SEQ ID NO: 2460094
auuaaagacacugaguacu

SEQ ID NO: 2460096 - RNA, 19 nt, Artificial Sequence
  Description of Artificial Sequence: Synthetic oligonucleotide
  Sense strand starting at position 265 of SEQ ID NO: 1887278
ucaauauucccacgguuga

SEQ ID NO: 2460097 - RNA, 19 nt, Artificial Sequence
  Description of Artificial Sequence: Synthetic oligonucleotide
  Antisense strand to SEQ ID NO: 2460096
ucaaccgugggaauauuga

SEQ ID NO: 2460098 - RNA, 19 nt, Artificial Sequence
  Description of Artificial Sequence: Synthetic oligonucleotide
  Sense strand starting at position 269 of SEQ ID NO: 1887278
uauucccacgguugagaaa

SEQ ID NO: 2460099 - RNA, 19 nt, Artificial Sequence
  Description of Artificial Sequence: Synthetic oligonucleotide
  Antisense strand to SEQ ID NO: 2460098
uuucucaaccgugggaaua

SEQ ID NO: 2460100 - RNA, 19 nt, Artificial Sequence
  Description of Artificial Sequence: Synthetic oligonucleotide
  Sense strand starting at position 867 of SEQ ID NO: 1887278
gugaaugcacaaggaauaa

SEQ ID NO: 2460101 - RNA, 19 nt, Artificial Sequence
  Description of Artificial Sequence: Synthetic oligonucleotide
  Antisense strand to SEQ ID NO: 2460100
uuauuccuugugcauucac

SEQ ID NO: 2460102 - RNA, 19 nt, Artificial Sequence
  Description of Artificial Sequence: Synthetic oligonucleotide
  Sense strand starting at position 956 of SEQ ID NO: 1887278
aacucuugaguugagcaaa

SEQ ID NO: 2460103 - RNA, 19 nt, Artificial Sequence
  Description of Artificial Sequence: Synthetic oligonucleotide
  Antisense strand to SEQ ID NO: 2460102
uuugcucaacucaagaguu

SEQ ID NO: 2460104 - RNA, 19 nt, Artificial Sequence
  Description of Artificial Sequence: Synthetic oligonucleotide
  Sense strand starting at position 959 of SEQ ID NO: 1887278
ucuugaguugagcaaacau

SEQ ID NO: 2460105 - RNA, 19 nt, Artificial Sequence
  Description of Artificial Sequence: Synthetic oligonucleotide
  Antisense strand to SEQ ID NO: 2460104
auguuugcucaacucaaga

SEQ ID NO: 2460106 - RNA, 19 nt, Artificial Sequence
  Description of Artificial Sequence: Synthetic oligonucleotide
  Sense strand starting at position 1121 of SEQ ID NO: 1887278
ugacaacuuugaucccagu

SEQ ID NO: 2460107 - RNA, 19 nt, Artificial Sequence
  Description of Artificial Sequence: Synthetic oligonucleotide
  Antisense strand to SEQ ID NO: 2460106
acugggaucaaaguuguca

SEQ ID NO: 2460108 - RNA, 19 nt, Artificial Sequence
  Description of Artificial Sequence: Synthetic oligonucleotide
  Sense strand starting at position 1192 of SEQ ID NO: 1887278
ccauccuuccugcagagau

SEQ ID NO: 2460109 - RNA, 19 nt, Artificial Sequence
  Description of Artificial Sequence: Synthetic oligonucleotide
  Antisense strand to SEQ ID NO: 2460108
aucucugcaggaaggaugg

SEQ ID NO: 2460110 - RNA, 19 nt, Artificial Sequence
  Description of Artificial Sequence: Synthetic oligonucleotide
  Sense strand starting at position 1194 of SEQ ID NO: 1887278
auccuuccugcagagauga

SEQ ID NO: 2460111 - RNA, 19 nt, Artificial Sequence
  Description of Artificial Sequence: Synthetic oligonucleotide
  Antisense strand to SEQ ID NO: 2460110
ucaucucugcaggaaggau

SEQ ID NO: 2460112 - RNA, 19 nt, Artificial Sequence
  Description of Artificial Sequence: Synthetic oligonucleotide
  Sense strand starting at position 1210 of SEQ ID NO: 1887278
ugaggaggguguuaaagaa

SEQ ID NO: 2460113 - RNA, 19 nt, Artificial Sequence
  Description of Artificial Sequence: Synthetic oligonucleotide
  Antisense strand to SEQ ID NO: 2460112
uucuuuaacacccuccuca

SEQ ID NO: 2460114 - RNA, 19 nt, Artificial Sequence
  Description of Artificial Sequence: Synthetic oligonucleotide
  Sense strand starting at position 1231 of SEQ ID NO: 1887278
ggagcagaaucucucccaa

SEQ ID NO: 2460115 - RNA, 19 nt, Artificial Sequence
  Description of Artificial Sequence: Synthetic oligonucleotide
  Antisense strand to SEQ ID NO: 2460114
uugggagagauucugcucc

SEQ ID NO: 2460116 - RNA, 19 nt, Artificial Sequence
  Description of Artificial Sequence: Synthetic oligonucleotide
  Sense strand starting at position 1233 of SEQ ID NO: 1887278
agcagaaucucucccaaag

SEQ ID NO: 2460117 - RNA, 19 nt, Artificial Sequence
  Description of Artificial Sequence: Synthetic oligonucleotide
  Antisense strand to SEQ ID NO: 2460116
cuuugggagagauucugcu

SEQ ID NO: 2460118 - RNA, 19 nt, Artificial Sequence
  Description of Artificial Sequence: Synthetic oligonucleotide
  Sense strand starting at position 1307 of SEQ ID NO: 1887278
guagaagccugguugagua

SEQ ID NO: 2460119 - RNA, 19 nt, Artificial Sequence
  Description of Artificial Sequence: Synthetic oligonucleotide
  Antisense strand to SEQ ID NO: 2460118
uacucaaccaggcuucuac

SEQ ID NO: 2460120 - RNA, 19 nt, Artificial Sequence
  Description of Artificial Sequence: Synthetic oligonucleotide
  Sense strand starting at position 1309 of SEQ ID NO: 1887278
agaagccugguugaguaaa

SEQ ID NO: 2460121 - RNA, 19 nt, Artificial Sequence
  Description of Artificial Sequence: Synthetic oligonucleotide
  Antisense strand to SEQ ID NO: 2460120
uuuacucaaccaggcuucu

SEQ ID NO: 2460122 - RNA, 19 nt, Artificial Sequence
  Description of Artificial Sequence: Synthetic oligonucleotide
  Sense strand starting at position 1311 of SEQ ID NO: 1887278
aagccugguugaguaaaga

SEQ ID NO: 2460123 - RNA, 19 nt, Artificial Sequence
  Description of Artificial Sequence: Synthetic oligonucleotide
  Antisense strand to SEQ ID NO: 2460122
ucuuuacucaaccaggcuu

SEQ ID NO: 2460124 - RNA, 19 nt, Artificial Sequence
  Description of Artificial Sequence: Synthetic oligonucleotide
  Sense strand starting at position 1321 of SEQ ID NO: 1887278
gaguaaagacaucgcccau

SEQ ID NO: 2460125 - RNA, 19 nt, Artificial Sequence
  Description of Artificial Sequence: Synthetic oligonucleotide
  Antisense strand to SEQ ID NO: 2460124
augggcgaugucuuuacuc

SEQ ID NO: 2460126 - RNA, 19 nt, Artificial Sequence
  Description of Artificial Sequence: Synthetic oligonucleotide
  Sense strand starting at position 1606 of SEQ ID NO: 1887278
ucccguacaucagcuuaua

SEQ ID NO: 2460127 - RNA, 19 nt, Artificial Sequence
  Description of Artificial Sequence: Synthetic oligonucleotide
  Antisense strand to SEQ ID NO: 2460126
uauaagcugauguacggga

SEQ ID NO: 2460128 - RNA, 19 nt, Artificial Sequence
  Description of Artificial Sequence: Synthetic oligonucleotide
  Sense strand starting at position 1618 of SEQ ID NO: 1887278
gcuuauacuccuggaggga

SEQ ID NO: 2460129 - RNA, 19 nt, Artificial Sequence
  Description of Artificial Sequence: Synthetic oligonucleotide
  Antisense strand to SEQ ID NO: 2460128
ucccuccaggaguauaagc

SEQ ID NO: 2460130 - RNA, 19 nt, Artificial Sequence
  Description of Artificial Sequence: Synthetic oligonucleotide
  Sense strand starting at position 1724 of SEQ ID NO: 1887278
gacuauagguguuuggaga

SEQ ID NO: 2460131 - RNA, 19 nt, Artificial Sequence
  Description of Artificial Sequence: Synthetic oligonucleotide
  Antisense strand to SEQ ID NO: 2460130
ucuccaaacaccuauaguc

SEQ ID NO: 2460132 - RNA, 19 nt, Artificial Sequence
  Description of Artificial Sequence: Synthetic oligonucleotide
  Sense strand starting at position 1725 of SEQ ID NO: 1887278
acuauagguguuuggagau

SEQ ID NO: 2460133 - RNA, 19 nt, Artificial Sequence
  Description of Artificial Sequence: Synthetic oligonucleotide
  Antisense strand to SEQ ID NO: 2460132
aucuccaaacaccuauagu

SEQ ID NO: 2460134 - RNA, 19 nt, Artificial Sequence
  Description of Artificial Sequence: Synthetic oligonucleotide
  Sense strand starting at position 1728 of SEQ ID NO: 1887278
auagguguuuggagaugag

SEQ ID NO: 2460135 - RNA, 19 nt, Artificial Sequence
  Description of Artificial Sequence: Synthetic oligonucleotide
  Antisense strand to SEQ ID NO: 2460134
cucaucuccaaacaccuau

SEQ ID NO: 2460136 - RNA, 19 nt, Artificial Sequence
  Description of Artificial Sequence: Synthetic oligonucleotide
  Sense strand starting at position 1778 of SEQ ID NO: 1887278
ucaccuccuccuugggaau

SEQ ID NO: 2460137 - RNA, 19 nt, Artificial Sequence
  Description of Artificial Sequence: Synthetic oligonucleotide
  Antisense strand to SEQ ID NO: 2460136
auucccaaggaggagguga

SEQ ID NO: 2460138 - RNA, 19 nt, Artificial Sequence
  Description of Artificial Sequence: Synthetic oligonucleotide
  Sense strand starting at position 3478 of SEQ ID NO: 1887278
aagcuuugaugagauuuga

SEQ ID NO: 2460139 - RNA, 19 nt, Artificial Sequence
  Description of Artificial Sequence: Synthetic oligonucleotide
  Antisense strand to SEQ ID NO: 2460138
ucaaaucucaucaaagcuu

SEQ ID NO: 2460140 - RNA, 19 nt, Artificial Sequence
  Description of Artificial Sequence: Synthetic oligonucleotide
  Sense strand starting at position 3588 of SEQ ID NO: 1887278
uuaugaaacuucccagugu

SEQ ID NO: 2460141 - RNA, 19 nt, Artificial Sequence
  Description of Artificial Sequence: Synthetic oligonucleotide
  Antisense strand to SEQ ID NO: 2460140
acacugggaaguuucauaa

SEQ ID NO: 2460142 - RNA, 19 nt, Artificial Sequence
  Description of Artificial Sequence: Synthetic oligonucleotide
  Sense strand starting at position 3618 of SEQ ID NO: 1887278
agacaucucugcuccgagu

SEQ ID NO: 2460143 - RNA, 19 nt, Artificial Sequence
  Description of Artificial Sequence: Synthetic oligonucleotide
  Antisense strand to SEQ ID NO: 2460142
acucggagcagagaugucu

SEQ ID NO: 2460144 - RNA, 19 nt, Artificial Sequence
  Description of Artificial Sequence: Synthetic oligonucleotide
  Sense strand starting at position 3657 of SEQ ID NO: 1887278
guagguuggugagcuauuu

SEQ ID NO: 2460145 - RNA, 19 nt, Artificial Sequence
  Description of Artificial Sequence: Synthetic oligonucleotide
  Antisense strand to SEQ ID NO: 2460144
aaauagcucaccaaccuac

SEQ ID NO: 2460146 - RNA, 19 nt, Artificial Sequence
  Description of Artificial Sequence: Synthetic oligonucleotide
  Sense strand starting at position 3665 of SEQ ID NO: 1887278
gugagcuauuucccgugca

SEQ ID NO: 2460147 - RNA, 19 nt, Artificial Sequence
  Description of Artificial Sequence: Synthetic oligonucleotide
  Antisense strand to SEQ ID NO: 2460146
ugcacgggaaauagcucac

SEQ ID NO: 2460148 - RNA, 19 nt, Artificial Sequence
  Description of Artificial Sequence: Synthetic oligonucleotide
  Sense strand starting at position 3691 of SEQ ID NO: 1887278
uggguaagguuucuugauc

SEQ ID NO: 2460149 - RNA, 19 nt, Artificial Sequence
  Description of Artificial Sequence: Synthetic oligonucleotide
  Antisense strand to SEQ ID NO: 2460148
gaucaagaaaccuuaccca

SEQ ID NO: 2460150 - RNA, 19 nt, Artificial Sequence
  Description of Artificial Sequence: Synthetic oligonucleotide
  Sense strand starting at position 3696 of SEQ ID NO: 1887278
aagguuucuugaucccaag

SEQ ID NO: 2460151 - RNA, 19 nt, Artificial Sequence
  Description of Artificial Sequence: Synthetic oligonucleotide
  Antisense strand to SEQ ID NO: 2460150
cuugggaucaagaaaccuu

SEQ ID NO: 2460152 - RNA, 19 nt, Artificial Sequence
  Description of Artificial Sequence: Synthetic oligonucleotide
  Sense strand starting at position 3754 of SEQ ID NO: 1887278
agcucaacacuauguugau

SEQ ID NO: 2460153 - RNA, 19 nt, Artificial Sequence
  Description of Artificial Sequence: Synthetic oligonucleotide
  Antisense strand to SEQ ID NO: 2460152
aucaacauaguguugagcu

SEQ ID NO: 2460154 - RNA, 19 nt, Artificial Sequence
  Description of Artificial Sequence: Synthetic oligonucleotide
  Sense strand starting at position 3755 of SEQ ID NO: 1887278
gcucaacacuauguugaua

SEQ ID NO: 2460155 - RNA, 19 nt, Artificial Sequence
  Description of Artificial Sequence: Synthetic oligonucleotide
  Antisense strand to SEQ ID NO: 2460154
uaucaacauaguguugagc

SEQ ID NO: 2460156 - RNA, 19 nt, Artificial Sequence
  Description of Artificial Sequence: Synthetic oligonucleotide
  Sense strand starting at position 3768 of SEQ ID NO: 1887278
uugauaguaugguuccaac

SEQ ID NO: 2460157 - RNA, 19 nt, Artificial Sequence
  Description of Artificial Sequence: Synthetic oligonucleotide
  Antisense strand to SEQ ID NO: 2460156
guuggaaccauacuaucaa

SEQ ID NO: 2460158 - RNA, 19 nt, Artificial Sequence
  Description of Artificial Sequence: Synthetic oligonucleotide
  Sense strand starting at position 3779 of SEQ ID NO: 1887278
guuccaacuuuggcaugua

SEQ ID NO: 2460159 - RNA, 19 nt, Artificial Sequence
  Description of Artificial Sequence: Synthetic oligonucleotide
  Antisense strand to SEQ ID NO: 2460158
uacaugccaaaguuggaac

SEQ ID NO: 2460160 - RNA, 19 nt, Artificial Sequence
  Description of Artificial Sequence: Synthetic oligonucleotide
  Sense strand starting at position 3782 of SEQ ID NO: 1887278
ccaacuuuggcauguacau

SEQ ID NO: 2460161 - RNA, 19 nt, Artificial Sequence
  Description of Artificial Sequence: Synthetic oligonucleotide
  Antisense strand to SEQ ID NO: 2460160
auguacaugccaaaguugg

SEQ ID NO: 2460162 - RNA, 19 nt, Artificial Sequence
  Description of Artificial Sequence: Synthetic oligonucleotide
  Sense strand starting at position 3789 of SEQ ID NO: 1887278
uggcauguacaucauuaag

SEQ ID NO: 2460163 - RNA, 19 nt, Artificial Sequence
  Description of Artificial Sequence: Synthetic oligonucleotide
  Antisense strand to SEQ ID NO: 2460162
cuuaaugauguacaugcca

SEQ ID NO: 2460164 - RNA, 19 nt, Artificial Sequence
  Description of Artificial Sequence: Synthetic oligonucleotide
  Sense strand starting at position 3791 of SEQ ID NO: 1887278
gcauguacaucauuaagac

SEQ ID NO: 2460165 - RNA, 19 nt, Artificial Sequence
  Description of Artificial Sequence: Synthetic oligonucleotide
  Antisense strand to SEQ ID NO: 2460164
gucuuaaugauguacaugc

SEQ ID NO: 2460166 - RNA, 19 nt, Artificial Sequence
  Description of Artificial Sequence: Synthetic oligonucleotide
  Sense strand starting at position 3806 of SEQ ID NO: 1887278
agacauagcuuagucaacu

SEQ ID NO: 2460167 - RNA, 19 nt, Artificial Sequence
  Description of Artificial Sequence: Synthetic oligonucleotide
  Antisense strand to SEQ ID NO: 2460166
aguugacuaagcuaugucu

SEQ ID NO: 2460168 - RNA, 19 nt, Artificial Sequence
  Description of Artificial Sequence: Synthetic oligonucleotide
  Sense strand starting at position 3895 of SEQ ID NO: 1887278
uuaggucuuccagaguuug

SEQ ID NO: 2460169 - RNA, 19 nt, Artificial Sequence
  Description of Artificial Sequence: Synthetic oligonucleotide
  Antisense strand to SEQ ID NO: 2460168
caaacucuggaagaccuaa

SEQ ID NO: 2460170 - RNA, 19 nt, Artificial Sequence
  Description of Artificial Sequence: Synthetic oligonucleotide
  Sense strand starting at position 3949 of SEQ ID NO: 1887278
uguucuugaaucggcaaga

SEQ ID NO: 2460171 - RNA, 19 nt, Artificial Sequence
  Description of Artificial Sequence: Synthetic oligonucleotide
  Antisense strand to SEQ ID NO: 2460170
ucuugccgauucaagaaca

SEQ ID NO: 2460172 - RNA, 19 nt, Artificial Sequence
  Description of Artificial Sequence: Synthetic oligonucleotide
  Sense strand starting at position 3950 of SEQ ID NO: 1887278
guucuugaaucggcaagaa

SEQ ID NO: 2460173 - RNA, 19 nt, Artificial Sequence
  Description of Artificial Sequence: Synthetic oligonucleotide
  Antisense strand to SEQ ID NO: 2460172
uucuugccgauucaagaac

SEQ ID NO: 2460174 - RNA, 19 nt, Artificial Sequence
  Description of Artificial Sequence: Synthetic oligonucleotide
  Sense strand starting at position 3962 of SEQ ID NO: 1887278
gcaagaaucuccgcaacuc

SEQ ID NO: 2460175 - RNA, 19 nt, Artificial Sequence
  Description of Artificial Sequence: Synthetic oligonucleotide
  Antisense strand to SEQ ID NO: 2460174
gaguugcggagauucuugc

SEQ ID NO: 2460176 - RNA, 19 nt, Artificial Sequence
  Description of Artificial Sequence: Synthetic oligonucleotide
  Sense strand starting at position 215 of SEQ ID NO: 1887279
ucaauauucccacgguuga

SEQ ID NO: 2460177 - RNA, 19 nt, Artificial Sequence
  Description of Artificial Sequence: Synthetic oligonucleotide
  Antisense strand to SEQ ID NO: 2460176
ucaaccgugggaauauuga

SEQ ID NO: 2460178 - RNA, 19 nt, Artificial Sequence
  Description of Artificial Sequence: Synthetic oligonucleotide
  Sense strand starting at position 219 of SEQ ID NO: 1887279
uauucccacgguugagaaa

SEQ ID NO: 2460179 - RNA, 19 nt, Artificial Sequence
  Description of Artificial Sequence: Synthetic oligonucleotide
  Antisense strand to SEQ ID NO: 2460178
uuucucaaccgugggaaua

SEQ ID NO: 2460180 - RNA, 19 nt, Artificial Sequence
  Description of Artificial Sequence: Synthetic oligonucleotide
  Sense strand starting at position 817 of SEQ ID NO: 1887279
gugaaugcacaaggaauaa

SEQ ID NO: 2460181 - RNA, 19 nt, Artificial Sequence
  Description of Artificial Sequence: Synthetic oligonucleotide
  Antisense strand to SEQ ID NO: 2460180
uuauuccuugugcauucac

SEQ ID NO: 2460182 - RNA, 19 nt, Artificial Sequence
  Description of Artificial Sequence: Synthetic oligonucleotide
  Sense strand starting at position 906 of SEQ ID NO: 1887279
aacucuugaguugagcaaa

SEQ ID NO: 2460183 - RNA, 19 nt, Artificial Sequence
  Description of Artificial Sequence: Synthetic oligonucleotide
  Antisense strand to SEQ ID NO: 2460182
uuugcucaacucaagaguu

SEQ ID NO: 2460184 - RNA, 19 nt, Artificial Sequence
  Description of Artificial Sequence: Synthetic oligonucleotide
  Sense strand starting at position 909 of SEQ ID NO: 1887279
ucuugaguugagcaaacau

SEQ ID NO: 2460185 - RNA, 19 nt, Artificial Sequence
  Description of Artificial Sequence: Synthetic oligonucleotide
  Antisense strand to SEQ ID NO: 2460184
auguuugcucaacucaaga

SEQ ID NO: 2460186 - RNA, 19 nt, Artificial Sequence
  Description of Artificial Sequence: Synthetic oligonucleotide
  Sense strand starting at position 1071 of SEQ ID NO: 1887279
ugacaacuuugaucccagu

SEQ ID NO: 2460187 - RNA, 19 nt, Artificial Sequence
  Description of Artificial Sequence: Synthetic oligonucleotide
  Antisense strand to SEQ ID NO: 2460186
acugggaucaaaguuguca

SEQ ID NO: 2460188 - RNA, 19 nt, Artificial Sequence
  Description of Artificial Sequence: Synthetic oligonucleotide
  Sense strand starting at position 1142 of SEQ ID NO: 1887279
ccauccuuccugcagagau

SEQ ID NO: 2460189 - RNA, 19 nt, Artificial Sequence
  Description of Artificial Sequence: Synthetic oligonucleotide
  Antisense strand to SEQ ID NO: 2460188
aucucugcaggaaggaugg

SEQ ID NO: 2460190 - RNA, 19 nt, Artificial Sequence
  Description of Artificial Sequence: Synthetic oligonucleotide
  Sense strand starting at position 1144 of SEQ ID NO: 1887279
auccuuccugcagagauga

SEQ ID NO: 2460191 - RNA, 19 nt, Artificial Sequence
  Description of Artificial Sequence: Synthetic oligonucleotide
  Antisense strand to SEQ ID NO: 2460190
ucaucucugcaggaaggau

SEQ ID NO: 2460192 - RNA, 19 nt, Artificial Sequence
  Description of Artificial Sequence: Synthetic oligonucleotide
  Sense strand starting at position 1160 of SEQ ID NO: 1887279
ugaggaggguguuaaagaa

SEQ ID NO: 2460193 - RNA, 19 nt, Artificial Sequence
  Description of Artificial Sequence: Synthetic oligonucleotide
  Antisense strand to SEQ ID NO: 2460192
uucuuuaacacccuccuca

SEQ ID NO: 2460194 - RNA, 19 nt, Artificial Sequence
  Description of Artificial Sequence: Synthetic oligonucleotide
  Sense strand starting at position 1181 of SEQ ID NO: 1887279
ggagcagaaucucucccaa

SEQ ID NO: 2460195 - RNA, 19 nt, Artificial Sequence
  Description of Artificial Sequence: Synthetic oligonucleotide
  Antisense strand to SEQ ID NO: 2460194
uugggagagauucugcucc

SEQ ID NO: 2460196 - RNA, 19 nt, Artificial Sequence
  Description of Artificial Sequence: Synthetic oligonucleotide
  Sense strand starting at position 1183 of SEQ ID NO: 1887279
agcagaaucucucccaaag

SEQ ID NO: 2460197 - RNA, 19 nt, Artificial Sequence
  Description of Artificial Sequence: Synthetic oligonucleotide
  Antisense strand to SEQ ID NO: 2460196
cuuugggagagauucugcu

SEQ ID NO: 2460198 - RNA, 19 nt, Artificial Sequence
  Description of Artificial Sequence: Synthetic oligonucleotide
  Sense strand starting at position 1257 of SEQ ID NO: 1887279
guagaagccugguugagua

SEQ ID NO: 2460199 - RNA, 19 nt, Artificial Sequence
  Description of Artificial Sequence: Synthetic oligonucleotide
  Antisense strand to SEQ ID NO: 2460198
uacucaaccaggcuucuac

SEQ ID NO: 2460200 - RNA, 19 nt, Artificial Sequence
  Description of Artificial Sequence: Synthetic oligonucleotide
  Sense strand starting at position 1259 of SEQ ID NO: 1887279
agaagccugguugaguaaa

SEQ ID NO: 2460201 - RNA, 19 nt, Artificial Sequence
  Description of Artificial Sequence: Synthetic oligonucleotide
  Antisense strand to SEQ ID NO: 2460200
uuuacucaaccaggcuucu

SEQ ID NO: 2460202 - RNA, 19 nt, Artificial Sequence
  Description of Artificial Sequence: Synthetic oligonucleotide
  Sense strand starting at position 1261 of SEQ ID NO: 1887279
aagccugguugaguaaaga

SEQ ID NO: 2460203 - RNA, 19 nt, Artificial Sequence
  Description of Artificial Sequence: Synthetic oligonucleotide
  Antisense strand to SEQ ID NO: 2460202
ucuuuacucaaccaggcuu

SEQ ID NO: 2460204 - RNA, 19 nt, Artificial Sequence
  Description of Artificial Sequence: Synthetic oligonucleotide
  Sense strand starting at position 1271 of SEQ ID NO: 1887279
gaguaaagacaucgcccau

SEQ ID NO: 2460205 - RNA, 19 nt, Artificial Sequence
  Description of Artificial Sequence: Synthetic oligonucleotide
  Antisense strand to SEQ ID NO: 2460204
augggcgaugucuuuacuc

SEQ ID NO: 2460206 - RNA, 19 nt, Artificial Sequence
  Description of Artificial Sequence: Synthetic oligonucleotide
  Sense strand starting at position 1556 of SEQ ID NO: 1887279
ucccguacaucagcuuaua

SEQ ID NO: 2460207 - RNA, 19 nt, Artificial Sequence
  Description of Artificial Sequence: Synthetic oligonucleotide
  Antisense strand to SEQ ID NO: 2460206
uauaagcugauguacggga

SEQ ID NO: 2460208 - RNA, 19 nt, Artificial Sequence
  Description of Artificial Sequence: Synthetic oligonucleotide
  Sense strand starting at position 1568 of SEQ ID NO: 1887279
gcuuauacuccuggaggga

SEQ ID NO: 2460209 - RNA, 19 nt, Artificial Sequence
  Description of Artificial Sequence: Synthetic oligonucleotide
  Antisense strand to SEQ ID NO: 2460208
ucccuccaggaguauaagc

SEQ ID NO: 2460210 - RNA, 19 nt, Artificial Sequence
  Description of Artificial Sequence: Synthetic oligonucleotide
  Sense strand starting at position 1674 of SEQ ID NO: 1887279
gacuauagguguuuggaga

SEQ ID NO: 2460211 - RNA, 19 nt, Artificial Sequence
  Description of Artificial Sequence: Synthetic oligonucleotide
  Antisense strand to SEQ ID NO: 2460210
ucuccaaacaccuauaguc

SEQ ID NO: 2460212 - RNA, 19 nt, Artificial Sequence
  Description of Artificial Sequence: Synthetic oligonucleotide
  Sense strand starting at position 1675 of SEQ ID NO: 1887279
acuauagguguuuggagau

SEQ ID NO: 2460213 - RNA, 19 nt, Artificial Sequence
  Description of Artificial Sequence: Synthetic oligonucleotide
  Antisense strand to SEQ ID NO: 2460212
aucuccaaacaccuauagu

SEQ ID NO: 2460214 - RNA, 19 nt, Artificial Sequence
  Description of Artificial Sequence: Synthetic oligonucleotide
  Sense strand starting at position 1678 of SEQ ID NO: 1887279
auagguguuuggagaugag

SEQ ID NO: 2460215 - RNA, 19 nt, Artificial Sequence
  Description of Artificial Sequence: Synthetic oligonucleotide
  Antisense strand to SEQ ID NO: 2460214
cucaucuccaaacaccuau

SEQ ID NO: 2460216 - RNA, 19 nt, Artificial Sequence
  Description of Artificial Sequence: Synthetic oligonucleotide
  Sense strand starting at position 1728 of SEQ ID NO: 1887279
ucaccuccuccuugggaau

SEQ ID NO: 2460217 - RNA, 19 nt, Artificial Sequence
  Description of Artificial Sequence: Synthetic oligonucleotide
  Antisense strand to SEQ ID NO: 2460216
auucccaaggaggagguga

SEQ ID NO: 2460218 - RNA, 19 nt, Artificial Sequence
  Description of Artificial Sequence: Synthetic oligonucleotide
  Sense strand starting at position 3428 of SEQ ID NO: 1887279
aagcuuugaugagauuuga

SEQ ID NO: 2460219 - RNA, 19 nt, Artificial Sequence
  Description of Artificial Sequence: Synthetic oligonucleotide
  Antisense strand to SEQ ID NO: 2460218
ucaaaucucaucaaagcuu

SEQ ID NO: 2460220 - RNA, 19 nt, Artificial Sequence
  Description of Artificial Sequence: Synthetic oligonucleotide
  Sense strand starting at position 3538 of SEQ ID NO: 1887279
uuaugaaacuucccagugu

SEQ ID NO: 2460221 - RNA, 19 nt, Artificial Sequence
  Description of Artificial Sequence: Synthetic oligonucleotide
  Antisense strand to SEQ ID NO: 2460220
acacugggaaguuucauaa

SEQ ID NO: 2460222 - RNA, 19 nt, Artificial Sequence
  Description of Artificial Sequence: Synthetic oligonucleotide
  Sense strand starting at position 3568 of SEQ ID NO: 1887279
agacaucucugcuccgagu

SEQ ID NO: 2460223 - RNA, 19 nt, Artificial Sequence
  Description of Artificial Sequence: Synthetic oligonucleotide
  Antisense strand to SEQ ID NO: 2460222
acucggagcagagaugucu

SEQ ID NO: 2460224 - RNA, 19 nt, Artificial Sequence
  Description of Artificial Sequence: Synthetic oligonucleotide
  Sense strand starting at position 3607 of SEQ ID NO: 1887279
guagguuggugagcuauuu

SEQ ID NO: 2460225 - RNA, 19 nt, Artificial Sequence
  Description of Artificial Sequence: Synthetic oligonucleotide
  Antisense strand to SEQ ID NO: 2460224
aaauagcucaccaaccuac

SEQ ID NO: 2460226 - RNA, 19 nt, Artificial Sequence
  Description of Artificial Sequence: Synthetic oligonucleotide
  Sense strand starting at position 3615 of SEQ ID NO: 1887279
gugagcuauuucccgugca

SEQ ID NO: 2460227 - RNA, 19 nt, Artificial Sequence
  Description of Artificial Sequence: Synthetic oligonucleotide
  Antisense strand to SEQ ID NO: 2460226
ugcacgggaaauagcucac

SEQ ID NO: 2460228 - RNA, 19 nt, Artificial Sequence
  Description of Artificial Sequence: Synthetic oligonucleotide
  Sense strand starting at position 3641 of SEQ ID NO: 1887279
uggguaagguuucuugauc

SEQ ID NO: 2460229 - RNA, 19 nt, Artificial Sequence
  Description of Artificial Sequence: Synthetic oligonucleotide
  Antisense strand to SEQ ID NO: 2460228
gaucaagaaaccuuaccca

SEQ ID NO: 2460230 - RNA, 19 nt, Artificial Sequence
  Description of Artificial Sequence: Synthetic oligonucleotide
  Sense strand starting at position 3646 of SEQ ID NO: 1887279
aagguuucuugaucccaag

SEQ ID NO: 2460231 - RNA, 19 nt, Artificial Sequence
  Description of Artificial Sequence: Synthetic oligonucleotide
  Antisense strand to SEQ ID NO: 2460230
cuugggaucaagaaaccuu

SEQ ID NO: 2460232 - RNA, 19 nt, Artificial Sequence
  Description of Artificial Sequence: Synthetic oligonucleotide
  Sense strand starting at position 3704 of SEQ ID NO: 1887279
agcucaacacuauguugau

SEQ ID NO: 2460233 - RNA, 19 nt, Artificial Sequence
  Description of Artificial Sequence: Synthetic oligonucleotide
  Antisense strand to SEQ ID NO: 2460232
aucaacauaguguugagcu

SEQ ID NO: 2460234 - RNA, 19 nt, Artificial Sequence
  Description of Artificial Sequence: Synthetic oligonucleotide
  Sense strand starting at position 3705 of SEQ ID NO: 1887279
gcucaacacuauguugaua

SEQ ID NO: 2460235 - RNA, 19 nt, Artificial Sequence
  Description of Artificial Sequence: Synthetic oligonucleotide
  Antisense strand to SEQ ID NO: 2460234
uaucaacauaguguugagc

SEQ ID NO: 2460236 - RNA, 19 nt, Artificial Sequence
  Description of Artificial Sequence: Synthetic oligonucleotide
  Sense strand starting at position 3718 of SEQ ID NO: 1887279
uugauaguaugguuccaac

SEQ ID NO: 2460237 - RNA, 19 nt, Artificial Sequence
  Description of Artificial Sequence: Synthetic oligonucleotide
  Antisense strand to SEQ ID NO: 2460236
guuggaaccauacuaucaa

SEQ ID NO: 2460238 - RNA, 19 nt, Artificial Sequence
  Description of Artificial Sequence: Synthetic oligonucleotide
  Sense strand starting at position 3729 of SEQ ID NO: 1887279
guuccaacuuuggcaugua

SEQ ID NO: 2460239 - RNA, 19 nt, Artificial Sequence
  Description of Artificial Sequence: Synthetic oligonucleotide
  Antisense strand to SEQ ID NO: 2460238
uacaugccaaaguuggaac

SEQ ID NO: 2460240 - RNA, 19 nt, Artificial Sequence
  Description of Artificial Sequence: Synthetic oligonucleotide
  Sense strand starting at position 3732 of SEQ ID NO: 1887279
ccaacuuuggcauguacau

SEQ ID NO: 2460241 - RNA, 19 nt, Artificial Sequence
  Description of Artificial Sequence: Synthetic oligonucleotide
  Antisense strand to SEQ ID NO: 2460240
auguacaugccaaaguugg

SEQ ID NO: 2460242 - RNA, 19 nt, Artificial Sequence
  Description of Artificial Sequence: Synthetic oligonucleotide
  Sense strand starting at position 3739 of SEQ ID NO: 1887279
uggcauguacaucauuaag

SEQ ID NO: 2460243 - RNA, 19 nt, Artificial Sequence
  Description of Artificial Sequence: Synthetic oligonucleotide
  Antisense strand to SEQ ID NO: 2460242
cuuaaugauguacaugcca

SEQ ID NO: 2460244 - RNA, 19 nt, Artificial Sequence
  Description of Artificial Sequence: Synthetic oligonucleotide
  Sense strand starting at position 3741 of SEQ ID NO: 1887279
gcauguacaucauuaagac

SEQ ID NO: 2460245 - RNA, 19 nt, Artificial Sequence
  Description of Artificial Sequence: Synthetic oligonucleotide
  Antisense strand to SEQ ID NO: 2460244
gucuuaaugauguacaugc

SEQ ID NO: 2460246 - RNA, 19 nt, Artificial Sequence
  Description of Artificial Sequence: Synthetic oligonucleotide
  Sense strand starting at position 3756 of SEQ ID NO: 1887279
agacauagcuuagucaacu

SEQ ID NO: 2460247 - RNA, 19 nt, Artificial Sequence
  Description of Artificial Sequence: Synthetic oligonucleotide
  Antisense strand to SEQ ID NO: 2460246
aguugacuaagcuaugucu

SEQ ID NO: 2460248 - RNA, 19 nt, Artificial Sequence
  Description of Artificial Sequence: Synthetic oligonucleotide
  Sense strand starting at position 3845 of SEQ ID NO: 1887279
uuaggucuuccagaguuug

SEQ ID NO: 2460249 - RNA, 19 nt, Artificial Sequence
  Description of Artificial Sequence: Synthetic oligonucleotide
  Antisense strand to SEQ ID NO: 2460248
caaacucuggaagaccuaa

SEQ ID NO: 2460250 - RNA, 19 nt, Artificial Sequence
  Description of Artificial Sequence: Synthetic oligonucleotide
  Sense strand starting at position 3899 of SEQ ID NO: 1887279
uguucuugaaucggcaaga

SEQ ID NO: 2460251 - RNA, 19 nt, Artificial Sequence
  Description of Artificial Sequence: Synthetic oligonucleotide
  Antisense strand to SEQ ID NO: 2460250
ucuugccgauucaagaaca

SEQ ID NO: 2460252 - RNA, 19 nt, Artificial Sequence
  Description of Artificial Sequence: Synthetic oligonucleotide
  Sense strand starting at position 3900 of SEQ ID NO: 1887279
guucuugaaucggcaagaa

SEQ ID NO: 2460253 - RNA, 19 nt, Artificial Sequence
  Description of Artificial Sequence: Synthetic oligonucleotide
  Antisense strand to SEQ ID NO: 2460252
uucuugccgauucaagaac

SEQ ID NO: 2460254 - RNA, 19 nt, Artificial Sequence
  Description of Artificial Sequence: Synthetic oligonucleotide
  Sense strand starting at position 3912 of SEQ ID NO: 1887279
gcaagaaucuccgcaacuc

SEQ ID NO: 2460255 - RNA, 19 nt, Artificial Sequence
  Description of Artificial Sequence: Synthetic oligonucleotide
  Antisense strand to SEQ ID NO: 2460254
gaguugcggagauucuugc

SEQ ID NO: 2460256 - RNA, 19 nt, Artificial Sequence
  Description of Artificial Sequence: Synthetic oligonucleotide
  Sense strand starting at position 104 of SEQ ID NO: 1887280
cccaguucugccgggaaga

SEQ ID NO: 2460257 - RNA, 19 nt, Artificial Sequence
  Description of Artificial Sequence: Synthetic oligonucleotide
  Antisense strand to SEQ ID NO: 2460256
ucuucccggcagaacuggg

SEQ ID NO: 2460258 - RNA, 19 nt, Artificial Sequence
  Description of Artificial Sequence: Synthetic oligonucleotide
  Sense strand starting at position 105 of SEQ ID NO: 1887280
ccaguucugccgggaagag

SEQ ID NO: 2460259 - RNA, 19 nt, Artificial Sequence
  Description of Artificial Sequence: Synthetic oligonucleotide
  Antisense strand to SEQ ID NO: 2460258
cucuucccggcagaacugg

SEQ ID NO: 2460260 - RNA, 19 nt, Artificial Sequence
  Description of Artificial Sequence: Synthetic oligonucleotide
  Sense strand starting at position 106 of SEQ ID NO: 1887280
caguucugccgggaagagu

SEQ ID NO: 2460261 - RNA, 19 nt, Artificial Sequence
  Description of Artificial Sequence: Synthetic oligonucleotide
  Antisense strand to SEQ ID NO: 2460260
acucuucccggcagaacug

SEQ ID NO: 2460262 - RNA, 19 nt, Artificial Sequence
  Description of Artificial Sequence: Synthetic oligonucleotide
  Sense strand starting at position 654 of SEQ ID NO: 1887280
gcaaccauguccugguaau

SEQ ID NO: 2460263 - RNA, 19 nt, Artificial Sequence
  Description of Artificial Sequence: Synthetic oligonucleotide
  Antisense strand to SEQ ID NO: 2460262
auuaccaggacaugguugc

SEQ ID NO: 2460264 - RNA, 19 nt, Artificial Sequence
  Description of Artificial Sequence: Synthetic oligonucleotide
  Sense strand starting at position 1191 of SEQ ID NO: 1887280
ugugaauugcuugaaccga

SEQ ID NO: 2460265 - RNA, 19 nt, Artificial Sequence
  Description of Artificial Sequence: Synthetic oligonucleotide
  Antisense strand to SEQ ID NO: 2460264
ucgguucaagcaauucaca

SEQ ID NO: 2460266 - RNA, 19 nt, Artificial Sequence
  Description of Artificial Sequence: Synthetic oligonucleotide
  Sense strand starting at position 1990 of SEQ ID NO: 1887280
cugggcuagucugugaaca

SEQ ID NO: 2460267 - RNA, 19 nt, Artificial Sequence
  Description of Artificial Sequence: Synthetic oligonucleotide
  Antisense strand to SEQ ID NO: 2460266
uguucacagacuagcccag

SEQ ID NO: 2460268 - RNA, 19 nt, Artificial Sequence
  Description of Artificial Sequence: Synthetic oligonucleotide
  Sense strand starting at position 1992 of SEQ ID NO: 1887280
gggcuagucugugaacagu

SEQ ID NO: 2460269 - RNA, 19 nt, Artificial Sequence
  Description of Artificial Sequence: Synthetic oligonucleotide
  Antisense strand to SEQ ID NO: 2460268
acuguucacagacuagccc

SEQ ID NO: 2460270 - RNA, 19 nt, Artificial Sequence
  Description of Artificial Sequence: Synthetic oligonucleotide
  Sense strand starting at position 2059 of SEQ ID NO: 1887280
cggagucacaguugaguca

SEQ ID NO: 2460271 - RNA, 19 nt, Artificial Sequence
  Description of Artificial Sequence: Synthetic oligonucleotide
  Antisense strand to SEQ ID NO: 2460270
ugacucaacugugacuccg

SEQ ID NO: 2460272 - RNA, 19 nt, Artificial Sequence
  Description of Artificial Sequence: Synthetic oligonucleotide
  Sense strand starting at position 2060 of SEQ ID NO: 1887280
ggagucacaguugagucau

SEQ ID NO: 2460273 - RNA, 19 nt, Artificial Sequence
  Description of Artificial Sequence: Synthetic oligonucleotide
  Antisense strand to SEQ ID NO: 2460272
augacucaacugugacucc

SEQ ID NO: 2460274 - RNA, 19 nt, Artificial Sequence
  Description of Artificial Sequence: Synthetic oligonucleotide
  Sense strand starting at position 2066 of SEQ ID NO: 1887280
acaguugagucaugugaag

SEQ ID NO: 2460275 - RNA, 19 nt, Artificial Sequence
  Description of Artificial Sequence: Synthetic oligonucleotide
  Antisense strand to SEQ ID NO: 2460274
cuucacaugacucaacugu

SEQ ID NO: 2460276 - RNA, 19 nt, Artificial Sequence
  Description of Artificial Sequence: Synthetic oligonucleotide
  Sense strand starting at position 2068 of SEQ ID NO: 1887280
aguugagucaugugaagaa

SEQ ID NO: 2460277 - RNA, 19 nt, Artificial Sequence
  Description of Artificial Sequence: Synthetic oligonucleotide
  Antisense strand to SEQ ID NO: 2460276
uucuucacaugacucaacu

SEQ ID NO: 2460278 - RNA, 19 nt, Artificial Sequence
  Description of Artificial Sequence: Synthetic oligonucleotide
  Sense strand starting at position 2108 of SEQ ID NO: 1887280
ggccucugcuuguggagau

SEQ ID NO: 2460279 - RNA, 19 nt, Artificial Sequence
  Description of Artificial Sequence: Synthetic oligonucleotide
  Antisense strand to SEQ ID NO: 2460278
aucuccacaagcagaggcc

SEQ ID NO: 2460280 - RNA, 19 nt, Artificial Sequence
  Description of Artificial Sequence: Synthetic oligonucleotide
  Sense strand starting at position 2109 of SEQ ID NO: 1887280
gccucugcuuguggagaua

SEQ ID NO: 2460281 - RNA, 19 nt, Artificial Sequence
  Description of Artificial Sequence: Synthetic oligonucleotide
  Antisense strand to SEQ ID NO: 2460280
uaucuccacaagcagaggc

SEQ ID NO: 2460282 - RNA, 19 nt, Artificial Sequence
  Description of Artificial Sequence: Synthetic oligonucleotide
  Sense strand starting at position 2112 of SEQ ID NO: 1887280
ucugcuuguggagauauau

SEQ ID NO: 2460283 - RNA, 19 nt, Artificial Sequence
  Description of Artificial Sequence: Synthetic oligonucleotide
  Antisense strand to SEQ ID NO: 2460282
auauaucuccacaagcaga

SEQ ID NO: 2460284 - RNA, 19 nt, Artificial Sequence
  Description of Artificial Sequence: Synthetic oligonucleotide
  Sense strand starting at position 2287 of SEQ ID NO: 1887280
gaaucagacccugguaaau

SEQ ID NO: 2460285 - RNA, 19 nt, Artificial Sequence
  Description of Artificial Sequence: Synthetic oligonucleotide
  Antisense strand to SEQ ID NO: 2460284
auuuaccagggucugauuc

SEQ ID NO: 2460286 - RNA, 19 nt, Artificial Sequence
  Description of Artificial Sequence: Synthetic oligonucleotide
  Sense strand starting at position 2364 of SEQ ID NO: 1887280
cggcuuguucacugcacga

SEQ ID NO: 2460287 - RNA, 19 nt, Artificial Sequence
  Description of Artificial Sequence: Synthetic oligonucleotide
  Antisense strand to SEQ ID NO: 2460286
ucgugcagugaacaagccg

SEQ ID NO: 2460288 - RNA, 19 nt, Artificial Sequence
  Description of Artificial Sequence: Synthetic oligonucleotide
  Sense strand starting at position 2916 of SEQ ID NO: 1887280
ucagaucuuccucggagaa

SEQ ID NO: 2460289 - RNA, 19 nt, Artificial Sequence
  Description of Artificial Sequence: Synthetic oligonucleotide
  Antisense strand to SEQ ID NO: 2460288
uucuccgaggaagaucuga

SEQ ID NO: 2460290 - RNA, 19 nt, Artificial Sequence
  Description of Artificial Sequence: Synthetic oligonucleotide
  Sense strand starting at position 2917 of SEQ ID NO: 1887280
cagaucuuccucggagaag

SEQ ID NO: 2460291 - RNA, 19 nt, Artificial Sequence
  Description of Artificial Sequence: Synthetic oligonucleotide
  Antisense strand to SEQ ID NO: 2460290
cuucuccgaggaagaucug

SEQ ID NO: 2460292 - RNA, 19 nt, Artificial Sequence
  Description of Artificial Sequence: Synthetic oligonucleotide
  Sense strand starting at position 2918 of SEQ ID NO: 1887280
agaucuuccucggagaagu

SEQ ID NO: 2460293 - RNA, 19 nt, Artificial Sequence
  Description of Artificial Sequence: Synthetic oligonucleotide
  Antisense strand to SEQ ID NO: 2460292
acuucuccgaggaagaucu

SEQ ID NO: 2460294 - RNA, 19 nt, Artificial Sequence
  Description of Artificial Sequence: Synthetic oligonucleotide
  Sense strand starting at position 3099 of SEQ ID NO: 1887280
ccaacucagucuguucuaa

SEQ ID NO: 2460295 - RNA, 19 nt, Artificial Sequence
  Description of Artificial Sequence: Synthetic oligonucleotide
  Antisense strand to SEQ ID NO: 2460294
uuagaacagacugaguugg

SEQ ID NO: 2460296 - RNA, 19 nt, Artificial Sequence
  Description of Artificial Sequence: Synthetic oligonucleotide
  Sense strand starting at position 3103 of SEQ ID NO: 1887280
cucagucuguucuaaggau

SEQ ID NO: 2460297 - RNA, 19 nt, Artificial Sequence
  Description of Artificial Sequence: Synthetic oligonucleotide
  Antisense strand to SEQ ID NO: 2460296
auccuuagaacagacugag

SEQ ID NO: 2460298 - RNA, 19 nt, Artificial Sequence
  Description of Artificial Sequence: Synthetic oligonucleotide
  Sense strand starting at position 3107 of SEQ ID NO: 1887280
gucuguucuaaggaugggu

SEQ ID NO: 2460299 - RNA, 19 nt, Artificial Sequence
  Description of Artificial Sequence: Synthetic oligonucleotide
  Antisense strand to SEQ ID NO: 2460298
acccauccuuagaacagac

SEQ ID NO: 2460300 - RNA, 19 nt, Artificial Sequence
  Description of Artificial Sequence: Synthetic oligonucleotide
  Sense strand starting at position 3109 of SEQ ID NO: 1887280
cuguucuaaggauggguaa

SEQ ID NO: 2460301 - RNA, 19 nt, Artificial Sequence
  Description of Artificial Sequence: Synthetic oligonucleotide
  Antisense strand to SEQ ID NO: 2460300
uuacccauccuuagaacag

SEQ ID NO: 2460302 - RNA, 19 nt, Artificial Sequence
  Description of Artificial Sequence: Synthetic oligonucleotide
  Sense strand starting at position 3411 of SEQ ID NO: 1887280
cggccaaagucuggguaau

SEQ ID NO: 2460303 - RNA, 19 nt, Artificial Sequence
  Description of Artificial Sequence: Synthetic oligonucleotide
  Antisense strand to SEQ ID NO: 2460302
auuacccagacuuuggccg

SEQ ID NO: 2460304 - RNA, 19 nt, Artificial Sequence
  Description of Artificial Sequence: Synthetic oligonucleotide
  Sense strand starting at position 3412 of SEQ ID NO: 1887280
ggccaaagucuggguaauc

SEQ ID NO: 2460305 - RNA, 19 nt, Artificial Sequence
  Description of Artificial Sequence: Synthetic oligonucleotide
  Antisense strand to SEQ ID NO: 2460304
gauuacccagacuuuggcc

SEQ ID NO: 2460306 - RNA, 19 nt, Artificial Sequence
  Description of Artificial Sequence: Synthetic oligonucleotide
  Sense strand starting at position 3413 of SEQ ID NO: 1887280
gccaaagucuggguaaucu

SEQ ID NO: 2460307 - RNA, 19 nt, Artificial Sequence
  Description of Artificial Sequence: Synthetic oligonucleotide
  Antisense strand to SEQ ID NO: 2460306
agauuacccagacuuuggc

SEQ ID NO: 2460308 - RNA, 19 nt, Artificial Sequence
  Description of Artificial Sequence: Synthetic oligonucleotide
  Sense strand starting at position 3436 of SEQ ID NO: 1887280
augaaacgaucaucaucua

SEQ ID NO: 2460309 - RNA, 19 nt, Artificial Sequence
  Description of Artificial Sequence: Synthetic oligonucleotide
  Antisense strand to SEQ ID NO: 2460308
uagaugaugaucguuucau

SEQ ID NO: 2460310 - RNA, 19 nt, Artificial Sequence
  Description of Artificial Sequence: Synthetic oligonucleotide
  Sense strand starting at position 3929 of SEQ ID NO: 1887280
cgaggaaugugugcacaga

SEQ ID NO: 2460311 - RNA, 19 nt, Artificial Sequence
  Description of Artificial Sequence: Synthetic oligonucleotide
  Antisense strand to SEQ ID NO: 2460310
ucugugcacacauuccucg

SEQ ID NO: 2460312 - RNA, 19 nt, Artificial Sequence
  Description of Artificial Sequence: Synthetic oligonucleotide
  Sense strand starting at position 3930 of SEQ ID NO: 1887280
gaggaaugugugcacagaa

SEQ ID NO: 2460313 - RNA, 19 nt, Artificial Sequence
  Description of Artificial Sequence: Synthetic oligonucleotide
  Antisense strand to SEQ ID NO: 2460312
uucugugcacacauuccuc

SEQ ID NO: 2460314 - RNA, 19 nt, Artificial Sequence
  Description of Artificial Sequence: Synthetic oligonucleotide
  Sense strand starting at position 3977 of SEQ ID NO: 1887280
ggugccaucuucgagcuaa

SEQ ID NO: 2460315 - RNA, 19 nt, Artificial Sequence
  Description of Artificial Sequence: Synthetic oligonucleotide
  Antisense strand to SEQ ID NO: 2460314
uuagcucgaagauggcacc

SEQ ID NO: 2460316 - RNA, 19 nt, Artificial Sequence
  Description of Artificial Sequence: Synthetic oligonucleotide
  Sense strand starting at position 47 of SEQ ID NO: 1887281
acgagauccugucucugaa

SEQ ID NO: 2460317 - RNA, 19 nt, Artificial Sequence
  Description of Artificial Sequence: Synthetic oligonucleotide
  Antisense strand to SEQ ID NO: 2460316
uucagagacaggaucucgu

SEQ ID NO: 2460318 - RNA, 19 nt, Artificial Sequence
  Description of Artificial Sequence: Synthetic oligonucleotide
  Sense strand starting at position 95 of SEQ ID NO: 1887281
uuuccuuaugcagauguca

SEQ ID NO: 2460319 - RNA, 19 nt, Artificial Sequence
  Description of Artificial Sequence: Synthetic oligonucleotide
  Antisense strand to SEQ ID NO: 2460318
ugacaucugcauaaggaaa

SEQ ID NO: 2460320 - RNA, 19 nt, Artificial Sequence
  Description of Artificial Sequence: Synthetic oligonucleotide
  Sense strand starting at position 104 of SEQ ID NO: 1887281
gcagaugucagauguguag

SEQ ID NO: 2460321 - RNA, 19 nt, Artificial Sequence
  Description of Artificial Sequence: Synthetic oligonucleotide
  Antisense strand to SEQ ID NO: 2460320
cuacacaucugacaucugc

SEQ ID NO: 2460322 - RNA, 19 nt, Artificial Sequence
  Description of Artificial Sequence: Synthetic oligonucleotide
  Sense strand starting at position 106 of SEQ ID NO: 1887281
agaugucagauguguaguu

SEQ ID NO: 2460323 - RNA, 19 nt, Artificial Sequence
  Description of Artificial Sequence: Synthetic oligonucleotide
  Antisense strand to SEQ ID NO: 2460322
aacuacacaucugacaucu

SEQ ID NO: 2460324 - RNA, 19 nt, Artificial Sequence
  Description of Artificial Sequence: Synthetic oligonucleotide
  Sense strand starting at position 107 of SEQ ID NO: 1887281
gaugucagauguguaguuu

SEQ ID NO: 2460325 - RNA, 19 nt, Artificial Sequence
  Description of Artificial Sequence: Synthetic oligonucleotide
  Antisense strand to SEQ ID NO: 2460324
aaacuacacaucugacauc

SEQ ID NO: 2460326 - RNA, 19 nt, Artificial Sequence
  Description of Artificial Sequence: Synthetic oligonucleotide
  Sense strand starting at position 128 of SEQ ID NO: 1887281
ugguuagcaccucagcauu

SEQ ID NO: 2460327 - RNA, 19 nt, Artificial Sequence
  Description of Artificial Sequence: Synthetic oligonucleotide
  Antisense strand to SEQ ID NO: 2460326
aaugcugaggugcuaacca

SEQ ID NO: 2460328 - RNA, 19 nt, Artificial Sequence
  Description of Artificial Sequence: Synthetic oligonucleotide
  Sense strand starting at position 748 of SEQ ID NO: 1887281
ugcaauuuauacuaggguu

SEQ ID NO: 2460329 - RNA, 19 nt, Artificial Sequence
  Description of Artificial Sequence: Synthetic oligonucleotide
  Antisense strand to SEQ ID NO: 2460328
aacccuaguauaaauugca

SEQ ID NO: 2460330 - RNA, 19 nt, Artificial Sequence
  Description of Artificial Sequence: Synthetic oligonucleotide
  Sense strand starting at position 756 of SEQ ID NO: 1887281
auacuaggguuacuauaau

SEQ ID NO: 2460331 - RNA, 19 nt, Artificial Sequence
  Description of Artificial Sequence: Synthetic oligonucleotide
  Antisense strand to SEQ ID NO: 2460330
auuauaguaacccuaguau

SEQ ID NO: 2460332 - RNA, 19 nt, Artificial Sequence
  Description of Artificial Sequence: Synthetic oligonucleotide
  Sense strand starting at position 793 of SEQ ID NO: 1887281
agcagcucaccucaguaau

SEQ ID NO: 2460333 - RNA, 19 nt, Artificial Sequence
  Description of Artificial Sequence: Synthetic oligonucleotide
  Antisense strand to SEQ ID NO: 2460332
auuacugaggugagcugcu

SEQ ID NO: 2460334 - RNA, 19 nt, Artificial Sequence
  Description of Artificial Sequence: Synthetic oligonucleotide
  Sense strand starting at position 1161 of SEQ ID NO: 1887281
ccaaucugccagcaaauga

SEQ ID NO: 2460335 - RNA, 19 nt, Artificial Sequence
  Description of Artificial Sequence: Synthetic oligonucleotide
  Antisense strand to SEQ ID NO: 2460334
ucauuugcuggcagauugg

SEQ ID NO: 2460336 - RNA, 19 nt, Artificial Sequence
  Description of Artificial Sequence: Synthetic oligonucleotide
  Sense strand starting at position 1211 of SEQ ID NO: 1887281
ccgguuaaucaugaaacau

SEQ ID NO: 2460337 - RNA, 19 nt, Artificial Sequence
  Description of Artificial Sequence: Synthetic oligonucleotide
  Antisense strand to SEQ ID NO: 2460336
auguuucaugauuaaccgg

SEQ ID NO: 2460338 - RNA, 19 nt, Artificial Sequence
  Description of Artificial Sequence: Synthetic oligonucleotide
  Sense strand starting at position 1255 of SEQ ID NO: 1887281
acuguuaacgcagagaaug

SEQ ID NO: 2460339 - RNA, 19 nt, Artificial Sequence
  Description of Artificial Sequence: Synthetic oligonucleotide
  Antisense strand to SEQ ID NO: 2460338
cauucucugcguuaacagu

SEQ ID NO: 2460340 - RNA, 19 nt, Artificial Sequence
  Description of Artificial Sequence: Synthetic oligonucleotide
  Sense strand starting at position 1267 of SEQ ID NO: 1887281
gagaauggagauugcaagu

SEQ ID NO: 2460341 - RNA, 19 nt, Artificial Sequence
  Description of Artificial Sequence: Synthetic oligonucleotide
  Antisense strand to SEQ ID NO: 2460340
acuugcaaucuccauucuc

SEQ ID NO: 2460342 - RNA, 19 nt, Artificial Sequence
  Description of Artificial Sequence: Synthetic oligonucleotide
  Sense strand starting at position 1327 of SEQ ID NO: 1887281
acagcaguguguccaucaa

SEQ ID NO: 2460343 - RNA, 19 nt, Artificial Sequence
  Description of Artificial Sequence: Synthetic oligonucleotide
  Antisense strand to SEQ ID NO: 2460342
uugauggacacacugcugu

SEQ ID NO: 2460344 - RNA, 19 nt, Artificial Sequence
  Description of Artificial Sequence: Synthetic oligonucleotide
  Sense strand starting at position 1385 of SEQ ID NO: 1887281
ucaucaagaccucaguguu

SEQ ID NO: 2460345 - RNA, 19 nt, Artificial Sequence
  Description of Artificial Sequence: Synthetic oligonucleotide
  Antisense strand to SEQ ID NO: 2460344
aacacugaggucuugauga

SEQ ID NO: 2460346 - RNA, 19 nt, Artificial Sequence
  Description of Artificial Sequence: Synthetic oligonucleotide
  Sense strand starting at position 1388 of SEQ ID NO: 1887281
ucaagaccucaguguuauc

SEQ ID NO: 2460347 - RNA, 19 nt, Artificial Sequence
  Description of Artificial Sequence: Synthetic oligonucleotide
  Antisense strand to SEQ ID NO: 2460346
gauaacacugaggucuuga

SEQ ID NO: 2460348 - RNA, 19 nt, Artificial Sequence
  Description of Artificial Sequence: Synthetic oligonucleotide
  Sense strand starting at position 1393 of SEQ ID NO: 1887281
accucaguguuaucugcaa

SEQ ID NO: 2460349 - RNA, 19 nt, Artificial Sequence
  Description of Artificial Sequence: Synthetic oligonucleotide
  Antisense strand to SEQ ID NO: 2460348
uugcagauaacacugaggu

SEQ ID NO: 2460350 - RNA, 19 nt, Artificial Sequence
  Description of Artificial Sequence: Synthetic oligonucleotide
  Sense strand starting at position 1757 of SEQ ID NO: 1887281
ggugauggauagguugaga

SEQ ID NO: 2460351 - RNA, 19 nt, Artificial Sequence
  Description of Artificial Sequence: Synthetic oligonucleotide
  Antisense strand to SEQ ID NO: 2460350
ucucaaccuauccaucacc

SEQ ID NO: 2460352 - RNA, 19 nt, Artificial Sequence
  Description of Artificial Sequence: Synthetic oligonucleotide
  Sense strand starting at position 2039 of SEQ ID NO: 1887281
cccggauucuggguacaac

SEQ ID NO: 2460353 - RNA, 19 nt, Artificial Sequence
  Description of Artificial Sequence: Synthetic oligonucleotide
  Antisense strand to SEQ ID NO: 2460352
guuguacccagaauccggg

SEQ ID NO: 2460354 - RNA, 19 nt, Artificial Sequence
  Description of Artificial Sequence: Synthetic oligonucleotide
  Sense strand starting at position 2224 of SEQ ID NO: 1887281
gaggguuggaggcaaaguu

SEQ ID NO: 2460355 - RNA, 19 nt, Artificial Sequence
  Description of Artificial Sequence: Synthetic oligonucleotide
  Antisense strand to SEQ ID NO: 2460354
aacuuugccuccaacccuc

SEQ ID NO: 2460356 - RNA, 19 nt, Artificial Sequence
  Description of Artificial Sequence: Synthetic oligonucleotide
  Sense strand starting at position 2251 of SEQ ID NO: 1887281
ggaugaggcauacguggua

SEQ ID NO: 2460357 - RNA, 19 nt, Artificial Sequence
  Description of Artificial Sequence: Synthetic oligonucleotide
  Antisense strand to SEQ ID NO: 2460356
uaccacguaugccucaucc

SEQ ID NO: 2460358 - RNA, 19 nt, Artificial Sequence
  Description of Artificial Sequence: Synthetic oligonucleotide
  Sense strand starting at position 2510 of SEQ ID NO: 1887281
gcaguuauuugagcagcua

SEQ ID NO: 2460359 - RNA, 19 nt, Artificial Sequence
  Description of Artificial Sequence: Synthetic oligonucleotide
  Antisense strand to SEQ ID NO: 2460358
uagcugcucaaauaacugc

SEQ ID NO: 2460360 - RNA, 19 nt, Artificial Sequence
  Description of Artificial Sequence: Synthetic oligonucleotide
  Sense strand starting at position 2538 of SEQ ID NO: 1887281
ggccuugaccaaggcauau

SEQ ID NO: 2460361 - RNA, 19 nt, Artificial Sequence
  Description of Artificial Sequence: Synthetic oligonucleotide
  Antisense strand to SEQ ID NO: 2460360
auaugccuuggucaaggcc

SEQ ID NO: 2460362 - RNA, 19 nt, Artificial Sequence
  Description of Artificial Sequence: Synthetic oligonucleotide
  Sense strand starting at position 2638 of SEQ ID NO: 1887281
cuaaguagcuugcuuaacu

SEQ ID NO: 2460363 - RNA, 19 nt, Artificial Sequence
  Description of Artificial Sequence: Synthetic oligonucleotide
  Antisense strand to SEQ ID NO: 2460362
aguuaagcaagcuacuuag

SEQ ID NO: 2460364 - RNA, 19 nt, Artificial Sequence
  Description of Artificial Sequence: Synthetic oligonucleotide
  Sense strand starting at position 2682 of SEQ ID NO: 1887281
guccuaaugucauuguuaa

SEQ ID NO: 2460365 - RNA, 19 nt, Artificial Sequence
  Description of Artificial Sequence: Synthetic oligonucleotide
  Antisense strand to SEQ ID NO: 2460364
uuaacaaugacauuaggac

SEQ ID NO: 2460366 - RNA, 19 nt, Artificial Sequence
  Description of Artificial Sequence: Synthetic oligonucleotide
  Sense strand starting at position 2683 of SEQ ID NO: 1887281
uccuaaugucauuguuaaa

SEQ ID NO: 2460367 - RNA, 19 nt, Artificial Sequence
  Description of Artificial Sequence: Synthetic oligonucleotide
  Antisense strand to SEQ ID NO: 2460366
uuuaacaaugacauuagga

SEQ ID NO: 2460368 - RNA, 19 nt, Artificial Sequence
  Description of Artificial Sequence: Synthetic oligonucleotide
  Sense strand starting at position 2780 of SEQ ID NO: 1887281
auauuugaguaagaucagu

SEQ ID NO: 2460369 - RNA, 19 nt, Artificial Sequence
  Description of Artificial Sequence: Synthetic oligonucleotide
  Antisense strand to SEQ ID NO: 2460368
acugaucuuacucaaauau

SEQ ID NO: 2460370 - RNA, 19 nt, Artificial Sequence
  Description of Artificial Sequence: Synthetic oligonucleotide
  Sense strand starting at position 2785 of SEQ ID NO: 1887281
ugaguaagaucaguggauu

SEQ ID NO: 2460371 - RNA, 19 nt, Artificial Sequence
  Description of Artificial Sequence: Synthetic oligonucleotide
  Antisense strand to SEQ ID NO: 2460370
aauccacugaucuuacuca

SEQ ID NO: 2460372 - RNA, 19 nt, Artificial Sequence
  Description of Artificial Sequence: Synthetic oligonucleotide
  Sense strand starting at position 2786 of SEQ ID NO: 1887281
gaguaagaucaguggauug

SEQ ID NO: 2460373 - RNA, 19 nt, Artificial Sequence
  Description of Artificial Sequence: Synthetic oligonucleotide
  Antisense strand to SEQ ID NO: 2460372
caauccacugaucuuacuc

SEQ ID NO: 2460374 - RNA, 19 nt, Artificial Sequence
  Description of Artificial Sequence: Synthetic oligonucleotide
  Sense strand starting at position 2798 of SEQ ID NO: 1887281
uggauuguaucagugucaa

SEQ ID NO: 2460375 - RNA, 19 nt, Artificial Sequence
  Description of Artificial Sequence: Synthetic oligonucleotide
  Antisense strand to SEQ ID NO: 2460374
uugacacugauacaaucca

SEQ ID NO: 2460376 - RNA, 19 nt, Artificial Sequence
  Description of Artificial Sequence: Synthetic oligonucleotide
  Sense strand starting at position 2851 of SEQ ID NO: 1887281
ggauguuaccauugggaga

SEQ ID NO: 2460377 - RNA, 19 nt, Artificial Sequence
  Description of Artificial Sequence: Synthetic oligonucleotide
  Antisense strand to SEQ ID NO: 2460376
ucucccaaugguaacaucc

SEQ ID NO: 2460378 - RNA, 19 nt, Artificial Sequence
  Description of Artificial Sequence: Synthetic oligonucleotide
  Sense strand starting at position 2971 of SEQ ID NO: 1887281
uaauauggucccugcuuga

SEQ ID NO: 2460379 - RNA, 19 nt, Artificial Sequence
  Description of Artificial Sequence: Synthetic oligonucleotide
  Antisense strand to SEQ ID NO: 2460378
ucaagcagggaccauauua

SEQ ID NO: 2460380 - RNA, 19 nt, Artificial Sequence
  Description of Artificial Sequence: Synthetic oligonucleotide
  Sense strand starting at position 3033 of SEQ ID NO: 1887281
cggccacuuaagugauauu

SEQ ID NO: 2460381 - RNA, 19 nt, Artificial Sequence
  Description of Artificial Sequence: Synthetic oligonucleotide
  Antisense strand to SEQ ID NO: 2460380
aauaucacuuaaguggccg

SEQ ID NO: 2460382 - RNA, 19 nt, Artificial Sequence
  Description of Artificial Sequence: Synthetic oligonucleotide
  Sense strand starting at position 3103 of SEQ ID NO: 1887281
gugugaaacccaggcaaau

SEQ ID NO: 2460383 - RNA, 19 nt, Artificial Sequence
  Description of Artificial Sequence: Synthetic oligonucleotide
  Antisense strand to SEQ ID NO: 2460382
auuugccuggguuucacac

SEQ ID NO: 2460384 - RNA, 19 nt, Artificial Sequence
  Description of Artificial Sequence: Synthetic oligonucleotide
  Sense strand starting at position 3477 of SEQ ID NO: 1887281
auuguagccuguguaacaa

SEQ ID NO: 2460385 - RNA, 19 nt, Artificial Sequence
  Description of Artificial Sequence: Synthetic oligonucleotide
  Antisense strand to SEQ ID NO: 2460384
uuguuacacaggcuacaau

SEQ ID NO: 2460386 - RNA, 19 nt, Artificial Sequence
  Description of Artificial Sequence: Synthetic oligonucleotide
  Sense strand starting at position 3607 of SEQ ID NO: 1887281
cagugaaacugguccuguu

SEQ ID NO: 2460387 - RNA, 19 nt, Artificial Sequence
  Description of Artificial Sequence: Synthetic oligonucleotide
  Antisense strand to SEQ ID NO: 2460386
aacaggaccaguuucacug

SEQ ID NO: 2460388 - RNA, 19 nt, Artificial Sequence
  Description of Artificial Sequence: Synthetic oligonucleotide
  Sense strand starting at position 3628 of SEQ ID NO: 1887281
aaguuaaggugggcucauu

SEQ ID NO: 2460389 - RNA, 19 nt, Artificial Sequence
  Description of Artificial Sequence: Synthetic oligonucleotide
  Antisense strand to SEQ ID NO: 2460388
aaugagcccaccuuaacuu

SEQ ID NO: 2460390 - RNA, 19 nt, Artificial Sequence
  Description of Artificial Sequence: Synthetic oligonucleotide
  Sense strand starting at position 3638 of SEQ ID NO: 1887281
gggcucauugaugaguuga

SEQ ID NO: 2460391 - RNA, 19 nt, Artificial Sequence
  Description of Artificial Sequence: Synthetic oligonucleotide
  Antisense strand to SEQ ID NO: 2460390
ucaacucaucaaugagccc

SEQ ID NO: 2460392 - RNA, 19 nt, Artificial Sequence
  Description of Artificial Sequence: Synthetic oligonucleotide
  Sense strand starting at position 3646 of SEQ ID NO: 1887281
ugaugaguugaggacuguu

SEQ ID NO: 2460393 - RNA, 19 nt, Artificial Sequence
  Description of Artificial Sequence: Synthetic oligonucleotide
  Antisense strand to SEQ ID NO: 2460392
aacaguccucaacucauca

SEQ ID NO: 2460394 - RNA, 19 nt, Artificial Sequence
  Description of Artificial Sequence: Synthetic oligonucleotide
  Sense strand starting at position 3656 of SEQ ID NO: 1887281
aggacuguugcuggagcaa

SEQ ID NO: 2460395 - RNA, 19 nt, Artificial Sequence
  Description of Artificial Sequence: Synthetic oligonucleotide
  Antisense strand to SEQ ID NO: 2460394
uugcuccagcaacaguccu

SEQ ID NO: 2460396 - RNA, 19 nt, Artificial Sequence
  Description of Artificial Sequence: Synthetic oligonucleotide
  Sense strand starting at position 98 of SEQ ID NO: 1887282
gucagaagcaugugaaccu

SEQ ID NO: 2460397 - RNA, 19 nt, Artificial Sequence
  Description of Artificial Sequence: Synthetic oligonucleotide
  Antisense strand to SEQ ID NO: 2460396
agguucacaugcuucugac

SEQ ID NO: 2460398 - RNA, 19 nt, Artificial Sequence
  Description of Artificial Sequence: Synthetic oligonucleotide
  Sense strand starting at position 322 of SEQ ID NO: 1887282
ggucguccucacuacuaga

SEQ ID NO: 2460399 - RNA, 19 nt, Artificial Sequence
  Description of Artificial Sequence: Synthetic oligonucleotide
  Antisense strand to SEQ ID NO: 2460398
ucuaguagugaggacgacc

SEQ ID NO: 2460400 - RNA, 19 nt, Artificial Sequence
  Description of Artificial Sequence: Synthetic oligonucleotide
  Sense strand starting at position 383 of SEQ ID NO: 1887282
ucaggaaguuacucucuau

SEQ ID NO: 2460401 - RNA, 19 nt, Artificial Sequence
  Description of Artificial Sequence: Synthetic oligonucleotide
  Antisense strand to SEQ ID NO: 2460400
auagagaguaacuuccuga

SEQ ID NO: 2460402 - RNA, 19 nt, Artificial Sequence
  Description of Artificial Sequence: Synthetic oligonucleotide
  Sense strand starting at position 386 of SEQ ID NO: 1887282
ggaaguuacucucuaugau

SEQ ID NO: 2460403 - RNA, 19 nt, Artificial Sequence
  Description of Artificial Sequence: Synthetic oligonucleotide
  Antisense strand to SEQ ID NO: 2460402
aucauagagaguaacuucc

SEQ ID NO: 2460404 - RNA, 19 nt, Artificial Sequence
  Description of Artificial Sequence: Synthetic oligonucleotide
  Sense strand starting at position 389 of SEQ ID NO: 1887282
aguuacucucuaugaucua

SEQ ID NO: 2460405 - RNA, 19 nt, Artificial Sequence
  Description of Artificial Sequence: Synthetic oligonucleotide
  Antisense strand to SEQ ID NO: 2460404
uagaucauagagaguaacu

SEQ ID NO: 2460406 - RNA, 19 nt, Artificial Sequence
  Description of Artificial Sequence: Synthetic oligonucleotide
  Sense strand starting at position 571 of SEQ ID NO: 1887282
cuucuugccugauccaaga

SEQ ID NO: 2460407 - RNA, 19 nt, Artificial Sequence
  Description of Artificial Sequence: Synthetic oligonucleotide
  Antisense strand to SEQ ID NO: 2460406
ucuuggaucaggcaagaag

SEQ ID NO: 2460408 - RNA, 19 nt, Artificial Sequence
  Description of Artificial Sequence: Synthetic oligonucleotide
  Sense strand starting at position 911 of SEQ ID NO: 1887282
cgggacaccuuuccuguaa

SEQ ID NO: 2460409 - RNA, 19 nt, Artificial Sequence
  Description of Artificial Sequence: Synthetic oligonucleotide
  Antisense strand to SEQ ID NO: 2460408
uuacaggaaaggugucccg

SEQ ID NO: 2460410 - RNA, 19 nt, Artificial Sequence
  Description of Artificial Sequence: Synthetic oligonucleotide
  Sense strand starting at position 912 of SEQ ID NO: 1887282
gggacaccuuuccuguaau

SEQ ID NO: 2460411 - RNA, 19 nt, Artificial Sequence
  Description of Artificial Sequence: Synthetic oligonucleotide
  Antisense strand to SEQ ID NO: 2460410
auuacaggaaagguguccc

SEQ ID NO: 2460412 - RNA, 19 nt, Artificial Sequence
  Description of Artificial Sequence: Synthetic oligonucleotide
  Sense strand starting at position 985 of SEQ ID NO: 1887282
gcagucuuuccugaccaua

SEQ ID NO: 2460413 - RNA, 19 nt, Artificial Sequence
  Description of Artificial Sequence: Synthetic oligonucleotide
  Antisense strand to SEQ ID NO: 2460412
uauggucaggaaagacugc

SEQ ID NO: 2460414 - RNA, 19 nt, Artificial Sequence
  Description of Artificial Sequence: Synthetic oligonucleotide
  Sense strand starting at position 1150 of SEQ ID NO: 1887282
gggcaagaaaccugucugu

SEQ ID NO: 2460415 - RNA, 19 nt, Artificial Sequence
  Description of Artificial Sequence: Synthetic oligonucleotide
  Antisense strand to SEQ ID NO: 2460414
acagacagguuucuugccc

SEQ ID NO: 2460416 - RNA, 19 nt, Artificial Sequence
  Description of Artificial Sequence: Synthetic oligonucleotide
  Sense strand starting at position 1432 of SEQ ID NO: 1887282
cgccgauuccuacaagaua

SEQ ID NO: 2460417 - RNA, 19 nt, Artificial Sequence
  Description of Artificial Sequence: Synthetic oligonucleotide
  Antisense strand to SEQ ID NO: 2460416
uaucuuguaggaaucggcg

SEQ ID NO: 2460418 - RNA, 19 nt, Artificial Sequence
  Description of Artificial Sequence: Synthetic oligonucleotide
  Sense strand starting at position 1516 of SEQ ID NO: 1887282
ggcaauaaggguugaggaa

SEQ ID NO: 2460419 - RNA, 19 nt, Artificial Sequence
  Description of Artificial Sequence: Synthetic oligonucleotide
  Antisense strand to SEQ ID NO: 2460418
uuccucaacccuuauugcc

SEQ ID NO: 2460420 - RNA, 19 nt, Artificial Sequence
  Description of Artificial Sequence: Synthetic oligonucleotide
  Sense strand starting at position 1949 of SEQ ID NO: 1887282
uccgcuuugagggagcaaa

SEQ ID NO: 2460421 - RNA, 19 nt, Artificial Sequence
  Description of Artificial Sequence: Synthetic oligonucleotide
  Antisense strand to SEQ ID NO: 2460420
uuugcucccucaaagcgga

SEQ ID NO: 2460422 - RNA, 19 nt, Artificial Sequence
  Description of Artificial Sequence: Synthetic oligonucleotide
  Sense strand starting at position 2340 of SEQ ID NO: 1887282
cuuuaaauuguagaagcaa

SEQ ID NO: 2460423 - RNA, 19 nt, Artificial Sequence
  Description of Artificial Sequence: Synthetic oligonucleotide
  Antisense strand to SEQ ID NO: 2460422
uugcuucuacaauuuaaag

SEQ ID NO: 2460424 - RNA, 19 nt, Artificial Sequence
  Description of Artificial Sequence: Synthetic oligonucleotide
  Sense strand starting at position 2369 of SEQ ID NO: 1887282
uauguucuugcagagaagu

SEQ ID NO: 2460425 - RNA, 19 nt, Artificial Sequence
  Description of Artificial Sequence: Synthetic oligonucleotide
  Antisense strand to SEQ ID NO: 2460424
acuucucugcaagaacaua

SEQ ID NO: 2460426 - RNA, 19 nt, Artificial Sequence
  Description of Artificial Sequence: Synthetic oligonucleotide
  Sense strand starting at position 2371 of SEQ ID NO: 1887282
uguucuugcagagaaguaa

SEQ ID NO: 2460427 - RNA, 19 nt, Artificial Sequence
  Description of Artificial Sequence: Synthetic oligonucleotide
  Antisense strand to SEQ ID NO: 2460426
uuacuucucugcaagaaca

SEQ ID NO: 2460428 - RNA, 19 nt, Artificial Sequence
  Description of Artificial Sequence: Synthetic oligonucleotide
  Sense strand starting at position 2424 of SEQ ID NO: 1887282
guaacuaauggacgguauu

SEQ ID NO: 2460429 - RNA, 19 nt, Artificial Sequence
  Description of Artificial Sequence: Synthetic oligonucleotide
  Antisense strand to SEQ ID NO: 2460428
aauaccguccauuaguuac

SEQ ID NO: 2460430 - RNA, 19 nt, Artificial Sequence
  Description of Artificial Sequence: Synthetic oligonucleotide
  Sense strand starting at position 2425 of SEQ ID NO: 1887282
uaacuaauggacgguauua

SEQ ID NO: 2460431 - RNA, 19 nt, Artificial Sequence
  Description of Artificial Sequence: Synthetic oligonucleotide
  Antisense strand to SEQ ID NO: 2460430
uaauaccguccauuaguua

SEQ ID NO: 2460432 - RNA, 19 nt, Artificial Sequence
  Description of Artificial Sequence: Synthetic oligonucleotide
  Sense strand starting at position 2427 of SEQ ID NO: 1887282
acuaauggacgguauuauu

SEQ ID NO: 2460433 - RNA, 19 nt, Artificial Sequence
  Description of Artificial Sequence: Synthetic oligonucleotide
  Antisense strand to SEQ ID NO: 2460432
aauaauaccguccauuagu

SEQ ID NO: 2460434 - RNA, 19 nt, Artificial Sequence
  Description of Artificial Sequence: Synthetic oligonucleotide
  Sense strand starting at position 2437 of SEQ ID NO: 1887282
gguauuauuaugggaggua

SEQ ID NO: 2460435 - RNA, 19 nt, Artificial Sequence
  Description of Artificial Sequence: Synthetic oligonucleotide
  Antisense strand to SEQ ID NO: 2460434
uaccucccauaauaauacc

SEQ ID NO: 2460436 - RNA, 19 nt, Artificial Sequence
  Description of Artificial Sequence: Synthetic oligonucleotide
  Sense strand starting at position 2508 of SEQ ID NO: 1887282
ggaacucuauugccaauca

SEQ ID NO: 2460437 - RNA, 19 nt, Artificial Sequence
  Description of Artificial Sequence: Synthetic oligonucleotide
  Antisense strand to SEQ ID NO: 2460436
ugauuggcaauagaguucc

SEQ ID NO: 2460438 - RNA, 19 nt, Artificial Sequence
  Description of Artificial Sequence: Synthetic oligonucleotide
  Sense strand starting at position 2570 of SEQ ID NO: 1887282
gggugauaaugguuuccuu

SEQ ID NO: 2460439 - RNA, 19 nt, Artificial Sequence
  Description of Artificial Sequence: Synthetic oligonucleotide
  Antisense strand to SEQ ID NO: 2460438
aaggaaaccauuaucaccc

SEQ ID NO: 2460440 - RNA, 19 nt, Artificial Sequence
  Description of Artificial Sequence: Synthetic oligonucleotide
  Sense strand starting at position 2573 of SEQ ID NO: 1887282
ugauaaugguuuccuuaca

SEQ ID NO: 2460441 - RNA, 19 nt, Artificial Sequence
  Description of Artificial Sequence: Synthetic oligonucleotide
  Antisense strand to SEQ ID NO: 2460440
uguaaggaaaccauuauca

SEQ ID NO: 2460442 - RNA, 19 nt, Artificial Sequence
  Description of Artificial Sequence: Synthetic oligonucleotide
  Sense strand starting at position 2583 of SEQ ID NO: 1887282
uuccuuacaguguaaguau

SEQ ID NO: 2460443 - RNA, 19 nt, Artificial Sequence
  Description of Artificial Sequence: Synthetic oligonucleotide
  Antisense strand to SEQ ID NO: 2460442
auacuuacacuguaaggaa

SEQ ID NO: 2460444 - RNA, 19 nt, Artificial Sequence
  Description of Artificial Sequence: Synthetic oligonucleotide
  Sense strand starting at position 2590 of SEQ ID NO: 1887282
caguguaaguaucuaguaa

SEQ ID NO: 2460445 - RNA, 19 nt, Artificial Sequence
  Description of Artificial Sequence: Synthetic oligonucleotide
  Antisense strand to SEQ ID NO: 2460444
uuacuagauacuuacacug

SEQ ID NO: 2460446 - RNA, 19 nt, Artificial Sequence
  Description of Artificial Sequence: Synthetic oligonucleotide
  Sense strand starting at position 2591 of SEQ ID NO: 1887282
aguguaaguaucuaguaaa

SEQ ID NO: 2460447 - RNA, 19 nt, Artificial Sequence
  Description of Artificial Sequence: Synthetic oligonucleotide
  Antisense strand to SEQ ID NO: 2460446
uuuacuagauacuuacacu

SEQ ID NO: 2460448 - RNA, 19 nt, Artificial Sequence
  Description of Artificial Sequence: Synthetic oligonucleotide
  Sense strand starting at position 2598 of SEQ ID NO: 1887282
guaucuaguaaaugggaga

SEQ ID NO: 2460449 - RNA, 19 nt, Artificial Sequence
  Description of Artificial Sequence: Synthetic oligonucleotide
  Antisense strand to SEQ ID NO: 2460448
ucucccauuuacuagauac

SEQ ID NO: 2460450 - RNA, 19 nt, Artificial Sequence
  Description of Artificial Sequence: Synthetic oligonucleotide
  Sense strand starting at position 2603 of SEQ ID NO: 1887282
uaguaaaugggagacguua

SEQ ID NO: 2460451 - RNA, 19 nt, Artificial Sequence
  Description of Artificial Sequence: Synthetic oligonucleotide
  Antisense strand to SEQ ID NO: 2460450
uaacgucucccauuuacua

SEQ ID NO: 2460452 - RNA, 19 nt, Artificial Sequence
  Description of Artificial Sequence: Synthetic oligonucleotide
  Sense strand starting at position 2605 of SEQ ID NO: 1887282
guaaaugggagacguuaua

SEQ ID NO: 2460453 - RNA, 19 nt, Artificial Sequence
  Description of Artificial Sequence: Synthetic oligonucleotide
  Antisense strand to SEQ ID NO: 2460452
uauaacgucucccauuuac

SEQ ID NO: 2460454 - RNA, 19 nt, Artificial Sequence
  Description of Artificial Sequence: Synthetic oligonucleotide
  Sense strand starting at position 2711 of SEQ ID NO: 1887282
agcggugaugaugacaaua

SEQ ID NO: 2460455 - RNA, 19 nt, Artificial Sequence
  Description of Artificial Sequence: Synthetic oligonucleotide
  Antisense strand to SEQ ID NO: 2460454
uauugucaucaucaccgcu

SEQ ID NO: 2460456 - RNA, 19 nt, Artificial Sequence
  Description of Artificial Sequence: Synthetic oligonucleotide
  Sense strand starting at position 2773 of SEQ ID NO: 1887282
auuugcacguuuccuuaau

SEQ ID NO: 2460457 - RNA, 19 nt, Artificial Sequence
  Description of Artificial Sequence: Synthetic oligonucleotide
  Antisense strand to SEQ ID NO: 2460456
auuaaggaaacgugcaaau

SEQ ID NO: 2460458 - RNA, 19 nt, Artificial Sequence
  Description of Artificial Sequence: Synthetic oligonucleotide
  Sense strand starting at position 2826 of SEQ ID NO: 1887282
ggcuguuugccagugccau

SEQ ID NO: 2460459 - RNA, 19 nt, Artificial Sequence
  Description of Artificial Sequence: Synthetic oligonucleotide
  Antisense strand to SEQ ID NO: 2460458
auggcacuggcaaacagcc

SEQ ID NO: 2460460 - RNA, 19 nt, Artificial Sequence
  Description of Artificial Sequence: Synthetic oligonucleotide
  Sense strand starting at position 3141 of SEQ ID NO: 1887282
gagguuucaccacgauggu

SEQ ID NO: 2460461 - RNA, 19 nt, Artificial Sequence
  Description of Artificial Sequence: Synthetic oligonucleotide
  Antisense strand to SEQ ID NO: 2460460
accaucguggugaaaccuc

SEQ ID NO: 2460462 - RNA, 19 nt, Artificial Sequence
  Description of Artificial Sequence: Synthetic oligonucleotide
  Sense strand starting at position 3247 of SEQ ID NO: 1887282
uggucaaggcuugaacuuu

SEQ ID NO: 2460463 - RNA, 19 nt, Artificial Sequence
  Description of Artificial Sequence: Synthetic oligonucleotide
  Antisense strand to SEQ ID NO: 2460462
aaaguucaagccuugacca

SEQ ID NO: 2460464 - RNA, 19 nt, Artificial Sequence
  Description of Artificial Sequence: Synthetic oligonucleotide
  Sense strand starting at position 3351 of SEQ ID NO: 1887282
cucaaugcacuugauguua

SEQ ID NO: 2460465 - RNA, 19 nt, Artificial Sequence
  Description of Artificial Sequence: Synthetic oligonucleotide
  Antisense strand to SEQ ID NO: 2460464
uaacaucaagugcauugag

SEQ ID NO: 2460466 - RNA, 19 nt, Artificial Sequence
  Description of Artificial Sequence: Synthetic oligonucleotide
  Sense strand starting at position 3415 of SEQ ID NO: 1887282
aggaguuagcccugagaag

SEQ ID NO: 2460467 - RNA, 19 nt, Artificial Sequence
  Description of Artificial Sequence: Synthetic oligonucleotide
  Antisense strand to SEQ ID NO: 2460466
cuucucagggcuaacuccu

SEQ ID NO: 2460468 - RNA, 19 nt, Artificial Sequence
  Description of Artificial Sequence: Synthetic oligonucleotide
  Sense strand starting at position 3605 of SEQ ID NO: 1887282
gguagugaugaaugguauc

SEQ ID NO: 2460469 - RNA, 19 nt, Artificial Sequence
  Description of Artificial Sequence: Synthetic oligonucleotide
  Antisense strand to SEQ ID NO: 2460468
gauaccauucaucacuacc

SEQ ID NO: 2460470 - RNA, 19 nt, Artificial Sequence
  Description of Artificial Sequence: Synthetic oligonucleotide
  Sense strand starting at position 3699 of SEQ ID NO: 1887282
ugggacuacagaugcuaau

SEQ ID NO: 2460471 - RNA, 19 nt, Artificial Sequence
  Description of Artificial Sequence: Synthetic oligonucleotide
  Antisense strand to SEQ ID NO: 2460470
auuagcaucuguaguccca

SEQ ID NO: 2460472 - RNA, 19 nt, Artificial Sequence
  Description of Artificial Sequence: Synthetic oligonucleotide
  Sense strand starting at position 3889 of SEQ ID NO: 1887282
ucccaaggcugguuuagau

SEQ ID NO: 2460473 - RNA, 19 nt, Artificial Sequence
  Description of Artificial Sequence: Synthetic oligonucleotide
  Antisense strand to SEQ ID NO: 2460472
aucuaaaccagccuuggga

SEQ ID NO: 2460474 - RNA, 19 nt, Artificial Sequence
  Description of Artificial Sequence: Synthetic oligonucleotide
  Sense strand starting at position 3973 of SEQ ID NO: 1887282
ggccuuugaucuuccugau

SEQ ID NO: 2460475 - RNA, 19 nt, Artificial Sequence
  Description of Artificial Sequence: Synthetic oligonucleotide
  Antisense strand to SEQ ID NO: 2460474
aucaggaagaucaaaggcc

SEQ ID NO: 2460476 - RNA, 19 nt, Artificial Sequence
  Description of Artificial Sequence: Synthetic oligonucleotide
  Sense strand starting at position 1526 of SEQ ID NO: 1887283
gcgggcauguugagacuuu

SEQ ID NO: 2460477 - RNA, 19 nt, Artificial Sequence
  Description of Artificial Sequence: Synthetic oligonucleotide
  Antisense strand to SEQ ID NO: 2460476
aaagucucaacaugcccgc

SEQ ID NO: 2460478 - RNA, 19 nt, Artificial Sequence
  Description of Artificial Sequence: Synthetic oligonucleotide
  Sense strand starting at position 1700 of SEQ ID NO: 1887283
gagaaaucguccuccuacc

SEQ ID NO: 2460479 - RNA, 19 nt, Artificial Sequence
  Description of Artificial Sequence: Synthetic oligonucleotide
  Antisense strand to SEQ ID NO: 2460478
gguaggaggacgauuucuc

SEQ ID NO: 2460480 - RNA, 19 nt, Artificial Sequence
  Description of Artificial Sequence: Synthetic oligonucleotide
  Sense strand starting at position 1733 of SEQ ID NO: 1887283
cugcguuucucuuccaauc

SEQ ID NO: 2460481 - RNA, 19 nt, Artificial Sequence
  Description of Artificial Sequence: Synthetic oligonucleotide
  Antisense strand to SEQ ID NO: 2460480
gauuggaagagaaacgcag

SEQ ID NO: 2460482 - RNA, 19 nt, Artificial Sequence
  Description of Artificial Sequence: Synthetic oligonucleotide
  Sense strand starting at position 2189 of SEQ ID NO: 1887283
aggacaagcuucucaaugu

SEQ ID NO: 2460483 - RNA, 19 nt, Artificial Sequence
  Description of Artificial Sequence: Synthetic oligonucleotide
  Antisense strand to SEQ ID NO: 2460482
acauugagaagcuuguccu

SEQ ID NO: 2460484 - RNA, 19 nt, Artificial Sequence
  Description of Artificial Sequence: Synthetic oligonucleotide
  Sense strand starting at position 2190 of SEQ ID NO: 1887283
ggacaagcuucucaauguc

SEQ ID NO: 2460485 - RNA, 19 nt, Artificial Sequence
  Description of Artificial Sequence: Synthetic oligonucleotide
  Antisense strand to SEQ ID NO: 2460484
gacauugagaagcuugucc

SEQ ID NO: 2460486 - RNA, 19 nt, Artificial Sequence
  Description of Artificial Sequence: Synthetic oligonucleotide
  Sense strand starting at position 2207 of SEQ ID NO: 1887283
ucccguuucgcuggguuua

SEQ ID NO: 2460487 - RNA, 19 nt, Artificial Sequence
  Description of Artificial Sequence: Synthetic oligonucleotide
  Antisense strand to SEQ ID NO: 2460486
uaaacccagcgaaacggga

SEQ ID NO: 2460488 - RNA, 19 nt, Artificial Sequence
  Description of Artificial Sequence: Synthetic oligonucleotide
  Sense strand starting at position 2220 of SEQ ID NO: 1887283
gguuuaggauccgaggagu

SEQ ID NO: 2460489 - RNA, 19 nt, Artificial Sequence
  Description of Artificial Sequence: Synthetic oligonucleotide
  Antisense strand to SEQ ID NO: 2460488
acuccucggauccuaaacc

SEQ ID NO: 2460490 - RNA, 19 nt, Artificial Sequence
  Description of Artificial Sequence: Synthetic oligonucleotide
  Sense strand starting at position 2369 of SEQ ID NO: 1887283
guggguuugcgcgagggau

SEQ ID NO: 2460491 - RNA, 19 nt, Artificial Sequence
  Description of Artificial Sequence: Synthetic oligonucleotide
  Antisense strand to SEQ ID NO: 2460490
aucccucgcgcaaacccac

SEQ ID NO: 2460492 - RNA, 19 nt, Artificial Sequence
  Description of Artificial Sequence: Synthetic oligonucleotide
  Sense strand starting at position 2370 of SEQ ID NO: 1887283
uggguuugcgcgagggauc

SEQ ID NO: 2460493 - RNA, 19 nt, Artificial Sequence
  Description of Artificial Sequence: Synthetic oligonucleotide
  Antisense strand to SEQ ID NO: 2460492
gaucccucgcgcaaaccca

SEQ ID NO: 2460494 - RNA, 19 nt, Artificial Sequence
  Description of Artificial Sequence: Synthetic oligonucleotide
  Sense strand starting at position 2537 of SEQ ID NO: 1887283
uguuguuaccggcgucaca

SEQ ID NO: 2460495 - RNA, 19 nt, Artificial Sequence
  Description of Artificial Sequence: Synthetic oligonucleotide
  Antisense strand to SEQ ID NO: 2460494
ugugacgccgguaacaaca

SEQ ID NO: 2460496 - RNA, 19 nt, Artificial Sequence
  Description of Artificial Sequence: Synthetic oligonucleotide
  Sense strand starting at position 2578 of SEQ ID NO: 1887283
acgcaaucagcuugucaaa

SEQ ID NO: 2460497 - RNA, 19 nt, Artificial Sequence
  Description of Artificial Sequence: Synthetic oligonucleotide
  Antisense strand to SEQ ID NO: 2460496
uuugacaagcugauugcgu

SEQ ID NO: 2460498 - RNA, 19 nt, Artificial Sequence
  Description of Artificial Sequence: Synthetic oligonucleotide
  Sense strand starting at position 2601 of SEQ ID NO: 1887283
cucggccaucccuaggaaa

SEQ ID NO: 2460499 - RNA, 19 nt, Artificial Sequence
  Description of Artificial Sequence: Synthetic oligonucleotide
  Antisense strand to SEQ ID NO: 2460498
uuuccuagggauggccgag

SEQ ID NO: 2460500 - RNA, 19 nt, Artificial Sequence
  Description of Artificial Sequence: Synthetic oligonucleotide
  Sense strand starting at position 3084 of SEQ ID NO: 1887283
ccucuugucuccugggaga

SEQ ID NO: 2460501 - RNA, 19 nt, Artificial Sequence
  Description of Artificial Sequence: Synthetic oligonucleotide
  Antisense strand to SEQ ID NO: 2460500
ucucccaggagacaagagg

SEQ ID NO: 2460502 - RNA, 19 nt, Artificial Sequence
  Description of Artificial Sequence: Synthetic oligonucleotide
  Sense strand starting at position 3086 of SEQ ID NO: 1887283
ucuugucuccugggagaaa

SEQ ID NO: 2460503 - RNA, 19 nt, Artificial Sequence
  Description of Artificial Sequence: Synthetic oligonucleotide
  Antisense strand to SEQ ID NO: 2460502
uuucucccaggagacaaga

SEQ ID NO: 2460504 - RNA, 19 nt, Artificial Sequence
  Description of Artificial Sequence: Synthetic oligonucleotide
  Sense strand starting at position 3099 of SEQ ID NO: 1887283
gagaaaugagauugcuuuc

SEQ ID NO: 2460505 - RNA, 19 nt, Artificial Sequence
  Description of Artificial Sequence: Synthetic oligonucleotide
  Antisense strand to SEQ ID NO: 2460504
gaaagcaaucucauuucuc

SEQ ID NO: 2460506 - RNA, 19 nt, Artificial Sequence
  Description of Artificial Sequence: Synthetic oligonucleotide
  Sense strand starting at position 3249 of SEQ ID NO: 1887283
acuaguagauguuaaugaa

SEQ ID NO: 2460507 - RNA, 19 nt, Artificial Sequence
  Description of Artificial Sequence: Synthetic oligonucleotide
  Antisense strand to SEQ ID NO: 2460506
uucauuaacaucuacuagu

SEQ ID NO: 2460508 - RNA, 19 nt, Artificial Sequence
  Description of Artificial Sequence: Synthetic oligonucleotide
  Sense strand starting at position 3382 of SEQ ID NO: 1887283
cccagaacugcacguguuu

SEQ ID NO: 2460509 - RNA, 19 nt, Artificial Sequence
  Description of Artificial Sequence: Synthetic oligonucleotide
  Antisense strand to SEQ ID NO: 2460508
aaacacgugcaguucuggg

SEQ ID NO: 2460510 - RNA, 19 nt, Artificial Sequence
  Description of Artificial Sequence: Synthetic oligonucleotide
  Sense strand starting at position 3393 of SEQ ID NO: 1887283
acguguuucuggcccuaca

SEQ ID NO: 2460511 - RNA, 19 nt, Artificial Sequence
  Description of Artificial Sequence: Synthetic oligonucleotide
  Antisense strand to SEQ ID NO: 2460510
uguagggccagaaacacgu

SEQ ID NO: 2460512 - RNA, 19 nt, Artificial Sequence
  Description of Artificial Sequence: Synthetic oligonucleotide
  Sense strand starting at position 3414 of SEQ ID NO: 1887283
cccagaucgucccuuggaa

SEQ ID NO: 2460513 - RNA, 19 nt, Artificial Sequence
  Description of Artificial Sequence: Synthetic oligonucleotide
  Antisense strand to SEQ ID NO: 2460512
uuccaagggacgaucuggg

SEQ ID NO: 2460514 - RNA, 19 nt, Artificial Sequence
  Description of Artificial Sequence: Synthetic oligonucleotide
  Sense strand starting at position 3416 of SEQ ID NO: 1887283
cagaucgucccuuggaaua

SEQ ID NO: 2460515 - RNA, 19 nt, Artificial Sequence
  Description of Artificial Sequence: Synthetic oligonucleotide
  Antisense strand to SEQ ID NO: 2460514
uauuccaagggacgaucug

SEQ ID NO: 2460516 - RNA, 19 nt, Artificial Sequence
  Description of Artificial Sequence: Synthetic oligonucleotide
  Sense strand starting at position 3418 of SEQ ID NO: 1887283
gaucgucccuuggaauaua

SEQ ID NO: 2460517 - RNA, 19 nt, Artificial Sequence
  Description of Artificial Sequence: Synthetic oligonucleotide
  Antisense strand to SEQ ID NO: 2460516
uauauuccaagggacgauc

SEQ ID NO: 2460518 - RNA, 19 nt, Artificial Sequence
  Description of Artificial Sequence: Synthetic oligonucleotide
  Sense strand starting at position 3439 of SEQ ID NO: 1887283
cagggcaauuuguguagga

SEQ ID NO: 2460519 - RNA, 19 nt, Artificial Sequence
  Description of Artificial Sequence: Synthetic oligonucleotide
  Antisense strand to SEQ ID NO: 2460518
uccuacacaaauugcccug

SEQ ID NO: 2460520 - RNA, 19 nt, Artificial Sequence
  Description of Artificial Sequence: Synthetic oligonucleotide
  Sense strand starting at position 3444 of SEQ ID NO: 1887283
caauuuguguaggaucaca

SEQ ID NO: 2460521 - RNA, 19 nt, Artificial Sequence
  Description of Artificial Sequence: Synthetic oligonucleotide
  Antisense strand to SEQ ID NO: 2460520
ugugauccuacacaaauug

SEQ ID NO: 2460522 - RNA, 19 nt, Artificial Sequence
  Description of Artificial Sequence: Synthetic oligonucleotide
  Sense strand starting at position 3541 of SEQ ID NO: 1887283
ggaggucuuaagugauuaa

SEQ ID NO: 2460523 - RNA, 19 nt, Artificial Sequence
  Description of Artificial Sequence: Synthetic oligonucleotide
  Antisense strand to SEQ ID NO: 2460522
uuaaucacuuaagaccucc

SEQ ID NO: 2460524 - RNA, 19 nt, Artificial Sequence
  Description of Artificial Sequence: Synthetic oligonucleotide
  Sense strand starting at position 3551 of SEQ ID NO: 1887283
agugauuaagcccaggagu

SEQ ID NO: 2460525 - RNA, 19 nt, Artificial Sequence
  Description of Artificial Sequence: Synthetic oligonucleotide
  Antisense strand to SEQ ID NO: 2460524
acuccugggcuuaaucacu

SEQ ID NO: 2460526 - RNA, 19 nt, Artificial Sequence
  Description of Artificial Sequence: Synthetic oligonucleotide
  Sense strand starting at position 3570 of SEQ ID NO: 1887283
ucgagaucagcuuagacaa

SEQ ID NO: 2460527 - RNA, 19 nt, Artificial Sequence
  Description of Artificial Sequence: Synthetic oligonucleotide
  Antisense strand to SEQ ID NO: 2460526
uugucuaagcugaucucga

SEQ ID NO: 2460528 - RNA, 19 nt, Artificial Sequence
  Description of Artificial Sequence: Synthetic oligonucleotide
  Sense strand starting at position 3593 of SEQ ID NO: 1887283
gcaagaugcugccucuaca

SEQ ID NO: 2460529 - RNA, 19 nt, Artificial Sequence
  Description of Artificial Sequence: Synthetic oligonucleotide
  Antisense strand to SEQ ID NO: 2460528
uguagaggcagcaucuugc

SEQ ID NO: 2460530 - RNA, 19 nt, Artificial Sequence
  Description of Artificial Sequence: Synthetic oligonucleotide
  Sense strand starting at position 3743 of SEQ ID NO: 1887283
ccuucuuaauaguguguga

SEQ ID NO: 2460531 - RNA, 19 nt, Artificial Sequence
  Description of Artificial Sequence: Synthetic oligonucleotide
  Antisense strand to SEQ ID NO: 2460530
ucacacacuauuaagaagg

SEQ ID NO: 2460532 - RNA, 19 nt, Artificial Sequence
  Description of Artificial Sequence: Synthetic oligonucleotide
  Sense strand starting at position 3745 of SEQ ID NO: 1887283
uucuuaauagugugugaau

SEQ ID NO: 2460533 - RNA, 19 nt, Artificial Sequence
  Description of Artificial Sequence: Synthetic oligonucleotide
  Antisense strand to SEQ ID NO: 2460532
auucacacacuauuaagaa

SEQ ID NO: 2460534 - RNA, 19 nt, Artificial Sequence
  Description of Artificial Sequence: Synthetic oligonucleotide
  Sense strand starting at position 3746 of SEQ ID NO: 1887283
ucuuaauagugugugaauc

SEQ ID NO: 2460535 - RNA, 19 nt, Artificial Sequence
  Description of Artificial Sequence: Synthetic oligonucleotide
  Antisense strand to SEQ ID NO: 2460534
gauucacacacuauuaaga

SEQ ID NO: 2460536 - RNA, 19 nt, Artificial Sequence
  Description of Artificial Sequence: Synthetic oligonucleotide
  Sense strand starting at position 3747 of SEQ ID NO: 1887283
cuuaauagugugugaaucu

SEQ ID NO: 2460537 - RNA, 19 nt, Artificial Sequence
  Description of Artificial Sequence: Synthetic oligonucleotide
  Antisense strand to SEQ ID NO: 2460536
agauucacacacuauuaag

SEQ ID NO: 2460538 - RNA, 19 nt, Artificial Sequence
  Description of Artificial Sequence: Synthetic oligonucleotide
  Sense strand starting at position 3756 of SEQ ID NO: 1887283
gugugaaucugagugccuu

SEQ ID NO: 2460539 - RNA, 19 nt, Artificial Sequence
  Description of Artificial Sequence: Synthetic oligonucleotide
  Antisense strand to SEQ ID NO: 2460538
aaggcacucagauucacac

SEQ ID NO: 2460540 - RNA, 19 nt, Artificial Sequence
  Description of Artificial Sequence: Synthetic oligonucleotide
  Sense strand starting at position 3757 of SEQ ID NO: 1887283
ugugaaucugagugccuua

SEQ ID NO: 2460541 - RNA, 19 nt, Artificial Sequence
  Description of Artificial Sequence: Synthetic oligonucleotide
  Antisense strand to SEQ ID NO: 2460540
uaaggcacucagauucaca

SEQ ID NO: 2460542 - RNA, 19 nt, Artificial Sequence
  Description of Artificial Sequence: Synthetic oligonucleotide
  Sense strand starting at position 3760 of SEQ ID NO: 1887283
gaaucugagugccuuauua

SEQ ID NO: 2460543 - RNA, 19 nt, Artificial Sequence
  Description of Artificial Sequence: Synthetic oligonucleotide
  Antisense strand to SEQ ID NO: 2460542
uaauaaggcacucagauuc

SEQ ID NO: 2460544 - RNA, 19 nt, Artificial Sequence
  Description of Artificial Sequence: Synthetic oligonucleotide
  Sense strand starting at position 3762 of SEQ ID NO: 1887283
aucugagugccuuauuaac

SEQ ID NO: 2460545 - RNA, 19 nt, Artificial Sequence
  Description of Artificial Sequence: Synthetic oligonucleotide
  Antisense strand to SEQ ID NO: 2460544
guuaauaaggcacucagau

SEQ ID NO: 2460546 - RNA, 19 nt, Artificial Sequence
  Description of Artificial Sequence: Synthetic oligonucleotide
  Sense strand starting at position 3764 of SEQ ID NO: 1887283
cugagugccuuauuaaccu

SEQ ID NO: 2460547 - RNA, 19 nt, Artificial Sequence
  Description of Artificial Sequence: Synthetic oligonucleotide
  Antisense strand to SEQ ID NO: 2460546
agguuaauaaggcacucag

SEQ ID NO: 2460548 - RNA, 19 nt, Artificial Sequence
  Description of Artificial Sequence: Synthetic oligonucleotide
  Sense strand starting at position 3792 of SEQ ID NO: 1887283
ccaguuucguaucuguaaa

SEQ ID NO: 2460549 - RNA, 19 nt, Artificial Sequence
  Description of Artificial Sequence: Synthetic oligonucleotide
  Antisense strand to SEQ ID NO: 2460548
uuuacagauacgaaacugg

SEQ ID NO: 2460550 - RNA, 19 nt, Artificial Sequence
  Description of Artificial Sequence: Synthetic oligonucleotide
  Sense strand starting at position 3794 of SEQ ID NO: 1887283
aguuucguaucuguaaagu

SEQ ID NO: 2460551 - RNA, 19 nt, Artificial Sequence
  Description of Artificial Sequence: Synthetic oligonucleotide
  Antisense strand to SEQ ID NO: 2460550
acuuuacagauacgaaacu

SEQ ID NO: 2460552 - RNA, 19 nt, Artificial Sequence
  Description of Artificial Sequence: Synthetic oligonucleotide
  Sense strand starting at position 3860 of SEQ ID NO: 1887283
ggccaaaugagaugaugua

SEQ ID NO: 2460553 - RNA, 19 nt, Artificial Sequence
  Description of Artificial Sequence: Synthetic oligonucleotide
  Antisense strand to SEQ ID NO: 2460552
uacaucaucucauuuggcc

SEQ ID NO: 2460554 - RNA, 19 nt, Artificial Sequence
  Description of Artificial Sequence: Synthetic oligonucleotide
  Sense strand starting at position 3887 of SEQ ID NO: 1887283
uguaaaguccuccacagau

SEQ ID NO: 2460555 - RNA, 19 nt, Artificial Sequence
  Description of Artificial Sequence: Synthetic oligonucleotide
  Antisense strand to SEQ ID NO: 2460554
aucuguggaggacuuuaca

SEQ ID NO: 2460556 - RNA, 19 nt, Artificial Sequence
  Description of Artificial Sequence: Synthetic oligonucleotide
  Sense strand starting at position 388 of SEQ ID NO: 1887284
uccauaguaugcucaauga

SEQ ID NO: 2460557 - RNA, 19 nt, Artificial Sequence
  Description of Artificial Sequence: Synthetic oligonucleotide
  Antisense strand to SEQ ID NO: 2460556
ucauugagcauacuaugga

SEQ ID NO: 2460558 - RNA, 19 nt, Artificial Sequence
  Description of Artificial Sequence: Synthetic oligonucleotide
  Sense strand starting at position 439 of SEQ ID NO: 1887284
caagacucucgugacucaa

SEQ ID NO: 2460559 - RNA, 19 nt, Artificial Sequence
  Description of Artificial Sequence: Synthetic oligonucleotide
  Antisense strand to SEQ ID NO: 2460558
uugagucacgagagucuug

SEQ ID NO: 2460560 - RNA, 19 nt, Artificial Sequence
  Description of Artificial Sequence: Synthetic oligonucleotide
  Sense strand starting at position 508 of SEQ ID NO: 1887284
agaaguuccaauuacguga

SEQ ID NO: 2460561 - RNA, 19 nt, Artificial Sequence
  Description of Artificial Sequence: Synthetic oligonucleotide
  Antisense strand to SEQ ID NO: 2460560
ucacguaauuggaacuucu

SEQ ID NO: 2460562 - RNA, 19 nt, Artificial Sequence
  Description of Artificial Sequence: Synthetic oligonucleotide
  Sense strand starting at position 513 of SEQ ID NO: 1887284
uuccaauuacgugaaguuu

SEQ ID NO: 2460563 - RNA, 19 nt, Artificial Sequence
  Description of Artificial Sequence: Synthetic oligonucleotide
  Antisense strand to SEQ ID NO: 2460562
aaacuucacguaauuggaa

SEQ ID NO: 2460564 - RNA, 19 nt, Artificial Sequence
  Description of Artificial Sequence: Synthetic oligonucleotide
  Sense strand starting at position 563 of SEQ ID NO: 1887284
acucaucaguagucuuuga

SEQ ID NO: 2460565 - RNA, 19 nt, Artificial Sequence
  Description of Artificial Sequence: Synthetic oligonucleotide
  Antisense strand to SEQ ID NO: 2460564
ucaaagacuacugaugagu

SEQ ID NO: 2460566 - RNA, 19 nt, Artificial Sequence
  Description of Artificial Sequence: Synthetic oligonucleotide
  Sense strand starting at position 570 of SEQ ID NO: 1887284
aguagucuuugagcuaaga

SEQ ID NO: 2460567 - RNA, 19 nt, Artificial Sequence
  Description of Artificial Sequence: Synthetic oligonucleotide
  Antisense strand to SEQ ID NO: 2460566
ucuuagcucaaagacuacu

SEQ ID NO: 2460568 - RNA, 19 nt, Artificial Sequence
  Description of Artificial Sequence: Synthetic oligonucleotide
  Sense strand starting at position 616 of SEQ ID NO: 1887284
ugcgaaagaucuccaguaa

SEQ ID NO: 2460569 - RNA, 19 nt, Artificial Sequence
  Description of Artificial Sequence: Synthetic oligonucleotide
  Antisense strand to SEQ ID NO: 2460568
uuacuggagaucuuucgca

SEQ ID NO: 2460570 - RNA, 19 nt, Artificial Sequence
  Description of Artificial Sequence: Synthetic oligonucleotide
  Sense strand starting at position 617 of SEQ ID NO: 1887284
gcgaaagaucuccaguaag

SEQ ID NO: 2460571 - RNA, 19 nt, Artificial Sequence
  Description of Artificial Sequence: Synthetic oligonucleotide
  Antisense strand to SEQ ID NO: 2460570
cuuacuggagaucuuucgc

SEQ ID NO: 2460572 - RNA, 19 nt, Artificial Sequence
  Description of Artificial Sequence: Synthetic oligonucleotide
  Sense strand starting at position 642 of SEQ ID NO: 1887284
ccaggaaagcaauguccau

SEQ ID NO: 2460573 - RNA, 19 nt, Artificial Sequence
  Description of Artificial Sequence: Synthetic oligonucleotide
  Antisense strand to SEQ ID NO: 2460572
auggacauugcuuuccugg

SEQ ID NO: 2460574 - RNA, 19 nt, Artificial Sequence
  Description of Artificial Sequence: Synthetic oligonucleotide
  Sense strand starting at position 683 of SEQ ID NO: 1887284
ugagucagacuguagucaa

SEQ ID NO: 2460575 - RNA, 19 nt, Artificial Sequence
  Description of Artificial Sequence: Synthetic oligonucleotide
  Antisense strand to SEQ ID NO: 2460574
uugacuacagucugacuca

SEQ ID NO: 2460576 - RNA, 19 nt, Artificial Sequence
  Description of Artificial Sequence: Synthetic oligonucleotide
  Sense strand starting at position 686 of SEQ ID NO: 1887284
gucagacuguagucaagaa

SEQ ID NO: 2460577 - RNA, 19 nt, Artificial Sequence
  Description of Artificial Sequence: Synthetic oligonucleotide
  Antisense strand to SEQ ID NO: 2460576
uucuugacuacagucugac

SEQ ID NO: 2460578 - RNA, 19 nt, Artificial Sequence
  Description of Artificial Sequence: Synthetic oligonucleotide
  Sense strand starting at position 690 of SEQ ID NO: 1887284
gacuguagucaagaagcuu

SEQ ID NO: 2460579 - RNA, 19 nt, Artificial Sequence
  Description of Artificial Sequence: Synthetic oligonucleotide
  Antisense strand to SEQ ID NO: 2460578
aagcuucuugacuacaguc

SEQ ID NO: 2460580 - RNA, 19 nt, Artificial Sequence
  Description of Artificial Sequence: Synthetic oligonucleotide
  Sense strand starting at position 1169 of SEQ ID NO: 1887284
ccuguagugucaguauuug

SEQ ID NO: 2460581 - RNA, 19 nt, Artificial Sequence
  Description of Artificial Sequence: Synthetic oligonucleotide
  Antisense strand to SEQ ID NO: 2460580
caaauacugacacuacagg

SEQ ID NO: 2460582 - RNA, 19 nt, Artificial Sequence
  Description of Artificial Sequence: Synthetic oligonucleotide
  Sense strand starting at position 2103 of SEQ ID NO: 1887284
cuauguccggcuggaauuu

SEQ ID NO: 2460583 - RNA, 19 nt, Artificial Sequence
  Description of Artificial Sequence: Synthetic oligonucleotide
  Antisense strand to SEQ ID NO: 2460582
aaauuccagccggacauag

SEQ ID NO: 2460584 - RNA, 19 nt, Artificial Sequence
  Description of Artificial Sequence: Synthetic oligonucleotide
  Sense strand starting at position 2274 of SEQ ID NO: 1887284
agggaagccuuuccaugaa

SEQ ID NO: 2460585 - RNA, 19 nt, Artificial Sequence
  Description of Artificial Sequence: Synthetic oligonucleotide
  Antisense strand to SEQ ID NO: 2460584
uucauggaaaggcuucccu

SEQ ID NO: 2460586 - RNA, 19 nt, Artificial Sequence
  Description of Artificial Sequence: Synthetic oligonucleotide
  Sense strand starting at position 2337 of SEQ ID NO: 1887284
uagcgauuucugcgaaaga

SEQ ID NO: 2460587 - RNA, 19 nt, Artificial Sequence
  Description of Artificial Sequence: Synthetic oligonucleotide
  Antisense strand to SEQ ID NO: 2460586
ucuuucgcagaaaucgcua

SEQ ID NO: 2460588 - RNA, 19 nt, Artificial Sequence
  Description of Artificial Sequence: Synthetic oligonucleotide
  Sense strand starting at position 2454 of SEQ ID NO: 1887284
ccaagcagggcuuaagaau

SEQ ID NO: 2460589 - RNA, 19 nt, Artificial Sequence
  Description of Artificial Sequence: Synthetic oligonucleotide
  Antisense strand to SEQ ID NO: 2460588
auucuuaagcccugcuugg

SEQ ID NO: 2460590 - RNA, 19 nt, Artificial Sequence
  Description of Artificial Sequence: Synthetic oligonucleotide
  Sense strand starting at position 2474 of SEQ ID NO: 1887284
uguguugucgguucuuagu

SEQ ID NO: 2460591 - RNA, 19 nt, Artificial Sequence
  Description of Artificial Sequence: Synthetic oligonucleotide
  Antisense strand to SEQ ID NO: 2460590
acuaagaaccgacaacaca

SEQ ID NO: 2460592 - RNA, 19 nt, Artificial Sequence
  Description of Artificial Sequence: Synthetic oligonucleotide
  Sense strand starting at position 2570 of SEQ ID NO: 1887284
uugagaaagcuuugcuaag

SEQ ID NO: 2460593 - RNA, 19 nt, Artificial Sequence
  Description of Artificial Sequence: Synthetic oligonucleotide
  Antisense strand to SEQ ID NO: 2460592
cuuagcaaagcuuucucaa

SEQ ID NO: 2460594 - RNA, 19 nt, Artificial Sequence
  Description of Artificial Sequence: Synthetic oligonucleotide
  Sense strand starting at position 2572 of SEQ ID NO: 1887284
gagaaagcuuugcuaagga

SEQ ID NO: 2460595 - RNA, 19 nt, Artificial Sequence
  Description of Artificial Sequence: Synthetic oligonucleotide
  Antisense strand to SEQ ID NO: 2460594
uccuuagcaaagcuuucuc

SEQ ID NO: 2460596 - RNA, 19 nt, Artificial Sequence
  Description of Artificial Sequence: Synthetic oligonucleotide
  Sense strand starting at position 2714 of SEQ ID NO: 1887284
acuuguuuccaguacauua

SEQ ID NO: 2460597 - RNA, 19 nt, Artificial Sequence
  Description of Artificial Sequence: Synthetic oligonucleotide
  Antisense strand to SEQ ID NO: 2460596
uaauguacuggaaacaagu

SEQ ID NO: 2460598 - RNA, 19 nt, Artificial Sequence
  Description of Artificial Sequence: Synthetic oligonucleotide
  Sense strand starting at position 2744 of SEQ ID NO: 1887284
cgaauuuaaucuccgccua

SEQ ID NO: 2460599 - RNA, 19 nt, Artificial Sequence
  Description of Artificial Sequence: Synthetic oligonucleotide
  Antisense strand to SEQ ID NO: 2460598
uaggcggagauuaaauucg

SEQ ID NO: 2460600 - RNA, 19 nt, Artificial Sequence
  Description of Artificial Sequence: Synthetic oligonucleotide
  Sense strand starting at position 2749 of SEQ ID NO: 1887284
uuaaucuccgccuagaaua

SEQ ID NO: 2460601 - RNA, 19 nt, Artificial Sequence
  Description of Artificial Sequence: Synthetic oligonucleotide
  Antisense strand to SEQ ID NO: 2460600
uauucuaggcggagauuaa

SEQ ID NO: 2460602 - RNA, 19 nt, Artificial Sequence
  Description of Artificial Sequence: Synthetic oligonucleotide
  Sense strand starting at position 2760 of SEQ ID NO: 1887284
cuagaauagucucugaggu

SEQ ID NO: 2460603 - RNA, 19 nt, Artificial Sequence
  Description of Artificial Sequence: Synthetic oligonucleotide
  Antisense strand to SEQ ID NO: 2460602
accucagagacuauucuag

SEQ ID NO: 2460604 - RNA, 19 nt, Artificial Sequence
  Description of Artificial Sequence: Synthetic oligonucleotide
  Sense strand starting at position 2761 of SEQ ID NO: 1887284
uagaauagucucugaggua

SEQ ID NO: 2460605 - RNA, 19 nt, Artificial Sequence
  Description of Artificial Sequence: Synthetic oligonucleotide
  Antisense strand to SEQ ID NO: 2460604
uaccucagagacuauucua

SEQ ID NO: 2460606 - RNA, 19 nt, Artificial Sequence
  Description of Artificial Sequence: Synthetic oligonucleotide
  Sense strand starting at position 2795 of SEQ ID NO: 1887284
aguguugagaagcaucaca

SEQ ID NO: 2460607 - RNA, 19 nt, Artificial Sequence
  Description of Artificial Sequence: Synthetic oligonucleotide
  Antisense strand to SEQ ID NO: 2460606
ugugaugcuucucaacacu

SEQ ID NO: 2460608 - RNA, 19 nt, Artificial Sequence
  Description of Artificial Sequence: Synthetic oligonucleotide
  Sense strand starting at position 2820 of SEQ ID NO: 1887284
agaggaaaggccuggguuu

SEQ ID NO: 2460609 - RNA, 19 nt, Artificial Sequence
  Description of Artificial Sequence: Synthetic oligonucleotide
  Antisense strand to SEQ ID NO: 2460608
aaacccaggccuuuccucu

SEQ ID NO: 2460610 - RNA, 19 nt, Artificial Sequence
  Description of Artificial Sequence: Synthetic oligonucleotide
  Sense strand starting at position 2987 of SEQ ID NO: 1887284
gcauuuguuucugugaguu

SEQ ID NO: 2460611 - RNA, 19 nt, Artificial Sequence
  Description of Artificial Sequence: Synthetic oligonucleotide
  Antisense strand to SEQ ID NO: 2460610
aacucacagaaacaaaugc

SEQ ID NO: 2460612 - RNA, 19 nt, Artificial Sequence
  Description of Artificial Sequence: Synthetic oligonucleotide
  Sense strand starting at position 3006 of SEQ ID NO: 1887284
uuagaauguucuccguaga

SEQ ID NO: 2460613 - RNA, 19 nt, Artificial Sequence
  Description of Artificial Sequence: Synthetic oligonucleotide
  Antisense strand to SEQ ID NO: 2460612
ucuacggagaacauucuaa

SEQ ID NO: 2460614 - RNA, 19 nt, Artificial Sequence
  Description of Artificial Sequence: Synthetic oligonucleotide
  Sense strand starting at position 3007 of SEQ ID NO: 1887284
uagaauguucuccguagau

SEQ ID NO: 2460615 - RNA, 19 nt, Artificial Sequence
  Description of Artificial Sequence: Synthetic oligonucleotide
  Antisense strand to SEQ ID NO: 2460614
aucuacggagaacauucua

SEQ ID NO: 2460616 - RNA, 19 nt, Artificial Sequence
  Description of Artificial Sequence: Synthetic oligonucleotide
  Sense strand starting at position 3009 of SEQ ID NO: 1887284
gaauguucuccguagauau

SEQ ID NO: 2460617 - RNA, 19 nt, Artificial Sequence
  Description of Artificial Sequence: Synthetic oligonucleotide
  Antisense strand to SEQ ID NO: 2460616
auaucuacggagaacauuc

SEQ ID NO: 2460618 - RNA, 19 nt, Artificial Sequence
  Description of Artificial Sequence: Synthetic oligonucleotide
  Sense strand starting at position 3196 of SEQ ID NO: 1887284
guuaauguuugagugacac

SEQ ID NO: 2460619 - RNA, 19 nt, Artificial Sequence
  Description of Artificial Sequence: Synthetic oligonucleotide
  Antisense strand to SEQ ID NO: 2460618
gugucacucaaacauuaac

SEQ ID NO: 2460620 - RNA, 19 nt, Artificial Sequence
  Description of Artificial Sequence: Synthetic oligonucleotide
  Sense strand starting at position 3393 of SEQ ID NO: 1887284
aguuacuugguuuauguua

SEQ ID NO: 2460621 - RNA, 19 nt, Artificial Sequence
  Description of Artificial Sequence: Synthetic oligonucleotide
  Antisense strand to SEQ ID NO: 2460620
uaacauaaaccaaguaacu

SEQ ID NO: 2460622 - RNA, 19 nt, Artificial Sequence
  Description of Artificial Sequence: Synthetic oligonucleotide
  Sense strand starting at position 3422 of SEQ ID NO: 1887284
acucaagugugaucugacu

SEQ ID NO: 2460623 - RNA, 19 nt, Artificial Sequence
  Description of Artificial Sequence: Synthetic oligonucleotide
  Antisense strand to SEQ ID NO: 2460622
agucagaucacacuugagu

SEQ ID NO: 2460624 - RNA, 19 nt, Artificial Sequence
  Description of Artificial Sequence: Synthetic oligonucleotide
  Sense strand starting at position 3424 of SEQ ID NO: 1887284
ucaagugugaucugacuga

SEQ ID NO: 2460625 - RNA, 19 nt, Artificial Sequence
  Description of Artificial Sequence: Synthetic oligonucleotide
  Antisense strand to SEQ ID NO: 2460624
ucagucagaucacacuuga

SEQ ID NO: 2460626 - RNA, 19 nt, Artificial Sequence
  Description of Artificial Sequence: Synthetic oligonucleotide
  Sense strand starting at position 3428 of SEQ ID NO: 1887284
gugugaucugacugaagaa

SEQ ID NO: 2460627 - RNA, 19 nt, Artificial Sequence
  Description of Artificial Sequence: Synthetic oligonucleotide
  Antisense strand to SEQ ID NO: 2460626
uucuucagucagaucacac

SEQ ID NO: 2460628 - RNA, 19 nt, Artificial Sequence
  Description of Artificial Sequence: Synthetic oligonucleotide
  Sense strand starting at position 3479 of SEQ ID NO: 1887284
gauguauaucaugagcuuc

SEQ ID NO: 2460629 - RNA, 19 nt, Artificial Sequence
  Description of Artificial Sequence: Synthetic oligonucleotide
  Antisense strand to SEQ ID NO: 2460628
gaagcucaugauauacauc

SEQ ID NO: 2460630 - RNA, 19 nt, Artificial Sequence
  Description of Artificial Sequence: Synthetic oligonucleotide
  Sense strand starting at position 3498 of SEQ ID NO: 1887284
agaauaaguguguacuggu

SEQ ID NO: 2460631 - RNA, 19 nt, Artificial Sequence
  Description of Artificial Sequence: Synthetic oligonucleotide
  Antisense strand to SEQ ID NO: 2460630
accaguacacacuuauucu

SEQ ID NO: 2460632 - RNA, 19 nt, Artificial Sequence
  Description of Artificial Sequence: Synthetic oligonucleotide
  Sense strand starting at position 3594 of SEQ ID NO: 1887284
gcacaaaguuacucagcaa

SEQ ID NO: 2460633 - RNA, 19 nt, Artificial Sequence
  Description of Artificial Sequence: Synthetic oligonucleotide
  Antisense strand to SEQ ID NO: 2460632
uugcugaguaacuuugugc

SEQ ID NO: 2460634 - RNA, 19 nt, Artificial Sequence
  Description of Artificial Sequence: Synthetic oligonucleotide
  Sense strand starting at position 3634 of SEQ ID NO: 1887284
gacaguagccuacaagacu

SEQ ID NO: 2460635 - RNA, 19 nt, Artificial Sequence
  Description of Artificial Sequence: Synthetic oligonucleotide
  Antisense strand to SEQ ID NO: 2460634
agucuuguaggcuacuguc

SEQ ID NO: 2460636 - RNA, 19 nt, Artificial Sequence
  Description of Artificial Sequence: Synthetic oligonucleotide
  Sense strand starting at position 707 of SEQ ID NO: 1887285
cucugcuucucugaguaca

SEQ ID NO: 2460637 - RNA, 19 nt, Artificial Sequence
  Description of Artificial Sequence: Synthetic oligonucleotide
  Antisense strand to SEQ ID NO: 2460636
uguacucagagaagcagag

SEQ ID NO: 2460638 - RNA, 19 nt, Artificial Sequence
  Description of Artificial Sequence: Synthetic oligonucleotide
  Sense strand starting at position 709 of SEQ ID NO: 1887285
cugcuucucugaguacaac

SEQ ID NO: 2460639 - RNA, 19 nt, Artificial Sequence
  Description of Artificial Sequence: Synthetic oligonucleotide
  Antisense strand to SEQ ID NO: 2460638
guuguacucagagaagcag

SEQ ID NO: 2460640 - RNA, 19 nt, Artificial Sequence
  Description of Artificial Sequence: Synthetic oligonucleotide
  Sense strand starting at position 710 of SEQ ID NO: 1887285
ugcuucucugaguacaacu

SEQ ID NO: 2460641 - RNA, 19 nt, Artificial Sequence
  Description of Artificial Sequence: Synthetic oligonucleotide
  Antisense strand to SEQ ID NO: 2460640
aguuguacucagagaagca

SEQ ID NO: 2460642 - RNA, 19 nt, Artificial Sequence
  Description of Artificial Sequence: Synthetic oligonucleotide
  Sense strand starting at position 953 of SEQ ID NO: 1887285
cuuugccugugucagacau

SEQ ID NO: 2460643 - RNA, 19 nt, Artificial Sequence
  Description of Artificial Sequence: Synthetic oligonucleotide
  Antisense strand to SEQ ID NO: 2460642
augucugacacaggcaaag

SEQ ID NO: 2460644 - RNA, 19 nt, Artificial Sequence
  Description of Artificial Sequence: Synthetic oligonucleotide
  Sense strand starting at position 955 of SEQ ID NO: 1887285
uugccugugucagacauaa

SEQ ID NO: 2460645 - RNA, 19 nt, Artificial Sequence
  Description of Artificial Sequence: Synthetic oligonucleotide
  Antisense strand to SEQ ID NO: 2460644
uuaugucugacacaggcaa

SEQ ID NO: 2460646 - RNA, 19 nt, Artificial Sequence
  Description of Artificial Sequence: Synthetic oligonucleotide
  Sense strand starting at position 1473 of SEQ ID NO: 1887285
ucaccauugucuguucuua

SEQ ID NO: 2460647 - RNA, 19 nt, Artificial Sequence
  Description of Artificial Sequence: Synthetic oligonucleotide
  Antisense strand to SEQ ID NO: 2460646
uaagaacagacaaugguga

SEQ ID NO: 2460648 - RNA, 19 nt, Artificial Sequence
  Description of Artificial Sequence: Synthetic oligonucleotide
  Sense strand starting at position 1475 of SEQ ID NO: 1887285
accauugucuguucuuaca

SEQ ID NO: 2460649 - RNA, 19 nt, Artificial Sequence
  Description of Artificial Sequence: Synthetic oligonucleotide
  Antisense strand to SEQ ID NO: 2460648
uguaagaacagacaauggu

SEQ ID NO: 2460650 - RNA, 19 nt, Artificial Sequence
  Description of Artificial Sequence: Synthetic oligonucleotide
  Sense strand starting at position 2034 of SEQ ID NO: 1887285
ggacguaggaccuggaaau

SEQ ID NO: 2460651 - RNA, 19 nt, Artificial Sequence
  Description of Artificial Sequence: Synthetic oligonucleotide
  Antisense strand to SEQ ID NO: 2460650
auuuccagguccuacgucc

SEQ ID NO: 2460652 - RNA, 19 nt, Artificial Sequence
  Description of Artificial Sequence: Synthetic oligonucleotide
  Sense strand starting at position 2516 of SEQ ID NO: 1887285
cuuguuuagucauugugga

SEQ ID NO: 2460653 - RNA, 19 nt, Artificial Sequence
  Description of Artificial Sequence: Synthetic oligonucleotide
  Antisense strand to SEQ ID NO: 2460652
uccacaaugacuaaacaag

SEQ ID NO: 2460654 - RNA, 19 nt, Artificial Sequence
  Description of Artificial Sequence: Synthetic oligonucleotide
  Sense strand starting at position 2517 of SEQ ID NO: 1887285
uuguuuagucauuguggaa

SEQ ID NO: 2460655 - RNA, 19 nt, Artificial Sequence
  Description of Artificial Sequence: Synthetic oligonucleotide
  Antisense strand to SEQ ID NO: 2460654
uuccacaaugacuaaacaa

SEQ ID NO: 2460656 - RNA, 19 nt, Artificial Sequence
  Description of Artificial Sequence: Synthetic oligonucleotide
  Sense strand starting at position 3169 of SEQ ID NO: 1887285
ggaugaauauaagcaugua

SEQ ID NO: 2460657 - RNA, 19 nt, Artificial Sequence
  Description of Artificial Sequence: Synthetic oligonucleotide
  Antisense strand to SEQ ID NO: 2460656
uacaugcuuauauucaucc

SEQ ID NO: 2460658 - RNA, 19 nt, Artificial Sequence
  Description of Artificial Sequence: Synthetic oligonucleotide
  Sense strand starting at position 3388 of SEQ ID NO: 1887285
uacgaaguaugguugaaac

SEQ ID NO: 2460659 - RNA, 19 nt, Artificial Sequence
  Description of Artificial Sequence: Synthetic oligonucleotide
  Antisense strand to SEQ ID NO: 2460658
guuucaaccauacuucgua

SEQ ID NO: 2460660 - RNA, 19 nt, Artificial Sequence
  Description of Artificial Sequence: Synthetic oligonucleotide
  Sense strand starting at position 3390 of SEQ ID NO: 1887285
cgaaguaugguugaaacag

SEQ ID NO: 2460661 - RNA, 19 nt, Artificial Sequence
  Description of Artificial Sequence: Synthetic oligonucleotide
  Antisense strand to SEQ ID NO: 2460660
cuguuucaaccauacuucg

SEQ ID NO: 2460662 - RNA, 19 nt, Artificial Sequence
  Description of Artificial Sequence: Synthetic oligonucleotide
  Sense strand starting at position 3601 of SEQ ID NO: 1887285
ugaagacaaucaugauuug

SEQ ID NO: 2460663 - RNA, 19 nt, Artificial Sequence
  Description of Artificial Sequence: Synthetic oligonucleotide
  Antisense strand to SEQ ID NO: 2460662
caaaucaugauugucuuca

SEQ ID NO: 2460664 - RNA, 19 nt, Artificial Sequence
  Description of Artificial Sequence: Synthetic oligonucleotide
  Sense strand starting at position 3729 of SEQ ID NO: 1887285
cacguaagacauuggugaa

SEQ ID NO: 2460665 - RNA, 19 nt, Artificial Sequence
  Description of Artificial Sequence: Synthetic oligonucleotide
  Antisense strand to SEQ ID NO: 2460664
uucaccaaugucuuacgug

SEQ ID NO: 2460666 - RNA, 19 nt, Artificial Sequence
  Description of Artificial Sequence: Synthetic oligonucleotide
  Sense strand starting at position 3730 of SEQ ID NO: 1887285
acguaagacauuggugaaa

SEQ ID NO: 2460667 - RNA, 19 nt, Artificial Sequence
  Description of Artificial Sequence: Synthetic oligonucleotide
  Antisense strand to SEQ ID NO: 2460666
uuucaccaaugucuuacgu

SEQ ID NO: 2460668 - RNA, 19 nt, Artificial Sequence
  Description of Artificial Sequence: Synthetic oligonucleotide
  Sense strand starting at position 3756 of SEQ ID NO: 1887285
gguagauagucacuuuauc

SEQ ID NO: 2460669 - RNA, 19 nt, Artificial Sequence
  Description of Artificial Sequence: Synthetic oligonucleotide
  Antisense strand to SEQ ID NO: 2460668
gauaaagugacuaucuacc

SEQ ID NO: 2460670 - RNA, 19 nt, Artificial Sequence
  Description of Artificial Sequence: Synthetic oligonucleotide
  Sense strand starting at position 11 of SEQ ID NO: 1887286
cucuucuucuagguuguaa

SEQ ID NO: 2460671 - RNA, 19 nt, Artificial Sequence
  Description of Artificial Sequence: Synthetic oligonucleotide
  Antisense strand to SEQ ID NO: 2460670
uuacaaccuagaagaagag

SEQ ID NO: 2460672 - RNA, 19 nt, Artificial Sequence
  Description of Artificial Sequence: Synthetic oligonucleotide
  Sense strand starting at position 13 of SEQ ID NO: 1887286
cuucuucuagguuguaagu

SEQ ID NO: 2460673 - RNA, 19 nt, Artificial Sequence
  Description of Artificial Sequence: Synthetic oligonucleotide
  Antisense strand to SEQ ID NO: 2460672
acuuacaaccuagaagaag

SEQ ID NO: 2460674 - RNA, 19 nt, Artificial Sequence
  Description of Artificial Sequence: Synthetic oligonucleotide
  Sense strand starting at position 22 of SEQ ID NO: 1887286
gguuguaaguucguuagga

SEQ ID NO: 2460675 - RNA, 19 nt, Artificial Sequence
  Description of Artificial Sequence: Synthetic oligonucleotide
  Antisense strand to SEQ ID NO: 2460674
uccuaacgaacuuacaacc

SEQ ID NO: 2460676 - RNA, 19 nt, Artificial Sequence
  Description of Artificial Sequence: Synthetic oligonucleotide
  Sense strand starting at position 23 of SEQ ID NO: 1887286
guuguaaguucguuaggaa

SEQ ID NO: 2460677 - RNA, 19 nt, Artificial Sequence
  Description of Artificial Sequence: Synthetic oligonucleotide
  Antisense strand to SEQ ID NO: 2460676
uuccuaacgaacuuacaac

SEQ ID NO: 2460678 - RNA, 19 nt, Artificial Sequence
  Description of Artificial Sequence: Synthetic oligonucleotide
  Sense strand starting at position 24 of SEQ ID NO: 1887286
uuguaaguucguuaggaaa

SEQ ID NO: 2460679 - RNA, 19 nt, Artificial Sequence
  Description of Artificial Sequence: Synthetic oligonucleotide
  Antisense strand to SEQ ID NO: 2460678
uuuccuaacgaacuuacaa

SEQ ID NO: 2460680 - RNA, 19 nt, Artificial Sequence
  Description of Artificial Sequence: Synthetic oligonucleotide
  Sense strand starting at position 50 of SEQ ID NO: 1887286
accaaauauuuguagaaag

SEQ ID NO: 2460681 - RNA, 19 nt, Artificial Sequence
  Description of Artificial Sequence: Synthetic oligonucleotide
  Antisense strand to SEQ ID NO: 2460680
cuuucuacaaauauuuggu

SEQ ID NO: 2460682 - RNA, 19 nt, Artificial Sequence
  Description of Artificial Sequence: Synthetic oligonucleotide
  Sense strand starting at position 474 of SEQ ID NO: 1887286
uggugaucuagcuaugcau

SEQ ID NO: 2460683 - RNA, 19 nt, Artificial Sequence
  Description of Artificial Sequence: Synthetic oligonucleotide
  Antisense strand to SEQ ID NO: 2460682
augcauagcuagaucacca

SEQ ID NO: 2460684 - RNA, 19 nt, Artificial Sequence
  Description of Artificial Sequence: Synthetic oligonucleotide
  Sense strand starting at position 476 of SEQ ID NO: 1887286
gugaucuagcuaugcauca

SEQ ID NO: 2460685 - RNA, 19 nt, Artificial Sequence
  Description of Artificial Sequence: Synthetic oligonucleotide
  Antisense strand to SEQ ID NO: 2460684
ugaugcauagcuagaucac

SEQ ID NO: 2460686 - RNA, 19 nt, Artificial Sequence
  Description of Artificial Sequence: Synthetic oligonucleotide
  Sense strand starting at position 477 of SEQ ID NO: 1887286
ugaucuagcuaugcaucaa

SEQ ID NO: 2460687 - RNA, 19 nt, Artificial Sequence
  Description of Artificial Sequence: Synthetic oligonucleotide
  Antisense strand to SEQ ID NO: 2460686
uugaugcauagcuagauca

SEQ ID NO: 2460688 - RNA, 19 nt, Artificial Sequence
  Description of Artificial Sequence: Synthetic oligonucleotide
  Sense strand starting at position 541 of SEQ ID NO: 1887286
aaauauaacuugcugggua

SEQ ID NO: 2460689 - RNA, 19 nt, Artificial Sequence
  Description of Artificial Sequence: Synthetic oligonucleotide
  Antisense strand to SEQ ID NO: 2460688
uacccagcaaguuauauuu

SEQ ID NO: 2460690 - RNA, 19 nt, Artificial Sequence
  Description of Artificial Sequence: Synthetic oligonucleotide
  Sense strand starting at position 656 of SEQ ID NO: 1887286
agacccugucuaugugaaa

SEQ ID NO: 2460691 - RNA, 19 nt, Artificial Sequence
  Description of Artificial Sequence: Synthetic oligonucleotide
  Antisense strand to SEQ ID NO: 2460690
uuucacauagacagggucu

SEQ ID NO: 2460692 - RNA, 19 nt, Artificial Sequence
  Description of Artificial Sequence: Synthetic oligonucleotide
  Sense strand starting at position 657 of SEQ ID NO: 1887286
gacccugucuaugugaaag

SEQ ID NO: 2460693 - RNA, 19 nt, Artificial Sequence
  Description of Artificial Sequence: Synthetic oligonucleotide
  Antisense strand to SEQ ID NO: 2460692
cuuucacauagacaggguc

SEQ ID NO: 2460694 - RNA, 19 nt, Artificial Sequence
  Description of Artificial Sequence: Synthetic oligonucleotide
  Sense strand starting at position 1105 of SEQ ID NO: 1887286
auuaguaugcugcagaguu

SEQ ID NO: 2460695 - RNA, 19 nt, Artificial Sequence
  Description of Artificial Sequence: Synthetic oligonucleotide
  Antisense strand to SEQ ID NO: 2460694
aacucugcagcauacuaau

SEQ ID NO: 2460696 - RNA, 19 nt, Artificial Sequence
  Description of Artificial Sequence: Synthetic oligonucleotide
  Sense strand starting at position 1107 of SEQ ID NO: 1887286
uaguaugcugcagaguuua

SEQ ID NO: 2460697 - RNA, 19 nt, Artificial Sequence
  Description of Artificial Sequence: Synthetic oligonucleotide
  Antisense strand to SEQ ID NO: 2460696
uaaacucugcagcauacua

SEQ ID NO: 2460698 - RNA, 19 nt, Artificial Sequence
  Description of Artificial Sequence: Synthetic oligonucleotide
  Sense strand starting at position 1445 of SEQ ID NO: 1887286
gcaagaaggaguuaagugu

SEQ ID NO: 2460699 - RNA, 19 nt, Artificial Sequence
  Description of Artificial Sequence: Synthetic oligonucleotide
  Antisense strand to SEQ ID NO: 2460698
acacuuaacuccuucuugc

SEQ ID NO: 2460700 - RNA, 19 nt, Artificial Sequence
  Description of Artificial Sequence: Synthetic oligonucleotide
  Sense strand starting at position 1449 of SEQ ID NO: 1887286
gaaggaguuaaguguaaga

SEQ ID NO: 2460701 - RNA, 19 nt, Artificial Sequence
  Description of Artificial Sequence: Synthetic oligonucleotide
  Antisense strand to SEQ ID NO: 2460700
ucuuacacuuaacuccuuc

SEQ ID NO: 2460702 - RNA, 19 nt, Artificial Sequence
  Description of Artificial Sequence: Synthetic oligonucleotide
  Sense strand starting at position 1717 of SEQ ID NO: 1887286
guuuauauuugugucccaa

SEQ ID NO: 2460703 - RNA, 19 nt, Artificial Sequence
  Description of Artificial Sequence: Synthetic oligonucleotide
  Antisense strand to SEQ ID NO: 2460702
uugggacacaaauauaaac

SEQ ID NO: 2460704 - RNA, 19 nt, Artificial Sequence
  Description of Artificial Sequence: Synthetic oligonucleotide
  Sense strand starting at position 1969 of SEQ ID NO: 1887286
gagucacgaggcugucaaa

SEQ ID NO: 2460705 - RNA, 19 nt, Artificial Sequence
  Description of Artificial Sequence: Synthetic oligonucleotide
  Antisense strand to SEQ ID NO: 2460704
uuugacagccucgugacuc

SEQ ID NO: 2460706 - RNA, 19 nt, Artificial Sequence
  Description of Artificial Sequence: Synthetic oligonucleotide
  Sense strand starting at position 1976 of SEQ ID NO: 1887286
gaggcugucaaaugcuguu

SEQ ID NO: 2460707 - RNA, 19 nt, Artificial Sequence
  Description of Artificial Sequence: Synthetic oligonucleotide
  Antisense strand to SEQ ID NO: 2460706
aacagcauuugacagccuc

SEQ ID NO: 2460708 - RNA, 19 nt, Artificial Sequence
  Description of Artificial Sequence: Synthetic oligonucleotide
  Sense strand starting at position 2004 of SEQ ID NO: 1887286
caagguuggguuugaucau

SEQ ID NO: 2460709 - RNA, 19 nt, Artificial Sequence
  Description of Artificial Sequence: Synthetic oligonucleotide
  Antisense strand to SEQ ID NO: 2460708
augaucaaacccaaccuug

SEQ ID NO: 2460710 - RNA, 19 nt, Artificial Sequence
  Description of Artificial Sequence: Synthetic oligonucleotide
  Sense strand starting at position 2022 of SEQ ID NO: 1887286
ugcaguuacgguucuagca

SEQ ID NO: 2460711 - RNA, 19 nt, Artificial Sequence
  Description of Artificial Sequence: Synthetic oligonucleotide
  Antisense strand to SEQ ID NO: 2460710
ugcuagaaccguaacugca

SEQ ID NO: 2460712 - RNA, 19 nt, Artificial Sequence
  Description of Artificial Sequence: Synthetic oligonucleotide
  Sense strand starting at position 2032 of SEQ ID NO: 1887286
guucuagcacugcauaauu

SEQ ID NO: 2460713 - RNA, 19 nt, Artificial Sequence
  Description of Artificial Sequence: Synthetic oligonucleotide
  Antisense strand to SEQ ID NO: 2460712
aauuaugcagugcuagaac

SEQ ID NO: 2460714 - RNA, 19 nt, Artificial Sequence
  Description of Artificial Sequence: Synthetic oligonucleotide
  Sense strand starting at position 2221 of SEQ ID NO: 1887286
ggaaacgugcuguaucauc

SEQ ID NO: 2460715 - RNA, 19 nt, Artificial Sequence
  Description of Artificial Sequence: Synthetic oligonucleotide
  Antisense strand to SEQ ID NO: 2460714
gaugauacagcacguuucc

SEQ ID NO: 2460716 - RNA, 19 nt, Artificial Sequence
  Description of Artificial Sequence: Synthetic oligonucleotide
  Sense strand starting at position 2230 of SEQ ID NO: 1887286
cuguaucaucguuguugga

SEQ ID NO: 2460717 - RNA, 19 nt, Artificial Sequence
  Description of Artificial Sequence: Synthetic oligonucleotide
  Antisense strand to SEQ ID NO: 2460716
uccaacaacgaugauacag

SEQ ID NO: 2460718 - RNA, 19 nt, Artificial Sequence
  Description of Artificial Sequence: Synthetic oligonucleotide
  Sense strand starting at position 2232 of SEQ ID NO: 1887286
guaucaucguuguuggaau

SEQ ID NO: 2460719 - RNA, 19 nt, Artificial Sequence
  Description of Artificial Sequence: Synthetic oligonucleotide
  Antisense strand to SEQ ID NO: 2460718
auuccaacaacgaugauac

SEQ ID NO: 2460720 - RNA, 19 nt, Artificial Sequence
  Description of Artificial Sequence: Synthetic oligonucleotide
  Sense strand starting at position 2263 of SEQ ID NO: 1887286
ggguguaucauauacgaua

SEQ ID NO: 2460721 - RNA, 19 nt, Artificial Sequence
  Description of Artificial Sequence: Synthetic oligonucleotide
  Antisense strand to SEQ ID NO: 2460720
uaucguauaugauacaccc

SEQ ID NO: 2460722 - RNA, 19 nt, Artificial Sequence
  Description of Artificial Sequence: Synthetic oligonucleotide
  Sense strand starting at position 2265 of SEQ ID NO: 1887286
guguaucauauacgauagu

SEQ ID NO: 2460723 - RNA, 19 nt, Artificial Sequence
  Description of Artificial Sequence: Synthetic oligonucleotide
  Antisense strand to SEQ ID NO: 2460722
acuaucguauaugauacac

SEQ ID NO: 2460724 - RNA, 19 nt, Artificial Sequence
  Description of Artificial Sequence: Synthetic oligonucleotide
  Sense strand starting at position 2268 of SEQ ID NO: 1887286
uaucauauacgauaguguu

SEQ ID NO: 2460725 - RNA, 19 nt, Artificial Sequence
  Description of Artificial Sequence: Synthetic oligonucleotide
  Antisense strand to SEQ ID NO: 2460724
aacacuaucguauaugaua

SEQ ID NO: 2460726 - RNA, 19 nt, Artificial Sequence
  Description of Artificial Sequence: Synthetic oligonucleotide
  Sense strand starting at position 2274 of SEQ ID NO: 1887286
auacgauaguguuuccuuu

SEQ ID NO: 2460727 - RNA, 19 nt, Artificial Sequence
  Description of Artificial Sequence: Synthetic oligonucleotide
  Antisense strand to SEQ ID NO: 2460726
aaaggaaacacuaucguau

SEQ ID NO: 2460728 - RNA, 19 nt, Artificial Sequence
  Description of Artificial Sequence: Synthetic oligonucleotide
  Sense strand starting at position 2288 of SEQ ID NO: 1887286
ccuuucucauggccaguua

SEQ ID NO: 2460729 - RNA, 19 nt, Artificial Sequence
  Description of Artificial Sequence: Synthetic oligonucleotide
  Antisense strand to SEQ ID NO: 2460728
uaacuggccaugagaaagg

SEQ ID NO: 2460730 - RNA, 19 nt, Artificial Sequence
  Description of Artificial Sequence: Synthetic oligonucleotide
  Sense strand starting at position 2289 of SEQ ID NO: 1887286
cuuucucauggccaguuaa

SEQ ID NO: 2460731 - RNA, 19 nt, Artificial Sequence
  Description of Artificial Sequence: Synthetic oligonucleotide
  Antisense strand to SEQ ID NO: 2460730
uuaacuggccaugagaaag

SEQ ID NO: 2460732 - RNA, 19 nt, Artificial Sequence
  Description of Artificial Sequence: Synthetic oligonucleotide
  Sense strand starting at position 2366 of SEQ ID NO: 1887286
gcuaguaaagaauguugaa

SEQ ID NO: 2460733 - RNA, 19 nt, Artificial Sequence
  Description of Artificial Sequence: Synthetic oligonucleotide
  Antisense strand to SEQ ID NO: 2460732
uucaacauucuuuacuagc

SEQ ID NO: 2460734 - RNA, 19 nt, Artificial Sequence
  Description of Artificial Sequence: Synthetic oligonucleotide
  Sense strand starting at position 2470 of SEQ ID NO: 1887286
guggacuguacugacagua

SEQ ID NO: 2460735 - RNA, 19 nt, Artificial Sequence
  Description of Artificial Sequence: Synthetic oligonucleotide
  Antisense strand to SEQ ID NO: 2460734
uacugucaguacaguccac

SEQ ID NO: 2460736 - RNA, 19 nt, Artificial Sequence
  Description of Artificial Sequence: Synthetic oligonucleotide
  Sense strand starting at position 2542 of SEQ ID NO: 1887286
ugggaucuaugcuuagauc

SEQ ID NO: 2460737 - RNA, 19 nt, Artificial Sequence
  Description of Artificial Sequence: Synthetic oligonucleotide
  Antisense strand to SEQ ID NO: 2460736
gaucuaagcauagauccca

SEQ ID NO: 2460738 - RNA, 19 nt, Artificial Sequence
  Description of Artificial Sequence: Synthetic oligonucleotide
  Sense strand starting at position 2571 of SEQ ID NO: 1887286
guuuaaacagucuaugaau

SEQ ID NO: 2460739 - RNA, 19 nt, Artificial Sequence
  Description of Artificial Sequence: Synthetic oligonucleotide
  Antisense strand to SEQ ID NO: 2460738
auucauagacuguuuaaac

SEQ ID NO: 2460740 - RNA, 19 nt, Artificial Sequence
  Description of Artificial Sequence: Synthetic oligonucleotide
  Sense strand starting at position 2704 of SEQ ID NO: 1887286
gccuaagaauuugucuagu

SEQ ID NO: 2460741 - RNA, 19 nt, Artificial Sequence
  Description of Artificial Sequence: Synthetic oligonucleotide
  Antisense strand to SEQ ID NO: 2460740
acuagacaaauucuuaggc

SEQ ID NO: 2460742 - RNA, 19 nt, Artificial Sequence
  Description of Artificial Sequence: Synthetic oligonucleotide
  Sense strand starting at position 2956 of SEQ ID NO: 1887286
gcuggcaucuaguuuaauu

SEQ ID NO: 2460743 - RNA, 19 nt, Artificial Sequence
  Description of Artificial Sequence: Synthetic oligonucleotide
  Antisense strand to SEQ ID NO: 2460742
aauuaaacuagaugccagc

SEQ ID NO: 2460744 - RNA, 19 nt, Artificial Sequence
  Description of Artificial Sequence: Synthetic oligonucleotide
  Sense strand starting at position 3015 of SEQ ID NO: 1887286
aaaggauaagagugagugu

SEQ ID NO: 2460745 - RNA, 19 nt, Artificial Sequence
  Description of Artificial Sequence: Synthetic oligonucleotide
  Antisense strand to SEQ ID NO: 2460744
acacucacucuuauccuuu

SEQ ID NO: 2460746 - RNA, 19 nt, Artificial Sequence
  Description of Artificial Sequence: Synthetic oligonucleotide
  Sense strand starting at position 3022 of SEQ ID NO: 1887286
aagagugagugucccugua

SEQ ID NO: 2460747 - RNA, 19 nt, Artificial Sequence
  Description of Artificial Sequence: Synthetic oligonucleotide
  Antisense strand to SEQ ID NO: 2460746
uacagggacacucacucuu

SEQ ID NO: 2460748 - RNA, 19 nt, Artificial Sequence
  Description of Artificial Sequence: Synthetic oligonucleotide
  Sense strand starting at position 3024 of SEQ ID NO: 1887286
gagugagugucccuguauu

SEQ ID NO: 2460749 - RNA, 19 nt, Artificial Sequence
  Description of Artificial Sequence: Synthetic oligonucleotide
  Antisense strand to SEQ ID NO: 2460748
aauacagggacacucacuc

SEQ ID NO: 2460750 - RNA, 19 nt, Artificial Sequence
  Description of Artificial Sequence: Synthetic oligonucleotide
  Sense strand starting at position 754 of SEQ ID NO: 1887287
gugauugcuguuuaauuag

SEQ ID NO: 2460751 - RNA, 19 nt, Artificial Sequence
  Description of Artificial Sequence: Synthetic oligonucleotide
  Antisense strand to SEQ ID NO: 2460750
cuaauuaaacagcaaucac

SEQ ID NO: 2460752 - RNA, 19 nt, Artificial Sequence
  Description of Artificial Sequence: Synthetic oligonucleotide
  Sense strand starting at position 757 of SEQ ID NO: 1887287
auugcuguuuaauuaggaa

SEQ ID NO: 2460753 - RNA, 19 nt, Artificial Sequence
  Description of Artificial Sequence: Synthetic oligonucleotide
  Antisense strand to SEQ ID NO: 2460752
uuccuaauuaaacagcaau

SEQ ID NO: 2460754 - RNA, 19 nt, Artificial Sequence
  Description of Artificial Sequence: Synthetic oligonucleotide
  Sense strand starting at position 904 of SEQ ID NO: 1887287
uggaaauacugcgugacaa

SEQ ID NO: 2460755 - RNA, 19 nt, Artificial Sequence
  Description of Artificial Sequence: Synthetic oligonucleotide
  Antisense strand to SEQ ID NO: 2460754
uugucacgcaguauuucca

SEQ ID NO: 2460756 - RNA, 19 nt, Artificial Sequence
  Description of Artificial Sequence: Synthetic oligonucleotide
  Sense strand starting at position 905 of SEQ ID NO: 1887287
ggaaauacugcgugacaau

SEQ ID NO: 2460757 - RNA, 19 nt, Artificial Sequence
  Description of Artificial Sequence: Synthetic oligonucleotide
  Antisense strand to SEQ ID NO: 2460756
auugucacgcaguauuucc

SEQ ID NO: 2460758 - RNA, 19 nt, Artificial Sequence
  Description of Artificial Sequence: Synthetic oligonucleotide
  Sense strand starting at position 906 of SEQ ID NO: 1887287
gaaauacugcgugacaaug

SEQ ID NO: 2460759 - RNA, 19 nt, Artificial Sequence
  Description of Artificial Sequence: Synthetic oligonucleotide
  Antisense strand to SEQ ID NO: 2460758
cauugucacgcaguauuuc

SEQ ID NO: 2460760 - RNA, 19 nt, Artificial Sequence
  Description of Artificial Sequence: Synthetic oligonucleotide
  Sense strand starting at position 1149 of SEQ ID NO: 1887287
agguuaaagacuuggugac

SEQ ID NO: 2460761 - RNA, 19 nt, Artificial Sequence
  Description of Artificial Sequence: Synthetic oligonucleotide
  Antisense strand to SEQ ID NO: 2460760
gucaccaagucuuuaaccu

SEQ ID NO: 2460762 - RNA, 19 nt, Artificial Sequence
  Description of Artificial Sequence: Synthetic oligonucleotide
  Sense strand starting at position 1150 of SEQ ID NO: 1887287
gguuaaagacuuggugacu

SEQ ID NO: 2460763 - RNA, 19 nt, Artificial Sequence
  Description of Artificial Sequence: Synthetic oligonucleotide
  Antisense strand to SEQ ID NO: 2460762
agucaccaagucuuuaacc

SEQ ID NO: 2460764 - RNA, 19 nt, Artificial Sequence
  Description of Artificial Sequence: Synthetic oligonucleotide
  Sense strand starting at position 1300 of SEQ ID NO: 1887287
agauuacuccuuugagaau

SEQ ID NO: 2460765 - RNA, 19 nt, Artificial Sequence
  Description of Artificial Sequence: Synthetic oligonucleotide
  Antisense strand to SEQ ID NO: 2460764
auucucaaaggaguaaucu

SEQ ID NO: 2460766 - RNA, 19 nt, Artificial Sequence
  Description of Artificial Sequence: Synthetic oligonucleotide
  Sense strand starting at position 1380 of SEQ ID NO: 1887287
uucucuaggugauccaauu

SEQ ID NO: 2460767 - RNA, 19 nt, Artificial Sequence
  Description of Artificial Sequence: Synthetic oligonucleotide
  Antisense strand to SEQ ID NO: 2460766
aauuggaucaccuagagaa

SEQ ID NO: 2460768 - RNA, 19 nt, Artificial Sequence
  Description of Artificial Sequence: Synthetic oligonucleotide
  Sense strand starting at position 1763 of SEQ ID NO: 1887287
guaccucuaggcugaagau

SEQ ID NO: 2460769 - RNA, 19 nt, Artificial Sequence
  Description of Artificial Sequence: Synthetic oligonucleotide
  Antisense strand to SEQ ID NO: 2460768
aucuucagccuagagguac

SEQ ID NO: 2460770 - RNA, 19 nt, Artificial Sequence
  Description of Artificial Sequence: Synthetic oligonucleotide
  Sense strand starting at position 1953 of SEQ ID NO: 1887287
acugacauuucuggagaau

SEQ ID NO: 2460771 - RNA, 19 nt, Artificial Sequence
  Description of Artificial Sequence: Synthetic oligonucleotide
  Antisense strand to SEQ ID NO: 2460770
auucuccagaaaugucagu

SEQ ID NO: 2460772 - RNA, 19 nt, Artificial Sequence
  Description of Artificial Sequence: Synthetic oligonucleotide
  Sense strand starting at position 2246 of SEQ ID NO: 1887287
agcugugagugacugagaa

SEQ ID NO: 2460773 - RNA, 19 nt, Artificial Sequence
  Description of Artificial Sequence: Synthetic oligonucleotide
  Antisense strand to SEQ ID NO: 2460772
uucucagucacucacagcu

SEQ ID NO: 2460774 - RNA, 19 nt, Artificial Sequence
  Description of Artificial Sequence: Synthetic oligonucleotide
  Sense strand starting at position 2375 of SEQ ID NO: 1887287
gugggcuaggcaugagaga

SEQ ID NO: 2460775 - RNA, 19 nt, Artificial Sequence
  Description of Artificial Sequence: Synthetic oligonucleotide
  Antisense strand to SEQ ID NO: 2460774
ucucucaugccuagcccac

SEQ ID NO: 2460776 - RNA, 19 nt, Artificial Sequence
  Description of Artificial Sequence: Synthetic oligonucleotide
  Sense strand starting at position 2631 of SEQ ID NO: 1887287
gcuggauaccuaggcagau

SEQ ID NO: 2460777 - RNA, 19 nt, Artificial Sequence
  Description of Artificial Sequence: Synthetic oligonucleotide
  Antisense strand to SEQ ID NO: 2460776
aucugccuagguauccagc

SEQ ID NO: 2460778 - RNA, 19 nt, Artificial Sequence
  Description of Artificial Sequence: Synthetic oligonucleotide
  Sense strand starting at position 2653 of SEQ ID NO: 1887287
auggucuuugccuauagga

SEQ ID NO: 2460779 - RNA, 19 nt, Artificial Sequence
  Description of Artificial Sequence: Synthetic oligonucleotide
  Antisense strand to SEQ ID NO: 2460778
uccuauaggcaaagaccau

SEQ ID NO: 2460780 - RNA, 19 nt, Artificial Sequence
  Description of Artificial Sequence: Synthetic oligonucleotide
  Sense strand starting at position 2662 of SEQ ID NO: 1887287
gccuauaggagcuauguaa

SEQ ID NO: 2460781 - RNA, 19 nt, Artificial Sequence
  Description of Artificial Sequence: Synthetic oligonucleotide
  Antisense strand to SEQ ID NO: 2460780
uuacauagcuccuauaggc

SEQ ID NO: 2460782 - RNA, 19 nt, Artificial Sequence
  Description of Artificial Sequence: Synthetic oligonucleotide
  Sense strand starting at position 3060 of SEQ ID NO: 1887287
ggaggauaccugggcuagu

SEQ ID NO: 2460783 - RNA, 19 nt, Artificial Sequence
  Description of Artificial Sequence: Synthetic oligonucleotide
  Antisense strand to SEQ ID NO: 2460782
acuagcccagguauccucc

SEQ ID NO: 2460784 - RNA, 19 nt, Artificial Sequence
  Description of Artificial Sequence: Synthetic oligonucleotide
  Sense strand starting at position 3061 of SEQ ID NO: 1887287
gaggauaccugggcuaguu

SEQ ID NO: 2460785 - RNA, 19 nt, Artificial Sequence
  Description of Artificial Sequence: Synthetic oligonucleotide
  Antisense strand to SEQ ID NO: 2460784
aacuagcccagguauccuc

SEQ ID NO: 2460786 - RNA, 19 nt, Artificial Sequence
  Description of Artificial Sequence: Synthetic oligonucleotide
  Sense strand starting at position 3081 of SEQ ID NO: 1887287
aggguagugagacaaguuu

SEQ ID NO: 2460787 - RNA, 19 nt, Artificial Sequence
  Description of Artificial Sequence: Synthetic oligonucleotide
  Antisense strand to SEQ ID NO: 2460786
aaacuugucucacuacccu

SEQ ID NO: 2460788 - RNA, 19 nt, Artificial Sequence
  Description of Artificial Sequence: Synthetic oligonucleotide
  Sense strand starting at position 3243 of SEQ ID NO: 1887287
guaucacaguuccugaaau

SEQ ID NO: 2460789 - RNA, 19 nt, Artificial Sequence
  Description of Artificial Sequence: Synthetic oligonucleotide
  Antisense strand to SEQ ID NO: 2460788
auuucaggaacugugauac

SEQ ID NO: 2460790 - RNA, 19 nt, Artificial Sequence
  Description of Artificial Sequence: Synthetic oligonucleotide
  Sense strand starting at position 3255 of SEQ ID NO: 1887287
cugaaaugccauugguuag

SEQ ID NO: 2460791 - RNA, 19 nt, Artificial Sequence
  Description of Artificial Sequence: Synthetic oligonucleotide
  Antisense strand to SEQ ID NO: 2460790
cuaaccaauggcauuucag

SEQ ID NO: 2460792 - RNA, 19 nt, Artificial Sequence
  Description of Artificial Sequence: Synthetic oligonucleotide
  Sense strand starting at position 3256 of SEQ ID NO: 1887287
ugaaaugccauugguuaga

SEQ ID NO: 2460793 - RNA, 19 nt, Artificial Sequence
  Description of Artificial Sequence: Synthetic oligonucleotide
  Antisense strand to SEQ ID NO: 2460792
ucuaaccaauggcauuuca

SEQ ID NO: 2460794 - RNA, 19 nt, Artificial Sequence
  Description of Artificial Sequence: Synthetic oligonucleotide
  Sense strand starting at position 3259 of SEQ ID NO: 1887287
aaugccauugguuagaagu

SEQ ID NO: 2460795 - RNA, 19 nt, Artificial Sequence
  Description of Artificial Sequence: Synthetic oligonucleotide
  Antisense strand to SEQ ID NO: 2460794
acuucuaaccaauggcauu

SEQ ID NO: 2460796 - RNA, 19 nt, Artificial Sequence
  Description of Artificial Sequence: Synthetic oligonucleotide
  Sense strand starting at position 3270 of SEQ ID NO: 1887287
uuagaaguccuuugggcaa

SEQ ID NO: 2460797 - RNA, 19 nt, Artificial Sequence
  Description of Artificial Sequence: Synthetic oligonucleotide
  Antisense strand to SEQ ID NO: 2460796
uugcccaaaggacuucuaa

SEQ ID NO: 2460798 - RNA, 19 nt, Artificial Sequence
  Description of Artificial Sequence: Synthetic oligonucleotide
  Sense strand starting at position 3406 of SEQ ID NO: 1887287
ugucauaggacuugucaga

SEQ ID NO: 2460799 - RNA, 19 nt, Artificial Sequence
  Description of Artificial Sequence: Synthetic oligonucleotide
  Antisense strand to SEQ ID NO: 2460798
ucugacaaguccuaugaca

SEQ ID NO: 2460800 - RNA, 19 nt, Artificial Sequence
  Description of Artificial Sequence: Synthetic oligonucleotide
  Sense strand starting at position 3416 of SEQ ID NO: 1887287
cuugucagacucuauugua

SEQ ID NO: 2460801 - RNA, 19 nt, Artificial Sequence
  Description of Artificial Sequence: Synthetic oligonucleotide
  Antisense strand to SEQ ID NO: 2460800
uacaauagagucugacaag

SEQ ID NO: 2460802 - RNA, 19 nt, Artificial Sequence
  Description of Artificial Sequence: Synthetic oligonucleotide
  Sense strand starting at position 3580 of SEQ ID NO: 1887287
gagccauuguaauuaggaa

SEQ ID NO: 2460803 - RNA, 19 nt, Artificial Sequence
  Description of Artificial Sequence: Synthetic oligonucleotide
  Antisense strand to SEQ ID NO: 2460802
uuccuaauuacaauggcuc

SEQ ID NO: 2460804 - RNA, 19 nt, Artificial Sequence
  Description of Artificial Sequence: Synthetic oligonucleotide
  Sense strand starting at position 3608 of SEQ ID NO: 1887287
cgugguuuccaauacagac

SEQ ID NO: 2460805 - RNA, 19 nt, Artificial Sequence
  Description of Artificial Sequence: Synthetic oligonucleotide
  Antisense strand to SEQ ID NO: 2460804
gucuguauuggaaaccacg

SEQ ID NO: 2460806 - RNA, 19 nt, Artificial Sequence
  Description of Artificial Sequence: Synthetic oligonucleotide
  Sense strand starting at position 3641 of SEQ ID NO: 1887287
ccacguuacaguugagaag

SEQ ID NO: 2460807 - RNA, 19 nt, Artificial Sequence
  Description of Artificial Sequence: Synthetic oligonucleotide
  Antisense strand to SEQ ID NO: 2460806
cuucucaacuguaacgugg

SEQ ID NO: 2460808 - RNA, 19 nt, Artificial Sequence
  Description of Artificial Sequence: Synthetic oligonucleotide
  Sense strand starting at position 3642 of SEQ ID NO: 1887287
cacguuacaguugagaaga

SEQ ID NO: 2460809 - RNA, 19 nt, Artificial Sequence
  Description of Artificial Sequence: Synthetic oligonucleotide
  Antisense strand to SEQ ID NO: 2460808
ucuucucaacuguaacgug

SEQ ID NO: 2460810 - RNA, 19 nt, Artificial Sequence
  Description of Artificial Sequence: Synthetic oligonucleotide
  Sense strand starting at position 3691 of SEQ ID NO: 1887287
guaauaguuaaauggcaga

SEQ ID NO: 2460811 - RNA, 19 nt, Artificial Sequence
  Description of Artificial Sequence: Synthetic oligonucleotide
  Antisense strand to SEQ ID NO: 2460810
ucugccauuuaacuauuac

SEQ ID NO: 2460812 - RNA, 19 nt, Artificial Sequence
  Description of Artificial Sequence: Synthetic oligonucleotide
  Sense strand starting at position 3722 of SEQ ID NO: 1887287
cuccaaagacaguggucua

SEQ ID NO: 2460813 - RNA, 19 nt, Artificial Sequence
  Description of Artificial Sequence: Synthetic oligonucleotide
  Antisense strand to SEQ ID NO: 2460812
uagaccacugucuuuggag

SEQ ID NO: 2460814 - RNA, 19 nt, Artificial Sequence
  Description of Artificial Sequence: Synthetic oligonucleotide
  Sense strand starting at position 3725 of SEQ ID NO: 1887287
caaagacaguggucuauac

SEQ ID NO: 2460815 - RNA, 19 nt, Artificial Sequence
  Description of Artificial Sequence: Synthetic oligonucleotide
  Antisense strand to SEQ ID NO: 2460814
guauagaccacugucuuug

SEQ ID NO: 2460816 - RNA, 19 nt, Artificial Sequence
  Description of Artificial Sequence: Synthetic oligonucleotide
  Sense strand starting at position 3729 of SEQ ID NO: 1887287
gacaguggucuauacuagu

SEQ ID NO: 2460817 - RNA, 19 nt, Artificial Sequence
  Description of Artificial Sequence: Synthetic oligonucleotide
  Antisense strand to SEQ ID NO: 2460816
acuaguauagaccacuguc

SEQ ID NO: 2460818 - RNA, 19 nt, Artificial Sequence
  Description of Artificial Sequence: Synthetic oligonucleotide
  Sense strand starting at position 3793 of SEQ ID NO: 1887287
gacucaucucuggguacag

SEQ ID NO: 2460819 - RNA, 19 nt, Artificial Sequence
  Description of Artificial Sequence: Synthetic oligonucleotide
  Antisense strand to SEQ ID NO: 2460818
cuguacccagagaugaguc

SEQ ID NO: 2460820 - RNA, 19 nt, Artificial Sequence
  Description of Artificial Sequence: Synthetic oligonucleotide
  Sense strand starting at position 3794 of SEQ ID NO: 1887287
acucaucucuggguacaga

SEQ ID NO: 2460821 - RNA, 19 nt, Artificial Sequence
  Description of Artificial Sequence: Synthetic oligonucleotide
  Antisense strand to SEQ ID NO: 2460820
ucuguacccagagaugagu

SEQ ID NO: 2460822 - RNA, 19 nt, Artificial Sequence
  Description of Artificial Sequence: Synthetic oligonucleotide
  Sense strand starting at position 3795 of SEQ ID NO: 1887287
cucaucucuggguacagau

SEQ ID NO: 2460823 - RNA, 19 nt, Artificial Sequence
  Description of Artificial Sequence: Synthetic oligonucleotide
  Antisense strand to SEQ ID NO: 2460822
aucuguacccagagaugag

SEQ ID NO: 2460824 - RNA, 19 nt, Artificial Sequence
  Description of Artificial Sequence: Synthetic oligonucleotide
  Sense strand starting at position 3805 of SEQ ID NO: 1887287
gguacagauaaaugagcuu

SEQ ID NO: 2460825 - RNA, 19 nt, Artificial Sequence
  Description of Artificial Sequence: Synthetic oligonucleotide
  Antisense strand to SEQ ID NO: 2460824
aagcucauuuaucuguacc

SEQ ID NO: 2460826 - RNA, 19 nt, Artificial Sequence
  Description of Artificial Sequence: Synthetic oligonucleotide
  Sense strand starting at position 3918 of SEQ ID NO: 1887287
agaggcuucugaguacuca

SEQ ID NO: 2460827 - RNA, 19 nt, Artificial Sequence
  Description of Artificial Sequence: Synthetic oligonucleotide
  Antisense strand to SEQ ID NO: 2460826
ugaguacucagaagccucu

SEQ ID NO: 2460828 - RNA, 19 nt, Artificial Sequence
  Description of Artificial Sequence: Synthetic oligonucleotide
  Sense strand starting at position 3919 of SEQ ID NO: 1887287
gaggcuucugaguacucaa

SEQ ID NO: 2460829 - RNA, 19 nt, Artificial Sequence
  Description of Artificial Sequence: Synthetic oligonucleotide
  Antisense strand to SEQ ID NO: 2460828
uugaguacucagaagccuc

SEQ ID NO: 2460830 - RNA, 19 nt, Artificial Sequence
  Description of Artificial Sequence: Synthetic oligonucleotide
  Sense strand starting at position 125 of SEQ ID NO: 1887288
aaaugugagguuuauugua

SEQ ID NO: 2460831 - RNA, 19 nt, Artificial Sequence
  Description of Artificial Sequence: Synthetic oligonucleotide
  Antisense strand to SEQ ID NO: 2460830
uacaauaaaccucacauuu

SEQ ID NO: 2460832 - RNA, 19 nt, Artificial Sequence
  Description of Artificial Sequence: Synthetic oligonucleotide
  Sense strand starting at position 132 of SEQ ID NO: 1887288
agguuuauuguaggucaau

SEQ ID NO: 2460833 - RNA, 19 nt, Artificial Sequence
  Description of Artificial Sequence: Synthetic oligonucleotide
  Antisense strand to SEQ ID NO: 2460832
auugaccuacaauaaaccu

SEQ ID NO: 2460834 - RNA, 19 nt, Artificial Sequence
  Description of Artificial Sequence: Synthetic oligonucleotide
  Sense strand starting at position 133 of SEQ ID NO: 1887288
gguuuauuguaggucaauu

SEQ ID NO: 2460835 - RNA, 19 nt, Artificial Sequence
  Description of Artificial Sequence: Synthetic oligonucleotide
  Antisense strand to SEQ ID NO: 2460834
aauugaccuacaauaaacc

SEQ ID NO: 2460836 - RNA, 19 nt, Artificial Sequence
  Description of Artificial Sequence: Synthetic oligonucleotide
  Sense strand starting at position 241 of SEQ ID NO: 1887288
agugccaaauucucuugaa

SEQ ID NO: 2460837 - RNA, 19 nt, Artificial Sequence
  Description of Artificial Sequence: Synthetic oligonucleotide
  Antisense strand to SEQ ID NO: 2460836
uucaagagaauuuggcacu

SEQ ID NO: 2460838 - RNA, 19 nt, Artificial Sequence
  Description of Artificial Sequence: Synthetic oligonucleotide
  Sense strand starting at position 242 of SEQ ID NO: 1887288
gugccaaauucucuugaau

SEQ ID NO: 2460839 - RNA, 19 nt, Artificial Sequence
  Description of Artificial Sequence: Synthetic oligonucleotide
  Antisense strand to SEQ ID NO: 2460838
auucaagagaauuuggcac

SEQ ID NO: 2460840 - RNA, 19 nt, Artificial Sequence
  Description of Artificial Sequence: Synthetic oligonucleotide
  Sense strand starting at position 285 of SEQ ID NO: 1887288
cuguuugguccacaguguu

SEQ ID NO: 2460841 - RNA, 19 nt, Artificial Sequence
  Description of Artificial Sequence: Synthetic oligonucleotide
  Antisense strand to SEQ ID NO: 2460840
aacacuguggaccaaacag

SEQ ID NO: 2460842 - RNA, 19 nt, Artificial Sequence
  Description of Artificial Sequence: Synthetic oligonucleotide
  Sense strand starting at position 420 of SEQ ID NO: 1887288
cagagacuccgagguucuu

SEQ ID NO: 2460843 - RNA, 19 nt, Artificial Sequence
  Description of Artificial Sequence: Synthetic oligonucleotide
  Antisense strand to SEQ ID NO: 2460842
aagaaccucggagucucug

SEQ ID NO: 2460844 - RNA, 19 nt, Artificial Sequence
  Description of Artificial Sequence: Synthetic oligonucleotide
  Sense strand starting at position 955 of SEQ ID NO: 1887288
agaguuacaugcccauguu

SEQ ID NO: 2460845 - RNA, 19 nt, Artificial Sequence
  Description of Artificial Sequence: Synthetic oligonucleotide
  Antisense strand to SEQ ID NO: 2460844
aacaugggcauguaacucu

SEQ ID NO: 2460846 - RNA, 19 nt, Artificial Sequence
  Description of Artificial Sequence: Synthetic oligonucleotide
  Sense strand starting at position 1329 of SEQ ID NO: 1887288
gggugagaguaguccugga

SEQ ID NO: 2460847 - RNA, 19 nt, Artificial Sequence
  Description of Artificial Sequence: Synthetic oligonucleotide
  Antisense strand to SEQ ID NO: 2460846
uccaggacuacucucaccc

SEQ ID NO: 2460848 - RNA, 19 nt, Artificial Sequence
  Description of Artificial Sequence: Synthetic oligonucleotide
  Sense strand starting at position 1344 of SEQ ID NO: 1887288
uggagaaucuccgugggac

SEQ ID NO: 2460849 - RNA, 19 nt, Artificial Sequence
  Description of Artificial Sequence: Synthetic oligonucleotide
  Antisense strand to SEQ ID NO: 2460848
gucccacggagauucucca

SEQ ID NO: 2460850 - RNA, 19 nt, Artificial Sequence
  Description of Artificial Sequence: Synthetic oligonucleotide
  Sense strand starting at position 1345 of SEQ ID NO: 1887288
ggagaaucuccgugggaca

SEQ ID NO: 2460851 - RNA, 19 nt, Artificial Sequence
  Description of Artificial Sequence: Synthetic oligonucleotide
  Antisense strand to SEQ ID NO: 2460850
ugucccacggagauucucc

SEQ ID NO: 2460852 - RNA, 19 nt, Artificial Sequence
  Description of Artificial Sequence: Synthetic oligonucleotide
  Sense strand starting at position 1379 of SEQ ID NO: 1887288
gggugugaaggucauagua

SEQ ID NO: 2460853 - RNA, 19 nt, Artificial Sequence
  Description of Artificial Sequence: Synthetic oligonucleotide
  Antisense strand to SEQ ID NO: 2460852
uacuaugaccuucacaccc

SEQ ID NO: 2460854 - RNA, 19 nt, Artificial Sequence
  Description of Artificial Sequence: Synthetic oligonucleotide
  Sense strand starting at position 1421 of SEQ ID NO: 1887288
aggucucacaaguaugagu

SEQ ID NO: 2460855 - RNA, 19 nt, Artificial Sequence
  Description of Artificial Sequence: Synthetic oligonucleotide
  Antisense strand to SEQ ID NO: 2460854
acucauacuugugagaccu

SEQ ID NO: 2460856 - RNA, 19 nt, Artificial Sequence
  Description of Artificial Sequence: Synthetic oligonucleotide
  Sense strand starting at position 1461 of SEQ ID NO: 1887288
cgggcuauuuggcuucaga

SEQ ID NO: 2460857 - RNA, 19 nt, Artificial Sequence
  Description of Artificial Sequence: Synthetic oligonucleotide
  Antisense strand to SEQ ID NO: 2460856
ucugaagccaaauagcccg

SEQ ID NO: 2460858 - RNA, 19 nt, Artificial Sequence
  Description of Artificial Sequence: Synthetic oligonucleotide
  Sense strand starting at position 1475 of SEQ ID NO: 1887288
ucagaacugucccagaaag

SEQ ID NO: 2460859 - RNA, 19 nt, Artificial Sequence
  Description of Artificial Sequence: Synthetic oligonucleotide
  Antisense strand to SEQ ID NO: 2460858
cuuucugggacaguucuga

SEQ ID NO: 2460860 - RNA, 19 nt, Artificial Sequence
  Description of Artificial Sequence: Synthetic oligonucleotide
  Sense strand starting at position 1603 of SEQ ID NO: 1887288
gcugcuuguccuccuaagu

SEQ ID NO: 2460861 - RNA, 19 nt, Artificial Sequence
  Description of Artificial Sequence: Synthetic oligonucleotide
  Antisense strand to SEQ ID NO: 2460860
acuuaggaggacaagcagc

SEQ ID NO: 2460862 - RNA, 19 nt, Artificial Sequence
  Description of Artificial Sequence: Synthetic oligonucleotide
  Sense strand starting at position 1612 of SEQ ID NO: 1887288
ccuccuaaguguucuuaug

SEQ ID NO: 2460863 - RNA, 19 nt, Artificial Sequence
  Description of Artificial Sequence: Synthetic oligonucleotide
  Antisense strand to SEQ ID NO: 2460862
cauaagaacacuuaggagg

SEQ ID NO: 2460864 - RNA, 19 nt, Artificial Sequence
  Description of Artificial Sequence: Synthetic oligonucleotide
  Sense strand starting at position 1614 of SEQ ID NO: 1887288
uccuaaguguucuuaugca

SEQ ID NO: 2460865 - RNA, 19 nt, Artificial Sequence
  Description of Artificial Sequence: Synthetic oligonucleotide
  Antisense strand to SEQ ID NO: 2460864
ugcauaagaacacuuagga

SEQ ID NO: 2460866 - RNA, 19 nt, Artificial Sequence
  Description of Artificial Sequence: Synthetic oligonucleotide
  Sense strand starting at position 1618 of SEQ ID NO: 1887288
aaguguucuuaugcaggaa

SEQ ID NO: 2460867 - RNA, 19 nt, Artificial Sequence
  Description of Artificial Sequence: Synthetic oligonucleotide
  Antisense strand to SEQ ID NO: 2460866
uuccugcauaagaacacuu

SEQ ID NO: 2460868 - RNA, 19 nt, Artificial Sequence
  Description of Artificial Sequence: Synthetic oligonucleotide
  Sense strand starting at position 1621 of SEQ ID NO: 1887288
uguucuuaugcaggaacca

SEQ ID NO: 2460869 - RNA, 19 nt, Artificial Sequence
  Description of Artificial Sequence: Synthetic oligonucleotide
  Antisense strand to SEQ ID NO: 2460868
ugguuccugcauaagaaca

SEQ ID NO: 2460870 - RNA, 19 nt, Artificial Sequence
  Description of Artificial Sequence: Synthetic oligonucleotide
  Sense strand starting at position 1697 of SEQ ID NO: 1887288
gggucugccgcuggagaaa

SEQ ID NO: 2460871 - RNA, 19 nt, Artificial Sequence
  Description of Artificial Sequence: Synthetic oligonucleotide
  Antisense strand to SEQ ID NO: 2460870
uuucuccagcggcagaccc

SEQ ID NO: 2460872 - RNA, 19 nt, Artificial Sequence
  Description of Artificial Sequence: Synthetic oligonucleotide
  Sense strand starting at position 2183 of SEQ ID NO: 1887288
uugccauguugagcuugaa

SEQ ID NO: 2460873 - RNA, 19 nt, Artificial Sequence
  Description of Artificial Sequence: Synthetic oligonucleotide
  Antisense strand to SEQ ID NO: 2460872
uucaagcucaacauggcaa

SEQ ID NO: 2460874 - RNA, 19 nt, Artificial Sequence
  Description of Artificial Sequence: Synthetic oligonucleotide
  Sense strand starting at position 2196 of SEQ ID NO: 1887288
cuugaaugcuguucccuaa

SEQ ID NO: 2460875 - RNA, 19 nt, Artificial Sequence
  Description of Artificial Sequence: Synthetic oligonucleotide
  Antisense strand to SEQ ID NO: 2460874
uuagggaacagcauucaag

SEQ ID NO: 2460876 - RNA, 19 nt, Artificial Sequence
  Description of Artificial Sequence: Synthetic oligonucleotide
  Sense strand starting at position 2402 of SEQ ID NO: 1887288
caagcaggcccagagaauu

SEQ ID NO: 2460877 - RNA, 19 nt, Artificial Sequence
  Description of Artificial Sequence: Synthetic oligonucleotide
  Antisense strand to SEQ ID NO: 2460876
aauucucugggccugcuug

SEQ ID NO: 2460878 - RNA, 19 nt, Artificial Sequence
  Description of Artificial Sequence: Synthetic oligonucleotide
  Sense strand starting at position 2450 of SEQ ID NO: 1887288
cgccucucugaggaggaua

SEQ ID NO: 2460879 - RNA, 19 nt, Artificial Sequence
  Description of Artificial Sequence: Synthetic oligonucleotide
  Antisense strand to SEQ ID NO: 2460878
uauccuccucagagaggcg

SEQ ID NO: 2460880 - RNA, 19 nt, Artificial Sequence
  Description of Artificial Sequence: Synthetic oligonucleotide
  Sense strand starting at position 2458 of SEQ ID NO: 1887288
ugaggaggauaacaagauu

SEQ ID NO: 2460881 - RNA, 19 nt, Artificial Sequence
  Description of Artificial Sequence: Synthetic oligonucleotide
  Antisense strand to SEQ ID NO: 2460880
aaucuuguuauccuccuca

SEQ ID NO: 2460882 - RNA, 19 nt, Artificial Sequence
  Description of Artificial Sequence: Synthetic oligonucleotide
  Sense strand starting at position 2552 of SEQ ID NO: 1887288
ggugguacugaugaucaca

SEQ ID NO: 2460883 - RNA, 19 nt, Artificial Sequence
  Description of Artificial Sequence: Synthetic oligonucleotide
  Antisense strand to SEQ ID NO: 2460882
ugugaucaucaguaccacc

SEQ ID NO: 2460884 - RNA, 19 nt, Artificial Sequence
  Description of Artificial Sequence: Synthetic oligonucleotide
  Sense strand starting at position 2557 of SEQ ID NO: 1887288
uacugaugaucacagugau

SEQ ID NO: 2460885 - RNA, 19 nt, Artificial Sequence
  Description of Artificial Sequence: Synthetic oligonucleotide
  Antisense strand to SEQ ID NO: 2460884
aucacugugaucaucagua

SEQ ID NO: 2460886 - RNA, 19 nt, Artificial Sequence
  Description of Artificial Sequence: Synthetic oligonucleotide
  Sense strand starting at position 2600 of SEQ ID NO: 1887288
ucaacauuguuccuauguu

SEQ ID NO: 2460887 - RNA, 19 nt, Artificial Sequence
  Description of Artificial Sequence: Synthetic oligonucleotide
  Antisense strand to SEQ ID NO: 2460886
aacauaggaacaauguuga

SEQ ID NO: 2460888 - RNA, 19 nt, Artificial Sequence
  Description of Artificial Sequence: Synthetic oligonucleotide
  Sense strand starting at position 2623 of SEQ ID NO: 1887288
gcaccauucuaagcauuag

SEQ ID NO: 2460889 - RNA, 19 nt, Artificial Sequence
  Description of Artificial Sequence: Synthetic oligonucleotide
  Antisense strand to SEQ ID NO: 2460888
cuaaugcuuagaauggugc

SEQ ID NO: 2460890 - RNA, 19 nt, Artificial Sequence
  Description of Artificial Sequence: Synthetic oligonucleotide
  Sense strand starting at position 2642 of SEQ ID NO: 1887288
guaggcauugucuucguuu

SEQ ID NO: 2460891 - RNA, 19 nt, Artificial Sequence
  Description of Artificial Sequence: Synthetic oligonucleotide
  Antisense strand to SEQ ID NO: 2460890
aaacgaagacaaugccuac

SEQ ID NO: 2460892 - RNA, 19 nt, Artificial Sequence
  Description of Artificial Sequence: Synthetic oligonucleotide
  Sense strand starting at position 2826 of SEQ ID NO: 1887288
guugauaugacucaggugu

SEQ ID NO: 2460893 - RNA, 19 nt, Artificial Sequence
  Description of Artificial Sequence: Synthetic oligonucleotide
  Antisense strand to SEQ ID NO: 2460892
acaccugagucauaucaac

SEQ ID NO: 2460894 - RNA, 19 nt, Artificial Sequence
  Description of Artificial Sequence: Synthetic oligonucleotide
  Sense strand starting at position 2833 of SEQ ID NO: 1887288
ugacucaggugucuaugua

SEQ ID NO: 2460895 - RNA, 19 nt, Artificial Sequence
  Description of Artificial Sequence: Synthetic oligonucleotide
  Antisense strand to SEQ ID NO: 2460894
uacauagacaccugaguca

SEQ ID NO: 2460896 - RNA, 19 nt, Artificial Sequence
  Description of Artificial Sequence: Synthetic oligonucleotide
  Sense strand starting at position 2837 of SEQ ID NO: 1887288
ucaggugucuauguaccua

SEQ ID NO: 2460897 - RNA, 19 nt, Artificial Sequence
  Description of Artificial Sequence: Synthetic oligonucleotide
  Antisense strand to SEQ ID NO: 2460896
uagguacauagacaccuga

SEQ ID NO: 2460898 - RNA, 19 nt, Artificial Sequence
  Description of Artificial Sequence: Synthetic oligonucleotide
  Sense strand starting at position 2898 of SEQ ID NO: 1887288
ugagcacuuggcugagagu

SEQ ID NO: 2460899 - RNA, 19 nt, Artificial Sequence
  Description of Artificial Sequence: Synthetic oligonucleotide
  Antisense strand to SEQ ID NO: 2460898
acucucagccaagugcuca

SEQ ID NO: 2460900 - RNA, 19 nt, Artificial Sequence
  Description of Artificial Sequence: Synthetic oligonucleotide
  Sense strand starting at position 2928 of SEQ ID NO: 1887288
guuugcaucuuaucuuguu

SEQ ID NO: 2460901 - RNA, 19 nt, Artificial Sequence
  Description of Artificial Sequence: Synthetic oligonucleotide
  Antisense strand to SEQ ID NO: 2460900
aacaagauaagaugcaaac

SEQ ID NO: 2460902 - RNA, 19 nt, Artificial Sequence
  Description of Artificial Sequence: Synthetic oligonucleotide
  Sense strand starting at position 3017 of SEQ ID NO: 1887288
gcagucugucaauaucaag

SEQ ID NO: 2460903 - RNA, 19 nt, Artificial Sequence
  Description of Artificial Sequence: Synthetic oligonucleotide
  Antisense strand to SEQ ID NO: 2460902
cuugauauugacagacugc

SEQ ID NO: 2460904 - RNA, 19 nt, Artificial Sequence
  Description of Artificial Sequence: Synthetic oligonucleotide
  Sense strand starting at position 3194 of SEQ ID NO: 1887288
gguagugcuugccuauaau

SEQ ID NO: 2460905 - RNA, 19 nt, Artificial Sequence
  Description of Artificial Sequence: Synthetic oligonucleotide
  Antisense strand to SEQ ID NO: 2460904
auuauaggcaagcacuacc

SEQ ID NO: 2460906 - RNA, 19 nt, Artificial Sequence
  Description of Artificial Sequence: Synthetic oligonucleotide
  Sense strand starting at position 3821 of SEQ ID NO: 1887288
aguugcuucucaucuacau

SEQ ID NO: 2460907 - RNA, 19 nt, Artificial Sequence
  Description of Artificial Sequence: Synthetic oligonucleotide
  Antisense strand to SEQ ID NO: 2460906
auguagaugagaagcaacu

SEQ ID NO: 2460908 - RNA, 19 nt, Artificial Sequence
  Description of Artificial Sequence: Synthetic oligonucleotide
  Sense strand starting at position 3942 of SEQ ID NO: 1887288
ugccaacacugaucuagaa

SEQ ID NO: 2460909 - RNA, 19 nt, Artificial Sequence
  Description of Artificial Sequence: Synthetic oligonucleotide
  Antisense strand to SEQ ID NO: 2460908
uucuagaucaguguuggca

SEQ ID NO: 2460910 - RNA, 19 nt, Artificial Sequence
  Description of Artificial Sequence: Synthetic oligonucleotide
  Sense strand starting at position 92 of SEQ ID NO: 1887289
gagggauacugauaaggau

SEQ ID NO: 2460911 - RNA, 19 nt, Artificial Sequence
  Description of Artificial Sequence: Synthetic oligonucleotide
  Antisense strand to SEQ ID NO: 2460910
auccuuaucaguaucccuc

SEQ ID NO: 2460912 - RNA, 19 nt, Artificial Sequence
  Description of Artificial Sequence: Synthetic oligonucleotide
  Sense strand starting at position 124 of SEQ ID NO: 1887289
aagugauuugcuggugguc

SEQ ID NO: 2460913 - RNA, 19 nt, Artificial Sequence
  Description of Artificial Sequence: Synthetic oligonucleotide
  Antisense strand to SEQ ID NO: 2460912
gaccaccagcaaaucacuu

SEQ ID NO: 2460914 - RNA, 19 nt, Artificial Sequence
  Description of Artificial Sequence: Synthetic oligonucleotide
  Sense strand starting at position 138 of SEQ ID NO: 1887289
uggucuucucagggucaga

SEQ ID NO: 2460915 - RNA, 19 nt, Artificial Sequence
  Description of Artificial Sequence: Synthetic oligonucleotide
  Antisense strand to SEQ ID NO: 2460914
ucugacccugagaagacca

SEQ ID NO: 2460916 - RNA, 19 nt, Artificial Sequence
  Description of Artificial Sequence: Synthetic oligonucleotide
  Sense strand starting at position 383 of SEQ ID NO: 1887289
agcccagaguggucacaua

SEQ ID NO: 2460917 - RNA, 19 nt, Artificial Sequence
  Description of Artificial Sequence: Synthetic oligonucleotide
  Antisense strand to SEQ ID NO: 2460916
uaugugaccacucugggcu

SEQ ID NO: 2460918 - RNA, 19 nt, Artificial Sequence
  Description of Artificial Sequence: Synthetic oligonucleotide
  Sense strand starting at position 396 of SEQ ID NO: 1887289
cacauauuccagggucaga

SEQ ID NO: 2460919 - RNA, 19 nt, Artificial Sequence
  Description of Artificial Sequence: Synthetic oligonucleotide
  Antisense strand to SEQ ID NO: 2460918
ucugacccuggaauaugug

SEQ ID NO: 2460920 - RNA, 19 nt, Artificial Sequence
  Description of Artificial Sequence: Synthetic oligonucleotide
  Sense strand starting at position 480 of SEQ ID NO: 1887289
uuacacugggccugaaaca

SEQ ID NO: 2460921 - RNA, 19 nt, Artificial Sequence
  Description of Artificial Sequence: Synthetic oligonucleotide
  Antisense strand to SEQ ID NO: 2460920
uguuucaggcccaguguaa

SEQ ID NO: 2460922 - RNA, 19 nt, Artificial Sequence
  Description of Artificial Sequence: Synthetic oligonucleotide
  Sense strand starting at position 1165 of SEQ ID NO: 1887289
aagccacaccucgggaaua

SEQ ID NO: 2460923 - RNA, 19 nt, Artificial Sequence
  Description of Artificial Sequence: Synthetic oligonucleotide
  Antisense strand to SEQ ID NO: 2460922
uauucccgagguguggcuu

SEQ ID NO: 2460924 - RNA, 19 nt, Artificial Sequence
  Description of Artificial Sequence: Synthetic oligonucleotide
  Sense strand starting at position 1167 of SEQ ID NO: 1887289
gccacaccucgggaauacu

SEQ ID NO: 2460925 - RNA, 19 nt, Artificial Sequence
  Description of Artificial Sequence: Synthetic oligonucleotide
  Antisense strand to SEQ ID NO: 2460924
aguauucccgagguguggc

SEQ ID NO: 2460926 - RNA, 19 nt, Artificial Sequence
  Description of Artificial Sequence: Synthetic oligonucleotide
  Sense strand starting at position 1175 of SEQ ID NO: 1887289
ucgggaauacuccaguucu

SEQ ID NO: 2460927 - RNA, 19 nt, Artificial Sequence
  Description of Artificial Sequence: Synthetic oligonucleotide
  Antisense strand to SEQ ID NO: 2460926
agaacuggaguauucccga

SEQ ID NO: 2460928 - RNA, 19 nt, Artificial Sequence
  Description of Artificial Sequence: Synthetic oligonucleotide
  Sense strand starting at position 2611 of SEQ ID NO: 1887289
gguagugaggccuaagcau

SEQ ID NO: 2460929 - RNA, 19 nt, Artificial Sequence
  Description of Artificial Sequence: Synthetic oligonucleotide
  Antisense strand to SEQ ID NO: 2460928
augcuuaggccucacuacc

SEQ ID NO: 2460930 - RNA, 19 nt, Artificial Sequence
  Description of Artificial Sequence: Synthetic oligonucleotide
  Sense strand starting at position 2618 of SEQ ID NO: 1887289
aggccuaagcauuagaauu

SEQ ID NO: 2460931 - RNA, 19 nt, Artificial Sequence
  Description of Artificial Sequence: Synthetic oligonucleotide
  Antisense strand to SEQ ID NO: 2460930
aauucuaaugcuuaggccu

SEQ ID NO: 2460932 - RNA, 19 nt, Artificial Sequence
  Description of Artificial Sequence: Synthetic oligonucleotide
  Sense strand starting at position 2664 of SEQ ID NO: 1887289
gccuuugcucugggaccaa

SEQ ID NO: 2460933 - RNA, 19 nt, Artificial Sequence
  Description of Artificial Sequence: Synthetic oligonucleotide
  Antisense strand to SEQ ID NO: 2460932
uuggucccagagcaaaggc

SEQ ID NO: 2460934 - RNA, 19 nt, Artificial Sequence
  Description of Artificial Sequence: Synthetic oligonucleotide
  Sense strand starting at position 2692 of SEQ ID NO: 1887289
accaguagaccucgacaca

SEQ ID NO: 2460935 - RNA, 19 nt, Artificial Sequence
  Description of Artificial Sequence: Synthetic oligonucleotide
  Antisense strand to SEQ ID NO: 2460934
ugugucgaggucuacuggu

SEQ ID NO: 2460936 - RNA, 19 nt, Artificial Sequence
  Description of Artificial Sequence: Synthetic oligonucleotide
  Sense strand starting at position 2693 of SEQ ID NO: 1887289
ccaguagaccucgacacau

SEQ ID NO: 2460937 - RNA, 19 nt, Artificial Sequence
  Description of Artificial Sequence: Synthetic oligonucleotide
  Antisense strand to SEQ ID NO: 2460936
augugucgaggucuacugg

SEQ ID NO: 2460938 - RNA, 19 nt, Artificial Sequence
  Description of Artificial Sequence: Synthetic oligonucleotide
  Sense strand starting at position 2782 of SEQ ID NO: 1887289
ugcagugagcaccaaucau

SEQ ID NO: 2460939 - RNA, 19 nt, Artificial Sequence
  Description of Artificial Sequence: Synthetic oligonucleotide
  Antisense strand to SEQ ID NO: 2460938
augauuggugcucacugca

SEQ ID NO: 2460940 - RNA, 19 nt, Artificial Sequence
  Description of Artificial Sequence: Synthetic oligonucleotide
  Sense strand starting at position 2845 of SEQ ID NO: 1887289
cccagcaaugcucaagaaa

SEQ ID NO: 2460941 - RNA, 19 nt, Artificial Sequence
  Description of Artificial Sequence: Synthetic oligonucleotide
  Antisense strand to SEQ ID NO: 2460940
uuucuugagcauugcuggg

SEQ ID NO: 2460942 - RNA, 19 nt, Artificial Sequence
  Description of Artificial Sequence: Synthetic oligonucleotide
  Sense strand starting at position 2848 of SEQ ID NO: 1887289
agcaaugcucaagaaaugu

SEQ ID NO: 2460943 - RNA, 19 nt, Artificial Sequence
  Description of Artificial Sequence: Synthetic oligonucleotide
  Antisense strand to SEQ ID NO: 2460942
acauuucuugagcauugcu

SEQ ID NO: 2460944 - RNA, 19 nt, Artificial Sequence
  Description of Artificial Sequence: Synthetic oligonucleotide
  Sense strand starting at position 2859 of SEQ ID NO: 1887289
agaaauguugcggaaagca

SEQ ID NO: 2460945 - RNA, 19 nt, Artificial Sequence
  Description of Artificial Sequence: Synthetic oligonucleotide
  Antisense strand to SEQ ID NO: 2460944
ugcuuuccgcaacauuucu

SEQ ID NO: 2460946 - RNA, 19 nt, Artificial Sequence
  Description of Artificial Sequence: Synthetic oligonucleotide
  Sense strand starting at position 2955 of SEQ ID NO: 1887289
cgcauuggacaaggucuaa

SEQ ID NO: 2460947 - RNA, 19 nt, Artificial Sequence
  Description of Artificial Sequence: Synthetic oligonucleotide
  Antisense strand to SEQ ID NO: 2460946
uuagaccuuguccaaugcg

SEQ ID NO: 2460948 - RNA, 19 nt, Artificial Sequence
  Description of Artificial Sequence: Synthetic oligonucleotide
  Sense strand starting at position 3205 of SEQ ID NO: 1887289
guuagaaggccaugaugga

SEQ ID NO: 2460949 - RNA, 19 nt, Artificial Sequence
  Description of Artificial Sequence: Synthetic oligonucleotide
  Antisense strand to SEQ ID NO: 2460948
uccaucauggccuucuaac

SEQ ID NO: 2460950 - RNA, 19 nt, Artificial Sequence
  Description of Artificial Sequence: Synthetic oligonucleotide
  Sense strand starting at position 3255 of SEQ ID NO: 1887289
augagagaauucuaaacug

SEQ ID NO: 2460951 - RNA, 19 nt, Artificial Sequence
  Description of Artificial Sequence: Synthetic oligonucleotide
  Antisense strand to SEQ ID NO: 2460950
caguuuagaauucucucau

SEQ ID NO: 2460952 - RNA, 19 nt, Artificial Sequence
  Description of Artificial Sequence: Synthetic oligonucleotide
  Sense strand starting at position 3292 of SEQ ID NO: 1887289
agcauuugaugguacauaa

SEQ ID NO: 2460953 - RNA, 19 nt, Artificial Sequence
  Description of Artificial Sequence: Synthetic oligonucleotide
  Antisense strand to SEQ ID NO: 2460952
uuauguaccaucaaaugcu

SEQ ID NO: 2460954 - RNA, 19 nt, Artificial Sequence
  Description of Artificial Sequence: Synthetic oligonucleotide
  Sense strand starting at position 3326 of SEQ ID NO: 1887289
cgucuucugcgcuuuagca

SEQ ID NO: 2460955 - RNA, 19 nt, Artificial Sequence
  Description of Artificial Sequence: Synthetic oligonucleotide
  Antisense strand to SEQ ID NO: 2460954
ugcuaaagcgcagaagacg

SEQ ID NO: 2460956 - RNA, 19 nt, Artificial Sequence
  Description of Artificial Sequence: Synthetic oligonucleotide
  Sense strand starting at position 3327 of SEQ ID NO: 1887289
gucuucugcgcuuuagcau

SEQ ID NO: 2460957 - RNA, 19 nt, Artificial Sequence
  Description of Artificial Sequence: Synthetic oligonucleotide
  Antisense strand to SEQ ID NO: 2460956
augcuaaagcgcagaagac

SEQ ID NO: 2460958 - RNA, 19 nt, Artificial Sequence
  Description of Artificial Sequence: Synthetic oligonucleotide
  Sense strand starting at position 3336 of SEQ ID NO: 1887289
gcuuuagcauuuguaauca

SEQ ID NO: 2460959 - RNA, 19 nt, Artificial Sequence
  Description of Artificial Sequence: Synthetic oligonucleotide
  Antisense strand to SEQ ID NO: 2460958
ugauuacaaaugcuaaagc

SEQ ID NO: 2460960 - RNA, 19 nt, Artificial Sequence
  Description of Artificial Sequence: Synthetic oligonucleotide
  Sense strand starting at position 3358 of SEQ ID NO: 1887289
uguuccuccgcguuuguua

SEQ ID NO: 2460961 - RNA, 19 nt, Artificial Sequence
  Description of Artificial Sequence: Synthetic oligonucleotide
  Antisense strand to SEQ ID NO: 2460960
uaacaaacgcggaggaaca

SEQ ID NO: 2460962 - RNA, 19 nt, Artificial Sequence
  Description of Artificial Sequence: Synthetic oligonucleotide
  Sense strand starting at position 3359 of SEQ ID NO: 1887289
guuccuccgcguuuguuaa

SEQ ID NO: 2460963 - RNA, 19 nt, Artificial Sequence
  Description of Artificial Sequence: Synthetic oligonucleotide
  Antisense strand to SEQ ID NO: 2460962
uuaacaaacgcggaggaac

SEQ ID NO: 2460964 - RNA, 19 nt, Artificial Sequence
  Description of Artificial Sequence: Synthetic oligonucleotide
  Sense strand starting at position 3367 of SEQ ID NO: 1887289
gcguuuguuaaaugggaga

SEQ ID NO: 2460965 - RNA, 19 nt, Artificial Sequence
  Description of Artificial Sequence: Synthetic oligonucleotide
  Antisense strand to SEQ ID NO: 2460964
ucucccauuuaacaaacgc

SEQ ID NO: 2460966 - RNA, 19 nt, Artificial Sequence
  Description of Artificial Sequence: Synthetic oligonucleotide
  Sense strand starting at position 3369 of SEQ ID NO: 1887289
guuuguuaaaugggagaau

SEQ ID NO: 2460967 - RNA, 19 nt, Artificial Sequence
  Description of Artificial Sequence: Synthetic oligonucleotide
  Antisense strand to SEQ ID NO: 2460966
auucucccauuuaacaaac

SEQ ID NO: 2460968 - RNA, 19 nt, Artificial Sequence
  Description of Artificial Sequence: Synthetic oligonucleotide
  Sense strand starting at position 3378 of SEQ ID NO: 1887289
augggagaauuguaaacua

SEQ ID NO: 2460969 - RNA, 19 nt, Artificial Sequence
  Description of Artificial Sequence: Synthetic oligonucleotide
  Antisense strand to SEQ ID NO: 2460968
uaguuuacaauucucccau

SEQ ID NO: 2460970 - RNA, 19 nt, Artificial Sequence
  Description of Artificial Sequence: Synthetic oligonucleotide
  Sense strand starting at position 3390 of SEQ ID NO: 1887289
uaaacuauguuuccgacga

SEQ ID NO: 2460971 - RNA, 19 nt, Artificial Sequence
  Description of Artificial Sequence: Synthetic oligonucleotide
  Antisense strand to SEQ ID NO: 2460970
ucgucggaaacauaguuua

SEQ ID NO: 2460972 - RNA, 19 nt, Artificial Sequence
  Description of Artificial Sequence: Synthetic oligonucleotide
  Sense strand starting at position 3395 of SEQ ID NO: 1887289
uauguuuccgacgacaguu

SEQ ID NO: 2460973 - RNA, 19 nt, Artificial Sequence
  Description of Artificial Sequence: Synthetic oligonucleotide
  Antisense strand to SEQ ID NO: 2460972
aacugucgucggaaacaua

SEQ ID NO: 2460974 - RNA, 19 nt, Artificial Sequence
  Description of Artificial Sequence: Synthetic oligonucleotide
  Sense strand starting at position 3405 of SEQ ID NO: 1887289
acgacaguuuggcuacuua

SEQ ID NO: 2460975 - RNA, 19 nt, Artificial Sequence
  Description of Artificial Sequence: Synthetic oligonucleotide
  Antisense strand to SEQ ID NO: 2460974
uaaguagccaaacugucgu

SEQ ID NO: 2460976 - RNA, 19 nt, Artificial Sequence
  Description of Artificial Sequence: Synthetic oligonucleotide
  Sense strand starting at position 3459 of SEQ ID NO: 1887289
aguugacaucccggcaauu

SEQ ID NO: 2460977 - RNA, 19 nt, Artificial Sequence
  Description of Artificial Sequence: Synthetic oligonucleotide
  Antisense strand to SEQ ID NO: 2460976
aauugccgggaugucaacu

SEQ ID NO: 2460978 - RNA, 19 nt, Artificial Sequence
  Description of Artificial Sequence: Synthetic oligonucleotide
  Sense strand starting at position 3461 of SEQ ID NO: 1887289
uugacaucccggcaauuga

SEQ ID NO: 2460979 - RNA, 19 nt, Artificial Sequence
  Description of Artificial Sequence: Synthetic oligonucleotide
  Antisense strand to SEQ ID NO: 2460978
ucaauugccgggaugucaa

SEQ ID NO: 2460980 - RNA, 19 nt, Artificial Sequence
  Description of Artificial Sequence: Synthetic oligonucleotide
  Sense strand starting at position 3470 of SEQ ID NO: 1887289
cggcaauugauauguuaau

SEQ ID NO: 2460981 - RNA, 19 nt, Artificial Sequence
  Description of Artificial Sequence: Synthetic oligonucleotide
  Antisense strand to SEQ ID NO: 2460980
auuaacauaucaauugccg

SEQ ID NO: 2460982 - RNA, 19 nt, Artificial Sequence
  Description of Artificial Sequence: Synthetic oligonucleotide
  Sense strand starting at position 3471 of SEQ ID NO: 1887289
ggcaauugauauguuaauu

SEQ ID NO: 2460983 - RNA, 19 nt, Artificial Sequence
  Description of Artificial Sequence: Synthetic oligonucleotide
  Antisense strand to SEQ ID NO: 2460982
aauuaacauaucaauugcc

SEQ ID NO: 2460984 - RNA, 19 nt, Artificial Sequence
  Description of Artificial Sequence: Synthetic oligonucleotide
  Sense strand starting at position 3501 of SEQ ID NO: 1887289
uugugugcucauuaaauca

SEQ ID NO: 2460985 - RNA, 19 nt, Artificial Sequence
  Description of Artificial Sequence: Synthetic oligonucleotide
  Antisense strand to SEQ ID NO: 2460984
ugauuuaaugagcacacaa

SEQ ID NO: 2460986 - RNA, 19 nt, Artificial Sequence
  Description of Artificial Sequence: Synthetic oligonucleotide
  Sense strand starting at position 3528 of SEQ ID NO: 1887289
agggacuucuaccugccaa

SEQ ID NO: 2460987 - RNA, 19 nt, Artificial Sequence
  Description of Artificial Sequence: Synthetic oligonucleotide
  Antisense strand to SEQ ID NO: 2460986
uuggcagguagaagucccu

SEQ ID NO: 2460988 - RNA, 19 nt, Artificial Sequence
  Description of Artificial Sequence: Synthetic oligonucleotide
  Sense strand starting at position 3529 of SEQ ID NO: 1887289
gggacuucuaccugccaag

SEQ ID NO: 2460989 - RNA, 19 nt, Artificial Sequence
  Description of Artificial Sequence: Synthetic oligonucleotide
  Antisense strand to SEQ ID NO: 2460988
cuuggcagguagaaguccc

SEQ ID NO: 2460990 - RNA, 19 nt, Artificial Sequence
  Description of Artificial Sequence: Synthetic oligonucleotide
  Sense strand starting at position 84 of SEQ ID NO: 1887290
acaggaaccuuguugaaua

SEQ ID NO: 2460991 - RNA, 19 nt, Artificial Sequence
  Description of Artificial Sequence: Synthetic oligonucleotide
  Antisense strand to SEQ ID NO: 2460990
uauucaacaagguuccugu

SEQ ID NO: 2460992 - RNA, 19 nt, Artificial Sequence
  Description of Artificial Sequence: Synthetic oligonucleotide
  Sense strand starting at position 151 of SEQ ID NO: 1887290
uccuaaauaugaguucuag

SEQ ID NO: 2460993 - RNA, 19 nt, Artificial Sequence
  Description of Artificial Sequence: Synthetic oligonucleotide
  Antisense strand to SEQ ID NO: 2460992
cuagaacucauauuuagga

SEQ ID NO: 2460994 - RNA, 19 nt, Artificial Sequence
  Description of Artificial Sequence: Synthetic oligonucleotide
  Sense strand starting at position 157 of SEQ ID NO: 1887290
auaugaguucuagaggccu

SEQ ID NO: 2460995 - RNA, 19 nt, Artificial Sequence
  Description of Artificial Sequence: Synthetic oligonucleotide
  Antisense strand to SEQ ID NO: 2460994
aggccucuagaacucauau

SEQ ID NO: 2460996 - RNA, 19 nt, Artificial Sequence
  Description of Artificial Sequence: Synthetic oligonucleotide
  Sense strand starting at position 199 of SEQ ID NO: 1887290
ucuuauuucugaugauaag

SEQ ID NO: 2460997 - RNA, 19 nt, Artificial Sequence
  Description of Artificial Sequence: Synthetic oligonucleotide
  Antisense strand to SEQ ID NO: 2460996
cuuaucaucagaaauaaga

SEQ ID NO: 2460998 - RNA, 19 nt, Artificial Sequence
  Description of Artificial Sequence: Synthetic oligonucleotide
  Sense strand starting at position 221 of SEQ ID NO: 1887290
gacuaacccugagguuauu

SEQ ID NO: 2460999 - RNA, 19 nt, Artificial Sequence
  Description of Artificial Sequence: Synthetic oligonucleotide
  Antisense strand to SEQ ID NO: 2460998
aauaaccucaggguuaguc

SEQ ID NO: 2461000 - RNA, 19 nt, Artificial Sequence
  Description of Artificial Sequence: Synthetic oligonucleotide
  Sense strand starting at position 400 of SEQ ID NO: 1887290
acaugaccuuucguuuaau

SEQ ID NO: 2461001 - RNA, 19 nt, Artificial Sequence
  Description of Artificial Sequence: Synthetic oligonucleotide
  Antisense strand to SEQ ID NO: 2461000
auuaaacgaaaggucaugu

SEQ ID NO: 2461002 - RNA, 19 nt, Artificial Sequence
  Description of Artificial Sequence: Synthetic oligonucleotide
  Sense strand starting at position 403 of SEQ ID NO: 1887290
ugaccuuucguuuaauacu

SEQ ID NO: 2461003 - RNA, 19 nt, Artificial Sequence
  Description of Artificial Sequence: Synthetic oligonucleotide
  Antisense strand to SEQ ID NO: 2461002
aguauuaaacgaaagguca

SEQ ID NO: 2461004 - RNA, 19 nt, Artificial Sequence
  Description of Artificial Sequence: Synthetic oligonucleotide
  Sense strand starting at position 409 of SEQ ID NO: 1887290
uucguuuaauacuacagua

SEQ ID NO: 2461005 - RNA, 19 nt, Artificial Sequence
  Description of Artificial Sequence: Synthetic oligonucleotide
  Antisense strand to SEQ ID NO: 2461004
uacuguaguauuaaacgaa

SEQ ID NO: 2461006 - RNA, 19 nt, Artificial Sequence
  Description of Artificial Sequence: Synthetic oligonucleotide
  Sense strand starting at position 411 of SEQ ID NO: 1887290
cguuuaauacuacaguauc

SEQ ID NO: 2461007 - RNA, 19 nt, Artificial Sequence
  Description of Artificial Sequence: Synthetic oligonucleotide
  Antisense strand to SEQ ID NO: 2461006
gauacuguaguauuaaacg

SEQ ID NO: 2461008 - RNA, 19 nt, Artificial Sequence
  Description of Artificial Sequence: Synthetic oligonucleotide
  Sense strand starting at position 419 of SEQ ID NO: 1887290
acuacaguaucgcacaauu

SEQ ID NO: 2461009 - RNA, 19 nt, Artificial Sequence
  Description of Artificial Sequence: Synthetic oligonucleotide
  Antisense strand to SEQ ID NO: 2461008
aauugugcgauacuguagu

SEQ ID NO: 2461010 - RNA, 19 nt, Artificial Sequence
  Description of Artificial Sequence: Synthetic oligonucleotide
  Sense strand starting at position 434 of SEQ ID NO: 1887290
aauuauaaaugugugggua

SEQ ID NO: 2461011 - RNA, 19 nt, Artificial Sequence
  Description of Artificial Sequence: Synthetic oligonucleotide
  Antisense strand to SEQ ID NO: 2461010
uacccacacauuuauaauu

SEQ ID NO: 2461012 - RNA, 19 nt, Artificial Sequence
  Description of Artificial Sequence: Synthetic oligonucleotide
  Sense strand starting at position 435 of SEQ ID NO: 1887290
auuauaaauguguggguau

SEQ ID NO: 2461013 - RNA, 19 nt, Artificial Sequence
  Description of Artificial Sequence: Synthetic oligonucleotide
  Antisense strand to SEQ ID NO: 2461012
auacccacacauuuauaau

SEQ ID NO: 2461014 - RNA, 19 nt, Artificial Sequence
  Description of Artificial Sequence: Synthetic oligonucleotide
  Sense strand starting at position 436 of SEQ ID NO: 1887290
uuauaaauguguggguauu

SEQ ID NO: 2461015 - RNA, 19 nt, Artificial Sequence
  Description of Artificial Sequence: Synthetic oligonucleotide
  Antisense strand to SEQ ID NO: 2461014
aauacccacacauuuauaa

SEQ ID NO: 2461016 - RNA, 19 nt, Artificial Sequence
  Description of Artificial Sequence: Synthetic oligonucleotide
  Sense strand starting at position 530 of SEQ ID NO: 1887290
auggacauucgaugaaguu

SEQ ID NO: 2461017 - RNA, 19 nt, Artificial Sequence
  Description of Artificial Sequence: Synthetic oligonucleotide
  Antisense strand to SEQ ID NO: 2461016
aacuucaucgaauguccau

SEQ ID NO: 2461018 - RNA, 19 nt, Artificial Sequence
  Description of Artificial Sequence: Synthetic oligonucleotide
  Sense strand starting at position 780 of SEQ ID NO: 1887290
acugaacacuauuggaaau

SEQ ID NO: 2461019 - RNA, 19 nt, Artificial Sequence
  Description of Artificial Sequence: Synthetic oligonucleotide
  Antisense strand to SEQ ID NO: 2461018
auuuccaauaguguucagu

SEQ ID NO: 2461020 - RNA, 19 nt, Artificial Sequence
  Description of Artificial Sequence: Synthetic oligonucleotide
  Sense strand starting at position 782 of SEQ ID NO: 1887290
ugaacacuauuggaaauaa

SEQ ID NO: 2461021 - RNA, 19 nt, Artificial Sequence
  Description of Artificial Sequence: Synthetic oligonucleotide
  Antisense strand to SEQ ID NO: 2461020
uuauuuccaauaguguuca

SEQ ID NO: 2461022 - RNA, 19 nt, Artificial Sequence
  Description of Artificial Sequence: Synthetic oligonucleotide
  Sense strand starting at position 819 of SEQ ID NO: 1887290
ucccauuugucaucacggu

SEQ ID NO: 2461023 - RNA, 19 nt, Artificial Sequence
  Description of Artificial Sequence: Synthetic oligonucleotide
  Antisense strand to SEQ ID NO: 2461022
accgugaugacaaauggga

SEQ ID NO: 2461024 - RNA, 19 nt, Artificial Sequence
  Description of Artificial Sequence: Synthetic oligonucleotide
  Sense strand starting at position 1238 of SEQ ID NO: 1887290
aagguccuccuuugugaga

SEQ ID NO: 2461025 - RNA, 19 nt, Artificial Sequence
  Description of Artificial Sequence: Synthetic oligonucleotide
  Antisense strand to SEQ ID NO: 2461024
ucucacaaaggaggaccuu

SEQ ID NO: 2461026 - RNA, 19 nt, Artificial Sequence
  Description of Artificial Sequence: Synthetic oligonucleotide
  Sense strand starting at position 1566 of SEQ ID NO: 1887290
ccgcgaguuguuugcaguu

SEQ ID NO: 2461027 - RNA, 19 nt, Artificial Sequence
  Description of Artificial Sequence: Synthetic oligonucleotide
  Antisense strand to SEQ ID NO: 2461026
aacugcaaacaacucgcgg

SEQ ID NO: 2461028 - RNA, 19 nt, Artificial Sequence
  Description of Artificial Sequence: Synthetic oligonucleotide
  Sense strand starting at position 1572 of SEQ ID NO: 1887290
guuguuugcaguuaaggac

SEQ ID NO: 2461029 - RNA, 19 nt, Artificial Sequence
  Description of Artificial Sequence: Synthetic oligonucleotide
  Antisense strand to SEQ ID NO: 2461028
guccuuaacugcaaacaac

SEQ ID NO: 2461030 - RNA, 19 nt, Artificial Sequence
  Description of Artificial Sequence: Synthetic oligonucleotide
  Sense strand starting at position 1599 of SEQ ID NO: 1887290
ggucacauuccagggcaua

SEQ ID NO: 2461031 - RNA, 19 nt, Artificial Sequence
  Description of Artificial Sequence: Synthetic oligonucleotide
  Antisense strand to SEQ ID NO: 2461030
uaugcccuggaaugugacc

SEQ ID NO: 2461032 - RNA, 19 nt, Artificial Sequence
  Description of Artificial Sequence: Synthetic oligonucleotide
  Sense strand starting at position 1738 of SEQ ID NO: 1887290
ggcagaggguccgagaauu

SEQ ID NO: 2461033 - RNA, 19 nt, Artificial Sequence
  Description of Artificial Sequence: Synthetic oligonucleotide
  Antisense strand to SEQ ID NO: 2461032
aauucucggacccucugcc

SEQ ID NO: 2461034 - RNA, 19 nt, Artificial Sequence
  Description of Artificial Sequence: Synthetic oligonucleotide
  Sense strand starting at position 2213 of SEQ ID NO: 1887290
gcgagagaccugggucaga

SEQ ID NO: 2461035 - RNA, 19 nt, Artificial Sequence
  Description of Artificial Sequence: Synthetic oligonucleotide
  Antisense strand to SEQ ID NO: 2461034
ucugacccaggucucucgc

SEQ ID NO: 2461036 - RNA, 19 nt, Artificial Sequence
  Description of Artificial Sequence: Synthetic oligonucleotide
  Sense strand starting at position 2272 of SEQ ID NO: 1887290
gcuguaacgguuucuguca

SEQ ID NO: 2461037 - RNA, 19 nt, Artificial Sequence
  Description of Artificial Sequence: Synthetic oligonucleotide
  Antisense strand to SEQ ID NO: 2461036
ugacagaaaccguuacagc

SEQ ID NO: 2461038 - RNA, 19 nt, Artificial Sequence
  Description of Artificial Sequence: Synthetic oligonucleotide
  Sense strand starting at position 2294 of SEQ ID NO: 1887290
caggucuucuuucccgaaa

SEQ ID NO: 2461039 - RNA, 19 nt, Artificial Sequence
  Description of Artificial Sequence: Synthetic oligonucleotide
  Antisense strand to SEQ ID NO: 2461038
uuucgggaaagaagaccug

SEQ ID NO: 2461040 - RNA, 19 nt, Artificial Sequence
  Description of Artificial Sequence: Synthetic oligonucleotide
  Sense strand starting at position 2295 of SEQ ID NO: 1887290
aggucuucuuucccgaaau

SEQ ID NO: 2461041 - RNA, 19 nt, Artificial Sequence
  Description of Artificial Sequence: Synthetic oligonucleotide
  Antisense strand to SEQ ID NO: 2461040
auuucgggaaagaagaccu

SEQ ID NO: 2461042 - RNA, 19 nt, Artificial Sequence
  Description of Artificial Sequence: Synthetic oligonucleotide
  Sense strand starting at position 2297 of SEQ ID NO: 1887290
gucuucuuucccgaaaucu

SEQ ID NO: 2461043 - RNA, 19 nt, Artificial Sequence
  Description of Artificial Sequence: Synthetic oligonucleotide
  Antisense strand to SEQ ID NO: 2461042
agauuucgggaaagaagac

SEQ ID NO: 2461044 - RNA, 19 nt, Artificial Sequence
  Description of Artificial Sequence: Synthetic oligonucleotide
  Sense strand starting at position 2309 of SEQ ID NO: 1887290
gaaaucugaggcugucacu

SEQ ID NO: 2461045 - RNA, 19 nt, Artificial Sequence
  Description of Artificial Sequence: Synthetic oligonucleotide
  Antisense strand to SEQ ID NO: 2461044
agugacagccucagauuuc

SEQ ID NO: 2461046 - RNA, 19 nt, Artificial Sequence
  Description of Artificial Sequence: Synthetic oligonucleotide
  Sense strand starting at position 2420 of SEQ ID NO: 1887290
gcgaucucggguuaccaca

SEQ ID NO: 2461047 - RNA, 19 nt, Artificial Sequence
  Description of Artificial Sequence: Synthetic oligonucleotide
  Antisense strand to SEQ ID NO: 2461046
ugugguaacccgagaucgc

SEQ ID NO: 2461048 - RNA, 19 nt, Artificial Sequence
  Description of Artificial Sequence: Synthetic oligonucleotide
  Sense strand starting at position 2965 of SEQ ID NO: 1887290
ccgagauccucccauugca

SEQ ID NO: 2461049 - RNA, 19 nt, Artificial Sequence
  Description of Artificial Sequence: Synthetic oligonucleotide
  Antisense strand to SEQ ID NO: 2461048
ugcaaugggaggaucucgg

SEQ ID NO: 2461050 - RNA, 19 nt, Artificial Sequence
  Description of Artificial Sequence: Synthetic oligonucleotide
  Sense strand starting at position 3001 of SEQ ID NO: 1887290
gugugagacuguguuucaa

SEQ ID NO: 2461051 - RNA, 19 nt, Artificial Sequence
  Description of Artificial Sequence: Synthetic oligonucleotide
  Antisense strand to SEQ ID NO: 2461050
uugaaacacagucucacac

SEQ ID NO: 2461052 - RNA, 19 nt, Artificial Sequence
  Description of Artificial Sequence: Synthetic oligonucleotide
  Sense strand starting at position 3231 of SEQ ID NO: 1887290
cuguuacaguugucaggga

SEQ ID NO: 2461053 - RNA, 19 nt, Artificial Sequence
  Description of Artificial Sequence: Synthetic oligonucleotide
  Antisense strand to SEQ ID NO: 2461052
ucccugacaacuguaacag

SEQ ID NO: 2461054 - RNA, 19 nt, Artificial Sequence
  Description of Artificial Sequence: Synthetic oligonucleotide
  Sense strand starting at position 3300 of SEQ ID NO: 1887290
gucuucuccuguuuaaccu

SEQ ID NO: 2461055 - RNA, 19 nt, Artificial Sequence
  Description of Artificial Sequence: Synthetic oligonucleotide
  Antisense strand to SEQ ID NO: 2461054
agguuaaacaggagaagac

SEQ ID NO: 2461056 - RNA, 19 nt, Artificial Sequence
  Description of Artificial Sequence: Synthetic oligonucleotide
  Sense strand starting at position 3351 of SEQ ID NO: 1887290
cagggaauuuguuagauga

SEQ ID NO: 2461057 - RNA, 19 nt, Artificial Sequence
  Description of Artificial Sequence: Synthetic oligonucleotide
  Antisense strand to SEQ ID NO: 2461056
ucaucuaacaaauucccug

SEQ ID NO: 2461058 - RNA, 19 nt, Artificial Sequence
  Description of Artificial Sequence: Synthetic oligonucleotide
  Sense strand starting at position 3353 of SEQ ID NO: 1887290
gggaauuuguuagaugagg

SEQ ID NO: 2461059 - RNA, 19 nt, Artificial Sequence
  Description of Artificial Sequence: Synthetic oligonucleotide
  Antisense strand to SEQ ID NO: 2461058
ccucaucuaacaaauuccc

SEQ ID NO: 2461060 - RNA, 19 nt, Artificial Sequence
  Description of Artificial Sequence: Synthetic oligonucleotide
  Sense strand starting at position 3382 of SEQ ID NO: 1887290
guacaugguacagaagagu

SEQ ID NO: 2461061 - RNA, 19 nt, Artificial Sequence
  Description of Artificial Sequence: Synthetic oligonucleotide
  Antisense strand to SEQ ID NO: 2461060
acucuucuguaccauguac

SEQ ID NO: 2461062 - RNA, 19 nt, Artificial Sequence
  Description of Artificial Sequence: Synthetic oligonucleotide
  Sense strand starting at position 3820 of SEQ ID NO: 1887290
aggccugagccauaucuua

SEQ ID NO: 2461063 - RNA, 19 nt, Artificial Sequence
  Description of Artificial Sequence: Synthetic oligonucleotide
  Antisense strand to SEQ ID NO: 2461062
uaagauauggcucaggccu

SEQ ID NO: 2461064 - RNA, 19 nt, Artificial Sequence
  Description of Artificial Sequence: Synthetic oligonucleotide
  Sense strand starting at position 3825 of SEQ ID NO: 1887290
ugagccauaucuuagcagu

SEQ ID NO: 2461065 - RNA, 19 nt, Artificial Sequence
  Description of Artificial Sequence: Synthetic oligonucleotide
  Antisense strand to SEQ ID NO: 2461064
acugcuaagauauggcuca

SEQ ID NO: 2461066 - RNA, 19 nt, Artificial Sequence
  Description of Artificial Sequence: Synthetic oligonucleotide
  Sense strand starting at position 3827 of SEQ ID NO: 1887290
agccauaucuuagcaguuu

SEQ ID NO: 2461067 - RNA, 19 nt, Artificial Sequence
  Description of Artificial Sequence: Synthetic oligonucleotide
  Antisense strand to SEQ ID NO: 2461066
aaacugcuaagauauggcu

SEQ ID NO: 2461068 - RNA, 19 nt, Artificial Sequence
  Description of Artificial Sequence: Synthetic oligonucleotide
  Sense strand starting at position 3900 of SEQ ID NO: 1887290
cugugauugcaccagugga

SEQ ID NO: 2461069 - RNA, 19 nt, Artificial Sequence
  Description of Artificial Sequence: Synthetic oligonucleotide
  Antisense strand to SEQ ID NO: 2461068
uccacuggugcaaucacag

SEQ ID NO: 2461070 - RNA, 19 nt, Artificial Sequence
  Description of Artificial Sequence: Synthetic oligonucleotide
  Sense strand starting at position 19 of SEQ ID NO: 1887291
cgaguucucuaacaaagau

SEQ ID NO: 2461071 - RNA, 19 nt, Artificial Sequence
  Description of Artificial Sequence: Synthetic oligonucleotide
  Antisense strand to SEQ ID NO: 2461070
aucuuuguuagagaacucg

SEQ ID NO: 2461072 - RNA, 19 nt, Artificial Sequence
  Description of Artificial Sequence: Synthetic oligonucleotide
  Sense strand starting at position 477 of SEQ ID NO: 1887291
ccacaaagauccucagagu

SEQ ID NO: 2461073 - RNA, 19 nt, Artificial Sequence
  Description of Artificial Sequence: Synthetic oligonucleotide
  Antisense strand to SEQ ID NO: 2461072
acucugaggaucuuugugg

SEQ ID NO: 2461074 - RNA, 19 nt, Artificial Sequence
  Description of Artificial Sequence: Synthetic oligonucleotide
  Sense strand starting at position 689 of SEQ ID NO: 1887291
ccuucugucauggaggcua

SEQ ID NO: 2461075 - RNA, 19 nt, Artificial Sequence
  Description of Artificial Sequence: Synthetic oligonucleotide
  Antisense strand to SEQ ID NO: 2461074
uagccuccaugacagaagg

SEQ ID NO: 2461076 - RNA, 19 nt, Artificial Sequence
  Description of Artificial Sequence: Synthetic oligonucleotide
  Sense strand starting at position 691 of SEQ ID NO: 1887291
uucugucauggaggcuaau

SEQ ID NO: 2461077 - RNA, 19 nt, Artificial Sequence
  Description of Artificial Sequence: Synthetic oligonucleotide
  Antisense strand to SEQ ID NO: 2461076
auuagccuccaugacagaa

SEQ ID NO: 2461078 - RNA, 19 nt, Artificial Sequence
  Description of Artificial Sequence: Synthetic oligonucleotide
  Sense strand starting at position 1014 of SEQ ID NO: 1887291
guagccaaugcuuaaguuu

SEQ ID NO: 2461079 - RNA, 19 nt, Artificial Sequence
  Description of Artificial Sequence: Synthetic oligonucleotide
  Antisense strand to SEQ ID NO: 2461078
aaacuuaagcauuggcuac

SEQ ID NO: 2461080 - RNA, 19 nt, Artificial Sequence
  Description of Artificial Sequence: Synthetic oligonucleotide
  Sense strand starting at position 1021 of SEQ ID NO: 1887291
augcuuaaguuuguccaca

SEQ ID NO: 2461081 - RNA, 19 nt, Artificial Sequence
  Description of Artificial Sequence: Synthetic oligonucleotide
  Antisense strand to SEQ ID NO: 2461080
uguggacaaacuuaagcau

SEQ ID NO: 2461082 - RNA, 19 nt, Artificial Sequence
  Description of Artificial Sequence: Synthetic oligonucleotide
  Sense strand starting at position 1022 of SEQ ID NO: 1887291
ugcuuaaguuuguccacaa

SEQ ID NO: 2461083 - RNA, 19 nt, Artificial Sequence
  Description of Artificial Sequence: Synthetic oligonucleotide
  Antisense strand to SEQ ID NO: 2461082
uuguggacaaacuuaagca

SEQ ID NO: 2461084 - RNA, 19 nt, Artificial Sequence
  Description of Artificial Sequence: Synthetic oligonucleotide
  Sense strand starting at position 1023 of SEQ ID NO: 1887291
gcuuaaguuuguccacaaa

SEQ ID NO: 2461085 - RNA, 19 nt, Artificial Sequence
  Description of Artificial Sequence: Synthetic oligonucleotide
  Antisense strand to SEQ ID NO: 2461084
uuuguggacaaacuuaagc

SEQ ID NO: 2461086 - RNA, 19 nt, Artificial Sequence
  Description of Artificial Sequence: Synthetic oligonucleotide
  Sense strand starting at position 1422 of SEQ ID NO: 1887291
acaguuguucuugacgaca

SEQ ID NO: 2461087 - RNA, 19 nt, Artificial Sequence
  Description of Artificial Sequence: Synthetic oligonucleotide
  Antisense strand to SEQ ID NO: 2461086
ugucgucaagaacaacugu

SEQ ID NO: 2461088 - RNA, 19 nt, Artificial Sequence
  Description of Artificial Sequence: Synthetic oligonucleotide
  Sense strand starting at position 1427 of SEQ ID NO: 1887291
uguucuugacgacauguga

SEQ ID NO: 2461089 - RNA, 19 nt, Artificial Sequence
  Description of Artificial Sequence: Synthetic oligonucleotide
  Antisense strand to SEQ ID NO: 2461088
ucacaugucgucaagaaca

SEQ ID NO: 2461090 - RNA, 19 nt, Artificial Sequence
  Description of Artificial Sequence: Synthetic oligonucleotide
  Sense strand starting at position 1434 of SEQ ID NO: 1887291
gacgacaugugaucuucuu

SEQ ID NO: 2461091 - RNA, 19 nt, Artificial Sequence
  Description of Artificial Sequence: Synthetic oligonucleotide
  Antisense strand to SEQ ID NO: 2461090
aagaagaucacaugucguc

SEQ ID NO: 2461092 - RNA, 19 nt, Artificial Sequence
  Description of Artificial Sequence: Synthetic oligonucleotide
  Sense strand starting at position 1847 of SEQ ID NO: 1887291
cacaaagaugcugggauua

SEQ ID NO: 2461093 - RNA, 19 nt, Artificial Sequence
  Description of Artificial Sequence: Synthetic oligonucleotide
  Antisense strand to SEQ ID NO: 2461092
uaaucccagcaucuuugug

SEQ ID NO: 2461094 - RNA, 19 nt, Artificial Sequence
  Description of Artificial Sequence: Synthetic oligonucleotide
  Sense strand starting at position 1849 of SEQ ID NO: 1887291
caaagaugcugggauuauu

SEQ ID NO: 2461095 - RNA, 19 nt, Artificial Sequence
  Description of Artificial Sequence: Synthetic oligonucleotide
  Antisense strand to SEQ ID NO: 2461094
aauaaucccagcaucuuug

SEQ ID NO: 2461096 - RNA, 19 nt, Artificial Sequence
  Description of Artificial Sequence: Synthetic oligonucleotide
  Sense strand starting at position 1974 of SEQ ID NO: 1887291
cuaggaugaccgcagucaa

SEQ ID NO: 2461097 - RNA, 19 nt, Artificial Sequence
  Description of Artificial Sequence: Synthetic oligonucleotide
  Antisense strand to SEQ ID NO: 2461096
uugacugcggucauccuag

SEQ ID NO: 2461098 - RNA, 19 nt, Artificial Sequence
  Description of Artificial Sequence: Synthetic oligonucleotide
  Sense strand starting at position 1994 of SEQ ID NO: 1887291
ugggucugguuucucuuaa

SEQ ID NO: 2461099 - RNA, 19 nt, Artificial Sequence
  Description of Artificial Sequence: Synthetic oligonucleotide
  Antisense strand to SEQ ID NO: 2461098
uuaagagaaaccagaccca

SEQ ID NO: 2461100 - RNA, 19 nt, Artificial Sequence
  Description of Artificial Sequence: Synthetic oligonucleotide
  Sense strand starting at position 1995 of SEQ ID NO: 1887291
gggucugguuucucuuaaa

SEQ ID NO: 2461101 - RNA, 19 nt, Artificial Sequence
  Description of Artificial Sequence: Synthetic oligonucleotide
  Antisense strand to SEQ ID NO: 2461100
uuuaagagaaaccagaccc

SEQ ID NO: 2461102 - RNA, 19 nt, Artificial Sequence
  Description of Artificial Sequence: Synthetic oligonucleotide
  Sense strand starting at position 2040 of SEQ ID NO: 1887291
gaauuuaaguggcaagaaa

SEQ ID NO: 2461103 - RNA, 19 nt, Artificial Sequence
  Description of Artificial Sequence: Synthetic oligonucleotide
  Antisense strand to SEQ ID NO: 2461102
uuucuugccacuuaaauuc

SEQ ID NO: 2461104 - RNA, 19 nt, Artificial Sequence
  Description of Artificial Sequence: Synthetic oligonucleotide
  Sense strand starting at position 2059 of SEQ ID NO: 1887291
ugaucucaugcaugcugau

SEQ ID NO: 2461105 - RNA, 19 nt, Artificial Sequence
  Description of Artificial Sequence: Synthetic oligonucleotide
  Antisense strand to SEQ ID NO: 2461104
aucagcaugcaugagauca

SEQ ID NO: 2461106 - RNA, 19 nt, Artificial Sequence
  Description of Artificial Sequence: Synthetic oligonucleotide
  Sense strand starting at position 2074 of SEQ ID NO: 1887291
ugauuucccuucugaaagg

SEQ ID NO: 2461107 - RNA, 19 nt, Artificial Sequence
  Description of Artificial Sequence: Synthetic oligonucleotide
  Antisense strand to SEQ ID NO: 2461106
ccuuucagaagggaaauca

SEQ ID NO: 2461108 - RNA, 19 nt, Artificial Sequence
  Description of Artificial Sequence: Synthetic oligonucleotide
  Sense strand starting at position 2095 of SEQ ID NO: 1887291
uuaggcuaaucagcuauua

SEQ ID NO: 2461109 - RNA, 19 nt, Artificial Sequence
  Description of Artificial Sequence: Synthetic oligonucleotide
  Antisense strand to SEQ ID NO: 2461108
uaauagcugauuagccuaa

SEQ ID NO: 2461110 - RNA, 19 nt, Artificial Sequence
  Description of Artificial Sequence: Synthetic oligonucleotide
  Sense strand starting at position 2240 of SEQ ID NO: 1887291
ggcauugucuuacuaugaa

SEQ ID NO: 2461111 - RNA, 19 nt, Artificial Sequence
  Description of Artificial Sequence: Synthetic oligonucleotide
  Antisense strand to SEQ ID NO: 2461110
uucauaguaagacaaugcc

SEQ ID NO: 2461112 - RNA, 19 nt, Artificial Sequence
  Description of Artificial Sequence: Synthetic oligonucleotide
  Sense strand starting at position 2243 of SEQ ID NO: 1887291
auugucuuacuaugaagaa

SEQ ID NO: 2461113 - RNA, 19 nt, Artificial Sequence
  Description of Artificial Sequence: Synthetic oligonucleotide
  Antisense strand to SEQ ID NO: 2461112
uucuucauaguaagacaau

SEQ ID NO: 2461114 - RNA, 19 nt, Artificial Sequence
  Description of Artificial Sequence: Synthetic oligonucleotide
  Sense strand starting at position 2244 of SEQ ID NO: 1887291
uugucuuacuaugaagaau

SEQ ID NO: 2461115 - RNA, 19 nt, Artificial Sequence
  Description of Artificial Sequence: Synthetic oligonucleotide
  Antisense strand to SEQ ID NO: 2461114
auucuucauaguaagacaa

SEQ ID NO: 2461116 - RNA, 19 nt, Artificial Sequence
  Description of Artificial Sequence: Synthetic oligonucleotide
  Sense strand starting at position 2259 of SEQ ID NO: 1887291
gaauauguuccugaaaguc

SEQ ID NO: 2461117 - RNA, 19 nt, Artificial Sequence
  Description of Artificial Sequence: Synthetic oligonucleotide
  Antisense strand to SEQ ID NO: 2461116
gacuuucaggaacauauuc

SEQ ID NO: 2461118 - RNA, 19 nt, Artificial Sequence
  Description of Artificial Sequence: Synthetic oligonucleotide
  Sense strand starting at position 2271 of SEQ ID NO: 1887291
gaaagucgcacuugaguau

SEQ ID NO: 2461119 - RNA, 19 nt, Artificial Sequence
  Description of Artificial Sequence: Synthetic oligonucleotide
  Antisense strand to SEQ ID NO: 2461118
auacucaagugcgacuuuc

SEQ ID NO: 2461120 - RNA, 19 nt, Artificial Sequence
  Description of Artificial Sequence: Synthetic oligonucleotide
  Sense strand starting at position 2274 of SEQ ID NO: 1887291
agucgcacuugaguauuau

SEQ ID NO: 2461121 - RNA, 19 nt, Artificial Sequence
  Description of Artificial Sequence: Synthetic oligonucleotide
  Antisense strand to SEQ ID NO: 2461120
auaauacucaagugcgacu

SEQ ID NO: 2461122 - RNA, 19 nt, Artificial Sequence
  Description of Artificial Sequence: Synthetic oligonucleotide
  Sense strand starting at position 2275 of SEQ ID NO: 1887291
gucgcacuugaguauuauu

SEQ ID NO: 2461123 - RNA, 19 nt, Artificial Sequence
  Description of Artificial Sequence: Synthetic oligonucleotide
  Antisense strand to SEQ ID NO: 2461122
aauaauacucaagugcgac

SEQ ID NO: 2461124 - RNA, 19 nt, Artificial Sequence
  Description of Artificial Sequence: Synthetic oligonucleotide
  Sense strand starting at position 2278 of SEQ ID NO: 1887291
gcacuugaguauuauuuau

SEQ ID NO: 2461125 - RNA, 19 nt, Artificial Sequence
  Description of Artificial Sequence: Synthetic oligonucleotide
  Antisense strand to SEQ ID NO: 2461124
auaaauaauacucaagugc

SEQ ID NO: 2461126 - RNA, 19 nt, Artificial Sequence
  Description of Artificial Sequence: Synthetic oligonucleotide
  Sense strand starting at position 3351 of SEQ ID NO: 1887291
agaggcuauugauaaaguu

SEQ ID NO: 2461127 - RNA, 19 nt, Artificial Sequence
  Description of Artificial Sequence: Synthetic oligonucleotide
  Antisense strand to SEQ ID NO: 2461126
aacuuuaucaauagccucu

SEQ ID NO: 2461128 - RNA, 19 nt, Artificial Sequence
  Description of Artificial Sequence: Synthetic oligonucleotide
  Sense strand starting at position 3400 of SEQ ID NO: 1887291
aaauauaaucccgauguug

SEQ ID NO: 2461129 - RNA, 19 nt, Artificial Sequence
  Description of Artificial Sequence: Synthetic oligonucleotide
  Antisense strand to SEQ ID NO: 2461128
caacaucgggauuauauuu

SEQ ID NO: 2461130 - RNA, 19 nt, Artificial Sequence
  Description of Artificial Sequence: Synthetic oligonucleotide
  Sense strand starting at position 3402 of SEQ ID NO: 1887291
auauaaucccgauguugaa

SEQ ID NO: 2461131 - RNA, 19 nt, Artificial Sequence
  Description of Artificial Sequence: Synthetic oligonucleotide
  Antisense strand to SEQ ID NO: 2461130
uucaacaucgggauuauau

SEQ ID NO: 2461132 - RNA, 19 nt, Artificial Sequence
  Description of Artificial Sequence: Synthetic oligonucleotide
  Sense strand starting at position 3466 of SEQ ID NO: 1887291
caugaaugucuugguguuu

SEQ ID NO: 2461133 - RNA, 19 nt, Artificial Sequence
  Description of Artificial Sequence: Synthetic oligonucleotide
  Antisense strand to SEQ ID NO: 2461132
aaacaccaagacauucaug

SEQ ID NO: 2461134 - RNA, 19 nt, Artificial Sequence
  Description of Artificial Sequence: Synthetic oligonucleotide
  Sense strand starting at position 3492 of SEQ ID NO: 1887291
gguaaugagugaguuucuu

SEQ ID NO: 2461135 - RNA, 19 nt, Artificial Sequence
  Description of Artificial Sequence: Synthetic oligonucleotide
  Antisense strand to SEQ ID NO: 2461134
aagaaacucacucauuacc

SEQ ID NO: 2461136 - RNA, 19 nt, Artificial Sequence
  Description of Artificial Sequence: Synthetic oligonucleotide
  Sense strand starting at position 3622 of SEQ ID NO: 1887291
gcuuccucagcccaaagau

SEQ ID NO: 2461137 - RNA, 19 nt, Artificial Sequence
  Description of Artificial Sequence: Synthetic oligonucleotide
  Antisense strand to SEQ ID NO: 2461136
aucuuugggcugaggaagc

SEQ ID NO: 2461138 - RNA, 19 nt, Artificial Sequence
  Description of Artificial Sequence: Synthetic oligonucleotide
  Sense strand starting at position 3632 of SEQ ID NO: 1887291
cccaaagauggugguagua

SEQ ID NO: 2461139 - RNA, 19 nt, Artificial Sequence
  Description of Artificial Sequence: Synthetic oligonucleotide
  Antisense strand to SEQ ID NO: 2461138
uacuaccaccaucuuuggg

SEQ ID NO: 2461140 - RNA, 19 nt, Artificial Sequence
  Description of Artificial Sequence: Synthetic oligonucleotide
  Sense strand starting at position 3642 of SEQ ID NO: 1887291
gugguaguaugcuuguacu

SEQ ID NO: 2461141 - RNA, 19 nt, Artificial Sequence
  Description of Artificial Sequence: Synthetic oligonucleotide
  Antisense strand to SEQ ID NO: 2461140
aguacaagcauacuaccac

SEQ ID NO: 2461142 - RNA, 19 nt, Artificial Sequence
  Description of Artificial Sequence: Synthetic oligonucleotide
  Sense strand starting at position 3652 of SEQ ID NO: 1887291
gcuuguacugccuacagaa

SEQ ID NO: 2461143 - RNA, 19 nt, Artificial Sequence
  Description of Artificial Sequence: Synthetic oligonucleotide
  Antisense strand to SEQ ID NO: 2461142
uucuguaggcaguacaagc

SEQ ID NO: 2461144 - RNA, 19 nt, Artificial Sequence
  Description of Artificial Sequence: Synthetic oligonucleotide
  Sense strand starting at position 3846 of SEQ ID NO: 1887291
uggugaaguuccucagggu

SEQ ID NO: 2461145 - RNA, 19 nt, Artificial Sequence
  Description of Artificial Sequence: Synthetic oligonucleotide
  Antisense strand to SEQ ID NO: 2461144
acccugaggaacuucacca

SEQ ID NO: 2461146 - RNA, 19 nt, Artificial Sequence
  Description of Artificial Sequence: Synthetic oligonucleotide
  Sense strand starting at position 3847 of SEQ ID NO: 1887291
ggugaaguuccucaggguu

SEQ ID NO: 2461147 - RNA, 19 nt, Artificial Sequence
  Description of Artificial Sequence: Synthetic oligonucleotide
  Antisense strand to SEQ ID NO: 2461146
aacccugaggaacuucacc

SEQ ID NO: 2461148 - RNA, 19 nt, Artificial Sequence
  Description of Artificial Sequence: Synthetic oligonucleotide
  Sense strand starting at position 3860 of SEQ ID NO: 1887291
aggguucuggccuaagaug

SEQ ID NO: 2461149 - RNA, 19 nt, Artificial Sequence
  Description of Artificial Sequence: Synthetic oligonucleotide
  Antisense strand to SEQ ID NO: 2461148
caucuuaggccagaacccu

SEQ ID NO: 2461150 - RNA, 19 nt, Artificial Sequence
  Description of Artificial Sequence: Synthetic oligonucleotide
  Sense strand starting at position 18 of SEQ ID NO: 1887292
ccuuuaagucagugagcua

SEQ ID NO: 2461151 - RNA, 19 nt, Artificial Sequence
  Description of Artificial Sequence: Synthetic oligonucleotide
  Antisense strand to SEQ ID NO: 2461150
uagcucacugacuuaaagg

SEQ ID NO: 2461152 - RNA, 19 nt, Artificial Sequence
  Description of Artificial Sequence: Synthetic oligonucleotide
  Sense strand starting at position 21 of SEQ ID NO: 1887292
uuaagucagugagcuagaa

SEQ ID NO: 2461153 - RNA, 19 nt, Artificial Sequence
  Description of Artificial Sequence: Synthetic oligonucleotide
  Antisense strand to SEQ ID NO: 2461152
uucuagcucacugacuuaa

SEQ ID NO: 2461154 - RNA, 19 nt, Artificial Sequence
  Description of Artificial Sequence: Synthetic oligonucleotide
  Sense strand starting at position 34 of SEQ ID NO: 1887292
cuagaacuuguaugcacua

SEQ ID NO: 2461155 - RNA, 19 nt, Artificial Sequence
  Description of Artificial Sequence: Synthetic oligonucleotide
  Antisense strand to SEQ ID NO: 2461154
uagugcauacaaguucuag

SEQ ID NO: 2461156 - RNA, 19 nt, Artificial Sequence
  Description of Artificial Sequence: Synthetic oligonucleotide
  Sense strand starting at position 410 of SEQ ID NO: 1887292
ugaggauguuggguacagu

SEQ ID NO: 2461157 - RNA, 19 nt, Artificial Sequence
  Description of Artificial Sequence: Synthetic oligonucleotide
  Antisense strand to SEQ ID NO: 2461156
acuguacccaacauccuca

SEQ ID NO: 2461158 - RNA, 19 nt, Artificial Sequence
  Description of Artificial Sequence: Synthetic oligonucleotide
  Sense strand starting at position 421 of SEQ ID NO: 1887292
gguacagucucauugcuga

SEQ ID NO: 2461159 - RNA, 19 nt, Artificial Sequence
  Description of Artificial Sequence: Synthetic oligonucleotide
  Antisense strand to SEQ ID NO: 2461158
ucagcaaugagacuguacc

SEQ ID NO: 2461160 - RNA, 19 nt, Artificial Sequence
  Description of Artificial Sequence: Synthetic oligonucleotide
  Sense strand starting at position 424 of SEQ ID NO: 1887292
acagucucauugcugagau

SEQ ID NO: 2461161 - RNA, 19 nt, Artificial Sequence
  Description of Artificial Sequence: Synthetic oligonucleotide
  Antisense strand to SEQ ID NO: 2461160
aucucagcaaugagacugu

SEQ ID NO: 2461162 - RNA, 19 nt, Artificial Sequence
  Description of Artificial Sequence: Synthetic oligonucleotide
  Sense strand starting at position 426 of SEQ ID NO: 1887292
agucucauugcugagauuc

SEQ ID NO: 2461163 - RNA, 19 nt, Artificial Sequence
  Description of Artificial Sequence: Synthetic oligonucleotide
  Antisense strand to SEQ ID NO: 2461162
gaaucucagcaaugagacu

SEQ ID NO: 2461164 - RNA, 19 nt, Artificial Sequence
  Description of Artificial Sequence: Synthetic oligonucleotide
  Sense strand starting at position 473 of SEQ ID NO: 1887292
uugguacaagaguggaaau

SEQ ID NO: 2461165 - RNA, 19 nt, Artificial Sequence
  Description of Artificial Sequence: Synthetic oligonucleotide
  Antisense strand to SEQ ID NO: 2461164
auuuccacucuuguaccaa

SEQ ID NO: 2461166 - RNA, 19 nt, Artificial Sequence
  Description of Artificial Sequence: Synthetic oligonucleotide
  Sense strand starting at position 1199 of SEQ ID NO: 1887292
aaggacgucuccuuguauu

SEQ ID NO: 2461167 - RNA, 19 nt, Artificial Sequence
  Description of Artificial Sequence: Synthetic oligonucleotide
  Antisense strand to SEQ ID NO: 2461166
aauacaaggagacguccuu

SEQ ID NO: 2461168 - RNA, 19 nt, Artificial Sequence
  Description of Artificial Sequence: Synthetic oligonucleotide
  Sense strand starting at position 1212 of SEQ ID NO: 1887292
uguauuguacauggacuua

SEQ ID NO: 2461169 - RNA, 19 nt, Artificial Sequence
  Description of Artificial Sequence: Synthetic oligonucleotide
  Antisense strand to SEQ ID NO: 2461168
uaaguccauguacaauaca

SEQ ID NO: 2461170 - RNA, 19 nt, Artificial Sequence
  Description of Artificial Sequence: Synthetic oligonucleotide
  Sense strand starting at position 1248 of SEQ ID NO: 1887292
agacauuauuuacacgagu

SEQ ID NO: 2461171 - RNA, 19 nt, Artificial Sequence
  Description of Artificial Sequence: Synthetic oligonucleotide
  Antisense strand to SEQ ID NO: 2461170
acucguguaaauaaugucu

SEQ ID NO: 2461172 - RNA, 19 nt, Artificial Sequence
  Description of Artificial Sequence: Synthetic oligonucleotide
  Sense strand starting at position 1276 of SEQ ID NO: 1887292
guuaaaguuagcgcaguuu

SEQ ID NO: 2461173 - RNA, 19 nt, Artificial Sequence
  Description of Artificial Sequence: Synthetic oligonucleotide
  Antisense strand to SEQ ID NO: 2461172
aaacugcgcuaacuuuaac

SEQ ID NO: 2461174 - RNA, 19 nt, Artificial Sequence
  Description of Artificial Sequence: Synthetic oligonucleotide
  Sense strand starting at position 1318 of SEQ ID NO: 1887292
ucagaauacugaggaagaa

SEQ ID NO: 2461175 - RNA, 19 nt, Artificial Sequence
  Description of Artificial Sequence: Synthetic oligonucleotide
  Antisense strand to SEQ ID NO: 2461174
uucuuccucaguauucuga

SEQ ID NO: 2461176 - RNA, 19 nt, Artificial Sequence
  Description of Artificial Sequence: Synthetic oligonucleotide
  Sense strand starting at position 1345 of SEQ ID NO: 1887292
gguagaccucggugggaaa

SEQ ID NO: 2461177 - RNA, 19 nt, Artificial Sequence
  Description of Artificial Sequence: Synthetic oligonucleotide
  Antisense strand to SEQ ID NO: 2461176
uuucccaccgaggucuacc

SEQ ID NO: 2461178 - RNA, 19 nt, Artificial Sequence
  Description of Artificial Sequence: Synthetic oligonucleotide
  Sense strand starting at position 1371 of SEQ ID NO: 1887292
ggaaacuauuucuaagcaa

SEQ ID NO: 2461179 - RNA, 19 nt, Artificial Sequence
  Description of Artificial Sequence: Synthetic oligonucleotide
  Antisense strand to SEQ ID NO: 2461178
uugcuuagaaauaguuucc

SEQ ID NO: 2461180 - RNA, 19 nt, Artificial Sequence
  Description of Artificial Sequence: Synthetic oligonucleotide
  Sense strand starting at position 1475 of SEQ ID NO: 1887292
gagggaacuguccgacaca

SEQ ID NO: 2461181 - RNA, 19 nt, Artificial Sequence
  Description of Artificial Sequence: Synthetic oligonucleotide
  Antisense strand to SEQ ID NO: 2461180
ugugucggacaguucccuc

SEQ ID NO: 2461182 - RNA, 19 nt, Artificial Sequence
  Description of Artificial Sequence: Synthetic oligonucleotide
  Sense strand starting at position 1520 of SEQ ID NO: 1887292
gaagcaagguuccugcaga

SEQ ID NO: 2461183 - RNA, 19 nt, Artificial Sequence
  Description of Artificial Sequence: Synthetic oligonucleotide
  Antisense strand to SEQ ID NO: 2461182
ucugcaggaaccuugcuuc

SEQ ID NO: 2461184 - RNA, 19 nt, Artificial Sequence
  Description of Artificial Sequence: Synthetic oligonucleotide
  Sense strand starting at position 2058 of SEQ ID NO: 1887292
gacugauccugcucacugu

SEQ ID NO: 2461185 - RNA, 19 nt, Artificial Sequence
  Description of Artificial Sequence: Synthetic oligonucleotide
  Antisense strand to SEQ ID NO: 2461184
acagugagcaggaucaguc

SEQ ID NO: 2461186 - RNA, 19 nt, Artificial Sequence
  Description of Artificial Sequence: Synthetic oligonucleotide
  Sense strand starting at position 2086 of SEQ ID NO: 1887292
cguacuuagagcgucgaua

SEQ ID NO: 2461187 - RNA, 19 nt, Artificial Sequence
  Description of Artificial Sequence: Synthetic oligonucleotide
  Antisense strand to SEQ ID NO: 2461186
uaucgacgcucuaaguacg

SEQ ID NO: 2461188 - RNA, 19 nt, Artificial Sequence
  Description of Artificial Sequence: Synthetic oligonucleotide
  Sense strand starting at position 2147 of SEQ ID NO: 1887292
auuagaucacagcgucgaa

SEQ ID NO: 2461189 - RNA, 19 nt, Artificial Sequence
  Description of Artificial Sequence: Synthetic oligonucleotide
  Antisense strand to SEQ ID NO: 2461188
uucgacgcugugaucuaau

SEQ ID NO: 2461190 - RNA, 19 nt, Artificial Sequence
  Description of Artificial Sequence: Synthetic oligonucleotide
  Sense strand starting at position 2312 of SEQ ID NO: 1887292
cugaaucuugcagggacau

SEQ ID NO: 2461191 - RNA, 19 nt, Artificial Sequence
  Description of Artificial Sequence: Synthetic oligonucleotide
  Antisense strand to SEQ ID NO: 2461190
augucccugcaagauucag

SEQ ID NO: 2461192 - RNA, 19 nt, Artificial Sequence
  Description of Artificial Sequence: Synthetic oligonucleotide
  Sense strand starting at position 2352 of SEQ ID NO: 1887292
aucugcuuauucuuggcaa

SEQ ID NO: 2461193 - RNA, 19 nt, Artificial Sequence
  Description of Artificial Sequence: Synthetic oligonucleotide
  Antisense strand to SEQ ID NO: 2461192
uugccaagaauaagcagau

SEQ ID NO: 2461194 - RNA, 19 nt, Artificial Sequence
  Description of Artificial Sequence: Synthetic oligonucleotide
  Sense strand starting at position 2354 of SEQ ID NO: 1887292
cugcuuauucuuggcaaag

SEQ ID NO: 2461195 - RNA, 19 nt, Artificial Sequence
  Description of Artificial Sequence: Synthetic oligonucleotide
  Antisense strand to SEQ ID NO: 2461194
cuuugccaagaauaagcag

SEQ ID NO: 2461196 - RNA, 19 nt, Artificial Sequence
  Description of Artificial Sequence: Synthetic oligonucleotide
  Sense strand starting at position 2393 of SEQ ID NO: 1887292
gaaccagaaucgguuggau

SEQ ID NO: 2461197 - RNA, 19 nt, Artificial Sequence
  Description of Artificial Sequence: Synthetic oligonucleotide
  Antisense strand to SEQ ID NO: 2461196
auccaaccgauucugguuc

SEQ ID NO: 2461198 - RNA, 19 nt, Artificial Sequence
  Description of Artificial Sequence: Synthetic oligonucleotide
  Sense strand starting at position 2395 of SEQ ID NO: 1887292
accagaaucgguuggauca

SEQ ID NO: 2461199 - RNA, 19 nt, Artificial Sequence
  Description of Artificial Sequence: Synthetic oligonucleotide
  Antisense strand to SEQ ID NO: 2461198
ugauccaaccgauucuggu

SEQ ID NO: 2461200 - RNA, 19 nt, Artificial Sequence
  Description of Artificial Sequence: Synthetic oligonucleotide
  Sense strand starting at position 2475 of SEQ ID NO: 1887292
gagccugaacaguggcaaa

SEQ ID NO: 2461201 - RNA, 19 nt, Artificial Sequence
  Description of Artificial Sequence: Synthetic oligonucleotide
  Antisense strand to SEQ ID NO: 2461200
uuugccacuguucaggcuc

SEQ ID NO: 2461202 - RNA, 19 nt, Artificial Sequence
  Description of Artificial Sequence: Synthetic oligonucleotide
  Sense strand starting at position 2489 of SEQ ID NO: 1887292
gcaaauguuugagcuccaa

SEQ ID NO: 2461203 - RNA, 19 nt, Artificial Sequence
  Description of Artificial Sequence: Synthetic oligonucleotide
  Antisense strand to SEQ ID NO: 2461202
uuggagcucaaacauuugc

SEQ ID NO: 2461204 - RNA, 19 nt, Artificial Sequence
  Description of Artificial Sequence: Synthetic oligonucleotide
  Sense strand starting at position 2574 of SEQ ID NO: 1887292
ggaacuaaaugcuuagagu

SEQ ID NO: 2461205 - RNA, 19 nt, Artificial Sequence
  Description of Artificial Sequence: Synthetic oligonucleotide
  Antisense strand to SEQ ID NO: 2461204
acucuaagcauuuaguucc

SEQ ID NO: 2461206 - RNA, 19 nt, Artificial Sequence
  Description of Artificial Sequence: Synthetic oligonucleotide
  Sense strand starting at position 2580 of SEQ ID NO: 1887292
aaaugcuuagagugaaagu

SEQ ID NO: 2461207 - RNA, 19 nt, Artificial Sequence
  Description of Artificial Sequence: Synthetic oligonucleotide
  Antisense strand to SEQ ID NO: 2461206
acuuucacucuaagcauuu

SEQ ID NO: 2461208 - RNA, 19 nt, Artificial Sequence
  Description of Artificial Sequence: Synthetic oligonucleotide
  Sense strand starting at position 2673 of SEQ ID NO: 1887292
gagacugagugcuucuuaa

SEQ ID NO: 2461209 - RNA, 19 nt, Artificial Sequence
  Description of Artificial Sequence: Synthetic oligonucleotide
  Antisense strand to SEQ ID NO: 2461208
uuaagaagcacucagucuc

SEQ ID NO: 2461210 - RNA, 19 nt, Artificial Sequence
  Description of Artificial Sequence: Synthetic oligonucleotide
  Sense strand starting at position 2735 of SEQ ID NO: 1887292
gcuaauugaccaggaagca

SEQ ID NO: 2461211 - RNA, 19 nt, Artificial Sequence
  Description of Artificial Sequence: Synthetic oligonucleotide
  Antisense strand to SEQ ID NO: 2461210
ugcuuccuggucaauuagc

SEQ ID NO: 2461212 - RNA, 19 nt, Artificial Sequence
  Description of Artificial Sequence: Synthetic oligonucleotide
  Sense strand starting at position 2789 of SEQ ID NO: 1887292
ggcagaugagucuggauag

SEQ ID NO: 2461213 - RNA, 19 nt, Artificial Sequence
  Description of Artificial Sequence: Synthetic oligonucleotide
  Antisense strand to SEQ ID NO: 2461212
cuauccagacucaucugcc

SEQ ID NO: 2461214 - RNA, 19 nt, Artificial Sequence
  Description of Artificial Sequence: Synthetic oligonucleotide
  Sense strand starting at position 2886 of SEQ ID NO: 1887292
aggaaauuugcuugcagcu

SEQ ID NO: 2461215 - RNA, 19 nt, Artificial Sequence
  Description of Artificial Sequence: Synthetic oligonucleotide
  Antisense strand to SEQ ID NO: 2461214
agcugcaagcaaauuuccu

SEQ ID NO: 2461216 - RNA, 19 nt, Artificial Sequence
  Description of Artificial Sequence: Synthetic oligonucleotide
  Sense strand starting at position 3037 of SEQ ID NO: 1887292
aggugucugcagggaugua

SEQ ID NO: 2461217 - RNA, 19 nt, Artificial Sequence
  Description of Artificial Sequence: Synthetic oligonucleotide
  Antisense strand to SEQ ID NO: 2461216
uacaucccugcagacaccu

SEQ ID NO: 2461218 - RNA, 19 nt, Artificial Sequence
  Description of Artificial Sequence: Synthetic oligonucleotide
  Sense strand starting at position 3038 of SEQ ID NO: 1887292
ggugucugcagggauguau

SEQ ID NO: 2461219 - RNA, 19 nt, Artificial Sequence
  Description of Artificial Sequence: Synthetic oligonucleotide
  Antisense strand to SEQ ID NO: 2461218
auacaucccugcagacacc

SEQ ID NO: 2461220 - RNA, 19 nt, Artificial Sequence
  Description of Artificial Sequence: Synthetic oligonucleotide
  Sense strand starting at position 3047 of SEQ ID NO: 1887292
agggauguaucugcaacaa

SEQ ID NO: 2461221 - RNA, 19 nt, Artificial Sequence
  Description of Artificial Sequence: Synthetic oligonucleotide
  Antisense strand to SEQ ID NO: 2461220
uuguugcagauacaucccu

SEQ ID NO: 2461222 - RNA, 19 nt, Artificial Sequence
  Description of Artificial Sequence: Synthetic oligonucleotide
  Sense strand starting at position 3075 of SEQ ID NO: 1887292
ugguuugaaccuuggcuca

SEQ ID NO: 2461223 - RNA, 19 nt, Artificial Sequence
  Description of Artificial Sequence: Synthetic oligonucleotide
  Antisense strand to SEQ ID NO: 2461222
ugagccaagguucaaacca

SEQ ID NO: 2461224 - RNA, 19 nt, Artificial Sequence
  Description of Artificial Sequence: Synthetic oligonucleotide
  Sense strand starting at position 3238 of SEQ ID NO: 1887292
gcuaccugauaucuagaaa

SEQ ID NO: 2461225 - RNA, 19 nt, Artificial Sequence
  Description of Artificial Sequence: Synthetic oligonucleotide
  Antisense strand to SEQ ID NO: 2461224
uuucuagauaucagguagc

SEQ ID NO: 2461226 - RNA, 19 nt, Artificial Sequence
  Description of Artificial Sequence: Synthetic oligonucleotide
  Sense strand starting at position 3358 of SEQ ID NO: 1887292
ggaggugaguaauuauccu

SEQ ID NO: 2461227 - RNA, 19 nt, Artificial Sequence
  Description of Artificial Sequence: Synthetic oligonucleotide
  Antisense strand to SEQ ID NO: 2461226
aggauaauuacucaccucc

SEQ ID NO: 2461228 - RNA, 19 nt, Artificial Sequence
  Description of Artificial Sequence: Synthetic oligonucleotide
  Sense strand starting at position 3631 of SEQ ID NO: 1887292
ugacuuguccagggccaua

SEQ ID NO: 2461229 - RNA, 19 nt, Artificial Sequence
  Description of Artificial Sequence: Synthetic oligonucleotide
  Antisense strand to SEQ ID NO: 2461228
uauggcccuggacaaguca

SEQ ID NO: 2461230 - RNA, 19 nt, Artificial Sequence
  Description of Artificial Sequence: Synthetic oligonucleotide
  Sense strand starting at position 30 of SEQ ID NO: 1887293
ugguauauguaucagcaau

SEQ ID NO: 2461231 - RNA, 19 nt, Artificial Sequence
  Description of Artificial Sequence: Synthetic oligonucleotide
  Antisense strand to SEQ ID NO: 2461230
auugcugauacauauacca

SEQ ID NO: 2461232 - RNA, 19 nt, Artificial Sequence
  Description of Artificial Sequence: Synthetic oligonucleotide
  Sense strand starting at position 32 of SEQ ID NO: 1887293
guauauguaucagcaauau

SEQ ID NO: 2461233 - RNA, 19 nt, Artificial Sequence
  Description of Artificial Sequence: Synthetic oligonucleotide
  Antisense strand to SEQ ID NO: 2461232
auauugcugauacauauac

SEQ ID NO: 2461234 - RNA, 19 nt, Artificial Sequence
  Description of Artificial Sequence: Synthetic oligonucleotide
  Sense strand starting at position 543 of SEQ ID NO: 1887293
cagaaugucuucuuaugag

SEQ ID NO: 2461235 - RNA, 19 nt, Artificial Sequence
  Description of Artificial Sequence: Synthetic oligonucleotide
  Antisense strand to SEQ ID NO: 2461234
cucauaagaagacauucug

SEQ ID NO: 2461236 - RNA, 19 nt, Artificial Sequence
  Description of Artificial Sequence: Synthetic oligonucleotide
  Sense strand starting at position 547 of SEQ ID NO: 1887293
augucuucuuaugagguca

SEQ ID NO: 2461237 - RNA, 19 nt, Artificial Sequence
  Description of Artificial Sequence: Synthetic oligonucleotide
  Antisense strand to SEQ ID NO: 2461236
ugaccucauaagaagacau

SEQ ID NO: 2461238 - RNA, 19 nt, Artificial Sequence
  Description of Artificial Sequence: Synthetic oligonucleotide
  Sense strand starting at position 549 of SEQ ID NO: 1887293
gucuucuuaugaggucauu

SEQ ID NO: 2461239 - RNA, 19 nt, Artificial Sequence
  Description of Artificial Sequence: Synthetic oligonucleotide
  Antisense strand to SEQ ID NO: 2461238
aaugaccucauaagaagac

SEQ ID NO: 2461240 - RNA, 19 nt, Artificial Sequence
  Description of Artificial Sequence: Synthetic oligonucleotide
  Sense strand starting at position 552 of SEQ ID NO: 1887293
uucuuaugaggucauucuu

SEQ ID NO: 2461241 - RNA, 19 nt, Artificial Sequence
  Description of Artificial Sequence: Synthetic oligonucleotide
  Antisense strand to SEQ ID NO: 2461240
aagaaugaccucauaagaa

SEQ ID NO: 2461242 - RNA, 19 nt, Artificial Sequence
  Description of Artificial Sequence: Synthetic oligonucleotide
  Sense strand starting at position 678 of SEQ ID NO: 1887293
ggaacucauguuugugaca

SEQ ID NO: 2461243 - RNA, 19 nt, Artificial Sequence
  Description of Artificial Sequence: Synthetic oligonucleotide
  Antisense strand to SEQ ID NO: 2461242
ugucacaaacaugaguucc

SEQ ID NO: 2461244 - RNA, 19 nt, Artificial Sequence
  Description of Artificial Sequence: Synthetic oligonucleotide
  Sense strand starting at position 679 of SEQ ID NO: 1887293
gaacucauguuugugacau

SEQ ID NO: 2461245 - RNA, 19 nt, Artificial Sequence
  Description of Artificial Sequence: Synthetic oligonucleotide
  Antisense strand to SEQ ID NO: 2461244
augucacaaacaugaguuc

SEQ ID NO: 2461246 - RNA, 19 nt, Artificial Sequence
  Description of Artificial Sequence: Synthetic oligonucleotide
  Sense strand starting at position 681 of SEQ ID NO: 1887293
acucauguuugugacauaa

SEQ ID NO: 2461247 - RNA, 19 nt, Artificial Sequence
  Description of Artificial Sequence: Synthetic oligonucleotide
  Antisense strand to SEQ ID NO: 2461246
uuaugucacaaacaugagu

SEQ ID NO: 2461248 - RNA, 19 nt, Artificial Sequence
  Description of Artificial Sequence: Synthetic oligonucleotide
  Sense strand starting at position 817 of SEQ ID NO: 1887293
guucuaugcguuugucuuu

SEQ ID NO: 2461249 - RNA, 19 nt, Artificial Sequence
  Description of Artificial Sequence: Synthetic oligonucleotide
  Antisense strand to SEQ ID NO: 2461248
aaagacaaacgcauagaac

SEQ ID NO: 2461250 - RNA, 19 nt, Artificial Sequence
  Description of Artificial Sequence: Synthetic oligonucleotide
  Sense strand starting at position 1028 of SEQ ID NO: 1887293
gagcucacauucugaggaa

SEQ ID NO: 2461251 - RNA, 19 nt, Artificial Sequence
  Description of Artificial Sequence: Synthetic oligonucleotide
  Antisense strand to SEQ ID NO: 2461250
uuccucagaaugugagcuc

SEQ ID NO: 2461252 - RNA, 19 nt, Artificial Sequence
  Description of Artificial Sequence: Synthetic oligonucleotide
  Sense strand starting at position 1029 of SEQ ID NO: 1887293
agcucacauucugaggaaa

SEQ ID NO: 2461253 - RNA, 19 nt, Artificial Sequence
  Description of Artificial Sequence: Synthetic oligonucleotide
  Antisense strand to SEQ ID NO: 2461252
uuuccucagaaugugagcu

SEQ ID NO: 2461254 - RNA, 19 nt, Artificial Sequence
  Description of Artificial Sequence: Synthetic oligonucleotide
  Sense strand starting at position 1292 of SEQ ID NO: 1887293
accguauaugcuuaacuuu

SEQ ID NO: 2461255 - RNA, 19 nt, Artificial Sequence
  Description of Artificial Sequence: Synthetic oligonucleotide
  Antisense strand to SEQ ID NO: 2461254
aaaguuaagcauauacggu

SEQ ID NO: 2461256 - RNA, 19 nt, Artificial Sequence
  Description of Artificial Sequence: Synthetic oligonucleotide
  Sense strand starting at position 2303 of SEQ ID NO: 1887293
agcuguuggacccgggaua

SEQ ID NO: 2461257 - RNA, 19 nt, Artificial Sequence
  Description of Artificial Sequence: Synthetic oligonucleotide
  Antisense strand to SEQ ID NO: 2461256
uaucccggguccaacagcu

SEQ ID NO: 2461258 - RNA, 19 nt, Artificial Sequence
  Description of Artificial Sequence: Synthetic oligonucleotide
  Sense strand starting at position 2526 of SEQ ID NO: 1887293
gugugaauagugcagccaa

SEQ ID NO: 2461259 - RNA, 19 nt, Artificial Sequence
  Description of Artificial Sequence: Synthetic oligonucleotide
  Antisense strand to SEQ ID NO: 2461258
uuggcugcacuauucacac

SEQ ID NO: 2461260 - RNA, 19 nt, Artificial Sequence
  Description of Artificial Sequence: Synthetic oligonucleotide
  Sense strand starting at position 3229 of SEQ ID NO: 1887293
ggcaguguagcacacaaua

SEQ ID NO: 2461261 - RNA, 19 nt, Artificial Sequence
  Description of Artificial Sequence: Synthetic oligonucleotide
  Antisense strand to SEQ ID NO: 2461260
uauugugugcuacacugcc

SEQ ID NO: 2461262 - RNA, 19 nt, Artificial Sequence
  Description of Artificial Sequence: Synthetic oligonucleotide
  Sense strand starting at position 3563 of SEQ ID NO: 1887293
ccuguauccaggcaagaag

SEQ ID NO: 2461263 - RNA, 19 nt, Artificial Sequence
  Description of Artificial Sequence: Synthetic oligonucleotide
  Antisense strand to SEQ ID NO: 2461262
cuucuugccuggauacagg

SEQ ID NO: 2461264 - RNA, 19 nt, Artificial Sequence
  Description of Artificial Sequence: Synthetic oligonucleotide
  Sense strand starting at position 3689 of SEQ ID NO: 1887293
uccgcuuucgccuucuuua

SEQ ID NO: 2461265 - RNA, 19 nt, Artificial Sequence
  Description of Artificial Sequence: Synthetic oligonucleotide
  Antisense strand to SEQ ID NO: 2461264
uaaagaaggcgaaagcgga

SEQ ID NO: 2461266 - RNA, 19 nt, Artificial Sequence
  Description of Artificial Sequence: Synthetic oligonucleotide
  Sense strand starting at position 3690 of SEQ ID NO: 1887293
ccgcuuucgccuucuuuaa

SEQ ID NO: 2461267 - RNA, 19 nt, Artificial Sequence
  Description of Artificial Sequence: Synthetic oligonucleotide
  Antisense strand to SEQ ID NO: 2461266
uuaaagaaggcgaaagcgg

SEQ ID NO: 2461268 - RNA, 19 nt, Artificial Sequence
  Description of Artificial Sequence: Synthetic oligonucleotide
  Sense strand starting at position 146 of SEQ ID NO: 1887294
gguagaaaccacugaugua

SEQ ID NO: 2461269 - RNA, 19 nt, Artificial Sequence
  Description of Artificial Sequence: Synthetic oligonucleotide
  Antisense strand to SEQ ID NO: 2461268
uacaucagugguuucuacc

SEQ ID NO: 2461270 - RNA, 19 nt, Artificial Sequence
  Description of Artificial Sequence: Synthetic oligonucleotide
  Sense strand starting at position 167 of SEQ ID NO: 1887294
auaauaagugugcaaccau

SEQ ID NO: 2461271 - RNA, 19 nt, Artificial Sequence
  Description of Artificial Sequence: Synthetic oligonucleotide
  Antisense strand to SEQ ID NO: 2461270
augguugcacacuuauuau

SEQ ID NO: 2461272 - RNA, 19 nt, Artificial Sequence
  Description of Artificial Sequence: Synthetic oligonucleotide
  Sense strand starting at position 176 of SEQ ID NO: 1887294
gugcaaccauauucuuaag

SEQ ID NO: 2461273 - RNA, 19 nt, Artificial Sequence
  Description of Artificial Sequence: Synthetic oligonucleotide
  Antisense strand to SEQ ID NO: 2461272
cuuaagaauaugguugcac

SEQ ID NO: 2461274 - RNA, 19 nt, Artificial Sequence
  Description of Artificial Sequence: Synthetic oligonucleotide
  Sense strand starting at position 205 of SEQ ID NO: 1887294
caaucuugguuagcugaga

SEQ ID NO: 2461275 - RNA, 19 nt, Artificial Sequence
  Description of Artificial Sequence: Synthetic oligonucleotide
  Antisense strand to SEQ ID NO: 2461274
ucucagcuaaccaagauug

SEQ ID NO: 2461276 - RNA, 19 nt, Artificial Sequence
  Description of Artificial Sequence: Synthetic oligonucleotide
  Sense strand starting at position 206 of SEQ ID NO: 1887294
aaucuugguuagcugagaa

SEQ ID NO: 2461277 - RNA, 19 nt, Artificial Sequence
  Description of Artificial Sequence: Synthetic oligonucleotide
  Antisense strand to SEQ ID NO: 2461276
uucucagcuaaccaagauu

SEQ ID NO: 2461278 - RNA, 19 nt, Artificial Sequence
  Description of Artificial Sequence: Synthetic oligonucleotide
  Sense strand starting at position 390 of SEQ ID NO: 1887294
auguauuucuuucuuguca

SEQ ID NO: 2461279 - RNA, 19 nt, Artificial Sequence
  Description of Artificial Sequence: Synthetic oligonucleotide
  Antisense strand to SEQ ID NO: 2461278
ugacaagaaagaaauacau

SEQ ID NO: 2461280 - RNA, 19 nt, Artificial Sequence
  Description of Artificial Sequence: Synthetic oligonucleotide
  Sense strand starting at position 391 of SEQ ID NO: 1887294
uguauuucuuucuugucau

SEQ ID NO: 2461281 - RNA, 19 nt, Artificial Sequence
  Description of Artificial Sequence: Synthetic oligonucleotide
  Antisense strand to SEQ ID NO: 2461280
augacaagaaagaaauaca

SEQ ID NO: 2461282 - RNA, 19 nt, Artificial Sequence
  Description of Artificial Sequence: Synthetic oligonucleotide
  Sense strand starting at position 459 of SEQ ID NO: 1887294
gggaggcauccguagguaa

SEQ ID NO: 2461283 - RNA, 19 nt, Artificial Sequence
  Description of Artificial Sequence: Synthetic oligonucleotide
  Antisense strand to SEQ ID NO: 2461282
uuaccuacggaugccuccc

SEQ ID NO: 2461284 - RNA, 19 nt, Artificial Sequence
  Description of Artificial Sequence: Synthetic oligonucleotide
  Sense strand starting at position 471 of SEQ ID NO: 1887294
uagguaaugugaguuauua

SEQ ID NO: 2461285 - RNA, 19 nt, Artificial Sequence
  Description of Artificial Sequence: Synthetic oligonucleotide
  Antisense strand to SEQ ID NO: 2461284
uaauaacucacauuaccua

SEQ ID NO: 2461286 - RNA, 19 nt, Artificial Sequence
  Description of Artificial Sequence: Synthetic oligonucleotide
  Sense strand starting at position 473 of SEQ ID NO: 1887294
gguaaugugaguuauuauc

SEQ ID NO: 2461287 - RNA, 19 nt, Artificial Sequence
  Description of Artificial Sequence: Synthetic oligonucleotide
  Antisense strand to SEQ ID NO: 2461286
gauaauaacucacauuacc

SEQ ID NO: 2461288 - RNA, 19 nt, Artificial Sequence
  Description of Artificial Sequence: Synthetic oligonucleotide
  Sense strand starting at position 495 of SEQ ID NO: 1887294
guucuagauguuggguuga

SEQ ID NO: 2461289 - RNA, 19 nt, Artificial Sequence
  Description of Artificial Sequence: Synthetic oligonucleotide
  Antisense strand to SEQ ID NO: 2461288
ucaacccaacaucuagaac

SEQ ID NO: 2461290 - RNA, 19 nt, Artificial Sequence
  Description of Artificial Sequence: Synthetic oligonucleotide
  Sense strand starting at position 497 of SEQ ID NO: 1887294
ucuagauguuggguugagu

SEQ ID NO: 2461291 - RNA, 19 nt, Artificial Sequence
  Description of Artificial Sequence: Synthetic oligonucleotide
  Antisense strand to SEQ ID NO: 2461290
acucaacccaacaucuaga

SEQ ID NO: 2461292 - RNA, 19 nt, Artificial Sequence
  Description of Artificial Sequence: Synthetic oligonucleotide
  Sense strand starting at position 584 of SEQ ID NO: 1887294
ccauacaugcacgagugau

SEQ ID NO: 2461293 - RNA, 19 nt, Artificial Sequence
  Description of Artificial Sequence: Synthetic oligonucleotide
  Antisense strand to SEQ ID NO: 2461292
aucacucgugcauguaugg

SEQ ID NO: 2461294 - RNA, 19 nt, Artificial Sequence
  Description of Artificial Sequence: Synthetic oligonucleotide
  Sense strand starting at position 685 of SEQ ID NO: 1887294
uggugaugcagguagcuaa

SEQ ID NO: 2461295 - RNA, 19 nt, Artificial Sequence
  Description of Artificial Sequence: Synthetic oligonucleotide
  Antisense strand to SEQ ID NO: 2461294
uuagcuaccugcaucacca

SEQ ID NO: 2461296 - RNA, 19 nt, Artificial Sequence
  Description of Artificial Sequence: Synthetic oligonucleotide
  Sense strand starting at position 693 of SEQ ID NO: 1887294
cagguagcuaaugguuaga

SEQ ID NO: 2461297 - RNA, 19 nt, Artificial Sequence
  Description of Artificial Sequence: Synthetic oligonucleotide
  Antisense strand to SEQ ID NO: 2461296
ucuaaccauuagcuaccug

SEQ ID NO: 2461298 - RNA, 19 nt, Artificial Sequence
  Description of Artificial Sequence: Synthetic oligonucleotide
  Sense strand starting at position 815 of SEQ ID NO: 1887294
uaugcucugcugucgcaau

SEQ ID NO: 2461299 - RNA, 19 nt, Artificial Sequence
  Description of Artificial Sequence: Synthetic oligonucleotide
  Antisense strand to SEQ ID NO: 2461298
auugcgacagcagagcaua

SEQ ID NO: 2461300 - RNA, 19 nt, Artificial Sequence
  Description of Artificial Sequence: Synthetic oligonucleotide
  Sense strand starting at position 1118 of SEQ ID NO: 1887294
uggagcugcaguuauauau

SEQ ID NO: 2461301 - RNA, 19 nt, Artificial Sequence
  Description of Artificial Sequence: Synthetic oligonucleotide
  Antisense strand to SEQ ID NO: 2461300
auauauaacugcagcucca

SEQ ID NO: 2461302 - RNA, 19 nt, Artificial Sequence
  Description of Artificial Sequence: Synthetic oligonucleotide
  Sense strand starting at position 1226 of SEQ ID NO: 1887294
auguuaacugcuggauuau

SEQ ID NO: 2461303 - RNA, 19 nt, Artificial Sequence
  Description of Artificial Sequence: Synthetic oligonucleotide
  Antisense strand to SEQ ID NO: 2461302
auaauccagcaguuaacau

SEQ ID NO: 2461304 - RNA, 19 nt, Artificial Sequence
  Description of Artificial Sequence: Synthetic oligonucleotide
  Sense strand starting at position 1227 of SEQ ID NO: 1887294
uguuaacugcuggauuaua

SEQ ID NO: 2461305 - RNA, 19 nt, Artificial Sequence
  Description of Artificial Sequence: Synthetic oligonucleotide
  Antisense strand to SEQ ID NO: 2461304
uauaauccagcaguuaaca

SEQ ID NO: 2461306 - RNA, 19 nt, Artificial Sequence
  Description of Artificial Sequence: Synthetic oligonucleotide
  Sense strand starting at position 1431 of SEQ ID NO: 1887294
ugucuacagugaucaggua

SEQ ID NO: 2461307 - RNA, 19 nt, Artificial Sequence
  Description of Artificial Sequence: Synthetic oligonucleotide
  Antisense strand to SEQ ID NO: 2461306
uaccugaucacuguagaca

SEQ ID NO: 2461308 - RNA, 19 nt, Artificial Sequence
  Description of Artificial Sequence: Synthetic oligonucleotide
  Sense strand starting at position 1658 of SEQ ID NO: 1887294
ccuucuuugccuuaaggga

SEQ ID NO: 2461309 - RNA, 19 nt, Artificial Sequence
  Description of Artificial Sequence: Synthetic oligonucleotide
  Antisense strand to SEQ ID NO: 2461308
ucccuuaaggcaaagaagg

SEQ ID NO: 2461310 - RNA, 19 nt, Artificial Sequence
  Description of Artificial Sequence: Synthetic oligonucleotide
  Sense strand starting at position 1905 of SEQ ID NO: 1887294
aggugaaucuagcuauagu

SEQ ID NO: 2461311 - RNA, 19 nt, Artificial Sequence
  Description of Artificial Sequence: Synthetic oligonucleotide
  Antisense strand to SEQ ID NO: 2461310
acuauagcuagauucaccu

SEQ ID NO: 2461312 - RNA, 19 nt, Artificial Sequence
  Description of Artificial Sequence: Synthetic oligonucleotide
  Sense strand starting at position 1906 of SEQ ID NO: 1887294
ggugaaucuagcuauagua

SEQ ID NO: 2461313 - RNA, 19 nt, Artificial Sequence
  Description of Artificial Sequence: Synthetic oligonucleotide
  Antisense strand to SEQ ID NO: 2461312
uacuauagcuagauucacc

SEQ ID NO: 2461314 - RNA, 19 nt, Artificial Sequence
  Description of Artificial Sequence: Synthetic oligonucleotide
  Sense strand starting at position 1908 of SEQ ID NO: 1887294
ugaaucuagcuauaguaca

SEQ ID NO: 2461315 - RNA, 19 nt, Artificial Sequence
  Description of Artificial Sequence: Synthetic oligonucleotide
  Antisense strand to SEQ ID NO: 2461314
uguacuauagcuagauuca

SEQ ID NO: 2461316 - RNA, 19 nt, Artificial Sequence
  Description of Artificial Sequence: Synthetic oligonucleotide
  Sense strand starting at position 2100 of SEQ ID NO: 1887294
agggaacacugacaauaaa

SEQ ID NO: 2461317 - RNA, 19 nt, Artificial Sequence
  Description of Artificial Sequence: Synthetic oligonucleotide
  Antisense strand to SEQ ID NO: 2461316
uuuauugucaguguucccu

SEQ ID NO: 2461318 - RNA, 19 nt, Artificial Sequence
  Description of Artificial Sequence: Synthetic oligonucleotide
  Sense strand starting at position 2158 of SEQ ID NO: 1887294
aggccagagauauguauau

SEQ ID NO: 2461319 - RNA, 19 nt, Artificial Sequence
  Description of Artificial Sequence: Synthetic oligonucleotide
  Antisense strand to SEQ ID NO: 2461318
auauacauaucucuggccu

SEQ ID NO: 2461320 - RNA, 19 nt, Artificial Sequence
  Description of Artificial Sequence: Synthetic oligonucleotide
  Sense strand starting at position 2162 of SEQ ID NO: 1887294
cagagauauguauaugcug

SEQ ID NO: 2461321 - RNA, 19 nt, Artificial Sequence
  Description of Artificial Sequence: Synthetic oligonucleotide
  Antisense strand to SEQ ID NO: 2461320
cagcauauacauaucucug

SEQ ID NO: 2461322 - RNA, 19 nt, Artificial Sequence
  Description of Artificial Sequence: Synthetic oligonucleotide
  Sense strand starting at position 2217 of SEQ ID NO: 1887294
guccaucugccuuggaaga

SEQ ID NO: 2461323 - RNA, 19 nt, Artificial Sequence
  Description of Artificial Sequence: Synthetic oligonucleotide
  Antisense strand to SEQ ID NO: 2461322
ucuuccaaggcagauggac

SEQ ID NO: 2461324 - RNA, 19 nt, Artificial Sequence
  Description of Artificial Sequence: Synthetic oligonucleotide
  Sense strand starting at position 2218 of SEQ ID NO: 1887294
uccaucugccuuggaagaa

SEQ ID NO: 2461325 - RNA, 19 nt, Artificial Sequence
  Description of Artificial Sequence: Synthetic oligonucleotide
  Antisense strand to SEQ ID NO: 2461324
uucuuccaaggcagaugga

SEQ ID NO: 2461326 - RNA, 19 nt, Artificial Sequence
  Description of Artificial Sequence: Synthetic oligonucleotide
  Sense strand starting at position 2282 of SEQ ID NO: 1887294
ucuuaaagagcauguuuau

SEQ ID NO: 2461327 - RNA, 19 nt, Artificial Sequence
  Description of Artificial Sequence: Synthetic oligonucleotide
  Antisense strand to SEQ ID NO: 2461326
auaaacaugcucuuuaaga

SEQ ID NO: 2461328 - RNA, 19 nt, Artificial Sequence
  Description of Artificial Sequence: Synthetic oligonucleotide
  Sense strand starting at position 2285 of SEQ ID NO: 1887294
uaaagagcauguuuauguu

SEQ ID NO: 2461329 - RNA, 19 nt, Artificial Sequence
  Description of Artificial Sequence: Synthetic oligonucleotide
  Antisense strand to SEQ ID NO: 2461328
aacauaaacaugcucuuua

SEQ ID NO: 2461330 - RNA, 19 nt, Artificial Sequence
  Description of Artificial Sequence: Synthetic oligonucleotide
  Sense strand starting at position 2662 of SEQ ID NO: 1887294
agaagugacucuccuaacu

SEQ ID NO: 2461331 - RNA, 19 nt, Artificial Sequence
  Description of Artificial Sequence: Synthetic oligonucleotide
  Antisense strand to SEQ ID NO: 2461330
aguuaggagagucacuucu

SEQ ID NO: 2461332 - RNA, 19 nt, Artificial Sequence
  Description of Artificial Sequence: Synthetic oligonucleotide
  Sense strand starting at position 3001 of SEQ ID NO: 1887294
cuaggcugagcuggaaauu

SEQ ID NO: 2461333 - RNA, 19 nt, Artificial Sequence
  Description of Artificial Sequence: Synthetic oligonucleotide
  Antisense strand to SEQ ID NO: 2461332
aauuuccagcucagccuag

SEQ ID NO: 2461334 - RNA, 19 nt, Artificial Sequence
  Description of Artificial Sequence: Synthetic oligonucleotide
  Sense strand starting at position 3067 of SEQ ID NO: 1887294
gcagguucccgggaacauu

SEQ ID NO: 2461335 - RNA, 19 nt, Artificial Sequence
  Description of Artificial Sequence: Synthetic oligonucleotide
  Antisense strand to SEQ ID NO: 2461334
aauguucccgggaaccugc

SEQ ID NO: 2461336 - RNA, 19 nt, Artificial Sequence
  Description of Artificial Sequence: Synthetic oligonucleotide
  Sense strand starting at position 3076 of SEQ ID NO: 1887294
cgggaacauucagugacau

SEQ ID NO: 2461337 - RNA, 19 nt, Artificial Sequence
  Description of Artificial Sequence: Synthetic oligonucleotide
  Antisense strand to SEQ ID NO: 2461336
augucacugaauguucccg

SEQ ID NO: 2461338 - RNA, 19 nt, Artificial Sequence
  Description of Artificial Sequence: Synthetic oligonucleotide
  Sense strand starting at position 3233 of SEQ ID NO: 1887294
ggcucucaugacuaucaca

SEQ ID NO: 2461339 - RNA, 19 nt, Artificial Sequence
  Description of Artificial Sequence: Synthetic oligonucleotide
  Antisense strand to SEQ ID NO: 2461338
ugugauagucaugagagcc

SEQ ID NO: 2461340 - RNA, 19 nt, Artificial Sequence
  Description of Artificial Sequence: Synthetic oligonucleotide
  Sense strand starting at position 3349 of SEQ ID NO: 1887294
agcaguuggcaucaauauc

SEQ ID NO: 2461341 - RNA, 19 nt, Artificial Sequence
  Description of Artificial Sequence: Synthetic oligonucleotide
  Antisense strand to SEQ ID NO: 2461340
gauauugaugccaacugcu

SEQ ID NO: 2461342 - RNA, 19 nt, Artificial Sequence
  Description of Artificial Sequence: Synthetic oligonucleotide
  Sense strand starting at position 3357 of SEQ ID NO: 1887294
gcaucaauaucgucaaacc

SEQ ID NO: 2461343 - RNA, 19 nt, Artificial Sequence
  Description of Artificial Sequence: Synthetic oligonucleotide
  Antisense strand to SEQ ID NO: 2461342
gguuugacgauauugaugc

SEQ ID NO: 2461344 - RNA, 19 nt, Artificial Sequence
  Description of Artificial Sequence: Synthetic oligonucleotide
  Sense strand starting at position 3504 of SEQ ID NO: 1887294
guccuauaggcccauguaa

SEQ ID NO: 2461345 - RNA, 19 nt, Artificial Sequence
  Description of Artificial Sequence: Synthetic oligonucleotide
  Antisense strand to SEQ ID NO: 2461344
uuacaugggccuauaggac

SEQ ID NO: 2461346 - RNA, 19 nt, Artificial Sequence
  Description of Artificial Sequence: Synthetic oligonucleotide
  Sense strand starting at position 3699 of SEQ ID NO: 1887294
cagguuuaucugcauugua

SEQ ID NO: 2461347 - RNA, 19 nt, Artificial Sequence
  Description of Artificial Sequence: Synthetic oligonucleotide
  Antisense strand to SEQ ID NO: 2461346
uacaaugcagauaaaccug

SEQ ID NO: 2461348 - RNA, 19 nt, Artificial Sequence
  Description of Artificial Sequence: Synthetic oligonucleotide
  Sense strand starting at position 131 of SEQ ID NO: 1887295
uugagagaaucccugucua

SEQ ID NO: 2461349 - RNA, 19 nt, Artificial Sequence
  Description of Artificial Sequence: Synthetic oligonucleotide
  Antisense strand to SEQ ID NO: 2461348
uagacagggauucucucaa

SEQ ID NO: 2461350 - RNA, 19 nt, Artificial Sequence
  Description of Artificial Sequence: Synthetic oligonucleotide
  Sense strand starting at position 144 of SEQ ID NO: 1887295
ugucuaccucaguacagua

SEQ ID NO: 2461351 - RNA, 19 nt, Artificial Sequence
  Description of Artificial Sequence: Synthetic oligonucleotide
  Antisense strand to SEQ ID NO: 2461350
uacuguacugagguagaca

SEQ ID NO: 2461352 - RNA, 19 nt, Artificial Sequence
  Description of Artificial Sequence: Synthetic oligonucleotide
  Sense strand starting at position 157 of SEQ ID NO: 1887295
acaguaacaggauguauau

SEQ ID NO: 2461353 - RNA, 19 nt, Artificial Sequence
  Description of Artificial Sequence: Synthetic oligonucleotide
  Antisense strand to SEQ ID NO: 2461352
auauacauccuguuacugu

SEQ ID NO: 2461354 - RNA, 19 nt, Artificial Sequence
  Description of Artificial Sequence: Synthetic oligonucleotide
  Sense strand starting at position 465 of SEQ ID NO: 1887295
ugcaauggccauuacaaga

SEQ ID NO: 2461355 - RNA, 19 nt, Artificial Sequence
  Description of Artificial Sequence: Synthetic oligonucleotide
  Antisense strand to SEQ ID NO: 2461354
ucuuguaauggccauugca

SEQ ID NO: 2461356 - RNA, 19 nt, Artificial Sequence
  Description of Artificial Sequence: Synthetic oligonucleotide
  Sense strand starting at position 500 of SEQ ID NO: 1887295
gugcaaauggcagaacaua

SEQ ID NO: 2461357 - RNA, 19 nt, Artificial Sequence
  Description of Artificial Sequence: Synthetic oligonucleotide
  Antisense strand to SEQ ID NO: 2461356
uauguucugccauuugcac

SEQ ID NO: 2461358 - RNA, 19 nt, Artificial Sequence
  Description of Artificial Sequence: Synthetic oligonucleotide
  Sense strand starting at position 529 of SEQ ID NO: 1887295
uguuucgucucauugauuu

SEQ ID NO: 2461359 - RNA, 19 nt, Artificial Sequence
  Description of Artificial Sequence: Synthetic oligonucleotide
  Antisense strand to SEQ ID NO: 2461358
aaaucaaugagacgaaaca

SEQ ID NO: 2461360 - RNA, 19 nt, Artificial Sequence
  Description of Artificial Sequence: Synthetic oligonucleotide
  Sense strand starting at position 533 of SEQ ID NO: 1887295
ucgucucauugauuuaucu

SEQ ID NO: 2461361 - RNA, 19 nt, Artificial Sequence
  Description of Artificial Sequence: Synthetic oligonucleotide
  Antisense strand to SEQ ID NO: 2461360
agauaaaucaaugagacga

SEQ ID NO: 2461362 - RNA, 19 nt, Artificial Sequence
  Description of Artificial Sequence: Synthetic oligonucleotide
  Sense strand starting at position 564 of SEQ ID NO: 1887295
acugguauaucucugacga

SEQ ID NO: 2461363 - RNA, 19 nt, Artificial Sequence
  Description of Artificial Sequence: Synthetic oligonucleotide
  Antisense strand to SEQ ID NO: 2461362
ucgucagagauauaccagu

SEQ ID NO: 2461364 - RNA, 19 nt, Artificial Sequence
  Description of Artificial Sequence: Synthetic oligonucleotide
  Sense strand starting at position 565 of SEQ ID NO: 1887295
cugguauaucucugacgaa

SEQ ID NO: 2461365 - RNA, 19 nt, Artificial Sequence
  Description of Artificial Sequence: Synthetic oligonucleotide
  Antisense strand to SEQ ID NO: 2461364
uucgucagagauauaccag

SEQ ID NO: 2461366 - RNA, 19 nt, Artificial Sequence
  Description of Artificial Sequence: Synthetic oligonucleotide
  Sense strand starting at position 634 of SEQ ID NO: 1887295
aguuuaaacucacucaagu

SEQ ID NO: 2461367 - RNA, 19 nt, Artificial Sequence
  Description of Artificial Sequence: Synthetic oligonucleotide
  Antisense strand to SEQ ID NO: 2461366
acuugagugaguuuaaacu

SEQ ID NO: 2461368 - RNA, 19 nt, Artificial Sequence
  Description of Artificial Sequence: Synthetic oligonucleotide
  Sense strand starting at position 660 of SEQ ID NO: 1887295
uuuggauaagccugaccaa

SEQ ID NO: 2461369 - RNA, 19 nt, Artificial Sequence
  Description of Artificial Sequence: Synthetic oligonucleotide
  Antisense strand to SEQ ID NO: 2461368
uuggucaggcuuauccaaa

SEQ ID NO: 2461370 - RNA, 19 nt, Artificial Sequence
  Description of Artificial Sequence: Synthetic oligonucleotide
  Sense strand starting at position 663 of SEQ ID NO: 1887295
ggauaagccugaccaaaug

SEQ ID NO: 2461371 - RNA, 19 nt, Artificial Sequence
  Description of Artificial Sequence: Synthetic oligonucleotide
  Antisense strand to SEQ ID NO: 2461370
cauuuggucaggcuuaucc

SEQ ID NO: 2461372 - RNA, 19 nt, Artificial Sequence
  Description of Artificial Sequence: Synthetic oligonucleotide
  Sense strand starting at position 746 of SEQ ID NO: 1887295
uguuguauuggucuccgua

SEQ ID NO: 2461373 - RNA, 19 nt, Artificial Sequence
  Description of Artificial Sequence: Synthetic oligonucleotide
  Antisense strand to SEQ ID NO: 2461372
uacggagaccaauacaaca

SEQ ID NO: 2461374 - RNA, 19 nt, Artificial Sequence
  Description of Artificial Sequence: Synthetic oligonucleotide
  Sense strand starting at position 758 of SEQ ID NO: 1887295
cuccguaagugggugauaa

SEQ ID NO: 2461375 - RNA, 19 nt, Artificial Sequence
  Description of Artificial Sequence: Synthetic oligonucleotide
  Antisense strand to SEQ ID NO: 2461374
uuaucacccacuuacggag

SEQ ID NO: 2461376 - RNA, 19 nt, Artificial Sequence
  Description of Artificial Sequence: Synthetic oligonucleotide
  Sense strand starting at position 760 of SEQ ID NO: 1887295
ccguaagugggugauaaca

SEQ ID NO: 2461377 - RNA, 19 nt, Artificial Sequence
  Description of Artificial Sequence: Synthetic oligonucleotide
  Antisense strand to SEQ ID NO: 2461376
uguuaucacccacuuacgg

SEQ ID NO: 2461378 - RNA, 19 nt, Artificial Sequence
  Description of Artificial Sequence: Synthetic oligonucleotide
  Sense strand starting at position 924 of SEQ ID NO: 1887295
ccaacaaucgcugaacaga

SEQ ID NO: 2461379 - RNA, 19 nt, Artificial Sequence
  Description of Artificial Sequence: Synthetic oligonucleotide
  Antisense strand to SEQ ID NO: 2461378
ucuguucagcgauuguugg

SEQ ID NO: 2461380 - RNA, 19 nt, Artificial Sequence
  Description of Artificial Sequence: Synthetic oligonucleotide
  Sense strand starting at position 1173 of SEQ ID NO: 1887295
uuaaauagccaaugggaau

SEQ ID NO: 2461381 - RNA, 19 nt, Artificial Sequence
  Description of Artificial Sequence: Synthetic oligonucleotide
  Antisense strand to SEQ ID NO: 2461380
auucccauuggcuauuuaa

SEQ ID NO: 2461382 - RNA, 19 nt, Artificial Sequence
  Description of Artificial Sequence: Synthetic oligonucleotide
  Sense strand starting at position 1219 of SEQ ID NO: 1887295
uggaaauagcucugugacu

SEQ ID NO: 2461383 - RNA, 19 nt, Artificial Sequence
  Description of Artificial Sequence: Synthetic oligonucleotide
  Antisense strand to SEQ ID NO: 2461382
agucacagagcuauuucca

SEQ ID NO: 2461384 - RNA, 19 nt, Artificial Sequence
  Description of Artificial Sequence: Synthetic oligonucleotide
  Sense strand starting at position 1220 of SEQ ID NO: 1887295
ggaaauagcucugugacug

SEQ ID NO: 2461385 - RNA, 19 nt, Artificial Sequence
  Description of Artificial Sequence: Synthetic oligonucleotide
  Antisense strand to SEQ ID NO: 2461384
cagucacagagcuauuucc

SEQ ID NO: 2461386 - RNA, 19 nt, Artificial Sequence
  Description of Artificial Sequence: Synthetic oligonucleotide
  Sense strand starting at position 1250 of SEQ ID NO: 1887295
aagggaacguuuguuuacu

SEQ ID NO: 2461387 - RNA, 19 nt, Artificial Sequence
  Description of Artificial Sequence: Synthetic oligonucleotide
  Antisense strand to SEQ ID NO: 2461386
aguaaacaaacguucccuu

SEQ ID NO: 2461388 - RNA, 19 nt, Artificial Sequence
  Description of Artificial Sequence: Synthetic oligonucleotide
  Sense strand starting at position 2219 of SEQ ID NO: 1887295
agcuauucucggccaguuu

SEQ ID NO: 2461389 - RNA, 19 nt, Artificial Sequence
  Description of Artificial Sequence: Synthetic oligonucleotide
  Antisense strand to SEQ ID NO: 2461388
aaacuggccgagaauagcu

SEQ ID NO: 2461390 - RNA, 19 nt, Artificial Sequence
  Description of Artificial Sequence: Synthetic oligonucleotide
  Sense strand starting at position 2644 of SEQ ID NO: 1887295
gaaagagggucauuguaca

SEQ ID NO: 2461391 - RNA, 19 nt, Artificial Sequence
  Description of Artificial Sequence: Synthetic oligonucleotide
  Antisense strand to SEQ ID NO: 2461390
uguacaaugacccucuuuc

SEQ ID NO: 2461392 - RNA, 19 nt, Artificial Sequence
  Description of Artificial Sequence: Synthetic oligonucleotide
  Sense strand starting at position 2787 of SEQ ID NO: 1887295
ugacccuaugagugaagau

SEQ ID NO: 2461393 - RNA, 19 nt, Artificial Sequence
  Description of Artificial Sequence: Synthetic oligonucleotide
  Antisense strand to SEQ ID NO: 2461392
aucuucacucauaggguca

SEQ ID NO: 2461394 - RNA, 19 nt, Artificial Sequence
  Description of Artificial Sequence: Synthetic oligonucleotide
  Sense strand starting at position 2796 of SEQ ID NO: 1887295
gagugaagauauccuugac

SEQ ID NO: 2461395 - RNA, 19 nt, Artificial Sequence
  Description of Artificial Sequence: Synthetic oligonucleotide
  Antisense strand to SEQ ID NO: 2461394
gucaaggauaucuucacuc

SEQ ID NO: 2461396 - RNA, 19 nt, Artificial Sequence
  Description of Artificial Sequence: Synthetic oligonucleotide
  Sense strand starting at position 2799 of SEQ ID NO: 1887295
ugaagauauccuugaccau

SEQ ID NO: 2461397 - RNA, 19 nt, Artificial Sequence
  Description of Artificial Sequence: Synthetic oligonucleotide
  Antisense strand to SEQ ID NO: 2461396
auggucaaggauaucuuca

SEQ ID NO: 2461398 - RNA, 19 nt, Artificial Sequence
  Description of Artificial Sequence: Synthetic oligonucleotide
  Sense strand starting at position 2851 of SEQ ID NO: 1887295
guuccaccaccauguaaua

SEQ ID NO: 2461399 - RNA, 19 nt, Artificial Sequence
  Description of Artificial Sequence: Synthetic oligonucleotide
  Antisense strand to SEQ ID NO: 2461398
uauuacauggugguggaac

SEQ ID NO: 2461400 - RNA, 19 nt, Artificial Sequence
  Description of Artificial Sequence: Synthetic oligonucleotide
  Sense strand starting at position 2867 of SEQ ID NO: 1887295
auacaauuguagucuuacu

SEQ ID NO: 2461401 - RNA, 19 nt, Artificial Sequence
  Description of Artificial Sequence: Synthetic oligonucleotide
  Antisense strand to SEQ ID NO: 2461400
aguaagacuacaauuguau

SEQ ID NO: 2461402 - RNA, 19 nt, Artificial Sequence
  Description of Artificial Sequence: Synthetic oligonucleotide
  Sense strand starting at position 2978 of SEQ ID NO: 1887295
ucaguuuagugguuaaaca

SEQ ID NO: 2461403 - RNA, 19 nt, Artificial Sequence
  Description of Artificial Sequence: Synthetic oligonucleotide
  Antisense strand to SEQ ID NO: 2461402
uguuuaaccacuaaacuga

SEQ ID NO: 2461404 - RNA, 19 nt, Artificial Sequence
  Description of Artificial Sequence: Synthetic oligonucleotide
  Sense strand starting at position 2979 of SEQ ID NO: 1887295
caguuuagugguuaaacac

SEQ ID NO: 2461405 - RNA, 19 nt, Artificial Sequence
  Description of Artificial Sequence: Synthetic oligonucleotide
  Antisense strand to SEQ ID NO: 2461404
guguuuaaccacuaaacug

SEQ ID NO: 2461406 - RNA, 19 nt, Artificial Sequence
  Description of Artificial Sequence: Synthetic oligonucleotide
  Sense strand starting at position 3176 of SEQ ID NO: 1887295
uuaauuguuagugacguaa

SEQ ID NO: 2461407 - RNA, 19 nt, Artificial Sequence
  Description of Artificial Sequence: Synthetic oligonucleotide
  Antisense strand to SEQ ID NO: 2461406
uuacgucacuaacaauuaa

SEQ ID NO: 2461408 - RNA, 19 nt, Artificial Sequence
  Description of Artificial Sequence: Synthetic oligonucleotide
  Sense strand starting at position 3344 of SEQ ID NO: 1887295
uguagcaaauguuuccuaa

SEQ ID NO: 2461409 - RNA, 19 nt, Artificial Sequence
  Description of Artificial Sequence: Synthetic oligonucleotide
  Antisense strand to SEQ ID NO: 2461408
uuaggaaacauuugcuaca

SEQ ID NO: 2461410 - RNA, 19 nt, Artificial Sequence
  Description of Artificial Sequence: Synthetic oligonucleotide
  Sense strand starting at position 3347 of SEQ ID NO: 1887295
agcaaauguuuccuaauga

SEQ ID NO: 2461411 - RNA, 19 nt, Artificial Sequence
  Description of Artificial Sequence: Synthetic oligonucleotide
  Antisense strand to SEQ ID NO: 2461410
ucauuaggaaacauuugcu

SEQ ID NO: 2461412 - RNA, 19 nt, Artificial Sequence
  Description of Artificial Sequence: Synthetic oligonucleotide
  Sense strand starting at position 3536 of SEQ ID NO: 1887295
ugcauuagaucugucagga

SEQ ID NO: 2461413 - RNA, 19 nt, Artificial Sequence
  Description of Artificial Sequence: Synthetic oligonucleotide
  Antisense strand to SEQ ID NO: 2461412
uccugacagaucuaaugca

SEQ ID NO: 2461414 - RNA, 19 nt, Artificial Sequence
  Description of Artificial Sequence: Synthetic oligonucleotide
  Sense strand starting at position 3647 of SEQ ID NO: 1887295
ugugccuugcuggagaauu

SEQ ID NO: 2461415 - RNA, 19 nt, Artificial Sequence
  Description of Artificial Sequence: Synthetic oligonucleotide
  Antisense strand to SEQ ID NO: 2461414
aauucuccagcaaggcaca

SEQ ID NO: 2461416 - RNA, 19 nt, Artificial Sequence
  Description of Artificial Sequence: Synthetic oligonucleotide
  Sense strand starting at position 3649 of SEQ ID NO: 1887295
ugccuugcuggagaauuaa

SEQ ID NO: 2461417 - RNA, 19 nt, Artificial Sequence
  Description of Artificial Sequence: Synthetic oligonucleotide
  Antisense strand to SEQ ID NO: 2461416
uuaauucuccagcaaggca

SEQ ID NO: 2461418 - RNA, 19 nt, Artificial Sequence
  Description of Artificial Sequence: Synthetic oligonucleotide
  Sense strand starting at position 3753 of SEQ ID NO: 1887295
agguuuauuuaagugcuua

SEQ ID NO: 2461419 - RNA, 19 nt, Artificial Sequence
  Description of Artificial Sequence: Synthetic oligonucleotide
  Antisense strand to SEQ ID NO: 2461418
uaagcacuuaaauaaaccu

SEQ ID NO: 2461420 - RNA, 19 nt, Artificial Sequence
  Description of Artificial Sequence: Synthetic oligonucleotide
  Sense strand starting at position 3774 of SEQ ID NO: 1887295
gaagcagaucuuuggagag

SEQ ID NO: 2461421 - RNA, 19 nt, Artificial Sequence
  Description of Artificial Sequence: Synthetic oligonucleotide
  Antisense strand to SEQ ID NO: 2461420
cucuccaaagaucugcuuc

SEQ ID NO: 2461422 - RNA, 19 nt, Artificial Sequence
  Description of Artificial Sequence: Synthetic oligonucleotide
  Sense strand starting at position 3863 of SEQ ID NO: 1887295
agggcuccacacuguuuaa

SEQ ID NO: 2461423 - RNA, 19 nt, Artificial Sequence
  Description of Artificial Sequence: Synthetic oligonucleotide
  Antisense strand to SEQ ID NO: 2461422
uuaaacaguguggagcccu

SEQ ID NO: 2461424 - RNA, 19 nt, Artificial Sequence
  Description of Artificial Sequence: Synthetic oligonucleotide
  Sense strand starting at position 3915 of SEQ ID NO: 1887295
uauaaugauucggugagau

SEQ ID NO: 2461425 - RNA, 19 nt, Artificial Sequence
  Description of Artificial Sequence: Synthetic oligonucleotide
  Antisense strand to SEQ ID NO: 2461424
aucucaccgaaucauuaua

SEQ ID NO: 2461426 - RNA, 19 nt, Artificial Sequence
  Description of Artificial Sequence: Synthetic oligonucleotide
  Sense strand starting at position 3957 of SEQ ID NO: 1887295
agauauggaaguugaaguu

SEQ ID NO: 2461427 - RNA, 19 nt, Artificial Sequence
  Description of Artificial Sequence: Synthetic oligonucleotide
  Antisense strand to SEQ ID NO: 2461426
aacuucaacuuccauaucu

SEQ ID NO: 2461428 - RNA, 19 nt, Artificial Sequence
  Description of Artificial Sequence: Synthetic oligonucleotide
  Sense strand starting at position 493 of SEQ ID NO: 1887296
gagaguccuccucaucagu

SEQ ID NO: 2461429 - RNA, 19 nt, Artificial Sequence
  Description of Artificial Sequence: Synthetic oligonucleotide
  Antisense strand to SEQ ID NO: 2461428
acugaugaggaggacucuc

SEQ ID NO: 2461430 - RNA, 19 nt, Artificial Sequence
  Description of Artificial Sequence: Synthetic oligonucleotide
  Sense strand starting at position 612 of SEQ ID NO: 1887296
acaggauucccuggucuuu

SEQ ID NO: 2461431 - RNA, 19 nt, Artificial Sequence
  Description of Artificial Sequence: Synthetic oligonucleotide
  Antisense strand to SEQ ID NO: 2461430
aaagaccagggaauccugu

SEQ ID NO: 2461432 - RNA, 19 nt, Artificial Sequence
  Description of Artificial Sequence: Synthetic oligonucleotide
  Sense strand starting at position 671 of SEQ ID NO: 1887296
agcuuucuacuggaaaguc

SEQ ID NO: 2461433 - RNA, 19 nt, Artificial Sequence
  Description of Artificial Sequence: Synthetic oligonucleotide
  Antisense strand to SEQ ID NO: 2461432
gacuuuccaguagaaagcu

SEQ ID NO: 2461434 - RNA, 19 nt, Artificial Sequence
  Description of Artificial Sequence: Synthetic oligonucleotide
  Sense strand starting at position 916 of SEQ ID NO: 1887296
aguauagugguagagucaa

SEQ ID NO: 2461435 - RNA, 19 nt, Artificial Sequence
  Description of Artificial Sequence: Synthetic oligonucleotide
  Antisense strand to SEQ ID NO: 2461434
uugacucuaccacuauacu

SEQ ID NO: 2461436 - RNA, 19 nt, Artificial Sequence
  Description of Artificial Sequence: Synthetic oligonucleotide
  Sense strand starting at position 922 of SEQ ID NO: 1887296
gugguagagucaaagguca

SEQ ID NO: 2461437 - RNA, 19 nt, Artificial Sequence
  Description of Artificial Sequence: Synthetic oligonucleotide
  Antisense strand to SEQ ID NO: 2461436
ugaccuuugacucuaccac

SEQ ID NO: 2461438 - RNA, 19 nt, Artificial Sequence
  Description of Artificial Sequence: Synthetic oligonucleotide
  Sense strand starting at position 924 of SEQ ID NO: 1887296
gguagagucaaaggucaaa

SEQ ID NO: 2461439 - RNA, 19 nt, Artificial Sequence
  Description of Artificial Sequence: Synthetic oligonucleotide
  Antisense strand to SEQ ID NO: 2461438
uuugaccuuugacucuacc

SEQ ID NO: 2461440 - RNA, 19 nt, Artificial Sequence
  Description of Artificial Sequence: Synthetic oligonucleotide
  Sense strand starting at position 1014 of SEQ ID NO: 1887296
guuuauuuagaugggcagu

SEQ ID NO: 2461441 - RNA, 19 nt, Artificial Sequence
  Description of Artificial Sequence: Synthetic oligonucleotide
  Antisense strand to SEQ ID NO: 2461440
acugcccaucuaaauaaac

SEQ ID NO: 2461442 - RNA, 19 nt, Artificial Sequence
  Description of Artificial Sequence: Synthetic oligonucleotide
  Sense strand starting at position 1382 of SEQ ID NO: 1887296
gggaaaggccucugcauug

SEQ ID NO: 2461443 - RNA, 19 nt, Artificial Sequence
  Description of Artificial Sequence: Synthetic oligonucleotide
  Antisense strand to SEQ ID NO: 2461442
caaugcagaggccuuuccc

SEQ ID NO: 2461444 - RNA, 19 nt, Artificial Sequence
  Description of Artificial Sequence: Synthetic oligonucleotide
  Sense strand starting at position 1507 of SEQ ID NO: 1887296
gauaaugcacccugucaga

SEQ ID NO: 2461445 - RNA, 19 nt, Artificial Sequence
  Description of Artificial Sequence: Synthetic oligonucleotide
  Antisense strand to SEQ ID NO: 2461444
ucugacagggugcauuauc

SEQ ID NO: 2461446 - RNA, 19 nt, Artificial Sequence
  Description of Artificial Sequence: Synthetic oligonucleotide
  Sense strand starting at position 1523 of SEQ ID NO: 1887296
agauucccauguguauauu

SEQ ID NO: 2461447 - RNA, 19 nt, Artificial Sequence
  Description of Artificial Sequence: Synthetic oligonucleotide
  Antisense strand to SEQ ID NO: 2461446
aauauacacaugggaaucu

SEQ ID NO: 2461448 - RNA, 19 nt, Artificial Sequence
  Description of Artificial Sequence: Synthetic oligonucleotide
  Sense strand starting at position 1999 of SEQ ID NO: 1887296
agauuaucucaguguacua

SEQ ID NO: 2461449 - RNA, 19 nt, Artificial Sequence
  Description of Artificial Sequence: Synthetic oligonucleotide
  Antisense strand to SEQ ID NO: 2461448
uaguacacugagauaaucu

SEQ ID NO: 2461450 - RNA, 19 nt, Artificial Sequence
  Description of Artificial Sequence: Synthetic oligonucleotide
  Sense strand starting at position 2021 of SEQ ID NO: 1887296
gaaucaaacuauguuggua

SEQ ID NO: 2461451 - RNA, 19 nt, Artificial Sequence
  Description of Artificial Sequence: Synthetic oligonucleotide
  Antisense strand to SEQ ID NO: 2461450
uaccaacauaguuugauuc

SEQ ID NO: 2461452 - RNA, 19 nt, Artificial Sequence
  Description of Artificial Sequence: Synthetic oligonucleotide
  Sense strand starting at position 2222 of SEQ ID NO: 1887296
agucuucuucuugagccau

SEQ ID NO: 2461453 - RNA, 19 nt, Artificial Sequence
  Description of Artificial Sequence: Synthetic oligonucleotide
  Antisense strand to SEQ ID NO: 2461452
auggcucaagaagaagacu

SEQ ID NO: 2461454 - RNA, 19 nt, Artificial Sequence
  Description of Artificial Sequence: Synthetic oligonucleotide
  Sense strand starting at position 2262 of SEQ ID NO: 1887296
ggcugcugugaucaggaga

SEQ ID NO: 2461455 - RNA, 19 nt, Artificial Sequence
  Description of Artificial Sequence: Synthetic oligonucleotide
  Antisense strand to SEQ ID NO: 2461454
ucuccugaucacagcagcc

SEQ ID NO: 2461456 - RNA, 19 nt, Artificial Sequence
  Description of Artificial Sequence: Synthetic oligonucleotide
  Sense strand starting at position 2491 of SEQ ID NO: 1887296
ugagaaacugcccaugagu

SEQ ID NO: 2461457 - RNA, 19 nt, Artificial Sequence
  Description of Artificial Sequence: Synthetic oligonucleotide
  Antisense strand to SEQ ID NO: 2461456
acucaugggcaguuucuca

SEQ ID NO: 2461458 - RNA, 19 nt, Artificial Sequence
  Description of Artificial Sequence: Synthetic oligonucleotide
  Sense strand starting at position 2502 of SEQ ID NO: 1887296
ccaugagugcaggaguaau

SEQ ID NO: 2461459 - RNA, 19 nt, Artificial Sequence
  Description of Artificial Sequence: Synthetic oligonucleotide
  Antisense strand to SEQ ID NO: 2461458
auuacuccugcacucaugg

SEQ ID NO: 2461460 - RNA, 19 nt, Artificial Sequence
  Description of Artificial Sequence: Synthetic oligonucleotide
  Sense strand starting at position 2773 of SEQ ID NO: 1887296
uuugcuuaccuggaugaua

SEQ ID NO: 2461461 - RNA, 19 nt, Artificial Sequence
  Description of Artificial Sequence: Synthetic oligonucleotide
  Antisense strand to SEQ ID NO: 2461460
uaucauccagguaagcaaa

SEQ ID NO: 2461462 - RNA, 19 nt, Artificial Sequence
  Description of Artificial Sequence: Synthetic oligonucleotide
  Sense strand starting at position 2775 of SEQ ID NO: 1887296
ugcuuaccuggaugauagu

SEQ ID NO: 2461463 - RNA, 19 nt, Artificial Sequence
  Description of Artificial Sequence: Synthetic oligonucleotide
  Antisense strand to SEQ ID NO: 2461462
acuaucauccagguaagca

SEQ ID NO: 2461464 - RNA, 19 nt, Artificial Sequence
  Description of Artificial Sequence: Synthetic oligonucleotide
  Sense strand starting at position 2776 of SEQ ID NO: 1887296
gcuuaccuggaugauagua

SEQ ID NO: 2461465 - RNA, 19 nt, Artificial Sequence
  Description of Artificial Sequence: Synthetic oligonucleotide
  Antisense strand to SEQ ID NO: 2461464
uacuaucauccagguaagc

SEQ ID NO: 2461466 - RNA, 19 nt, Artificial Sequence
  Description of Artificial Sequence: Synthetic oligonucleotide
  Sense strand starting at position 2943 of SEQ ID NO: 1887296
acacgaaauugucuacaaa

SEQ ID NO: 2461467 - RNA, 19 nt, Artificial Sequence
  Description of Artificial Sequence: Synthetic oligonucleotide
  Antisense strand to SEQ ID NO: 2461466
uuuguagacaauuucgugu

SEQ ID NO: 2461468 - RNA, 19 nt, Artificial Sequence
  Description of Artificial Sequence: Synthetic oligonucleotide
  Sense strand starting at position 2968 of SEQ ID NO: 1887296
ucaacucugcgugcuguaa

SEQ ID NO: 2461469 - RNA, 19 nt, Artificial Sequence
  Description of Artificial Sequence: Synthetic oligonucleotide
  Antisense strand to SEQ ID NO: 2461468
uuacagcacgcagaguuga

SEQ ID NO: 2461470 - RNA, 19 nt, Artificial Sequence
  Description of Artificial Sequence: Synthetic oligonucleotide
  Sense strand starting at position 2969 of SEQ ID NO: 1887296
caacucugcgugcuguaau

SEQ ID NO: 2461471 - RNA, 19 nt, Artificial Sequence
  Description of Artificial Sequence: Synthetic oligonucleotide
  Antisense strand to SEQ ID NO: 2461470
auuacagcacgcagaguug

SEQ ID NO: 2461472 - RNA, 19 nt, Artificial Sequence
  Description of Artificial Sequence: Synthetic oligonucleotide
  Sense strand starting at position 2991 of SEQ ID NO: 1887296
gugacagaguucccuaauu

SEQ ID NO: 2461473 - RNA, 19 nt, Artificial Sequence
  Description of Artificial Sequence: Synthetic oligonucleotide
  Antisense strand to SEQ ID NO: 2461472
aauuagggaacucugucac

SEQ ID NO: 2461474 - RNA, 19 nt, Artificial Sequence
  Description of Artificial Sequence: Synthetic oligonucleotide
  Sense strand starting at position 3084 of SEQ ID NO: 1887296
acuuaucugcuguaugaga

SEQ ID NO: 2461475 - RNA, 19 nt, Artificial Sequence
  Description of Artificial Sequence: Synthetic oligonucleotide
  Antisense strand to SEQ ID NO: 2461474
ucucauacagcagauaagu

SEQ ID NO: 2461476 - RNA, 19 nt, Artificial Sequence
  Description of Artificial Sequence: Synthetic oligonucleotide
  Sense strand starting at position 3086 of SEQ ID NO: 1887296
uuaucugcuguaugagauu

SEQ ID NO: 2461477 - RNA, 19 nt, Artificial Sequence
  Description of Artificial Sequence: Synthetic oligonucleotide
  Antisense strand to SEQ ID NO: 2461476
aaucucauacagcagauaa

SEQ ID NO: 2461478 - RNA, 19 nt, Artificial Sequence
  Description of Artificial Sequence: Synthetic oligonucleotide
  Sense strand starting at position 3155 of SEQ ID NO: 1887296
aggcuacacuagucaguua

SEQ ID NO: 2461479 - RNA, 19 nt, Artificial Sequence
  Description of Artificial Sequence: Synthetic oligonucleotide
  Antisense strand to SEQ ID NO: 2461478
uaacugacuaguguagccu

SEQ ID NO: 2461480 - RNA, 19 nt, Artificial Sequence
  Description of Artificial Sequence: Synthetic oligonucleotide
  Sense strand starting at position 3158 of SEQ ID NO: 1887296
cuacacuagucaguuaaca

SEQ ID NO: 2461481 - RNA, 19 nt, Artificial Sequence
  Description of Artificial Sequence: Synthetic oligonucleotide
  Antisense strand to SEQ ID NO: 2461480
uguuaacugacuaguguag

SEQ ID NO: 2461482 - RNA, 19 nt, Artificial Sequence
  Description of Artificial Sequence: Synthetic oligonucleotide
  Sense strand starting at position 3182 of SEQ ID NO: 1887296
acgguuccucauggaggaa

SEQ ID NO: 2461483 - RNA, 19 nt, Artificial Sequence
  Description of Artificial Sequence: Synthetic oligonucleotide
  Antisense strand to SEQ ID NO: 2461482
uuccuccaugaggaaccgu

SEQ ID NO: 2461484 - RNA, 19 nt, Artificial Sequence
  Description of Artificial Sequence: Synthetic oligonucleotide
  Sense strand starting at position 3183 of SEQ ID NO: 1887296
cgguuccucauggaggaaa

SEQ ID NO: 2461485 - RNA, 19 nt, Artificial Sequence
  Description of Artificial Sequence: Synthetic oligonucleotide
  Antisense strand to SEQ ID NO: 2461484
uuuccuccaugaggaaccg

SEQ ID NO: 2461486 - RNA, 19 nt, Artificial Sequence
  Description of Artificial Sequence: Synthetic oligonucleotide
  Sense strand starting at position 3242 of SEQ ID NO: 1887296
cagaguugccacgaggcaa

SEQ ID NO: 2461487 - RNA, 19 nt, Artificial Sequence
  Description of Artificial Sequence: Synthetic oligonucleotide
  Antisense strand to SEQ ID NO: 2461486
uugccucguggcaacucug

SEQ ID NO: 2461488 - RNA, 19 nt, Artificial Sequence
  Description of Artificial Sequence: Synthetic oligonucleotide
  Sense strand starting at position 3338 of SEQ ID NO: 1887296
agggcuugugaacauuacu

SEQ ID NO: 2461489 - RNA, 19 nt, Artificial Sequence
  Description of Artificial Sequence: Synthetic oligonucleotide
  Antisense strand to SEQ ID NO: 2461488
aguaauguucacaagcccu

SEQ ID NO: 2461490 - RNA, 19 nt, Artificial Sequence
  Description of Artificial Sequence: Synthetic oligonucleotide
  Sense strand starting at position 3341 of SEQ ID NO: 1887296
gcuugugaacauuacuaaa

SEQ ID NO: 2461491 - RNA, 19 nt, Artificial Sequence
  Description of Artificial Sequence: Synthetic oligonucleotide
  Antisense strand to SEQ ID NO: 2461490
uuuaguaauguucacaagc

SEQ ID NO: 2461492 - RNA, 19 nt, Artificial Sequence
  Description of Artificial Sequence: Synthetic oligonucleotide
  Sense strand starting at position 3520 of SEQ ID NO: 1887296
guaggaagaugugccuaua

SEQ ID NO: 2461493 - RNA, 19 nt, Artificial Sequence
  Description of Artificial Sequence: Synthetic oligonucleotide
  Antisense strand to SEQ ID NO: 2461492
uauaggcacaucuuccuac

SEQ ID NO: 2461494 - RNA, 19 nt, Artificial Sequence
  Description of Artificial Sequence: Synthetic oligonucleotide
  Sense strand starting at position 3523 of SEQ ID NO: 1887296
ggaagaugugccuauaacu

SEQ ID NO: 2461495 - RNA, 19 nt, Artificial Sequence
  Description of Artificial Sequence: Synthetic oligonucleotide
  Antisense strand to SEQ ID NO: 2461494
aguuauaggcacaucuucc

SEQ ID NO: 2461496 - RNA, 19 nt, Artificial Sequence
  Description of Artificial Sequence: Synthetic oligonucleotide
  Sense strand starting at position 3534 of SEQ ID NO: 1887296
cuauaacugcucuggguua

SEQ ID NO: 2461497 - RNA, 19 nt, Artificial Sequence
  Description of Artificial Sequence: Synthetic oligonucleotide
  Antisense strand to SEQ ID NO: 2461496
uaacccagagcaguuauag

SEQ ID NO: 2461498 - RNA, 19 nt, Artificial Sequence
  Description of Artificial Sequence: Synthetic oligonucleotide
  Sense strand starting at position 3546 of SEQ ID NO: 1887296
uggguuaugugaccaugga

SEQ ID NO: 2461499 - RNA, 19 nt, Artificial Sequence
  Description of Artificial Sequence: Synthetic oligonucleotide
  Antisense strand to SEQ ID NO: 2461498
uccauggucacauaaccca

SEQ ID NO: 2461500 - RNA, 19 nt, Artificial Sequence
  Description of Artificial Sequence: Synthetic oligonucleotide
  Sense strand starting at position 3651 of SEQ ID NO: 1887296
ugaugaacacccugugacu

SEQ ID NO: 2461501 - RNA, 19 nt, Artificial Sequence
  Description of Artificial Sequence: Synthetic oligonucleotide
  Antisense strand to SEQ ID NO: 2461500
agucacaggguguucauca

SEQ ID NO: 2461502 - RNA, 19 nt, Artificial Sequence
  Description of Artificial Sequence: Synthetic oligonucleotide
  Sense strand starting at position 3662 of SEQ ID NO: 1887296
cugugacugaugcauaagu

SEQ ID NO: 2461503 - RNA, 19 nt, Artificial Sequence
  Description of Artificial Sequence: Synthetic oligonucleotide
  Antisense strand to SEQ ID NO: 2461502
acuuaugcaucagucacag

SEQ ID NO: 2461504 - RNA, 19 nt, Artificial Sequence
  Description of Artificial Sequence: Synthetic oligonucleotide
  Sense strand starting at position 3832 of SEQ ID NO: 1887296
gggugaaugagucauguau

SEQ ID NO: 2461505 - RNA, 19 nt, Artificial Sequence
  Description of Artificial Sequence: Synthetic oligonucleotide
  Antisense strand to SEQ ID NO: 2461504
auacaugacucauucaccc

SEQ ID NO: 2461506 - RNA, 19 nt, Artificial Sequence
  Description of Artificial Sequence: Synthetic oligonucleotide
  Sense strand starting at position 3896 of SEQ ID NO: 1887296
cuggcaauugugcugugua

SEQ ID NO: 2461507 - RNA, 19 nt, Artificial Sequence
  Description of Artificial Sequence: Synthetic oligonucleotide
  Antisense strand to SEQ ID NO: 2461506
uacacagcacaauugccag

SEQ ID NO: 2461508 - RNA, 19 nt, Artificial Sequence
  Description of Artificial Sequence: Synthetic oligonucleotide
  Sense strand starting at position 495 of SEQ ID NO: 1887297
caguguuacaguggccaga

SEQ ID NO: 2461509 - RNA, 19 nt, Artificial Sequence
  Description of Artificial Sequence: Synthetic oligonucleotide
  Antisense strand to SEQ ID NO: 2461508
ucuggccacuguaacacug

SEQ ID NO: 2461510 - RNA, 19 nt, Artificial Sequence
  Description of Artificial Sequence: Synthetic oligonucleotide
  Sense strand starting at position 497 of SEQ ID NO: 1887297
guguuacaguggccagaua

SEQ ID NO: 2461511 - RNA, 19 nt, Artificial Sequence
  Description of Artificial Sequence: Synthetic oligonucleotide
  Antisense strand to SEQ ID NO: 2461510
uaucuggccacuguaacac

SEQ ID NO: 2461512 - RNA, 19 nt, Artificial Sequence
  Description of Artificial Sequence: Synthetic oligonucleotide
  Sense strand starting at position 555 of SEQ ID NO: 1887297
cccugcuguugaucauuaa

SEQ ID NO: 2461513 - RNA, 19 nt, Artificial Sequence
  Description of Artificial Sequence: Synthetic oligonucleotide
  Antisense strand to SEQ ID NO: 2461512
uuaaugaucaacagcaggg

SEQ ID NO: 2461514 - RNA, 19 nt, Artificial Sequence
  Description of Artificial Sequence: Synthetic oligonucleotide
  Sense strand starting at position 556 of SEQ ID NO: 1887297
ccugcuguugaucauuaaa

SEQ ID NO: 2461515 - RNA, 19 nt, Artificial Sequence
  Description of Artificial Sequence: Synthetic oligonucleotide
  Antisense strand to SEQ ID NO: 2461514
uuuaaugaucaacagcagg

SEQ ID NO: 2461516 - RNA, 19 nt, Artificial Sequence
  Description of Artificial Sequence: Synthetic oligonucleotide
  Sense strand starting at position 559 of SEQ ID NO: 1887297
gcuguugaucauuaaaccu

SEQ ID NO: 2461517 - RNA, 19 nt, Artificial Sequence
  Description of Artificial Sequence: Synthetic oligonucleotide
  Antisense strand to SEQ ID NO: 2461516
agguuuaaugaucaacagc

SEQ ID NO: 2461518 - RNA, 19 nt, Artificial Sequence
  Description of Artificial Sequence: Synthetic oligonucleotide
  Sense strand starting at position 751 of SEQ ID NO: 1887297
cacgcugacuuguuaauuu

SEQ ID NO: 2461519 - RNA, 19 nt, Artificial Sequence
  Description of Artificial Sequence: Synthetic oligonucleotide
  Antisense strand to SEQ ID NO: 2461518
aaauuaacaagucagcgug

SEQ ID NO: 2461520 - RNA, 19 nt, Artificial Sequence
  Description of Artificial Sequence: Synthetic oligonucleotide
  Sense strand starting at position 762 of SEQ ID NO: 1887297
guuaauuuccagugcuagg

SEQ ID NO: 2461521 - RNA, 19 nt, Artificial Sequence
  Description of Artificial Sequence: Synthetic oligonucleotide
  Antisense strand to SEQ ID NO: 2461520
ccuagcacuggaaauuaac

SEQ ID NO: 2461522 - RNA, 19 nt, Artificial Sequence
  Description of Artificial Sequence: Synthetic oligonucleotide
  Sense strand starting at position 1001 of SEQ ID NO: 1887297
ucugaaagugucuauacca

SEQ ID NO: 2461523 - RNA, 19 nt, Artificial Sequence
  Description of Artificial Sequence: Synthetic oligonucleotide
  Antisense strand to SEQ ID NO: 2461522
ugguauagacacuuucaga

SEQ ID NO: 2461524 - RNA, 19 nt, Artificial Sequence
  Description of Artificial Sequence: Synthetic oligonucleotide
  Sense strand starting at position 1168 of SEQ ID NO: 1887297
gcaagcgauuauuucuguu

SEQ ID NO: 2461525 - RNA, 19 nt, Artificial Sequence
  Description of Artificial Sequence: Synthetic oligonucleotide
  Antisense strand to SEQ ID NO: 2461524
aacagaaauaaucgcuugc

SEQ ID NO: 2461526 - RNA, 19 nt, Artificial Sequence
  Description of Artificial Sequence: Synthetic oligonucleotide
  Sense strand starting at position 1170 of SEQ ID NO: 1887297
aagcgauuauuucuguuau

SEQ ID NO: 2461527 - RNA, 19 nt, Artificial Sequence
  Description of Artificial Sequence: Synthetic oligonucleotide
  Antisense strand to SEQ ID NO: 2461526
auaacagaaauaaucgcuu

SEQ ID NO: 2461528 - RNA, 19 nt, Artificial Sequence
  Description of Artificial Sequence: Synthetic oligonucleotide
  Sense strand starting at position 1172 of SEQ ID NO: 1887297
gcgauuauuucuguuauac

SEQ ID NO: 2461529 - RNA, 19 nt, Artificial Sequence
  Description of Artificial Sequence: Synthetic oligonucleotide
  Antisense strand to SEQ ID NO: 2461528
guauaacagaaauaaucgc

SEQ ID NO: 2461530 - RNA, 19 nt, Artificial Sequence
  Description of Artificial Sequence: Synthetic oligonucleotide
  Sense strand starting at position 1285 of SEQ ID NO: 1887297
aaaggaugccaccgugaca

SEQ ID NO: 2461531 - RNA, 19 nt, Artificial Sequence
  Description of Artificial Sequence: Synthetic oligonucleotide
  Antisense strand to SEQ ID NO: 2461530
ugucacgguggcauccuuu

SEQ ID NO: 2461532 - RNA, 19 nt, Artificial Sequence
  Description of Artificial Sequence: Synthetic oligonucleotide
  Sense strand starting at position 1423 of SEQ ID NO: 1887297
cgucuaaacccuugacuac

SEQ ID NO: 2461533 - RNA, 19 nt, Artificial Sequence
  Description of Artificial Sequence: Synthetic oligonucleotide
  Antisense strand to SEQ ID NO: 2461532
guagucaaggguuuagacg

SEQ ID NO: 2461534 - RNA, 19 nt, Artificial Sequence
  Description of Artificial Sequence: Synthetic oligonucleotide
  Sense strand starting at position 1433 of SEQ ID NO: 1887297
cuugacuacgaguguaacu

SEQ ID NO: 2461535 - RNA, 19 nt, Artificial Sequence
  Description of Artificial Sequence: Synthetic oligonucleotide
  Antisense strand to SEQ ID NO: 2461534
aguuacacucguagucaag

SEQ ID NO: 2461536 - RNA, 19 nt, Artificial Sequence
  Description of Artificial Sequence: Synthetic oligonucleotide
  Sense strand starting at position 1435 of SEQ ID NO: 1887297
ugacuacgaguguaacuaa

SEQ ID NO: 2461537 - RNA, 19 nt, Artificial Sequence
  Description of Artificial Sequence: Synthetic oligonucleotide
  Antisense strand to SEQ ID NO: 2461536
uuaguuacacucguaguca

SEQ ID NO: 2461538 - RNA, 19 nt, Artificial Sequence
  Description of Artificial Sequence: Synthetic oligonucleotide
  Sense strand starting at position 1438 of SEQ ID NO: 1887297
cuacgaguguaacuaauga

SEQ ID NO: 2461539 - RNA, 19 nt, Artificial Sequence
  Description of Artificial Sequence: Synthetic oligonucleotide
  Antisense strand to SEQ ID NO: 2461538
ucauuaguuacacucguag

SEQ ID NO: 2461540 - RNA, 19 nt, Artificial Sequence
  Description of Artificial Sequence: Synthetic oligonucleotide
  Sense strand starting at position 2291 of SEQ ID NO: 1887297
ccuugcuuucgggaggauu

SEQ ID NO: 2461541 - RNA, 19 nt, Artificial Sequence
  Description of Artificial Sequence: Synthetic oligonucleotide
  Antisense strand to SEQ ID NO: 2461540
aauccucccgaaagcaagg

SEQ ID NO: 2461542 - RNA, 19 nt, Artificial Sequence
  Description of Artificial Sequence: Synthetic oligonucleotide
  Sense strand starting at position 2347 of SEQ ID NO: 1887297
gagcuucgucagggagaag

SEQ ID NO: 2461543 - RNA, 19 nt, Artificial Sequence
  Description of Artificial Sequence: Synthetic oligonucleotide
  Antisense strand to SEQ ID NO: 2461542
cuucucccugacgaagcuc

SEQ ID NO: 2461544 - RNA, 19 nt, Artificial Sequence
  Description of Artificial Sequence: Synthetic oligonucleotide
  Sense strand starting at position 2492 of SEQ ID NO: 1887297
gcauacacacuuuauuagu

SEQ ID NO: 2461545 - RNA, 19 nt, Artificial Sequence
  Description of Artificial Sequence: Synthetic oligonucleotide
  Antisense strand to SEQ ID NO: 2461544
acuaauaaaguguguaugc

SEQ ID NO: 2461546 - RNA, 19 nt, Artificial Sequence
  Description of Artificial Sequence: Synthetic oligonucleotide
  Sense strand starting at position 2590 of SEQ ID NO: 1887297
aaugaugcauuugagaaga

SEQ ID NO: 2461547 - RNA, 19 nt, Artificial Sequence
  Description of Artificial Sequence: Synthetic oligonucleotide
  Antisense strand to SEQ ID NO: 2461546
ucuucucaaaugcaucauu

SEQ ID NO: 2461548 - RNA, 19 nt, Artificial Sequence
  Description of Artificial Sequence: Synthetic oligonucleotide
  Sense strand starting at position 2592 of SEQ ID NO: 1887297
ugaugcauuugagaagaaa

SEQ ID NO: 2461549 - RNA, 19 nt, Artificial Sequence
  Description of Artificial Sequence: Synthetic oligonucleotide
  Antisense strand to SEQ ID NO: 2461548
uuucuucucaaaugcauca

SEQ ID NO: 2461550 - RNA, 19 nt, Artificial Sequence
  Description of Artificial Sequence: Synthetic oligonucleotide
  Sense strand starting at position 2633 of SEQ ID NO: 1887297
gcgauacauuucuaagaga

SEQ ID NO: 2461551 - RNA, 19 nt, Artificial Sequence
  Description of Artificial Sequence: Synthetic oligonucleotide
  Antisense strand to SEQ ID NO: 2461550
ucucuuagaaauguaucgc

SEQ ID NO: 2461552 - RNA, 19 nt, Artificial Sequence
  Description of Artificial Sequence: Synthetic oligonucleotide
  Sense strand starting at position 2636 of SEQ ID NO: 1887297
auacauuucuaagagaguc

SEQ ID NO: 2461553 - RNA, 19 nt, Artificial Sequence
  Description of Artificial Sequence: Synthetic oligonucleotide
  Antisense strand to SEQ ID NO: 2461552
gacucucuuagaaauguau

SEQ ID NO: 2461554 - RNA, 19 nt, Artificial Sequence
  Description of Artificial Sequence: Synthetic oligonucleotide
  Sense strand starting at position 2648 of SEQ ID NO: 1887297
gagagucacuaggagaaau

SEQ ID NO: 2461555 - RNA, 19 nt, Artificial Sequence
  Description of Artificial Sequence: Synthetic oligonucleotide
  Antisense strand to SEQ ID NO: 2461554
auuucuccuagugacucuc

SEQ ID NO: 2461556 - RNA, 19 nt, Artificial Sequence
  Description of Artificial Sequence: Synthetic oligonucleotide
  Sense strand starting at position 2682 of SEQ ID NO: 1887297
aaauuaguggaagguaagu

SEQ ID NO: 2461557 - RNA, 19 nt, Artificial Sequence
  Description of Artificial Sequence: Synthetic oligonucleotide
  Antisense strand to SEQ ID NO: 2461556
acuuaccuuccacuaauuu

SEQ ID NO: 2461558 - RNA, 19 nt, Artificial Sequence
  Description of Artificial Sequence: Synthetic oligonucleotide
  Sense strand starting at position 2688 of SEQ ID NO: 1887297
guggaagguaaguguuacu

SEQ ID NO: 2461559 - RNA, 19 nt, Artificial Sequence
  Description of Artificial Sequence: Synthetic oligonucleotide
  Antisense strand to SEQ ID NO: 2461558
aguaacacuuaccuuccac

SEQ ID NO: 2461560 - RNA, 19 nt, Artificial Sequence
  Description of Artificial Sequence: Synthetic oligonucleotide
  Sense strand starting at position 2693 of SEQ ID NO: 1887297
agguaaguguuacuuggga

SEQ ID NO: 2461561 - RNA, 19 nt, Artificial Sequence
  Description of Artificial Sequence: Synthetic oligonucleotide
  Antisense strand to SEQ ID NO: 2461560
ucccaaguaacacuuaccu

SEQ ID NO: 2461562 - RNA, 19 nt, Artificial Sequence
  Description of Artificial Sequence: Synthetic oligonucleotide
  Sense strand starting at position 2695 of SEQ ID NO: 1887297
guaaguguuacuugggaag

SEQ ID NO: 2461563 - RNA, 19 nt, Artificial Sequence
  Description of Artificial Sequence: Synthetic oligonucleotide
  Antisense strand to SEQ ID NO: 2461562
cuucccaaguaacacuuac

SEQ ID NO: 2461564 - RNA, 19 nt, Artificial Sequence
  Description of Artificial Sequence: Synthetic oligonucleotide
  Sense strand starting at position 2794 of SEQ ID NO: 1887297
gugccacucccagaggaau

SEQ ID NO: 2461565 - RNA, 19 nt, Artificial Sequence
  Description of Artificial Sequence: Synthetic oligonucleotide
  Antisense strand to SEQ ID NO: 2461564
auuccucugggaguggcac

SEQ ID NO: 2461566 - RNA, 19 nt, Artificial Sequence
  Description of Artificial Sequence: Synthetic oligonucleotide
  Sense strand starting at position 2818 of SEQ ID NO: 1887297
cugcuuauucccuguagga

SEQ ID NO: 2461567 - RNA, 19 nt, Artificial Sequence
  Description of Artificial Sequence: Synthetic oligonucleotide
  Antisense strand to SEQ ID NO: 2461566
uccuacagggaauaagcag

SEQ ID NO: 2461568 - RNA, 19 nt, Artificial Sequence
  Description of Artificial Sequence: Synthetic oligonucleotide
  Sense strand starting at position 2820 of SEQ ID NO: 1887297
gcuuauucccuguaggaaa

SEQ ID NO: 2461569 - RNA, 19 nt, Artificial Sequence
  Description of Artificial Sequence: Synthetic oligonucleotide
  Antisense strand to SEQ ID NO: 2461568
uuuccuacagggaauaagc

SEQ ID NO: 2461570 - RNA, 19 nt, Artificial Sequence
  Description of Artificial Sequence: Synthetic oligonucleotide
  Sense strand starting at position 2866 of SEQ ID NO: 1887297
cuacaauuucuccgguguu

SEQ ID NO: 2461571 - RNA, 19 nt, Artificial Sequence
  Description of Artificial Sequence: Synthetic oligonucleotide
  Antisense strand to SEQ ID NO: 2461570
aacaccggagaaauuguag

SEQ ID NO: 2461572 - RNA, 19 nt, Artificial Sequence
  Description of Artificial Sequence: Synthetic oligonucleotide
  Sense strand starting at position 2957 of SEQ ID NO: 1887297
agggaaaccuaauauagau

SEQ ID NO: 2461573 - RNA, 19 nt, Artificial Sequence
  Description of Artificial Sequence: Synthetic oligonucleotide
  Antisense strand to SEQ ID NO: 2461572
aucuauauuagguuucccu

SEQ ID NO: 2461574 - RNA, 19 nt, Artificial Sequence
  Description of Artificial Sequence: Synthetic oligonucleotide
  Sense strand starting at position 2969 of SEQ ID NO: 1887297
uauagauugugggucagca

SEQ ID NO: 2461575 - RNA, 19 nt, Artificial Sequence
  Description of Artificial Sequence: Synthetic oligonucleotide
  Antisense strand to SEQ ID NO: 2461574
ugcugacccacaaucuaua

SEQ ID NO: 2461576 - RNA, 19 nt, Artificial Sequence
  Description of Artificial Sequence: Synthetic oligonucleotide
  Sense strand starting at position 3187 of SEQ ID NO: 1887297
auuauuaugcuuuguagag

SEQ ID NO: 2461577 - RNA, 19 nt, Artificial Sequence
  Description of Artificial Sequence: Synthetic oligonucleotide
  Antisense strand to SEQ ID NO: 2461576
cucuacaaagcauaauaau

SEQ ID NO: 2461578 - RNA, 19 nt, Artificial Sequence
  Description of Artificial Sequence: Synthetic oligonucleotide
  Sense strand starting at position 3188 of SEQ ID NO: 1887297
uuauuaugcuuuguagaga

SEQ ID NO: 2461579 - RNA, 19 nt, Artificial Sequence
  Description of Artificial Sequence: Synthetic oligonucleotide
  Antisense strand to SEQ ID NO: 2461578
ucucuacaaagcauaauaa

SEQ ID NO: 2461580 - RNA, 19 nt, Artificial Sequence
  Description of Artificial Sequence: Synthetic oligonucleotide
  Sense strand starting at position 3629 of SEQ ID NO: 1887297
ugagguguucaguaguauc

SEQ ID NO: 2461581 - RNA, 19 nt, Artificial Sequence
  Description of Artificial Sequence: Synthetic oligonucleotide
  Antisense strand to SEQ ID NO: 2461580
gauacuacugaacaccuca

SEQ ID NO: 2461582 - RNA, 19 nt, Artificial Sequence
  Description of Artificial Sequence: Synthetic oligonucleotide
  Sense strand starting at position 3667 of SEQ ID NO: 1887297
ugaaauacguuuccagaaa

SEQ ID NO: 2461583 - RNA, 19 nt, Artificial Sequence
  Description of Artificial Sequence: Synthetic oligonucleotide
  Antisense strand to SEQ ID NO: 2461582
uuucuggaaacguauuuca

SEQ ID NO: 2461584 - RNA, 19 nt, Artificial Sequence
  Description of Artificial Sequence: Synthetic oligonucleotide
  Sense strand starting at position 3759 of SEQ ID NO: 1887297
guauuuguccauuaguguc

SEQ ID NO: 2461585 - RNA, 19 nt, Artificial Sequence
  Description of Artificial Sequence: Synthetic oligonucleotide
  Antisense strand to SEQ ID NO: 2461584
gacacuaauggacaaauac

SEQ ID NO: 2461586 - RNA, 19 nt, Artificial Sequence
  Description of Artificial Sequence: Synthetic oligonucleotide
  Sense strand starting at position 3947 of SEQ ID NO: 1887297
ugaauaaagcuaugcaaau

SEQ ID NO: 2461587 - RNA, 19 nt, Artificial Sequence
  Description of Artificial Sequence: Synthetic oligonucleotide
  Antisense strand to SEQ ID NO: 2461586
auuugcauagcuuuauuca

SEQ ID NO: 2461588 - RNA, 19 nt, Artificial Sequence
  Description of Artificial Sequence: Synthetic oligonucleotide
  Sense strand starting at position 1090 of SEQ ID NO: 1887298
ggccggguguccguauuua

SEQ ID NO: 2461589 - RNA, 19 nt, Artificial Sequence
  Description of Artificial Sequence: Synthetic oligonucleotide
  Antisense strand to SEQ ID NO: 2461588
uaaauacggacacccggcc

SEQ ID NO: 2461590 - RNA, 19 nt, Artificial Sequence
  Description of Artificial Sequence: Synthetic oligonucleotide
  Sense strand starting at position 1455 of SEQ ID NO: 1887298
cugugcuccugggagaguu

SEQ ID NO: 2461591 - RNA, 19 nt, Artificial Sequence
  Description of Artificial Sequence: Synthetic oligonucleotide
  Antisense strand to SEQ ID NO: 2461590
aacucucccaggagcacag

SEQ ID NO: 2461592 - RNA, 19 nt, Artificial Sequence
  Description of Artificial Sequence: Synthetic oligonucleotide
  Sense strand starting at position 1464 of SEQ ID NO: 1887298
ugggagaguugugggucua

SEQ ID NO: 2461593 - RNA, 19 nt, Artificial Sequence
  Description of Artificial Sequence: Synthetic oligonucleotide
  Antisense strand to SEQ ID NO: 2461592
uagacccacaacucuccca

SEQ ID NO: 2461594 - RNA, 19 nt, Artificial Sequence
  Description of Artificial Sequence: Synthetic oligonucleotide
  Sense strand starting at position 1465 of SEQ ID NO: 1887298
gggagaguugugggucuac

SEQ ID NO: 2461595 - RNA, 19 nt, Artificial Sequence
  Description of Artificial Sequence: Synthetic oligonucleotide
  Antisense strand to SEQ ID NO: 2461594
guagacccacaacucuccc

SEQ ID NO: 2461596 - RNA, 19 nt, Artificial Sequence
  Description of Artificial Sequence: Synthetic oligonucleotide
  Sense strand starting at position 1626 of SEQ ID NO: 1887298
ccguaaagcuaucgcuaac

SEQ ID NO: 2461597 - RNA, 19 nt, Artificial Sequence
  Description of Artificial Sequence: Synthetic oligonucleotide
  Antisense strand to SEQ ID NO: 2461596
guuagcgauagcuuuacgg

SEQ ID NO: 2461598 - RNA, 19 nt, Artificial Sequence
  Description of Artificial Sequence: Synthetic oligonucleotide
  Sense strand starting at position 1704 of SEQ ID NO: 1887298
cacgccuugggaugcauaa

SEQ ID NO: 2461599 - RNA, 19 nt, Artificial Sequence
  Description of Artificial Sequence: Synthetic oligonucleotide
  Antisense strand to SEQ ID NO: 2461598
uuaugcaucccaaggcgug

SEQ ID NO: 2461600 - RNA, 19 nt, Artificial Sequence
  Description of Artificial Sequence: Synthetic oligonucleotide
  Sense strand starting at position 1706 of SEQ ID NO: 1887298
cgccuugggaugcauaaga

SEQ ID NO: 2461601 - RNA, 19 nt, Artificial Sequence
  Description of Artificial Sequence: Synthetic oligonucleotide
  Antisense strand to SEQ ID NO: 2461600
ucuuaugcaucccaaggcg

SEQ ID NO: 2461602 - RNA, 19 nt, Artificial Sequence
  Description of Artificial Sequence: Synthetic oligonucleotide
  Sense strand starting at position 1733 of SEQ ID NO: 1887298
gcacgaacaucuuacaugu

SEQ ID NO: 2461603 - RNA, 19 nt, Artificial Sequence
  Description of Artificial Sequence: Synthetic oligonucleotide
  Antisense strand to SEQ ID NO: 2461602
acauguaagauguucgugc

SEQ ID NO: 2461604 - RNA, 19 nt, Artificial Sequence
  Description of Artificial Sequence: Synthetic oligonucleotide
  Sense strand starting at position 1841 of SEQ ID NO: 1887298
ucugaaaugugcuccauuu

SEQ ID NO: 2461605 - RNA, 19 nt, Artificial Sequence
  Description of Artificial Sequence: Synthetic oligonucleotide
  Antisense strand to SEQ ID NO: 2461604
aaauggagcacauuucaga

SEQ ID NO: 2461606 - RNA, 19 nt, Artificial Sequence
  Description of Artificial Sequence: Synthetic oligonucleotide
  Sense strand starting at position 2063 of SEQ ID NO: 1887298
cucugaaucugggaggagu

SEQ ID NO: 2461607 - RNA, 19 nt, Artificial Sequence
  Description of Artificial Sequence: Synthetic oligonucleotide
  Antisense strand to SEQ ID NO: 2461606
acuccucccagauucagag

SEQ ID NO: 2461608 - RNA, 19 nt, Artificial Sequence
  Description of Artificial Sequence: Synthetic oligonucleotide
  Sense strand starting at position 2241 of SEQ ID NO: 1887298
ugaauuaagcucugugaca

SEQ ID NO: 2461609 - RNA, 19 nt, Artificial Sequence
  Description of Artificial Sequence: Synthetic oligonucleotide
  Antisense strand to SEQ ID NO: 2461608
ugucacagagcuuaauuca

SEQ ID NO: 2461610 - RNA, 19 nt, Artificial Sequence
  Description of Artificial Sequence: Synthetic oligonucleotide
  Sense strand starting at position 2242 of SEQ ID NO: 1887298
gaauuaagcucugugacac

SEQ ID NO: 2461611 - RNA, 19 nt, Artificial Sequence
  Description of Artificial Sequence: Synthetic oligonucleotide
  Antisense strand to SEQ ID NO: 2461610
gugucacagagcuuaauuc

SEQ ID NO: 2461612 - RNA, 19 nt, Artificial Sequence
  Description of Artificial Sequence: Synthetic oligonucleotide
  Sense strand starting at position 2296 of SEQ ID NO: 1887298
uguguuucagaucaacgga

SEQ ID NO: 2461613 - RNA, 19 nt, Artificial Sequence
  Description of Artificial Sequence: Synthetic oligonucleotide
  Antisense strand to SEQ ID NO: 2461612
uccguugaucugaaacaca

SEQ ID NO: 2461614 - RNA, 19 nt, Artificial Sequence
  Description of Artificial Sequence: Synthetic oligonucleotide
  Sense strand starting at position 2481 of SEQ ID NO: 1887298
uacauuugcucaggacaga

SEQ ID NO: 2461615 - RNA, 19 nt, Artificial Sequence
  Description of Artificial Sequence: Synthetic oligonucleotide
  Antisense strand to SEQ ID NO: 2461614
ucuguccugagcaaaugua

SEQ ID NO: 2461616 - RNA, 19 nt, Artificial Sequence
  Description of Artificial Sequence: Synthetic oligonucleotide
  Sense strand starting at position 2510 of SEQ ID NO: 1887298
ggcccuuuacaugaacaau

SEQ ID NO: 2461617 - RNA, 19 nt, Artificial Sequence
  Description of Artificial Sequence: Synthetic oligonucleotide
  Antisense strand to SEQ ID NO: 2461616
auuguucauguaaagggcc

SEQ ID NO: 2461618 - RNA, 19 nt, Artificial Sequence
  Description of Artificial Sequence: Synthetic oligonucleotide
  Sense strand starting at position 2519 of SEQ ID NO: 1887298
caugaacaaucguuguuau

SEQ ID NO: 2461619 - RNA, 19 nt, Artificial Sequence
  Description of Artificial Sequence: Synthetic oligonucleotide
  Antisense strand to SEQ ID NO: 2461618
auaacaacgauuguucaug

SEQ ID NO: 2461620 - RNA, 19 nt, Artificial Sequence
  Description of Artificial Sequence: Synthetic oligonucleotide
  Sense strand starting at position 2520 of SEQ ID NO: 1887298
augaacaaucguuguuaua

SEQ ID NO: 2461621 - RNA, 19 nt, Artificial Sequence
  Description of Artificial Sequence: Synthetic oligonucleotide
  Antisense strand to SEQ ID NO: 2461620
uauaacaacgauuguucau

SEQ ID NO: 2461622 - RNA, 19 nt, Artificial Sequence
  Description of Artificial Sequence: Synthetic oligonucleotide
  Sense strand starting at position 2522 of SEQ ID NO: 1887298
gaacaaucguuguuauauu

SEQ ID NO: 2461623 - RNA, 19 nt, Artificial Sequence
  Description of Artificial Sequence: Synthetic oligonucleotide
  Antisense strand to SEQ ID NO: 2461622
aauauaacaacgauuguuc

SEQ ID NO: 2461624 - RNA, 19 nt, Artificial Sequence
  Description of Artificial Sequence: Synthetic oligonucleotide
  Sense strand starting at position 2576 of SEQ ID NO: 1887298
ggagccuggugucuguuua

SEQ ID NO: 2461625 - RNA, 19 nt, Artificial Sequence
  Description of Artificial Sequence: Synthetic oligonucleotide
  Antisense strand to SEQ ID NO: 2461624
uaaacagacaccaggcucc

SEQ ID NO: 2461626 - RNA, 19 nt, Artificial Sequence
  Description of Artificial Sequence: Synthetic oligonucleotide
  Sense strand starting at position 2626 of SEQ ID NO: 1887298
aauggccagcucugugaaa

SEQ ID NO: 2461627 - RNA, 19 nt, Artificial Sequence
  Description of Artificial Sequence: Synthetic oligonucleotide
  Antisense strand to SEQ ID NO: 2461626
uuucacagagcuggccauu

SEQ ID NO: 2461628 - RNA, 19 nt, Artificial Sequence
  Description of Artificial Sequence: Synthetic oligonucleotide
  Sense strand starting at position 2627 of SEQ ID NO: 1887298
auggccagcucugugaaau

SEQ ID NO: 2461629 - RNA, 19 nt, Artificial Sequence
  Description of Artificial Sequence: Synthetic oligonucleotide
  Antisense strand to SEQ ID NO: 2461628
auuucacagagcuggccau

SEQ ID NO: 2461630 - RNA, 19 nt, Artificial Sequence
  Description of Artificial Sequence: Synthetic oligonucleotide
  Sense strand starting at position 2628 of SEQ ID NO: 1887298
uggccagcucugugaaauu

SEQ ID NO: 2461631 - RNA, 19 nt, Artificial Sequence
  Description of Artificial Sequence: Synthetic oligonucleotide
  Antisense strand to SEQ ID NO: 2461630
aauuucacagagcuggcca

SEQ ID NO: 2461632 - RNA, 19 nt, Artificial Sequence
  Description of Artificial Sequence: Synthetic oligonucleotide
  Sense strand starting at position 2667 of SEQ ID NO: 1887298
uuggcuaacuaccuugaaa

SEQ ID NO: 2461633 - RNA, 19 nt, Artificial Sequence
  Description of Artificial Sequence: Synthetic oligonucleotide
  Antisense strand to SEQ ID NO: 2461632
uuucaagguaguuagccaa

SEQ ID NO: 2461634 - RNA, 19 nt, Artificial Sequence
  Description of Artificial Sequence: Synthetic oligonucleotide
  Sense strand starting at position 2669 of SEQ ID NO: 1887298
ggcuaacuaccuugaaacu

SEQ ID NO: 2461635 - RNA, 19 nt, Artificial Sequence
  Description of Artificial Sequence: Synthetic oligonucleotide
  Antisense strand to SEQ ID NO: 2461634
aguuucaagguaguuagcc

SEQ ID NO: 2461636 - RNA, 19 nt, Artificial Sequence
  Description of Artificial Sequence: Synthetic oligonucleotide
  Sense strand starting at position 2744 of SEQ ID NO: 1887298
ggcaguguuaagugaaaga

SEQ ID NO: 2461637 - RNA, 19 nt, Artificial Sequence
  Description of Artificial Sequence: Synthetic oligonucleotide
  Antisense strand to SEQ ID NO: 2461636
ucuuucacuuaacacugcc

SEQ ID NO: 2461638 - RNA, 19 nt, Artificial Sequence
  Description of Artificial Sequence: Synthetic oligonucleotide
  Sense strand starting at position 2861 of SEQ ID NO: 1887298
ggguaucacuaacaauauc

SEQ ID NO: 2461639 - RNA, 19 nt, Artificial Sequence
  Description of Artificial Sequence: Synthetic oligonucleotide
  Antisense strand to SEQ ID NO: 2461638
gauauuguuagugauaccc

SEQ ID NO: 2461640 - RNA, 19 nt, Artificial Sequence
  Description of Artificial Sequence: Synthetic oligonucleotide
  Sense strand starting at position 2872 of SEQ ID NO: 1887298
acaauaucuucuguggaaa

SEQ ID NO: 2461641 - RNA, 19 nt, Artificial Sequence
  Description of Artificial Sequence: Synthetic oligonucleotide
  Antisense strand to SEQ ID NO: 2461640
uuuccacagaagauauugu

SEQ ID NO: 2461642 - RNA, 19 nt, Artificial Sequence
  Description of Artificial Sequence: Synthetic oligonucleotide
  Sense strand starting at position 3537 of SEQ ID NO: 1887298
acacguaugagcugucaua

SEQ ID NO: 2461643 - RNA, 19 nt, Artificial Sequence
  Description of Artificial Sequence: Synthetic oligonucleotide
  Antisense strand to SEQ ID NO: 2461642
uaugacagcucauacgugu

SEQ ID NO: 2461644 - RNA, 19 nt, Artificial Sequence
  Description of Artificial Sequence: Synthetic oligonucleotide
  Sense strand starting at position 3912 of SEQ ID NO: 1887298
ccugcuguguugugauuau

SEQ ID NO: 2461645 - RNA, 19 nt, Artificial Sequence
  Description of Artificial Sequence: Synthetic oligonucleotide
  Antisense strand to SEQ ID NO: 2461644
auaaucacaacacagcagg

SEQ ID NO: 2461646 - RNA, 19 nt, Artificial Sequence
  Description of Artificial Sequence: Synthetic oligonucleotide
  Sense strand starting at position 3916 of SEQ ID NO: 1887298
cuguguugugauuaucuuu

SEQ ID NO: 2461647 - RNA, 19 nt, Artificial Sequence
  Description of Artificial Sequence: Synthetic oligonucleotide
  Antisense strand to SEQ ID NO: 2461646
aaagauaaucacaacacag

SEQ ID NO: 2461648 - RNA, 19 nt, Artificial Sequence
  Description of Artificial Sequence: Synthetic oligonucleotide
  Sense strand starting at position 3919 of SEQ ID NO: 1887298
uguugugauuaucuuucca

SEQ ID NO: 2461649 - RNA, 19 nt, Artificial Sequence
  Description of Artificial Sequence: Synthetic oligonucleotide
  Antisense strand to SEQ ID NO: 2461648
uggaaagauaaucacaaca

SEQ ID NO: 2461650 - RNA, 19 nt, Artificial Sequence
  Description of Artificial Sequence: Synthetic oligonucleotide
  Sense strand starting at position 3921 of SEQ ID NO: 1887298
uugugauuaucuuuccaug

SEQ ID NO: 2461651 - RNA, 19 nt, Artificial Sequence
  Description of Artificial Sequence: Synthetic oligonucleotide
  Antisense strand to SEQ ID NO: 2461650
cauggaaagauaaucacaa

SEQ ID NO: 2461652 - RNA, 19 nt, Artificial Sequence
  Description of Artificial Sequence: Synthetic oligonucleotide
  Sense strand starting at position 3923 of SEQ ID NO: 1887298
gugauuaucuuuccaugua

SEQ ID NO: 2461653 - RNA, 19 nt, Artificial Sequence
  Description of Artificial Sequence: Synthetic oligonucleotide
  Antisense strand to SEQ ID NO: 2461652
uacauggaaagauaaucac

SEQ ID NO: 2461654 - RNA, 19 nt, Artificial Sequence
  Description of Artificial Sequence: Synthetic oligonucleotide
  Sense strand starting at position 3924 of SEQ ID NO: 1887298
ugauuaucuuuccauguag

SEQ ID NO: 2461655 - RNA, 19 nt, Artificial Sequence
  Description of Artificial Sequence: Synthetic oligonucleotide
  Antisense strand to SEQ ID NO: 2461654
cuacauggaaagauaauca

SEQ ID NO: 2461656 - RNA, 19 nt, Artificial Sequence
  Description of Artificial Sequence: Synthetic oligonucleotide
  Sense strand starting at position 21 of SEQ ID NO: 1887299
auaaguaaucuaggaugua

SEQ ID NO: 2461657 - RNA, 19 nt, Artificial Sequence
  Description of Artificial Sequence: Synthetic oligonucleotide
  Antisense strand to SEQ ID NO: 2461656
uacauccuagauuacuuau

SEQ ID NO: 2461658 - RNA, 19 nt, Artificial Sequence
  Description of Artificial Sequence: Synthetic oligonucleotide
  Sense strand starting at position 30 of SEQ ID NO: 1887299
cuaggauguauguagguua

SEQ ID NO: 2461659 - RNA, 19 nt, Artificial Sequence
  Description of Artificial Sequence: Synthetic oligonucleotide
  Antisense strand to SEQ ID NO: 2461658
uaaccuacauacauccuag

SEQ ID NO: 2461660 - RNA, 19 nt, Artificial Sequence
  Description of Artificial Sequence: Synthetic oligonucleotide
  Sense strand starting at position 401 of SEQ ID NO: 1887299
guaguaagauagcuaauua

SEQ ID NO: 2461661 - RNA, 19 nt, Artificial Sequence
  Description of Artificial Sequence: Synthetic oligonucleotide
  Antisense strand to SEQ ID NO: 2461660
uaauuagcuaucuuacuac

SEQ ID NO: 2461662 - RNA, 19 nt, Artificial Sequence
  Description of Artificial Sequence: Synthetic oligonucleotide
  Sense strand starting at position 483 of SEQ ID NO: 1887299
uuuacuugugaugacaauu

SEQ ID NO: 2461663 - RNA, 19 nt, Artificial Sequence
  Description of Artificial Sequence: Synthetic oligonucleotide
  Antisense strand to SEQ ID NO: 2461662
aauugucaucacaaguaaa

SEQ ID NO: 2461664 - RNA, 19 nt, Artificial Sequence
  Description of Artificial Sequence: Synthetic oligonucleotide
  Sense strand starting at position 508 of SEQ ID NO: 1887299
agaacaaacucgucaucuu

SEQ ID NO: 2461665 - RNA, 19 nt, Artificial Sequence
  Description of Artificial Sequence: Synthetic oligonucleotide
  Antisense strand to SEQ ID NO: 2461664
aagaugacgaguuuguucu

SEQ ID NO: 2461666 - RNA, 19 nt, Artificial Sequence
  Description of Artificial Sequence: Synthetic oligonucleotide
  Sense strand starting at position 519 of SEQ ID NO: 1887299
gucaucuuucuuugaugaa

SEQ ID NO: 2461667 - RNA, 19 nt, Artificial Sequence
  Description of Artificial Sequence: Synthetic oligonucleotide
  Antisense strand to SEQ ID NO: 2461666
uucaucaaagaaagaugac

SEQ ID NO: 2461668 - RNA, 19 nt, Artificial Sequence
  Description of Artificial Sequence: Synthetic oligonucleotide
  Sense strand starting at position 541 of SEQ ID NO: 1887299
auuguuugauauucugaga

SEQ ID NO: 2461669 - RNA, 19 nt, Artificial Sequence
  Description of Artificial Sequence: Synthetic oligonucleotide
  Antisense strand to SEQ ID NO: 2461668
ucucagaauaucaaacaau

SEQ ID NO: 2461670 - RNA, 19 nt, Artificial Sequence
  Description of Artificial Sequence: Synthetic oligonucleotide
  Sense strand starting at position 602 of SEQ ID NO: 1887299
ucgaucucucaacaaggua

SEQ ID NO: 2461671 - RNA, 19 nt, Artificial Sequence
  Description of Artificial Sequence: Synthetic oligonucleotide
  Antisense strand to SEQ ID NO: 2461670
uaccuuguugagagaucga

SEQ ID NO: 2461672 - RNA, 19 nt, Artificial Sequence
  Description of Artificial Sequence: Synthetic oligonucleotide
  Sense strand starting at position 638 of SEQ ID NO: 1887299
ucaagagcugcccauaaua

SEQ ID NO: 2461673 - RNA, 19 nt, Artificial Sequence
  Description of Artificial Sequence: Synthetic oligonucleotide
  Antisense strand to SEQ ID NO: 2461672
uauuaugggcagcucuuga

SEQ ID NO: 2461674 - RNA, 19 nt, Artificial Sequence
  Description of Artificial Sequence: Synthetic oligonucleotide
  Sense strand starting at position 769 of SEQ ID NO: 1887299
augagaaauugcccugaug

SEQ ID NO: 2461675 - RNA, 19 nt, Artificial Sequence
  Description of Artificial Sequence: Synthetic oligonucleotide
  Antisense strand to SEQ ID NO: 2461674
caucagggcaauuucucau

SEQ ID NO: 2461676 - RNA, 19 nt, Artificial Sequence
  Description of Artificial Sequence: Synthetic oligonucleotide
  Sense strand starting at position 771 of SEQ ID NO: 1887299
gagaaauugcccugaugac

SEQ ID NO: 2461677 - RNA, 19 nt, Artificial Sequence
  Description of Artificial Sequence: Synthetic oligonucleotide
  Antisense strand to SEQ ID NO: 2461676
gucaucagggcaauuucuc

SEQ ID NO: 2461678 - RNA, 19 nt, Artificial Sequence
  Description of Artificial Sequence: Synthetic oligonucleotide
  Sense strand starting at position 1058 of SEQ ID NO: 1887299
guuuaugucuuuccaauuu

SEQ ID NO: 2461679 - RNA, 19 nt, Artificial Sequence
  Description of Artificial Sequence: Synthetic oligonucleotide
  Antisense strand to SEQ ID NO: 2461678
aaauuggaaagacauaaac

SEQ ID NO: 2461680 - RNA, 19 nt, Artificial Sequence
  Description of Artificial Sequence: Synthetic oligonucleotide
  Sense strand starting at position 1166 of SEQ ID NO: 1887299
ggugucuaccucuaguaua

SEQ ID NO: 2461681 - RNA, 19 nt, Artificial Sequence
  Description of Artificial Sequence: Synthetic oligonucleotide
  Antisense strand to SEQ ID NO: 2461680
uauacuagagguagacacc

SEQ ID NO: 2461682 - RNA, 19 nt, Artificial Sequence
  Description of Artificial Sequence: Synthetic oligonucleotide
  Sense strand starting at position 1177 of SEQ ID NO: 1887299
cuaguauauguguagucaa

SEQ ID NO: 2461683 - RNA, 19 nt, Artificial Sequence
  Description of Artificial Sequence: Synthetic oligonucleotide
  Antisense strand to SEQ ID NO: 2461682
uugacuacacauauacuag

SEQ ID NO: 2461684 - RNA, 19 nt, Artificial Sequence
  Description of Artificial Sequence: Synthetic oligonucleotide
  Sense strand starting at position 1180 of SEQ ID NO: 1887299
guauauguguagucaauuu

SEQ ID NO: 2461685 - RNA, 19 nt, Artificial Sequence
  Description of Artificial Sequence: Synthetic oligonucleotide
  Antisense strand to SEQ ID NO: 2461684
aaauugacuacacauauac

SEQ ID NO: 2461686 - RNA, 19 nt, Artificial Sequence
  Description of Artificial Sequence: Synthetic oligonucleotide
  Sense strand starting at position 1334 of SEQ ID NO: 1887299
ccaggcuuauauucugaga

SEQ ID NO: 2461687 - RNA, 19 nt, Artificial Sequence
  Description of Artificial Sequence: Synthetic oligonucleotide
  Antisense strand to SEQ ID NO: 2461686
ucucagaauauaagccugg

SEQ ID NO: 2461688 - RNA, 19 nt, Artificial Sequence
  Description of Artificial Sequence: Synthetic oligonucleotide
  Sense strand starting at position 1376 of SEQ ID NO: 1887299
accuuuggguuucugaauu

SEQ ID NO: 2461689 - RNA, 19 nt, Artificial Sequence
  Description of Artificial Sequence: Synthetic oligonucleotide
  Antisense strand to SEQ ID NO: 2461688
aauucagaaacccaaaggu

SEQ ID NO: 2461690 - RNA, 19 nt, Artificial Sequence
  Description of Artificial Sequence: Synthetic oligonucleotide
  Sense strand starting at position 1428 of SEQ ID NO: 1887299
uuucuaagaacuggagagu

SEQ ID NO: 2461691 - RNA, 19 nt, Artificial Sequence
  Description of Artificial Sequence: Synthetic oligonucleotide
  Antisense strand to SEQ ID NO: 2461690
acucuccaguucuuagaaa

SEQ ID NO: 2461692 - RNA, 19 nt, Artificial Sequence
  Description of Artificial Sequence: Synthetic oligonucleotide
  Sense strand starting at position 1504 of SEQ ID NO: 1887299
cgaugaggauaguuaauga

SEQ ID NO: 2461693 - RNA, 19 nt, Artificial Sequence
  Description of Artificial Sequence: Synthetic oligonucleotide
  Antisense strand to SEQ ID NO: 2461692
ucauuaacuauccucaucg

SEQ ID NO: 2461694 - RNA, 19 nt, Artificial Sequence
  Description of Artificial Sequence: Synthetic oligonucleotide
  Sense strand starting at position 1530 of SEQ ID NO: 1887299
cccgguaacgacgauuaaa

SEQ ID NO: 2461695 - RNA, 19 nt, Artificial Sequence
  Description of Artificial Sequence: Synthetic oligonucleotide
  Antisense strand to SEQ ID NO: 2461694
uuuaaucgucguuaccggg

SEQ ID NO: 2461696 - RNA, 19 nt, Artificial Sequence
  Description of Artificial Sequence: Synthetic oligonucleotide
  Sense strand starting at position 1542 of SEQ ID NO: 1887299
gauuaaaggcuuugauuga

SEQ ID NO: 2461697 - RNA, 19 nt, Artificial Sequence
  Description of Artificial Sequence: Synthetic oligonucleotide
  Antisense strand to SEQ ID NO: 2461696
ucaaucaaagccuuuaauc

SEQ ID NO: 2461698 - RNA, 19 nt, Artificial Sequence
  Description of Artificial Sequence: Synthetic oligonucleotide
  Sense strand starting at position 1564 of SEQ ID NO: 1887299
cguauuaggccuuaagaau

SEQ ID NO: 2461699 - RNA, 19 nt, Artificial Sequence
  Description of Artificial Sequence: Synthetic oligonucleotide
  Antisense strand to SEQ ID NO: 2461698
auucuuaaggccuaauacg

SEQ ID NO: 2461700 - RNA, 19 nt, Artificial Sequence
  Description of Artificial Sequence: Synthetic oligonucleotide
  Sense strand starting at position 2477 of SEQ ID NO: 1887299
ggcaggagcgcguuugaau

SEQ ID NO: 2461701 - RNA, 19 nt, Artificial Sequence
  Description of Artificial Sequence: Synthetic oligonucleotide
  Antisense strand to SEQ ID NO: 2461700
auucaaacgcgcuccugcc

SEQ ID NO: 2461702 - RNA, 19 nt, Artificial Sequence
  Description of Artificial Sequence: Synthetic oligonucleotide
  Sense strand starting at position 2478 of SEQ ID NO: 1887299
gcaggagcgcguuugaauc

SEQ ID NO: 2461703 - RNA, 19 nt, Artificial Sequence
  Description of Artificial Sequence: Synthetic oligonucleotide
  Antisense strand to SEQ ID NO: 2461702
gauucaaacgcgcuccugc

SEQ ID NO: 2461704 - RNA, 19 nt, Artificial Sequence
  Description of Artificial Sequence: Synthetic oligonucleotide
  Sense strand starting at position 2937 of SEQ ID NO: 1887299
gcucacugagggcaauaaa

SEQ ID NO: 2461705 - RNA, 19 nt, Artificial Sequence
  Description of Artificial Sequence: Synthetic oligonucleotide
  Antisense strand to SEQ ID NO: 2461704
uuuauugcccucagugagc

SEQ ID NO: 2461706 - RNA, 19 nt, Artificial Sequence
  Description of Artificial Sequence: Synthetic oligonucleotide
  Sense strand starting at position 3135 of SEQ ID NO: 1887299
gguggagagcucagcguuu

SEQ ID NO: 2461707 - RNA, 19 nt, Artificial Sequence
  Description of Artificial Sequence: Synthetic oligonucleotide
  Antisense strand to SEQ ID NO: 2461706
aaacgcugagcucuccacc

SEQ ID NO: 2461708 - RNA, 19 nt, Artificial Sequence
  Description of Artificial Sequence: Synthetic oligonucleotide
  Sense strand starting at position 3478 of SEQ ID NO: 1887299
gcccuaacccuugggaauu

SEQ ID NO: 2461709 - RNA, 19 nt, Artificial Sequence
  Description of Artificial Sequence: Synthetic oligonucleotide
  Antisense strand to SEQ ID NO: 2461708
aauucccaaggguuagggc

SEQ ID NO: 2461710 - RNA, 19 nt, Artificial Sequence
  Description of Artificial Sequence: Synthetic oligonucleotide
  Sense strand starting at position 3556 of SEQ ID NO: 1887299
ccguguauugguucgcuuu

SEQ ID NO: 2461711 - RNA, 19 nt, Artificial Sequence
  Description of Artificial Sequence: Synthetic oligonucleotide
  Antisense strand to SEQ ID NO: 2461710
aaagcgaaccaauacacgg

SEQ ID NO: 2461712 - RNA, 19 nt, Artificial Sequence
  Description of Artificial Sequence: Synthetic oligonucleotide
  Sense strand starting at position 3591 of SEQ ID NO: 1887299
ggaaauccgcuuuaaacug

SEQ ID NO: 2461713 - RNA, 19 nt, Artificial Sequence
  Description of Artificial Sequence: Synthetic oligonucleotide
  Antisense strand to SEQ ID NO: 2461712
caguuuaaagcggauuucc

SEQ ID NO: 2461714 - RNA, 19 nt, Artificial Sequence
  Description of Artificial Sequence: Synthetic oligonucleotide
  Sense strand starting at position 3608 of SEQ ID NO: 1887299
ugugauguacuuuauagau

SEQ ID NO: 2461715 - RNA, 19 nt, Artificial Sequence
  Description of Artificial Sequence: Synthetic oligonucleotide
  Antisense strand to SEQ ID NO: 2461714
aucuauaaaguacaucaca

SEQ ID NO: 2461716 - RNA, 19 nt, Artificial Sequence
  Description of Artificial Sequence: Synthetic oligonucleotide
  Sense strand starting at position 3616 of SEQ ID NO: 1887299
acuuuauagauaugaggug

SEQ ID NO: 2461717 - RNA, 19 nt, Artificial Sequence
  Description of Artificial Sequence: Synthetic oligonucleotide
  Antisense strand to SEQ ID NO: 2461716
caccucauaucuauaaagu

SEQ ID NO: 2461718 - RNA, 19 nt, Artificial Sequence
  Description of Artificial Sequence: Synthetic oligonucleotide
  Sense strand starting at position 3657 of SEQ ID NO: 1887299
gaaggaauauugucaugcu

SEQ ID NO: 2461719 - RNA, 19 nt, Artificial Sequence
  Description of Artificial Sequence: Synthetic oligonucleotide
  Antisense strand to SEQ ID NO: 2461718
agcaugacaauauuccuuc

SEQ ID NO: 2461720 - RNA, 19 nt, Artificial Sequence
  Description of Artificial Sequence: Synthetic oligonucleotide
  Sense strand starting at position 3765 of SEQ ID NO: 1887299
ugaggcugauagguuuaga

SEQ ID NO: 2461721 - RNA, 19 nt, Artificial Sequence
  Description of Artificial Sequence: Synthetic oligonucleotide
  Antisense strand to SEQ ID NO: 2461720
ucuaaaccuaucagccuca

SEQ ID NO: 2461722 - RNA, 19 nt, Artificial Sequence
  Description of Artificial Sequence: Synthetic oligonucleotide
  Sense strand starting at position 3794 of SEQ ID NO: 1887299
accauauaacuguaugguu

SEQ ID NO: 2461723 - RNA, 19 nt, Artificial Sequence
  Description of Artificial Sequence: Synthetic oligonucleotide
  Antisense strand to SEQ ID NO: 2461722
aaccauacaguuauauggu

SEQ ID NO: 2461724 - RNA, 19 nt, Artificial Sequence
  Description of Artificial Sequence: Synthetic oligonucleotide
  Sense strand starting at position 3821 of SEQ ID NO: 1887299
aauugaaaucgugauccgu

SEQ ID NO: 2461725 - RNA, 19 nt, Artificial Sequence
  Description of Artificial Sequence: Synthetic oligonucleotide
  Antisense strand to SEQ ID NO: 2461724
acggaucacgauuucaauu

SEQ ID NO: 2461726 - RNA, 19 nt, Artificial Sequence
  Description of Artificial Sequence: Synthetic oligonucleotide
  Sense strand starting at position 3827 of SEQ ID NO: 1887299
aaucgugauccguagaaug

SEQ ID NO: 2461727 - RNA, 19 nt, Artificial Sequence
  Description of Artificial Sequence: Synthetic oligonucleotide
  Antisense strand to SEQ ID NO: 2461726
cauucuacggaucacgauu

SEQ ID NO: 2461728 - RNA, 19 nt, Artificial Sequence
  Description of Artificial Sequence: Synthetic oligonucleotide
  Sense strand starting at position 3829 of SEQ ID NO: 1887299
ucgugauccguagaaugaa

SEQ ID NO: 2461729 - RNA, 19 nt, Artificial Sequence
  Description of Artificial Sequence: Synthetic oligonucleotide
  Antisense strand to SEQ ID NO: 2461728
uucauucuacggaucacga

SEQ ID NO: 2461730 - RNA, 19 nt, Artificial Sequence
  Description of Artificial Sequence: Synthetic oligonucleotide
  Sense strand starting at position 3884 of SEQ ID NO: 1887299
gcuguagucccagcgucua

SEQ ID NO: 2461731 - RNA, 19 nt, Artificial Sequence
  Description of Artificial Sequence: Synthetic oligonucleotide
  Antisense strand to SEQ ID NO: 2461730
uagacgcugggacuacagc

SEQ ID NO: 2461732 - RNA, 19 nt, Artificial Sequence
  Description of Artificial Sequence: Synthetic oligonucleotide
  Sense strand starting at position 3919 of SEQ ID NO: 1887299
auuguaaaugcccagauua

SEQ ID NO: 2461733 - RNA, 19 nt, Artificial Sequence
  Description of Artificial Sequence: Synthetic oligonucleotide
  Antisense strand to SEQ ID NO: 2461732
uaaucugggcauuuacaau

SEQ ID NO: 2461734 - RNA, 19 nt, Artificial Sequence
  Description of Artificial Sequence: Synthetic oligonucleotide
  Sense strand starting at position 3921 of SEQ ID NO: 1887299
uguaaaugcccagauuaga

SEQ ID NO: 2461735 - RNA, 19 nt, Artificial Sequence
  Description of Artificial Sequence: Synthetic oligonucleotide
  Antisense strand to SEQ ID NO: 2461734
ucuaaucugggcauuuaca

SEQ ID NO: 2461736 - RNA, 19 nt, Artificial Sequence
  Description of Artificial Sequence: Synthetic oligonucleotide
  Sense strand starting at position 88 of SEQ ID NO: 1887300
ugaauacugcuauguaaug

SEQ ID NO: 2461737 - RNA, 19 nt, Artificial Sequence
  Description of Artificial Sequence: Synthetic oligonucleotide
  Antisense strand to SEQ ID NO: 2461736
cauuacauagcaguauuca

SEQ ID NO: 2461738 - RNA, 19 nt, Artificial Sequence
  Description of Artificial Sequence: Synthetic oligonucleotide
  Sense strand starting at position 139 of SEQ ID NO: 1887300
cuaagaucaugaguggcaa

SEQ ID NO: 2461739 - RNA, 19 nt, Artificial Sequence
  Description of Artificial Sequence: Synthetic oligonucleotide
  Antisense strand to SEQ ID NO: 2461738
uugccacucaugaucuuag

SEQ ID NO: 2461740 - RNA, 19 nt, Artificial Sequence
  Description of Artificial Sequence: Synthetic oligonucleotide
  Sense strand starting at position 140 of SEQ ID NO: 1887300
uaagaucaugaguggcaaa

SEQ ID NO: 2461741 - RNA, 19 nt, Artificial Sequence
  Description of Artificial Sequence: Synthetic oligonucleotide
  Antisense strand to SEQ ID NO: 2461740
uuugccacucaugaucuua

SEQ ID NO: 2461742 - RNA, 19 nt, Artificial Sequence
  Description of Artificial Sequence: Synthetic oligonucleotide
  Sense strand starting at position 209 of SEQ ID NO: 1887300
gcuguauuaggagaaauuc

SEQ ID NO: 2461743 - RNA, 19 nt, Artificial Sequence
  Description of Artificial Sequence: Synthetic oligonucleotide
  Antisense strand to SEQ ID NO: 2461742
gaauuucuccuaauacagc

SEQ ID NO: 2461744 - RNA, 19 nt, Artificial Sequence
  Description of Artificial Sequence: Synthetic oligonucleotide
  Sense strand starting at position 236 of SEQ ID NO: 1887300
uggaucugguuucuuaaua

SEQ ID NO: 2461745 - RNA, 19 nt, Artificial Sequence
  Description of Artificial Sequence: Synthetic oligonucleotide
  Antisense strand to SEQ ID NO: 2461744
uauuaagaaaccagaucca

SEQ ID NO: 2461746 - RNA, 19 nt, Artificial Sequence
  Description of Artificial Sequence: Synthetic oligonucleotide
  Sense strand starting at position 237 of SEQ ID NO: 1887300
ggaucugguuucuuaauaa

SEQ ID NO: 2461747 - RNA, 19 nt, Artificial Sequence
  Description of Artificial Sequence: Synthetic oligonucleotide
  Antisense strand to SEQ ID NO: 2461746
uuauuaagaaaccagaucc

SEQ ID NO: 2461748 - RNA, 19 nt, Artificial Sequence
  Description of Artificial Sequence: Synthetic oligonucleotide
  Sense strand starting at position 328 of SEQ ID NO: 1887300
auguuucuugaggaaaugu

SEQ ID NO: 2461749 - RNA, 19 nt, Artificial Sequence
  Description of Artificial Sequence: Synthetic oligonucleotide
  Antisense strand to SEQ ID NO: 2461748
acauuuccucaagaaacau

SEQ ID NO: 2461750 - RNA, 19 nt, Artificial Sequence
  Description of Artificial Sequence: Synthetic oligonucleotide
  Sense strand starting at position 482 of SEQ ID NO: 1887300
uuuacuaauguguaagacu

SEQ ID NO: 2461751 - RNA, 19 nt, Artificial Sequence
  Description of Artificial Sequence: Synthetic oligonucleotide
  Antisense strand to SEQ ID NO: 2461750
agucuuacacauuaguaaa

SEQ ID NO: 2461752 - RNA, 19 nt, Artificial Sequence
  Description of Artificial Sequence: Synthetic oligonucleotide
  Sense strand starting at position 547 of SEQ ID NO: 1887300
uuauaaaggcuugguaaag

SEQ ID NO: 2461753 - RNA, 19 nt, Artificial Sequence
  Description of Artificial Sequence: Synthetic oligonucleotide
  Antisense strand to SEQ ID NO: 2461752
cuuuaccaagccuuuauaa

SEQ ID NO: 2461754 - RNA, 19 nt, Artificial Sequence
  Description of Artificial Sequence: Synthetic oligonucleotide
  Sense strand starting at position 548 of SEQ ID NO: 1887300
uauaaaggcuugguaaagu

SEQ ID NO: 2461755 - RNA, 19 nt, Artificial Sequence
  Description of Artificial Sequence: Synthetic oligonucleotide
  Antisense strand to SEQ ID NO: 2461754
acuuuaccaagccuuuaua

SEQ ID NO: 2461756 - RNA, 19 nt, Artificial Sequence
  Description of Artificial Sequence: Synthetic oligonucleotide
  Sense strand starting at position 587 of SEQ ID NO: 1887300
aggagaucuggugguuucu

SEQ ID NO: 2461757 - RNA, 19 nt, Artificial Sequence
  Description of Artificial Sequence: Synthetic oligonucleotide
  Antisense strand to SEQ ID NO: 2461756
agaaaccaccagaucuccu

SEQ ID NO: 2461758 - RNA, 19 nt, Artificial Sequence
  Description of Artificial Sequence: Synthetic oligonucleotide
  Sense strand starting at position 589 of SEQ ID NO: 1887300
gagaucuggugguuucuaa

SEQ ID NO: 2461759 - RNA, 19 nt, Artificial Sequence
  Description of Artificial Sequence: Synthetic oligonucleotide
  Antisense strand to SEQ ID NO: 2461758
uuagaaaccaccagaucuc

SEQ ID NO: 2461760 - RNA, 19 nt, Artificial Sequence
  Description of Artificial Sequence: Synthetic oligonucleotide
  Sense strand starting at position 767 of SEQ ID NO: 1887300
aggcauacugcugauaauu

SEQ ID NO: 2461761 - RNA, 19 nt, Artificial Sequence
  Description of Artificial Sequence: Synthetic oligonucleotide
  Antisense strand to SEQ ID NO: 2461760
aauuaucagcaguaugccu

SEQ ID NO: 2461762 - RNA, 19 nt, Artificial Sequence
  Description of Artificial Sequence: Synthetic oligonucleotide
  Sense strand starting at position 983 of SEQ ID NO: 1887300
uugccacucuauuuaggua

SEQ ID NO: 2461763 - RNA, 19 nt, Artificial Sequence
  Description of Artificial Sequence: Synthetic oligonucleotide
  Antisense strand to SEQ ID NO: 2461762
uaccuaaauagaguggcaa

SEQ ID NO: 2461764 - RNA, 19 nt, Artificial Sequence
  Description of Artificial Sequence: Synthetic oligonucleotide
  Sense strand starting at position 1390 of SEQ ID NO: 1887300
ugaugacaacucuauuguu

SEQ ID NO: 2461765 - RNA, 19 nt, Artificial Sequence
  Description of Artificial Sequence: Synthetic oligonucleotide
  Antisense strand to SEQ ID NO: 2461764
aacaauagaguugucauca

SEQ ID NO: 2461766 - RNA, 19 nt, Artificial Sequence
  Description of Artificial Sequence: Synthetic oligonucleotide
  Sense strand starting at position 1416 of SEQ ID NO: 1887300
ccugauauacaugguaaau

SEQ ID NO: 2461767 - RNA, 19 nt, Artificial Sequence
  Description of Artificial Sequence: Synthetic oligonucleotide
  Antisense strand to SEQ ID NO: 2461766
auuuaccauguauaucagg

SEQ ID NO: 2461768 - RNA, 19 nt, Artificial Sequence
  Description of Artificial Sequence: Synthetic oligonucleotide
  Sense strand starting at position 1595 of SEQ ID NO: 1887300
ggagaacuguucucacaaa

SEQ ID NO: 2461769 - RNA, 19 nt, Artificial Sequence
  Description of Artificial Sequence: Synthetic oligonucleotide
  Antisense strand to SEQ ID NO: 2461768
uuugugagaacaguucucc

SEQ ID NO: 2461770 - RNA, 19 nt, Artificial Sequence
  Description of Artificial Sequence: Synthetic oligonucleotide
  Sense strand starting at position 1768 of SEQ ID NO: 1887300
aaagaugaugcauguaguu

SEQ ID NO: 2461771 - RNA, 19 nt, Artificial Sequence
  Description of Artificial Sequence: Synthetic oligonucleotide
  Antisense strand to SEQ ID NO: 2461770
aacuacaugcaucaucuuu

SEQ ID NO: 2461772 - RNA, 19 nt, Artificial Sequence
  Description of Artificial Sequence: Synthetic oligonucleotide
  Sense strand starting at position 1770 of SEQ ID NO: 1887300
agaugaugcauguaguuua

SEQ ID NO: 2461773 - RNA, 19 nt, Artificial Sequence
  Description of Artificial Sequence: Synthetic oligonucleotide
  Antisense strand to SEQ ID NO: 2461772
uaaacuacaugcaucaucu

SEQ ID NO: 2461774 - RNA, 19 nt, Artificial Sequence
  Description of Artificial Sequence: Synthetic oligonucleotide
  Sense strand starting at position 1863 of SEQ ID NO: 1887300
cuucguguuggacacauaa

SEQ ID NO: 2461775 - RNA, 19 nt, Artificial Sequence
  Description of Artificial Sequence: Synthetic oligonucleotide
  Antisense strand to SEQ ID NO: 2461774
uuauguguccaacacgaag

SEQ ID NO: 2461776 - RNA, 19 nt, Artificial Sequence
  Description of Artificial Sequence: Synthetic oligonucleotide
  Sense strand starting at position 2028 of SEQ ID NO: 1887300
guucucugaguagagucau

SEQ ID NO: 2461777 - RNA, 19 nt, Artificial Sequence
  Description of Artificial Sequence: Synthetic oligonucleotide
  Antisense strand to SEQ ID NO: 2461776
augacucuacucagagaac

SEQ ID NO: 2461778 - RNA, 19 nt, Artificial Sequence
  Description of Artificial Sequence: Synthetic oligonucleotide
  Sense strand starting at position 2133 of SEQ ID NO: 1887300
guaguaugagcugauuauc

SEQ ID NO: 2461779 - RNA, 19 nt, Artificial Sequence
  Description of Artificial Sequence: Synthetic oligonucleotide
  Antisense strand to SEQ ID NO: 2461778
gauaaucagcucauacuac

SEQ ID NO: 2461780 - RNA, 19 nt, Artificial Sequence
  Description of Artificial Sequence: Synthetic oligonucleotide
  Sense strand starting at position 2136 of SEQ ID NO: 1887300
guaugagcugauuaucuuu

SEQ ID NO: 2461781 - RNA, 19 nt, Artificial Sequence
  Description of Artificial Sequence: Synthetic oligonucleotide
  Antisense strand to SEQ ID NO: 2461780
aaagauaaucagcucauac

SEQ ID NO: 2461782 - RNA, 19 nt, Artificial Sequence
  Description of Artificial Sequence: Synthetic oligonucleotide
  Sense strand starting at position 2201 of SEQ ID NO: 1887300
acuuauuggccugaguuga

SEQ ID NO: 2461783 - RNA, 19 nt, Artificial Sequence
  Description of Artificial Sequence: Synthetic oligonucleotide
  Antisense strand to SEQ ID NO: 2461782
ucaacucaggccaauaagu

SEQ ID NO: 2461784 - RNA, 19 nt, Artificial Sequence
  Description of Artificial Sequence: Synthetic oligonucleotide
  Sense strand starting at position 2205 of SEQ ID NO: 1887300
auuggccugaguugauaaa

SEQ ID NO: 2461785 - RNA, 19 nt, Artificial Sequence
  Description of Artificial Sequence: Synthetic oligonucleotide
  Antisense strand to SEQ ID NO: 2461784
uuuaucaacucaggccaau

SEQ ID NO: 2461786 - RNA, 19 nt, Artificial Sequence
  Description of Artificial Sequence: Synthetic oligonucleotide
  Sense strand starting at position 2380 of SEQ ID NO: 1887300
uuucuuaauucggucauuu

SEQ ID NO: 2461787 - RNA, 19 nt, Artificial Sequence
  Description of Artificial Sequence: Synthetic oligonucleotide
  Antisense strand to SEQ ID NO: 2461786
aaaugaccgaauuaagaaa

SEQ ID NO: 2461788 - RNA, 19 nt, Artificial Sequence
  Description of Artificial Sequence: Synthetic oligonucleotide
  Sense strand starting at position 2389 of SEQ ID NO: 1887300
ucggucauuucuccucaga

SEQ ID NO: 2461789 - RNA, 19 nt, Artificial Sequence
  Description of Artificial Sequence: Synthetic oligonucleotide
  Antisense strand to SEQ ID NO: 2461788
ucugaggagaaaugaccga

SEQ ID NO: 2461790 - RNA, 19 nt, Artificial Sequence
  Description of Artificial Sequence: Synthetic oligonucleotide
  Sense strand starting at position 2766 of SEQ ID NO: 1887300
aaagcuauaugggcaguaa

SEQ ID NO: 2461791 - RNA, 19 nt, Artificial Sequence
  Description of Artificial Sequence: Synthetic oligonucleotide
  Antisense strand to SEQ ID NO: 2461790
uuacugcccauauagcuuu

SEQ ID NO: 2461792 - RNA, 19 nt, Artificial Sequence
  Description of Artificial Sequence: Synthetic oligonucleotide
  Sense strand starting at position 2767 of SEQ ID NO: 1887300
aagcuauaugggcaguaaa

SEQ ID NO: 2461793 - RNA, 19 nt, Artificial Sequence
  Description of Artificial Sequence: Synthetic oligonucleotide
  Antisense strand to SEQ ID NO: 2461792
uuuacugcccauauagcuu

SEQ ID NO: 2461794 - RNA, 19 nt, Artificial Sequence
  Description of Artificial Sequence: Synthetic oligonucleotide
  Sense strand starting at position 2770 of SEQ ID NO: 1887300
cuauaugggcaguaaagua

SEQ ID NO: 2461795 - RNA, 19 nt, Artificial Sequence
  Description of Artificial Sequence: Synthetic oligonucleotide
  Antisense strand to SEQ ID NO: 2461794
uacuuuacugcccauauag

SEQ ID NO: 2461796 - RNA, 19 nt, Artificial Sequence
  Description of Artificial Sequence: Synthetic oligonucleotide
  Sense strand starting at position 2889 of SEQ ID NO: 1887300
auccuaugagguugugaau

SEQ ID NO: 2461797 - RNA, 19 nt, Artificial Sequence
  Description of Artificial Sequence: Synthetic oligonucleotide
  Antisense strand to SEQ ID NO: 2461796
auucacaaccucauaggau

SEQ ID NO: 2461798 - RNA, 19 nt, Artificial Sequence
  Description of Artificial Sequence: Synthetic oligonucleotide
  Sense strand starting at position 3157 of SEQ ID NO: 1887300
gguggagauaccuguuuaa

SEQ ID NO: 2461799 - RNA, 19 nt, Artificial Sequence
  Description of Artificial Sequence: Synthetic oligonucleotide
  Antisense strand to SEQ ID NO: 2461798
uuaaacagguaucuccacc

SEQ ID NO: 2461800 - RNA, 19 nt, Artificial Sequence
  Description of Artificial Sequence: Synthetic oligonucleotide
  Sense strand starting at position 3221 of SEQ ID NO: 1887300
ggauuucuguaagaaucua

SEQ ID NO: 2461801 - RNA, 19 nt, Artificial Sequence
  Description of Artificial Sequence: Synthetic oligonucleotide
  Antisense strand to SEQ ID NO: 2461800
uagauucuuacagaaaucc

SEQ ID NO: 2461802 - RNA, 19 nt, Artificial Sequence
  Description of Artificial Sequence: Synthetic oligonucleotide
  Sense strand starting at position 3388 of SEQ ID NO: 1887300
acaauuugcugcccugauu

SEQ ID NO: 2461803 - RNA, 19 nt, Artificial Sequence
  Description of Artificial Sequence: Synthetic oligonucleotide
  Antisense strand to SEQ ID NO: 2461802
aaucagggcagcaaauugu

SEQ ID NO: 2461804 - RNA, 19 nt, Artificial Sequence
  Description of Artificial Sequence: Synthetic oligonucleotide
  Sense strand starting at position 3475 of SEQ ID NO: 1887300
gaagguacagugugaaacu

SEQ ID NO: 2461805 - RNA, 19 nt, Artificial Sequence
  Description of Artificial Sequence: Synthetic oligonucleotide
  Antisense strand to SEQ ID NO: 2461804
aguuucacacuguaccuuc

SEQ ID NO: 2461806 - RNA, 19 nt, Artificial Sequence
  Description of Artificial Sequence: Synthetic oligonucleotide
  Sense strand starting at position 3505 of SEQ ID NO: 1887300
guagaauaucauuaacagc

SEQ ID NO: 2461807 - RNA, 19 nt, Artificial Sequence
  Description of Artificial Sequence: Synthetic oligonucleotide
  Antisense strand to SEQ ID NO: 2461806
gcuguuaaugauauucuac

SEQ ID NO: 2461808 - RNA, 19 nt, Artificial Sequence
  Description of Artificial Sequence: Synthetic oligonucleotide
  Sense strand starting at position 3567 of SEQ ID NO: 1887300
aggaacuaguugcuguaaa

SEQ ID NO: 2461809 - RNA, 19 nt, Artificial Sequence
  Description of Artificial Sequence: Synthetic oligonucleotide
  Antisense strand to SEQ ID NO: 2461808
uuuacagcaacuaguuccu

SEQ ID NO: 2461810 - RNA, 19 nt, Artificial Sequence
  Description of Artificial Sequence: Synthetic oligonucleotide
  Sense strand starting at position 3579 of SEQ ID NO: 1887300
cuguaaauugcuuaagaaa

SEQ ID NO: 2461811 - RNA, 19 nt, Artificial Sequence
  Description of Artificial Sequence: Synthetic oligonucleotide
  Antisense strand to SEQ ID NO: 2461810
uuucuuaagcaauuuacag

SEQ ID NO: 2461812 - RNA, 19 nt, Artificial Sequence
  Description of Artificial Sequence: Synthetic oligonucleotide
  Sense strand starting at position 3716 of SEQ ID NO: 1887300
aucagauaagcuuagugau

SEQ ID NO: 2461813 - RNA, 19 nt, Artificial Sequence
  Description of Artificial Sequence: Synthetic oligonucleotide
  Antisense strand to SEQ ID NO: 2461812
aucacuaagcuuaucugau

SEQ ID NO: 2461814 - RNA, 19 nt, Artificial Sequence
  Description of Artificial Sequence: Synthetic oligonucleotide
  Sense strand starting at position 3718 of SEQ ID NO: 1887300
cagauaagcuuagugauua

SEQ ID NO: 2461815 - RNA, 19 nt, Artificial Sequence
  Description of Artificial Sequence: Synthetic oligonucleotide
  Antisense strand to SEQ ID NO: 2461814
uaaucacuaagcuuaucug

SEQ ID NO: 2461816 - RNA, 19 nt, Artificial Sequence
  Description of Artificial Sequence: Synthetic oligonucleotide
  Sense strand starting at position 24 of SEQ ID NO: 1887301
agagcuagccuauacuuga

SEQ ID NO: 2461817 - RNA, 19 nt, Artificial Sequence
  Description of Artificial Sequence: Synthetic oligonucleotide
  Antisense strand to SEQ ID NO: 2461816
ucaaguauaggcuagcucu

SEQ ID NO: 2461818 - RNA, 19 nt, Artificial Sequence
  Description of Artificial Sequence: Synthetic oligonucleotide
  Sense strand starting at position 201 of SEQ ID NO: 1887301
ucaucacaucgucaaugau

SEQ ID NO: 2461819 - RNA, 19 nt, Artificial Sequence
  Description of Artificial Sequence: Synthetic oligonucleotide
  Antisense strand to SEQ ID NO: 2461818
aucauugacgaugugauga

SEQ ID NO: 2461820 - RNA, 19 nt, Artificial Sequence
  Description of Artificial Sequence: Synthetic oligonucleotide
  Sense strand starting at position 228 of SEQ ID NO: 1887301
gucuaagggcuuugaucaa

SEQ ID NO: 2461821 - RNA, 19 nt, Artificial Sequence
  Description of Artificial Sequence: Synthetic oligonucleotide
  Antisense strand to SEQ ID NO: 2461820
uugaucaaagcccuuagac

SEQ ID NO: 2461822 - RNA, 19 nt, Artificial Sequence
  Description of Artificial Sequence: Synthetic oligonucleotide
  Sense strand starting at position 380 of SEQ ID NO: 1887301
gucaaauacugcuucugaa

SEQ ID NO: 2461823 - RNA, 19 nt, Artificial Sequence
  Description of Artificial Sequence: Synthetic oligonucleotide
  Antisense strand to SEQ ID NO: 2461822
uucagaagcaguauuugac

SEQ ID NO: 2461824 - RNA, 19 nt, Artificial Sequence
  Description of Artificial Sequence: Synthetic oligonucleotide
  Sense strand starting at position 442 of SEQ ID NO: 1887301
acaauugaaugggaacaaa

SEQ ID NO: 2461825 - RNA, 19 nt, Artificial Sequence
  Description of Artificial Sequence: Synthetic oligonucleotide
  Antisense strand to SEQ ID NO: 2461824
uuuguucccauucaauugu

SEQ ID NO: 2461826 - RNA, 19 nt, Artificial Sequence
  Description of Artificial Sequence: Synthetic oligonucleotide
  Sense strand starting at position 501 of SEQ ID NO: 1887301
agaaauagucuccacuggu

SEQ ID NO: 2461827 - RNA, 19 nt, Artificial Sequence
  Description of Artificial Sequence: Synthetic oligonucleotide
  Antisense strand to SEQ ID NO: 2461826
accaguggagacuauuucu

SEQ ID NO: 2461828 - RNA, 19 nt, Artificial Sequence
  Description of Artificial Sequence: Synthetic oligonucleotide
  Sense strand starting at position 655 of SEQ ID NO: 1887301
cuuugaucugccuaaugau

SEQ ID NO: 2461829 - RNA, 19 nt, Artificial Sequence
  Description of Artificial Sequence: Synthetic oligonucleotide
  Antisense strand to SEQ ID NO: 2461828
aucauuaggcagaucaaag

SEQ ID NO: 2461830 - RNA, 19 nt, Artificial Sequence
  Description of Artificial Sequence: Synthetic oligonucleotide
  Sense strand starting at position 701 of SEQ ID NO: 1887301
guagauguguaaccucaag

SEQ ID NO: 2461831 - RNA, 19 nt, Artificial Sequence
  Description of Artificial Sequence: Synthetic oligonucleotide
  Antisense strand to SEQ ID NO: 2461830
cuugagguuacacaucuac

SEQ ID NO: 2461832 - RNA, 19 nt, Artificial Sequence
  Description of Artificial Sequence: Synthetic oligonucleotide
  Sense strand starting at position 747 of SEQ ID NO: 1887301
uuucgucaccgauaagaau

SEQ ID NO: 2461833 - RNA, 19 nt, Artificial Sequence
  Description of Artificial Sequence: Synthetic oligonucleotide
  Antisense strand to SEQ ID NO: 2461832
auucuuaucggugacgaaa

SEQ ID NO: 2461834 - RNA, 19 nt, Artificial Sequence
  Description of Artificial Sequence: Synthetic oligonucleotide
  Sense strand starting at position 996 of SEQ ID NO: 1887301
gagaauugcugauugaagc

SEQ ID NO: 2461835 - RNA, 19 nt, Artificial Sequence
  Description of Artificial Sequence: Synthetic oligonucleotide
  Antisense strand to SEQ ID NO: 2461834
gcuucaaucagcaauucuc

SEQ ID NO: 2461836 - RNA, 19 nt, Artificial Sequence
  Description of Artificial Sequence: Synthetic oligonucleotide
  Sense strand starting at position 997 of SEQ ID NO: 1887301
agaauugcugauugaagcu

SEQ ID NO: 2461837 - RNA, 19 nt, Artificial Sequence
  Description of Artificial Sequence: Synthetic oligonucleotide
  Antisense strand to SEQ ID NO: 2461836
agcuucaaucagcaauucu

SEQ ID NO: 2461838 - RNA, 19 nt, Artificial Sequence
  Description of Artificial Sequence: Synthetic oligonucleotide
  Sense strand starting at position 1042 of SEQ ID NO: 1887301
auguuucagcgguaaagaa

SEQ ID NO: 2461839 - RNA, 19 nt, Artificial Sequence
  Description of Artificial Sequence: Synthetic oligonucleotide
  Antisense strand to SEQ ID NO: 2461838
uucuuuaccgcugaaacau

SEQ ID NO: 2461840 - RNA, 19 nt, Artificial Sequence
  Description of Artificial Sequence: Synthetic oligonucleotide
  Sense strand starting at position 1419 of SEQ ID NO: 1887301
uccagaagucgcucgcuaa

SEQ ID NO: 2461841 - RNA, 19 nt, Artificial Sequence
  Description of Artificial Sequence: Synthetic oligonucleotide
  Antisense strand to SEQ ID NO: 2461840
uuagcgagcgacuucugga

SEQ ID NO: 2461842 - RNA, 19 nt, Artificial Sequence
  Description of Artificial Sequence: Synthetic oligonucleotide
  Sense strand starting at position 2631 of SEQ ID NO: 1887301
uguguucguacguucuaga

SEQ ID NO: 2461843 - RNA, 19 nt, Artificial Sequence
  Description of Artificial Sequence: Synthetic oligonucleotide
  Antisense strand to SEQ ID NO: 2461842
ucuagaacguacgaacaca

SEQ ID NO: 2461844 - RNA, 19 nt, Artificial Sequence
  Description of Artificial Sequence: Synthetic oligonucleotide
  Sense strand starting at position 2632 of SEQ ID NO: 1887301
guguucguacguucuagau

SEQ ID NO: 2461845 - RNA, 19 nt, Artificial Sequence
  Description of Artificial Sequence: Synthetic oligonucleotide
  Antisense strand to SEQ ID NO: 2461844
aucuagaacguacgaacac

SEQ ID NO: 2461846 - RNA, 19 nt, Artificial Sequence
  Description of Artificial Sequence: Synthetic oligonucleotide
  Sense strand starting at position 2693 of SEQ ID NO: 1887301
uagaaagucuuucuacgac

SEQ ID NO: 2461847 - RNA, 19 nt, Artificial Sequence
  Description of Artificial Sequence: Synthetic oligonucleotide
  Antisense strand to SEQ ID NO: 2461846
gucguagaaagacuuucua

SEQ ID NO: 2461848 - RNA, 19 nt, Artificial Sequence
  Description of Artificial Sequence: Synthetic oligonucleotide
  Sense strand starting at position 2746 of SEQ ID NO: 1887301
cguuguuaaccggagaacu

SEQ ID NO: 2461849 - RNA, 19 nt, Artificial Sequence
  Description of Artificial Sequence: Synthetic oligonucleotide
  Antisense strand to SEQ ID NO: 2461848
aguucuccgguuaacaacg

SEQ ID NO: 2461850 - RNA, 19 nt, Artificial Sequence
  Description of Artificial Sequence: Synthetic oligonucleotide
  Sense strand starting at position 2748 of SEQ ID NO: 1887301
uuguuaaccggagaacuac

SEQ ID NO: 2461851 - RNA, 19 nt, Artificial Sequence
  Description of Artificial Sequence: Synthetic oligonucleotide
  Antisense strand to SEQ ID NO: 2461850
guaguucuccgguuaacaa

SEQ ID NO: 2461852 - RNA, 19 nt, Artificial Sequence
  Description of Artificial Sequence: Synthetic oligonucleotide
  Sense strand starting at position 2899 of SEQ ID NO: 1887301
uuuacacuguaguuggaaa

SEQ ID NO: 2461853 - RNA, 19 nt, Artificial Sequence
  Description of Artificial Sequence: Synthetic oligonucleotide
  Antisense strand to SEQ ID NO: 2461852
uuuccaacuacaguguaaa

SEQ ID NO: 2461854 - RNA, 19 nt, Artificial Sequence
  Description of Artificial Sequence: Synthetic oligonucleotide
  Sense strand starting at position 2906 of SEQ ID NO: 1887301
uguaguuggaaacauguaa

SEQ ID NO: 2461855 - RNA, 19 nt, Artificial Sequence
  Description of Artificial Sequence: Synthetic oligonucleotide
  Antisense strand to SEQ ID NO: 2461854
uuacauguuuccaacuaca

SEQ ID NO: 2461856 - RNA, 19 nt, Artificial Sequence
  Description of Artificial Sequence: Synthetic oligonucleotide
  Sense strand starting at position 2949 of SEQ ID NO: 1887301
agaagcuugaaaggguaua

SEQ ID NO: 2461857 - RNA, 19 nt, Artificial Sequence
  Description of Artificial Sequence: Synthetic oligonucleotide
  Antisense strand to SEQ ID NO: 2461856
uauacccuuucaagcuucu

SEQ ID NO: 2461858 - RNA, 19 nt, Artificial Sequence
  Description of Artificial Sequence: Synthetic oligonucleotide
  Sense strand starting at position 2995 of SEQ ID NO: 1887301
agggacagauggcuuguua

SEQ ID NO: 2461859 - RNA, 19 nt, Artificial Sequence
  Description of Artificial Sequence: Synthetic oligonucleotide
  Antisense strand to SEQ ID NO: 2461858
uaacaagccaucugucccu

SEQ ID NO: 2461860 - RNA, 19 nt, Artificial Sequence
  Description of Artificial Sequence: Synthetic oligonucleotide
  Sense strand starting at position 2999 of SEQ ID NO: 1887301
acagauggcuuguuaagaa

SEQ ID NO: 2461861 - RNA, 19 nt, Artificial Sequence
  Description of Artificial Sequence: Synthetic oligonucleotide
  Antisense strand to SEQ ID NO: 2461860
uucuuaacaagccaucugu

SEQ ID NO: 2461862 - RNA, 19 nt, Artificial Sequence
  Description of Artificial Sequence: Synthetic oligonucleotide
  Sense strand starting at position 3220 of SEQ ID NO: 1887301
acuguuuggagugguauaa

SEQ ID NO: 2461863 - RNA, 19 nt, Artificial Sequence
  Description of Artificial Sequence: Synthetic oligonucleotide
  Antisense strand to SEQ ID NO: 2461862
uuauaccacuccaaacagu

SEQ ID NO: 2461864 - RNA, 19 nt, Artificial Sequence
  Description of Artificial Sequence: Synthetic oligonucleotide
  Sense strand starting at position 3231 of SEQ ID NO: 1887301
ugguauaaggcuggagaga

SEQ ID NO: 2461865 - RNA, 19 nt, Artificial Sequence
  Description of Artificial Sequence: Synthetic oligonucleotide
  Antisense strand to SEQ ID NO: 2461864
ucucuccagccuuauacca

SEQ ID NO: 2461866 - RNA, 19 nt, Artificial Sequence
  Description of Artificial Sequence: Synthetic oligonucleotide
  Sense strand starting at position 3347 of SEQ ID NO: 1887301
agauguguaaggugaagaa

SEQ ID NO: 2461867 - RNA, 19 nt, Artificial Sequence
  Description of Artificial Sequence: Synthetic oligonucleotide
  Antisense strand to SEQ ID NO: 2461866
uucuucaccuuacacaucu

SEQ ID NO: 2461868 - RNA, 19 nt, Artificial Sequence
  Description of Artificial Sequence: Synthetic oligonucleotide
  Sense strand starting at position 3363 of SEQ ID NO: 1887301
gaaaguguauguuuggauu

SEQ ID NO: 2461869 - RNA, 19 nt, Artificial Sequence
  Description of Artificial Sequence: Synthetic oligonucleotide
  Antisense strand to SEQ ID NO: 2461868
aauccaaacauacacuuuc

SEQ ID NO: 2461870 - RNA, 19 nt, Artificial Sequence
  Description of Artificial Sequence: Synthetic oligonucleotide
  Sense strand starting at position 3413 of SEQ ID NO: 1887301
aacaguuaccagugaagug

SEQ ID NO: 2461871 - RNA, 19 nt, Artificial Sequence
  Description of Artificial Sequence: Synthetic oligonucleotide
  Antisense strand to SEQ ID NO: 2461870
cacuucacugguaacuguu

SEQ ID NO: 2461872 - RNA, 19 nt, Artificial Sequence
  Description of Artificial Sequence: Synthetic oligonucleotide
  Sense strand starting at position 3418 of SEQ ID NO: 1887301
uuaccagugaaguggugaa

SEQ ID NO: 2461873 - RNA, 19 nt, Artificial Sequence
  Description of Artificial Sequence: Synthetic oligonucleotide
  Antisense strand to SEQ ID NO: 2461872
uucaccacuucacugguaa

SEQ ID NO: 2461874 - RNA, 19 nt, Artificial Sequence
  Description of Artificial Sequence: Synthetic oligonucleotide
  Sense strand starting at position 3446 of SEQ ID NO: 1887301
cauauuggaguggguugaa

SEQ ID NO: 2461875 - RNA, 19 nt, Artificial Sequence
  Description of Artificial Sequence: Synthetic oligonucleotide
  Antisense strand to SEQ ID NO: 2461874
uucaacccacuccaauaug

SEQ ID NO: 2461876 - RNA, 19 nt, Artificial Sequence
  Description of Artificial Sequence: Synthetic oligonucleotide
  Sense strand starting at position 3449 of SEQ ID NO: 1887301
auuggaguggguugaauga

SEQ ID NO: 2461877 - RNA, 19 nt, Artificial Sequence
  Description of Artificial Sequence: Synthetic oligonucleotide
  Antisense strand to SEQ ID NO: 2461876
ucauucaacccacuccaau

SEQ ID NO: 2461878 - RNA, 19 nt, Artificial Sequence
  Description of Artificial Sequence: Synthetic oligonucleotide
  Sense strand starting at position 3451 of SEQ ID NO: 1887301
uggaguggguugaaugaau

SEQ ID NO: 2461879 - RNA, 19 nt, Artificial Sequence
  Description of Artificial Sequence: Synthetic oligonucleotide
  Antisense strand to SEQ ID NO: 2461878
auucauucaacccacucca

SEQ ID NO: 2461880 - RNA, 19 nt, Artificial Sequence
  Description of Artificial Sequence: Synthetic oligonucleotide
  Sense strand starting at position 3487 of SEQ ID NO: 1887301
agauuuggguuguauaaua

SEQ ID NO: 2461881 - RNA, 19 nt, Artificial Sequence
  Description of Artificial Sequence: Synthetic oligonucleotide
  Antisense strand to SEQ ID NO: 2461880
uauuauacaacccaaaucu

SEQ ID NO: 2461882 - RNA, 19 nt, Artificial Sequence
  Description of Artificial Sequence: Synthetic oligonucleotide
  Sense strand starting at position 3832 of SEQ ID NO: 1887301
gagauaaaguuucugcuua

SEQ ID NO: 2461883 - RNA, 19 nt, Artificial Sequence
  Description of Artificial Sequence: Synthetic oligonucleotide
  Antisense strand to SEQ ID NO: 2461882
uaagcagaaacuuuaucuc

SEQ ID NO: 2461884 - RNA, 19 nt, Artificial Sequence
  Description of Artificial Sequence: Synthetic oligonucleotide
  Sense strand starting at position 3834 of SEQ ID NO: 1887301
gauaaaguuucugcuuaug

SEQ ID NO: 2461885 - RNA, 19 nt, Artificial Sequence
  Description of Artificial Sequence: Synthetic oligonucleotide
  Antisense strand to SEQ ID NO: 2461884
cauaagcagaaacuuuauc

SEQ ID NO: 2461886 - RNA, 19 nt, Artificial Sequence
  Description of Artificial Sequence: Synthetic oligonucleotide
  Sense strand starting at position 3857 of SEQ ID NO: 1887301
cguggacgacuuggagaau

SEQ ID NO: 2461887 - RNA, 19 nt, Artificial Sequence
  Description of Artificial Sequence: Synthetic oligonucleotide
  Antisense strand to SEQ ID NO: 2461886
auucuccaagucguccacg

SEQ ID NO: 2461888 - RNA, 19 nt, Artificial Sequence
  Description of Artificial Sequence: Synthetic oligonucleotide
  Sense strand starting at position 3895 of SEQ ID NO: 1887301
aagaaaugagguugcaguu

SEQ ID NO: 2461889 - RNA, 19 nt, Artificial Sequence
  Description of Artificial Sequence: Synthetic oligonucleotide
  Antisense strand to SEQ ID NO: 2461888
aacugcaaccucauuucuu

SEQ ID NO: 2461890 - RNA, 19 nt, Artificial Sequence
  Description of Artificial Sequence: Synthetic oligonucleotide
  Sense strand starting at position 3954 of SEQ ID NO: 1887301
aagauauuagagcauguuu

SEQ ID NO: 2461891 - RNA, 19 nt, Artificial Sequence
  Description of Artificial Sequence: Synthetic oligonucleotide
  Antisense strand to SEQ ID NO: 2461890
aaacaugcucuaauaucuu

SEQ ID NO: 2461892 - RNA, 19 nt, Artificial Sequence
  Description of Artificial Sequence: Synthetic oligonucleotide
  Sense strand starting at position 3956 of SEQ ID NO: 1887301
gauauuagagcauguuuac

SEQ ID NO: 2461893 - RNA, 19 nt, Artificial Sequence
  Description of Artificial Sequence: Synthetic oligonucleotide
  Antisense strand to SEQ ID NO: 2461892
guaaacaugcucuaauauc

SEQ ID NO: 2461894 - RNA, 19 nt, Artificial Sequence
  Description of Artificial Sequence: Synthetic oligonucleotide
  Sense strand starting at position 3965 of SEQ ID NO: 1887301
gcauguuuacgugcugaug

SEQ ID NO: 2461895 - RNA, 19 nt, Artificial Sequence
  Description of Artificial Sequence: Synthetic oligonucleotide
  Antisense strand to SEQ ID NO: 2461894
caucagcacguaaacaugc

SEQ ID NO: 2461896 - RNA, 19 nt, Artificial Sequence
  Description of Artificial Sequence: Synthetic oligonucleotide
  Sense strand starting at position 1 of SEQ ID NO: 1887302
ucgguucuuuccuugguaa

SEQ ID NO: 2461897 - RNA, 19 nt, Artificial Sequence
  Description of Artificial Sequence: Synthetic oligonucleotide
  Antisense strand to SEQ ID NO: 2461896
uuaccaaggaaagaaccga

SEQ ID NO: 2461898 - RNA, 19 nt, Artificial Sequence
  Description of Artificial Sequence: Synthetic oligonucleotide
  Sense strand starting at position 2 of SEQ ID NO: 1887302
cgguucuuuccuugguaaa

SEQ ID NO: 2461899 - RNA, 19 nt, Artificial Sequence
  Description of Artificial Sequence: Synthetic oligonucleotide
  Antisense strand to SEQ ID NO: 2461898
uuuaccaaggaaagaaccg

SEQ ID NO: 2461900 - RNA, 19 nt, Artificial Sequence
  Description of Artificial Sequence: Synthetic oligonucleotide
  Sense strand starting at position 22 of SEQ ID NO: 1887302
uguaguuacuaauaaagac

SEQ ID NO: 2461901 - RNA, 19 nt, Artificial Sequence
  Description of Artificial Sequence: Synthetic oligonucleotide
  Antisense strand to SEQ ID NO: 2461900
gucuuuauuaguaacuaca

SEQ ID NO: 2461902 - RNA, 19 nt, Artificial Sequence
  Description of Artificial Sequence: Synthetic oligonucleotide
  Sense strand starting at position 224 of SEQ ID NO: 1887302
cuuccaguuuaguuuggua

SEQ ID NO: 2461903 - RNA, 19 nt, Artificial Sequence
  Description of Artificial Sequence: Synthetic oligonucleotide
  Antisense strand to SEQ ID NO: 2461902
uaccaaacuaaacuggaag

SEQ ID NO: 2461904 - RNA, 19 nt, Artificial Sequence
  Description of Artificial Sequence: Synthetic oligonucleotide
  Sense strand starting at position 347 of SEQ ID NO: 1887302
guaguucagccuggaagca

SEQ ID NO: 2461905 - RNA, 19 nt, Artificial Sequence
  Description of Artificial Sequence: Synthetic oligonucleotide
  Antisense strand to SEQ ID NO: 2461904
ugcuuccaggcugaacuac

SEQ ID NO: 2461906 - RNA, 19 nt, Artificial Sequence
  Description of Artificial Sequence: Synthetic oligonucleotide
  Sense strand starting at position 386 of SEQ ID NO: 1887302
agcaacagcuuguccauaa

SEQ ID NO: 2461907 - RNA, 19 nt, Artificial Sequence
  Description of Artificial Sequence: Synthetic oligonucleotide
  Antisense strand to SEQ ID NO: 2461906
uuauggacaagcuguugcu

SEQ ID NO: 2461908 - RNA, 19 nt, Artificial Sequence
  Description of Artificial Sequence: Synthetic oligonucleotide
  Sense strand starting at position 439 of SEQ ID NO: 1887302
cuggaaggaauguguccua

SEQ ID NO: 2461909 - RNA, 19 nt, Artificial Sequence
  Description of Artificial Sequence: Synthetic oligonucleotide
  Antisense strand to SEQ ID NO: 2461908
uaggacacauuccuuccag

SEQ ID NO: 2461910 - RNA, 19 nt, Artificial Sequence
  Description of Artificial Sequence: Synthetic oligonucleotide
  Sense strand starting at position 442 of SEQ ID NO: 1887302
gaaggaauguguccuagga

SEQ ID NO: 2461911 - RNA, 19 nt, Artificial Sequence
  Description of Artificial Sequence: Synthetic oligonucleotide
  Antisense strand to SEQ ID NO: 2461910
uccuaggacacauuccuuc

SEQ ID NO: 2461912 - RNA, 19 nt, Artificial Sequence
  Description of Artificial Sequence: Synthetic oligonucleotide
  Sense strand starting at position 444 of SEQ ID NO: 1887302
aggaauguguccuaggaga

SEQ ID NO: 2461913 - RNA, 19 nt, Artificial Sequence
  Description of Artificial Sequence: Synthetic oligonucleotide
  Antisense strand to SEQ ID NO: 2461912
ucuccuaggacacauuccu

SEQ ID NO: 2461914 - RNA, 19 nt, Artificial Sequence
  Description of Artificial Sequence: Synthetic oligonucleotide
  Sense strand starting at position 446 of SEQ ID NO: 1887302
gaauguguccuaggagacu

SEQ ID NO: 2461915 - RNA, 19 nt, Artificial Sequence
  Description of Artificial Sequence: Synthetic oligonucleotide
  Antisense strand to SEQ ID NO: 2461914
agucuccuaggacacauuc

SEQ ID NO: 2461916 - RNA, 19 nt, Artificial Sequence
  Description of Artificial Sequence: Synthetic oligonucleotide
  Sense strand starting at position 819 of SEQ ID NO: 1887302
uaggccuaagcguguuaau

SEQ ID NO: 2461917 - RNA, 19 nt, Artificial Sequence
  Description of Artificial Sequence: Synthetic oligonucleotide
  Antisense strand to SEQ ID NO: 2461916
auuaacacgcuuaggccua

SEQ ID NO: 2461918 - RNA, 19 nt, Artificial Sequence
  Description of Artificial Sequence: Synthetic oligonucleotide
  Sense strand starting at position 828 of SEQ ID NO: 1887302
gcguguuaaugaccauaca

SEQ ID NO: 2461919 - RNA, 19 nt, Artificial Sequence
  Description of Artificial Sequence: Synthetic oligonucleotide
  Antisense strand to SEQ ID NO: 2461918
uguauggucauuaacacgc

SEQ ID NO: 2461920 - RNA, 19 nt, Artificial Sequence
  Description of Artificial Sequence: Synthetic oligonucleotide
  Sense strand starting at position 831 of SEQ ID NO: 1887302
uguuaaugaccauacacga

SEQ ID NO: 2461921 - RNA, 19 nt, Artificial Sequence
  Description of Artificial Sequence: Synthetic oligonucleotide
  Antisense strand to SEQ ID NO: 2461920
ucguguauggucauuaaca

SEQ ID NO: 2461922 - RNA, 19 nt, Artificial Sequence
  Description of Artificial Sequence: Synthetic oligonucleotide
  Sense strand starting at position 969 of SEQ ID NO: 1887302
auuggaagcucauagauug

SEQ ID NO: 2461923 - RNA, 19 nt, Artificial Sequence
  Description of Artificial Sequence: Synthetic oligonucleotide
  Antisense strand to SEQ ID NO: 2461922
caaucuaugagcuuccaau

SEQ ID NO: 2461924 - RNA, 19 nt, Artificial Sequence
  Description of Artificial Sequence: Synthetic oligonucleotide
  Sense strand starting at position 1095 of SEQ ID NO: 1887302
gcaaaugguucucuauccu

SEQ ID NO: 2461925 - RNA, 19 nt, Artificial Sequence
  Description of Artificial Sequence: Synthetic oligonucleotide
  Antisense strand to SEQ ID NO: 2461924
aggauagagaaccauuugc

SEQ ID NO: 2461926 - RNA, 19 nt, Artificial Sequence
  Description of Artificial Sequence: Synthetic oligonucleotide
  Sense strand starting at position 1202 of SEQ ID NO: 1887302
caagaauuggcuugggucu

SEQ ID NO: 2461927 - RNA, 19 nt, Artificial Sequence
  Description of Artificial Sequence: Synthetic oligonucleotide
  Antisense strand to SEQ ID NO: 2461926
agacccaagccaauucuug

SEQ ID NO: 2461928 - RNA, 19 nt, Artificial Sequence
  Description of Artificial Sequence: Synthetic oligonucleotide
  Sense strand starting at position 1214 of SEQ ID NO: 1887302
ugggucuguugggauauga

SEQ ID NO: 2461929 - RNA, 19 nt, Artificial Sequence
  Description of Artificial Sequence: Synthetic oligonucleotide
  Antisense strand to SEQ ID NO: 2461928
ucauaucccaacagaccca

SEQ ID NO: 2461930 - RNA, 19 nt, Artificial Sequence
  Description of Artificial Sequence: Synthetic oligonucleotide
  Sense strand starting at position 1218 of SEQ ID NO: 1887302
ucuguugggauaugaauau

SEQ ID NO: 2461931 - RNA, 19 nt, Artificial Sequence
  Description of Artificial Sequence: Synthetic oligonucleotide
  Antisense strand to SEQ ID NO: 2461930
auauucauaucccaacaga

SEQ ID NO: 2461932 - RNA, 19 nt, Artificial Sequence
  Description of Artificial Sequence: Synthetic oligonucleotide
  Sense strand starting at position 1225 of SEQ ID NO: 1887302
ggauaugaauauuaaccca

SEQ ID NO: 2461933 - RNA, 19 nt, Artificial Sequence
  Description of Artificial Sequence: Synthetic oligonucleotide
  Antisense strand to SEQ ID NO: 2461932
uggguuaauauucauaucc

SEQ ID NO: 2461934 - RNA, 19 nt, Artificial Sequence
  Description of Artificial Sequence: Synthetic oligonucleotide
  Sense strand starting at position 2462 of SEQ ID NO: 1887302
gcugguucccugcagggau

SEQ ID NO: 2461935 - RNA, 19 nt, Artificial Sequence
  Description of Artificial Sequence: Synthetic oligonucleotide
  Antisense strand to SEQ ID NO: 2461934
aucccugcagggaaccagc

SEQ ID NO: 2461936 - RNA, 19 nt, Artificial Sequence
  Description of Artificial Sequence: Synthetic oligonucleotide
  Sense strand starting at position 2565 of SEQ ID NO: 1887302
aggccaugucaugagcauu

SEQ ID NO: 2461937 - RNA, 19 nt, Artificial Sequence
  Description of Artificial Sequence: Synthetic oligonucleotide
  Antisense strand to SEQ ID NO: 2461936
aaugcucaugacauggccu

SEQ ID NO: 2461938 - RNA, 19 nt, Artificial Sequence
  Description of Artificial Sequence: Synthetic oligonucleotide
  Sense strand starting at position 2624 of SEQ ID NO: 1887302
gagccuuuggacugcauga

SEQ ID NO: 2461939 - RNA, 19 nt, Artificial Sequence
  Description of Artificial Sequence: Synthetic oligonucleotide
  Antisense strand to SEQ ID NO: 2461938
ucaugcaguccaaaggcuc

SEQ ID NO: 2461940 - RNA, 19 nt, Artificial Sequence
  Description of Artificial Sequence: Synthetic oligonucleotide
  Sense strand starting at position 2626 of SEQ ID NO: 1887302
gccuuuggacugcaugaau

SEQ ID NO: 2461941 - RNA, 19 nt, Artificial Sequence
  Description of Artificial Sequence: Synthetic oligonucleotide
  Antisense strand to SEQ ID NO: 2461940
auucaugcaguccaaaggc

SEQ ID NO: 2461942 - RNA, 19 nt, Artificial Sequence
  Description of Artificial Sequence: Synthetic oligonucleotide
  Sense strand starting at position 2741 of SEQ ID NO: 1887302
gguuguucccaucggaaga

SEQ ID NO: 2461943 - RNA, 19 nt, Artificial Sequence
  Description of Artificial Sequence: Synthetic oligonucleotide
  Antisense strand to SEQ ID NO: 2461942
ucuuccgaugggaacaacc

SEQ ID NO: 2461944 - RNA, 19 nt, Artificial Sequence
  Description of Artificial Sequence: Synthetic oligonucleotide
  Sense strand starting at position 2772 of SEQ ID NO: 1887302
cucugagaccuccgaggaa

SEQ ID NO: 2461945 - RNA, 19 nt, Artificial Sequence
  Description of Artificial Sequence: Synthetic oligonucleotide
  Antisense strand to SEQ ID NO: 2461944
uuccucggaggucucagag

SEQ ID NO: 2461946 - RNA, 19 nt, Artificial Sequence
  Description of Artificial Sequence: Synthetic oligonucleotide
  Sense strand starting at position 2871 of SEQ ID NO: 1887302
ggcaguaagagguguaacu

SEQ ID NO: 2461947 - RNA, 19 nt, Artificial Sequence
  Description of Artificial Sequence: Synthetic oligonucleotide
  Antisense strand to SEQ ID NO: 2461946
aguuacaccucuuacugcc

SEQ ID NO: 2461948 - RNA, 19 nt, Artificial Sequence
  Description of Artificial Sequence: Synthetic oligonucleotide
  Sense strand starting at position 2873 of SEQ ID NO: 1887302
caguaagagguguaacuuu

SEQ ID NO: 2461949 - RNA, 19 nt, Artificial Sequence
  Description of Artificial Sequence: Synthetic oligonucleotide
  Antisense strand to SEQ ID NO: 2461948
aaaguuacaccucuuacug

SEQ ID NO: 2461950 - RNA, 19 nt, Artificial Sequence
  Description of Artificial Sequence: Synthetic oligonucleotide
  Sense strand starting at position 2880 of SEQ ID NO: 1887302
agguguaacuuucugggau

SEQ ID NO: 2461951 - RNA, 19 nt, Artificial Sequence
  Description of Artificial Sequence: Synthetic oligonucleotide
  Antisense strand to SEQ ID NO: 2461950
aucccagaaaguuacaccu

SEQ ID NO: 2461952 - RNA, 19 nt, Artificial Sequence
  Description of Artificial Sequence: Synthetic oligonucleotide
  Sense strand starting at position 2881 of SEQ ID NO: 1887302
gguguaacuuucugggaug

SEQ ID NO: 2461953 - RNA, 19 nt, Artificial Sequence
  Description of Artificial Sequence: Synthetic oligonucleotide
  Antisense strand to SEQ ID NO: 2461952
caucccagaaaguuacacc

SEQ ID NO: 2461954 - RNA, 19 nt, Artificial Sequence
  Description of Artificial Sequence: Synthetic oligonucleotide
  Sense strand starting at position 2883 of SEQ ID NO: 1887302
uguaacuuucugggaugga

SEQ ID NO: 2461955 - RNA, 19 nt, Artificial Sequence
  Description of Artificial Sequence: Synthetic oligonucleotide
  Antisense strand to SEQ ID NO: 2461954
uccaucccagaaaguuaca

SEQ ID NO: 2461956 - RNA, 19 nt, Artificial Sequence
  Description of Artificial Sequence: Synthetic oligonucleotide
  Sense strand starting at position 2896 of SEQ ID NO: 1887302
gauggaggcuugcuaggau

SEQ ID NO: 2461957 - RNA, 19 nt, Artificial Sequence
  Description of Artificial Sequence: Synthetic oligonucleotide
  Antisense strand to SEQ ID NO: 2461956
auccuagcaagccuccauc

SEQ ID NO: 2461958 - RNA, 19 nt, Artificial Sequence
  Description of Artificial Sequence: Synthetic oligonucleotide
  Sense strand starting at position 2899 of SEQ ID NO: 1887302
ggaggcuugcuaggauauc

SEQ ID NO: 2461959 - RNA, 19 nt, Artificial Sequence
  Description of Artificial Sequence: Synthetic oligonucleotide
  Antisense strand to SEQ ID NO: 2461958
gauauccuagcaagccucc

SEQ ID NO: 2461960 - RNA, 19 nt, Artificial Sequence
  Description of Artificial Sequence: Synthetic oligonucleotide
  Sense strand starting at position 3017 of SEQ ID NO: 1887302
cugaccugaucucuuaaga

SEQ ID NO: 2461961 - RNA, 19 nt, Artificial Sequence
  Description of Artificial Sequence: Synthetic oligonucleotide
  Antisense strand to SEQ ID NO: 2461960
ucuuaagagaucaggucag

SEQ ID NO: 2461962 - RNA, 19 nt, Artificial Sequence
  Description of Artificial Sequence: Synthetic oligonucleotide
  Sense strand starting at position 3090 of SEQ ID NO: 1887302
gucaacaagccuugugacu

SEQ ID NO: 2461963 - RNA, 19 nt, Artificial Sequence
  Description of Artificial Sequence: Synthetic oligonucleotide
  Antisense strand to SEQ ID NO: 2461962
agucacaaggcuuguugac

SEQ ID NO: 2461964 - RNA, 19 nt, Artificial Sequence
  Description of Artificial Sequence: Synthetic oligonucleotide
  Sense strand starting at position 3097 of SEQ ID NO: 1887302
agccuugugacuugcagga

SEQ ID NO: 2461965 - RNA, 19 nt, Artificial Sequence
  Description of Artificial Sequence: Synthetic oligonucleotide
  Antisense strand to SEQ ID NO: 2461964
uccugcaagucacaaggcu

SEQ ID NO: 2461966 - RNA, 19 nt, Artificial Sequence
  Description of Artificial Sequence: Synthetic oligonucleotide
  Sense strand starting at position 3461 of SEQ ID NO: 1887302
ggguaacacugugagacua

SEQ ID NO: 2461967 - RNA, 19 nt, Artificial Sequence
  Description of Artificial Sequence: Synthetic oligonucleotide
  Antisense strand to SEQ ID NO: 2461966
uagucucacaguguuaccc

SEQ ID NO: 2461968 - RNA, 19 nt, Artificial Sequence
  Description of Artificial Sequence: Synthetic oligonucleotide
  Sense strand starting at position 3469 of SEQ ID NO: 1887302
cugugagacuacuaucucu

SEQ ID NO: 2461969 - RNA, 19 nt, Artificial Sequence
  Description of Artificial Sequence: Synthetic oligonucleotide
  Antisense strand to SEQ ID NO: 2461968
agagauaguagucucacag

SEQ ID NO: 2461970 - RNA, 19 nt, Artificial Sequence
  Description of Artificial Sequence: Synthetic oligonucleotide
  Sense strand starting at position 3668 of SEQ ID NO: 1887302
aaaucuguuuguguguaua

SEQ ID NO: 2461971 - RNA, 19 nt, Artificial Sequence
  Description of Artificial Sequence: Synthetic oligonucleotide
  Antisense strand to SEQ ID NO: 2461970
uauacacacaaacagauuu

SEQ ID NO: 2461972 - RNA, 19 nt, Artificial Sequence
  Description of Artificial Sequence: Synthetic oligonucleotide
  Sense strand starting at position 3871 of SEQ ID NO: 1887302
uagcuugcaucucuggaga

SEQ ID NO: 2461973 - RNA, 19 nt, Artificial Sequence
  Description of Artificial Sequence: Synthetic oligonucleotide
  Antisense strand to SEQ ID NO: 2461972
ucuccagagaugcaagcua

SEQ ID NO: 2461974 - RNA, 19 nt, Artificial Sequence
  Description of Artificial Sequence: Synthetic oligonucleotide
  Sense strand starting at position 3894 of SEQ ID NO: 1887302
aggacaugaucucauacau

SEQ ID NO: 2461975 - RNA, 19 nt, Artificial Sequence
  Description of Artificial Sequence: Synthetic oligonucleotide
  Antisense strand to SEQ ID NO: 2461974
auguaugagaucauguccu

SEQ ID NO: 2461976 - RNA, 19 nt, Artificial Sequence
  Description of Artificial Sequence: Synthetic oligonucleotide
  Sense strand starting at position 8 of SEQ ID NO: 1887303
agaauuacaucagcaagcu

SEQ ID NO: 2461977 - RNA, 19 nt, Artificial Sequence
  Description of Artificial Sequence: Synthetic oligonucleotide
  Antisense strand to SEQ ID NO: 2461976
agcuugcugauguaauucu

SEQ ID NO: 2461978 - RNA, 19 nt, Artificial Sequence
  Description of Artificial Sequence: Synthetic oligonucleotide
  Sense strand starting at position 174 of SEQ ID NO: 1887303
ccaagaauucucugguaau

SEQ ID NO: 2461979 - RNA, 19 nt, Artificial Sequence
  Description of Artificial Sequence: Synthetic oligonucleotide
  Antisense strand to SEQ ID NO: 2461978
auuaccagagaauucuugg

SEQ ID NO: 2461980 - RNA, 19 nt, Artificial Sequence
  Description of Artificial Sequence: Synthetic oligonucleotide
  Sense strand starting at position 177 of SEQ ID NO: 1887303
agaauucucugguaauaug

SEQ ID NO: 2461981 - RNA, 19 nt, Artificial Sequence
  Description of Artificial Sequence: Synthetic oligonucleotide
  Antisense strand to SEQ ID NO: 2461980
cauauuaccagagaauucu

SEQ ID NO: 2461982 - RNA, 19 nt, Artificial Sequence
  Description of Artificial Sequence: Synthetic oligonucleotide
  Sense strand starting at position 180 of SEQ ID NO: 1887303
auucucugguaauaugaaa

SEQ ID NO: 2461983 - RNA, 19 nt, Artificial Sequence
  Description of Artificial Sequence: Synthetic oligonucleotide
  Antisense strand to SEQ ID NO: 2461982
uuucauauuaccagagaau

SEQ ID NO: 2461984 - RNA, 19 nt, Artificial Sequence
  Description of Artificial Sequence: Synthetic oligonucleotide
  Sense strand starting at position 929 of SEQ ID NO: 1887303
guaauaagcuaggauaggu

SEQ ID NO: 2461985 - RNA, 19 nt, Artificial Sequence
  Description of Artificial Sequence: Synthetic oligonucleotide
  Antisense strand to SEQ ID NO: 2461984
accuauccuagcuuauuac

SEQ ID NO: 2461986 - RNA, 19 nt, Artificial Sequence
  Description of Artificial Sequence: Synthetic oligonucleotide
  Sense strand starting at position 938 of SEQ ID NO: 1887303
uaggauagguauugaaauc

SEQ ID NO: 2461987 - RNA, 19 nt, Artificial Sequence
  Description of Artificial Sequence: Synthetic oligonucleotide
  Antisense strand to SEQ ID NO: 2461986
gauuucaauaccuauccua

SEQ ID NO: 2461988 - RNA, 19 nt, Artificial Sequence
  Description of Artificial Sequence: Synthetic oligonucleotide
  Sense strand starting at position 1130 of SEQ ID NO: 1887303
cucccaggguuccaaugau

SEQ ID NO: 2461989 - RNA, 19 nt, Artificial Sequence
  Description of Artificial Sequence: Synthetic oligonucleotide
  Antisense strand to SEQ ID NO: 2461988
aucauuggaacccugggag

SEQ ID NO: 2461990 - RNA, 19 nt, Artificial Sequence
  Description of Artificial Sequence: Synthetic oligonucleotide
  Sense strand starting at position 1796 of SEQ ID NO: 1887303
uuucucaugcuguguagaa

SEQ ID NO: 2461991 - RNA, 19 nt, Artificial Sequence
  Description of Artificial Sequence: Synthetic oligonucleotide
  Antisense strand to SEQ ID NO: 2461990
uucuacacagcaugagaaa

SEQ ID NO: 2461992 - RNA, 19 nt, Artificial Sequence
  Description of Artificial Sequence: Synthetic oligonucleotide
  Sense strand starting at position 1797 of SEQ ID NO: 1887303
uucucaugcuguguagaag

SEQ ID NO: 2461993 - RNA, 19 nt, Artificial Sequence
  Description of Artificial Sequence: Synthetic oligonucleotide
  Antisense strand to SEQ ID NO: 2461992
cuucuacacagcaugagaa

SEQ ID NO: 2461994 - RNA, 19 nt, Artificial Sequence
  Description of Artificial Sequence: Synthetic oligonucleotide
  Sense strand starting at position 1798 of SEQ ID NO: 1887303
ucucaugcuguguagaaga

SEQ ID NO: 2461995 - RNA, 19 nt, Artificial Sequence
  Description of Artificial Sequence: Synthetic oligonucleotide
  Antisense strand to SEQ ID NO: 2461994
ucuucuacacagcaugaga

SEQ ID NO: 2461996 - RNA, 19 nt, Artificial Sequence
  Description of Artificial Sequence: Synthetic oligonucleotide
  Sense strand starting at position 1902 of SEQ ID NO: 1887303
aagugcaauguccagauga

SEQ ID NO: 2461997 - RNA, 19 nt, Artificial Sequence
  Description of Artificial Sequence: Synthetic oligonucleotide
  Antisense strand to SEQ ID NO: 2461996
ucaucuggacauugcacuu

SEQ ID NO: 2461998 - RNA, 19 nt, Artificial Sequence
  Description of Artificial Sequence: Synthetic oligonucleotide
  Sense strand starting at position 1904 of SEQ ID NO: 1887303
gugcaauguccagaugaau

SEQ ID NO: 2461999 - RNA, 19 nt, Artificial Sequence
  Description of Artificial Sequence: Synthetic oligonucleotide
  Antisense strand to SEQ ID NO: 2461998
auucaucuggacauugcac

SEQ ID NO: 2462000 - RNA, 19 nt, Artificial Sequence
  Description of Artificial Sequence: Synthetic oligonucleotide
  Sense strand starting at position 1917 of SEQ ID NO: 1887303
augaauauuuccuagguuu

SEQ ID NO: 2462001 - RNA, 19 nt, Artificial Sequence
  Description of Artificial Sequence: Synthetic oligonucleotide
  Antisense strand to SEQ ID NO: 2462000
aaaccuaggaaauauucau

SEQ ID NO: 2462002 - RNA, 19 nt, Artificial Sequence
  Description of Artificial Sequence: Synthetic oligonucleotide
  Sense strand starting at position 2731 of SEQ ID NO: 1887303
ucaucaucuucgccacaga

SEQ ID NO: 2462003 - RNA, 19 nt, Artificial Sequence
  Description of Artificial Sequence: Synthetic oligonucleotide
  Antisense strand to SEQ ID NO: 2462002
ucuguggcgaagaugauga

SEQ ID NO: 2462004 - RNA, 19 nt, Artificial Sequence
  Description of Artificial Sequence: Synthetic oligonucleotide
  Sense strand starting at position 2734 of SEQ ID NO: 1887303
ucaucuucgccacagaacu

SEQ ID NO: 2462005 - RNA, 19 nt, Artificial Sequence
  Description of Artificial Sequence: Synthetic oligonucleotide
  Antisense strand to SEQ ID NO: 2462004
aguucuguggcgaagauga

SEQ ID NO: 2462006 - RNA, 19 nt, Artificial Sequence
  Description of Artificial Sequence: Synthetic oligonucleotide
  Sense strand starting at position 2779 of SEQ ID NO: 1887303
ucugauaauuugugucugu

SEQ ID NO: 2462007 - RNA, 19 nt, Artificial Sequence
  Description of Artificial Sequence: Synthetic oligonucleotide
  Antisense strand to SEQ ID NO: 2462006
acagacacaaauuaucaga

SEQ ID NO: 2462008 - RNA, 19 nt, Artificial Sequence
  Description of Artificial Sequence: Synthetic oligonucleotide
  Sense strand starting at position 2780 of SEQ ID NO: 1887303
cugauaauuugugucuguu

SEQ ID NO: 2462009 - RNA, 19 nt, Artificial Sequence
  Description of Artificial Sequence: Synthetic oligonucleotide
  Antisense strand to SEQ ID NO: 2462008
aacagacacaaauuaucag

SEQ ID NO: 2462010 - RNA, 19 nt, Artificial Sequence
  Description of Artificial Sequence: Synthetic oligonucleotide
  Sense strand starting at position 2788 of SEQ ID NO: 1887303
uugugucuguuccuccuua

SEQ ID NO: 2462011 - RNA, 19 nt, Artificial Sequence
  Description of Artificial Sequence: Synthetic oligonucleotide
  Antisense strand to SEQ ID NO: 2462010
uaaggaggaacagacacaa

SEQ ID NO: 2462012 - RNA, 19 nt, Artificial Sequence
  Description of Artificial Sequence: Synthetic oligonucleotide
  Sense strand starting at position 2789 of SEQ ID NO: 1887303
ugugucuguuccuccuuaa

SEQ ID NO: 2462013 - RNA, 19 nt, Artificial Sequence
  Description of Artificial Sequence: Synthetic oligonucleotide
  Antisense strand to SEQ ID NO: 2462012
uuaaggaggaacagacaca

SEQ ID NO: 2462014 - RNA, 19 nt, Artificial Sequence
  Description of Artificial Sequence: Synthetic oligonucleotide
  Sense strand starting at position 2792 of SEQ ID NO: 1887303
gucuguuccuccuuaaaug

SEQ ID NO: 2462015 - RNA, 19 nt, Artificial Sequence
  Description of Artificial Sequence: Synthetic oligonucleotide
  Antisense strand to SEQ ID NO: 2462014
cauuuaaggaggaacagac

SEQ ID NO: 2462016 - RNA, 19 nt, Artificial Sequence
  Description of Artificial Sequence: Synthetic oligonucleotide
  Sense strand starting at position 2803 of SEQ ID NO: 1887303
cuuaaauggcucuacguua

SEQ ID NO: 2462017 - RNA, 19 nt, Artificial Sequence
  Description of Artificial Sequence: Synthetic oligonucleotide
  Antisense strand to SEQ ID NO: 2462016
uaacguagagccauuuaag

SEQ ID NO: 2462018 - RNA, 19 nt, Artificial Sequence
  Description of Artificial Sequence: Synthetic oligonucleotide
  Sense strand starting at position 2811 of SEQ ID NO: 1887303
gcucuacguuaacucuuau

SEQ ID NO: 2462019 - RNA, 19 nt, Artificial Sequence
  Description of Artificial Sequence: Synthetic oligonucleotide
  Antisense strand to SEQ ID NO: 2462018
auaagaguuaacguagagc

SEQ ID NO: 2462020 - RNA, 19 nt, Artificial Sequence
  Description of Artificial Sequence: Synthetic oligonucleotide
  Sense strand starting at position 2817 of SEQ ID NO: 1887303
cguuaacucuuauuagaaa

SEQ ID NO: 2462021 - RNA, 19 nt, Artificial Sequence
  Description of Artificial Sequence: Synthetic oligonucleotide
  Antisense strand to SEQ ID NO: 2462020
uuucuaauaagaguuaacg

SEQ ID NO: 2462022 - RNA, 19 nt, Artificial Sequence
  Description of Artificial Sequence: Synthetic oligonucleotide
  Sense strand starting at position 3359 of SEQ ID NO: 1887303
aguaaugacucuucgggua

SEQ ID NO: 2462023 - RNA, 19 nt, Artificial Sequence
  Description of Artificial Sequence: Synthetic oligonucleotide
  Antisense strand to SEQ ID NO: 2462022
uacccgaagagucauuacu

SEQ ID NO: 2462024 - RNA, 19 nt, Artificial Sequence
  Description of Artificial Sequence: Synthetic oligonucleotide
  Sense strand starting at position 3361 of SEQ ID NO: 1887303
uaaugacucuucggguaga

SEQ ID NO: 2462025 - RNA, 19 nt, Artificial Sequence
  Description of Artificial Sequence: Synthetic oligonucleotide
  Antisense strand to SEQ ID NO: 2462024
ucuacccgaagagucauua

SEQ ID NO: 2462026 - RNA, 19 nt, Artificial Sequence
  Description of Artificial Sequence: Synthetic oligonucleotide
  Sense strand starting at position 26 of SEQ ID NO: 1887304
cacuuugauccuggugacu

SEQ ID NO: 2462027 - RNA, 19 nt, Artificial Sequence
  Description of Artificial Sequence: Synthetic oligonucleotide
  Antisense strand to SEQ ID NO: 2462026
agucaccaggaucaaagug

SEQ ID NO: 2462028 - RNA, 19 nt, Artificial Sequence
  Description of Artificial Sequence: Synthetic oligonucleotide
  Sense strand starting at position 37 of SEQ ID NO: 1887304
uggugacuccaugggauau

SEQ ID NO: 2462029 - RNA, 19 nt, Artificial Sequence
  Description of Artificial Sequence: Synthetic oligonucleotide
  Antisense strand to SEQ ID NO: 2462028
auaucccauggagucacca

SEQ ID NO: 2462030 - RNA, 19 nt, Artificial Sequence
  Description of Artificial Sequence: Synthetic oligonucleotide
  Sense strand starting at position 38 of SEQ ID NO: 1887304
ggugacuccaugggauaua

SEQ ID NO: 2462031 - RNA, 19 nt, Artificial Sequence
  Description of Artificial Sequence: Synthetic oligonucleotide
  Antisense strand to SEQ ID NO: 2462030
uauaucccauggagucacc

SEQ ID NO: 2462032 - RNA, 19 nt, Artificial Sequence
  Description of Artificial Sequence: Synthetic oligonucleotide
  Sense strand starting at position 258 of SEQ ID NO: 1887304
agaugacagaaauguaguu

SEQ ID NO: 2462033 - RNA, 19 nt, Artificial Sequence
  Description of Artificial Sequence: Synthetic oligonucleotide
  Antisense strand to SEQ ID NO: 2462032
aacuacauuucugucaucu

SEQ ID NO: 2462034 - RNA, 19 nt, Artificial Sequence
  Description of Artificial Sequence: Synthetic oligonucleotide
  Sense strand starting at position 292 of SEQ ID NO: 1887304
acuaaugucucagcaagcu

SEQ ID NO: 2462035 - RNA, 19 nt, Artificial Sequence
  Description of Artificial Sequence: Synthetic oligonucleotide
  Antisense strand to SEQ ID NO: 2462034
agcuugcugagacauuagu

SEQ ID NO: 2462036 - RNA, 19 nt, Artificial Sequence
  Description of Artificial Sequence: Synthetic oligonucleotide
  Sense strand starting at position 305 of SEQ ID NO: 1887304
caagcuagugcgugauaga

SEQ ID NO: 2462037 - RNA, 19 nt, Artificial Sequence
  Description of Artificial Sequence: Synthetic oligonucleotide
  Antisense strand to SEQ ID NO: 2462036
ucuaucacgcacuagcuug

SEQ ID NO: 2462038 - RNA, 19 nt, Artificial Sequence
  Description of Artificial Sequence: Synthetic oligonucleotide
  Sense strand starting at position 306 of SEQ ID NO: 1887304
aagcuagugcgugauagau

SEQ ID NO: 2462039 - RNA, 19 nt, Artificial Sequence
  Description of Artificial Sequence: Synthetic oligonucleotide
  Antisense strand to SEQ ID NO: 2462038
aucuaucacgcacuagcuu

SEQ ID NO: 2462040 - RNA, 19 nt, Artificial Sequence
  Description of Artificial Sequence: Synthetic oligonucleotide
  Sense strand starting at position 308 of SEQ ID NO: 1887304
gcuagugcgugauagauau

SEQ ID NO: 2462041 - RNA, 19 nt, Artificial Sequence
  Description of Artificial Sequence: Synthetic oligonucleotide
  Antisense strand to SEQ ID NO: 2462040
auaucuaucacgcacuagc

SEQ ID NO: 2462042 - RNA, 19 nt, Artificial Sequence
  Description of Artificial Sequence: Synthetic oligonucleotide
  Sense strand starting at position 314 of SEQ ID NO: 1887304
gcgugauagauauggacuc

SEQ ID NO: 2462043 - RNA, 19 nt, Artificial Sequence
  Description of Artificial Sequence: Synthetic oligonucleotide
  Antisense strand to SEQ ID NO: 2462042
gaguccauaucuaucacgc

SEQ ID NO: 2462044 - RNA, 19 nt, Artificial Sequence
  Description of Artificial Sequence: Synthetic oligonucleotide
  Sense strand starting at position 333 of SEQ ID NO: 1887304
ccagaucuuuccguccaca

SEQ ID NO: 2462045 - RNA, 19 nt, Artificial Sequence
  Description of Artificial Sequence: Synthetic oligonucleotide
  Antisense strand to SEQ ID NO: 2462044
uguggacggaaagaucugg

SEQ ID NO: 2462046 - RNA, 19 nt, Artificial Sequence
  Description of Artificial Sequence: Synthetic oligonucleotide
  Sense strand starting at position 345 of SEQ ID NO: 1887304
guccacagagccuauaaau

SEQ ID NO: 2462047 - RNA, 19 nt, Artificial Sequence
  Description of Artificial Sequence: Synthetic oligonucleotide
  Antisense strand to SEQ ID NO: 2462046
auuuauaggcucuguggac

SEQ ID NO: 2462048 - RNA, 19 nt, Artificial Sequence
  Description of Artificial Sequence: Synthetic oligonucleotide
  Sense strand starting at position 426 of SEQ ID NO: 1887304
aggcaaucauggcagaauu

SEQ ID NO: 2462049 - RNA, 19 nt, Artificial Sequence
  Description of Artificial Sequence: Synthetic oligonucleotide
  Antisense strand to SEQ ID NO: 2462048
aauucugccaugauugccu

SEQ ID NO: 2462050 - RNA, 19 nt, Artificial Sequence
  Description of Artificial Sequence: Synthetic oligonucleotide
  Sense strand starting at position 2343 of SEQ ID NO: 1887304
ggaagaaugcucuggugag

SEQ ID NO: 2462051 - RNA, 19 nt, Artificial Sequence
  Description of Artificial Sequence: Synthetic oligonucleotide
  Antisense strand to SEQ ID NO: 2462050
cucaccagagcauucuucc

SEQ ID NO: 2462052 - RNA, 19 nt, Artificial Sequence
  Description of Artificial Sequence: Synthetic oligonucleotide
  Sense strand starting at position 2347 of SEQ ID NO: 1887304
gaaugcucuggugagauag

SEQ ID NO: 2462053 - RNA, 19 nt, Artificial Sequence
  Description of Artificial Sequence: Synthetic oligonucleotide
  Antisense strand to SEQ ID NO: 2462052
cuaucucaccagagcauuc

SEQ ID NO: 2462054 - RNA, 19 nt, Artificial Sequence
  Description of Artificial Sequence: Synthetic oligonucleotide
  Sense strand starting at position 2423 of SEQ ID NO: 1887304
ugggcucugugggaacuau

SEQ ID NO: 2462055 - RNA, 19 nt, Artificial Sequence
  Description of Artificial Sequence: Synthetic oligonucleotide
  Antisense strand to SEQ ID NO: 2462054
auaguucccacagagccca

SEQ ID NO: 2462056 - RNA, 19 nt, Artificial Sequence
  Description of Artificial Sequence: Synthetic oligonucleotide
  Sense strand starting at position 2434 of SEQ ID NO: 1887304
ggaacuaugaucuggagcu

SEQ ID NO: 2462057 - RNA, 19 nt, Artificial Sequence
  Description of Artificial Sequence: Synthetic oligonucleotide
  Antisense strand to SEQ ID NO: 2462056
agcuccagaucauaguucc

SEQ ID NO: 2462058 - RNA, 19 nt, Artificial Sequence
  Description of Artificial Sequence: Synthetic oligonucleotide
  Sense strand starting at position 2435 of SEQ ID NO: 1887304
gaacuaugaucuggagcua

SEQ ID NO: 2462059 - RNA, 19 nt, Artificial Sequence
  Description of Artificial Sequence: Synthetic oligonucleotide
  Antisense strand to SEQ ID NO: 2462058
uagcuccagaucauaguuc

SEQ ID NO: 2462060 - RNA, 19 nt, Artificial Sequence
  Description of Artificial Sequence: Synthetic oligonucleotide
  Sense strand starting at position 3081 of SEQ ID NO: 1887304
ggguuucggguuugguaaa

SEQ ID NO: 2462061 - RNA, 19 nt, Artificial Sequence
  Description of Artificial Sequence: Synthetic oligonucleotide
  Antisense strand to SEQ ID NO: 2462060
uuuaccaaacccgaaaccc

SEQ ID NO: 2462062 - RNA, 19 nt, Artificial Sequence
  Description of Artificial Sequence: Synthetic oligonucleotide
  Sense strand starting at position 3351 of SEQ ID NO: 1887304
ggugcacccucaguguaau

SEQ ID NO: 2462063 - RNA, 19 nt, Artificial Sequence
  Description of Artificial Sequence: Synthetic oligonucleotide
  Antisense strand to SEQ ID NO: 2462062
auuacacugagggugcacc

SEQ ID NO: 2462064 - RNA, 19 nt, Artificial Sequence
  Description of Artificial Sequence: Synthetic oligonucleotide
  Sense strand starting at position 3363 of SEQ ID NO: 1887304
guguaaugggcaggucuca

SEQ ID NO: 2462065 - RNA, 19 nt, Artificial Sequence
  Description of Artificial Sequence: Synthetic oligonucleotide
  Antisense strand to SEQ ID NO: 2462064
ugagaccugcccauuacac

SEQ ID NO: 2462066 - RNA, 19 nt, Artificial Sequence
  Description of Artificial Sequence: Synthetic oligonucleotide
  Sense strand starting at position 3618 of SEQ ID NO: 1887304
acugauccaucucagucua

SEQ ID NO: 2462067 - RNA, 19 nt, Artificial Sequence
  Description of Artificial Sequence: Synthetic oligonucleotide
  Antisense strand to SEQ ID NO: 2462066
uagacugagauggaucagu

SEQ ID NO: 2462068 - RNA, 19 nt, Artificial Sequence
  Description of Artificial Sequence: Synthetic oligonucleotide
  Sense strand starting at position 3966 of SEQ ID NO: 1887304
guggccagugccugacaau

SEQ ID NO: 2462069 - RNA, 19 nt, Artificial Sequence
  Description of Artificial Sequence: Synthetic oligonucleotide
  Antisense strand to SEQ ID NO: 2462068
auugucaggcacuggccac

SEQ ID NO: 2462070 - RNA, 19 nt, Artificial Sequence
  Description of Artificial Sequence: Synthetic oligonucleotide
  Sense strand starting at position 3967 of SEQ ID NO: 1887304
uggccagugccugacaaua

SEQ ID NO: 2462071 - RNA, 19 nt, Artificial Sequence
  Description of Artificial Sequence: Synthetic oligonucleotide
  Antisense strand to SEQ ID NO: 2462070
uauugucaggcacuggcca

SEQ ID NO: 2462072 - RNA, 19 nt, Artificial Sequence
  Description of Artificial Sequence: Synthetic oligonucleotide
  Sense strand starting at position 3969 of SEQ ID NO: 1887304
gccagugccugacaauagu

SEQ ID NO: 2462073 - RNA, 19 nt, Artificial Sequence
  Description of Artificial Sequence: Synthetic oligonucleotide
  Antisense strand to SEQ ID NO: 2462072
acuauugucaggcacuggc

SEQ ID NO: 2462074 - RNA, 19 nt, Artificial Sequence
  Description of Artificial Sequence: Synthetic oligonucleotide
  Sense strand starting at position 99 of SEQ ID NO: 1887305
gaccuugggccugaaucuu

SEQ ID NO: 2462075 - RNA, 19 nt, Artificial Sequence
  Description of Artificial Sequence: Synthetic oligonucleotide
  Antisense strand to SEQ ID NO: 2462074
aagauucaggcccaagguc

SEQ ID NO: 2462076 - RNA, 19 nt, Artificial Sequence
  Description of Artificial Sequence: Synthetic oligonucleotide
  Sense strand starting at position 244 of SEQ ID NO: 1887305
cugacucagcaguagaaau

SEQ ID NO: 2462077 - RNA, 19 nt, Artificial Sequence
  Description of Artificial Sequence: Synthetic oligonucleotide
  Antisense strand to SEQ ID NO: 2462076
auuucuacugcugagucag

SEQ ID NO: 2462078 - RNA, 19 nt, Artificial Sequence
  Description of Artificial Sequence: Synthetic oligonucleotide
  Sense strand starting at position 379 of SEQ ID NO: 1887305
ccgugaaauccugaucaca

SEQ ID NO: 2462079 - RNA, 19 nt, Artificial Sequence
  Description of Artificial Sequence: Synthetic oligonucleotide
  Antisense strand to SEQ ID NO: 2462078
ugugaucaggauuucacgg

SEQ ID NO: 2462080 - RNA, 19 nt, Artificial Sequence
  Description of Artificial Sequence: Synthetic oligonucleotide
  Sense strand starting at position 381 of SEQ ID NO: 1887305
gugaaauccugaucacauu

SEQ ID NO: 2462081 - RNA, 19 nt, Artificial Sequence
  Description of Artificial Sequence: Synthetic oligonucleotide
  Antisense strand to SEQ ID NO: 2462080
aaugugaucaggauuucac

SEQ ID NO: 2462082 - RNA, 19 nt, Artificial Sequence
  Description of Artificial Sequence: Synthetic oligonucleotide
  Sense strand starting at position 427 of SEQ ID NO: 1887305
gcaaauuaguaagccugau

SEQ ID NO: 2462083 - RNA, 19 nt, Artificial Sequence
  Description of Artificial Sequence: Synthetic oligonucleotide
  Antisense strand to SEQ ID NO: 2462082
aucaggcuuacuaauuugc

SEQ ID NO: 2462084 - RNA, 19 nt, Artificial Sequence
  Description of Artificial Sequence: Synthetic oligonucleotide
  Sense strand starting at position 431 of SEQ ID NO: 1887305
auuaguaagccugauguuc

SEQ ID NO: 2462085 - RNA, 19 nt, Artificial Sequence
  Description of Artificial Sequence: Synthetic oligonucleotide
  Antisense strand to SEQ ID NO: 2462084
gaacaucaggcuuacuaau

SEQ ID NO: 2462086 - RNA, 19 nt, Artificial Sequence
  Description of Artificial Sequence: Synthetic oligonucleotide
  Sense strand starting at position 505 of SEQ ID NO: 1887305
uuagcuacuggucaaauga

SEQ ID NO: 2462087 - RNA, 19 nt, Artificial Sequence
  Description of Artificial Sequence: Synthetic oligonucleotide
  Antisense strand to SEQ ID NO: 2462086
ucauuugaccaguagcuaa

SEQ ID NO: 2462088 - RNA, 19 nt, Artificial Sequence
  Description of Artificial Sequence: Synthetic oligonucleotide
  Sense strand starting at position 528 of SEQ ID NO: 1887305
uacucagagcccuagguuu

SEQ ID NO: 2462089 - RNA, 19 nt, Artificial Sequence
  Description of Artificial Sequence: Synthetic oligonucleotide
  Antisense strand to SEQ ID NO: 2462088
aaaccuagggcucugagua

SEQ ID NO: 2462090 - RNA, 19 nt, Artificial Sequence
  Description of Artificial Sequence: Synthetic oligonucleotide
  Sense strand starting at position 539 of SEQ ID NO: 1887305
cuagguuucuaaucuuuag

SEQ ID NO: 2462091 - RNA, 19 nt, Artificial Sequence
  Description of Artificial Sequence: Synthetic oligonucleotide
  Antisense strand to SEQ ID NO: 2462090
cuaaagauuagaaaccuag

SEQ ID NO: 2462092 - RNA, 19 nt, Artificial Sequence
  Description of Artificial Sequence: Synthetic oligonucleotide
  Sense strand starting at position 830 of SEQ ID NO: 1887305
uuaguuaaugaauggaacu

SEQ ID NO: 2462093 - RNA, 19 nt, Artificial Sequence
  Description of Artificial Sequence: Synthetic oligonucleotide
  Antisense strand to SEQ ID NO: 2462092
aguuccauucauuaacuaa

SEQ ID NO: 2462094 - RNA, 19 nt, Artificial Sequence
  Description of Artificial Sequence: Synthetic oligonucleotide
  Sense strand starting at position 1214 of SEQ ID NO: 1887305
ugcuucuggccugagagaa

SEQ ID NO: 2462095 - RNA, 19 nt, Artificial Sequence
  Description of Artificial Sequence: Synthetic oligonucleotide
  Antisense strand to SEQ ID NO: 2462094
uucucucaggccagaagca

SEQ ID NO: 2462096 - RNA, 19 nt, Artificial Sequence
  Description of Artificial Sequence: Synthetic oligonucleotide
  Sense strand starting at position 1227 of SEQ ID NO: 1887305
agagaaaggugucugcauu

SEQ ID NO: 2462097 - RNA, 19 nt, Artificial Sequence
  Description of Artificial Sequence: Synthetic oligonucleotide
  Antisense strand to SEQ ID NO: 2462096
aaugcagacaccuuucucu

SEQ ID NO: 2462098 - RNA, 19 nt, Artificial Sequence
  Description of Artificial Sequence: Synthetic oligonucleotide
  Sense strand starting at position 1348 of SEQ ID NO: 1887305
gugacuaggaugugaagaa

SEQ ID NO: 2462099 - RNA, 19 nt, Artificial Sequence
  Description of Artificial Sequence: Synthetic oligonucleotide
  Antisense strand to SEQ ID NO: 2462098
uucuucacauccuagucac

SEQ ID NO: 2462100 - RNA, 19 nt, Artificial Sequence
  Description of Artificial Sequence: Synthetic oligonucleotide
  Sense strand starting at position 1394 of SEQ ID NO: 1887305
gcucuugcuccguuuaacu

SEQ ID NO: 2462101 - RNA, 19 nt, Artificial Sequence
  Description of Artificial Sequence: Synthetic oligonucleotide
  Antisense strand to SEQ ID NO: 2462100
aguuaaacggagcaagagc

SEQ ID NO: 2462102 - RNA, 19 nt, Artificial Sequence
  Description of Artificial Sequence: Synthetic oligonucleotide
  Sense strand starting at position 1487 of SEQ ID NO: 1887305
gguuuaacccugcagcuaa

SEQ ID NO: 2462103 - RNA, 19 nt, Artificial Sequence
  Description of Artificial Sequence: Synthetic oligonucleotide
  Antisense strand to SEQ ID NO: 2462102
uuagcugcaggguuaaacc

SEQ ID NO: 2462104 - RNA, 19 nt, Artificial Sequence
  Description of Artificial Sequence: Synthetic oligonucleotide
  Sense strand starting at position 1789 of SEQ ID NO: 1887305
gggagaugcuggcuuuaaa

SEQ ID NO: 2462105 - RNA, 19 nt, Artificial Sequence
  Description of Artificial Sequence: Synthetic oligonucleotide
  Antisense strand to SEQ ID NO: 2462104
uuuaaagccagcaucuccc

SEQ ID NO: 2462106 - RNA, 19 nt, Artificial Sequence
  Description of Artificial Sequence: Synthetic oligonucleotide
  Sense strand starting at position 2001 of SEQ ID NO: 1887305
uguggauugccugcgcauu

SEQ ID NO: 2462107 - RNA, 19 nt, Artificial Sequence
  Description of Artificial Sequence: Synthetic oligonucleotide
  Antisense strand to SEQ ID NO: 2462106
aaugcgcaggcaauccaca

SEQ ID NO: 2462108 - RNA, 19 nt, Artificial Sequence
  Description of Artificial Sequence: Synthetic oligonucleotide
  Sense strand starting at position 2028 of SEQ ID NO: 1887305
guaguucuaacagaggagu

SEQ ID NO: 2462109 - RNA, 19 nt, Artificial Sequence
  Description of Artificial Sequence: Synthetic oligonucleotide
  Antisense strand to SEQ ID NO: 2462108
acuccucuguuagaacuac

SEQ ID NO: 2462110 - RNA, 19 nt, Artificial Sequence
  Description of Artificial Sequence: Synthetic oligonucleotide
  Sense strand starting at position 2360 of SEQ ID NO: 1887305
cugcuaucaguugaauaga

SEQ ID NO: 2462111 - RNA, 19 nt, Artificial Sequence
  Description of Artificial Sequence: Synthetic oligonucleotide
  Antisense strand to SEQ ID NO: 2462110
ucuauucaacugauagcag

SEQ ID NO: 2462112 - RNA, 19 nt, Artificial Sequence
  Description of Artificial Sequence: Synthetic oligonucleotide
  Sense strand starting at position 2422 of SEQ ID NO: 1887305
uuaggaagugucuggaaua

SEQ ID NO: 2462113 - RNA, 19 nt, Artificial Sequence
  Description of Artificial Sequence: Synthetic oligonucleotide
  Antisense strand to SEQ ID NO: 2462112
uauuccagacacuuccuaa

SEQ ID NO: 2462114 - RNA, 19 nt, Artificial Sequence
  Description of Artificial Sequence: Synthetic oligonucleotide
  Sense strand starting at position 2460 of SEQ ID NO: 1887305
gugucuuaugacuacagga

SEQ ID NO: 2462115 - RNA, 19 nt, Artificial Sequence
  Description of Artificial Sequence: Synthetic oligonucleotide
  Antisense strand to SEQ ID NO: 2462114
uccuguagucauaagacac

SEQ ID NO: 2462116 - RNA, 19 nt, Artificial Sequence
  Description of Artificial Sequence: Synthetic oligonucleotide
  Sense strand starting at position 2571 of SEQ ID NO: 1887305
gcgagucaucuugugguuu

SEQ ID NO: 2462117 - RNA, 19 nt, Artificial Sequence
  Description of Artificial Sequence: Synthetic oligonucleotide
  Antisense strand to SEQ ID NO: 2462116
aaaccacaagaugacucgc

SEQ ID NO: 2462118 - RNA, 19 nt, Artificial Sequence
  Description of Artificial Sequence: Synthetic oligonucleotide
  Sense strand starting at position 2583 of SEQ ID NO: 1887305
gugguuuccguggaggaug

SEQ ID NO: 2462119 - RNA, 19 nt, Artificial Sequence
  Description of Artificial Sequence: Synthetic oligonucleotide
  Antisense strand to SEQ ID NO: 2462118
cauccuccacggaaaccac

SEQ ID NO: 2462120 - RNA, 19 nt, Artificial Sequence
  Description of Artificial Sequence: Synthetic oligonucleotide
  Sense strand starting at position 2879 of SEQ ID NO: 1887305
acuuaagaguuccugcaga

SEQ ID NO: 2462121 - RNA, 19 nt, Artificial Sequence
  Description of Artificial Sequence: Synthetic oligonucleotide
  Antisense strand to SEQ ID NO: 2462120
ucugcaggaacucuuaagu

SEQ ID NO: 2462122 - RNA, 19 nt, Artificial Sequence
  Description of Artificial Sequence: Synthetic oligonucleotide
  Sense strand starting at position 2916 of SEQ ID NO: 1887305
gaaggagucccucguggaa

SEQ ID NO: 2462123 - RNA, 19 nt, Artificial Sequence
  Description of Artificial Sequence: Synthetic oligonucleotide
  Antisense strand to SEQ ID NO: 2462122
uuccacgagggacuccuuc

SEQ ID NO: 2462124 - RNA, 19 nt, Artificial Sequence
  Description of Artificial Sequence: Synthetic oligonucleotide
  Sense strand starting at position 2956 of SEQ ID NO: 1887305
agguguuuacuagagagug

SEQ ID NO: 2462125 - RNA, 19 nt, Artificial Sequence
  Description of Artificial Sequence: Synthetic oligonucleotide
  Antisense strand to SEQ ID NO: 2462124
cacucucuaguaaacaccu

SEQ ID NO: 2462126 - RNA, 19 nt, Artificial Sequence
  Description of Artificial Sequence: Synthetic oligonucleotide
  Sense strand starting at position 2958 of SEQ ID NO: 1887305
guguuuacuagagaguguu

SEQ ID NO: 2462127 - RNA, 19 nt, Artificial Sequence
  Description of Artificial Sequence: Synthetic oligonucleotide
  Antisense strand to SEQ ID NO: 2462126
aacacucucuaguaaacac

SEQ ID NO: 2462128 - RNA, 19 nt, Artificial Sequence
  Description of Artificial Sequence: Synthetic oligonucleotide
  Sense strand starting at position 3000 of SEQ ID NO: 1887305
aaacaaaggugguuugagu

SEQ ID NO: 2462129 - RNA, 19 nt, Artificial Sequence
  Description of Artificial Sequence: Synthetic oligonucleotide
  Antisense strand to SEQ ID NO: 2462128
acucaaaccaccuuuguuu

SEQ ID NO: 2462130 - RNA, 19 nt, Artificial Sequence
  Description of Artificial Sequence: Synthetic oligonucleotide
  Sense strand starting at position 3007 of SEQ ID NO: 1887305
ggugguuugaguuaauggu

SEQ ID NO: 2462131 - RNA, 19 nt, Artificial Sequence
  Description of Artificial Sequence: Synthetic oligonucleotide
  Antisense strand to SEQ ID NO: 2462130
accauuaacucaaaccacc

SEQ ID NO: 2462132 - RNA, 19 nt, Artificial Sequence
  Description of Artificial Sequence: Synthetic oligonucleotide
  Sense strand starting at position 3011 of SEQ ID NO: 1887305
guuugaguuaauggucaga

SEQ ID NO: 2462133 - RNA, 19 nt, Artificial Sequence
  Description of Artificial Sequence: Synthetic oligonucleotide
  Antisense strand to SEQ ID NO: 2462132
ucugaccauuaacucaaac

SEQ ID NO: 2462134 - RNA, 19 nt, Artificial Sequence
  Description of Artificial Sequence: Synthetic oligonucleotide
  Sense strand starting at position 3013 of SEQ ID NO: 1887305
uugaguuaauggucagaug

SEQ ID NO: 2462135 - RNA, 19 nt, Artificial Sequence
  Description of Artificial Sequence: Synthetic oligonucleotide
  Antisense strand to SEQ ID NO: 2462134
caucugaccauuaacucaa

SEQ ID NO: 2462136 - RNA, 19 nt, Artificial Sequence
  Description of Artificial Sequence: Synthetic oligonucleotide
  Sense strand starting at position 3040 of SEQ ID NO: 1887305
agcccugaguacucuaacu

SEQ ID NO: 2462137 - RNA, 19 nt, Artificial Sequence
  Description of Artificial Sequence: Synthetic oligonucleotide
  Antisense strand to SEQ ID NO: 2462136
aguuagaguacucagggcu

SEQ ID NO: 2462138 - RNA, 19 nt, Artificial Sequence
  Description of Artificial Sequence: Synthetic oligonucleotide
  Sense strand starting at position 3100 of SEQ ID NO: 1887305
ugcucugagccuuaauauu

SEQ ID NO: 2462139 - RNA, 19 nt, Artificial Sequence
  Description of Artificial Sequence: Synthetic oligonucleotide
  Antisense strand to SEQ ID NO: 2462138
aauauuaaggcucagagca

SEQ ID NO: 2462140 - RNA, 19 nt, Artificial Sequence
  Description of Artificial Sequence: Synthetic oligonucleotide
  Sense strand starting at position 3605 of SEQ ID NO: 1887305
ggauuugcucucuggugau

SEQ ID NO: 2462141 - RNA, 19 nt, Artificial Sequence
  Description of Artificial Sequence: Synthetic oligonucleotide
  Antisense strand to SEQ ID NO: 2462140
aucaccagagagcaaaucc

SEQ ID NO: 2462142 - RNA, 19 nt, Artificial Sequence
  Description of Artificial Sequence: Synthetic oligonucleotide
  Sense strand starting at position 3611 of SEQ ID NO: 1887305
gcucucuggugauuaggaa

SEQ ID NO: 2462143 - RNA, 19 nt, Artificial Sequence
  Description of Artificial Sequence: Synthetic oligonucleotide
  Antisense strand to SEQ ID NO: 2462142
uuccuaaucaccagagagc

SEQ ID NO: 2462144 - RNA, 19 nt, Artificial Sequence
  Description of Artificial Sequence: Synthetic oligonucleotide
  Sense strand starting at position 3626 of SEQ ID NO: 1887305
ggaagaucuaauggcaugu

SEQ ID NO: 2462145 - RNA, 19 nt, Artificial Sequence
  Description of Artificial Sequence: Synthetic oligonucleotide
  Antisense strand to SEQ ID NO: 2462144
acaugccauuagaucuucc

SEQ ID NO: 2462146 - RNA, 19 nt, Artificial Sequence
  Description of Artificial Sequence: Synthetic oligonucleotide
  Sense strand starting at position 3733 of SEQ ID NO: 1887305
ugauuugucuggcauuugu

SEQ ID NO: 2462147 - RNA, 19 nt, Artificial Sequence
  Description of Artificial Sequence: Synthetic oligonucleotide
  Antisense strand to SEQ ID NO: 2462146
acaaaugccagacaaauca

SEQ ID NO: 2462148 - RNA, 19 nt, Artificial Sequence
  Description of Artificial Sequence: Synthetic oligonucleotide
  Sense strand starting at position 3808 of SEQ ID NO: 1887305
cuguuaagugcacaacuau

SEQ ID NO: 2462149 - RNA, 19 nt, Artificial Sequence
  Description of Artificial Sequence: Synthetic oligonucleotide
  Antisense strand to SEQ ID NO: 2462148
auaguugugcacuuaacag

SEQ ID NO: 2462150 - RNA, 19 nt, Artificial Sequence
  Description of Artificial Sequence: Synthetic oligonucleotide
  Sense strand starting at position 3854 of SEQ ID NO: 1887305
agcaaacuugucuauuagu

SEQ ID NO: 2462151 - RNA, 19 nt, Artificial Sequence
  Description of Artificial Sequence: Synthetic oligonucleotide
  Antisense strand to SEQ ID NO: 2462150
acuaauagacaaguuugcu

SEQ ID NO: 2462152 - RNA, 19 nt, Artificial Sequence
  Description of Artificial Sequence: Synthetic oligonucleotide
  Sense strand starting at position 3896 of SEQ ID NO: 1887305
cugcuuucccaagauggca

SEQ ID NO: 2462153 - RNA, 19 nt, Artificial Sequence
  Description of Artificial Sequence: Synthetic oligonucleotide
  Antisense strand to SEQ ID NO: 2462152
ugccaucuugggaaagcag

SEQ ID NO: 2462154 - RNA, 19 nt, Artificial Sequence
  Description of Artificial Sequence: Synthetic oligonucleotide
  Sense strand starting at position 29 of SEQ ID NO: 1887306
gcccuuccuguuuacagau

SEQ ID NO: 2462155 - RNA, 19 nt, Artificial Sequence
  Description of Artificial Sequence: Synthetic oligonucleotide
  Antisense strand to SEQ ID NO: 2462154
aucuguaaacaggaagggc

SEQ ID NO: 2462156 - RNA, 19 nt, Artificial Sequence
  Description of Artificial Sequence: Synthetic oligonucleotide
  Sense strand starting at position 73 of SEQ ID NO: 1887306
acaacagcuuucuugaagu

SEQ ID NO: 2462157 - RNA, 19 nt, Artificial Sequence
  Description of Artificial Sequence: Synthetic oligonucleotide
  Antisense strand to SEQ ID NO: 2462156
acuucaagaaagcuguugu

SEQ ID NO: 2462158 - RNA, 19 nt, Artificial Sequence
  Description of Artificial Sequence: Synthetic oligonucleotide
  Sense strand starting at position 168 of SEQ ID NO: 1887306
gcaagagauacuuaagugu

SEQ ID NO: 2462159 - RNA, 19 nt, Artificial Sequence
  Description of Artificial Sequence: Synthetic oligonucleotide
  Antisense strand to SEQ ID NO: 2462158
acacuuaaguaucucuugc

SEQ ID NO: 2462160 - RNA, 19 nt, Artificial Sequence
  Description of Artificial Sequence: Synthetic oligonucleotide
  Sense strand starting at position 171 of SEQ ID NO: 1887306
agagauacuuaaguguuaa

SEQ ID NO: 2462161 - RNA, 19 nt, Artificial Sequence
  Description of Artificial Sequence: Synthetic oligonucleotide
  Antisense strand to SEQ ID NO: 2462160
uuaacacuuaaguaucucu

SEQ ID NO: 2462162 - RNA, 19 nt, Artificial Sequence
  Description of Artificial Sequence: Synthetic oligonucleotide
  Sense strand starting at position 245 of SEQ ID NO: 1887306
uugguuuguaggcagcaaa

SEQ ID NO: 2462163 - RNA, 19 nt, Artificial Sequence
  Description of Artificial Sequence: Synthetic oligonucleotide
  Antisense strand to SEQ ID NO: 2462162
uuugcugccuacaaaccaa

SEQ ID NO: 2462164 - RNA, 19 nt, Artificial Sequence
  Description of Artificial Sequence: Synthetic oligonucleotide
  Sense strand starting at position 375 of SEQ ID NO: 1887306
agugcucugccugauuaaa

SEQ ID NO: 2462165 - RNA, 19 nt, Artificial Sequence
  Description of Artificial Sequence: Synthetic oligonucleotide
  Antisense strand to SEQ ID NO: 2462164
uuuaaucaggcagagcacu

SEQ ID NO: 2462166 - RNA, 19 nt, Artificial Sequence
  Description of Artificial Sequence: Synthetic oligonucleotide
  Sense strand starting at position 399 of SEQ ID NO: 1887306
cuguguucucaugagaacu

SEQ ID NO: 2462167 - RNA, 19 nt, Artificial Sequence
  Description of Artificial Sequence: Synthetic oligonucleotide
  Antisense strand to SEQ ID NO: 2462166
aguucucaugagaacacag

SEQ ID NO: 2462168 - RNA, 19 nt, Artificial Sequence
  Description of Artificial Sequence: Synthetic oligonucleotide
  Sense strand starting at position 444 of SEQ ID NO: 1887306
ugacgucuucuuggaagag

SEQ ID NO: 2462169 - RNA, 19 nt, Artificial Sequence
  Description of Artificial Sequence: Synthetic oligonucleotide
  Antisense strand to SEQ ID NO: 2462168
cucuuccaagaagacguca

SEQ ID NO: 2462170 - RNA, 19 nt, Artificial Sequence
  Description of Artificial Sequence: Synthetic oligonucleotide
  Sense strand starting at position 516 of SEQ ID NO: 1887306
cgaggaaucgauugcacau

SEQ ID NO: 2462171 - RNA, 19 nt, Artificial Sequence
  Description of Artificial Sequence: Synthetic oligonucleotide
  Antisense strand to SEQ ID NO: 2462170
augugcaaucgauuccucg

SEQ ID NO: 2462172 - RNA, 19 nt, Artificial Sequence
  Description of Artificial Sequence: Synthetic oligonucleotide
  Sense strand starting at position 684 of SEQ ID NO: 1887306
ccacucuuccucuaagugu

SEQ ID NO: 2462173 - RNA, 19 nt, Artificial Sequence
  Description of Artificial Sequence: Synthetic oligonucleotide
  Antisense strand to SEQ ID NO: 2462172
acacuuagaggaagagugg

SEQ ID NO: 2462174 - RNA, 19 nt, Artificial Sequence
  Description of Artificial Sequence: Synthetic oligonucleotide
  Sense strand starting at position 692 of SEQ ID NO: 1887306
ccucuaaguguacacaaua

SEQ ID NO: 2462175 - RNA, 19 nt, Artificial Sequence
  Description of Artificial Sequence: Synthetic oligonucleotide
  Antisense strand to SEQ ID NO: 2462174
uauuguguacacuuagagg

SEQ ID NO: 2462176 - RNA, 19 nt, Artificial Sequence
  Description of Artificial Sequence: Synthetic oligonucleotide
  Sense strand starting at position 878 of SEQ ID NO: 1887306
caggauguacgcugacauu

SEQ ID NO: 2462177 - RNA, 19 nt, Artificial Sequence
  Description of Artificial Sequence: Synthetic oligonucleotide
  Antisense strand to SEQ ID NO: 2462176
aaugucagcguacauccug

SEQ ID NO: 2462178 - RNA, 19 nt, Artificial Sequence
  Description of Artificial Sequence: Synthetic oligonucleotide
  Sense strand starting at position 926 of SEQ ID NO: 1887306
ggugaaacugcaugacuca

SEQ ID NO: 2462179 - RNA, 19 nt, Artificial Sequence
  Description of Artificial Sequence: Synthetic oligonucleotide
  Antisense strand to SEQ ID NO: 2462178
ugagucaugcaguuucacc

SEQ ID NO: 2462180 - RNA, 19 nt, Artificial Sequence
  Description of Artificial Sequence: Synthetic oligonucleotide
  Sense strand starting at position 927 of SEQ ID NO: 1887306
gugaaacugcaugacucau

SEQ ID NO: 2462181 - RNA, 19 nt, Artificial Sequence
  Description of Artificial Sequence: Synthetic oligonucleotide
  Antisense strand to SEQ ID NO: 2462180
augagucaugcaguuucac

SEQ ID NO: 2462182 - RNA, 19 nt, Artificial Sequence
  Description of Artificial Sequence: Synthetic oligonucleotide
  Sense strand starting at position 1237 of SEQ ID NO: 1887306
uugagaaaugcccgauucu

SEQ ID NO: 2462183 - RNA, 19 nt, Artificial Sequence
  Description of Artificial Sequence: Synthetic oligonucleotide
  Antisense strand to SEQ ID NO: 2462182
agaaucgggcauuucucaa

SEQ ID NO: 2462184 - RNA, 19 nt, Artificial Sequence
  Description of Artificial Sequence: Synthetic oligonucleotide
  Sense strand starting at position 1238 of SEQ ID NO: 1887306
ugagaaaugcccgauucuu

SEQ ID NO: 2462185 - RNA, 19 nt, Artificial Sequence
  Description of Artificial Sequence: Synthetic oligonucleotide
  Antisense strand to SEQ ID NO: 2462184
aagaaucgggcauuucuca

SEQ ID NO: 2462186 - RNA, 19 nt, Artificial Sequence
  Description of Artificial Sequence: Synthetic oligonucleotide
  Sense strand starting at position 2001 of SEQ ID NO: 1887306
caggaauucccuuacugug

SEQ ID NO: 2462187 - RNA, 19 nt, Artificial Sequence
  Description of Artificial Sequence: Synthetic oligonucleotide
  Antisense strand to SEQ ID NO: 2462186
cacaguaagggaauuccug

SEQ ID NO: 2462188 - RNA, 19 nt, Artificial Sequence
  Description of Artificial Sequence: Synthetic oligonucleotide
  Sense strand starting at position 2015 of SEQ ID NO: 1887306
cugugcuaguauuuaaagu

SEQ ID NO: 2462189 - RNA, 19 nt, Artificial Sequence
  Description of Artificial Sequence: Synthetic oligonucleotide
  Antisense strand to SEQ ID NO: 2462188
acuuuaaauacuagcacag

SEQ ID NO: 2462190 - RNA, 19 nt, Artificial Sequence
  Description of Artificial Sequence: Synthetic oligonucleotide
  Sense strand starting at position 2091 of SEQ ID NO: 1887306
gaaugagucacuuggugug

SEQ ID NO: 2462191 - RNA, 19 nt, Artificial Sequence
  Description of Artificial Sequence: Synthetic oligonucleotide
  Antisense strand to SEQ ID NO: 2462190
cacaccaagugacucauuc

SEQ ID NO: 2462192 - RNA, 19 nt, Artificial Sequence
  Description of Artificial Sequence: Synthetic oligonucleotide
  Sense strand starting at position 2093 of SEQ ID NO: 1887306
augagucacuuggugugau

SEQ ID NO: 2462193 - RNA, 19 nt, Artificial Sequence
  Description of Artificial Sequence: Synthetic oligonucleotide
  Antisense strand to SEQ ID NO: 2462192
aucacaccaagugacucau

SEQ ID NO: 2462194 - RNA, 19 nt, Artificial Sequence
  Description of Artificial Sequence: Synthetic oligonucleotide
  Sense strand starting at position 2165 of SEQ ID NO: 1887306
aaggaaggcuccuaagaag

SEQ ID NO: 2462195 - RNA, 19 nt, Artificial Sequence
  Description of Artificial Sequence: Synthetic oligonucleotide
  Antisense strand to SEQ ID NO: 2462194
cuucuuaggagccuuccuu

SEQ ID NO: 2462196 - RNA, 19 nt, Artificial Sequence
  Description of Artificial Sequence: Synthetic oligonucleotide
  Sense strand starting at position 2527 of SEQ ID NO: 1887306
ggugacaagacuugccuuu

SEQ ID NO: 2462197 - RNA, 19 nt, Artificial Sequence
  Description of Artificial Sequence: Synthetic oligonucleotide
  Antisense strand to SEQ ID NO: 2462196
aaaggcaagucuugucacc

SEQ ID NO: 2462198 - RNA, 19 nt, Artificial Sequence
  Description of Artificial Sequence: Synthetic oligonucleotide
  Sense strand starting at position 2529 of SEQ ID NO: 1887306
ugacaagacuugccuuuau

SEQ ID NO: 2462199 - RNA, 19 nt, Artificial Sequence
  Description of Artificial Sequence: Synthetic oligonucleotide
  Antisense strand to SEQ ID NO: 2462198
auaaaggcaagucuuguca

SEQ ID NO: 2462200 - RNA, 19 nt, Artificial Sequence
  Description of Artificial Sequence: Synthetic oligonucleotide
  Sense strand starting at position 2541 of SEQ ID NO: 1887306
ccuuuaucuggugaccuga

SEQ ID NO: 2462201 - RNA, 19 nt, Artificial Sequence
  Description of Artificial Sequence: Synthetic oligonucleotide
  Antisense strand to SEQ ID NO: 2462200
ucaggucaccagauaaagg

SEQ ID NO: 2462202 - RNA, 19 nt, Artificial Sequence
  Description of Artificial Sequence: Synthetic oligonucleotide
  Sense strand starting at position 2556 of SEQ ID NO: 1887306
cugacaagguuaucagcaa

SEQ ID NO: 2462203 - RNA, 19 nt, Artificial Sequence
  Description of Artificial Sequence: Synthetic oligonucleotide
  Antisense strand to SEQ ID NO: 2462202
uugcugauaaccuugucag

SEQ ID NO: 2462204 - RNA, 19 nt, Artificial Sequence
  Description of Artificial Sequence: Synthetic oligonucleotide
  Sense strand starting at position 2688 of SEQ ID NO: 1887306
cugcaaguucuuccgcauu

SEQ ID NO: 2462205 - RNA, 19 nt, Artificial Sequence
  Description of Artificial Sequence: Synthetic oligonucleotide
  Antisense strand to SEQ ID NO: 2462204
aaugcggaagaacuugcag

SEQ ID NO: 2462206 - RNA, 19 nt, Artificial Sequence
  Description of Artificial Sequence: Synthetic oligonucleotide
  Sense strand starting at position 2729 of SEQ ID NO: 1887306
uuguguucucuuuggaaca

SEQ ID NO: 2462207 - RNA, 19 nt, Artificial Sequence
  Description of Artificial Sequence: Synthetic oligonucleotide
  Antisense strand to SEQ ID NO: 2462206
uguuccaaagagaacacaa

SEQ ID NO: 2462208 - RNA, 19 nt, Artificial Sequence
  Description of Artificial Sequence: Synthetic oligonucleotide
  Sense strand starting at position 2767 of SEQ ID NO: 1887306
ucuuaauuaugagcaguca

SEQ ID NO: 2462209 - RNA, 19 nt, Artificial Sequence
  Description of Artificial Sequence: Synthetic oligonucleotide
  Antisense strand to SEQ ID NO: 2462208
ugacugcucauaauuaaga

SEQ ID NO: 2462210 - RNA, 19 nt, Artificial Sequence
  Description of Artificial Sequence: Synthetic oligonucleotide
  Sense strand starting at position 2850 of SEQ ID NO: 1887306
ggauauauuugcguccucu

SEQ ID NO: 2462211 - RNA, 19 nt, Artificial Sequence
  Description of Artificial Sequence: Synthetic oligonucleotide
  Antisense strand to SEQ ID NO: 2462210
agaggacgcaaauauaucc

SEQ ID NO: 2462212 - RNA, 19 nt, Artificial Sequence
  Description of Artificial Sequence: Synthetic oligonucleotide
  Sense strand starting at position 2905 of SEQ ID NO: 1887306
cagagucgauacuuaauaa

SEQ ID NO: 2462213 - RNA, 19 nt, Artificial Sequence
  Description of Artificial Sequence: Synthetic oligonucleotide
  Antisense strand to SEQ ID NO: 2462212
uuauuaaguaucgacucug

SEQ ID NO: 2462214 - RNA, 19 nt, Artificial Sequence
  Description of Artificial Sequence: Synthetic oligonucleotide
  Sense strand starting at position 2917 of SEQ ID NO: 1887306
uuaauaacgucuuugaccu

SEQ ID NO: 2462215 - RNA, 19 nt, Artificial Sequence
  Description of Artificial Sequence: Synthetic oligonucleotide
  Antisense strand to SEQ ID NO: 2462214
aggucaaagacguuauuaa

SEQ ID NO: 2462216 - RNA, 19 nt, Artificial Sequence
  Description of Artificial Sequence: Synthetic oligonucleotide
  Sense strand starting at position 2921 of SEQ ID NO: 1887306
uaacgucuuugaccuauga

SEQ ID NO: 2462217 - RNA, 19 nt, Artificial Sequence
  Description of Artificial Sequence: Synthetic oligonucleotide
  Antisense strand to SEQ ID NO: 2462216
ucauaggucaaagacguua

SEQ ID NO: 2462218 - RNA, 19 nt, Artificial Sequence
  Description of Artificial Sequence: Synthetic oligonucleotide
  Sense strand starting at position 2923 of SEQ ID NO: 1887306
acgucuuugaccuaugaug

SEQ ID NO: 2462219 - RNA, 19 nt, Artificial Sequence
  Description of Artificial Sequence: Synthetic oligonucleotide
  Antisense strand to SEQ ID NO: 2462218
caucauaggucaaagacgu

SEQ ID NO: 2462220 - RNA, 19 nt, Artificial Sequence
  Description of Artificial Sequence: Synthetic oligonucleotide
  Sense strand starting at position 2925 of SEQ ID NO: 1887306
gucuuugaccuaugaugcu

SEQ ID NO: 2462221 - RNA, 19 nt, Artificial Sequence
  Description of Artificial Sequence: Synthetic oligonucleotide
  Antisense strand to SEQ ID NO: 2462220
agcaucauaggucaaagac

SEQ ID NO: 2462222 - RNA, 19 nt, Artificial Sequence
  Description of Artificial Sequence: Synthetic oligonucleotide
  Sense strand starting at position 3028 of SEQ ID NO: 1887306
agugcugugcuggagauaa

SEQ ID NO: 2462223 - RNA, 19 nt, Artificial Sequence
  Description of Artificial Sequence: Synthetic oligonucleotide
  Antisense strand to SEQ ID NO: 2462222
uuaucuccagcacagcacu

SEQ ID NO: 2462224 - RNA, 19 nt, Artificial Sequence
  Description of Artificial Sequence: Synthetic oligonucleotide
  Sense strand starting at position 3053 of SEQ ID NO: 1887306
uaucuagugcucgaucuau

SEQ ID NO: 2462225 - RNA, 19 nt, Artificial Sequence
  Description of Artificial Sequence: Synthetic oligonucleotide
  Antisense strand to SEQ ID NO: 2462224
auagaucgagcacuagaua

SEQ ID NO: 2462226 - RNA, 19 nt, Artificial Sequence
  Description of Artificial Sequence: Synthetic oligonucleotide
  Sense strand starting at position 3474 of SEQ ID NO: 1887306
uuaucuggugggugggaaa

SEQ ID NO: 2462227 - RNA, 19 nt, Artificial Sequence
  Description of Artificial Sequence: Synthetic oligonucleotide
  Antisense strand to SEQ ID NO: 2462226
uuucccacccaccagauaa

SEQ ID NO: 2462228 - RNA, 19 nt, Artificial Sequence
  Description of Artificial Sequence: Synthetic oligonucleotide
  Sense strand starting at position 3535 of SEQ ID NO: 1887306
guguguacuaggcaaagcu

SEQ ID NO: 2462229 - RNA, 19 nt, Artificial Sequence
  Description of Artificial Sequence: Synthetic oligonucleotide
  Antisense strand to SEQ ID NO: 2462228
agcuuugccuaguacacac

SEQ ID NO: 2462230 - RNA, 19 nt, Artificial Sequence
  Description of Artificial Sequence: Synthetic oligonucleotide
  Sense strand starting at position 3542 of SEQ ID NO: 1887306
cuaggcaaagcuugaauga

SEQ ID NO: 2462231 - RNA, 19 nt, Artificial Sequence
  Description of Artificial Sequence: Synthetic oligonucleotide
  Antisense strand to SEQ ID NO: 2462230
ucauucaagcuuugccuag

SEQ ID NO: 2462232 - RNA, 19 nt, Artificial Sequence
  Description of Artificial Sequence: Synthetic oligonucleotide
  Sense strand starting at position 3566 of SEQ ID NO: 1887306
gggugagaguacuugcaga

SEQ ID NO: 2462233 - RNA, 19 nt, Artificial Sequence
  Description of Artificial Sequence: Synthetic oligonucleotide
  Antisense strand to SEQ ID NO: 2462232
ucugcaaguacucucaccc

SEQ ID NO: 2462234 - RNA, 19 nt, Artificial Sequence
  Description of Artificial Sequence: Synthetic oligonucleotide
  Sense strand starting at position 987 of SEQ ID NO: 1887307
accagaaggccucggugaa

SEQ ID NO: 2462235 - RNA, 19 nt, Artificial Sequence
  Description of Artificial Sequence: Synthetic oligonucleotide
  Antisense strand to SEQ ID NO: 2462234
uucaccgaggccuucuggu

SEQ ID NO: 2462236 - RNA, 19 nt, Artificial Sequence
  Description of Artificial Sequence: Synthetic oligonucleotide
  Sense strand starting at position 1020 of SEQ ID NO: 1887307
uggugaaguccgagucgug

SEQ ID NO: 2462237 - RNA, 19 nt, Artificial Sequence
  Description of Artificial Sequence: Synthetic oligonucleotide
  Antisense strand to SEQ ID NO: 2462236
cacgacucggacuucacca

SEQ ID NO: 2462238 - RNA, 19 nt, Artificial Sequence
  Description of Artificial Sequence: Synthetic oligonucleotide
  Sense strand starting at position 1021 of SEQ ID NO: 1887307
ggugaaguccgagucgugu

SEQ ID NO: 2462239 - RNA, 19 nt, Artificial Sequence
  Description of Artificial Sequence: Synthetic oligonucleotide
  Antisense strand to SEQ ID NO: 2462238
acacgacucggacuucacc

SEQ ID NO: 2462240 - RNA, 19 nt, Artificial Sequence
  Description of Artificial Sequence: Synthetic oligonucleotide
  Sense strand starting at position 1027 of SEQ ID NO: 1887307
guccgagucgugucagcaa

SEQ ID NO: 2462241 - RNA, 19 nt, Artificial Sequence
  Description of Artificial Sequence: Synthetic oligonucleotide
  Antisense strand to SEQ ID NO: 2462240
uugcugacacgacucggac

SEQ ID NO: 2462242 - RNA, 19 nt, Artificial Sequence
  Description of Artificial Sequence: Synthetic oligonucleotide
  Sense strand starting at position 1029 of SEQ ID NO: 1887307
ccgagucgugucagcaaga

SEQ ID NO: 2462243 - RNA, 19 nt, Artificial Sequence
  Description of Artificial Sequence: Synthetic oligonucleotide
  Antisense strand to SEQ ID NO: 2462242
ucuugcugacacgacucgg

SEQ ID NO: 2462244 - RNA, 19 nt, Artificial Sequence
  Description of Artificial Sequence: Synthetic oligonucleotide
  Sense strand starting at position 1125 of SEQ ID NO: 1887307
ggcauuucuccugguucua

SEQ ID NO: 2462245 - RNA, 19 nt, Artificial Sequence
  Description of Artificial Sequence: Synthetic oligonucleotide
  Antisense strand to SEQ ID NO: 2462244
uagaaccaggagaaaugcc

SEQ ID NO: 2462246 - RNA, 19 nt, Artificial Sequence
  Description of Artificial Sequence: Synthetic oligonucleotide
  Sense strand starting at position 1156 of SEQ ID NO: 1887307
cucugaauugucuauuaag

SEQ ID NO: 2462247 - RNA, 19 nt, Artificial Sequence
  Description of Artificial Sequence: Synthetic oligonucleotide
  Antisense strand to SEQ ID NO: 2462246
cuuaauagacaauucagag

SEQ ID NO: 2462248 - RNA, 19 nt, Artificial Sequence
  Description of Artificial Sequence: Synthetic oligonucleotide
  Sense strand starting at position 1175 of SEQ ID NO: 1887307
auaggaaccugugcaaauu

SEQ ID NO: 2462249 - RNA, 19 nt, Artificial Sequence
  Description of Artificial Sequence: Synthetic oligonucleotide
  Antisense strand to SEQ ID NO: 2462248
aauuugcacagguuccuau

SEQ ID NO: 2462250 - RNA, 19 nt, Artificial Sequence
  Description of Artificial Sequence: Synthetic oligonucleotide
  Sense strand starting at position 1176 of SEQ ID NO: 1887307
uaggaaccugugcaaauua

SEQ ID NO: 2462251 - RNA, 19 nt, Artificial Sequence
  Description of Artificial Sequence: Synthetic oligonucleotide
  Antisense strand to SEQ ID NO: 2462250
uaauuugcacagguuccua

SEQ ID NO: 2462252 - RNA, 19 nt, Artificial Sequence
  Description of Artificial Sequence: Synthetic oligonucleotide
  Sense strand starting at position 1255 of SEQ ID NO: 1887307
accucaccggguuaucuua

SEQ ID NO: 2462253 - RNA, 19 nt, Artificial Sequence
  Description of Artificial Sequence: Synthetic oligonucleotide
  Antisense strand to SEQ ID NO: 2462252
uaagauaacccggugaggu

SEQ ID NO: 2462254 - RNA, 19 nt, Artificial Sequence
  Description of Artificial Sequence: Synthetic oligonucleotide
  Sense strand starting at position 1283 of SEQ ID NO: 1887307
auauccaagugcuuugaaa

SEQ ID NO: 2462255 - RNA, 19 nt, Artificial Sequence
  Description of Artificial Sequence: Synthetic oligonucleotide
  Antisense strand to SEQ ID NO: 2462254
uuucaaagcacuuggauau

SEQ ID NO: 2462256 - RNA, 19 nt, Artificial Sequence
  Description of Artificial Sequence: Synthetic oligonucleotide
  Sense strand starting at position 1539 of SEQ ID NO: 1887307
ugcgauggucaucaucaua

SEQ ID NO: 2462257 - RNA, 19 nt, Artificial Sequence
  Description of Artificial Sequence: Synthetic oligonucleotide
  Antisense strand to SEQ ID NO: 2462256
uaugaugaugaccaucgca

SEQ ID NO: 2462258 - RNA, 19 nt, Artificial Sequence
  Description of Artificial Sequence: Synthetic oligonucleotide
  Sense strand starting at position 1838 of SEQ ID NO: 1887307
accagauguuaccuggaua

SEQ ID NO: 2462259 - RNA, 19 nt, Artificial Sequence
  Description of Artificial Sequence: Synthetic oligonucleotide
  Antisense strand to SEQ ID NO: 2462258
uauccagguaacaucuggu

SEQ ID NO: 2462260 - RNA, 19 nt, Artificial Sequence
  Description of Artificial Sequence: Synthetic oligonucleotide
  Sense strand starting at position 2129 of SEQ ID NO: 1887307
ugaacuccuccugacaagu

SEQ ID NO: 2462261 - RNA, 19 nt, Artificial Sequence
  Description of Artificial Sequence: Synthetic oligonucleotide
  Antisense strand to SEQ ID NO: 2462260
acuugucaggaggaguuca

SEQ ID NO: 2462262 - RNA, 19 nt, Artificial Sequence
  Description of Artificial Sequence: Synthetic oligonucleotide
  Sense strand starting at position 2158 of SEQ ID NO: 1887307
ugggaaugccuccaucaau

SEQ ID NO: 2462263 - RNA, 19 nt, Artificial Sequence
  Description of Artificial Sequence: Synthetic oligonucleotide
  Antisense strand to SEQ ID NO: 2462262
auugauggaggcauuccca

SEQ ID NO: 2462264 - RNA, 19 nt, Artificial Sequence
  Description of Artificial Sequence: Synthetic oligonucleotide
  Sense strand starting at position 2168 of SEQ ID NO: 1887307
uccaucaaucccugagaag

SEQ ID NO: 2462265 - RNA, 19 nt, Artificial Sequence
  Description of Artificial Sequence: Synthetic oligonucleotide
  Antisense strand to SEQ ID NO: 2462264
cuucucagggauugaugga

SEQ ID NO: 2462266 - RNA, 19 nt, Artificial Sequence
  Description of Artificial Sequence: Synthetic oligonucleotide
  Sense strand starting at position 2230 of SEQ ID NO: 1887307
guucuuggaguucagaaga

SEQ ID NO: 2462267 - RNA, 19 nt, Artificial Sequence
  Description of Artificial Sequence: Synthetic oligonucleotide
  Antisense strand to SEQ ID NO: 2462266
ucuucugaacuccaagaac

SEQ ID NO: 2462268 - RNA, 19 nt, Artificial Sequence
  Description of Artificial Sequence: Synthetic oligonucleotide
  Sense strand starting at position 2286 of SEQ ID NO: 1887307
caauuauguggucaguacu

SEQ ID NO: 2462269 - RNA, 19 nt, Artificial Sequence
  Description of Artificial Sequence: Synthetic oligonucleotide
  Antisense strand to SEQ ID NO: 2462268
aguacugaccacauaauug

SEQ ID NO: 2462270 - RNA, 19 nt, Artificial Sequence
  Description of Artificial Sequence: Synthetic oligonucleotide
  Sense strand starting at position 2321 of SEQ ID NO: 1887307
guugccuaauuuccuguaa

SEQ ID NO: 2462271 - RNA, 19 nt, Artificial Sequence
  Description of Artificial Sequence: Synthetic oligonucleotide
  Antisense strand to SEQ ID NO: 2462270
uuacaggaaauuaggcaac

SEQ ID NO: 2462272 - RNA, 19 nt, Artificial Sequence
  Description of Artificial Sequence: Synthetic oligonucleotide
  Sense strand starting at position 2439 of SEQ ID NO: 1887307
gguaaauacuuaguggguu

SEQ ID NO: 2462273 - RNA, 19 nt, Artificial Sequence
  Description of Artificial Sequence: Synthetic oligonucleotide
  Antisense strand to SEQ ID NO: 2462272
aacccacuaaguauuuacc

SEQ ID NO: 2462274 - RNA, 19 nt, Artificial Sequence
  Description of Artificial Sequence: Synthetic oligonucleotide
  Sense strand starting at position 2442 of SEQ ID NO: 1887307
aaauacuuaguggguuaaa

SEQ ID NO: 2462275 - RNA, 19 nt, Artificial Sequence
  Description of Artificial Sequence: Synthetic oligonucleotide
  Antisense strand to SEQ ID NO: 2462274
uuuaacccacuaaguauuu

SEQ ID NO: 2462276 - RNA, 19 nt, Artificial Sequence
  Description of Artificial Sequence: Synthetic oligonucleotide
  Sense strand starting at position 2443 of SEQ ID NO: 1887307
aauacuuaguggguuaaac

SEQ ID NO: 2462277 - RNA, 19 nt, Artificial Sequence
  Description of Artificial Sequence: Synthetic oligonucleotide
  Antisense strand to SEQ ID NO: 2462276
guuuaacccacuaaguauu

SEQ ID NO: 2462278 - RNA, 19 nt, Artificial Sequence
  Description of Artificial Sequence: Synthetic oligonucleotide
  Sense strand starting at position 2597 of SEQ ID NO: 1887307
uuucgauaaggauaucugu

SEQ ID NO: 2462279 - RNA, 19 nt, Artificial Sequence
  Description of Artificial Sequence: Synthetic oligonucleotide
  Antisense strand to SEQ ID NO: 2462278
acagauauccuuaucgaaa

SEQ ID NO: 2462280 - RNA, 19 nt, Artificial Sequence
  Description of Artificial Sequence: Synthetic oligonucleotide
  Sense strand starting at position 2600 of SEQ ID NO: 1887307
cgauaaggauaucugucuu

SEQ ID NO: 2462281 - RNA, 19 nt, Artificial Sequence
  Description of Artificial Sequence: Synthetic oligonucleotide
  Antisense strand to SEQ ID NO: 2462280
aagacagauauccuuaucg

SEQ ID NO: 2462282 - RNA, 19 nt, Artificial Sequence
  Description of Artificial Sequence: Synthetic oligonucleotide
  Sense strand starting at position 2680 of SEQ ID NO: 1887307
uucuaugaccaguggcaaa

SEQ ID NO: 2462283 - RNA, 19 nt, Artificial Sequence
  Description of Artificial Sequence: Synthetic oligonucleotide
  Antisense strand to SEQ ID NO: 2462282
uuugccacuggucauagaa

SEQ ID NO: 2462284 - RNA, 19 nt, Artificial Sequence
  Description of Artificial Sequence: Synthetic oligonucleotide
  Sense strand starting at position 2740 of SEQ ID NO: 1887307
accuguacuuaaguaagua

SEQ ID NO: 2462285 - RNA, 19 nt, Artificial Sequence
  Description of Artificial Sequence: Synthetic oligonucleotide
  Antisense strand to SEQ ID NO: 2462284
uacuuacuuaaguacaggu

SEQ ID NO: 2462286 - RNA, 19 nt, Artificial Sequence
  Description of Artificial Sequence: Synthetic oligonucleotide
  Sense strand starting at position 2744 of SEQ ID NO: 1887307
guacuuaaguaaguaauga

SEQ ID NO: 2462287 - RNA, 19 nt, Artificial Sequence
  Description of Artificial Sequence: Synthetic oligonucleotide
  Antisense strand to SEQ ID NO: 2462286
ucauuacuuacuuaaguac

SEQ ID NO: 2462288 - RNA, 19 nt, Artificial Sequence
  Description of Artificial Sequence: Synthetic oligonucleotide
  Sense strand starting at position 2789 of SEQ ID NO: 1887307
aaaggaugcuguguaugga

SEQ ID NO: 2462289 - RNA, 19 nt, Artificial Sequence
  Description of Artificial Sequence: Synthetic oligonucleotide
  Antisense strand to SEQ ID NO: 2462288
uccauacacagcauccuuu

SEQ ID NO: 2462290 - RNA, 19 nt, Artificial Sequence
  Description of Artificial Sequence: Synthetic oligonucleotide
  Sense strand starting at position 2790 of SEQ ID NO: 1887307
aaggaugcuguguauggau

SEQ ID NO: 2462291 - RNA, 19 nt, Artificial Sequence
  Description of Artificial Sequence: Synthetic oligonucleotide
  Antisense strand to SEQ ID NO: 2462290
auccauacacagcauccuu

SEQ ID NO: 2462292 - RNA, 19 nt, Artificial Sequence
  Description of Artificial Sequence: Synthetic oligonucleotide
  Sense strand starting at position 2798 of SEQ ID NO: 1887307
uguguauggaucuagcaua

SEQ ID NO: 2462293 - RNA, 19 nt, Artificial Sequence
  Description of Artificial Sequence: Synthetic oligonucleotide
  Antisense strand to SEQ ID NO: 2462292
uaugcuagauccauacaca

SEQ ID NO: 2462294 - RNA, 19 nt, Artificial Sequence
  Description of Artificial Sequence: Synthetic oligonucleotide
  Sense strand starting at position 2923 of SEQ ID NO: 1887307
aucucagguaguggugaaa

SEQ ID NO: 2462295 - RNA, 19 nt, Artificial Sequence
  Description of Artificial Sequence: Synthetic oligonucleotide
  Antisense strand to SEQ ID NO: 2462294
uuucaccacuaccugagau

SEQ ID NO: 2462296 - RNA, 19 nt, Artificial Sequence
  Description of Artificial Sequence: Synthetic oligonucleotide
  Sense strand starting at position 3000 of SEQ ID NO: 1887307
gcaaauguguucccauuuc

SEQ ID NO: 2462297 - RNA, 19 nt, Artificial Sequence
  Description of Artificial Sequence: Synthetic oligonucleotide
  Antisense strand to SEQ ID NO: 2462296
gaaaugggaacacauuugc

SEQ ID NO: 2462298 - RNA, 19 nt, Artificial Sequence
  Description of Artificial Sequence: Synthetic oligonucleotide
  Sense strand starting at position 3126 of SEQ ID NO: 1887307
ccacaaucuggagguugua

SEQ ID NO: 2462299 - RNA, 19 nt, Artificial Sequence
  Description of Artificial Sequence: Synthetic oligonucleotide
  Antisense strand to SEQ ID NO: 2462298
uacaaccuccagauugugg

SEQ ID NO: 2462300 - RNA, 19 nt, Artificial Sequence
  Description of Artificial Sequence: Synthetic oligonucleotide
  Sense strand starting at position 3313 of SEQ ID NO: 1887307
aucuuaaaggcuuaaguau

SEQ ID NO: 2462301 - RNA, 19 nt, Artificial Sequence
  Description of Artificial Sequence: Synthetic oligonucleotide
  Antisense strand to SEQ ID NO: 2462300
auacuuaagccuuuaagau

SEQ ID NO: 2462302 - RNA, 19 nt, Artificial Sequence
  Description of Artificial Sequence: Synthetic oligonucleotide
  Sense strand starting at position 3319 of SEQ ID NO: 1887307
aaggcuuaaguaugggauu

SEQ ID NO: 2462303 - RNA, 19 nt, Artificial Sequence
  Description of Artificial Sequence: Synthetic oligonucleotide
  Antisense strand to SEQ ID NO: 2462302
aaucccauacuuaagccuu

SEQ ID NO: 2462304 - RNA, 19 nt, Artificial Sequence
  Description of Artificial Sequence: Synthetic oligonucleotide
  Sense strand starting at position 3428 of SEQ ID NO: 1887307
acguuugaggcuuacagaa

SEQ ID NO: 2462305 - RNA, 19 nt, Artificial Sequence
  Description of Artificial Sequence: Synthetic oligonucleotide
  Antisense strand to SEQ ID NO: 2462304
uucuguaagccucaaacgu

SEQ ID NO: 2462306 - RNA, 19 nt, Artificial Sequence
  Description of Artificial Sequence: Synthetic oligonucleotide
  Sense strand starting at position 3436 of SEQ ID NO: 1887307
ggcuuacagaaagguauaa

SEQ ID NO: 2462307 - RNA, 19 nt, Artificial Sequence
  Description of Artificial Sequence: Synthetic oligonucleotide
  Antisense strand to SEQ ID NO: 2462306
uuauaccuuucuguaagcc

SEQ ID NO: 2462308 - RNA, 19 nt, Artificial Sequence
  Description of Artificial Sequence: Synthetic oligonucleotide
  Sense strand starting at position 3567 of SEQ ID NO: 1887307
agaguaauagcucaucugu

SEQ ID NO: 2462309 - RNA, 19 nt, Artificial Sequence
  Description of Artificial Sequence: Synthetic oligonucleotide
  Antisense strand to SEQ ID NO: 2462308
acagaugagcuauuacucu

SEQ ID NO: 2462310 - RNA, 19 nt, Artificial Sequence
  Description of Artificial Sequence: Synthetic oligonucleotide
  Sense strand starting at position 3583 of SEQ ID NO: 1887307
ugucuuugacaccaaagca

SEQ ID NO: 2462311 - RNA, 19 nt, Artificial Sequence
  Description of Artificial Sequence: Synthetic oligonucleotide
  Antisense strand to SEQ ID NO: 2462310
ugcuuuggugucaaagaca

SEQ ID NO: 2462312 - RNA, 19 nt, Artificial Sequence
  Description of Artificial Sequence: Synthetic oligonucleotide
  Sense strand starting at position 3654 of SEQ ID NO: 1887307
ucuguccuacauugggaaa

SEQ ID NO: 2462313 - RNA, 19 nt, Artificial Sequence
  Description of Artificial Sequence: Synthetic oligonucleotide
  Antisense strand to SEQ ID NO: 2462312
uuucccaauguaggacaga

SEQ ID NO: 2462314 - RNA, 19 nt, Artificial Sequence
  Description of Artificial Sequence: Synthetic oligonucleotide
  Sense strand starting at position 130 of SEQ ID NO: 1887308
gguguucuuccugucugca

SEQ ID NO: 2462315 - RNA, 19 nt, Artificial Sequence
  Description of Artificial Sequence: Synthetic oligonucleotide
  Antisense strand to SEQ ID NO: 2462314
ugcagacaggaagaacacc

SEQ ID NO: 2462316 - RNA, 19 nt, Artificial Sequence
  Description of Artificial Sequence: Synthetic oligonucleotide
  Sense strand starting at position 166 of SEQ ID NO: 1887308
aguguaaauuaucuuacac

SEQ ID NO: 2462317 - RNA, 19 nt, Artificial Sequence
  Description of Artificial Sequence: Synthetic oligonucleotide
  Antisense strand to SEQ ID NO: 2462316
guguaagauaauuuacacu

SEQ ID NO: 2462318 - RNA, 19 nt, Artificial Sequence
  Description of Artificial Sequence: Synthetic oligonucleotide
  Sense strand starting at position 212 of SEQ ID NO: 1887308
auaaauagggaguguguau

SEQ ID NO: 2462319 - RNA, 19 nt, Artificial Sequence
  Description of Artificial Sequence: Synthetic oligonucleotide
  Antisense strand to SEQ ID NO: 2462318
auacacacucccuauuuau

SEQ ID NO: 2462320 - RNA, 19 nt, Artificial Sequence
  Description of Artificial Sequence: Synthetic oligonucleotide
  Sense strand starting at position 292 of SEQ ID NO: 1887308
ugcaguguagaacaauaga

SEQ ID NO: 2462321 - RNA, 19 nt, Artificial Sequence
  Description of Artificial Sequence: Synthetic oligonucleotide
  Antisense strand to SEQ ID NO: 2462320
ucuauuguucuacacugca

SEQ ID NO: 2462322 - RNA, 19 nt, Artificial Sequence
  Description of Artificial Sequence: Synthetic oligonucleotide
  Sense strand starting at position 391 of SEQ ID NO: 1887308
cuuuaaugcuauguuuaag

SEQ ID NO: 2462323 - RNA, 19 nt, Artificial Sequence
  Description of Artificial Sequence: Synthetic oligonucleotide
  Antisense strand to SEQ ID NO: 2462322
cuuaaacauagcauuaaag

SEQ ID NO: 2462324 - RNA, 19 nt, Artificial Sequence
  Description of Artificial Sequence: Synthetic oligonucleotide
  Sense strand starting at position 490 of SEQ ID NO: 1887308
uguacaaagucuucgaaau

SEQ ID NO: 2462325 - RNA, 19 nt, Artificial Sequence
  Description of Artificial Sequence: Synthetic oligonucleotide
  Antisense strand to SEQ ID NO: 2462324
auuucgaagacuuuguaca

SEQ ID NO: 2462326 - RNA, 19 nt, Artificial Sequence
  Description of Artificial Sequence: Synthetic oligonucleotide
  Sense strand starting at position 491 of SEQ ID NO: 1887308
guacaaagucuucgaaauc

SEQ ID NO: 2462327 - RNA, 19 nt, Artificial Sequence
  Description of Artificial Sequence: Synthetic oligonucleotide
  Antisense strand to SEQ ID NO: 2462326
gauuucgaagacuuuguac

SEQ ID NO: 2462328 - RNA, 19 nt, Artificial Sequence
  Description of Artificial Sequence: Synthetic oligonucleotide
  Sense strand starting at position 500 of SEQ ID NO: 1887308
cuucgaaaucuagggcuca

SEQ ID NO: 2462329 - RNA, 19 nt, Artificial Sequence
  Description of Artificial Sequence: Synthetic oligonucleotide
  Antisense strand to SEQ ID NO: 2462328
ugagcccuagauuucgaag

SEQ ID NO: 2462330 - RNA, 19 nt, Artificial Sequence
  Description of Artificial Sequence: Synthetic oligonucleotide
  Sense strand starting at position 637 of SEQ ID NO: 1887308
ggcauauaucaagguacuu

SEQ ID NO: 2462331 - RNA, 19 nt, Artificial Sequence
  Description of Artificial Sequence: Synthetic oligonucleotide
  Antisense strand to SEQ ID NO: 2462330
aaguaccuugauauaugcc

SEQ ID NO: 2462332 - RNA, 19 nt, Artificial Sequence
  Description of Artificial Sequence: Synthetic oligonucleotide
  Sense strand starting at position 649 of SEQ ID NO: 1887308
gguacuugcaauggaaaca

SEQ ID NO: 2462333 - RNA, 19 nt, Artificial Sequence
  Description of Artificial Sequence: Synthetic oligonucleotide
  Antisense strand to SEQ ID NO: 2462332
uguuuccauugcaaguacc

SEQ ID NO: 2462334 - RNA, 19 nt, Artificial Sequence
  Description of Artificial Sequence: Synthetic oligonucleotide
  Sense strand starting at position 715 of SEQ ID NO: 1887308
aggcaaauguaauccaauu

SEQ ID NO: 2462335 - RNA, 19 nt, Artificial Sequence
  Description of Artificial Sequence: Synthetic oligonucleotide
  Antisense strand to SEQ ID NO: 2462334
aauuggauuacauuugccu

SEQ ID NO: 2462336 - RNA, 19 nt, Artificial Sequence
  Description of Artificial Sequence: Synthetic oligonucleotide
  Sense strand starting at position 837 of SEQ ID NO: 1887308
gagagaagcucagagacaa

SEQ ID NO: 2462337 - RNA, 19 nt, Artificial Sequence
  Description of Artificial Sequence: Synthetic oligonucleotide
  Antisense strand to SEQ ID NO: 2462336
uugucucugagcuucucuc

SEQ ID NO: 2462338 - RNA, 19 nt, Artificial Sequence
  Description of Artificial Sequence: Synthetic oligonucleotide
  Sense strand starting at position 879 of SEQ ID NO: 1887308
gcaaaugugucaguaauua

SEQ ID NO: 2462339 - RNA, 19 nt, Artificial Sequence
  Description of Artificial Sequence: Synthetic oligonucleotide
  Antisense strand to SEQ ID NO: 2462338
uaauuacugacacauuugc

SEQ ID NO: 2462340 - RNA, 19 nt, Artificial Sequence
  Description of Artificial Sequence: Synthetic oligonucleotide
  Sense strand starting at position 891 of SEQ ID NO: 1887308
guaauuaggagguggucuu

SEQ ID NO: 2462341 - RNA, 19 nt, Artificial Sequence
  Description of Artificial Sequence: Synthetic oligonucleotide
  Antisense strand to SEQ ID NO: 2462340
aagaccaccuccuaauuac

SEQ ID NO: 2462342 - RNA, 19 nt, Artificial Sequence
  Description of Artificial Sequence: Synthetic oligonucleotide
  Sense strand starting at position 1001 of SEQ ID NO: 1887308
cugugcucucaacaaagga

SEQ ID NO: 2462343 - RNA, 19 nt, Artificial Sequence
  Description of Artificial Sequence: Synthetic oligonucleotide
  Antisense strand to SEQ ID NO: 2462342
uccuuuguugagagcacag

SEQ ID NO: 2462344 - RNA, 19 nt, Artificial Sequence
  Description of Artificial Sequence: Synthetic oligonucleotide
  Sense strand starting at position 1034 of SEQ ID NO: 1887308
gguuuauauuuaugagaag

SEQ ID NO: 2462345 - RNA, 19 nt, Artificial Sequence
  Description of Artificial Sequence: Synthetic oligonucleotide
  Antisense strand to SEQ ID NO: 2462344
cuucucauaaauauaaacc

SEQ ID NO: 2462346 - RNA, 19 nt, Artificial Sequence
  Description of Artificial Sequence: Synthetic oligonucleotide
  Sense strand starting at position 1037 of SEQ ID NO: 1887308
uuauauuuaugagaagcag

SEQ ID NO: 2462347 - RNA, 19 nt, Artificial Sequence
  Description of Artificial Sequence: Synthetic oligonucleotide
  Antisense strand to SEQ ID NO: 2462346
cugcuucucauaaauauaa

SEQ ID NO: 2462348 - RNA, 19 nt, Artificial Sequence
  Description of Artificial Sequence: Synthetic oligonucleotide
  Sense strand starting at position 1139 of SEQ ID NO: 1887308
uggguauucugaagugagg

SEQ ID NO: 2462349 - RNA, 19 nt, Artificial Sequence
  Description of Artificial Sequence: Synthetic oligonucleotide
  Antisense strand to SEQ ID NO: 2462348
ccucacuucagaauaccca

SEQ ID NO: 2462350 - RNA, 19 nt, Artificial Sequence
  Description of Artificial Sequence: Synthetic oligonucleotide
  Sense strand starting at position 1141 of SEQ ID NO: 1887308
gguauucugaagugaggac

SEQ ID NO: 2462351 - RNA, 19 nt, Artificial Sequence
  Description of Artificial Sequence: Synthetic oligonucleotide
  Antisense strand to SEQ ID NO: 2462350
guccucacuucagaauacc

SEQ ID NO: 2462352 - RNA, 19 nt, Artificial Sequence
  Description of Artificial Sequence: Synthetic oligonucleotide
  Sense strand starting at position 1148 of SEQ ID NO: 1887308
ugaagugaggacuguaaca

SEQ ID NO: 2462353 - RNA, 19 nt, Artificial Sequence
  Description of Artificial Sequence: Synthetic oligonucleotide
  Antisense strand to SEQ ID NO: 2462352
uguuacaguccucacuuca

SEQ ID NO: 2462354 - RNA, 19 nt, Artificial Sequence
  Description of Artificial Sequence: Synthetic oligonucleotide
  Sense strand starting at position 1174 of SEQ ID NO: 1887308
ccaagaaggcuauguucca

SEQ ID NO: 2462355 - RNA, 19 nt, Artificial Sequence
  Description of Artificial Sequence: Synthetic oligonucleotide
  Antisense strand to SEQ ID NO: 2462354
uggaacauagccuucuugg

SEQ ID NO: 2462356 - RNA, 19 nt, Artificial Sequence
  Description of Artificial Sequence: Synthetic oligonucleotide
  Sense strand starting at position 1822 of SEQ ID NO: 1887308
aaguacacagcuugguaaa

SEQ ID NO: 2462357 - RNA, 19 nt, Artificial Sequence
  Description of Artificial Sequence: Synthetic oligonucleotide
  Antisense strand to SEQ ID NO: 2462356
uuuaccaagcuguguacuu

SEQ ID NO: 2462358 - RNA, 19 nt, Artificial Sequence
  Description of Artificial Sequence: Synthetic oligonucleotide
  Sense strand starting at position 1823 of SEQ ID NO: 1887308
aguacacagcuugguaaau

SEQ ID NO: 2462359 - RNA, 19 nt, Artificial Sequence
  Description of Artificial Sequence: Synthetic oligonucleotide
  Antisense strand to SEQ ID NO: 2462358
auuuaccaagcuguguacu

SEQ ID NO: 2462360 - RNA, 19 nt, Artificial Sequence
  Description of Artificial Sequence: Synthetic oligonucleotide
  Sense strand starting at position 1911 of SEQ ID NO: 1887308
acagauuacuuacaaggga

SEQ ID NO: 2462361 - RNA, 19 nt, Artificial Sequence
  Description of Artificial Sequence: Synthetic oligonucleotide
  Antisense strand to SEQ ID NO: 2462360
ucccuuguaaguaaucugu

SEQ ID NO: 2462362 - RNA, 19 nt, Artificial Sequence
  Description of Artificial Sequence: Synthetic oligonucleotide
  Sense strand starting at position 1989 of SEQ ID NO: 1887308
uggaucaauucucccaagu

SEQ ID NO: 2462363 - RNA, 19 nt, Artificial Sequence
  Description of Artificial Sequence: Synthetic oligonucleotide
  Antisense strand to SEQ ID NO: 2462362
acuugggagaauugaucca

SEQ ID NO: 2462364 - RNA, 19 nt, Artificial Sequence
  Description of Artificial Sequence: Synthetic oligonucleotide
  Sense strand starting at position 1999 of SEQ ID NO: 1887308
cucccaagugcucagggaa

SEQ ID NO: 2462365 - RNA, 19 nt, Artificial Sequence
  Description of Artificial Sequence: Synthetic oligonucleotide
  Antisense strand to SEQ ID NO: 2462364
uucccugagcacuugggag

SEQ ID NO: 2462366 - RNA, 19 nt, Artificial Sequence
  Description of Artificial Sequence: Synthetic oligonucleotide
  Sense strand starting at position 2046 of SEQ ID NO: 1887308
acucaaauuuaaugugaag

SEQ ID NO: 2462367 - RNA, 19 nt, Artificial Sequence
  Description of Artificial Sequence: Synthetic oligonucleotide
  Antisense strand to SEQ ID NO: 2462366
cuucacauuaaauuugagu

SEQ ID NO: 2462368 - RNA, 19 nt, Artificial Sequence
  Description of Artificial Sequence: Synthetic oligonucleotide
  Sense strand starting at position 2066 of SEQ ID NO: 1887308
aacgaugagugauuggaca

SEQ ID NO: 2462369 - RNA, 19 nt, Artificial Sequence
  Description of Artificial Sequence: Synthetic oligonucleotide
  Antisense strand to SEQ ID NO: 2462368
uguccaaucacucaucguu

SEQ ID NO: 2462370 - RNA, 19 nt, Artificial Sequence
  Description of Artificial Sequence: Synthetic oligonucleotide
  Sense strand starting at position 2068 of SEQ ID NO: 1887308
cgaugagugauuggacaaa

SEQ ID NO: 2462371 - RNA, 19 nt, Artificial Sequence
  Description of Artificial Sequence: Synthetic oligonucleotide
  Antisense strand to SEQ ID NO: 2462370
uuuguccaaucacucaucg

SEQ ID NO: 2462372 - RNA, 19 nt, Artificial Sequence
  Description of Artificial Sequence: Synthetic oligonucleotide
  Sense strand starting at position 2081 of SEQ ID NO: 1887308
gacaaaguuuacccgauga

SEQ ID NO: 2462373 - RNA, 19 nt, Artificial Sequence
  Description of Artificial Sequence: Synthetic oligonucleotide
  Antisense strand to SEQ ID NO: 2462372
ucaucggguaaacuuuguc

SEQ ID NO: 2462374 - RNA, 19 nt, Artificial Sequence
  Description of Artificial Sequence: Synthetic oligonucleotide
  Sense strand starting at position 2217 of SEQ ID NO: 1887308
cugauugugcaucauauau

SEQ ID NO: 2462375 - RNA, 19 nt, Artificial Sequence
  Description of Artificial Sequence: Synthetic oligonucleotide
  Antisense strand to SEQ ID NO: 2462374
auauaugaugcacaaucag

SEQ ID NO: 2462376 - RNA, 19 nt, Artificial Sequence
  Description of Artificial Sequence: Synthetic oligonucleotide
  Sense strand starting at position 2365 of SEQ ID NO: 1887308
gauccuuuacuguauguga

SEQ ID NO: 2462377 - RNA, 19 nt, Artificial Sequence
  Description of Artificial Sequence: Synthetic oligonucleotide
  Antisense strand to SEQ ID NO: 2462376
ucacauacaguaaaggauc

SEQ ID NO: 2462378 - RNA, 19 nt, Artificial Sequence
  Description of Artificial Sequence: Synthetic oligonucleotide
  Sense strand starting at position 2390 of SEQ ID NO: 1887308
guccaagaaccuggucaau

SEQ ID NO: 2462379 - RNA, 19 nt, Artificial Sequence
  Description of Artificial Sequence: Synthetic oligonucleotide
  Antisense strand to SEQ ID NO: 2462378
auugaccagguucuuggac

SEQ ID NO: 2462380 - RNA, 19 nt, Artificial Sequence
  Description of Artificial Sequence: Synthetic oligonucleotide
  Sense strand starting at position 2392 of SEQ ID NO: 1887308
ccaagaaccuggucaauca

SEQ ID NO: 2462381 - RNA, 19 nt, Artificial Sequence
  Description of Artificial Sequence: Synthetic oligonucleotide
  Antisense strand to SEQ ID NO: 2462380
ugauugaccagguucuugg

SEQ ID NO: 2462382 - RNA, 19 nt, Artificial Sequence
  Description of Artificial Sequence: Synthetic oligonucleotide
  Sense strand starting at position 2600 of SEQ ID NO: 1887308
augguagaauucccaguca

SEQ ID NO: 2462383 - RNA, 19 nt, Artificial Sequence
  Description of Artificial Sequence: Synthetic oligonucleotide
  Antisense strand to SEQ ID NO: 2462382
ugacugggaauucuaccau

SEQ ID NO: 2462384 - RNA, 19 nt, Artificial Sequence
  Description of Artificial Sequence: Synthetic oligonucleotide
  Sense strand starting at position 2911 of SEQ ID NO: 1887308
ugcucucaucuuugacaga

SEQ ID NO: 2462385 - RNA, 19 nt, Artificial Sequence
  Description of Artificial Sequence: Synthetic oligonucleotide
  Antisense strand to SEQ ID NO: 2462384
ucugucaaagaugagagca

SEQ ID NO: 2462386 - RNA, 19 nt, Artificial Sequence
  Description of Artificial Sequence: Synthetic oligonucleotide
  Sense strand starting at position 3056 of SEQ ID NO: 1887308
ggagguuuccugcaguaag

SEQ ID NO: 2462387 - RNA, 19 nt, Artificial Sequence
  Description of Artificial Sequence: Synthetic oligonucleotide
  Antisense strand to SEQ ID NO: 2462386
cuuacugcaggaaaccucc

SEQ ID NO: 2462388 - RNA, 19 nt, Artificial Sequence
  Description of Artificial Sequence: Synthetic oligonucleotide
  Sense strand starting at position 3161 of SEQ ID NO: 1887308
cuuccuugcucagugaacu

SEQ ID NO: 2462389 - RNA, 19 nt, Artificial Sequence
  Description of Artificial Sequence: Synthetic oligonucleotide
  Antisense strand to SEQ ID NO: 2462388
aguucacugagcaaggaag

SEQ ID NO: 2462390 - RNA, 19 nt, Artificial Sequence
  Description of Artificial Sequence: Synthetic oligonucleotide
  Sense strand starting at position 3704 of SEQ ID NO: 1887308
cccggaugucuagaaucag

SEQ ID NO: 2462391 - RNA, 19 nt, Artificial Sequence
  Description of Artificial Sequence: Synthetic oligonucleotide
  Antisense strand to SEQ ID NO: 2462390
cugauucuagacauccggg

SEQ ID NO: 2462392 - RNA, 19 nt, Artificial Sequence
  Description of Artificial Sequence: Synthetic oligonucleotide
  Sense strand starting at position 3943 of SEQ ID NO: 1887308
caauuuaaguuguaagaag

SEQ ID NO: 2462393 - RNA, 19 nt, Artificial Sequence
  Description of Artificial Sequence: Synthetic oligonucleotide
  Antisense strand to SEQ ID NO: 2462392
cuucuuacaacuuaaauug

SEQ ID NO: 2462394 - RNA, 19 nt, Artificial Sequence
  Description of Artificial Sequence: Synthetic oligonucleotide
  Sense strand starting at position 35 of SEQ ID NO: 1887309
ccugcuaaucagggaaaua

SEQ ID NO: 2462395 - RNA, 19 nt, Artificial Sequence
  Description of Artificial Sequence: Synthetic oligonucleotide
  Antisense strand to SEQ ID NO: 2462394
uauuucccugauuagcagg

SEQ ID NO: 2462396 - RNA, 19 nt, Artificial Sequence
  Description of Artificial Sequence: Synthetic oligonucleotide
  Sense strand starting at position 95 of SEQ ID NO: 1887309
cccagucagcucugaagau

SEQ ID NO: 2462397 - RNA, 19 nt, Artificial Sequence
  Description of Artificial Sequence: Synthetic oligonucleotide
  Antisense strand to SEQ ID NO: 2462396
aucuucagagcugacuggg

SEQ ID NO: 2462398 - RNA, 19 nt, Artificial Sequence
  Description of Artificial Sequence: Synthetic oligonucleotide
  Sense strand starting at position 108 of SEQ ID NO: 1887309
gaagauaccuaugcucugu

SEQ ID NO: 2462399 - RNA, 19 nt, Artificial Sequence
  Description of Artificial Sequence: Synthetic oligonucleotide
  Antisense strand to SEQ ID NO: 2462398
acagagcauagguaucuuc

SEQ ID NO: 2462400 - RNA, 19 nt, Artificial Sequence
  Description of Artificial Sequence: Synthetic oligonucleotide
  Sense strand starting at position 171 of SEQ ID NO: 1887309
cuaggaguucuccaguucu

SEQ ID NO: 2462401 - RNA, 19 nt, Artificial Sequence
  Description of Artificial Sequence: Synthetic oligonucleotide
  Antisense strand to SEQ ID NO: 2462400
agaacuggagaacuccuag

SEQ ID NO: 2462402 - RNA, 19 nt, Artificial Sequence
  Description of Artificial Sequence: Synthetic oligonucleotide
  Sense strand starting at position 177 of SEQ ID NO: 1887309
guucuccaguucuuaggau

SEQ ID NO: 2462403 - RNA, 19 nt, Artificial Sequence
  Description of Artificial Sequence: Synthetic oligonucleotide
  Antisense strand to SEQ ID NO: 2462402
auccuaagaacuggagaac

SEQ ID NO: 2462404 - RNA, 19 nt, Artificial Sequence
  Description of Artificial Sequence: Synthetic oligonucleotide
  Sense strand starting at position 183 of SEQ ID NO: 1887309
caguucuuaggauaagcau

SEQ ID NO: 2462405 - RNA, 19 nt, Artificial Sequence
  Description of Artificial Sequence: Synthetic oligonucleotide
  Antisense strand to SEQ ID NO: 2462404
augcuuauccuaagaacug

SEQ ID NO: 2462406 - RNA, 19 nt, Artificial Sequence
  Description of Artificial Sequence: Synthetic oligonucleotide
  Sense strand starting at position 208 of SEQ ID NO: 1887309
ccaaauugccauuauagug

SEQ ID NO: 2462407 - RNA, 19 nt, Artificial Sequence
  Description of Artificial Sequence: Synthetic oligonucleotide
  Antisense strand to SEQ ID NO: 2462406
cacuauaauggcaauuugg

SEQ ID NO: 2462408 - RNA, 19 nt, Artificial Sequence
  Description of Artificial Sequence: Synthetic oligonucleotide
  Sense strand starting at position 345 of SEQ ID NO: 1887309
ggcuguauaguuggaugga

SEQ ID NO: 2462409 - RNA, 19 nt, Artificial Sequence
  Description of Artificial Sequence: Synthetic oligonucleotide
  Antisense strand to SEQ ID NO: 2462408
uccauccaacuauacagcc

SEQ ID NO: 2462410 - RNA, 19 nt, Artificial Sequence
  Description of Artificial Sequence: Synthetic oligonucleotide
  Sense strand starting at position 569 of SEQ ID NO: 1887309
uuaagagaguuccucauac

SEQ ID NO: 2462411 - RNA, 19 nt, Artificial Sequence
  Description of Artificial Sequence: Synthetic oligonucleotide
  Antisense strand to SEQ ID NO: 2462410
guaugaggaacucucuuaa

SEQ ID NO: 2462412 - RNA, 19 nt, Artificial Sequence
  Description of Artificial Sequence: Synthetic oligonucleotide
  Sense strand starting at position 842 of SEQ ID NO: 1887309
gagacaugagugcaccauu

SEQ ID NO: 2462413 - RNA, 19 nt, Artificial Sequence
  Description of Artificial Sequence: Synthetic oligonucleotide
  Antisense strand to SEQ ID NO: 2462412
aauggugcacucaugucuc

SEQ ID NO: 2462414 - RNA, 19 nt, Artificial Sequence
  Description of Artificial Sequence: Synthetic oligonucleotide
  Sense strand starting at position 1535 of SEQ ID NO: 1887309
cugucauuauuugagagaa

SEQ ID NO: 2462415 - RNA, 19 nt, Artificial Sequence
  Description of Artificial Sequence: Synthetic oligonucleotide
  Antisense strand to SEQ ID NO: 2462414
uucucucaaauaaugacag

SEQ ID NO: 2462416 - RNA, 19 nt, Artificial Sequence
  Description of Artificial Sequence: Synthetic oligonucleotide
  Sense strand starting at position 1537 of SEQ ID NO: 1887309
gucauuauuugagagaaag

SEQ ID NO: 2462417 - RNA, 19 nt, Artificial Sequence
  Description of Artificial Sequence: Synthetic oligonucleotide
  Antisense strand to SEQ ID NO: 2462416
cuuucucucaaauaaugac

SEQ ID NO: 2462418 - RNA, 19 nt, Artificial Sequence
  Description of Artificial Sequence: Synthetic oligonucleotide
  Sense strand starting at position 1560 of SEQ ID NO: 1887309
uugucugaugcacagagaa

SEQ ID NO: 2462419 - RNA, 19 nt, Artificial Sequence
  Description of Artificial Sequence: Synthetic oligonucleotide
  Antisense strand to SEQ ID NO: 2462418
uucucugugcaucagacaa

SEQ ID NO: 2462420 - RNA, 19 nt, Artificial Sequence
  Description of Artificial Sequence: Synthetic oligonucleotide
  Sense strand starting at position 1592 of SEQ ID NO: 1887309
ugagaaguucuaggugggu

SEQ ID NO: 2462421 - RNA, 19 nt, Artificial Sequence
  Description of Artificial Sequence: Synthetic oligonucleotide
  Antisense strand to SEQ ID NO: 2462420
acccaccuagaacuucuca

SEQ ID NO: 2462422 - RNA, 19 nt, Artificial Sequence
  Description of Artificial Sequence: Synthetic oligonucleotide
  Sense strand starting at position 1594 of SEQ ID NO: 1887309
agaaguucuagguggguau

SEQ ID NO: 2462423 - RNA, 19 nt, Artificial Sequence
  Description of Artificial Sequence: Synthetic oligonucleotide
  Antisense strand to SEQ ID NO: 2462422
auacccaccuagaacuucu

SEQ ID NO: 2462424 - RNA, 19 nt, Artificial Sequence
  Description of Artificial Sequence: Synthetic oligonucleotide
  Sense strand starting at position 2106 of SEQ ID NO: 1887309
ggugaagaaugagucuuau

SEQ ID NO: 2462425 - RNA, 19 nt, Artificial Sequence
  Description of Artificial Sequence: Synthetic oligonucleotide
  Antisense strand to SEQ ID NO: 2462424
auaagacucauucuucacc

SEQ ID NO: 2462426 - RNA, 19 nt, Artificial Sequence
  Description of Artificial Sequence: Synthetic oligonucleotide
  Sense strand starting at position 2117 of SEQ ID NO: 1887309
agucuuaugaaguaguuau

SEQ ID NO: 2462427 - RNA, 19 nt, Artificial Sequence
  Description of Artificial Sequence: Synthetic oligonucleotide
  Antisense strand to SEQ ID NO: 2462426
auaacuacuucauaagacu

SEQ ID NO: 2462428 - RNA, 19 nt, Artificial Sequence
  Description of Artificial Sequence: Synthetic oligonucleotide
  Sense strand starting at position 2146 of SEQ ID NO: 1887309
gcaggaaucuagcuacuga

SEQ ID NO: 2462429 - RNA, 19 nt, Artificial Sequence
  Description of Artificial Sequence: Synthetic oligonucleotide
  Antisense strand to SEQ ID NO: 2462428
ucaguagcuagauuccugc

SEQ ID NO: 2462430 - RNA, 19 nt, Artificial Sequence
  Description of Artificial Sequence: Synthetic oligonucleotide
  Sense strand starting at position 2208 of SEQ ID NO: 1887309
agagaacaaugacauugaa

SEQ ID NO: 2462431 - RNA, 19 nt, Artificial Sequence
  Description of Artificial Sequence: Synthetic oligonucleotide
  Antisense strand to SEQ ID NO: 2462430
uucaaugucauuguucucu

SEQ ID NO: 2462432 - RNA, 19 nt, Artificial Sequence
  Description of Artificial Sequence: Synthetic oligonucleotide
  Sense strand starting at position 2333 of SEQ ID NO: 1887309
gcaaaugauugccuuggaa

SEQ ID NO: 2462433 - RNA, 19 nt, Artificial Sequence
  Description of Artificial Sequence: Synthetic oligonucleotide
  Antisense strand to SEQ ID NO: 2462432
uuccaaggcaaucauuugc

SEQ ID NO: 2462434 - RNA, 19 nt, Artificial Sequence
  Description of Artificial Sequence: Synthetic oligonucleotide
  Sense strand starting at position 2335 of SEQ ID NO: 1887309
aaaugauugccuuggaaug

SEQ ID NO: 2462435 - RNA, 19 nt, Artificial Sequence
  Description of Artificial Sequence: Synthetic oligonucleotide
  Antisense strand to SEQ ID NO: 2462434
cauuccaaggcaaucauuu

SEQ ID NO: 2462436 - RNA, 19 nt, Artificial Sequence
  Description of Artificial Sequence: Synthetic oligonucleotide
  Sense strand starting at position 2336 of SEQ ID NO: 1887309
aaugauugccuuggaaugu

SEQ ID NO: 2462437 - RNA, 19 nt, Artificial Sequence
  Description of Artificial Sequence: Synthetic oligonucleotide
  Antisense strand to SEQ ID NO: 2462436
acauuccaaggcaaucauu

SEQ ID NO: 2462438 - RNA, 19 nt, Artificial Sequence
  Description of Artificial Sequence: Synthetic oligonucleotide
  Sense strand starting at position 2532 of SEQ ID NO: 1887309
gguccuacagaacguaauu

SEQ ID NO: 2462439 - RNA, 19 nt, Artificial Sequence
  Description of Artificial Sequence: Synthetic oligonucleotide
  Antisense strand to SEQ ID NO: 2462438
aauuacguucuguaggacc

SEQ ID NO: 2462440 - RNA, 19 nt, Artificial Sequence
  Description of Artificial Sequence: Synthetic oligonucleotide
  Sense strand starting at position 2640 of SEQ ID NO: 1887309
aagacuauuugcuuucguu

SEQ ID NO: 2462441 - RNA, 19 nt, Artificial Sequence
  Description of Artificial Sequence: Synthetic oligonucleotide
  Antisense strand to SEQ ID NO: 2462440
aacgaaagcaaauagucuu

SEQ ID NO: 2462442 - RNA, 19 nt, Artificial Sequence
  Description of Artificial Sequence: Synthetic oligonucleotide
  Sense strand starting at position 2644 of SEQ ID NO: 1887309
cuauuugcuuucguuauca

SEQ ID NO: 2462443 - RNA, 19 nt, Artificial Sequence
  Description of Artificial Sequence: Synthetic oligonucleotide
  Antisense strand to SEQ ID NO: 2462442
ugauaacgaaagcaaauag

SEQ ID NO: 2462444 - RNA, 19 nt, Artificial Sequence
  Description of Artificial Sequence: Synthetic oligonucleotide
  Sense strand starting at position 2646 of SEQ ID NO: 1887309
auuugcuuucguuaucaua

SEQ ID NO: 2462445 - RNA, 19 nt, Artificial Sequence
  Description of Artificial Sequence: Synthetic oligonucleotide
  Antisense strand to SEQ ID NO: 2462444
uaugauaacgaaagcaaau

SEQ ID NO: 2462446 - RNA, 19 nt, Artificial Sequence
  Description of Artificial Sequence: Synthetic oligonucleotide
  Sense strand starting at position 2758 of SEQ ID NO: 1887309
guaguuuaauguucugaag

SEQ ID NO: 2462447 - RNA, 19 nt, Artificial Sequence
  Description of Artificial Sequence: Synthetic oligonucleotide
  Antisense strand to SEQ ID NO: 2462446
cuucagaacauuaaacuac

SEQ ID NO: 2462448 - RNA, 19 nt, Artificial Sequence
  Description of Artificial Sequence: Synthetic oligonucleotide
  Sense strand starting at position 2860 of SEQ ID NO: 1887309
acugcccuuccauaggaua

SEQ ID NO: 2462449 - RNA, 19 nt, Artificial Sequence
  Description of Artificial Sequence: Synthetic oligonucleotide
  Antisense strand to SEQ ID NO: 2462448
uauccuauggaagggcagu

SEQ ID NO: 2462450 - RNA, 19 nt, Artificial Sequence
  Description of Artificial Sequence: Synthetic oligonucleotide
  Sense strand starting at position 2868 of SEQ ID NO: 1887309
uccauaggauaugcugaaa

SEQ ID NO: 2462451 - RNA, 19 nt, Artificial Sequence
  Description of Artificial Sequence: Synthetic oligonucleotide
  Antisense strand to SEQ ID NO: 2462450
uuucagcauauccuaugga

SEQ ID NO: 2462452 - RNA, 19 nt, Artificial Sequence
  Description of Artificial Sequence: Synthetic oligonucleotide
  Sense strand starting at position 2893 of SEQ ID NO: 1887309
agaauugauuaauugcaca

SEQ ID NO: 2462453 - RNA, 19 nt, Artificial Sequence
  Description of Artificial Sequence: Synthetic oligonucleotide
  Antisense strand to SEQ ID NO: 2462452
ugugcaauuaaucaauucu

SEQ ID NO: 2462454 - RNA, 19 nt, Artificial Sequence
  Description of Artificial Sequence: Synthetic oligonucleotide
  Sense strand starting at position 2940 of SEQ ID NO: 1887309
ugaaguucugggcaccaau

SEQ ID NO: 2462455 - RNA, 19 nt, Artificial Sequence
  Description of Artificial Sequence: Synthetic oligonucleotide
  Antisense strand to SEQ ID NO: 2462454
auuggugcccagaacuuca

SEQ ID NO: 2462456 - RNA, 19 nt, Artificial Sequence
  Description of Artificial Sequence: Synthetic oligonucleotide
  Sense strand starting at position 3061 of SEQ ID NO: 1887309
cauauuugguaguagauca

SEQ ID NO: 2462457 - RNA, 19 nt, Artificial Sequence
  Description of Artificial Sequence: Synthetic oligonucleotide
  Antisense strand to SEQ ID NO: 2462456
ugaucuacuaccaaauaug

SEQ ID NO: 2462458 - RNA, 19 nt, Artificial Sequence
  Description of Artificial Sequence: Synthetic oligonucleotide
  Sense strand starting at position 3264 of SEQ ID NO: 1887309
agauaccuacucuguuagu

SEQ ID NO: 2462459 - RNA, 19 nt, Artificial Sequence
  Description of Artificial Sequence: Synthetic oligonucleotide
  Antisense strand to SEQ ID NO: 2462458
acuaacagaguagguaucu

SEQ ID NO: 2462460 - RNA, 19 nt, Artificial Sequence
  Description of Artificial Sequence: Synthetic oligonucleotide
  Sense strand starting at position 3310 of SEQ ID NO: 1887309
uguauugauaguugcagaa

SEQ ID NO: 2462461 - RNA, 19 nt, Artificial Sequence
  Description of Artificial Sequence: Synthetic oligonucleotide
  Antisense strand to SEQ ID NO: 2462460
uucugcaacuaucaauaca

SEQ ID NO: 2462462 - RNA, 19 nt, Artificial Sequence
  Description of Artificial Sequence: Synthetic oligonucleotide
  Sense strand starting at position 3698 of SEQ ID NO: 1887309
ugugaauacuuaccauguu

SEQ ID NO: 2462463 - RNA, 19 nt, Artificial Sequence
  Description of Artificial Sequence: Synthetic oligonucleotide
  Antisense strand to SEQ ID NO: 2462462
aacaugguaaguauucaca

SEQ ID NO: 2462464 - RNA, 19 nt, Artificial Sequence
  Description of Artificial Sequence: Synthetic oligonucleotide
  Sense strand starting at position 3823 of SEQ ID NO: 1887309
gcaugcugaaauugaguaa

SEQ ID NO: 2462465 - RNA, 19 nt, Artificial Sequence
  Description of Artificial Sequence: Synthetic oligonucleotide
  Antisense strand to SEQ ID NO: 2462464
uuacucaauuucagcaugc

SEQ ID NO: 2462466 - RNA, 19 nt, Artificial Sequence
  Description of Artificial Sequence: Synthetic oligonucleotide
  Sense strand starting at position 3826 of SEQ ID NO: 1887309
ugcugaaauugaguaaauu

SEQ ID NO: 2462467 - RNA, 19 nt, Artificial Sequence
  Description of Artificial Sequence: Synthetic oligonucleotide
  Antisense strand to SEQ ID NO: 2462466
aauuuacucaauuucagca

SEQ ID NO: 2462468 - RNA, 19 nt, Artificial Sequence
  Description of Artificial Sequence: Synthetic oligonucleotide
  Sense strand starting at position 3836 of SEQ ID NO: 1887309
gaguaaauuugccagggac

SEQ ID NO: 2462469 - RNA, 19 nt, Artificial Sequence
  Description of Artificial Sequence: Synthetic oligonucleotide
  Antisense strand to SEQ ID NO: 2462468
gucccuggcaaauuuacuc

SEQ ID NO: 2462470 - RNA, 19 nt, Artificial Sequence
  Description of Artificial Sequence: Synthetic oligonucleotide
  Sense strand starting at position 3864 of SEQ ID NO: 1887309
gggauuacugagggugguu

SEQ ID NO: 2462471 - RNA, 19 nt, Artificial Sequence
  Description of Artificial Sequence: Synthetic oligonucleotide
  Antisense strand to SEQ ID NO: 2462470
aaccacccucaguaauccc

SEQ ID NO: 2462472 - RNA, 19 nt, Artificial Sequence
  Description of Artificial Sequence: Synthetic oligonucleotide
  Sense strand starting at position 3958 of SEQ ID NO: 1887309
ugcugugucccugaggauu

SEQ ID NO: 2462473 - RNA, 19 nt, Artificial Sequence
  Description of Artificial Sequence: Synthetic oligonucleotide
  Antisense strand to SEQ ID NO: 2462472
aauccucagggacacagca

SEQ ID NO: 2462474 - RNA, 19 nt, Artificial Sequence
  Description of Artificial Sequence: Synthetic oligonucleotide
  Sense strand starting at position 24 of SEQ ID NO: 1887310
ugucaauuauagucucaug

SEQ ID NO: 2462475 - RNA, 19 nt, Artificial Sequence
  Description of Artificial Sequence: Synthetic oligonucleotide
  Antisense strand to SEQ ID NO: 2462474
caugagacuauaauugaca

SEQ ID NO: 2462476 - RNA, 19 nt, Artificial Sequence
  Description of Artificial Sequence: Synthetic oligonucleotide
  Sense strand starting at position 101 of SEQ ID NO: 1887310
gacagaacagcucauuagu

SEQ ID NO: 2462477 - RNA, 19 nt, Artificial Sequence
  Description of Artificial Sequence: Synthetic oligonucleotide
  Antisense strand to SEQ ID NO: 2462476
acuaaugagcuguucuguc

SEQ ID NO: 2462478 - RNA, 19 nt, Artificial Sequence
  Description of Artificial Sequence: Synthetic oligonucleotide
  Sense strand starting at position 117 of SEQ ID NO: 1887310
aguggcauucguuaauaaa

SEQ ID NO: 2462479 - RNA, 19 nt, Artificial Sequence
  Description of Artificial Sequence: Synthetic oligonucleotide
  Antisense strand to SEQ ID NO: 2462478
uuuauuaacgaaugccacu

SEQ ID NO: 2462480 - RNA, 19 nt, Artificial Sequence
  Description of Artificial Sequence: Synthetic oligonucleotide
  Sense strand starting at position 172 of SEQ ID NO: 1887310
aggcaugcgcuguuugaca

SEQ ID NO: 2462481 - RNA, 19 nt, Artificial Sequence
  Description of Artificial Sequence: Synthetic oligonucleotide
  Antisense strand to SEQ ID NO: 2462480
ugucaaacagcgcaugccu

SEQ ID NO: 2462482 - RNA, 19 nt, Artificial Sequence
  Description of Artificial Sequence: Synthetic oligonucleotide
  Sense strand starting at position 215 of SEQ ID NO: 1887310
ucaguauugcaguaauucu

SEQ ID NO: 2462483 - RNA, 19 nt, Artificial Sequence
  Description of Artificial Sequence: Synthetic oligonucleotide
  Antisense strand to SEQ ID NO: 2462482
agaauuacugcaauacuga

SEQ ID NO: 2462484 - RNA, 19 nt, Artificial Sequence
  Description of Artificial Sequence: Synthetic oligonucleotide
  Sense strand starting at position 279 of SEQ ID NO: 1887310
cgaaauggugugaguguca

SEQ ID NO: 2462485 - RNA, 19 nt, Artificial Sequence
  Description of Artificial Sequence: Synthetic oligonucleotide
  Antisense strand to SEQ ID NO: 2462484
ugacacucacaccauuucg

SEQ ID NO: 2462486 - RNA, 19 nt, Artificial Sequence
  Description of Artificial Sequence: Synthetic oligonucleotide
  Sense strand starting at position 385 of SEQ ID NO: 1887310
ucaggcuuaccugguuuaa

SEQ ID NO: 2462487 - RNA, 19 nt, Artificial Sequence
  Description of Artificial Sequence: Synthetic oligonucleotide
  Antisense strand to SEQ ID NO: 2462486
uuaaaccagguaagccuga

SEQ ID NO: 2462488 - RNA, 19 nt, Artificial Sequence
  Description of Artificial Sequence: Synthetic oligonucleotide
  Sense strand starting at position 489 of SEQ ID NO: 1887310
cuuaaucuuccagauugug

SEQ ID NO: 2462489 - RNA, 19 nt, Artificial Sequence
  Description of Artificial Sequence: Synthetic oligonucleotide
  Antisense strand to SEQ ID NO: 2462488
cacaaucuggaagauuaag

SEQ ID NO: 2462490 - RNA, 19 nt, Artificial Sequence
  Description of Artificial Sequence: Synthetic oligonucleotide
  Sense strand starting at position 501 of SEQ ID NO: 1887310
gauugugugcugcaauaau

SEQ ID NO: 2462491 - RNA, 19 nt, Artificial Sequence
  Description of Artificial Sequence: Synthetic oligonucleotide
  Antisense strand to SEQ ID NO: 2462490
auuauugcagcacacaauc

SEQ ID NO: 2462492 - RNA, 19 nt, Artificial Sequence
  Description of Artificial Sequence: Synthetic oligonucleotide
  Sense strand starting at position 637 of SEQ ID NO: 1887310
ucaggaguccgguauagga

SEQ ID NO: 2462493 - RNA, 19 nt, Artificial Sequence
  Description of Artificial Sequence: Synthetic oligonucleotide
  Antisense strand to SEQ ID NO: 2462492
uccuauaccggacuccuga

SEQ ID NO: 2462494 - RNA, 19 nt, Artificial Sequence
  Description of Artificial Sequence: Synthetic oligonucleotide
  Sense strand starting at position 641 of SEQ ID NO: 1887310
gaguccgguauaggaaaua

SEQ ID NO: 2462495 - RNA, 19 nt, Artificial Sequence
  Description of Artificial Sequence: Synthetic oligonucleotide
  Antisense strand to SEQ ID NO: 2462494
uauuuccuauaccggacuc

SEQ ID NO: 2462496 - RNA, 19 nt, Artificial Sequence
  Description of Artificial Sequence: Synthetic oligonucleotide
  Sense strand starting at position 868 of SEQ ID NO: 1887310
uugucaugccaguaaauuc

SEQ ID NO: 2462497 - RNA, 19 nt, Artificial Sequence
  Description of Artificial Sequence: Synthetic oligonucleotide
  Antisense strand to SEQ ID NO: 2462496
gaauuuacuggcaugacaa

SEQ ID NO: 2462498 - RNA, 19 nt, Artificial Sequence
  Description of Artificial Sequence: Synthetic oligonucleotide
  Sense strand starting at position 905 of SEQ ID NO: 1887310
aaagaauggugccucagau

SEQ ID NO: 2462499 - RNA, 19 nt, Artificial Sequence
  Description of Artificial Sequence: Synthetic oligonucleotide
  Antisense strand to SEQ ID NO: 2462498
aucugaggcaccauucuuu

SEQ ID NO: 2462500 - RNA, 19 nt, Artificial Sequence
  Description of Artificial Sequence: Synthetic oligonucleotide
  Sense strand starting at position 911 of SEQ ID NO: 1887310
uggugccucagaugacuau

SEQ ID NO: 2462501 - RNA, 19 nt, Artificial Sequence
  Description of Artificial Sequence: Synthetic oligonucleotide
  Antisense strand to SEQ ID NO: 2462500
auagucaucugaggcacca

SEQ ID NO: 2462502 - RNA, 19 nt, Artificial Sequence
  Description of Artificial Sequence: Synthetic oligonucleotide
  Sense strand starting at position 923 of SEQ ID NO: 1887310
ugacuaugaugucugaacu

SEQ ID NO: 2462503 - RNA, 19 nt, Artificial Sequence
  Description of Artificial Sequence: Synthetic oligonucleotide
  Antisense strand to SEQ ID NO: 2462502
aguucagacaucauaguca

SEQ ID NO: 2462504 - RNA, 19 nt, Artificial Sequence
  Description of Artificial Sequence: Synthetic oligonucleotide
  Sense strand starting at position 924 of SEQ ID NO: 1887310
gacuaugaugucugaacug

SEQ ID NO: 2462505 - RNA, 19 nt, Artificial Sequence
  Description of Artificial Sequence: Synthetic oligonucleotide
  Antisense strand to SEQ ID NO: 2462504
caguucagacaucauaguc

SEQ ID NO: 2462506 - RNA, 19 nt, Artificial Sequence
  Description of Artificial Sequence: Synthetic oligonucleotide
  Sense strand starting at position 982 of SEQ ID NO: 1887310
guaacagucucccuggagu

SEQ ID NO: 2462507 - RNA, 19 nt, Artificial Sequence
  Description of Artificial Sequence: Synthetic oligonucleotide
  Antisense strand to SEQ ID NO: 2462506
acuccagggagacuguuac

SEQ ID NO: 2462508 - RNA, 19 nt, Artificial Sequence
  Description of Artificial Sequence: Synthetic oligonucleotide
  Sense strand starting at position 1061 of SEQ ID NO: 1887310
gaccucgcucuguaauuga

SEQ ID NO: 2462509 - RNA, 19 nt, Artificial Sequence
  Description of Artificial Sequence: Synthetic oligonucleotide
  Antisense strand to SEQ ID NO: 2462508
ucaauuacagagcgagguc

SEQ ID NO: 2462510 - RNA, 19 nt, Artificial Sequence
  Description of Artificial Sequence: Synthetic oligonucleotide
  Sense strand starting at position 1239 of SEQ ID NO: 1887310
ggagaugggccuuauaggu

SEQ ID NO: 2462511 - RNA, 19 nt, Artificial Sequence
  Description of Artificial Sequence: Synthetic oligonucleotide
  Antisense strand to SEQ ID NO: 2462510
accuauaaggcccaucucc

SEQ ID NO: 2462512 - RNA, 19 nt, Artificial Sequence
  Description of Artificial Sequence: Synthetic oligonucleotide
  Sense strand starting at position 2270 of SEQ ID NO: 1887310
gggaauuguuuacucugag

SEQ ID NO: 2462513 - RNA, 19 nt, Artificial Sequence
  Description of Artificial Sequence: Synthetic oligonucleotide
  Antisense strand to SEQ ID NO: 2462512
cucagaguaaacaauuccc

SEQ ID NO: 2462514 - RNA, 19 nt, Artificial Sequence
  Description of Artificial Sequence: Synthetic oligonucleotide
  Sense strand starting at position 2271 of SEQ ID NO: 1887310
ggaauuguuuacucugaga

SEQ ID NO: 2462515 - RNA, 19 nt, Artificial Sequence
  Description of Artificial Sequence: Synthetic oligonucleotide
  Antisense strand to SEQ ID NO: 2462514
ucucagaguaaacaauucc

SEQ ID NO: 2462516 - RNA, 19 nt, Artificial Sequence
  Description of Artificial Sequence: Synthetic oligonucleotide
  Sense strand starting at position 2273 of SEQ ID NO: 1887310
aauuguuuacucugagaga

SEQ ID NO: 2462517 - RNA, 19 nt, Artificial Sequence
  Description of Artificial Sequence: Synthetic oligonucleotide
  Antisense strand to SEQ ID NO: 2462516
ucucucagaguaaacaauu

SEQ ID NO: 2462518 - RNA, 19 nt, Artificial Sequence
  Description of Artificial Sequence: Synthetic oligonucleotide
  Sense strand starting at position 2331 of SEQ ID NO: 1887310
cccuuugcuccugaggacu

SEQ ID NO: 2462519 - RNA, 19 nt, Artificial Sequence
  Description of Artificial Sequence: Synthetic oligonucleotide
  Antisense strand to SEQ ID NO: 2462518
aguccucaggagcaaaggg

SEQ ID NO: 2462520 - RNA, 19 nt, Artificial Sequence
  Description of Artificial Sequence: Synthetic oligonucleotide
  Sense strand starting at position 2418 of SEQ ID NO: 1887310
ucccuaaaucuucggagga

SEQ ID NO: 2462521 - RNA, 19 nt, Artificial Sequence
  Description of Artificial Sequence: Synthetic oligonucleotide
  Antisense strand to SEQ ID NO: 2462520
uccuccgaagauuuaggga

SEQ ID NO: 2462522 - RNA, 19 nt, Artificial Sequence
  Description of Artificial Sequence: Synthetic oligonucleotide
  Sense strand starting at position 2436 of SEQ ID NO: 1887310
aaggaagggucuuucugau

SEQ ID NO: 2462523 - RNA, 19 nt, Artificial Sequence
  Description of Artificial Sequence: Synthetic oligonucleotide
  Antisense strand to SEQ ID NO: 2462522
aucagaaagacccuuccuu

SEQ ID NO: 2462524 - RNA, 19 nt, Artificial Sequence
  Description of Artificial Sequence: Synthetic oligonucleotide
  Sense strand starting at position 2878 of SEQ ID NO: 1887310
ggcugaaauauucguauaa

SEQ ID NO: 2462525 - RNA, 19 nt, Artificial Sequence
  Description of Artificial Sequence: Synthetic oligonucleotide
  Antisense strand to SEQ ID NO: 2462524
uuauacgaauauuucagcc

SEQ ID NO: 2462526 - RNA, 19 nt, Artificial Sequence
  Description of Artificial Sequence: Synthetic oligonucleotide
  Sense strand starting at position 2879 of SEQ ID NO: 1887310
gcugaaauauucguauaau

SEQ ID NO: 2462527 - RNA, 19 nt, Artificial Sequence
  Description of Artificial Sequence: Synthetic oligonucleotide
  Antisense strand to SEQ ID NO: 2462526
auuauacgaauauuucagc

SEQ ID NO: 2462528 - RNA, 19 nt, Artificial Sequence
  Description of Artificial Sequence: Synthetic oligonucleotide
  Sense strand starting at position 2968 of SEQ ID NO: 1887310
cuguuauuagaaugucuuu

SEQ ID NO: 2462529 - RNA, 19 nt, Artificial Sequence
  Description of Artificial Sequence: Synthetic oligonucleotide
  Antisense strand to SEQ ID NO: 2462528
aaagacauucuaauaacag

SEQ ID NO: 2462530 - RNA, 19 nt, Artificial Sequence
  Description of Artificial Sequence: Synthetic oligonucleotide
  Sense strand starting at position 2973 of SEQ ID NO: 1887310
auuagaaugucuuucucga

SEQ ID NO: 2462531 - RNA, 19 nt, Artificial Sequence
  Description of Artificial Sequence: Synthetic oligonucleotide
  Antisense strand to SEQ ID NO: 2462530
ucgagaaagacauucuaau

SEQ ID NO: 2462532 - RNA, 19 nt, Artificial Sequence
  Description of Artificial Sequence: Synthetic oligonucleotide
  Sense strand starting at position 2989 of SEQ ID NO: 1887310
cgaggagcucaauggacuu

SEQ ID NO: 2462533 - RNA, 19 nt, Artificial Sequence
  Description of Artificial Sequence: Synthetic oligonucleotide
  Antisense strand to SEQ ID NO: 2462532
aaguccauugagcuccucg

SEQ ID NO: 2462534 - RNA, 19 nt, Artificial Sequence
  Description of Artificial Sequence: Synthetic oligonucleotide
  Sense strand starting at position 3019 of SEQ ID NO: 1887310
cugaauucucagggcauau

SEQ ID NO: 2462535 - RNA, 19 nt, Artificial Sequence
  Description of Artificial Sequence: Synthetic oligonucleotide
  Antisense strand to SEQ ID NO: 2462534
auaugcccugagaauucag

SEQ ID NO: 2462536 - RNA, 19 nt, Artificial Sequence
  Description of Artificial Sequence: Synthetic oligonucleotide
  Sense strand starting at position 3023 of SEQ ID NO: 1887310
auucucagggcauauuaau

SEQ ID NO: 2462537 - RNA, 19 nt, Artificial Sequence
  Description of Artificial Sequence: Synthetic oligonucleotide
  Antisense strand to SEQ ID NO: 2462536
auuaauaugcccugagaau

SEQ ID NO: 2462538 - RNA, 19 nt, Artificial Sequence
  Description of Artificial Sequence: Synthetic oligonucleotide
  Sense strand starting at position 3190 of SEQ ID NO: 1887310
ccggccauucuuuaaagga

SEQ ID NO: 2462539 - RNA, 19 nt, Artificial Sequence
  Description of Artificial Sequence: Synthetic oligonucleotide
  Antisense strand to SEQ ID NO: 2462538
uccuuuaaagaauggccgg

SEQ ID NO: 2462540 - RNA, 19 nt, Artificial Sequence
  Description of Artificial Sequence: Synthetic oligonucleotide
  Sense strand starting at position 3235 of SEQ ID NO: 1887310
cguggcauugcucugcaua

SEQ ID NO: 2462541 - RNA, 19 nt, Artificial Sequence
  Description of Artificial Sequence: Synthetic oligonucleotide
  Antisense strand to SEQ ID NO: 2462540
uaugcagagcaaugccacg

SEQ ID NO: 2462542 - RNA, 19 nt, Artificial Sequence
  Description of Artificial Sequence: Synthetic oligonucleotide
  Sense strand starting at position 3284 of SEQ ID NO: 1887310
cucagauucuguuuaggag

SEQ ID NO: 2462543 - RNA, 19 nt, Artificial Sequence
  Description of Artificial Sequence: Synthetic oligonucleotide
  Antisense strand to SEQ ID NO: 2462542
cuccuaaacagaaucugag

SEQ ID NO: 2462544 - RNA, 19 nt, Artificial Sequence
  Description of Artificial Sequence: Synthetic oligonucleotide
  Sense strand starting at position 3489 of SEQ ID NO: 1887310
gugagucucaagugugaga

SEQ ID NO: 2462545 - RNA, 19 nt, Artificial Sequence
  Description of Artificial Sequence: Synthetic oligonucleotide
  Antisense strand to SEQ ID NO: 2462544
ucucacacuugagacucac

SEQ ID NO: 2462546 - RNA, 19 nt, Artificial Sequence
  Description of Artificial Sequence: Synthetic oligonucleotide
  Sense strand starting at position 3491 of SEQ ID NO: 1887310
gagucucaagugugagaaa

SEQ ID NO: 2462547 - RNA, 19 nt, Artificial Sequence
  Description of Artificial Sequence: Synthetic oligonucleotide
  Antisense strand to SEQ ID NO: 2462546
uuucucacacuugagacuc

SEQ ID NO: 2462548 - RNA, 19 nt, Artificial Sequence
  Description of Artificial Sequence: Synthetic oligonucleotide
  Sense strand starting at position 3502 of SEQ ID NO: 1887310
gugagaaaugcguaaauac

SEQ ID NO: 2462549 - RNA, 19 nt, Artificial Sequence
  Description of Artificial Sequence: Synthetic oligonucleotide
  Antisense strand to SEQ ID NO: 2462548
guauuuacgcauuucucac

SEQ ID NO: 2462550 - RNA, 19 nt, Artificial Sequence
  Description of Artificial Sequence: Synthetic oligonucleotide
  Sense strand starting at position 3512 of SEQ ID NO: 1887310
cguaaauacuaaguguaag

SEQ ID NO: 2462551 - RNA, 19 nt, Artificial Sequence
  Description of Artificial Sequence: Synthetic oligonucleotide
  Antisense strand to SEQ ID NO: 2462550
cuuacacuuaguauuuacg

SEQ ID NO: 2462552 - RNA, 19 nt, Artificial Sequence
  Description of Artificial Sequence: Synthetic oligonucleotide
  Sense strand starting at position 3581 of SEQ ID NO: 1887310
guccaagucacuggagaga

SEQ ID NO: 2462553 - RNA, 19 nt, Artificial Sequence
  Description of Artificial Sequence: Synthetic oligonucleotide
  Antisense strand to SEQ ID NO: 2462552
ucucuccagugacuuggac

SEQ ID NO: 2462554 - RNA, 19 nt, Artificial Sequence
  Description of Artificial Sequence: Synthetic oligonucleotide
  Sense strand starting at position 54 of SEQ ID NO: 1887312
uuuaguugagauuauccua

SEQ ID NO: 2462555 - RNA, 19 nt, Artificial Sequence
  Description of Artificial Sequence: Synthetic oligonucleotide
  Antisense strand to SEQ ID NO: 2462554
uaggauaaucucaacuaaa

SEQ ID NO: 2462556 - RNA, 19 nt, Artificial Sequence
  Description of Artificial Sequence: Synthetic oligonucleotide
  Sense strand starting at position 57 of SEQ ID NO: 1887312
aguugagauuauccuauau

SEQ ID NO: 2462557 - RNA, 19 nt, Artificial Sequence
  Description of Artificial Sequence: Synthetic oligonucleotide
  Antisense strand to SEQ ID NO: 2462556
auauaggauaaucucaacu

SEQ ID NO: 2462558 - RNA, 19 nt, Artificial Sequence
  Description of Artificial Sequence: Synthetic oligonucleotide
  Sense strand starting at position 154 of SEQ ID NO: 1887312
ugagguuuccucuacuccu

SEQ ID NO: 2462559 - RNA, 19 nt, Artificial Sequence
  Description of Artificial Sequence: Synthetic oligonucleotide
  Antisense strand to SEQ ID NO: 2462558
aggaguagaggaaaccuca

SEQ ID NO: 2462560 - RNA, 19 nt, Artificial Sequence
  Description of Artificial Sequence: Synthetic oligonucleotide
  Sense strand starting at position 208 of SEQ ID NO: 1887312
gugcauagagcuuaacaug

SEQ ID NO: 2462561 - RNA, 19 nt, Artificial Sequence
  Description of Artificial Sequence: Synthetic oligonucleotide
  Antisense strand to SEQ ID NO: 2462560
cauguuaagcucuaugcac

SEQ ID NO: 2462562 - RNA, 19 nt, Artificial Sequence
  Description of Artificial Sequence: Synthetic oligonucleotide
  Sense strand starting at position 263 of SEQ ID NO: 1887312
ggucaaugacuaugcacau

SEQ ID NO: 2462563 - RNA, 19 nt, Artificial Sequence
  Description of Artificial Sequence: Synthetic oligonucleotide
  Antisense strand to SEQ ID NO: 2462562
augugcauagucauugacc

SEQ ID NO: 2462564 - RNA, 19 nt, Artificial Sequence
  Description of Artificial Sequence: Synthetic oligonucleotide
  Sense strand starting at position 315 of SEQ ID NO: 1887312
acaagacaguccuugaugu

SEQ ID NO: 2462565 - RNA, 19 nt, Artificial Sequence
  Description of Artificial Sequence: Synthetic oligonucleotide
  Antisense strand to SEQ ID NO: 2462564
acaucaaggacugucuugu

SEQ ID NO: 2462566 - RNA, 19 nt, Artificial Sequence
  Description of Artificial Sequence: Synthetic oligonucleotide
  Sense strand starting at position 317 of SEQ ID NO: 1887312
aagacaguccuugauguua

SEQ ID NO: 2462567 - RNA, 19 nt, Artificial Sequence
  Description of Artificial Sequence: Synthetic oligonucleotide
  Antisense strand to SEQ ID NO: 2462566
uaacaucaaggacugucuu

SEQ ID NO: 2462568 - RNA, 19 nt, Artificial Sequence
  Description of Artificial Sequence: Synthetic oligonucleotide
  Sense strand starting at position 426 of SEQ ID NO: 1887312
cugugaguccaauagauau

SEQ ID NO: 2462569 - RNA, 19 nt, Artificial Sequence
  Description of Artificial Sequence: Synthetic oligonucleotide
  Antisense strand to SEQ ID NO: 2462568
auaucuauuggacucacag

SEQ ID NO: 2462570 - RNA, 19 nt, Artificial Sequence
  Description of Artificial Sequence: Synthetic oligonucleotide
  Sense strand starting at position 472 of SEQ ID NO: 1887312
ggaugccagcauuauaaag

SEQ ID NO: 2462571 - RNA, 19 nt, Artificial Sequence
  Description of Artificial Sequence: Synthetic oligonucleotide
  Antisense strand to SEQ ID NO: 2462570
cuuuauaaugcuggcaucc

SEQ ID NO: 2462572 - RNA, 19 nt, Artificial Sequence
  Description of Artificial Sequence: Synthetic oligonucleotide
  Sense strand starting at position 526 of SEQ ID NO: 1887312
uagguugugccaguuguuu

SEQ ID NO: 2462573 - RNA, 19 nt, Artificial Sequence
  Description of Artificial Sequence: Synthetic oligonucleotide
  Antisense strand to SEQ ID NO: 2462572
aaacaacuggcacaaccua

SEQ ID NO: 2462574 - RNA, 19 nt, Artificial Sequence
  Description of Artificial Sequence: Synthetic oligonucleotide
  Sense strand starting at position 962 of SEQ ID NO: 1887312
gguggaucuuauccugaga

SEQ ID NO: 2462575 - RNA, 19 nt, Artificial Sequence
  Description of Artificial Sequence: Synthetic oligonucleotide
  Antisense strand to SEQ ID NO: 2462574
ucucaggauaagauccacc

SEQ ID NO: 2462576 - RNA, 19 nt, Artificial Sequence
  Description of Artificial Sequence: Synthetic oligonucleotide
  Sense strand starting at position 1295 of SEQ ID NO: 1887312
agggaacauuccguuuaua

SEQ ID NO: 2462577 - RNA, 19 nt, Artificial Sequence
  Description of Artificial Sequence: Synthetic oligonucleotide
  Antisense strand to SEQ ID NO: 2462576
uauaaacggaauguucccu

SEQ ID NO: 2462578 - RNA, 19 nt, Artificial Sequence
  Description of Artificial Sequence: Synthetic oligonucleotide
  Sense strand starting at position 1298 of SEQ ID NO: 1887312
gaacauuccguuuauauag

SEQ ID NO: 2462579 - RNA, 19 nt, Artificial Sequence
  Description of Artificial Sequence: Synthetic oligonucleotide
  Antisense strand to SEQ ID NO: 2462578
cuauauaaacggaauguuc

SEQ ID NO: 2462580 - RNA, 19 nt, Artificial Sequence
  Description of Artificial Sequence: Synthetic oligonucleotide
  Sense strand starting at position 1652 of SEQ ID NO: 1887312
auagguaacuuggugucaa

SEQ ID NO: 2462581 - RNA, 19 nt, Artificial Sequence
  Description of Artificial Sequence: Synthetic oligonucleotide
  Antisense strand to SEQ ID NO: 2462580
uugacaccaaguuaccuau

SEQ ID NO: 2462582 - RNA, 19 nt, Artificial Sequence
  Description of Artificial Sequence: Synthetic oligonucleotide
  Sense strand starting at position 1660 of SEQ ID NO: 1887312
cuuggugucaacuagguaa

SEQ ID NO: 2462583 - RNA, 19 nt, Artificial Sequence
  Description of Artificial Sequence: Synthetic oligonucleotide
  Antisense strand to SEQ ID NO: 2462582
uuaccuaguugacaccaag

SEQ ID NO: 2462584 - RNA, 19 nt, Artificial Sequence
  Description of Artificial Sequence: Synthetic oligonucleotide
  Sense strand starting at position 1761 of SEQ ID NO: 1887312
ggcucucuacaaggagaaa

SEQ ID NO: 2462585 - RNA, 19 nt, Artificial Sequence
  Description of Artificial Sequence: Synthetic oligonucleotide
  Antisense strand to SEQ ID NO: 2462584
uuucuccuuguagagagcc

SEQ ID NO: 2462586 - RNA, 19 nt, Artificial Sequence
  Description of Artificial Sequence: Synthetic oligonucleotide
  Sense strand starting at position 2035 of SEQ ID NO: 1887312
aucucacuggcuugggaau

SEQ ID NO: 2462587 - RNA, 19 nt, Artificial Sequence
  Description of Artificial Sequence: Synthetic oligonucleotide
  Antisense strand to SEQ ID NO: 2462586
auucccaagccagugagau

SEQ ID NO: 2462588 - RNA, 19 nt, Artificial Sequence
  Description of Artificial Sequence: Synthetic oligonucleotide
  Sense strand starting at position 2055 of SEQ ID NO: 1887312
augguuuccguggaauaaa

SEQ ID NO: 2462589 - RNA, 19 nt, Artificial Sequence
  Description of Artificial Sequence: Synthetic oligonucleotide
  Antisense strand to SEQ ID NO: 2462588
uuuauuccacggaaaccau

SEQ ID NO: 2462590 - RNA, 19 nt, Artificial Sequence
  Description of Artificial Sequence: Synthetic oligonucleotide
  Sense strand starting at position 2241 of SEQ ID NO: 1887312
acagauuagcagugacuac

SEQ ID NO: 2462591 - RNA, 19 nt, Artificial Sequence
  Description of Artificial Sequence: Synthetic oligonucleotide
  Antisense strand to SEQ ID NO: 2462590
guagucacugcuaaucugu

SEQ ID NO: 2462592 - RNA, 19 nt, Artificial Sequence
  Description of Artificial Sequence: Synthetic oligonucleotide
  Sense strand starting at position 2248 of SEQ ID NO: 1887312
agcagugacuacuugaaag

SEQ ID NO: 2462593 - RNA, 19 nt, Artificial Sequence
  Description of Artificial Sequence: Synthetic oligonucleotide
  Antisense strand to SEQ ID NO: 2462592
cuuucaaguagucacugcu

SEQ ID NO: 2462594 - RNA, 19 nt, Artificial Sequence
  Description of Artificial Sequence: Synthetic oligonucleotide
  Sense strand starting at position 2795 of SEQ ID NO: 1887312
uucuauuagcuguagauua

SEQ ID NO: 2462595 - RNA, 19 nt, Artificial Sequence
  Description of Artificial Sequence: Synthetic oligonucleotide
  Antisense strand to SEQ ID NO: 2462594
uaaucuacagcuaauagaa

SEQ ID NO: 2462596 - RNA, 19 nt, Artificial Sequence
  Description of Artificial Sequence: Synthetic oligonucleotide
  Sense strand starting at position 2797 of SEQ ID NO: 1887312
cuauuagcuguagauuaug

SEQ ID NO: 2462597 - RNA, 19 nt, Artificial Sequence
  Description of Artificial Sequence: Synthetic oligonucleotide
  Antisense strand to SEQ ID NO: 2462596
cauaaucuacagcuaauag

SEQ ID NO: 2462598 - RNA, 19 nt, Artificial Sequence
  Description of Artificial Sequence: Synthetic oligonucleotide
  Sense strand starting at position 2925 of SEQ ID NO: 1887312
gcaugacuggauugagaau

SEQ ID NO: 2462599 - RNA, 19 nt, Artificial Sequence
  Description of Artificial Sequence: Synthetic oligonucleotide
  Antisense strand to SEQ ID NO: 2462598
auucucaauccagucaugc

SEQ ID NO: 2462600 - RNA, 19 nt, Artificial Sequence
  Description of Artificial Sequence: Synthetic oligonucleotide
  Sense strand starting at position 3064 of SEQ ID NO: 1887312
cuccaaugaugggucauaa

SEQ ID NO: 2462601 - RNA, 19 nt, Artificial Sequence
  Description of Artificial Sequence: Synthetic oligonucleotide
  Antisense strand to SEQ ID NO: 2462600
uuaugacccaucauuggag

SEQ ID NO: 2462602 - RNA, 19 nt, Artificial Sequence
  Description of Artificial Sequence: Synthetic oligonucleotide
  Sense strand starting at position 3084 of SEQ ID NO: 1887312
gucaauuuaguaugccuau

SEQ ID NO: 2462603 - RNA, 19 nt, Artificial Sequence
  Description of Artificial Sequence: Synthetic oligonucleotide
  Antisense strand to SEQ ID NO: 2462602
auaggcauacuaaauugac

SEQ ID NO: 2462604 - RNA, 19 nt, Artificial Sequence
  Description of Artificial Sequence: Synthetic oligonucleotide
  Sense strand starting at position 3184 of SEQ ID NO: 1887312
aaauuuguuucguuucugu

SEQ ID NO: 2462605 - RNA, 19 nt, Artificial Sequence
  Description of Artificial Sequence: Synthetic oligonucleotide
  Antisense strand to SEQ ID NO: 2462604
acagaaacgaaacaaauuu

SEQ ID NO: 2462606 - RNA, 19 nt, Artificial Sequence
  Description of Artificial Sequence: Synthetic oligonucleotide
  Sense strand starting at position 3331 of SEQ ID NO: 1887312
gcuugaauucuaugaguaa

SEQ ID NO: 2462607 - RNA, 19 nt, Artificial Sequence
  Description of Artificial Sequence: Synthetic oligonucleotide
  Antisense strand to SEQ ID NO: 2462606
uuacucauagaauucaagc

SEQ ID NO: 2462608 - RNA, 19 nt, Artificial Sequence
  Description of Artificial Sequence: Synthetic oligonucleotide
  Sense strand starting at position 3334 of SEQ ID NO: 1887312
ugaauucuaugaguaaguu

SEQ ID NO: 2462609 - RNA, 19 nt, Artificial Sequence
  Description of Artificial Sequence: Synthetic oligonucleotide
  Antisense strand to SEQ ID NO: 2462608
aacuuacucauagaauuca

SEQ ID NO: 2462610 - RNA, 19 nt, Artificial Sequence
  Description of Artificial Sequence: Synthetic oligonucleotide
  Sense strand starting at position 3338 of SEQ ID NO: 1887312
uucuaugaguaaguugaga

SEQ ID NO: 2462611 - RNA, 19 nt, Artificial Sequence
  Description of Artificial Sequence: Synthetic oligonucleotide
  Antisense strand to SEQ ID NO: 2462610
ucucaacuuacucauagaa

SEQ ID NO: 2462612 - RNA, 19 nt, Artificial Sequence
  Description of Artificial Sequence: Synthetic oligonucleotide
  Sense strand starting at position 3340 of SEQ ID NO: 1887312
cuaugaguaaguugagaga

SEQ ID NO: 2462613 - RNA, 19 nt, Artificial Sequence
  Description of Artificial Sequence: Synthetic oligonucleotide
  Antisense strand to SEQ ID NO: 2462612
ucucucaacuuacucauag

SEQ ID NO: 2462614 - RNA, 19 nt, Artificial Sequence
  Description of Artificial Sequence: Synthetic oligonucleotide
  Sense strand starting at position 3445 of SEQ ID NO: 1887312
gcaugugagagauaccauc

SEQ ID NO: 2462615 - RNA, 19 nt, Artificial Sequence
  Description of Artificial Sequence: Synthetic oligonucleotide
  Antisense strand to SEQ ID NO: 2462614
gaugguaucucucacaugc

SEQ ID NO: 2462616 - RNA, 19 nt, Artificial Sequence
  Description of Artificial Sequence: Synthetic oligonucleotide
  Sense strand starting at position 3601 of SEQ ID NO: 1887312
augaguacucaaugauccu

SEQ ID NO: 2462617 - RNA, 19 nt, Artificial Sequence
  Description of Artificial Sequence: Synthetic oligonucleotide
  Antisense strand to SEQ ID NO: 2462616
aggaucauugaguacucau

SEQ ID NO: 2462618 - RNA, 19 nt, Artificial Sequence
  Description of Artificial Sequence: Synthetic oligonucleotide
  Sense strand starting at position 3635 of SEQ ID NO: 1887312
cauuguaaucguuacuaag

SEQ ID NO: 2462619 - RNA, 19 nt, Artificial Sequence
  Description of Artificial Sequence: Synthetic oligonucleotide
  Antisense strand to SEQ ID NO: 2462618
cuuaguaacgauuacaaug

SEQ ID NO: 2462620 - RNA, 19 nt, Artificial Sequence
  Description of Artificial Sequence: Synthetic oligonucleotide
  Sense strand starting at position 3655 of SEQ ID NO: 1887312
agaggcaguuuaucuacau

SEQ ID NO: 2462621 - RNA, 19 nt, Artificial Sequence
  Description of Artificial Sequence: Synthetic oligonucleotide
  Antisense strand to SEQ ID NO: 2462620
auguagauaaacugccucu

SEQ ID NO: 2462622 - RNA, 19 nt, Artificial Sequence
  Description of Artificial Sequence: Synthetic oligonucleotide
  Sense strand starting at position 3656 of SEQ ID NO: 1887312
gaggcaguuuaucuacaua

SEQ ID NO: 2462623 - RNA, 19 nt, Artificial Sequence
  Description of Artificial Sequence: Synthetic oligonucleotide
  Antisense strand to SEQ ID NO: 2462622
uauguagauaaacugccuc

SEQ ID NO: 2462624 - RNA, 19 nt, Artificial Sequence
  Description of Artificial Sequence: Synthetic oligonucleotide
  Sense strand starting at position 3659 of SEQ ID NO: 1887312
gcaguuuaucuacauagaa

SEQ ID NO: 2462625 - RNA, 19 nt, Artificial Sequence
  Description of Artificial Sequence: Synthetic oligonucleotide
  Antisense strand to SEQ ID NO: 2462624
uucuauguagauaaacugc

SEQ ID NO: 2462626 - RNA, 19 nt, Artificial Sequence
  Description of Artificial Sequence: Synthetic oligonucleotide
  Sense strand starting at position 3799 of SEQ ID NO: 1887312
cuuguagauguugauacau

SEQ ID NO: 2462627 - RNA, 19 nt, Artificial Sequence
  Description of Artificial Sequence: Synthetic oligonucleotide
  Antisense strand to SEQ ID NO: 2462626
auguaucaacaucuacaag

SEQ ID NO: 2462628 - RNA, 19 nt, Artificial Sequence
  Description of Artificial Sequence: Synthetic oligonucleotide
  Sense strand starting at position 3922 of SEQ ID NO: 1887312
gaguuucuugggcaacaua

SEQ ID NO: 2462629 - RNA, 19 nt, Artificial Sequence
  Description of Artificial Sequence: Synthetic oligonucleotide
  Antisense strand to SEQ ID NO: 2462628
uauguugcccaagaaacuc

SEQ ID NO: 2462630 - RNA, 19 nt, Artificial Sequence
  Description of Artificial Sequence: Synthetic oligonucleotide
  Sense strand starting at position 3937 of SEQ ID NO: 1887312
cauaaucucuggguguuaa

SEQ ID NO: 2462631 - RNA, 19 nt, Artificial Sequence
  Description of Artificial Sequence: Synthetic oligonucleotide
  Antisense strand to SEQ ID NO: 2462630
uuaacacccagagauuaug

SEQ ID NO: 2462632 - RNA, 19 nt, Artificial Sequence
  Description of Artificial Sequence: Synthetic oligonucleotide
  Sense strand starting at position 3938 of SEQ ID NO: 1887312
auaaucucuggguguuaaa

SEQ ID NO: 2462633 - RNA, 19 nt, Artificial Sequence
  Description of Artificial Sequence: Synthetic oligonucleotide
  Antisense strand to SEQ ID NO: 2462632
uuuaacacccagagauuau

SEQ ID NO: 2462634 - RNA, 19 nt, Artificial Sequence
  Description of Artificial Sequence: Synthetic oligonucleotide
  Sense strand starting at position 2215 of SEQ ID NO: 1887311
uuuagagcaucucuaguau

SEQ ID NO: 2462635 - RNA, 19 nt, Artificial Sequence
  Description of Artificial Sequence: Synthetic oligonucleotide
  Antisense strand to SEQ ID NO: 2462634
auacuagagaugcucuaaa

SEQ ID NO: 2462636 - RNA, 19 nt, Artificial Sequence
  Description of Artificial Sequence: Synthetic oligonucleotide
  Sense strand starting at position 2219 of SEQ ID NO: 1887311
gagcaucucuaguauguua

SEQ ID NO: 2462637 - RNA, 19 nt, Artificial Sequence
  Description of Artificial Sequence: Synthetic oligonucleotide
  Antisense strand to SEQ ID NO: 2462636
uaacauacuagagaugcuc

SEQ ID NO: 2462638 - RNA, 19 nt, Artificial Sequence
  Description of Artificial Sequence: Synthetic oligonucleotide
  Sense strand starting at position 2221 of SEQ ID NO: 1887311
gcaucucuaguauguuaaa

SEQ ID NO: 2462639 - RNA, 19 nt, Artificial Sequence
  Description of Artificial Sequence: Synthetic oligonucleotide
  Antisense strand to SEQ ID NO: 2462638
uuuaacauacuagagaugc

SEQ ID NO: 2462640 - RNA, 19 nt, Artificial Sequence
  Description of Artificial Sequence: Synthetic oligonucleotide
  Sense strand starting at position 2253 of SEQ ID NO: 1887311
ucauuccucuuuggaaaug

SEQ ID NO: 2462641 - RNA, 19 nt, Artificial Sequence
  Description of Artificial Sequence: Synthetic oligonucleotide
  Antisense strand to SEQ ID NO: 2462640
cauuuccaaagaggaauga

SEQ ID NO: 2462642 - RNA, 19 nt, Artificial Sequence
  Description of Artificial Sequence: Synthetic oligonucleotide
  Sense strand starting at position 2263 of SEQ ID NO: 1887311
uuggaaaugcucuggaaga

SEQ ID NO: 2462643 - RNA, 19 nt, Artificial Sequence
  Description of Artificial Sequence: Synthetic oligonucleotide
  Antisense strand to SEQ ID NO: 2462642
ucuuccagagcauuuccaa

SEQ ID NO: 2462644 - RNA, 19 nt, Artificial Sequence
  Description of Artificial Sequence: Synthetic oligonucleotide
  Sense strand starting at position 2288 of SEQ ID NO: 1887311
aaugauaaaggcuguucua

SEQ ID NO: 2462645 - RNA, 19 nt, Artificial Sequence
  Description of Artificial Sequence: Synthetic oligonucleotide
  Antisense strand to SEQ ID NO: 2462644
uagaacagccuuuaucauu

SEQ ID NO: 2462646 - RNA, 19 nt, Artificial Sequence
  Description of Artificial Sequence: Synthetic oligonucleotide
  Sense strand starting at position 2291 of SEQ ID NO: 1887311
gauaaaggcuguucuauua

SEQ ID NO: 2462647 - RNA, 19 nt, Artificial Sequence
  Description of Artificial Sequence: Synthetic oligonucleotide
  Antisense strand to SEQ ID NO: 2462646
uaauagaacagccuuuauc

SEQ ID NO: 2462648 - RNA, 19 nt, Artificial Sequence
  Description of Artificial Sequence: Synthetic oligonucleotide
  Sense strand starting at position 2298 of SEQ ID NO: 1887311
gcuguucuauuauuguuaa

SEQ ID NO: 2462649 - RNA, 19 nt, Artificial Sequence
  Description of Artificial Sequence: Synthetic oligonucleotide
  Antisense strand to SEQ ID NO: 2462648
uuaacaauaauagaacagc

SEQ ID NO: 2462650 - RNA, 19 nt, Artificial Sequence
  Description of Artificial Sequence: Synthetic oligonucleotide
  Sense strand starting at position 119 of SEQ ID NO: 1887313
gcauuuccauuguuccuau

SEQ ID NO: 2462651 - RNA, 19 nt, Artificial Sequence
  Description of Artificial Sequence: Synthetic oligonucleotide
  Antisense strand to SEQ ID NO: 2462650
auaggaacaauggaaaugc

SEQ ID NO: 2462652 - RNA, 19 nt, Artificial Sequence
  Description of Artificial Sequence: Synthetic oligonucleotide
  Sense strand starting at position 122 of SEQ ID NO: 1887313
uuuccauuguuccuauaga

SEQ ID NO: 2462653 - RNA, 19 nt, Artificial Sequence
  Description of Artificial Sequence: Synthetic oligonucleotide
  Antisense strand to SEQ ID NO: 2462652
ucuauaggaacaauggaaa

SEQ ID NO: 2462654 - RNA, 19 nt, Artificial Sequence
  Description of Artificial Sequence: Synthetic oligonucleotide
  Sense strand starting at position 137 of SEQ ID NO: 1887313
uagauaggaucucugaagu

SEQ ID NO: 2462655 - RNA, 19 nt, Artificial Sequence
  Description of Artificial Sequence: Synthetic oligonucleotide
  Antisense strand to SEQ ID NO: 2462654
acuucagagauccuaucua

SEQ ID NO: 2462656 - RNA, 19 nt, Artificial Sequence
  Description of Artificial Sequence: Synthetic oligonucleotide
  Sense strand starting at position 158 of SEQ ID NO: 1887313
gggucauaaagcuguugaa

SEQ ID NO: 2462657 - RNA, 19 nt, Artificial Sequence
  Description of Artificial Sequence: Synthetic oligonucleotide
  Antisense strand to SEQ ID NO: 2462656
uucaacagcuuuaugaccc

SEQ ID NO: 2462658 - RNA, 19 nt, Artificial Sequence
  Description of Artificial Sequence: Synthetic oligonucleotide
  Sense strand starting at position 298 of SEQ ID NO: 1887313
aaagaaauagcuggugacu

SEQ ID NO: 2462659 - RNA, 19 nt, Artificial Sequence
  Description of Artificial Sequence: Synthetic oligonucleotide
  Antisense strand to SEQ ID NO: 2462658
agucaccagcuauuucuuu

SEQ ID NO: 2462660 - RNA, 19 nt, Artificial Sequence
  Description of Artificial Sequence: Synthetic oligonucleotide
  Sense strand starting at position 328 of SEQ ID NO: 1887313
gggccagucauaggaagaa

SEQ ID NO: 2462661 - RNA, 19 nt, Artificial Sequence
  Description of Artificial Sequence: Synthetic oligonucleotide
  Antisense strand to SEQ ID NO: 2462660
uucuuccuaugacuggccc

SEQ ID NO: 2462662 - RNA, 19 nt, Artificial Sequence
  Description of Artificial Sequence: Synthetic oligonucleotide
  Sense strand starting at position 520 of SEQ ID NO: 1887313
ucucauuguuaagucugaa

SEQ ID NO: 2462663 - RNA, 19 nt, Artificial Sequence
  Description of Artificial Sequence: Synthetic oligonucleotide
  Antisense strand to SEQ ID NO: 2462662
uucagacuuaacaaugaga

SEQ ID NO: 2462664 - RNA, 19 nt, Artificial Sequence
  Description of Artificial Sequence: Synthetic oligonucleotide
  Sense strand starting at position 523 of SEQ ID NO: 1887313
cauuguuaagucugaauug

SEQ ID NO: 2462665 - RNA, 19 nt, Artificial Sequence
  Description of Artificial Sequence: Synthetic oligonucleotide
  Antisense strand to SEQ ID NO: 2462664
caauucagacuuaacaaug

SEQ ID NO: 2462666 - RNA, 19 nt, Artificial Sequence
  Description of Artificial Sequence: Synthetic oligonucleotide
  Sense strand starting at position 528 of SEQ ID NO: 1887313
uuaagucugaauugaugga

SEQ ID NO: 2462667 - RNA, 19 nt, Artificial Sequence
  Description of Artificial Sequence: Synthetic oligonucleotide
  Antisense strand to SEQ ID NO: 2462666
uccaucaauucagacuuaa

SEQ ID NO: 2462668 - RNA, 19 nt, Artificial Sequence
  Description of Artificial Sequence: Synthetic oligonucleotide
  Sense strand starting at position 532 of SEQ ID NO: 1887313
gucugaauugauggauucu

SEQ ID NO: 2462669 - RNA, 19 nt, Artificial Sequence
  Description of Artificial Sequence: Synthetic oligonucleotide
  Antisense strand to SEQ ID NO: 2462668
agaauccaucaauucagac

SEQ ID NO: 2462670 - RNA, 19 nt, Artificial Sequence
  Description of Artificial Sequence: Synthetic oligonucleotide
  Sense strand starting at position 542 of SEQ ID NO: 1887313
auggauucucaauggguuu

SEQ ID NO: 2462671 - RNA, 19 nt, Artificial Sequence
  Description of Artificial Sequence: Synthetic oligonucleotide
  Antisense strand to SEQ ID NO: 2462670
aaacccauugagaauccau

SEQ ID NO: 2462672 - RNA, 19 nt, Artificial Sequence
  Description of Artificial Sequence: Synthetic oligonucleotide
  Sense strand starting at position 544 of SEQ ID NO: 1887313
ggauucucaauggguuuga

SEQ ID NO: 2462673 - RNA, 19 nt, Artificial Sequence
  Description of Artificial Sequence: Synthetic oligonucleotide
  Antisense strand to SEQ ID NO: 2462672
ucaaacccauugagaaucc

SEQ ID NO: 2462674 - RNA, 19 nt, Artificial Sequence
  Description of Artificial Sequence: Synthetic oligonucleotide
  Sense strand starting at position 548 of SEQ ID NO: 1887313
ucucaauggguuugaggga

SEQ ID NO: 2462675 - RNA, 19 nt, Artificial Sequence
  Description of Artificial Sequence: Synthetic oligonucleotide
  Antisense strand to SEQ ID NO: 2462674
ucccucaaacccauugaga

SEQ ID NO: 2462676 - RNA, 19 nt, Artificial Sequence
  Description of Artificial Sequence: Synthetic oligonucleotide
  Sense strand starting at position 639 of SEQ ID NO: 1887313
ccuauauucugguuacuug

SEQ ID NO: 2462677 - RNA, 19 nt, Artificial Sequence
  Description of Artificial Sequence: Synthetic oligonucleotide
  Antisense strand to SEQ ID NO: 2462676
caaguaaccagaauauagg

SEQ ID NO: 2462678 - RNA, 19 nt, Artificial Sequence
  Description of Artificial Sequence: Synthetic oligonucleotide
  Sense strand starting at position 649 of SEQ ID NO: 1887313
gguuacuuggauuguugga

SEQ ID NO: 2462679 - RNA, 19 nt, Artificial Sequence
  Description of Artificial Sequence: Synthetic oligonucleotide
  Antisense strand to SEQ ID NO: 2462678
uccaacaauccaaguaacc

SEQ ID NO: 2462680 - RNA, 19 nt, Artificial Sequence
  Description of Artificial Sequence: Synthetic oligonucleotide
  Sense strand starting at position 651 of SEQ ID NO: 1887313
uuacuuggauuguuggaga

SEQ ID NO: 2462681 - RNA, 19 nt, Artificial Sequence
  Description of Artificial Sequence: Synthetic oligonucleotide
  Antisense strand to SEQ ID NO: 2462680
ucuccaacaauccaaguaa

SEQ ID NO: 2462682 - RNA, 19 nt, Artificial Sequence
  Description of Artificial Sequence: Synthetic oligonucleotide
  Sense strand starting at position 654 of SEQ ID NO: 1887313
cuuggauuguuggagauuu

SEQ ID NO: 2462683 - RNA, 19 nt, Artificial Sequence
  Description of Artificial Sequence: Synthetic oligonucleotide
  Antisense strand to SEQ ID NO: 2462682
aaaucuccaacaauccaag

SEQ ID NO: 2462684 - RNA, 19 nt, Artificial Sequence
  Description of Artificial Sequence: Synthetic oligonucleotide
  Sense strand starting at position 1001 of SEQ ID NO: 1887313
cuagauguaccagguugaa

SEQ ID NO: 2462685 - RNA, 19 nt, Artificial Sequence
  Description of Artificial Sequence: Synthetic oligonucleotide
  Antisense strand to SEQ ID NO: 2462684
uucaaccugguacaucuag

SEQ ID NO: 2462686 - RNA, 19 nt, Artificial Sequence
  Description of Artificial Sequence: Synthetic oligonucleotide
  Sense strand starting at position 1020 of SEQ ID NO: 1887313
uuggcuuagcaguaaacua

SEQ ID NO: 2462687 - RNA, 19 nt, Artificial Sequence
  Description of Artificial Sequence: Synthetic oligonucleotide
  Antisense strand to SEQ ID NO: 2462686
uaguuuacugcuaagccaa

SEQ ID NO: 2462688 - RNA, 19 nt, Artificial Sequence
  Description of Artificial Sequence: Synthetic oligonucleotide
  Sense strand starting at position 1027 of SEQ ID NO: 1887313
agcaguaaacuauauguau

SEQ ID NO: 2462689 - RNA, 19 nt, Artificial Sequence
  Description of Artificial Sequence: Synthetic oligonucleotide
  Antisense strand to SEQ ID NO: 2462688
auacauauaguuuacugcu

SEQ ID NO: 2462690 - RNA, 19 nt, Artificial Sequence
  Description of Artificial Sequence: Synthetic oligonucleotide
  Sense strand starting at position 1119 of SEQ ID NO: 1887313
agcacuguggcauaacuau

SEQ ID NO: 2462691 - RNA, 19 nt, Artificial Sequence
  Description of Artificial Sequence: Synthetic oligonucleotide
  Antisense strand to SEQ ID NO: 2462690
auaguuaugccacagugcu

SEQ ID NO: 2462692 - RNA, 19 nt, Artificial Sequence
  Description of Artificial Sequence: Synthetic oligonucleotide
  Sense strand starting at position 1147 of SEQ ID NO: 1887313
augcuuuauggccacaaga

SEQ ID NO: 2462693 - RNA, 19 nt, Artificial Sequence
  Description of Artificial Sequence: Synthetic oligonucleotide
  Antisense strand to SEQ ID NO: 2462692
ucuuguggccauaaagcau

SEQ ID NO: 2462694 - RNA, 19 nt, Artificial Sequence
  Description of Artificial Sequence: Synthetic oligonucleotide
  Sense strand starting at position 1149 of SEQ ID NO: 1887313
gcuuuauggccacaagaug

SEQ ID NO: 2462695 - RNA, 19 nt, Artificial Sequence
  Description of Artificial Sequence: Synthetic oligonucleotide
  Antisense strand to SEQ ID NO: 2462694
caucuuguggccauaaagc

SEQ ID NO: 2462696 - RNA, 19 nt, Artificial Sequence
  Description of Artificial Sequence: Synthetic oligonucleotide
  Sense strand starting at position 1240 of SEQ ID NO: 1887313
uaauaaguucgugagcaac

SEQ ID NO: 2462697 - RNA, 19 nt, Artificial Sequence
  Description of Artificial Sequence: Synthetic oligonucleotide
  Antisense strand to SEQ ID NO: 2462696
guugcucacgaacuuauua

SEQ ID NO: 2462698 - RNA, 19 nt, Artificial Sequence
  Description of Artificial Sequence: Synthetic oligonucleotide
  Sense strand starting at position 1380 of SEQ ID NO: 1887313
ccacucuuugauggugaaa

SEQ ID NO: 2462699 - RNA, 19 nt, Artificial Sequence
  Description of Artificial Sequence: Synthetic oligonucleotide
  Antisense strand to SEQ ID NO: 2462698
uuucaccaucaaagagugg

SEQ ID NO: 2462700 - RNA, 19 nt, Artificial Sequence
  Description of Artificial Sequence: Synthetic oligonucleotide
  Sense strand starting at position 1411 of SEQ ID NO: 1887313
uucugaaggucagucauga

SEQ ID NO: 2462701 - RNA, 19 nt, Artificial Sequence
  Description of Artificial Sequence: Synthetic oligonucleotide
  Antisense strand to SEQ ID NO: 2462700
ucaugacugaccuucagaa

SEQ ID NO: 2462702 - RNA, 19 nt, Artificial Sequence
  Description of Artificial Sequence: Synthetic oligonucleotide
  Sense strand starting at position 1464 of SEQ ID NO: 1887313
ggaaaugacgcuggccaau

SEQ ID NO: 2462703 - RNA, 19 nt, Artificial Sequence
  Description of Artificial Sequence: Synthetic oligonucleotide
  Antisense strand to SEQ ID NO: 2462702
auuggccagcgucauuucc

SEQ ID NO: 2462704 - RNA, 19 nt, Artificial Sequence
  Description of Artificial Sequence: Synthetic oligonucleotide
  Sense strand starting at position 1574 of SEQ ID NO: 1887313
guugaauucucacuaugug

SEQ ID NO: 2462705 - RNA, 19 nt, Artificial Sequence
  Description of Artificial Sequence: Synthetic oligonucleotide
  Antisense strand to SEQ ID NO: 2462704
cacauagugagaauucaac

SEQ ID NO: 2462706 - RNA, 19 nt, Artificial Sequence
  Description of Artificial Sequence: Synthetic oligonucleotide
  Sense strand starting at position 1764 of SEQ ID NO: 1887313
uggagagauuaauucuucu

SEQ ID NO: 2462707 - RNA, 19 nt, Artificial Sequence
  Description of Artificial Sequence: Synthetic oligonucleotide
  Antisense strand to SEQ ID NO: 2462706
agaagaauuaaucucucca

SEQ ID NO: 2462708 - RNA, 19 nt, Artificial Sequence
  Description of Artificial Sequence: Synthetic oligonucleotide
  Sense strand starting at position 2108 of SEQ ID NO: 1887313
cuggucucaccaugugaua

SEQ ID NO: 2462709 - RNA, 19 nt, Artificial Sequence
  Description of Artificial Sequence: Synthetic oligonucleotide
  Antisense strand to SEQ ID NO: 2462708
uaucacauggugagaccag

SEQ ID NO: 2462710 - RNA, 19 nt, Artificial Sequence
  Description of Artificial Sequence: Synthetic oligonucleotide
  Sense strand starting at position 2780 of SEQ ID NO: 1887313
ggaccagacucuuuaugca

SEQ ID NO: 2462711 - RNA, 19 nt, Artificial Sequence
  Description of Artificial Sequence: Synthetic oligonucleotide
  Antisense strand to SEQ ID NO: 2462710
ugcauaaagagucuggucc

SEQ ID NO: 2462712 - RNA, 19 nt, Artificial Sequence
  Description of Artificial Sequence: Synthetic oligonucleotide
  Sense strand starting at position 2788 of SEQ ID NO: 1887313
cucuuuaugcaguaaagag

SEQ ID NO: 2462713 - RNA, 19 nt, Artificial Sequence
  Description of Artificial Sequence: Synthetic oligonucleotide
  Antisense strand to SEQ ID NO: 2462712
cucuuuacugcauaaagag

SEQ ID NO: 2462714 - RNA, 19 nt, Artificial Sequence
  Description of Artificial Sequence: Synthetic oligonucleotide
  Sense strand starting at position 2811 of SEQ ID NO: 1887313
agacaauugugagcaagac

SEQ ID NO: 2462715 - RNA, 19 nt, Artificial Sequence
  Description of Artificial Sequence: Synthetic oligonucleotide
  Antisense strand to SEQ ID NO: 2462714
gucuugcucacaauugucu

SEQ ID NO: 2462716 - RNA, 19 nt, Artificial Sequence
  Description of Artificial Sequence: Synthetic oligonucleotide
  Sense strand starting at position 3018 of SEQ ID NO: 1887313
auauuaugucaauagguca

SEQ ID NO: 2462717 - RNA, 19 nt, Artificial Sequence
  Description of Artificial Sequence: Synthetic oligonucleotide
  Antisense strand to SEQ ID NO: 2462716
ugaccuauugacauaauau

SEQ ID NO: 2462718 - RNA, 19 nt, Artificial Sequence
  Description of Artificial Sequence: Synthetic oligonucleotide
  Sense strand starting at position 3099 of SEQ ID NO: 1887313
gacagcauuugaugaaaga

SEQ ID NO: 2462719 - RNA, 19 nt, Artificial Sequence
  Description of Artificial Sequence: Synthetic oligonucleotide
  Antisense strand to SEQ ID NO: 2462718
ucuuucaucaaaugcuguc

SEQ ID NO: 2462720 - RNA, 19 nt, Artificial Sequence
  Description of Artificial Sequence: Synthetic oligonucleotide
  Sense strand starting at position 3201 of SEQ ID NO: 1887313
agaauuccuuacguuuaaa

SEQ ID NO: 2462721 - RNA, 19 nt, Artificial Sequence
  Description of Artificial Sequence: Synthetic oligonucleotide
  Antisense strand to SEQ ID NO: 2462720
uuuaaacguaaggaauucu

SEQ ID NO: 2462722 - RNA, 19 nt, Artificial Sequence
  Description of Artificial Sequence: Synthetic oligonucleotide
  Sense strand starting at position 3319 of SEQ ID NO: 1887313
acgggauaauacucagcca

SEQ ID NO: 2462723 - RNA, 19 nt, Artificial Sequence
  Description of Artificial Sequence: Synthetic oligonucleotide
  Antisense strand to SEQ ID NO: 2462722
uggcugaguauuaucccgu

SEQ ID NO: 2462724 - RNA, 19 nt, Artificial Sequence
  Description of Artificial Sequence: Synthetic oligonucleotide
  Sense strand starting at position 3320 of SEQ ID NO: 1887313
cgggauaauacucagccau

SEQ ID NO: 2462725 - RNA, 19 nt, Artificial Sequence
  Description of Artificial Sequence: Synthetic oligonucleotide
  Antisense strand to SEQ ID NO: 2462724
auggcugaguauuaucccg

SEQ ID NO: 2462726 - RNA, 19 nt, Artificial Sequence
  Description of Artificial Sequence: Synthetic oligonucleotide
  Sense strand starting at position 3322 of SEQ ID NO: 1887313
ggauaauacucagccauaa

SEQ ID NO: 2462727 - RNA, 19 nt, Artificial Sequence
  Description of Artificial Sequence: Synthetic oligonucleotide
  Antisense strand to SEQ ID NO: 2462726
uuauggcugaguauuaucc

SEQ ID NO: 2462728 - RNA, 19 nt, Artificial Sequence
  Description of Artificial Sequence: Synthetic oligonucleotide
  Sense strand starting at position 3843 of SEQ ID NO: 1887313
augcaauccgagcauguaa

SEQ ID NO: 2462729 - RNA, 19 nt, Artificial Sequence
  Description of Artificial Sequence: Synthetic oligonucleotide
  Antisense strand to SEQ ID NO: 2462728
uuacaugcucggauugcau

SEQ ID NO: 2462730 - RNA, 19 nt, Artificial Sequence
  Description of Artificial Sequence: Synthetic oligonucleotide
  Sense strand starting at position 131 of SEQ ID NO: 1887314
guguguuaaguacaucaaa

SEQ ID NO: 2462731 - RNA, 19 nt, Artificial Sequence
  Description of Artificial Sequence: Synthetic oligonucleotide
  Antisense strand to SEQ ID NO: 2462730
uuugauguacuuaacacac

SEQ ID NO: 2462732 - RNA, 19 nt, Artificial Sequence
  Description of Artificial Sequence: Synthetic oligonucleotide
  Sense strand starting at position 144 of SEQ ID NO: 1887314
aucaaagcaugaguauaau

SEQ ID NO: 2462733 - RNA, 19 nt, Artificial Sequence
  Description of Artificial Sequence: Synthetic oligonucleotide
  Antisense strand to SEQ ID NO: 2462732
auuauacucaugcuuugau

SEQ ID NO: 2462734 - RNA, 19 nt, Artificial Sequence
  Description of Artificial Sequence: Synthetic oligonucleotide
  Sense strand starting at position 150 of SEQ ID NO: 1887314
gcaugaguauaaucaucuu

SEQ ID NO: 2462735 - RNA, 19 nt, Artificial Sequence
  Description of Artificial Sequence: Synthetic oligonucleotide
  Antisense strand to SEQ ID NO: 2462734
aagaugauuauacucaugc

SEQ ID NO: 2462736 - RNA, 19 nt, Artificial Sequence
  Description of Artificial Sequence: Synthetic oligonucleotide
  Sense strand starting at position 176 of SEQ ID NO: 1887314
gaucuuguccugugauaua

SEQ ID NO: 2462737 - RNA, 19 nt, Artificial Sequence
  Description of Artificial Sequence: Synthetic oligonucleotide
  Antisense strand to SEQ ID NO: 2462736
uauaucacaggacaagauc

SEQ ID NO: 2462738 - RNA, 19 nt, Artificial Sequence
  Description of Artificial Sequence: Synthetic oligonucleotide
  Sense strand starting at position 214 of SEQ ID NO: 1887314
agacuuuaccaagaugcuu

SEQ ID NO: 2462739 - RNA, 19 nt, Artificial Sequence
  Description of Artificial Sequence: Synthetic oligonucleotide
  Antisense strand to SEQ ID NO: 2462738
aagcaucuugguaaagucu

SEQ ID NO: 2462740 - RNA, 19 nt, Artificial Sequence
  Description of Artificial Sequence: Synthetic oligonucleotide
  Sense strand starting at position 275 of SEQ ID NO: 1887314
gagugugccuugcuaauuu

SEQ ID NO: 2462741 - RNA, 19 nt, Artificial Sequence
  Description of Artificial Sequence: Synthetic oligonucleotide
  Antisense strand to SEQ ID NO: 2462740
aaauuagcaaggcacacuc

SEQ ID NO: 2462742 - RNA, 19 nt, Artificial Sequence
  Description of Artificial Sequence: Synthetic oligonucleotide
  Sense strand starting at position 632 of SEQ ID NO: 1887314
ggguaaugugguuacaaau

SEQ ID NO: 2462743 - RNA, 19 nt, Artificial Sequence
  Description of Artificial Sequence: Synthetic oligonucleotide
  Antisense strand to SEQ ID NO: 2462742
auuuguaaccacauuaccc

SEQ ID NO: 2462744 - RNA, 19 nt, Artificial Sequence
  Description of Artificial Sequence: Synthetic oligonucleotide
  Sense strand starting at position 672 of SEQ ID NO: 1887314
cuccaaagggugugagaau

SEQ ID NO: 2462745 - RNA, 19 nt, Artificial Sequence
  Description of Artificial Sequence: Synthetic oligonucleotide
  Antisense strand to SEQ ID NO: 2462744
auucucacacccuuuggag

SEQ ID NO: 2462746 - RNA, 19 nt, Artificial Sequence
  Description of Artificial Sequence: Synthetic oligonucleotide
  Sense strand starting at position 894 of SEQ ID NO: 1887314
ugccuaaacuggucuccaa

SEQ ID NO: 2462747 - RNA, 19 nt, Artificial Sequence
  Description of Artificial Sequence: Synthetic oligonucleotide
  Antisense strand to SEQ ID NO: 2462746
uuggagaccaguuuaggca

SEQ ID NO: 2462748 - RNA, 19 nt, Artificial Sequence
  Description of Artificial Sequence: Synthetic oligonucleotide
  Sense strand starting at position 1011 of SEQ ID NO: 1887314
uuaauaaagccguaugaac

SEQ ID NO: 2462749 - RNA, 19 nt, Artificial Sequence
  Description of Artificial Sequence: Synthetic oligonucleotide
  Antisense strand to SEQ ID NO: 2462748
guucauacggcuuuauuaa

SEQ ID NO: 2462750 - RNA, 19 nt, Artificial Sequence
  Description of Artificial Sequence: Synthetic oligonucleotide
  Sense strand starting at position 1019 of SEQ ID NO: 1887314
gccguaugaacagaaauac

SEQ ID NO: 2462751 - RNA, 19 nt, Artificial Sequence
  Description of Artificial Sequence: Synthetic oligonucleotide
  Antisense strand to SEQ ID NO: 2462750
guauuucuguucauacggc

SEQ ID NO: 2462752 - RNA, 19 nt, Artificial Sequence
  Description of Artificial Sequence: Synthetic oligonucleotide
  Sense strand starting at position 1044 of SEQ ID NO: 1887314
ccaucuccugcguuguauu

SEQ ID NO: 2462753 - RNA, 19 nt, Artificial Sequence
  Description of Artificial Sequence: Synthetic oligonucleotide
  Antisense strand to SEQ ID NO: 2462752
aauacaacgcaggagaugg

SEQ ID NO: 2462754 - RNA, 19 nt, Artificial Sequence
  Description of Artificial Sequence: Synthetic oligonucleotide
  Sense strand starting at position 1107 of SEQ ID NO: 1887314
augcaagacuaacuguaua

SEQ ID NO: 2462755 - RNA, 19 nt, Artificial Sequence
  Description of Artificial Sequence: Synthetic oligonucleotide
  Antisense strand to SEQ ID NO: 2462754
uauacaguuagucuugcau

SEQ ID NO: 2462756 - RNA, 19 nt, Artificial Sequence
  Description of Artificial Sequence: Synthetic oligonucleotide
  Sense strand starting at position 1136 of SEQ ID NO: 1887314
gccauugggaauggaguua

SEQ ID NO: 2462757 - RNA, 19 nt, Artificial Sequence
  Description of Artificial Sequence: Synthetic oligonucleotide
  Antisense strand to SEQ ID NO: 2462756
uaacuccauucccaauggc

SEQ ID NO: 2462758 - RNA, 19 nt, Artificial Sequence
  Description of Artificial Sequence: Synthetic oligonucleotide
  Sense strand starting at position 1236 of SEQ ID NO: 1887314
gggugaagucgagggaagu

SEQ ID NO: 2462759 - RNA, 19 nt, Artificial Sequence
  Description of Artificial Sequence: Synthetic oligonucleotide
  Antisense strand to SEQ ID NO: 2462758
acuucccucgacuucaccc

SEQ ID NO: 2462760 - RNA, 19 nt, Artificial Sequence
  Description of Artificial Sequence: Synthetic oligonucleotide
  Sense strand starting at position 1250 of SEQ ID NO: 1887314
gaagucccgccuuauaauc

SEQ ID NO: 2462761 - RNA, 19 nt, Artificial Sequence
  Description of Artificial Sequence: Synthetic oligonucleotide
  Antisense strand to SEQ ID NO: 2462760
gauuauaaggcgggacuuc

SEQ ID NO: 2462762 - RNA, 19 nt, Artificial Sequence
  Description of Artificial Sequence: Synthetic oligonucleotide
  Sense strand starting at position 1262 of SEQ ID NO: 1887314
uauaaucagugcuuaggau

SEQ ID NO: 2462763 - RNA, 19 nt, Artificial Sequence
  Description of Artificial Sequence: Synthetic oligonucleotide
  Antisense strand to SEQ ID NO: 2462762
auccuaagcacugauuaua

SEQ ID NO: 2462764 - RNA, 19 nt, Artificial Sequence
  Description of Artificial Sequence: Synthetic oligonucleotide
  Sense strand starting at position 1418 of SEQ ID NO: 1887314
ugagauugcaccuguggga

SEQ ID NO: 2462765 - RNA, 19 nt, Artificial Sequence
  Description of Artificial Sequence: Synthetic oligonucleotide
  Antisense strand to SEQ ID NO: 2462764
ucccacaggugcaaucuca

SEQ ID NO: 2462766 - RNA, 19 nt, Artificial Sequence
  Description of Artificial Sequence: Synthetic oligonucleotide
  Sense strand starting at position 1483 of SEQ ID NO: 1887314
auugauuaacgguacuaca

SEQ ID NO: 2462767 - RNA, 19 nt, Artificial Sequence
  Description of Artificial Sequence: Synthetic oligonucleotide
  Antisense strand to SEQ ID NO: 2462766
uguaguaccguuaaucaau

SEQ ID NO: 2462768 - RNA, 19 nt, Artificial Sequence
  Description of Artificial Sequence: Synthetic oligonucleotide
  Sense strand starting at position 1519 of SEQ ID NO: 1887314
cagguaagaugcuuaucau

SEQ ID NO: 2462769 - RNA, 19 nt, Artificial Sequence
  Description of Artificial Sequence: Synthetic oligonucleotide
  Antisense strand to SEQ ID NO: 2462768
augauaagcaucuuaccug

SEQ ID NO: 2462770 - RNA, 19 nt, Artificial Sequence
  Description of Artificial Sequence: Synthetic oligonucleotide
  Sense strand starting at position 1520 of SEQ ID NO: 1887314
agguaagaugcuuaucauu

SEQ ID NO: 2462771 - RNA, 19 nt, Artificial Sequence
  Description of Artificial Sequence: Synthetic oligonucleotide
  Antisense strand to SEQ ID NO: 2462770
aaugauaagcaucuuaccu

SEQ ID NO: 2462772 - RNA, 19 nt, Artificial Sequence
  Description of Artificial Sequence: Synthetic oligonucleotide
  Sense strand starting at position 2753 of SEQ ID NO: 1887314
cgcggagacgugagucuuu

SEQ ID NO: 2462773 - RNA, 19 nt, Artificial Sequence
  Description of Artificial Sequence: Synthetic oligonucleotide
  Antisense strand to SEQ ID NO: 2462772
aaagacucacgucuccgcg

SEQ ID NO: 2462774 - RNA, 19 nt, Artificial Sequence
  Description of Artificial Sequence: Synthetic oligonucleotide
  Sense strand starting at position 3027 of SEQ ID NO: 1887314
aagggacugacguguuuag

SEQ ID NO: 2462775 - RNA, 19 nt, Artificial Sequence
  Description of Artificial Sequence: Synthetic oligonucleotide
  Antisense strand to SEQ ID NO: 2462774
cuaaacacgucagucccuu

SEQ ID NO: 2462776 - RNA, 19 nt, Artificial Sequence
  Description of Artificial Sequence: Synthetic oligonucleotide
  Sense strand starting at position 3031 of SEQ ID NO: 1887314
gacugacguguuuagaaau

SEQ ID NO: 2462777 - RNA, 19 nt, Artificial Sequence
  Description of Artificial Sequence: Synthetic oligonucleotide
  Antisense strand to SEQ ID NO: 2462776
auuucuaaacacgucaguc

SEQ ID NO: 2462778 - RNA, 19 nt, Artificial Sequence
  Description of Artificial Sequence: Synthetic oligonucleotide
  Sense strand starting at position 3201 of SEQ ID NO: 1887314
agcauccucccuggagaaa

SEQ ID NO: 2462779 - RNA, 19 nt, Artificial Sequence
  Description of Artificial Sequence: Synthetic oligonucleotide
  Antisense strand to SEQ ID NO: 2462778
uuucuccagggaggaugcu

SEQ ID NO: 2462780 - RNA, 19 nt, Artificial Sequence
  Description of Artificial Sequence: Synthetic oligonucleotide
  Sense strand starting at position 3266 of SEQ ID NO: 1887314
gccucucuccugggaauga

SEQ ID NO: 2462781 - RNA, 19 nt, Artificial Sequence
  Description of Artificial Sequence: Synthetic oligonucleotide
  Antisense strand to SEQ ID NO: 2462780
ucauucccaggagagaggc

SEQ ID NO: 2462782 - RNA, 19 nt, Artificial Sequence
  Description of Artificial Sequence: Synthetic oligonucleotide
  Sense strand starting at position 3277 of SEQ ID NO: 1887314
gggaaugauuucuaaaugu

SEQ ID NO: 2462783 - RNA, 19 nt, Artificial Sequence
  Description of Artificial Sequence: Synthetic oligonucleotide
  Antisense strand to SEQ ID NO: 2462782
acauuuagaaaucauuccc

SEQ ID NO: 2462784 - RNA, 19 nt, Artificial Sequence
  Description of Artificial Sequence: Synthetic oligonucleotide
  Sense strand starting at position 3410 of SEQ ID NO: 1887314
gcacuugugcaacacauga

SEQ ID NO: 2462785 - RNA, 19 nt, Artificial Sequence
  Description of Artificial Sequence: Synthetic oligonucleotide
  Antisense strand to SEQ ID NO: 2462784
ucauguguugcacaagugc

SEQ ID NO: 2462786 - RNA, 19 nt, Artificial Sequence
  Description of Artificial Sequence: Synthetic oligonucleotide
  Sense strand starting at position 3415 of SEQ ID NO: 1887314
ugugcaacacaugaguuua

SEQ ID NO: 2462787 - RNA, 19 nt, Artificial Sequence
  Description of Artificial Sequence: Synthetic oligonucleotide
  Antisense strand to SEQ ID NO: 2462786
uaaacucauguguugcaca

SEQ ID NO: 2462788 - RNA, 19 nt, Artificial Sequence
  Description of Artificial Sequence: Synthetic oligonucleotide
  Sense strand starting at position 3427 of SEQ ID NO: 1887314
gaguuuaacgaguacuugu

SEQ ID NO: 2462789 - RNA, 19 nt, Artificial Sequence
  Description of Artificial Sequence: Synthetic oligonucleotide
  Antisense strand to SEQ ID NO: 2462788
acaaguacucguuaaacuc

SEQ ID NO: 2462790 - RNA, 19 nt, Artificial Sequence
  Description of Artificial Sequence: Synthetic oligonucleotide
  Sense strand starting at position 3622 of SEQ ID NO: 1887314
augugaguuugaccaccau

SEQ ID NO: 2462791 - RNA, 19 nt, Artificial Sequence
  Description of Artificial Sequence: Synthetic oligonucleotide
  Antisense strand to SEQ ID NO: 2462790
augguggucaaacucacau

SEQ ID NO: 2462792 - RNA, 19 nt, Artificial Sequence
  Description of Artificial Sequence: Synthetic oligonucleotide
  Sense strand starting at position 3776 of SEQ ID NO: 1887314
cacuacuguggaugauuaa

SEQ ID NO: 2462793 - RNA, 19 nt, Artificial Sequence
  Description of Artificial Sequence: Synthetic oligonucleotide
  Antisense strand to SEQ ID NO: 2462792
uuaaucauccacaguagug

SEQ ID NO: 2462794 - RNA, 19 nt, Artificial Sequence
  Description of Artificial Sequence: Synthetic oligonucleotide
  Sense strand starting at position 3788 of SEQ ID NO: 1887314
ugauuaacagccugugauu

SEQ ID NO: 2462795 - RNA, 19 nt, Artificial Sequence
  Description of Artificial Sequence: Synthetic oligonucleotide
  Antisense strand to SEQ ID NO: 2462794
aaucacaggcuguuaauca

SEQ ID NO: 2462796 - RNA, 19 nt, Artificial Sequence
  Description of Artificial Sequence: Synthetic oligonucleotide
  Sense strand starting at position 3790 of SEQ ID NO: 1887314
auuaacagccugugauuaa

SEQ ID NO: 2462797 - RNA, 19 nt, Artificial Sequence
  Description of Artificial Sequence: Synthetic oligonucleotide
  Antisense strand to SEQ ID NO: 2462796
uuaaucacaggcuguuaau

SEQ ID NO: 2462798 - RNA, 19 nt, Artificial Sequence
  Description of Artificial Sequence: Synthetic oligonucleotide
  Sense strand starting at position 3794 of SEQ ID NO: 1887314
acagccugugauuaaaugu

SEQ ID NO: 2462799 - RNA, 19 nt, Artificial Sequence
  Description of Artificial Sequence: Synthetic oligonucleotide
  Antisense strand to SEQ ID NO: 2462798
acauuuaaucacaggcugu

SEQ ID NO: 2462800 - RNA, 19 nt, Artificial Sequence
  Description of Artificial Sequence: Synthetic oligonucleotide
  Sense strand starting at position 3873 of SEQ ID NO: 1887314
uuaagaauucuauguaugg

SEQ ID NO: 2462801 - RNA, 19 nt, Artificial Sequence
  Description of Artificial Sequence: Synthetic oligonucleotide
  Antisense strand to SEQ ID NO: 2462800
ccauacauagaauucuuaa

SEQ ID NO: 2462802 - RNA, 19 nt, Artificial Sequence
  Description of Artificial Sequence: Synthetic oligonucleotide
  Sense strand starting at position 3874 of SEQ ID NO: 1887314
uaagaauucuauguaugga

SEQ ID NO: 2462803 - RNA, 19 nt, Artificial Sequence
  Description of Artificial Sequence: Synthetic oligonucleotide
  Antisense strand to SEQ ID NO: 2462802
uccauacauagaauucuua

SEQ ID NO: 2462804 - RNA, 19 nt, Artificial Sequence
  Description of Artificial Sequence: Synthetic oligonucleotide
  Sense strand starting at position 3877 of SEQ ID NO: 1887314
gaauucuauguauggacau

SEQ ID NO: 2462805 - RNA, 19 nt, Artificial Sequence
  Description of Artificial Sequence: Synthetic oligonucleotide
  Antisense strand to SEQ ID NO: 2462804
auguccauacauagaauuc

SEQ ID NO: 2462806 - RNA, 19 nt, Artificial Sequence
  Description of Artificial Sequence: Synthetic oligonucleotide
  Sense strand starting at position 3889 of SEQ ID NO: 1887314
uggacauaaugugucugau

SEQ ID NO: 2462807 - RNA, 19 nt, Artificial Sequence
  Description of Artificial Sequence: Synthetic oligonucleotide
  Antisense strand to SEQ ID NO: 2462806
aucagacacauuaugucca

SEQ ID NO: 2462808 - RNA, 19 nt, Artificial Sequence
  Description of Artificial Sequence: Synthetic oligonucleotide
  Sense strand starting at position 3891 of SEQ ID NO: 1887314
gacauaaugugucugauuc

SEQ ID NO: 2462809 - RNA, 19 nt, Artificial Sequence
  Description of Artificial Sequence: Synthetic oligonucleotide
  Antisense strand to SEQ ID NO: 2462808
gaaucagacacauuauguc

SEQ ID NO: 2462810 - RNA, 19 nt, Artificial Sequence
  Description of Artificial Sequence: Synthetic oligonucleotide
  Sense strand starting at position 1378 of SEQ ID NO: 1887315
agaggaggcuguaaucguu

SEQ ID NO: 2462811 - RNA, 19 nt, Artificial Sequence
  Description of Artificial Sequence: Synthetic oligonucleotide
  Antisense strand to SEQ ID NO: 2462810
aacgauuacagccuccucu

SEQ ID NO: 2462812 - RNA, 19 nt, Artificial Sequence
  Description of Artificial Sequence: Synthetic oligonucleotide
  Sense strand starting at position 1460 of SEQ ID NO: 1887315
ggugauccuucgccaggga

SEQ ID NO: 2462813 - RNA, 19 nt, Artificial Sequence
  Description of Artificial Sequence: Synthetic oligonucleotide
  Antisense strand to SEQ ID NO: 2462812
ucccuggcgaaggaucacc

SEQ ID NO: 2462814 - RNA, 19 nt, Artificial Sequence
  Description of Artificial Sequence: Synthetic oligonucleotide
  Sense strand starting at position 1842 of SEQ ID NO: 1887315
cgucuuagucgccuuagca

SEQ ID NO: 2462815 - RNA, 19 nt, Artificial Sequence
  Description of Artificial Sequence: Synthetic oligonucleotide
  Antisense strand to SEQ ID NO: 2462814
ugcuaaggcgacuaagacg

SEQ ID NO: 2462816 - RNA, 19 nt, Artificial Sequence
  Description of Artificial Sequence: Synthetic oligonucleotide
  Sense strand starting at position 1934 of SEQ ID NO: 1887315
ggacgauccaggugacuug

SEQ ID NO: 2462817 - RNA, 19 nt, Artificial Sequence
  Description of Artificial Sequence: Synthetic oligonucleotide
  Antisense strand to SEQ ID NO: 2462816
caagucaccuggaucgucc

SEQ ID NO: 2462818 - RNA, 19 nt, Artificial Sequence
  Description of Artificial Sequence: Synthetic oligonucleotide
  Sense strand starting at position 1965 of SEQ ID NO: 1887315
gggaguuguauugacacca

SEQ ID NO: 2462819 - RNA, 19 nt, Artificial Sequence
  Description of Artificial Sequence: Synthetic oligonucleotide
  Antisense strand to SEQ ID NO: 2462818
uggugucaauacaacuccc

SEQ ID NO: 2462820 - RNA, 19 nt, Artificial Sequence
  Description of Artificial Sequence: Synthetic oligonucleotide
  Sense strand starting at position 2029 of SEQ ID NO: 1887315
ggcaucaaucuguguaucu

SEQ ID NO: 2462821 - RNA, 19 nt, Artificial Sequence
  Description of Artificial Sequence: Synthetic oligonucleotide
  Antisense strand to SEQ ID NO: 2462820
agauacacagauugaugcc

SEQ ID NO: 2462822 - RNA, 19 nt, Artificial Sequence
  Description of Artificial Sequence: Synthetic oligonucleotide
  Sense strand starting at position 2030 of SEQ ID NO: 1887315
gcaucaaucuguguaucug

SEQ ID NO: 2462823 - RNA, 19 nt, Artificial Sequence
  Description of Artificial Sequence: Synthetic oligonucleotide
  Antisense strand to SEQ ID NO: 2462822
cagauacacagauugaugc

SEQ ID NO: 2462824 - RNA, 19 nt, Artificial Sequence
  Description of Artificial Sequence: Synthetic oligonucleotide
  Sense strand starting at position 2041 of SEQ ID NO: 1887315
uguaucuguuaagucuuaa

SEQ ID NO: 2462825 - RNA, 19 nt, Artificial Sequence
  Description of Artificial Sequence: Synthetic oligonucleotide
  Antisense strand to SEQ ID NO: 2462824
uuaagacuuaacagauaca

SEQ ID NO: 2462826 - RNA, 19 nt, Artificial Sequence
  Description of Artificial Sequence: Synthetic oligonucleotide
  Sense strand starting at position 2052 of SEQ ID NO: 1887315
agucuuaaugagcagccaa

SEQ ID NO: 2462827 - RNA, 19 nt, Artificial Sequence
  Description of Artificial Sequence: Synthetic oligonucleotide
  Antisense strand to SEQ ID NO: 2462826
uuggcugcucauuaagacu

SEQ ID NO: 2462828 - RNA, 19 nt, Artificial Sequence
  Description of Artificial Sequence: Synthetic oligonucleotide
  Sense strand starting at position 2096 of SEQ ID NO: 1887315
ucuucaguggguuauguga

SEQ ID NO: 2462829 - RNA, 19 nt, Artificial Sequence
  Description of Artificial Sequence: Synthetic oligonucleotide
  Antisense strand to SEQ ID NO: 2462828
ucacauaacccacugaaga

SEQ ID NO: 2462830 - RNA, 19 nt, Artificial Sequence
  Description of Artificial Sequence: Synthetic oligonucleotide
  Sense strand starting at position 2105 of SEQ ID NO: 1887315
gguuaugugauuugagcug

SEQ ID NO: 2462831 - RNA, 19 nt, Artificial Sequence
  Description of Artificial Sequence: Synthetic oligonucleotide
  Antisense strand to SEQ ID NO: 2462830
cagcucaaaucacauaacc

SEQ ID NO: 2462832 - RNA, 19 nt, Artificial Sequence
  Description of Artificial Sequence: Synthetic oligonucleotide
  Sense strand starting at position 2169 of SEQ ID NO: 1887315
gcuagugagauugaggauu

SEQ ID NO: 2462833 - RNA, 19 nt, Artificial Sequence
  Description of Artificial Sequence: Synthetic oligonucleotide
  Antisense strand to SEQ ID NO: 2462832
aauccucaaucucacuagc

SEQ ID NO: 2462834 - RNA, 19 nt, Artificial Sequence
  Description of Artificial Sequence: Synthetic oligonucleotide
  Sense strand starting at position 2206 of SEQ ID NO: 1887315
uggugaagucugcaguuca

SEQ ID NO: 2462835 - RNA, 19 nt, Artificial Sequence
  Description of Artificial Sequence: Synthetic oligonucleotide
  Antisense strand to SEQ ID NO: 2462834
ugaacugcagacuucacca

SEQ ID NO: 2462836 - RNA, 19 nt, Artificial Sequence
  Description of Artificial Sequence: Synthetic oligonucleotide
  Sense strand starting at position 2240 of SEQ ID NO: 1887315
acauuaacugcugggugau

SEQ ID NO: 2462837 - RNA, 19 nt, Artificial Sequence
  Description of Artificial Sequence: Synthetic oligonucleotide
  Antisense strand to SEQ ID NO: 2462836
aucacccagcaguuaaugu

SEQ ID NO: 2462838 - RNA, 19 nt, Artificial Sequence
  Description of Artificial Sequence: Synthetic oligonucleotide
  Sense strand starting at position 2264 of SEQ ID NO: 1887315
gccuaaauuucuuauggag

SEQ ID NO: 2462839 - RNA, 19 nt, Artificial Sequence
  Description of Artificial Sequence: Synthetic oligonucleotide
  Antisense strand to SEQ ID NO: 2462838
cuccauaagaaauuuaggc

SEQ ID NO: 2462840 - RNA, 19 nt, Artificial Sequence
  Description of Artificial Sequence: Synthetic oligonucleotide
  Sense strand starting at position 2315 of SEQ ID NO: 1887315
uacuuugugcaagaaguaa

SEQ ID NO: 2462841 - RNA, 19 nt, Artificial Sequence
  Description of Artificial Sequence: Synthetic oligonucleotide
  Antisense strand to SEQ ID NO: 2462840
uuacuucuugcacaaagua

SEQ ID NO: 2462842 - RNA, 19 nt, Artificial Sequence
  Description of Artificial Sequence: Synthetic oligonucleotide
  Sense strand starting at position 2361 of SEQ ID NO: 1887315
aaagaaagauugggacuua

SEQ ID NO: 2462843 - RNA, 19 nt, Artificial Sequence
  Description of Artificial Sequence: Synthetic oligonucleotide
  Antisense strand to SEQ ID NO: 2462842
uaagucccaaucuuucuuu

SEQ ID NO: 2462844 - RNA, 19 nt, Artificial Sequence
  Description of Artificial Sequence: Synthetic oligonucleotide
  Sense strand starting at position 2362 of SEQ ID NO: 1887315
aagaaagauugggacuuaa

SEQ ID NO: 2462845 - RNA, 19 nt, Artificial Sequence
  Description of Artificial Sequence: Synthetic oligonucleotide
  Antisense strand to SEQ ID NO: 2462844
uuaagucccaaucuuucuu

SEQ ID NO: 2462846 - RNA, 19 nt, Artificial Sequence
  Description of Artificial Sequence: Synthetic oligonucleotide
  Sense strand starting at position 2586 of SEQ ID NO: 1887315
cuuacuuucugauugaaug

SEQ ID NO: 2462847 - RNA, 19 nt, Artificial Sequence
  Description of Artificial Sequence: Synthetic oligonucleotide
  Antisense strand to SEQ ID NO: 2462846
cauucaaucagaaaguaag

SEQ ID NO: 2462848 - RNA, 19 nt, Artificial Sequence
  Description of Artificial Sequence: Synthetic oligonucleotide
  Sense strand starting at position 2587 of SEQ ID NO: 1887315
uuacuuucugauugaauga

SEQ ID NO: 2462849 - RNA, 19 nt, Artificial Sequence
  Description of Artificial Sequence: Synthetic oligonucleotide
  Antisense strand to SEQ ID NO: 2462848
ucauucaaucagaaaguaa

SEQ ID NO: 2462850 - RNA, 19 nt, Artificial Sequence
  Description of Artificial Sequence: Synthetic oligonucleotide
  Sense strand starting at position 2597 of SEQ ID NO: 1887315
auugaaugauguuuaucca

SEQ ID NO: 2462851 - RNA, 19 nt, Artificial Sequence
  Description of Artificial Sequence: Synthetic oligonucleotide
  Antisense strand to SEQ ID NO: 2462850
uggauaaacaucauucaau

SEQ ID NO: 2462852 - RNA, 19 nt, Artificial Sequence
  Description of Artificial Sequence: Synthetic oligonucleotide
  Sense strand starting at position 2653 of SEQ ID NO: 1887315
agaaguuucucauugcauc

SEQ ID NO: 2462853 - RNA, 19 nt, Artificial Sequence
  Description of Artificial Sequence: Synthetic oligonucleotide
  Antisense strand to SEQ ID NO: 2462852
gaugcaaugagaaacuucu

SEQ ID NO: 2462854 - RNA, 19 nt, Artificial Sequence
  Description of Artificial Sequence: Synthetic oligonucleotide
  Sense strand starting at position 2665 of SEQ ID NO: 1887315
uugcaucuuugaucuuaag

SEQ ID NO: 2462855 - RNA, 19 nt, Artificial Sequence
  Description of Artificial Sequence: Synthetic oligonucleotide
  Antisense strand to SEQ ID NO: 2462854
cuuaagaucaaagaugcaa

SEQ ID NO: 2462856 - RNA, 19 nt, Artificial Sequence
  Description of Artificial Sequence: Synthetic oligonucleotide
  Sense strand starting at position 2681 of SEQ ID NO: 1887315
aagguaggcuauccaucau

SEQ ID NO: 2462857 - RNA, 19 nt, Artificial Sequence
  Description of Artificial Sequence: Synthetic oligonucleotide
  Antisense strand to SEQ ID NO: 2462856
augauggauagccuaccuu

SEQ ID NO: 2462858 - RNA, 19 nt, Artificial Sequence
  Description of Artificial Sequence: Synthetic oligonucleotide
  Sense strand starting at position 2753 of SEQ ID NO: 1887315
augaaaugugucugagccu

SEQ ID NO: 2462859 - RNA, 19 nt, Artificial Sequence
  Description of Artificial Sequence: Synthetic oligonucleotide
  Antisense strand to SEQ ID NO: 2462858
aggcucagacacauuucau

SEQ ID NO: 2462860 - RNA, 19 nt, Artificial Sequence
  Description of Artificial Sequence: Synthetic oligonucleotide
  Sense strand starting at position 2766 of SEQ ID NO: 1887315
gagccuggagucugauaca

SEQ ID NO: 2462861 - RNA, 19 nt, Artificial Sequence
  Description of Artificial Sequence: Synthetic oligonucleotide
  Antisense strand to SEQ ID NO: 2462860
uguaucagacuccaggcuc

SEQ ID NO: 2462862 - RNA, 19 nt, Artificial Sequence
  Description of Artificial Sequence: Synthetic oligonucleotide
  Sense strand starting at position 2771 of SEQ ID NO: 1887315
uggagucugauacagugua

SEQ ID NO: 2462863 - RNA, 19 nt, Artificial Sequence
  Description of Artificial Sequence: Synthetic oligonucleotide
  Antisense strand to SEQ ID NO: 2462862
uacacuguaucagacucca

SEQ ID NO: 2462864 - RNA, 19 nt, Artificial Sequence
  Description of Artificial Sequence: Synthetic oligonucleotide
  Sense strand starting at position 2779 of SEQ ID NO: 1887315
gauacaguguauuugcuau

SEQ ID NO: 2462865 - RNA, 19 nt, Artificial Sequence
  Description of Artificial Sequence: Synthetic oligonucleotide
  Antisense strand to SEQ ID NO: 2462864
auagcaaauacacuguauc

SEQ ID NO: 2462866 - RNA, 19 nt, Artificial Sequence
  Description of Artificial Sequence: Synthetic oligonucleotide
  Sense strand starting at position 2834 of SEQ ID NO: 1887315
gugguaucaugaucauaac

SEQ ID NO: 2462867 - RNA, 19 nt, Artificial Sequence
  Description of Artificial Sequence: Synthetic oligonucleotide
  Antisense strand to SEQ ID NO: 2462866
guuaugaucaugauaccac

SEQ ID NO: 2462868 - RNA, 19 nt, Artificial Sequence
  Description of Artificial Sequence: Synthetic oligonucleotide
  Sense strand starting at position 2905 of SEQ ID NO: 1887315
aaggucauagagugaguaa

SEQ ID NO: 2462869 - RNA, 19 nt, Artificial Sequence
  Description of Artificial Sequence: Synthetic oligonucleotide
  Antisense strand to SEQ ID NO: 2462868
uuacucacucuaugaccuu

SEQ ID NO: 2462870 - RNA, 19 nt, Artificial Sequence
  Description of Artificial Sequence: Synthetic oligonucleotide
  Sense strand starting at position 3128 of SEQ ID NO: 1887315
cuguguacgaauggucaca

SEQ ID NO: 2462871 - RNA, 19 nt, Artificial Sequence
  Description of Artificial Sequence: Synthetic oligonucleotide
  Antisense strand to SEQ ID NO: 2462870
ugugaccauucguacacag

SEQ ID NO: 2462872 - RNA, 19 nt, Artificial Sequence
  Description of Artificial Sequence: Synthetic oligonucleotide
  Sense strand starting at position 3130 of SEQ ID NO: 1887315
guguacgaauggucacaua

SEQ ID NO: 2462873 - RNA, 19 nt, Artificial Sequence
  Description of Artificial Sequence: Synthetic oligonucleotide
  Antisense strand to SEQ ID NO: 2462872
uaugugaccauucguacac

SEQ ID NO: 2462874 - RNA, 19 nt, Artificial Sequence
  Description of Artificial Sequence: Synthetic oligonucleotide
  Sense strand starting at position 3295 of SEQ ID NO: 1887315
gcuagcaaaccagaugauu

SEQ ID NO: 2462875 - RNA, 19 nt, Artificial Sequence
  Description of Artificial Sequence: Synthetic oligonucleotide
  Antisense strand to SEQ ID NO: 2462874
aaucaucugguuugcuagc

SEQ ID NO: 2462876 - RNA, 19 nt, Artificial Sequence
  Description of Artificial Sequence: Synthetic oligonucleotide
  Sense strand starting at position 3314 of SEQ ID NO: 1887315
gcguguaugcaugugaggu

SEQ ID NO: 2462877 - RNA, 19 nt, Artificial Sequence
  Description of Artificial Sequence: Synthetic oligonucleotide
  Antisense strand to SEQ ID NO: 2462876
accucacaugcauacacgc

SEQ ID NO: 2462878 - RNA, 19 nt, Artificial Sequence
  Description of Artificial Sequence: Synthetic oligonucleotide
  Sense strand starting at position 3320 of SEQ ID NO: 1887315
augcaugugagguacucau

SEQ ID NO: 2462879 - RNA, 19 nt, Artificial Sequence
  Description of Artificial Sequence: Synthetic oligonucleotide
  Antisense strand to SEQ ID NO: 2462878
augaguaccucacaugcau

SEQ ID NO: 2462880 - RNA, 19 nt, Artificial Sequence
  Description of Artificial Sequence: Synthetic oligonucleotide
  Sense strand starting at position 3331 of SEQ ID NO: 1887315
guacucauuuggccacuca

SEQ ID NO: 2462881 - RNA, 19 nt, Artificial Sequence
  Description of Artificial Sequence: Synthetic oligonucleotide
  Antisense strand to SEQ ID NO: 2462880
ugaguggccaaaugaguac

SEQ ID NO: 2462882 - RNA, 19 nt, Artificial Sequence
  Description of Artificial Sequence: Synthetic oligonucleotide
  Sense strand starting at position 3508 of SEQ ID NO: 1887315
uagcgugugcccuuuauaa

SEQ ID NO: 2462883 - RNA, 19 nt, Artificial Sequence
  Description of Artificial Sequence: Synthetic oligonucleotide
  Antisense strand to SEQ ID NO: 2462882
uuauaaagggcacacgcua

SEQ ID NO: 2462884 - RNA, 19 nt, Artificial Sequence
  Description of Artificial Sequence: Synthetic oligonucleotide
  Sense strand starting at position 3682 of SEQ ID NO: 1887315
cugccucauccugauaagu

SEQ ID NO: 2462885 - RNA, 19 nt, Artificial Sequence
  Description of Artificial Sequence: Synthetic oligonucleotide
  Antisense strand to SEQ ID NO: 2462884
acuuaucaggaugaggcag

SEQ ID NO: 2462886 - RNA, 19 nt, Artificial Sequence
  Description of Artificial Sequence: Synthetic oligonucleotide
  Sense strand starting at position 3953 of SEQ ID NO: 1887315
caggauuagguauagcauu

SEQ ID NO: 2462887 - RNA, 19 nt, Artificial Sequence
  Description of Artificial Sequence: Synthetic oligonucleotide
  Antisense strand to SEQ ID NO: 2462886
aaugcuauaccuaauccug

SEQ ID NO: 2462888 - RNA, 19 nt, Artificial Sequence
  Description of Artificial Sequence: Synthetic oligonucleotide
  Sense strand starting at position 3981 of SEQ ID NO: 1887315
caauguaucugauaagagg

SEQ ID NO: 2462889 - RNA, 19 nt, Artificial Sequence
  Description of Artificial Sequence: Synthetic oligonucleotide
  Antisense strand to SEQ ID NO: 2462888
ccucuuaucagauacauug

SEQ ID NO: 2462890 - RNA, 19 nt, Artificial Sequence
  Description of Artificial Sequence: Synthetic oligonucleotide
  Sense strand starting at position 189 of SEQ ID NO: 1887316
ugucgaaucggucaauguc

SEQ ID NO: 2462891 - RNA, 19 nt, Artificial Sequence
  Description of Artificial Sequence: Synthetic oligonucleotide
  Antisense strand to SEQ ID NO: 2462890
gacauugaccgauucgaca

SEQ ID NO: 2462892 - RNA, 19 nt, Artificial Sequence
  Description of Artificial Sequence: Synthetic oligonucleotide
  Sense strand starting at position 304 of SEQ ID NO: 1887316
ucgaguguccagggauauc

SEQ ID NO: 2462893 - RNA, 19 nt, Artificial Sequence
  Description of Artificial Sequence: Synthetic oligonucleotide
  Antisense strand to SEQ ID NO: 2462892
gauaucccuggacacucga

SEQ ID NO: 2462894 - RNA, 19 nt, Artificial Sequence
  Description of Artificial Sequence: Synthetic oligonucleotide
  Sense strand starting at position 315 of SEQ ID NO: 1887316
gggauauccacgcagacau

SEQ ID NO: 2462895 - RNA, 19 nt, Artificial Sequence
  Description of Artificial Sequence: Synthetic oligonucleotide
  Antisense strand to SEQ ID NO: 2462894
augucugcguggauauccc

SEQ ID NO: 2462896 - RNA, 19 nt, Artificial Sequence
  Description of Artificial Sequence: Synthetic oligonucleotide
  Sense strand starting at position 325 of SEQ ID NO: 1887316
cgcagacauccuuguacuu

SEQ ID NO: 2462897 - RNA, 19 nt, Artificial Sequence
  Description of Artificial Sequence: Synthetic oligonucleotide
  Antisense strand to SEQ ID NO: 2462896
aaguacaaggaugucugcg

SEQ ID NO: 2462898 - RNA, 19 nt, Artificial Sequence
  Description of Artificial Sequence: Synthetic oligonucleotide
  Sense strand starting at position 565 of SEQ ID NO: 1887316
ccauuuccgucagugcuua

SEQ ID NO: 2462899 - RNA, 19 nt, Artificial Sequence
  Description of Artificial Sequence: Synthetic oligonucleotide
  Antisense strand to SEQ ID NO: 2462898
uaagcacugacggaaaugg

SEQ ID NO: 2462900 - RNA, 19 nt, Artificial Sequence
  Description of Artificial Sequence: Synthetic oligonucleotide
  Sense strand starting at position 569 of SEQ ID NO: 1887316
uuccgucagugcuuacaaa

SEQ ID NO: 2462901 - RNA, 19 nt, Artificial Sequence
  Description of Artificial Sequence: Synthetic oligonucleotide
  Antisense strand to SEQ ID NO: 2462900
uuuguaagcacugacggaa

SEQ ID NO: 2462902 - RNA, 19 nt, Artificial Sequence
  Description of Artificial Sequence: Synthetic oligonucleotide
  Sense strand starting at position 570 of SEQ ID NO: 1887316
uccgucagugcuuacaaau

SEQ ID NO: 2462903 - RNA, 19 nt, Artificial Sequence
  Description of Artificial Sequence: Synthetic oligonucleotide
  Antisense strand to SEQ ID NO: 2462902
auuuguaagcacugacgga

SEQ ID NO: 2462904 - RNA, 19 nt, Artificial Sequence
  Description of Artificial Sequence: Synthetic oligonucleotide
  Sense strand starting at position 616 of SEQ ID NO: 1887316
aacauuuggucggaacuca

SEQ ID NO: 2462905 - RNA, 19 nt, Artificial Sequence
  Description of Artificial Sequence: Synthetic oligonucleotide
  Antisense strand to SEQ ID NO: 2462904
ugaguuccgaccaaauguu

SEQ ID NO: 2462906 - RNA, 19 nt, Artificial Sequence
  Description of Artificial Sequence: Synthetic oligonucleotide
  Sense strand starting at position 697 of SEQ ID NO: 1887316
cuggcuaucucuucuggga

SEQ ID NO: 2462907 - RNA, 19 nt, Artificial Sequence
  Description of Artificial Sequence: Synthetic oligonucleotide
  Antisense strand to SEQ ID NO: 2462906
ucccagaagagauagccag

SEQ ID NO: 2462908 - RNA, 19 nt, Artificial Sequence
  Description of Artificial Sequence: Synthetic oligonucleotide
  Sense strand starting at position 717 of SEQ ID NO: 1887316
ucgcgcauucgaucgcauu

SEQ ID NO: 2462909 - RNA, 19 nt, Artificial Sequence
  Description of Artificial Sequence: Synthetic oligonucleotide
  Antisense strand to SEQ ID NO: 2462908
aaugcgaucgaaugcgcga

SEQ ID NO: 2462910 - RNA, 19 nt, Artificial Sequence
  Description of Artificial Sequence: Synthetic oligonucleotide
  Sense strand starting at position 863 of SEQ ID NO: 1887316
ggcaaaguggaacguaaua

SEQ ID NO: 2462911 - RNA, 19 nt, Artificial Sequence
  Description of Artificial Sequence: Synthetic oligonucleotide
  Antisense strand to SEQ ID NO: 2462910
uauuacguuccacuuugcc

SEQ ID NO: 2462912 - RNA, 19 nt, Artificial Sequence
  Description of Artificial Sequence: Synthetic oligonucleotide
  Sense strand starting at position 885 of SEQ ID NO: 1887316
gugacuaaauuggaugaga

SEQ ID NO: 2462913 - RNA, 19 nt, Artificial Sequence
  Description of Artificial Sequence: Synthetic oligonucleotide
  Antisense strand to SEQ ID NO: 2462912
ucucauccaauuuagucac

SEQ ID NO: 2462914 - RNA, 19 nt, Artificial Sequence
  Description of Artificial Sequence: Synthetic oligonucleotide
  Sense strand starting at position 912 of SEQ ID NO: 1887316
uggaccuucucgguagcaa

SEQ ID NO: 2462915 - RNA, 19 nt, Artificial Sequence
  Description of Artificial Sequence: Synthetic oligonucleotide
  Antisense strand to SEQ ID NO: 2462914
uugcuaccgagaaggucca

SEQ ID NO: 2462916 - RNA, 19 nt, Artificial Sequence
  Description of Artificial Sequence: Synthetic oligonucleotide
  Sense strand starting at position 913 of SEQ ID NO: 1887316
ggaccuucucgguagcaau

SEQ ID NO: 2462917 - RNA, 19 nt, Artificial Sequence
  Description of Artificial Sequence: Synthetic oligonucleotide
  Antisense strand to SEQ ID NO: 2462916
auugcuaccgagaaggucc

SEQ ID NO: 2462918 - RNA, 19 nt, Artificial Sequence
  Description of Artificial Sequence: Synthetic oligonucleotide
  Sense strand starting at position 978 of SEQ ID NO: 1887316
aacgaagaauucucgccaa

SEQ ID NO: 2462919 - RNA, 19 nt, Artificial Sequence
  Description of Artificial Sequence: Synthetic oligonucleotide
  Antisense strand to SEQ ID NO: 2462918
uuggcgagaauucuucguu

SEQ ID NO: 2462920 - RNA, 19 nt, Artificial Sequence
  Description of Artificial Sequence: Synthetic oligonucleotide
  Sense strand starting at position 1075 of SEQ ID NO: 1887316
caguuacgugcagaggaaa

SEQ ID NO: 2462921 - RNA, 19 nt, Artificial Sequence
  Description of Artificial Sequence: Synthetic oligonucleotide
  Antisense strand to SEQ ID NO: 2462920
uuuccucugcacguaacug

SEQ ID NO: 2462922 - RNA, 19 nt, Artificial Sequence
  Description of Artificial Sequence: Synthetic oligonucleotide
  Sense strand starting at position 1111 of SEQ ID NO: 1887316
gucucaccaucucuggaaa

SEQ ID NO: 2462923 - RNA, 19 nt, Artificial Sequence
  Description of Artificial Sequence: Synthetic oligonucleotide
  Antisense strand to SEQ ID NO: 2462922
uuuccagagauggugagac

SEQ ID NO: 2462924 - RNA, 19 nt, Artificial Sequence
  Description of Artificial Sequence: Synthetic oligonucleotide
  Sense strand starting at position 1407 of SEQ ID NO: 1887316
aaauccuuucuguaagcga

SEQ ID NO: 2462925 - RNA, 19 nt, Artificial Sequence
  Description of Artificial Sequence: Synthetic oligonucleotide
  Antisense strand to SEQ ID NO: 2462924
ucgcuuacagaaaggauuu

SEQ ID NO: 2462926 - RNA, 19 nt, Artificial Sequence
  Description of Artificial Sequence: Synthetic oligonucleotide
  Sense strand starting at position 1476 of SEQ ID NO: 1887316
gcgcgaguugccgcugaca

SEQ ID NO: 2462927 - RNA, 19 nt, Artificial Sequence
  Description of Artificial Sequence: Synthetic oligonucleotide
  Antisense strand to SEQ ID NO: 2462926
ugucagcggcaacucgcgc

SEQ ID NO: 2462928 - RNA, 19 nt, Artificial Sequence
  Description of Artificial Sequence: Synthetic oligonucleotide
  Sense strand starting at position 1479 of SEQ ID NO: 1887316
cgaguugccgcugacagau

SEQ ID NO: 2462929 - RNA, 19 nt, Artificial Sequence
  Description of Artificial Sequence: Synthetic oligonucleotide
  Antisense strand to SEQ ID NO: 2462928
aucugucagcggcaacucg

SEQ ID NO: 2462930 - RNA, 19 nt, Artificial Sequence
  Description of Artificial Sequence: Synthetic oligonucleotide
  Sense strand starting at position 1489 of SEQ ID NO: 1887316
cugacagaucggcgcugau

SEQ ID NO: 2462931 - RNA, 19 nt, Artificial Sequence
  Description of Artificial Sequence: Synthetic oligonucleotide
  Antisense strand to SEQ ID NO: 2462930
aucagcgccgaucugucag

SEQ ID NO: 2462932 - RNA, 19 nt, Artificial Sequence
  Description of Artificial Sequence: Synthetic oligonucleotide
  Sense strand starting at position 1547 of SEQ ID NO: 1887316
gggaccguaucaguuugua

SEQ ID NO: 2462933 - RNA, 19 nt, Artificial Sequence
  Description of Artificial Sequence: Synthetic oligonucleotide
  Antisense strand to SEQ ID NO: 2462932
uacaaacugauacgguccc

SEQ ID NO: 2462934 - RNA, 19 nt, Artificial Sequence
  Description of Artificial Sequence: Synthetic oligonucleotide
  Sense strand starting at position 1551 of SEQ ID NO: 1887316
ccguaucaguuuguacaga

SEQ ID NO: 2462935 - RNA, 19 nt, Artificial Sequence
  Description of Artificial Sequence: Synthetic oligonucleotide
  Antisense strand to SEQ ID NO: 2462934
ucuguacaaacugauacgg

SEQ ID NO: 2462936 - RNA, 19 nt, Artificial Sequence
  Description of Artificial Sequence: Synthetic oligonucleotide
  Sense strand starting at position 1556 of SEQ ID NO: 1887316
ucaguuuguacagaguugu

SEQ ID NO: 2462937 - RNA, 19 nt, Artificial Sequence
  Description of Artificial Sequence: Synthetic oligonucleotide
  Antisense strand to SEQ ID NO: 2462936
acaacucuguacaaacuga

SEQ ID NO: 2462938 - RNA, 19 nt, Artificial Sequence
  Description of Artificial Sequence: Synthetic oligonucleotide
  Sense strand starting at position 1675 of SEQ ID NO: 1887316
cgcagugacuuaucuguga

SEQ ID NO: 2462939 - RNA, 19 nt, Artificial Sequence
  Description of Artificial Sequence: Synthetic oligonucleotide
  Antisense strand to SEQ ID NO: 2462938
ucacagauaagucacugcg

SEQ ID NO: 2462940 - RNA, 19 nt, Artificial Sequence
  Description of Artificial Sequence: Synthetic oligonucleotide
  Sense strand starting at position 1678 of SEQ ID NO: 1887316
agugacuuaucugugacuu

SEQ ID NO: 2462941 - RNA, 19 nt, Artificial Sequence
  Description of Artificial Sequence: Synthetic oligonucleotide
  Antisense strand to SEQ ID NO: 2462940
aagucacagauaagucacu

SEQ ID NO: 2462942 - RNA, 19 nt, Artificial Sequence
  Description of Artificial Sequence: Synthetic oligonucleotide
  Sense strand starting at position 1679 of SEQ ID NO: 1887316
gugacuuaucugugacuua

SEQ ID NO: 2462943 - RNA, 19 nt, Artificial Sequence
  Description of Artificial Sequence: Synthetic oligonucleotide
  Antisense strand to SEQ ID NO: 2462942
uaagucacagauaagucac

SEQ ID NO: 2462944 - RNA, 19 nt, Artificial Sequence
  Description of Artificial Sequence: Synthetic oligonucleotide
  Sense strand starting at position 1686 of SEQ ID NO: 1887316
aucugugacuuaccugaaa

SEQ ID NO: 2462945 - RNA, 19 nt, Artificial Sequence
  Description of Artificial Sequence: Synthetic oligonucleotide
  Antisense strand to SEQ ID NO: 2462944
uuucagguaagucacagau

SEQ ID NO: 2462946 - RNA, 19 nt, Artificial Sequence
  Description of Artificial Sequence: Synthetic oligonucleotide
  Sense strand starting at position 1711 of SEQ ID NO: 1887316
agggaaauaucagaaacuc

SEQ ID NO: 2462947 - RNA, 19 nt, Artificial Sequence
  Description of Artificial Sequence: Synthetic oligonucleotide
  Antisense strand to SEQ ID NO: 2462946
gaguuucugauauuucccu

SEQ ID NO: 2462948 - RNA, 19 nt, Artificial Sequence
  Description of Artificial Sequence: Synthetic oligonucleotide
  Sense strand starting at position 1809 of SEQ ID NO: 1887316
acuaccuuuccguacauga

SEQ ID NO: 2462949 - RNA, 19 nt, Artificial Sequence
  Description of Artificial Sequence: Synthetic oligonucleotide
  Antisense strand to SEQ ID NO: 2462948
ucauguacggaaagguagu

SEQ ID NO: 2462950 - RNA, 19 nt, Artificial Sequence
  Description of Artificial Sequence: Synthetic oligonucleotide
  Sense strand starting at position 1822 of SEQ ID NO: 1887316
acaugacgacccgaguuaa

SEQ ID NO: 2462951 - RNA, 19 nt, Artificial Sequence
  Description of Artificial Sequence: Synthetic oligonucleotide
  Antisense strand to SEQ ID NO: 2462950
uuaacucgggucgucaugu

SEQ ID NO: 2462952 - RNA, 19 nt, Artificial Sequence
  Description of Artificial Sequence: Synthetic oligonucleotide
  Sense strand starting at position 1826 of SEQ ID NO: 1887316
gacgacccgaguuaaaguu

SEQ ID NO: 2462953 - RNA, 19 nt, Artificial Sequence
  Description of Artificial Sequence: Synthetic oligonucleotide
  Antisense strand to SEQ ID NO: 2462952
aacuuuaacucgggucguc

SEQ ID NO: 2462954 - RNA, 19 nt, Artificial Sequence
  Description of Artificial Sequence: Synthetic oligonucleotide
  Sense strand starting at position 1862 of SEQ ID NO: 1887316
gaauguugucuugagguuc

SEQ ID NO: 2462955 - RNA, 19 nt, Artificial Sequence
  Description of Artificial Sequence: Synthetic oligonucleotide
  Antisense strand to SEQ ID NO: 2462954
gaaccucaagacaacauuc

SEQ ID NO: 2462956 - RNA, 19 nt, Artificial Sequence
  Description of Artificial Sequence: Synthetic oligonucleotide
  Sense strand starting at position 1912 of SEQ ID NO: 1887316
ccgagauagggucggagaa

SEQ ID NO: 2462957 - RNA, 19 nt, Artificial Sequence
  Description of Artificial Sequence: Synthetic oligonucleotide
  Antisense strand to SEQ ID NO: 2462956
uucuccgacccuaucucgg

SEQ ID NO: 2462958 - RNA, 19 nt, Artificial Sequence
  Description of Artificial Sequence: Synthetic oligonucleotide
  Sense strand starting at position 1913 of SEQ ID NO: 1887316
cgagauagggucggagaaa

SEQ ID NO: 2462959 - RNA, 19 nt, Artificial Sequence
  Description of Artificial Sequence: Synthetic oligonucleotide
  Antisense strand to SEQ ID NO: 2462958
uuucuccgacccuaucucg

SEQ ID NO: 2462960 - RNA, 19 nt, Artificial Sequence
  Description of Artificial Sequence: Synthetic oligonucleotide
  Sense strand starting at position 1930 of SEQ ID NO: 1887316
aaguuuaaggucggucuca

SEQ ID NO: 2462961 - RNA, 19 nt, Artificial Sequence
  Description of Artificial Sequence: Synthetic oligonucleotide
  Antisense strand to SEQ ID NO: 2462960
ugagaccgaccuuaaacuu

SEQ ID NO: 2462962 - RNA, 19 nt, Artificial Sequence
  Description of Artificial Sequence: Synthetic oligonucleotide
  Sense strand starting at position 2939 of SEQ ID NO: 1887316
cagccuuaucuccgaguua

SEQ ID NO: 2462963 - RNA, 19 nt, Artificial Sequence
  Description of Artificial Sequence: Synthetic oligonucleotide
  Antisense strand to SEQ ID NO: 2462962
uaacucggagauaaggcug

SEQ ID NO: 2462964 - RNA, 19 nt, Artificial Sequence
  Description of Artificial Sequence: Synthetic oligonucleotide
  Sense strand starting at position 3052 of SEQ ID NO: 1887316
ugugguaaucuccgaugag

SEQ ID NO: 2462965 - RNA, 19 nt, Artificial Sequence
  Description of Artificial Sequence: Synthetic oligonucleotide
  Antisense strand to SEQ ID NO: 2462964
cucaucggagauuaccaca

SEQ ID NO: 2462966 - RNA, 19 nt, Artificial Sequence
  Description of Artificial Sequence: Synthetic oligonucleotide
  Sense strand starting at position 3294 of SEQ ID NO: 1887316
gcguuucugcugcuggaga

SEQ ID NO: 2462967 - RNA, 19 nt, Artificial Sequence
  Description of Artificial Sequence: Synthetic oligonucleotide
  Antisense strand to SEQ ID NO: 2462966
ucuccagcagcagaaacgc

SEQ ID NO: 2462968 - RNA, 19 nt, Artificial Sequence
  Description of Artificial Sequence: Synthetic oligonucleotide
  Sense strand starting at position 3721 of SEQ ID NO: 1887316
acgcacagcuacuuaaauu

SEQ ID NO: 2462969 - RNA, 19 nt, Artificial Sequence
  Description of Artificial Sequence: Synthetic oligonucleotide
  Antisense strand to SEQ ID NO: 2462968
aauuuaaguagcugugcgu

SEQ ID NO: 2462970 - RNA, 19 nt, Artificial Sequence
  Description of Artificial Sequence: Synthetic oligonucleotide
  Sense strand starting at position 163 of SEQ ID NO: 1887317
acuauauaugcccagcaga

SEQ ID NO: 2462971 - RNA, 19 nt, Artificial Sequence
  Description of Artificial Sequence: Synthetic oligonucleotide
  Antisense strand to SEQ ID NO: 2462970
ucugcugggcauauauagu

SEQ ID NO: 2462972 - RNA, 19 nt, Artificial Sequence
  Description of Artificial Sequence: Synthetic oligonucleotide
  Sense strand starting at position 190 of SEQ ID NO: 1887317
augcaaucuccugauacgu

SEQ ID NO: 2462973 - RNA, 19 nt, Artificial Sequence
  Description of Artificial Sequence: Synthetic oligonucleotide
  Antisense strand to SEQ ID NO: 2462972
acguaucaggagauugcau

SEQ ID NO: 2462974 - RNA, 19 nt, Artificial Sequence
  Description of Artificial Sequence: Synthetic oligonucleotide
  Sense strand starting at position 199 of SEQ ID NO: 1887317
ccugauacguagucauaga

SEQ ID NO: 2462975 - RNA, 19 nt, Artificial Sequence
  Description of Artificial Sequence: Synthetic oligonucleotide
  Antisense strand to SEQ ID NO: 2462974
ucuaugacuacguaucagg

SEQ ID NO: 2462976 - RNA, 19 nt, Artificial Sequence
  Description of Artificial Sequence: Synthetic oligonucleotide
  Sense strand starting at position 200 of SEQ ID NO: 1887317
cugauacguagucauagag

SEQ ID NO: 2462977 - RNA, 19 nt, Artificial Sequence
  Description of Artificial Sequence: Synthetic oligonucleotide
  Antisense strand to SEQ ID NO: 2462976
cucuaugacuacguaucag

SEQ ID NO: 2462978 - RNA, 19 nt, Artificial Sequence
  Description of Artificial Sequence: Synthetic oligonucleotide
  Sense strand starting at position 215 of SEQ ID NO: 1887317
agaguaauuucguccaagu

SEQ ID NO: 2462979 - RNA, 19 nt, Artificial Sequence
  Description of Artificial Sequence: Synthetic oligonucleotide
  Antisense strand to SEQ ID NO: 2462978
acuuggacgaaauuacucu

SEQ ID NO: 2462980 - RNA, 19 nt, Artificial Sequence
  Description of Artificial Sequence: Synthetic oligonucleotide
  Sense strand starting at position 252 of SEQ ID NO: 1887317
caccucagguguccugaua

SEQ ID NO: 2462981 - RNA, 19 nt, Artificial Sequence
  Description of Artificial Sequence: Synthetic oligonucleotide
  Antisense strand to SEQ ID NO: 2462980
uaucaggacaccugaggug

SEQ ID NO: 2462982 - RNA, 19 nt, Artificial Sequence
  Description of Artificial Sequence: Synthetic oligonucleotide
  Sense strand starting at position 263 of SEQ ID NO: 1887317
uccugauagguccguauga

SEQ ID NO: 2462983 - RNA, 19 nt, Artificial Sequence
  Description of Artificial Sequence: Synthetic oligonucleotide
  Antisense strand to SEQ ID NO: 2462982
ucauacggaccuaucagga

SEQ ID NO: 2462984 - RNA, 19 nt, Artificial Sequence
  Description of Artificial Sequence: Synthetic oligonucleotide
  Sense strand starting at position 264 of SEQ ID NO: 1887317
ccugauagguccguaugac

SEQ ID NO: 2462985 - RNA, 19 nt, Artificial Sequence
  Description of Artificial Sequence: Synthetic oligonucleotide
  Antisense strand to SEQ ID NO: 2462984
gucauacggaccuaucagg

SEQ ID NO: 2462986 - RNA, 19 nt, Artificial Sequence
  Description of Artificial Sequence: Synthetic oligonucleotide
  Sense strand starting at position 265 of SEQ ID NO: 1887317
cugauagguccguaugacu

SEQ ID NO: 2462987 - RNA, 19 nt, Artificial Sequence
  Description of Artificial Sequence: Synthetic oligonucleotide
  Antisense strand to SEQ ID NO: 2462986
agucauacggaccuaucag

SEQ ID NO: 2462988 - RNA, 19 nt, Artificial Sequence
  Description of Artificial Sequence: Synthetic oligonucleotide
  Sense strand starting at position 389 of SEQ ID NO: 1887317
uugcuaucagaguaccaau

SEQ ID NO: 2462989 - RNA, 19 nt, Artificial Sequence
  Description of Artificial Sequence: Synthetic oligonucleotide
  Antisense strand to SEQ ID NO: 2462988
auugguacucugauagcaa

SEQ ID NO: 2462990 - RNA, 19 nt, Artificial Sequence
  Description of Artificial Sequence: Synthetic oligonucleotide
  Sense strand starting at position 868 of SEQ ID NO: 1887317
acaaguagucuacaguaaa

SEQ ID NO: 2462991 - RNA, 19 nt, Artificial Sequence
  Description of Artificial Sequence: Synthetic oligonucleotide
  Antisense strand to SEQ ID NO: 2462990
uuuacuguagacuacuugu

SEQ ID NO: 2462992 - RNA, 19 nt, Artificial Sequence
  Description of Artificial Sequence: Synthetic oligonucleotide
  Sense strand starting at position 871 of SEQ ID NO: 1887317
aguagucuacaguaaauua

SEQ ID NO: 2462993 - RNA, 19 nt, Artificial Sequence
  Description of Artificial Sequence: Synthetic oligonucleotide
  Antisense strand to SEQ ID NO: 2462992
uaauuuacuguagacuacu

SEQ ID NO: 2462994 - RNA, 19 nt, Artificial Sequence
  Description of Artificial Sequence: Synthetic oligonucleotide
  Sense strand starting at position 879 of SEQ ID NO: 1887317
acaguaaauuaauccugua

SEQ ID NO: 2462995 - RNA, 19 nt, Artificial Sequence
  Description of Artificial Sequence: Synthetic oligonucleotide
  Antisense strand to SEQ ID NO: 2462994
uacaggauuaauuuacugu

SEQ ID NO: 2462996 - RNA, 19 nt, Artificial Sequence
  Description of Artificial Sequence: Synthetic oligonucleotide
  Sense strand starting at position 891 of SEQ ID NO: 1887317
uccuguauacuuuaguguu

SEQ ID NO: 2462997 - RNA, 19 nt, Artificial Sequence
  Description of Artificial Sequence: Synthetic oligonucleotide
  Antisense strand to SEQ ID NO: 2462996
aacacuaaaguauacagga

SEQ ID NO: 2462998 - RNA, 19 nt, Artificial Sequence
  Description of Artificial Sequence: Synthetic oligonucleotide
  Sense strand starting at position 1180 of SEQ ID NO: 1887317
acuguaauggcucgaugag

SEQ ID NO: 2462999 - RNA, 19 nt, Artificial Sequence
  Description of Artificial Sequence: Synthetic oligonucleotide
  Antisense strand to SEQ ID NO: 2462998
cucaucgagccauuacagu

SEQ ID NO: 2463000 - RNA, 19 nt, Artificial Sequence
  Description of Artificial Sequence: Synthetic oligonucleotide
  Sense strand starting at position 1181 of SEQ ID NO: 1887317
cuguaauggcucgaugaga

SEQ ID NO: 2463001 - RNA, 19 nt, Artificial Sequence
  Description of Artificial Sequence: Synthetic oligonucleotide
  Antisense strand to SEQ ID NO: 2463000
ucucaucgagccauuacag

SEQ ID NO: 2463002 - RNA, 19 nt, Artificial Sequence
  Description of Artificial Sequence: Synthetic oligonucleotide
  Sense strand starting at position 1194 of SEQ ID NO: 1887317
augagaauaugacaaagaa

SEQ ID NO: 2463003 - RNA, 19 nt, Artificial Sequence
  Description of Artificial Sequence: Synthetic oligonucleotide
  Antisense strand to SEQ ID NO: 2463002
uucuuugucauauucucau

SEQ ID NO: 2463004 - RNA, 19 nt, Artificial Sequence
  Description of Artificial Sequence: Synthetic oligonucleotide
  Sense strand starting at position 1269 of SEQ ID NO: 1887317
ccucacuugucuuuaggga

SEQ ID NO: 2463005 - RNA, 19 nt, Artificial Sequence
  Description of Artificial Sequence: Synthetic oligonucleotide
  Antisense strand to SEQ ID NO: 2463004
ucccuaaagacaagugagg

SEQ ID NO: 2463006 - RNA, 19 nt, Artificial Sequence
  Description of Artificial Sequence: Synthetic oligonucleotide
  Sense strand starting at position 1355 of SEQ ID NO: 1887317
agagaacaauccguucuuu

SEQ ID NO: 2463007 - RNA, 19 nt, Artificial Sequence
  Description of Artificial Sequence: Synthetic oligonucleotide
  Antisense strand to SEQ ID NO: 2463006
aaagaacggauuguucucu

SEQ ID NO: 2463008 - RNA, 19 nt, Artificial Sequence
  Description of Artificial Sequence: Synthetic oligonucleotide
  Sense strand starting at position 1444 of SEQ ID NO: 1887317
uaauaaugcgaacgcauua

SEQ ID NO: 2463009 - RNA, 19 nt, Artificial Sequence
  Description of Artificial Sequence: Synthetic oligonucleotide
  Antisense strand to SEQ ID NO: 2463008
uaaugcguucgcauuauua

SEQ ID NO: 2463010 - RNA, 19 nt, Artificial Sequence
  Description of Artificial Sequence: Synthetic oligonucleotide
  Sense strand starting at position 1449 of SEQ ID NO: 1887317
augcgaacgcauuauuaga

SEQ ID NO: 2463011 - RNA, 19 nt, Artificial Sequence
  Description of Artificial Sequence: Synthetic oligonucleotide
  Antisense strand to SEQ ID NO: 2463010
ucuaauaaugcguucgcau

SEQ ID NO: 2463012 - RNA, 19 nt, Artificial Sequence
  Description of Artificial Sequence: Synthetic oligonucleotide
  Sense strand starting at position 1456 of SEQ ID NO: 1887317
cgcauuauuagaccgugca

SEQ ID NO: 2463013 - RNA, 19 nt, Artificial Sequence
  Description of Artificial Sequence: Synthetic oligonucleotide
  Antisense strand to SEQ ID NO: 2463012
ugcacggucuaauaaugcg

SEQ ID NO: 2463014 - RNA, 19 nt, Artificial Sequence
  Description of Artificial Sequence: Synthetic oligonucleotide
  Sense strand starting at position 1466 of SEQ ID NO: 1887317
gaccgugcauggucugaaa

SEQ ID NO: 2463015 - RNA, 19 nt, Artificial Sequence
  Description of Artificial Sequence: Synthetic oligonucleotide
  Antisense strand to SEQ ID NO: 2463014
uuucagaccaugcacgguc

SEQ ID NO: 2463016 - RNA, 19 nt, Artificial Sequence
  Description of Artificial Sequence: Synthetic oligonucleotide
  Sense strand starting at position 1486 of SEQ ID NO: 1887317
aagcaauugucccucgauc

SEQ ID NO: 2463017 - RNA, 19 nt, Artificial Sequence
  Description of Artificial Sequence: Synthetic oligonucleotide
  Antisense strand to SEQ ID NO: 2463016
gaucgagggacaauugcuu

SEQ ID NO: 2463018 - RNA, 19 nt, Artificial Sequence
  Description of Artificial Sequence: Synthetic oligonucleotide
  Sense strand starting at position 1606 of SEQ ID NO: 1887317
cggguuuggcuucauaagu

SEQ ID NO: 2463019 - RNA, 19 nt, Artificial Sequence
  Description of Artificial Sequence: Synthetic oligonucleotide
  Antisense strand to SEQ ID NO: 2463018
acuuaugaagccaaacccg

SEQ ID NO: 2463020 - RNA, 19 nt, Artificial Sequence
  Description of Artificial Sequence: Synthetic oligonucleotide
  Sense strand starting at position 2144 of SEQ ID NO: 1887317
ccgccuuccgcgguauaau

SEQ ID NO: 2463021 - RNA, 19 nt, Artificial Sequence
  Description of Artificial Sequence: Synthetic oligonucleotide
  Antisense strand to SEQ ID NO: 2463020
auuauaccgcggaaggcgg

SEQ ID NO: 2463022 - RNA, 19 nt, Artificial Sequence
  Description of Artificial Sequence: Synthetic oligonucleotide
  Sense strand starting at position 2231 of SEQ ID NO: 1887317
uugaaucacuugucguuaa

SEQ ID NO: 2463023 - RNA, 19 nt, Artificial Sequence
  Description of Artificial Sequence: Synthetic oligonucleotide
  Antisense strand to SEQ ID NO: 2463022
uuaacgacaagugauucaa

SEQ ID NO: 2463024 - RNA, 19 nt, Artificial Sequence
  Description of Artificial Sequence: Synthetic oligonucleotide
  Sense strand starting at position 2258 of SEQ ID NO: 1887317
acuugaaacguuugguucu

SEQ ID NO: 2463025 - RNA, 19 nt, Artificial Sequence
  Description of Artificial Sequence: Synthetic oligonucleotide
  Antisense strand to SEQ ID NO: 2463024
agaaccaaacguuucaagu

SEQ ID NO: 2463026 - RNA, 19 nt, Artificial Sequence
  Description of Artificial Sequence: Synthetic oligonucleotide
  Sense strand starting at position 2275 of SEQ ID NO: 1887317
cuugcuuagcaagauguuu

SEQ ID NO: 2463027 - RNA, 19 nt, Artificial Sequence
  Description of Artificial Sequence: Synthetic oligonucleotide
  Antisense strand to SEQ ID NO: 2463026
aaacaucuugcuaagcaag

SEQ ID NO: 2463028 - RNA, 19 nt, Artificial Sequence
  Description of Artificial Sequence: Synthetic oligonucleotide
  Sense strand starting at position 2294 of SEQ ID NO: 1887317
guguuucuuccacauugau

SEQ ID NO: 2463029 - RNA, 19 nt, Artificial Sequence
  Description of Artificial Sequence: Synthetic oligonucleotide
  Antisense strand to SEQ ID NO: 2463028
aucaauguggaagaaacac

SEQ ID NO: 2463030 - RNA, 19 nt, Artificial Sequence
  Description of Artificial Sequence: Synthetic oligonucleotide
  Sense strand starting at position 2344 of SEQ ID NO: 1887317
gcaauaugagcugaggcaa

SEQ ID NO: 2463031 - RNA, 19 nt, Artificial Sequence
  Description of Artificial Sequence: Synthetic oligonucleotide
  Antisense strand to SEQ ID NO: 2463030
uugccucagcucauauugc

SEQ ID NO: 2463032 - RNA, 19 nt, Artificial Sequence
  Description of Artificial Sequence: Synthetic oligonucleotide
  Sense strand starting at position 2357 of SEQ ID NO: 1887317
aggcaaucuuaacuugauc

SEQ ID NO: 2463033 - RNA, 19 nt, Artificial Sequence
  Description of Artificial Sequence: Synthetic oligonucleotide
  Antisense strand to SEQ ID NO: 2463032
gaucaaguuaagauugccu

SEQ ID NO: 2463034 - RNA, 19 nt, Artificial Sequence
  Description of Artificial Sequence: Synthetic oligonucleotide
  Sense strand starting at position 2362 of SEQ ID NO: 1887317
aucuuaacuugauccguua

SEQ ID NO: 2463035 - RNA, 19 nt, Artificial Sequence
  Description of Artificial Sequence: Synthetic oligonucleotide
  Antisense strand to SEQ ID NO: 2463034
uaacggaucaaguuaagau

SEQ ID NO: 2463036 - RNA, 19 nt, Artificial Sequence
  Description of Artificial Sequence: Synthetic oligonucleotide
  Sense strand starting at position 2725 of SEQ ID NO: 1887317
gauggagucucuguuguuc

SEQ ID NO: 2463037 - RNA, 19 nt, Artificial Sequence
  Description of Artificial Sequence: Synthetic oligonucleotide
  Antisense strand to SEQ ID NO: 2463036
gaacaacagagacuccauc

SEQ ID NO: 2463038 - RNA, 19 nt, Artificial Sequence
  Description of Artificial Sequence: Synthetic oligonucleotide
  Sense strand starting at position 3030 of SEQ ID NO: 1887317
aguguuucucugucgcuua

SEQ ID NO: 2463039 - RNA, 19 nt, Artificial Sequence
  Description of Artificial Sequence: Synthetic oligonucleotide
  Antisense strand to SEQ ID NO: 2463038
uaagcgacagagaaacacu

SEQ ID NO: 2463040 - RNA, 19 nt, Artificial Sequence
  Description of Artificial Sequence: Synthetic oligonucleotide
  Sense strand starting at position 3057 of SEQ ID NO: 1887317
ugcagagugacaugaucuu

SEQ ID NO: 2463041 - RNA, 19 nt, Artificial Sequence
  Description of Artificial Sequence: Synthetic oligonucleotide
  Antisense strand to SEQ ID NO: 2463040
aagaucaugucacucugca

SEQ ID NO: 2463042 - RNA, 19 nt, Artificial Sequence
  Description of Artificial Sequence: Synthetic oligonucleotide
  Sense strand starting at position 3162 of SEQ ID NO: 1887317
gcuagcaugcagggauaau

SEQ ID NO: 2463043 - RNA, 19 nt, Artificial Sequence
  Description of Artificial Sequence: Synthetic oligonucleotide
  Antisense strand to SEQ ID NO: 2463042
auuaucccugcaugcuagc

SEQ ID NO: 2463044 - RNA, 19 nt, Artificial Sequence
  Description of Artificial Sequence: Synthetic oligonucleotide
  Sense strand starting at position 3163 of SEQ ID NO: 1887317
cuagcaugcagggauaauu

SEQ ID NO: 2463045 - RNA, 19 nt, Artificial Sequence
  Description of Artificial Sequence: Synthetic oligonucleotide
  Antisense strand to SEQ ID NO: 2463044
aauuaucccugcaugcuag

SEQ ID NO: 2463046 - RNA, 19 nt, Artificial Sequence
  Description of Artificial Sequence: Synthetic oligonucleotide
  Sense strand starting at position 3419 of SEQ ID NO: 1887317
gaguauaguggugaucaca

SEQ ID NO: 2463047 - RNA, 19 nt, Artificial Sequence
  Description of Artificial Sequence: Synthetic oligonucleotide
  Antisense strand to SEQ ID NO: 2463046
ugugaucaccacuauacuc

SEQ ID NO: 2463048 - RNA, 19 nt, Artificial Sequence
  Description of Artificial Sequence: Synthetic oligonucleotide
  Sense strand starting at position 3422 of SEQ ID NO: 1887317
uauaguggugaucacaguu

SEQ ID NO: 2463049 - RNA, 19 nt, Artificial Sequence
  Description of Artificial Sequence: Synthetic oligonucleotide
  Antisense strand to SEQ ID NO: 2463048
aacugugaucaccacuaua

SEQ ID NO: 2463050 - RNA, 19 nt, Artificial Sequence
  Description of Artificial Sequence: Synthetic oligonucleotide
  Sense strand starting at position 114 of SEQ ID NO: 1887318
gaaauuaugcugugacuga

SEQ ID NO: 2463051 - RNA, 19 nt, Artificial Sequence
  Description of Artificial Sequence: Synthetic oligonucleotide
  Antisense strand to SEQ ID NO: 2463050
ucagucacagcauaauuuc

SEQ ID NO: 2463052 - RNA, 19 nt, Artificial Sequence
  Description of Artificial Sequence: Synthetic oligonucleotide
  Sense strand starting at position 160 of SEQ ID NO: 1887318
guauauguucuacauuaca

SEQ ID NO: 2463053 - RNA, 19 nt, Artificial Sequence
  Description of Artificial Sequence: Synthetic oligonucleotide
  Antisense strand to SEQ ID NO: 2463052
uguaauguagaacauauac

SEQ ID NO: 2463054 - RNA, 19 nt, Artificial Sequence
  Description of Artificial Sequence: Synthetic oligonucleotide
  Sense strand starting at position 186 of SEQ ID NO: 1887318
gguguauacaguuauggua

SEQ ID NO: 2463055 - RNA, 19 nt, Artificial Sequence
  Description of Artificial Sequence: Synthetic oligonucleotide
  Antisense strand to SEQ ID NO: 2463054
uaccauaacuguauacacc

SEQ ID NO: 2463056 - RNA, 19 nt, Artificial Sequence
  Description of Artificial Sequence: Synthetic oligonucleotide
  Sense strand starting at position 207 of SEQ ID NO: 1887318
acagaauguacacgaguaa

SEQ ID NO: 2463057 - RNA, 19 nt, Artificial Sequence
  Description of Artificial Sequence: Synthetic oligonucleotide
  Antisense strand to SEQ ID NO: 2463056
uuacucguguacauucugu

SEQ ID NO: 2463058 - RNA, 19 nt, Artificial Sequence
  Description of Artificial Sequence: Synthetic oligonucleotide
  Sense strand starting at position 276 of SEQ ID NO: 1887318
auggaaagcucaguccuaa

SEQ ID NO: 2463059 - RNA, 19 nt, Artificial Sequence
  Description of Artificial Sequence: Synthetic oligonucleotide
  Antisense strand to SEQ ID NO: 2463058
uuaggacugagcuuuccau

SEQ ID NO: 2463060 - RNA, 19 nt, Artificial Sequence
  Description of Artificial Sequence: Synthetic oligonucleotide
  Sense strand starting at position 287 of SEQ ID NO: 1887318
aguccuaaucugugauuga

SEQ ID NO: 2463061 - RNA, 19 nt, Artificial Sequence
  Description of Artificial Sequence: Synthetic oligonucleotide
  Antisense strand to SEQ ID NO: 2463060
ucaaucacagauuaggacu

SEQ ID NO: 2463062 - RNA, 19 nt, Artificial Sequence
  Description of Artificial Sequence: Synthetic oligonucleotide
  Sense strand starting at position 290 of SEQ ID NO: 1887318
ccuaaucugugauugaauu

SEQ ID NO: 2463063 - RNA, 19 nt, Artificial Sequence
  Description of Artificial Sequence: Synthetic oligonucleotide
  Antisense strand to SEQ ID NO: 2463062
aauucaaucacagauuagg

SEQ ID NO: 2463064 - RNA, 19 nt, Artificial Sequence
  Description of Artificial Sequence: Synthetic oligonucleotide
  Sense strand starting at position 412 of SEQ ID NO: 1887318
gguagaacuuccucugauu

SEQ ID NO: 2463065 - RNA, 19 nt, Artificial Sequence
  Description of Artificial Sequence: Synthetic oligonucleotide
  Antisense strand to SEQ ID NO: 2463064
aaucagaggaaguucuacc

SEQ ID NO: 2463066 - RNA, 19 nt, Artificial Sequence
  Description of Artificial Sequence: Synthetic oligonucleotide
  Sense strand starting at position 460 of SEQ ID NO: 1887318
auuagaaacuuucugguga

SEQ ID NO: 2463067 - RNA, 19 nt, Artificial Sequence
  Description of Artificial Sequence: Synthetic oligonucleotide
  Antisense strand to SEQ ID NO: 2463066
ucaccagaaaguuucuaau

SEQ ID NO: 2463068 - RNA, 19 nt, Artificial Sequence
  Description of Artificial Sequence: Synthetic oligonucleotide
  Sense strand starting at position 561 of SEQ ID NO: 1887318
guaagaugaguuuggagac

SEQ ID NO: 2463069 - RNA, 19 nt, Artificial Sequence
  Description of Artificial Sequence: Synthetic oligonucleotide
  Antisense strand to SEQ ID NO: 2463068
gucuccaaacucaucuuac

SEQ ID NO: 2463070 - RNA, 19 nt, Artificial Sequence
  Description of Artificial Sequence: Synthetic oligonucleotide
  Sense strand starting at position 968 of SEQ ID NO: 1887318
uccauuagacauuguucua

SEQ ID NO: 2463071 - RNA, 19 nt, Artificial Sequence
  Description of Artificial Sequence: Synthetic oligonucleotide
  Antisense strand to SEQ ID NO: 2463070
uagaacaaugucuaaugga

SEQ ID NO: 2463072 - RNA, 19 nt, Artificial Sequence
  Description of Artificial Sequence: Synthetic oligonucleotide
  Sense strand starting at position 1449 of SEQ ID NO: 1887318
auacauuagcuguauguaa

SEQ ID NO: 2463073 - RNA, 19 nt, Artificial Sequence
  Description of Artificial Sequence: Synthetic oligonucleotide
  Antisense strand to SEQ ID NO: 2463072
uuacauacagcuaauguau

SEQ ID NO: 2463074 - RNA, 19 nt, Artificial Sequence
  Description of Artificial Sequence: Synthetic oligonucleotide
  Sense strand starting at position 1505 of SEQ ID NO: 1887318
ccuaccauauagucagaua

SEQ ID NO: 2463075 - RNA, 19 nt, Artificial Sequence
  Description of Artificial Sequence: Synthetic oligonucleotide
  Antisense strand to SEQ ID NO: 2463074
uaucugacuauaugguagg

SEQ ID NO: 2463076 - RNA, 19 nt, Artificial Sequence
  Description of Artificial Sequence: Synthetic oligonucleotide
  Sense strand starting at position 1508 of SEQ ID NO: 1887318
accauauagucagauauuu

SEQ ID NO: 2463077 - RNA, 19 nt, Artificial Sequence
  Description of Artificial Sequence: Synthetic oligonucleotide
  Antisense strand to SEQ ID NO: 2463076
aaauaucugacuauauggu

SEQ ID NO: 2463078 - RNA, 19 nt, Artificial Sequence
  Description of Artificial Sequence: Synthetic oligonucleotide
  Sense strand starting at position 1553 of SEQ ID NO: 1887318
agguuacaugugcauacau

SEQ ID NO: 2463079 - RNA, 19 nt, Artificial Sequence
  Description of Artificial Sequence: Synthetic oligonucleotide
  Antisense strand to SEQ ID NO: 2463078
auguaugcacauguaaccu

SEQ ID NO: 2463080 - RNA, 19 nt, Artificial Sequence
  Description of Artificial Sequence: Synthetic oligonucleotide
  Sense strand starting at position 1555 of SEQ ID NO: 1887318
guuacaugugcauacauaa

SEQ ID NO: 2463081 - RNA, 19 nt, Artificial Sequence
  Description of Artificial Sequence: Synthetic oligonucleotide
  Antisense strand to SEQ ID NO: 2463080
uuauguaugcacauguaac

SEQ ID NO: 2463082 - RNA, 19 nt, Artificial Sequence
  Description of Artificial Sequence: Synthetic oligonucleotide
  Sense strand starting at position 1631 of SEQ ID NO: 1887318
uuuccuuugccugauggau

SEQ ID NO: 2463083 - RNA, 19 nt, Artificial Sequence
  Description of Artificial Sequence: Synthetic oligonucleotide
  Antisense strand to SEQ ID NO: 2463082
auccaucaggcaaaggaaa

SEQ ID NO: 2463084 - RNA, 19 nt, Artificial Sequence
  Description of Artificial Sequence: Synthetic oligonucleotide
  Sense strand starting at position 1649 of SEQ ID NO: 1887318
uaagaaacagugugcuaca

SEQ ID NO: 2463085 - RNA, 19 nt, Artificial Sequence
  Description of Artificial Sequence: Synthetic oligonucleotide
  Antisense strand to SEQ ID NO: 2463084
uguagcacacuguuucuua

SEQ ID NO: 2463086 - RNA, 19 nt, Artificial Sequence
  Description of Artificial Sequence: Synthetic oligonucleotide
  Sense strand starting at position 1650 of SEQ ID NO: 1887318
aagaaacagugugcuacau

SEQ ID NO: 2463087 - RNA, 19 nt, Artificial Sequence
  Description of Artificial Sequence: Synthetic oligonucleotide
  Antisense strand to SEQ ID NO: 2463086
auguagcacacuguuucuu

SEQ ID NO: 2463088 - RNA, 19 nt, Artificial Sequence
  Description of Artificial Sequence: Synthetic oligonucleotide
  Sense strand starting at position 1702 of SEQ ID NO: 1887318
uuugucaaccuagauguaa

SEQ ID NO: 2463089 - RNA, 19 nt, Artificial Sequence
  Description of Artificial Sequence: Synthetic oligonucleotide
  Antisense strand to SEQ ID NO: 2463088
uuacaucuagguugacaaa

SEQ ID NO: 2463090 - RNA, 19 nt, Artificial Sequence
  Description of Artificial Sequence: Synthetic oligonucleotide
  Sense strand starting at position 1755 of SEQ ID NO: 1887318
guuuacuguaguuagacau

SEQ ID NO: 2463091 - RNA, 19 nt, Artificial Sequence
  Description of Artificial Sequence: Synthetic oligonucleotide
  Antisense strand to SEQ ID NO: 2463090
augucuaacuacaguaaac

SEQ ID NO: 2463092 - RNA, 19 nt, Artificial Sequence
  Description of Artificial Sequence: Synthetic oligonucleotide
  Sense strand starting at position 1802 of SEQ ID NO: 1887318
gccgaagauuuauccuucu

SEQ ID NO: 2463093 - RNA, 19 nt, Artificial Sequence
  Description of Artificial Sequence: Synthetic oligonucleotide
  Antisense strand to SEQ ID NO: 2463092
agaaggauaaaucuucggc

SEQ ID NO: 2463094 - RNA, 19 nt, Artificial Sequence
  Description of Artificial Sequence: Synthetic oligonucleotide
  Sense strand starting at position 1855 of SEQ ID NO: 1887318
aguuguaagcuuucugcuu

SEQ ID NO: 2463095 - RNA, 19 nt, Artificial Sequence
  Description of Artificial Sequence: Synthetic oligonucleotide
  Antisense strand to SEQ ID NO: 2463094
aagcagaaagcuuacaacu

SEQ ID NO: 2463096 - RNA, 19 nt, Artificial Sequence
  Description of Artificial Sequence: Synthetic oligonucleotide
  Sense strand starting at position 1919 of SEQ ID NO: 1887318
gccaguggugugccacuua

SEQ ID NO: 2463097 - RNA, 19 nt, Artificial Sequence
  Description of Artificial Sequence: Synthetic oligonucleotide
  Antisense strand to SEQ ID NO: 2463096
uaaguggcacaccacuggc

SEQ ID NO: 2463098 - RNA, 19 nt, Artificial Sequence
  Description of Artificial Sequence: Synthetic oligonucleotide
  Sense strand starting at position 1949 of SEQ ID NO: 1887318
ggaggaguucuccauccug

SEQ ID NO: 2463099 - RNA, 19 nt, Artificial Sequence
  Description of Artificial Sequence: Synthetic oligonucleotide
  Antisense strand to SEQ ID NO: 2463098
caggauggagaacuccucc

SEQ ID NO: 2463100 - RNA, 19 nt, Artificial Sequence
  Description of Artificial Sequence: Synthetic oligonucleotide
  Sense strand starting at position 2047 of SEQ ID NO: 1887318
agcugucaccaucagguaa

SEQ ID NO: 2463101 - RNA, 19 nt, Artificial Sequence
  Description of Artificial Sequence: Synthetic oligonucleotide
  Antisense strand to SEQ ID NO: 2463100
uuaccugauggugacagcu

SEQ ID NO: 2463102 - RNA, 19 nt, Artificial Sequence
  Description of Artificial Sequence: Synthetic oligonucleotide
  Sense strand starting at position 2094 of SEQ ID NO: 1887318
ucaagaaagucaucaguua

SEQ ID NO: 2463103 - RNA, 19 nt, Artificial Sequence
  Description of Artificial Sequence: Synthetic oligonucleotide
  Antisense strand to SEQ ID NO: 2463102
uaacugaugacuuucuuga

SEQ ID NO: 2463104 - RNA, 19 nt, Artificial Sequence
  Description of Artificial Sequence: Synthetic oligonucleotide
  Sense strand starting at position 2421 of SEQ ID NO: 1887318
ucugauauuggucaaguuu

SEQ ID NO: 2463105 - RNA, 19 nt, Artificial Sequence
  Description of Artificial Sequence: Synthetic oligonucleotide
  Antisense strand to SEQ ID NO: 2463104
aaacuugaccaauaucaga

SEQ ID NO: 2463106 - RNA, 19 nt, Artificial Sequence
  Description of Artificial Sequence: Synthetic oligonucleotide
  Sense strand starting at position 2477 of SEQ ID NO: 1887318
aggacaagguaagaaauaa

SEQ ID NO: 2463107 - RNA, 19 nt, Artificial Sequence
  Description of Artificial Sequence: Synthetic oligonucleotide
  Antisense strand to SEQ ID NO: 2463106
uuauuucuuaccuuguccu

SEQ ID NO: 2463108 - RNA, 19 nt, Artificial Sequence
  Description of Artificial Sequence: Synthetic oligonucleotide
  Sense strand starting at position 2574 of SEQ ID NO: 1887318
auugaagaauguuucgauu

SEQ ID NO: 2463109 - RNA, 19 nt, Artificial Sequence
  Description of Artificial Sequence: Synthetic oligonucleotide
  Antisense strand to SEQ ID NO: 2463108
aaucgaaacauucuucaau

SEQ ID NO: 2463110 - RNA, 19 nt, Artificial Sequence
  Description of Artificial Sequence: Synthetic oligonucleotide
  Sense strand starting at position 2583 of SEQ ID NO: 1887318
uguuucgauuugucuuacu

SEQ ID NO: 2463111 - RNA, 19 nt, Artificial Sequence
  Description of Artificial Sequence: Synthetic oligonucleotide
  Antisense strand to SEQ ID NO: 2463110
aguaagacaaaucgaaaca

SEQ ID NO: 2463112 - RNA, 19 nt, Artificial Sequence
  Description of Artificial Sequence: Synthetic oligonucleotide
  Sense strand starting at position 2622 of SEQ ID NO: 1887318
cuguuaucacuuuaagagu

SEQ ID NO: 2463113 - RNA, 19 nt, Artificial Sequence
  Description of Artificial Sequence: Synthetic oligonucleotide
  Antisense strand to SEQ ID NO: 2463112
acucuuaaagugauaacag

SEQ ID NO: 2463114 - RNA, 19 nt, Artificial Sequence
  Description of Artificial Sequence: Synthetic oligonucleotide
  Sense strand starting at position 2861 of SEQ ID NO: 1887318
gagagcagcugauugaaau

SEQ ID NO: 2463115 - RNA, 19 nt, Artificial Sequence
  Description of Artificial Sequence: Synthetic oligonucleotide
  Antisense strand to SEQ ID NO: 2463114
auuucaaucagcugcucuc

SEQ ID NO: 2463116 - RNA, 19 nt, Artificial Sequence
  Description of Artificial Sequence: Synthetic oligonucleotide
  Sense strand starting at position 2862 of SEQ ID NO: 1887318
agagcagcugauugaaauu

SEQ ID NO: 2463117 - RNA, 19 nt, Artificial Sequence
  Description of Artificial Sequence: Synthetic oligonucleotide
  Antisense strand to SEQ ID NO: 2463116
aauuucaaucagcugcucu

SEQ ID NO: 2463118 - RNA, 19 nt, Artificial Sequence
  Description of Artificial Sequence: Synthetic oligonucleotide
  Sense strand starting at position 2917 of SEQ ID NO: 1887318
auauaaaguuagguugaca

SEQ ID NO: 2463119 - RNA, 19 nt, Artificial Sequence
  Description of Artificial Sequence: Synthetic oligonucleotide
  Antisense strand to SEQ ID NO: 2463118
ugucaaccuaacuuuauau

SEQ ID NO: 2463120 - RNA, 19 nt, Artificial Sequence
  Description of Artificial Sequence: Synthetic oligonucleotide
  Sense strand starting at position 3384 of SEQ ID NO: 1887318
gugauacuuaguuacuagu

SEQ ID NO: 2463121 - RNA, 19 nt, Artificial Sequence
  Description of Artificial Sequence: Synthetic oligonucleotide
  Antisense strand to SEQ ID NO: 2463120
acuaguaacuaaguaucac

SEQ ID NO: 2463122 - RNA, 19 nt, Artificial Sequence
  Description of Artificial Sequence: Synthetic oligonucleotide
  Sense strand starting at position 3478 of SEQ ID NO: 1887318
gguauaagucuggauguac

SEQ ID NO: 2463123 - RNA, 19 nt, Artificial Sequence
  Description of Artificial Sequence: Synthetic oligonucleotide
  Antisense strand to SEQ ID NO: 2463122
guacauccagacuuauacc

SEQ ID NO: 2463124 - RNA, 19 nt, Artificial Sequence
  Description of Artificial Sequence: Synthetic oligonucleotide
  Sense strand starting at position 3627 of SEQ ID NO: 1887318
gggcuuacugccuauagau

SEQ ID NO: 2463125 - RNA, 19 nt, Artificial Sequence
  Description of Artificial Sequence: Synthetic oligonucleotide
  Antisense strand to SEQ ID NO: 2463124
aucuauaggcaguaagccc

SEQ ID NO: 2463126 - RNA, 19 nt, Artificial Sequence
  Description of Artificial Sequence: Synthetic oligonucleotide
  Sense strand starting at position 3636 of SEQ ID NO: 1887318
gccuauagauuccugauac

SEQ ID NO: 2463127 - RNA, 19 nt, Artificial Sequence
  Description of Artificial Sequence: Synthetic oligonucleotide
  Antisense strand to SEQ ID NO: 2463126
guaucaggaaucuauaggc

SEQ ID NO: 2463128 - RNA, 19 nt, Artificial Sequence
  Description of Artificial Sequence: Synthetic oligonucleotide
  Sense strand starting at position 3659 of SEQ ID NO: 1887318
ccauccauauguuuggauu

SEQ ID NO: 2463129 - RNA, 19 nt, Artificial Sequence
  Description of Artificial Sequence: Synthetic oligonucleotide
  Antisense strand to SEQ ID NO: 2463128
aauccaaacauauggaugg

SEQ ID NO: 2463130 - RNA, 19 nt, Artificial Sequence
  Description of Artificial Sequence: Synthetic oligonucleotide
  Sense strand starting at position 643 of SEQ ID NO: 1887319
cccugugguccuggaagaa

SEQ ID NO: 2463131 - RNA, 19 nt, Artificial Sequence
  Description of Artificial Sequence: Synthetic oligonucleotide
  Antisense strand to SEQ ID NO: 2463130
uucuuccaggaccacaggg

SEQ ID NO: 2463132 - RNA, 19 nt, Artificial Sequence
  Description of Artificial Sequence: Synthetic oligonucleotide
  Sense strand starting at position 709 of SEQ ID NO: 1887319
auuccugccuuucuagaga

SEQ ID NO: 2463133 - RNA, 19 nt, Artificial Sequence
  Description of Artificial Sequence: Synthetic oligonucleotide
  Antisense strand to SEQ ID NO: 2463132
ucucuagaaaggcaggaau

SEQ ID NO: 2463134 - RNA, 19 nt, Artificial Sequence
  Description of Artificial Sequence: Synthetic oligonucleotide
  Sense strand starting at position 1406 of SEQ ID NO: 1887319
gugaaauugugaucuccug

SEQ ID NO: 2463135 - RNA, 19 nt, Artificial Sequence
  Description of Artificial Sequence: Synthetic oligonucleotide
  Antisense strand to SEQ ID NO: 2463134
caggagaucacaauuucac

SEQ ID NO: 2463136 - RNA, 19 nt, Artificial Sequence
  Description of Artificial Sequence: Synthetic oligonucleotide
  Sense strand starting at position 1635 of SEQ ID NO: 1887319
ugaagaauuccacaucgug

SEQ ID NO: 2463137 - RNA, 19 nt, Artificial Sequence
  Description of Artificial Sequence: Synthetic oligonucleotide
  Antisense strand to SEQ ID NO: 2463136
cacgauguggaauucuuca

SEQ ID NO: 2463138 - RNA, 19 nt, Artificial Sequence
  Description of Artificial Sequence: Synthetic oligonucleotide
  Sense strand starting at position 1677 of SEQ ID NO: 1887319
cagugccuggcauauagau

SEQ ID NO: 2463139 - RNA, 19 nt, Artificial Sequence
  Description of Artificial Sequence: Synthetic oligonucleotide
  Antisense strand to SEQ ID NO: 2463138
aucuauaugccaggcacug

SEQ ID NO: 2463140 - RNA, 19 nt, Artificial Sequence
  Description of Artificial Sequence: Synthetic oligonucleotide
  Sense strand starting at position 1690 of SEQ ID NO: 1887319
auagaugacuugcuuaaau

SEQ ID NO: 2463141 - RNA, 19 nt, Artificial Sequence
  Description of Artificial Sequence: Synthetic oligonucleotide
  Antisense strand to SEQ ID NO: 2463140
auuuaagcaagucaucuau

SEQ ID NO: 2463142 - RNA, 19 nt, Artificial Sequence
  Description of Artificial Sequence: Synthetic oligonucleotide
  Sense strand starting at position 2214 of SEQ ID NO: 1887319
gaaagacuuuauguccuga

SEQ ID NO: 2463143 - RNA, 19 nt, Artificial Sequence
  Description of Artificial Sequence: Synthetic oligonucleotide
  Antisense strand to SEQ ID NO: 2463142
ucaggacauaaagucuuuc

SEQ ID NO: 2463144 - RNA, 19 nt, Artificial Sequence
  Description of Artificial Sequence: Synthetic oligonucleotide
  Sense strand starting at position 2245 of SEQ ID NO: 1887319
agccuucugcaggaugaua

SEQ ID NO: 2463145 - RNA, 19 nt, Artificial Sequence
  Description of Artificial Sequence: Synthetic oligonucleotide
  Antisense strand to SEQ ID NO: 2463144
uaucauccugcagaaggcu

SEQ ID NO: 2463146 - RNA, 19 nt, Artificial Sequence
  Description of Artificial Sequence: Synthetic oligonucleotide
  Sense strand starting at position 2385 of SEQ ID NO: 1887319
cuuugucuuccuuacuuga

SEQ ID NO: 2463147 - RNA, 19 nt, Artificial Sequence
  Description of Artificial Sequence: Synthetic oligonucleotide
  Antisense strand to SEQ ID NO: 2463146
ucaaguaaggaagacaaag

SEQ ID NO: 2463148 - RNA, 19 nt, Artificial Sequence
  Description of Artificial Sequence: Synthetic oligonucleotide
  Sense strand starting at position 2579 of SEQ ID NO: 1887319
uguauuuagcccugcaggu

SEQ ID NO: 2463149 - RNA, 19 nt, Artificial Sequence
  Description of Artificial Sequence: Synthetic oligonucleotide
  Antisense strand to SEQ ID NO: 2463148
accugcagggcuaaauaca

SEQ ID NO: 2463150 - RNA, 19 nt, Artificial Sequence
  Description of Artificial Sequence: Synthetic oligonucleotide
  Sense strand starting at position 2602 of SEQ ID NO: 1887319
gaagauuguucuguggaaa

SEQ ID NO: 2463151 - RNA, 19 nt, Artificial Sequence
  Description of Artificial Sequence: Synthetic oligonucleotide
  Antisense strand to SEQ ID NO: 2463150
uuuccacagaacaaucuuc

SEQ ID NO: 2463152 - RNA, 19 nt, Artificial Sequence
  Description of Artificial Sequence: Synthetic oligonucleotide
  Sense strand starting at position 2603 of SEQ ID NO: 1887319
aagauuguucuguggaaau

SEQ ID NO: 2463153 - RNA, 19 nt, Artificial Sequence
  Description of Artificial Sequence: Synthetic oligonucleotide
  Antisense strand to SEQ ID NO: 2463152
auuuccacagaacaaucuu

SEQ ID NO: 2463154 - RNA, 19 nt, Artificial Sequence
  Description of Artificial Sequence: Synthetic oligonucleotide
  Sense strand starting at position 2605 of SEQ ID NO: 1887319
gauuguucuguggaaauuc

SEQ ID NO: 2463155 - RNA, 19 nt, Artificial Sequence
  Description of Artificial Sequence: Synthetic oligonucleotide
  Antisense strand to SEQ ID NO: 2463154
gaauuuccacagaacaauc

SEQ ID NO: 2463156 - RNA, 19 nt, Artificial Sequence
  Description of Artificial Sequence: Synthetic oligonucleotide
  Sense strand starting at position 2666 of SEQ ID NO: 1887319
gcuuuccagccagaagagu

SEQ ID NO: 2463157 - RNA, 19 nt, Artificial Sequence
  Description of Artificial Sequence: Synthetic oligonucleotide
  Antisense strand to SEQ ID NO: 2463156
acucuucuggcuggaaagc

SEQ ID NO: 2463158 - RNA, 19 nt, Artificial Sequence
  Description of Artificial Sequence: Synthetic oligonucleotide
  Sense strand starting at position 2674 of SEQ ID NO: 1887319
gccagaagaguuuagucag

SEQ ID NO: 2463159 - RNA, 19 nt, Artificial Sequence
  Description of Artificial Sequence: Synthetic oligonucleotide
  Antisense strand to SEQ ID NO: 2463158
cugacuaaacucuucuggc

SEQ ID NO: 2463160 - RNA, 19 nt, Artificial Sequence
  Description of Artificial Sequence: Synthetic oligonucleotide
  Sense strand starting at position 2677 of SEQ ID NO: 1887319
agaagaguuuagucagaua

SEQ ID NO: 2463161 - RNA, 19 nt, Artificial Sequence
  Description of Artificial Sequence: Synthetic oligonucleotide
  Antisense strand to SEQ ID NO: 2463160
uaucugacuaaacucuucu

SEQ ID NO: 2463162 - RNA, 19 nt, Artificial Sequence
  Description of Artificial Sequence: Synthetic oligonucleotide
  Sense strand starting at position 2709 of SEQ ID NO: 1887319
cugugaacaugguuccaaa

SEQ ID NO: 2463163 - RNA, 19 nt, Artificial Sequence
  Description of Artificial Sequence: Synthetic oligonucleotide
  Antisense strand to SEQ ID NO: 2463162
uuuggaaccauguucacag

SEQ ID NO: 2463164 - RNA, 19 nt, Artificial Sequence
  Description of Artificial Sequence: Synthetic oligonucleotide
  Sense strand starting at position 2730 of SEQ ID NO: 1887319
acuugacagucacugagaa

SEQ ID NO: 2463165 - RNA, 19 nt, Artificial Sequence
  Description of Artificial Sequence: Synthetic oligonucleotide
  Antisense strand to SEQ ID NO: 2463164
uucucagugacugucaagu

SEQ ID NO: 2463166 - RNA, 19 nt, Artificial Sequence
  Description of Artificial Sequence: Synthetic oligonucleotide
  Sense strand starting at position 2731 of SEQ ID NO: 1887319
cuugacagucacugagaau

SEQ ID NO: 2463167 - RNA, 19 nt, Artificial Sequence
  Description of Artificial Sequence: Synthetic oligonucleotide
  Antisense strand to SEQ ID NO: 2463166
auucucagugacugucaag

SEQ ID NO: 2463168 - RNA, 19 nt, Artificial Sequence
  Description of Artificial Sequence: Synthetic oligonucleotide
  Sense strand starting at position 2849 of SEQ ID NO: 1887319
agugaaauacuuuaugcau

SEQ ID NO: 2463169 - RNA, 19 nt, Artificial Sequence
  Description of Artificial Sequence: Synthetic oligonucleotide
  Antisense strand to SEQ ID NO: 2463168
augcauaaaguauuucacu

SEQ ID NO: 2463170 - RNA, 19 nt, Artificial Sequence
  Description of Artificial Sequence: Synthetic oligonucleotide
  Sense strand starting at position 2883 of SEQ ID NO: 1887319
accaaauuauagccugagu

SEQ ID NO: 2463171 - RNA, 19 nt, Artificial Sequence
  Description of Artificial Sequence: Synthetic oligonucleotide
  Antisense strand to SEQ ID NO: 2463170
acucaggcuauaauuuggu

SEQ ID NO: 2463172 - RNA, 19 nt, Artificial Sequence
  Description of Artificial Sequence: Synthetic oligonucleotide
  Sense strand starting at position 3054 of SEQ ID NO: 1887319
gaaagaauacugugugcau

SEQ ID NO: 2463173 - RNA, 19 nt, Artificial Sequence
  Description of Artificial Sequence: Synthetic oligonucleotide
  Antisense strand to SEQ ID NO: 2463172
augcacacaguauucuuuc

SEQ ID NO: 2463174 - RNA, 19 nt, Artificial Sequence
  Description of Artificial Sequence: Synthetic oligonucleotide
  Sense strand starting at position 3055 of SEQ ID NO: 1887319
aaagaauacugugugcauu

SEQ ID NO: 2463175 - RNA, 19 nt, Artificial Sequence
  Description of Artificial Sequence: Synthetic oligonucleotide
  Antisense strand to SEQ ID NO: 2463174
aaugcacacaguauucuuu

SEQ ID NO: 2463176 - RNA, 19 nt, Artificial Sequence
  Description of Artificial Sequence: Synthetic oligonucleotide
  Sense strand starting at position 3058 of SEQ ID NO: 1887319
gaauacugugugcauuaua

SEQ ID NO: 2463177 - RNA, 19 nt, Artificial Sequence
  Description of Artificial Sequence: Synthetic oligonucleotide
  Antisense strand to SEQ ID NO: 2463176
uauaaugcacacaguauuc

SEQ ID NO: 2463178 - RNA, 19 nt, Artificial Sequence
  Description of Artificial Sequence: Synthetic oligonucleotide
  Sense strand starting at position 3067 of SEQ ID NO: 1887319
gugcauuauauugagaugu

SEQ ID NO: 2463179 - RNA, 19 nt, Artificial Sequence
  Description of Artificial Sequence: Synthetic oligonucleotide
  Antisense strand to SEQ ID NO: 2463178
acaucucaauauaaugcac

SEQ ID NO: 2463180 - RNA, 19 nt, Artificial Sequence
  Description of Artificial Sequence: Synthetic oligonucleotide
  Sense strand starting at position 3086 of SEQ ID NO: 1887319
uugguuggaguuuaaauca

SEQ ID NO: 2463181 - RNA, 19 nt, Artificial Sequence
  Description of Artificial Sequence: Synthetic oligonucleotide
  Antisense strand to SEQ ID NO: 2463180
ugauuuaaacuccaaccaa

SEQ ID NO: 2463182 - RNA, 19 nt, Artificial Sequence
  Description of Artificial Sequence: Synthetic oligonucleotide
  Sense strand starting at position 3108 of SEQ ID NO: 1887319
ggcauaucgagacgaaaga

SEQ ID NO: 2463183 - RNA, 19 nt, Artificial Sequence
  Description of Artificial Sequence: Synthetic oligonucleotide
  Antisense strand to SEQ ID NO: 2463182
ucuuucgucucgauaugcc

SEQ ID NO: 2463184 - RNA, 19 nt, Artificial Sequence
  Description of Artificial Sequence: Synthetic oligonucleotide
  Sense strand starting at position 3167 of SEQ ID NO: 1887319
gaagucauuuaagaugauu

SEQ ID NO: 2463185 - RNA, 19 nt, Artificial Sequence
  Description of Artificial Sequence: Synthetic oligonucleotide
  Antisense strand to SEQ ID NO: 2463184
aaucaucuuaaaugacuuc

SEQ ID NO: 2463186 - RNA, 19 nt, Artificial Sequence
  Description of Artificial Sequence: Synthetic oligonucleotide
  Sense strand starting at position 3227 of SEQ ID NO: 1887319
gcucauuucccguaguuuc

SEQ ID NO: 2463187 - RNA, 19 nt, Artificial Sequence
  Description of Artificial Sequence: Synthetic oligonucleotide
  Antisense strand to SEQ ID NO: 2463186
gaaacuacgggaaaugagc

SEQ ID NO: 2463188 - RNA, 19 nt, Artificial Sequence
  Description of Artificial Sequence: Synthetic oligonucleotide
  Sense strand starting at position 3314 of SEQ ID NO: 1887319
uagaaucugugucucugaa

SEQ ID NO: 2463189 - RNA, 19 nt, Artificial Sequence
  Description of Artificial Sequence: Synthetic oligonucleotide
  Antisense strand to SEQ ID NO: 2463188
uucagagacacagauucua

SEQ ID NO: 2463190 - RNA, 19 nt, Artificial Sequence
  Description of Artificial Sequence: Synthetic oligonucleotide
  Sense strand starting at position 3316 of SEQ ID NO: 1887319
gaaucugugucucugaaau

SEQ ID NO: 2463191 - RNA, 19 nt, Artificial Sequence
  Description of Artificial Sequence: Synthetic oligonucleotide
  Antisense strand to SEQ ID NO: 2463190
auuucagagacacagauuc

SEQ ID NO: 2463192 - RNA, 19 nt, Artificial Sequence
  Description of Artificial Sequence: Synthetic oligonucleotide
  Sense strand starting at position 3323 of SEQ ID NO: 1887319
ugucucugaaauggugauu

SEQ ID NO: 2463193 - RNA, 19 nt, Artificial Sequence
  Description of Artificial Sequence: Synthetic oligonucleotide
  Antisense strand to SEQ ID NO: 2463192
aaucaccauuucagagaca

SEQ ID NO: 2463194 - RNA, 19 nt, Artificial Sequence
  Description of Artificial Sequence: Synthetic oligonucleotide
  Sense strand starting at position 3329 of SEQ ID NO: 1887319
ugaaauggugauugaaagu

SEQ ID NO: 2463195 - RNA, 19 nt, Artificial Sequence
  Description of Artificial Sequence: Synthetic oligonucleotide
  Antisense strand to SEQ ID NO: 2463194
acuuucaaucaccauuuca

SEQ ID NO: 2463196 - RNA, 19 nt, Artificial Sequence
  Description of Artificial Sequence: Synthetic oligonucleotide
  Sense strand starting at position 3361 of SEQ ID NO: 1887319
ggaaauaguugagcagauc

SEQ ID NO: 2463197 - RNA, 19 nt, Artificial Sequence
  Description of Artificial Sequence: Synthetic oligonucleotide
  Antisense strand to SEQ ID NO: 2463196
gaucugcucaacuauuucc

SEQ ID NO: 2463198 - RNA, 19 nt, Artificial Sequence
  Description of Artificial Sequence: Synthetic oligonucleotide
  Sense strand starting at position 3557 of SEQ ID NO: 1887319
agacacgacuucuuguuua

SEQ ID NO: 2463199 - RNA, 19 nt, Artificial Sequence
  Description of Artificial Sequence: Synthetic oligonucleotide
  Antisense strand to SEQ ID NO: 2463198
uaaacaagaagucgugucu

SEQ ID NO: 2463200 - RNA, 19 nt, Artificial Sequence
  Description of Artificial Sequence: Synthetic oligonucleotide
  Sense strand starting at position 3593 of SEQ ID NO: 1887319
uuagaaguauccuugucua

SEQ ID NO: 2463201 - RNA, 19 nt, Artificial Sequence
  Description of Artificial Sequence: Synthetic oligonucleotide
  Antisense strand to SEQ ID NO: 2463200
uagacaaggauacuucuaa

SEQ ID NO: 2463202 - RNA, 19 nt, Artificial Sequence
  Description of Artificial Sequence: Synthetic oligonucleotide
  Sense strand starting at position 3618 of SEQ ID NO: 1887319
cugggaagaguuuagucau

SEQ ID NO: 2463203 - RNA, 19 nt, Artificial Sequence
  Description of Artificial Sequence: Synthetic oligonucleotide
  Antisense strand to SEQ ID NO: 2463202
augacuaaacucuucccag

SEQ ID NO: 2463204 - RNA, 19 nt, Artificial Sequence
  Description of Artificial Sequence: Synthetic oligonucleotide
  Sense strand starting at position 3621 of SEQ ID NO: 1887319
ggaagaguuuagucauugg

SEQ ID NO: 2463205 - RNA, 19 nt, Artificial Sequence
  Description of Artificial Sequence: Synthetic oligonucleotide
  Antisense strand to SEQ ID NO: 2463204
ccaaugacuaaacucuucc

SEQ ID NO: 2463206 - RNA, 19 nt, Artificial Sequence
  Description of Artificial Sequence: Synthetic oligonucleotide
  Sense strand starting at position 3707 of SEQ ID NO: 1887319
gccagugaauuaucaaaca

SEQ ID NO: 2463207 - RNA, 19 nt, Artificial Sequence
  Description of Artificial Sequence: Synthetic oligonucleotide
  Antisense strand to SEQ ID NO: 2463206
uguuugauaauucacuggc

SEQ ID NO: 2463208 - RNA, 19 nt, Artificial Sequence
  Description of Artificial Sequence: Synthetic oligonucleotide
  Sense strand starting at position 3901 of SEQ ID NO: 1887319
gugguuaggaugcacauua

SEQ ID NO: 2463209 - RNA, 19 nt, Artificial Sequence
  Description of Artificial Sequence: Synthetic oligonucleotide
  Antisense strand to SEQ ID NO: 2463208
uaaugugcauccuaaccac

SEQ ID NO: 2463210 - RNA, 19 nt, Artificial Sequence
  Description of Artificial Sequence: Synthetic oligonucleotide
  Sense strand starting at position 167 of SEQ ID NO: 1887320
auaauacaugcauguaguu

SEQ ID NO: 2463211 - RNA, 19 nt, Artificial Sequence
  Description of Artificial Sequence: Synthetic oligonucleotide
  Antisense strand to SEQ ID NO: 2463210
aacuacaugcauguauuau

SEQ ID NO: 2463212 - RNA, 19 nt, Artificial Sequence
  Description of Artificial Sequence: Synthetic oligonucleotide
  Sense strand starting at position 172 of SEQ ID NO: 1887320
acaugcauguaguuuauaa

SEQ ID NO: 2463213 - RNA, 19 nt, Artificial Sequence
  Description of Artificial Sequence: Synthetic oligonucleotide
  Antisense strand to SEQ ID NO: 2463212
uuauaaacuacaugcaugu

SEQ ID NO: 2463214 - RNA, 19 nt, Artificial Sequence
  Description of Artificial Sequence: Synthetic oligonucleotide
  Sense strand starting at position 174 of SEQ ID NO: 1887320
augcauguaguuuauaagu

SEQ ID NO: 2463215 - RNA, 19 nt, Artificial Sequence
  Description of Artificial Sequence: Synthetic oligonucleotide
  Antisense strand to SEQ ID NO: 2463214
acuuauaaacuacaugcau

SEQ ID NO: 2463216 - RNA, 19 nt, Artificial Sequence
  Description of Artificial Sequence: Synthetic oligonucleotide
  Sense strand starting at position 200 of SEQ ID NO: 1887320
cacauauggcacuagaugu

SEQ ID NO: 2463217 - RNA, 19 nt, Artificial Sequence
  Description of Artificial Sequence: Synthetic oligonucleotide
  Antisense strand to SEQ ID NO: 2463216
acaucuagugccauaugug

SEQ ID NO: 2463218 - RNA, 19 nt, Artificial Sequence
  Description of Artificial Sequence: Synthetic oligonucleotide
  Sense strand starting at position 225 of SEQ ID NO: 1887320
acuugucauuuauggaagu

SEQ ID NO: 2463219 - RNA, 19 nt, Artificial Sequence
  Description of Artificial Sequence: Synthetic oligonucleotide
  Antisense strand to SEQ ID NO: 2463218
acuuccauaaaugacaagu

SEQ ID NO: 2463220 - RNA, 19 nt, Artificial Sequence
  Description of Artificial Sequence: Synthetic oligonucleotide
  Sense strand starting at position 236 of SEQ ID NO: 1887320
auggaagugcauggucaaa

SEQ ID NO: 2463221 - RNA, 19 nt, Artificial Sequence
  Description of Artificial Sequence: Synthetic oligonucleotide
  Antisense strand to SEQ ID NO: 2463220
uuugaccaugcacuuccau

SEQ ID NO: 2463222 - RNA, 19 nt, Artificial Sequence
  Description of Artificial Sequence: Synthetic oligonucleotide
  Sense strand starting at position 373 of SEQ ID NO: 1887320
gaggcaauuugggcuuagu

SEQ ID NO: 2463223 - RNA, 19 nt, Artificial Sequence
  Description of Artificial Sequence: Synthetic oligonucleotide
  Antisense strand to SEQ ID NO: 2463222
acuaagcccaaauugccuc

SEQ ID NO: 2463224 - RNA, 19 nt, Artificial Sequence
  Description of Artificial Sequence: Synthetic oligonucleotide
  Sense strand starting at position 382 of SEQ ID NO: 1887320
ugggcuuaguguccaggau

SEQ ID NO: 2463225 - RNA, 19 nt, Artificial Sequence
  Description of Artificial Sequence: Synthetic oligonucleotide
  Antisense strand to SEQ ID NO: 2463224
auccuggacacuaagccca

SEQ ID NO: 2463226 - RNA, 19 nt, Artificial Sequence
  Description of Artificial Sequence: Synthetic oligonucleotide
  Sense strand starting at position 383 of SEQ ID NO: 1887320
gggcuuaguguccaggauu

SEQ ID NO: 2463227 - RNA, 19 nt, Artificial Sequence
  Description of Artificial Sequence: Synthetic oligonucleotide
  Antisense strand to SEQ ID NO: 2463226
aauccuggacacuaagccc

SEQ ID NO: 2463228 - RNA, 19 nt, Artificial Sequence
  Description of Artificial Sequence: Synthetic oligonucleotide
  Sense strand starting at position 458 of SEQ ID NO: 1887320
acagcuugaggcuaagagu

SEQ ID NO: 2463229 - RNA, 19 nt, Artificial Sequence
  Description of Artificial Sequence: Synthetic oligonucleotide
  Antisense strand to SEQ ID NO: 2463228
acucuuagccucaagcugu

SEQ ID NO: 2463230 - RNA, 19 nt, Artificial Sequence
  Description of Artificial Sequence: Synthetic oligonucleotide
  Sense strand starting at position 789 of SEQ ID NO: 1887320
cuggcugagaccugugagu

SEQ ID NO: 2463231 - RNA, 19 nt, Artificial Sequence
  Description of Artificial Sequence: Synthetic oligonucleotide
  Antisense strand to SEQ ID NO: 2463230
acucacaggucucagccag

SEQ ID NO: 2463232 - RNA, 19 nt, Artificial Sequence
  Description of Artificial Sequence: Synthetic oligonucleotide
  Sense strand starting at position 791 of SEQ ID NO: 1887320
ggcugagaccugugaguaa

SEQ ID NO: 2463233 - RNA, 19 nt, Artificial Sequence
  Description of Artificial Sequence: Synthetic oligonucleotide
  Antisense strand to SEQ ID NO: 2463232
uuacucacaggucucagcc

SEQ ID NO: 2463234 - RNA, 19 nt, Artificial Sequence
  Description of Artificial Sequence: Synthetic oligonucleotide
  Sense strand starting at position 822 of SEQ ID NO: 1887320
gcaagaugcugcuuaacau

SEQ ID NO: 2463235 - RNA, 19 nt, Artificial Sequence
  Description of Artificial Sequence: Synthetic oligonucleotide
  Antisense strand to SEQ ID NO: 2463234
auguuaagcagcaucuugc

SEQ ID NO: 2463236 - RNA, 19 nt, Artificial Sequence
  Description of Artificial Sequence: Synthetic oligonucleotide
  Sense strand starting at position 982 of SEQ ID NO: 1887320
ucaguaacauuagagugau

SEQ ID NO: 2463237 - RNA, 19 nt, Artificial Sequence
  Description of Artificial Sequence: Synthetic oligonucleotide
  Antisense strand to SEQ ID NO: 2463236
aucacucuaauguuacuga

SEQ ID NO: 2463238 - RNA, 19 nt, Artificial Sequence
  Description of Artificial Sequence: Synthetic oligonucleotide
  Sense strand starting at position 985 of SEQ ID NO: 1887320
guaacauuagagugauacc

SEQ ID NO: 2463239 - RNA, 19 nt, Artificial Sequence
  Description of Artificial Sequence: Synthetic oligonucleotide
  Antisense strand to SEQ ID NO: 2463238
gguaucacucuaauguuac

SEQ ID NO: 2463240 - RNA, 19 nt, Artificial Sequence
  Description of Artificial Sequence: Synthetic oligonucleotide
  Sense strand starting at position 994 of SEQ ID NO: 1887320
gagugauaccgcuguuaua

SEQ ID NO: 2463241 - RNA, 19 nt, Artificial Sequence
  Description of Artificial Sequence: Synthetic oligonucleotide
  Antisense strand to SEQ ID NO: 2463240
uauaacagcgguaucacuc

SEQ ID NO: 2463242 - RNA, 19 nt, Artificial Sequence
  Description of Artificial Sequence: Synthetic oligonucleotide
  Sense strand starting at position 1054 of SEQ ID NO: 1887320
gccaccgacuucuccgaau

SEQ ID NO: 2463243 - RNA, 19 nt, Artificial Sequence
  Description of Artificial Sequence: Synthetic oligonucleotide
  Antisense strand to SEQ ID NO: 2463242
auucggagaagucgguggc

SEQ ID NO: 2463244 - RNA, 19 nt, Artificial Sequence
  Description of Artificial Sequence: Synthetic oligonucleotide
  Sense strand starting at position 1167 of SEQ ID NO: 1887320
ggcgccugcaucucuuaga

SEQ ID NO: 2463245 - RNA, 19 nt, Artificial Sequence
  Description of Artificial Sequence: Synthetic oligonucleotide
  Antisense strand to SEQ ID NO: 2463244
ucuaagagaugcaggcgcc

SEQ ID NO: 2463246 - RNA, 19 nt, Artificial Sequence
  Description of Artificial Sequence: Synthetic oligonucleotide
  Sense strand starting at position 1284 of SEQ ID NO: 1887320
ugcggugcuuccacgagau

SEQ ID NO: 2463247 - RNA, 19 nt, Artificial Sequence
  Description of Artificial Sequence: Synthetic oligonucleotide
  Antisense strand to SEQ ID NO: 2463246
aucucguggaagcaccgca

SEQ ID NO: 2463248 - RNA, 19 nt, Artificial Sequence
  Description of Artificial Sequence: Synthetic oligonucleotide
  Sense strand starting at position 2151 of SEQ ID NO: 1887320
uuaauuagaucguucuccu

SEQ ID NO: 2463249 - RNA, 19 nt, Artificial Sequence
  Description of Artificial Sequence: Synthetic oligonucleotide
  Antisense strand to SEQ ID NO: 2463248
aggagaacgaucuaauuaa

SEQ ID NO: 2463250 - RNA, 19 nt, Artificial Sequence
  Description of Artificial Sequence: Synthetic oligonucleotide
  Sense strand starting at position 2160 of SEQ ID NO: 1887320
ucguucuccucucuggaua

SEQ ID NO: 2463251 - RNA, 19 nt, Artificial Sequence
  Description of Artificial Sequence: Synthetic oligonucleotide
  Antisense strand to SEQ ID NO: 2463250
uauccagagaggagaacga

SEQ ID NO: 2463252 - RNA, 19 nt, Artificial Sequence
  Description of Artificial Sequence: Synthetic oligonucleotide
  Sense strand starting at position 2226 of SEQ ID NO: 1887320
aaaggaggcuuguaaacga

SEQ ID NO: 2463253 - RNA, 19 nt, Artificial Sequence
  Description of Artificial Sequence: Synthetic oligonucleotide
  Antisense strand to SEQ ID NO: 2463252
ucguuuacaagccuccuuu

SEQ ID NO: 2463254 - RNA, 19 nt, Artificial Sequence
  Description of Artificial Sequence: Synthetic oligonucleotide
  Sense strand starting at position 2242 of SEQ ID NO: 1887320
cgaauuugguugagagcag

SEQ ID NO: 2463255 - RNA, 19 nt, Artificial Sequence
  Description of Artificial Sequence: Synthetic oligonucleotide
  Antisense strand to SEQ ID NO: 2463254
cugcucucaaccaaauucg

SEQ ID NO: 2463256 - RNA, 19 nt, Artificial Sequence
  Description of Artificial Sequence: Synthetic oligonucleotide
  Sense strand starting at position 2243 of SEQ ID NO: 1887320
gaauuugguugagagcaga

SEQ ID NO: 2463257 - RNA, 19 nt, Artificial Sequence
  Description of Artificial Sequence: Synthetic oligonucleotide
  Antisense strand to SEQ ID NO: 2463256
ucugcucucaaccaaauuc

SEQ ID NO: 2463258 - RNA, 19 nt, Artificial Sequence
  Description of Artificial Sequence: Synthetic oligonucleotide
  Sense strand starting at position 2317 of SEQ ID NO: 1887320
aguguugagucgucaacuc

SEQ ID NO: 2463259 - RNA, 19 nt, Artificial Sequence
  Description of Artificial Sequence: Synthetic oligonucleotide
  Antisense strand to SEQ ID NO: 2463258
gaguugacgacucaacacu

SEQ ID NO: 2463260 - RNA, 19 nt, Artificial Sequence
  Description of Artificial Sequence: Synthetic oligonucleotide
  Sense strand starting at position 2399 of SEQ ID NO: 1887320
agugguggaacguacauau

SEQ ID NO: 2463261 - RNA, 19 nt, Artificial Sequence
  Description of Artificial Sequence: Synthetic oligonucleotide
  Antisense strand to SEQ ID NO: 2463260
auauguacguuccaccacu

SEQ ID NO: 2463262 - RNA, 19 nt, Artificial Sequence
  Description of Artificial Sequence: Synthetic oligonucleotide
  Sense strand starting at position 2440 of SEQ ID NO: 1887320
aguuguaauuugccaaccu

SEQ ID NO: 2463263 - RNA, 19 nt, Artificial Sequence
  Description of Artificial Sequence: Synthetic oligonucleotide
  Antisense strand to SEQ ID NO: 2463262
agguuggcaaauuacaacu

SEQ ID NO: 2463264 - RNA, 19 nt, Artificial Sequence
  Description of Artificial Sequence: Synthetic oligonucleotide
  Sense strand starting at position 2481 of SEQ ID NO: 1887320
ccuuuagaugccuaaucug

SEQ ID NO: 2463265 - RNA, 19 nt, Artificial Sequence
  Description of Artificial Sequence: Synthetic oligonucleotide
  Antisense strand to SEQ ID NO: 2463264
cagauuaggcaucuaaagg

SEQ ID NO: 2463266 - RNA, 19 nt, Artificial Sequence
  Description of Artificial Sequence: Synthetic oligonucleotide
  Sense strand starting at position 2517 of SEQ ID NO: 1887320
gcuaacagagauugaguga

SEQ ID NO: 2463267 - RNA, 19 nt, Artificial Sequence
  Description of Artificial Sequence: Synthetic oligonucleotide
  Antisense strand to SEQ ID NO: 2463266
ucacucaaucucuguuagc

SEQ ID NO: 2463268 - RNA, 19 nt, Artificial Sequence
  Description of Artificial Sequence: Synthetic oligonucleotide
  Sense strand starting at position 2596 of SEQ ID NO: 1887320
gacugaugcuuggucuuau

SEQ ID NO: 2463269 - RNA, 19 nt, Artificial Sequence
  Description of Artificial Sequence: Synthetic oligonucleotide
  Antisense strand to SEQ ID NO: 2463268
auaagaccaagcaucaguc

SEQ ID NO: 2463270 - RNA, 19 nt, Artificial Sequence
  Description of Artificial Sequence: Synthetic oligonucleotide
  Sense strand starting at position 2597 of SEQ ID NO: 1887320
acugaugcuuggucuuaua

SEQ ID NO: 2463271 - RNA, 19 nt, Artificial Sequence
  Description of Artificial Sequence: Synthetic oligonucleotide
  Antisense strand to SEQ ID NO: 2463270
uauaagaccaagcaucagu

SEQ ID NO: 2463272 - RNA, 19 nt, Artificial Sequence
  Description of Artificial Sequence: Synthetic oligonucleotide
  Sense strand starting at position 2643 of SEQ ID NO: 1887320
cacauaggcccucgaagaa

SEQ ID NO: 2463273 - RNA, 19 nt, Artificial Sequence
  Description of Artificial Sequence: Synthetic oligonucleotide
  Antisense strand to SEQ ID NO: 2463272
uucuucgagggccuaugug

SEQ ID NO: 2463274 - RNA, 19 nt, Artificial Sequence
  Description of Artificial Sequence: Synthetic oligonucleotide
  Sense strand starting at position 2647 of SEQ ID NO: 1887320
uaggcccucgaagaaauua

SEQ ID NO: 2463275 - RNA, 19 nt, Artificial Sequence
  Description of Artificial Sequence: Synthetic oligonucleotide
  Antisense strand to SEQ ID NO: 2463274
uaauuucuucgagggccua

SEQ ID NO: 2463276 - RNA, 19 nt, Artificial Sequence
  Description of Artificial Sequence: Synthetic oligonucleotide
  Sense strand starting at position 2766 of SEQ ID NO: 1887320
gagacaauauugugaagau

SEQ ID NO: 2463277 - RNA, 19 nt, Artificial Sequence
  Description of Artificial Sequence: Synthetic oligonucleotide
  Antisense strand to SEQ ID NO: 2463276
aucuucacaauauugucuc

SEQ ID NO: 2463278 - RNA, 19 nt, Artificial Sequence
  Description of Artificial Sequence: Synthetic oligonucleotide
  Sense strand starting at position 2785 of SEQ ID NO: 1887320
ggcaauauuuccuaaagca

SEQ ID NO: 2463279 - RNA, 19 nt, Artificial Sequence
  Description of Artificial Sequence: Synthetic oligonucleotide
  Antisense strand to SEQ ID NO: 2463278
ugcuuuaggaaauauugcc

SEQ ID NO: 2463280 - RNA, 19 nt, Artificial Sequence
  Description of Artificial Sequence: Synthetic oligonucleotide
  Sense strand starting at position 2923 of SEQ ID NO: 1887320
aaacgauucugagaaagaa

SEQ ID NO: 2463281 - RNA, 19 nt, Artificial Sequence
  Description of Artificial Sequence: Synthetic oligonucleotide
  Antisense strand to SEQ ID NO: 2463280
uucuuucucagaaucguuu

SEQ ID NO: 2463282 - RNA, 19 nt, Artificial Sequence
  Description of Artificial Sequence: Synthetic oligonucleotide
  Sense strand starting at position 3008 of SEQ ID NO: 1887320
guaguaccgacauaacgau

SEQ ID NO: 2463283 - RNA, 19 nt, Artificial Sequence
  Description of Artificial Sequence: Synthetic oligonucleotide
  Antisense strand to SEQ ID NO: 2463282
aucguuaugucgguacuac

SEQ ID NO: 2463284 - RNA, 19 nt, Artificial Sequence
  Description of Artificial Sequence: Synthetic oligonucleotide
  Sense strand starting at position 3331 of SEQ ID NO: 1887320
uagcaaugcugucuuagcu

SEQ ID NO: 2463285 - RNA, 19 nt, Artificial Sequence
  Description of Artificial Sequence: Synthetic oligonucleotide
  Antisense strand to SEQ ID NO: 2463284
agcuaagacagcauugcua

SEQ ID NO: 2463286 - RNA, 19 nt, Artificial Sequence
  Description of Artificial Sequence: Synthetic oligonucleotide
  Sense strand starting at position 3335 of SEQ ID NO: 1887320
aaugcugucuuagcuauga

SEQ ID NO: 2463287 - RNA, 19 nt, Artificial Sequence
  Description of Artificial Sequence: Synthetic oligonucleotide
  Antisense strand to SEQ ID NO: 2463286
ucauagcuaagacagcauu

SEQ ID NO: 2463288 - RNA, 19 nt, Artificial Sequence
  Description of Artificial Sequence: Synthetic oligonucleotide
  Sense strand starting at position 3339 of SEQ ID NO: 1887320
cugucuuagcuaugauauc

SEQ ID NO: 2463289 - RNA, 19 nt, Artificial Sequence
  Description of Artificial Sequence: Synthetic oligonucleotide
  Antisense strand to SEQ ID NO: 2463288
gauaucauagcuaagacag

SEQ ID NO: 2463290 - RNA, 19 nt, Artificial Sequence
  Description of Artificial Sequence: Synthetic oligonucleotide
  Sense strand starting at position 24 of SEQ ID NO: 1887321
agaugagagcuguguucag

SEQ ID NO: 2463291 - RNA, 19 nt, Artificial Sequence
  Description of Artificial Sequence: Synthetic oligonucleotide
  Antisense strand to SEQ ID NO: 2463290
cugaacacagcucucaucu

SEQ ID NO: 2463292 - RNA, 19 nt, Artificial Sequence
  Description of Artificial Sequence: Synthetic oligonucleotide
  Sense strand starting at position 28 of SEQ ID NO: 1887321
gagagcuguguucagagga

SEQ ID NO: 2463293 - RNA, 19 nt, Artificial Sequence
  Description of Artificial Sequence: Synthetic oligonucleotide
  Antisense strand to SEQ ID NO: 2463292
uccucugaacacagcucuc

SEQ ID NO: 2463294 - RNA, 19 nt, Artificial Sequence
  Description of Artificial Sequence: Synthetic oligonucleotide
  Sense strand starting at position 277 of SEQ ID NO: 1887321
cagcgauggcaucagugaa

SEQ ID NO: 2463295 - RNA, 19 nt, Artificial Sequence
  Description of Artificial Sequence: Synthetic oligonucleotide
  Antisense strand to SEQ ID NO: 2463294
uucacugaugccaucgcug

SEQ ID NO: 2463296 - RNA, 19 nt, Artificial Sequence
  Description of Artificial Sequence: Synthetic oligonucleotide
  Sense strand starting at position 379 of SEQ ID NO: 1887321
gggugagggugauucauac

SEQ ID NO: 2463297 - RNA, 19 nt, Artificial Sequence
  Description of Artificial Sequence: Synthetic oligonucleotide
  Antisense strand to SEQ ID NO: 2463296
guaugaaucacccucaccc

SEQ ID NO: 2463298 - RNA, 19 nt, Artificial Sequence
  Description of Artificial Sequence: Synthetic oligonucleotide
  Sense strand starting at position 875 of SEQ ID NO: 1887321
uggcauagguugucagaaa

SEQ ID NO: 2463299 - RNA, 19 nt, Artificial Sequence
  Description of Artificial Sequence: Synthetic oligonucleotide
  Antisense strand to SEQ ID NO: 2463298
uuucugacaaccuaugcca

SEQ ID NO: 2463300 - RNA, 19 nt, Artificial Sequence
  Description of Artificial Sequence: Synthetic oligonucleotide
  Sense strand starting at position 882 of SEQ ID NO: 1887321
gguugucagaaauaaguag

SEQ ID NO: 2463301 - RNA, 19 nt, Artificial Sequence
  Description of Artificial Sequence: Synthetic oligonucleotide
  Antisense strand to SEQ ID NO: 2463300
cuacuuauuucugacaacc

SEQ ID NO: 2463302 - RNA, 19 nt, Artificial Sequence
  Description of Artificial Sequence: Synthetic oligonucleotide
  Sense strand starting at position 1102 of SEQ ID NO: 1887321
aguguuaucaguuacagga

SEQ ID NO: 2463303 - RNA, 19 nt, Artificial Sequence
  Description of Artificial Sequence: Synthetic oligonucleotide
  Antisense strand to SEQ ID NO: 2463302
uccuguaacugauaacacu

SEQ ID NO: 2463304 - RNA, 19 nt, Artificial Sequence
  Description of Artificial Sequence: Synthetic oligonucleotide
  Sense strand starting at position 1212 of SEQ ID NO: 1887321
gacauucuccugcaguaga

SEQ ID NO: 2463305 - RNA, 19 nt, Artificial Sequence
  Description of Artificial Sequence: Synthetic oligonucleotide
  Antisense strand to SEQ ID NO: 2463304
ucuacugcaggagaauguc

SEQ ID NO: 2463306 - RNA, 19 nt, Artificial Sequence
  Description of Artificial Sequence: Synthetic oligonucleotide
  Sense strand starting at position 1283 of SEQ ID NO: 1887321
guggguugguugaagaaua

SEQ ID NO: 2463307 - RNA, 19 nt, Artificial Sequence
  Description of Artificial Sequence: Synthetic oligonucleotide
  Antisense strand to SEQ ID NO: 2463306
uauucuucaaccaacccac

SEQ ID NO: 2463308 - RNA, 19 nt, Artificial Sequence
  Description of Artificial Sequence: Synthetic oligonucleotide
  Sense strand starting at position 1302 of SEQ ID NO: 1887321
cagggaacauggguguuua

SEQ ID NO: 2463309 - RNA, 19 nt, Artificial Sequence
  Description of Artificial Sequence: Synthetic oligonucleotide
  Antisense strand to SEQ ID NO: 2463308
uaaacacccauguucccug

SEQ ID NO: 2463310 - RNA, 19 nt, Artificial Sequence
  Description of Artificial Sequence: Synthetic oligonucleotide
  Sense strand starting at position 1303 of SEQ ID NO: 1887321
agggaacauggguguuuau

SEQ ID NO: 2463311 - RNA, 19 nt, Artificial Sequence
  Description of Artificial Sequence: Synthetic oligonucleotide
  Antisense strand to SEQ ID NO: 2463310
auaaacacccauguucccu

SEQ ID NO: 2463312 - RNA, 19 nt, Artificial Sequence
  Description of Artificial Sequence: Synthetic oligonucleotide
  Sense strand starting at position 1306 of SEQ ID NO: 1887321
gaacauggguguuuaugua

SEQ ID NO: 2463313 - RNA, 19 nt, Artificial Sequence
  Description of Artificial Sequence: Synthetic oligonucleotide
  Antisense strand to SEQ ID NO: 2463312
uacauaaacacccauguuc

SEQ ID NO: 2463314 - RNA, 19 nt, Artificial Sequence
  Description of Artificial Sequence: Synthetic oligonucleotide
  Sense strand starting at position 1334 of SEQ ID NO: 1887321
cuaugaggucagugagguu

SEQ ID NO: 2463315 - RNA, 19 nt, Artificial Sequence
  Description of Artificial Sequence: Synthetic oligonucleotide
  Antisense strand to SEQ ID NO: 2463314
aaccucacugaccucauag

SEQ ID NO: 2463316 - RNA, 19 nt, Artificial Sequence
  Description of Artificial Sequence: Synthetic oligonucleotide
  Sense strand starting at position 1341 of SEQ ID NO: 1887321
gucagugagguuugagauc

SEQ ID NO: 2463317 - RNA, 19 nt, Artificial Sequence
  Description of Artificial Sequence: Synthetic oligonucleotide
  Antisense strand to SEQ ID NO: 2463316
gaucucaaaccucacugac

SEQ ID NO: 2463318 - RNA, 19 nt, Artificial Sequence
  Description of Artificial Sequence: Synthetic oligonucleotide
  Sense strand starting at position 1919 of SEQ ID NO: 1887321
gcugguugcagauauuaag

SEQ ID NO: 2463319 - RNA, 19 nt, Artificial Sequence
  Description of Artificial Sequence: Synthetic oligonucleotide
  Antisense strand to SEQ ID NO: 2463318
cuuaauaucugcaaccagc

SEQ ID NO: 2463320 - RNA, 19 nt, Artificial Sequence
  Description of Artificial Sequence: Synthetic oligonucleotide
  Sense strand starting at position 2074 of SEQ ID NO: 1887321
caguguugugcugagagag

SEQ ID NO: 2463321 - RNA, 19 nt, Artificial Sequence
  Description of Artificial Sequence: Synthetic oligonucleotide
  Antisense strand to SEQ ID NO: 2463320
cucucucagcacaacacug

SEQ ID NO: 2463322 - RNA, 19 nt, Artificial Sequence
  Description of Artificial Sequence: Synthetic oligonucleotide
  Sense strand starting at position 2088 of SEQ ID NO: 1887321
gagagaacauugugauuua

SEQ ID NO: 2463323 - RNA, 19 nt, Artificial Sequence
  Description of Artificial Sequence: Synthetic oligonucleotide
  Antisense strand to SEQ ID NO: 2463322
uaaaucacaauguucucuc

SEQ ID NO: 2463324 - RNA, 19 nt, Artificial Sequence
  Description of Artificial Sequence: Synthetic oligonucleotide
  Sense strand starting at position 2089 of SEQ ID NO: 1887321
agagaacauugugauuuag

SEQ ID NO: 2463325 - RNA, 19 nt, Artificial Sequence
  Description of Artificial Sequence: Synthetic oligonucleotide
  Antisense strand to SEQ ID NO: 2463324
cuaaaucacaauguucucu

SEQ ID NO: 2463326 - RNA, 19 nt, Artificial Sequence
  Description of Artificial Sequence: Synthetic oligonucleotide
  Sense strand starting at position 2219 of SEQ ID NO: 1887321
ccauguggccaguaacuuu

SEQ ID NO: 2463327 - RNA, 19 nt, Artificial Sequence
  Description of Artificial Sequence: Synthetic oligonucleotide
  Antisense strand to SEQ ID NO: 2463326
aaaguuacuggccacaugg

SEQ ID NO: 2463328 - RNA, 19 nt, Artificial Sequence
  Description of Artificial Sequence: Synthetic oligonucleotide
  Sense strand starting at position 2635 of SEQ ID NO: 1887321
aaauaugaguaggagagaa

SEQ ID NO: 2463329 - RNA, 19 nt, Artificial Sequence
  Description of Artificial Sequence: Synthetic oligonucleotide
  Antisense strand to SEQ ID NO: 2463328
uucucuccuacucauauuu

SEQ ID NO: 2463330 - RNA, 19 nt, Artificial Sequence
  Description of Artificial Sequence: Synthetic oligonucleotide
  Sense strand starting at position 2745 of SEQ ID NO: 1887321
gcacgaaggccugaugaaa

SEQ ID NO: 2463331 - RNA, 19 nt, Artificial Sequence
  Description of Artificial Sequence: Synthetic oligonucleotide
  Antisense strand to SEQ ID NO: 2463330
uuucaucaggccuucgugc

SEQ ID NO: 2463332 - RNA, 19 nt, Artificial Sequence
  Description of Artificial Sequence: Synthetic oligonucleotide
  Sense strand starting at position 2976 of SEQ ID NO: 1887321
augaaagcuguuggagaga

SEQ ID NO: 2463333 - RNA, 19 nt, Artificial Sequence
  Description of Artificial Sequence: Synthetic oligonucleotide
  Antisense strand to SEQ ID NO: 2463332
ucucuccaacagcuuucau

SEQ ID NO: 2463334 - RNA, 19 nt, Artificial Sequence
  Description of Artificial Sequence: Synthetic oligonucleotide
  Sense strand starting at position 3041 of SEQ ID NO: 1887321
augaguaaaccguggugga

SEQ ID NO: 2463335 - RNA, 19 nt, Artificial Sequence
  Description of Artificial Sequence: Synthetic oligonucleotide
  Antisense strand to SEQ ID NO: 2463334
uccaccacgguuuacucau

SEQ ID NO: 2463336 - RNA, 19 nt, Artificial Sequence
  Description of Artificial Sequence: Synthetic oligonucleotide
  Sense strand starting at position 3042 of SEQ ID NO: 1887321
ugaguaaaccgugguggaa

SEQ ID NO: 2463337 - RNA, 19 nt, Artificial Sequence
  Description of Artificial Sequence: Synthetic oligonucleotide
  Antisense strand to SEQ ID NO: 2463336
uuccaccacgguuuacuca

SEQ ID NO: 2463338 - RNA, 19 nt, Artificial Sequence
  Description of Artificial Sequence: Synthetic oligonucleotide
  Sense strand starting at position 3096 of SEQ ID NO: 1887321
gggagauuguaccuuggag

SEQ ID NO: 2463339 - RNA, 19 nt, Artificial Sequence
  Description of Artificial Sequence: Synthetic oligonucleotide
  Antisense strand to SEQ ID NO: 2463338
cuccaagguacaaucuccc

SEQ ID NO: 2463340 - RNA, 19 nt, Artificial Sequence
  Description of Artificial Sequence: Synthetic oligonucleotide
  Sense strand starting at position 3098 of SEQ ID NO: 1887321
gagauuguaccuuggagga

SEQ ID NO: 2463341 - RNA, 19 nt, Artificial Sequence
  Description of Artificial Sequence: Synthetic oligonucleotide
  Antisense strand to SEQ ID NO: 2463340
uccuccaagguacaaucuc

SEQ ID NO: 2463342 - RNA, 19 nt, Artificial Sequence
  Description of Artificial Sequence: Synthetic oligonucleotide
  Sense strand starting at position 3146 of SEQ ID NO: 1887321
guccauuuccaguggguuu

SEQ ID NO: 2463343 - RNA, 19 nt, Artificial Sequence
  Description of Artificial Sequence: Synthetic oligonucleotide
  Antisense strand to SEQ ID NO: 2463342
aaacccacuggaaauggac

SEQ ID NO: 2463344 - RNA, 19 nt, Artificial Sequence
  Description of Artificial Sequence: Synthetic oligonucleotide
  Sense strand starting at position 3288 of SEQ ID NO: 1887321
gagugacuuugggugggaa

SEQ ID NO: 2463345 - RNA, 19 nt, Artificial Sequence
  Description of Artificial Sequence: Synthetic oligonucleotide
  Antisense strand to SEQ ID NO: 2463344
uucccacccaaagucacuc

SEQ ID NO: 2463346 - RNA, 19 nt, Artificial Sequence
  Description of Artificial Sequence: Synthetic oligonucleotide
  Sense strand starting at position 3289 of SEQ ID NO: 1887321
agugacuuugggugggaaa

SEQ ID NO: 2463347 - RNA, 19 nt, Artificial Sequence
  Description of Artificial Sequence: Synthetic oligonucleotide
  Antisense strand to SEQ ID NO: 2463346
uuucccacccaaagucacu

SEQ ID NO: 2463348 - RNA, 19 nt, Artificial Sequence
  Description of Artificial Sequence: Synthetic oligonucleotide
  Sense strand starting at position 3335 of SEQ ID NO: 1887321
agcugagaugucuauuaua

SEQ ID NO: 2463349 - RNA, 19 nt, Artificial Sequence
  Description of Artificial Sequence: Synthetic oligonucleotide
  Antisense strand to SEQ ID NO: 2463348
uauaauagacaucucagcu

SEQ ID NO: 2463350 - RNA, 19 nt, Artificial Sequence
  Description of Artificial Sequence: Synthetic oligonucleotide
  Sense strand starting at position 3427 of SEQ ID NO: 1887321
aaaugugggaauuguuagu

SEQ ID NO: 2463351 - RNA, 19 nt, Artificial Sequence
  Description of Artificial Sequence: Synthetic oligonucleotide
  Antisense strand to SEQ ID NO: 2463350
acuaacaauucccacauuu

SEQ ID NO: 2463352 - RNA, 19 nt, Artificial Sequence
  Description of Artificial Sequence: Synthetic oligonucleotide
  Sense strand starting at position 3432 of SEQ ID NO: 1887321
ugggaauuguuagugugag

SEQ ID NO: 2463353 - RNA, 19 nt, Artificial Sequence
  Description of Artificial Sequence: Synthetic oligonucleotide
  Antisense strand to SEQ ID NO: 2463352
cucacacuaacaauuccca

SEQ ID NO: 2463354 - RNA, 19 nt, Artificial Sequence
  Description of Artificial Sequence: Synthetic oligonucleotide
  Sense strand starting at position 3468 of SEQ ID NO: 1887321
uggcaaaggaaugguguau

SEQ ID NO: 2463355 - RNA, 19 nt, Artificial Sequence
  Description of Artificial Sequence: Synthetic oligonucleotide
  Antisense strand to SEQ ID NO: 2463354
auacaccauuccuuugcca

SEQ ID NO: 2463356 - RNA, 19 nt, Artificial Sequence
  Description of Artificial Sequence: Synthetic oligonucleotide
  Sense strand starting at position 3474 of SEQ ID NO: 1887321
aggaaugguguaugcagaa

SEQ ID NO: 2463357 - RNA, 19 nt, Artificial Sequence
  Description of Artificial Sequence: Synthetic oligonucleotide
  Antisense strand to SEQ ID NO: 2463356
uucugcauacaccauuccu

SEQ ID NO: 2463358 - RNA, 19 nt, Artificial Sequence
  Description of Artificial Sequence: Synthetic oligonucleotide
  Sense strand starting at position 3515 of SEQ ID NO: 1887321
gcuggagcacuccaagguu

SEQ ID NO: 2463359 - RNA, 19 nt, Artificial Sequence
  Description of Artificial Sequence: Synthetic oligonucleotide
  Antisense strand to SEQ ID NO: 2463358
aaccuuggagugcuccagc

SEQ ID NO: 2463360 - RNA, 19 nt, Artificial Sequence
  Description of Artificial Sequence: Synthetic oligonucleotide
  Sense strand starting at position 3518 of SEQ ID NO: 1887321
ggagcacuccaagguuaag

SEQ ID NO: 2463361 - RNA, 19 nt, Artificial Sequence
  Description of Artificial Sequence: Synthetic oligonucleotide
  Antisense strand to SEQ ID NO: 2463360
cuuaaccuuggagugcucc

SEQ ID NO: 2463362 - RNA, 19 nt, Artificial Sequence
  Description of Artificial Sequence: Synthetic oligonucleotide
  Sense strand starting at position 3656 of SEQ ID NO: 1887321
gugagaugaggccaaguua

SEQ ID NO: 2463363 - RNA, 19 nt, Artificial Sequence
  Description of Artificial Sequence: Synthetic oligonucleotide
  Antisense strand to SEQ ID NO: 2463362
uaacuuggccucaucucac

SEQ ID NO: 2463364 - RNA, 19 nt, Artificial Sequence
  Description of Artificial Sequence: Synthetic oligonucleotide
  Sense strand starting at position 3729 of SEQ ID NO: 1887321
cccaaagccugauucggau

SEQ ID NO: 2463365 - RNA, 19 nt, Artificial Sequence
  Description of Artificial Sequence: Synthetic oligonucleotide
  Antisense strand to SEQ ID NO: 2463364
auccgaaucaggcuuuggg

SEQ ID NO: 2463366 - RNA, 19 nt, Artificial Sequence
  Description of Artificial Sequence: Synthetic oligonucleotide
  Sense strand starting at position 3792 of SEQ ID NO: 1887321
acuuguuugcagcauuaaa

SEQ ID NO: 2463367 - RNA, 19 nt, Artificial Sequence
  Description of Artificial Sequence: Synthetic oligonucleotide
  Antisense strand to SEQ ID NO: 2463366
uuuaaugcugcaaacaagu

SEQ ID NO: 2463368 - RNA, 19 nt, Artificial Sequence
  Description of Artificial Sequence: Synthetic oligonucleotide
  Sense strand starting at position 3906 of SEQ ID NO: 1887321
ggagcuguuguugauauaa

SEQ ID NO: 2463369 - RNA, 19 nt, Artificial Sequence
  Description of Artificial Sequence: Synthetic oligonucleotide
  Antisense strand to SEQ ID NO: 2463368
uuauaucaacaacagcucc

SEQ ID NO: 2463370 - RNA, 19 nt, Artificial Sequence
  Description of Artificial Sequence: Synthetic oligonucleotide
  Sense strand starting at position 64 of SEQ ID NO: 1887322
uuacuugagguccaguaau

SEQ ID NO: 2463371 - RNA, 19 nt, Artificial Sequence
  Description of Artificial Sequence: Synthetic oligonucleotide
  Antisense strand to SEQ ID NO: 2463370
auuacuggaccucaaguaa

SEQ ID NO: 2463372 - RNA, 19 nt, Artificial Sequence
  Description of Artificial Sequence: Synthetic oligonucleotide
  Sense strand starting at position 294 of SEQ ID NO: 1887322
acuauucuacaguaauguu

SEQ ID NO: 2463373 - RNA, 19 nt, Artificial Sequence
  Description of Artificial Sequence: Synthetic oligonucleotide
  Antisense strand to SEQ ID NO: 2463372
aacauuacuguagaauagu

SEQ ID NO: 2463374 - RNA, 19 nt, Artificial Sequence
  Description of Artificial Sequence: Synthetic oligonucleotide
  Sense strand starting at position 304 of SEQ ID NO: 1887322
aguaauguugaagguggau

SEQ ID NO: 2463375 - RNA, 19 nt, Artificial Sequence
  Description of Artificial Sequence: Synthetic oligonucleotide
  Antisense strand to SEQ ID NO: 2463374
auccaccuucaacauuacu

SEQ ID NO: 2463376 - RNA, 19 nt, Artificial Sequence
  Description of Artificial Sequence: Synthetic oligonucleotide
  Sense strand starting at position 317 of SEQ ID NO: 1887322
guggaugaaguauaucgaa

SEQ ID NO: 2463377 - RNA, 19 nt, Artificial Sequence
  Description of Artificial Sequence: Synthetic oligonucleotide
  Antisense strand to SEQ ID NO: 2463376
uucgauauacuucauccac

SEQ ID NO: 2463378 - RNA, 19 nt, Artificial Sequence
  Description of Artificial Sequence: Synthetic oligonucleotide
  Sense strand starting at position 324 of SEQ ID NO: 1887322
aaguauaucgaaugaguuu

SEQ ID NO: 2463379 - RNA, 19 nt, Artificial Sequence
  Description of Artificial Sequence: Synthetic oligonucleotide
  Antisense strand to SEQ ID NO: 2463378
aaacucauucgauauacuu

SEQ ID NO: 2463380 - RNA, 19 nt, Artificial Sequence
  Description of Artificial Sequence: Synthetic oligonucleotide
  Sense strand starting at position 325 of SEQ ID NO: 1887322
aguauaucgaaugaguuua

SEQ ID NO: 2463381 - RNA, 19 nt, Artificial Sequence
  Description of Artificial Sequence: Synthetic oligonucleotide
  Antisense strand to SEQ ID NO: 2463380
uaaacucauucgauauacu

SEQ ID NO: 2463382 - RNA, 19 nt, Artificial Sequence
  Description of Artificial Sequence: Synthetic oligonucleotide
  Sense strand starting at position 330 of SEQ ID NO: 1887322
aucgaaugaguuuauguga

SEQ ID NO: 2463383 - RNA, 19 nt, Artificial Sequence
  Description of Artificial Sequence: Synthetic oligonucleotide
  Antisense strand to SEQ ID NO: 2463382
ucacauaaacucauucgau

SEQ ID NO: 2463384 - RNA, 19 nt, Artificial Sequence
  Description of Artificial Sequence: Synthetic oligonucleotide
  Sense strand starting at position 333 of SEQ ID NO: 1887322
gaaugaguuuaugugaguu

SEQ ID NO: 2463385 - RNA, 19 nt, Artificial Sequence
  Description of Artificial Sequence: Synthetic oligonucleotide
  Antisense strand to SEQ ID NO: 2463384
aacucacauaaacucauuc

SEQ ID NO: 2463386 - RNA, 19 nt, Artificial Sequence
  Description of Artificial Sequence: Synthetic oligonucleotide
  Sense strand starting at position 337 of SEQ ID NO: 1887322
gaguuuaugugaguuaaag

SEQ ID NO: 2463387 - RNA, 19 nt, Artificial Sequence
  Description of Artificial Sequence: Synthetic oligonucleotide
  Antisense strand to SEQ ID NO: 2463386
cuuuaacucacauaaacuc

SEQ ID NO: 2463388 - RNA, 19 nt, Artificial Sequence
  Description of Artificial Sequence: Synthetic oligonucleotide
  Sense strand starting at position 339 of SEQ ID NO: 1887322
guuuaugugaguuaaagua

SEQ ID NO: 2463389 - RNA, 19 nt, Artificial Sequence
  Description of Artificial Sequence: Synthetic oligonucleotide
  Antisense strand to SEQ ID NO: 2463388
uacuuuaacucacauaaac

SEQ ID NO: 2463390 - RNA, 19 nt, Artificial Sequence
  Description of Artificial Sequence: Synthetic oligonucleotide
  Sense strand starting at position 564 of SEQ ID NO: 1887322
ggcuuuguccaccaaggau

SEQ ID NO: 2463391 - RNA, 19 nt, Artificial Sequence
  Description of Artificial Sequence: Synthetic oligonucleotide
  Antisense strand to SEQ ID NO: 2463390
auccuugguggacaaagcc

SEQ ID NO: 2463392 - RNA, 19 nt, Artificial Sequence
  Description of Artificial Sequence: Synthetic oligonucleotide
  Sense strand starting at position 627 of SEQ ID NO: 1887322
uugaguuaauuacucagua

SEQ ID NO: 2463393 - RNA, 19 nt, Artificial Sequence
  Description of Artificial Sequence: Synthetic oligonucleotide
  Antisense strand to SEQ ID NO: 2463392
uacugaguaauuaacucaa

SEQ ID NO: 2463394 - RNA, 19 nt, Artificial Sequence
  Description of Artificial Sequence: Synthetic oligonucleotide
  Sense strand starting at position 628 of SEQ ID NO: 1887322
ugaguuaauuacucaguau

SEQ ID NO: 2463395 - RNA, 19 nt, Artificial Sequence
  Description of Artificial Sequence: Synthetic oligonucleotide
  Antisense strand to SEQ ID NO: 2463394
auacugaguaauuaacuca

SEQ ID NO: 2463396 - RNA, 19 nt, Artificial Sequence
  Description of Artificial Sequence: Synthetic oligonucleotide
  Sense strand starting at position 706 of SEQ ID NO: 1887322
auaugaugacguggauuga

SEQ ID NO: 2463397 - RNA, 19 nt, Artificial Sequence
  Description of Artificial Sequence: Synthetic oligonucleotide
  Antisense strand to SEQ ID NO: 2463396
ucaauccacgucaucauau

SEQ ID NO: 2463398 - RNA, 19 nt, Artificial Sequence
  Description of Artificial Sequence: Synthetic oligonucleotide
  Sense strand starting at position 707 of SEQ ID NO: 1887322
uaugaugacguggauugau

SEQ ID NO: 2463399 - RNA, 19 nt, Artificial Sequence
  Description of Artificial Sequence: Synthetic oligonucleotide
  Antisense strand to SEQ ID NO: 2463398
aucaauccacgucaucaua

SEQ ID NO: 2463400 - RNA, 19 nt, Artificial Sequence
  Description of Artificial Sequence: Synthetic oligonucleotide
  Sense strand starting at position 715 of SEQ ID NO: 1887322
cguggauugauagguagag

SEQ ID NO: 2463401 - RNA, 19 nt, Artificial Sequence
  Description of Artificial Sequence: Synthetic oligonucleotide
  Antisense strand to SEQ ID NO: 2463400
cucuaccuaucaauccacg

SEQ ID NO: 2463402 - RNA, 19 nt, Artificial Sequence
  Description of Artificial Sequence: Synthetic oligonucleotide
  Sense strand starting at position 745 of SEQ ID NO: 1887322
gagggagcugcuuaaguga

SEQ ID NO: 2463403 - RNA, 19 nt, Artificial Sequence
  Description of Artificial Sequence: Synthetic oligonucleotide
  Antisense strand to SEQ ID NO: 2463402
ucacuuaagcagcucccuc

SEQ ID NO: 2463404 - RNA, 19 nt, Artificial Sequence
  Description of Artificial Sequence: Synthetic oligonucleotide
  Sense strand starting at position 792 of SEQ ID NO: 1887322
uucucauauuggucaagga

SEQ ID NO: 2463405 - RNA, 19 nt, Artificial Sequence
  Description of Artificial Sequence: Synthetic oligonucleotide
  Antisense strand to SEQ ID NO: 2463404
uccuugaccaauaugagaa

SEQ ID NO: 2463406 - RNA, 19 nt, Artificial Sequence
  Description of Artificial Sequence: Synthetic oligonucleotide
  Sense strand starting at position 796 of SEQ ID NO: 1887322
cauauuggucaaggaccaa

SEQ ID NO: 2463407 - RNA, 19 nt, Artificial Sequence
  Description of Artificial Sequence: Synthetic oligonucleotide
  Antisense strand to SEQ ID NO: 2463406
uugguccuugaccaauaug

SEQ ID NO: 2463408 - RNA, 19 nt, Artificial Sequence
  Description of Artificial Sequence: Synthetic oligonucleotide
  Sense strand starting at position 935 of SEQ ID NO: 1887322
acauucuuucugggacauc

SEQ ID NO: 2463409 - RNA, 19 nt, Artificial Sequence
  Description of Artificial Sequence: Synthetic oligonucleotide
  Antisense strand to SEQ ID NO: 2463408
gaugucccagaaagaaugu

SEQ ID NO: 2463410 - RNA, 19 nt, Artificial Sequence
  Description of Artificial Sequence: Synthetic oligonucleotide
  Sense strand starting at position 967 of SEQ ID NO: 1887322
gggaaccaucucggaugua

SEQ ID NO: 2463411 - RNA, 19 nt, Artificial Sequence
  Description of Artificial Sequence: Synthetic oligonucleotide
  Antisense strand to SEQ ID NO: 2463410
uacauccgagaugguuccc

SEQ ID NO: 2463412 - RNA, 19 nt, Artificial Sequence
  Description of Artificial Sequence: Synthetic oligonucleotide
  Sense strand starting at position 1064 of SEQ ID NO: 1887322
ccagguuguguccagggaa

SEQ ID NO: 2463413 - RNA, 19 nt, Artificial Sequence
  Description of Artificial Sequence: Synthetic oligonucleotide
  Antisense strand to SEQ ID NO: 2463412
uucccuggacacaaccugg

SEQ ID NO: 2463414 - RNA, 19 nt, Artificial Sequence
  Description of Artificial Sequence: Synthetic oligonucleotide
  Sense strand starting at position 1120 of SEQ ID NO: 1887322
ccucaaauguuucuggaag

SEQ ID NO: 2463415 - RNA, 19 nt, Artificial Sequence
  Description of Artificial Sequence: Synthetic oligonucleotide
  Antisense strand to SEQ ID NO: 2463414
cuuccagaaacauuugagg

SEQ ID NO: 2463416 - RNA, 19 nt, Artificial Sequence
  Description of Artificial Sequence: Synthetic oligonucleotide
  Sense strand starting at position 1131 of SEQ ID NO: 1887322
ucuggaagucuuuauugca

SEQ ID NO: 2463417 - RNA, 19 nt, Artificial Sequence
  Description of Artificial Sequence: Synthetic oligonucleotide
  Antisense strand to SEQ ID NO: 2463416
ugcaauaaagacuuccaga

SEQ ID NO: 2463418 - RNA, 19 nt, Artificial Sequence
  Description of Artificial Sequence: Synthetic oligonucleotide
  Sense strand starting at position 1296 of SEQ ID NO: 1887322
cucagauaucuuuaugucu

SEQ ID NO: 2463419 - RNA, 19 nt, Artificial Sequence
  Description of Artificial Sequence: Synthetic oligonucleotide
  Antisense strand to SEQ ID NO: 2463418
agacauaaagauaucugag

SEQ ID NO: 2463420 - RNA, 19 nt, Artificial Sequence
  Description of Artificial Sequence: Synthetic oligonucleotide
  Sense strand starting at position 1457 of SEQ ID NO: 1887322
aagggaauuuaaugauguc

SEQ ID NO: 2463421 - RNA, 19 nt, Artificial Sequence
  Description of Artificial Sequence: Synthetic oligonucleotide
  Antisense strand to SEQ ID NO: 2463420
gacaucauuaaauucccuu

SEQ ID NO: 2463422 - RNA, 19 nt, Artificial Sequence
  Description of Artificial Sequence: Synthetic oligonucleotide
  Sense strand starting at position 1513 of SEQ ID NO: 1887322
cuaggcugucuccaaagaa

SEQ ID NO: 2463423 - RNA, 19 nt, Artificial Sequence
  Description of Artificial Sequence: Synthetic oligonucleotide
  Antisense strand to SEQ ID NO: 2463422
uucuuuggagacagccuag

SEQ ID NO: 2463424 - RNA, 19 nt, Artificial Sequence
  Description of Artificial Sequence: Synthetic oligonucleotide
  Sense strand starting at position 1739 of SEQ ID NO: 1887322
uuacaaguaccuugugaag

SEQ ID NO: 2463425 - RNA, 19 nt, Artificial Sequence
  Description of Artificial Sequence: Synthetic oligonucleotide
  Antisense strand to SEQ ID NO: 2463424
cuucacaagguacuuguaa

SEQ ID NO: 2463426 - RNA, 19 nt, Artificial Sequence
  Description of Artificial Sequence: Synthetic oligonucleotide
  Sense strand starting at position 1854 of SEQ ID NO: 1887322
uggauuuguacuugugcca

SEQ ID NO: 2463427 - RNA, 19 nt, Artificial Sequence
  Description of Artificial Sequence: Synthetic oligonucleotide
  Antisense strand to SEQ ID NO: 2463426
uggcacaaguacaaaucca

SEQ ID NO: 2463428 - RNA, 19 nt, Artificial Sequence
  Description of Artificial Sequence: Synthetic oligonucleotide
  Sense strand starting at position 2147 of SEQ ID NO: 1887322
aggaauccaugaguugagu

SEQ ID NO: 2463429 - RNA, 19 nt, Artificial Sequence
  Description of Artificial Sequence: Synthetic oligonucleotide
  Antisense strand to SEQ ID NO: 2463428
acucaacucauggauuccu

SEQ ID NO: 2463430 - RNA, 19 nt, Artificial Sequence
  Description of Artificial Sequence: Synthetic oligonucleotide
  Sense strand starting at position 2295 of SEQ ID NO: 1887322
gggagccuuuaucugaagu

SEQ ID NO: 2463431 - RNA, 19 nt, Artificial Sequence
  Description of Artificial Sequence: Synthetic oligonucleotide
  Antisense strand to SEQ ID NO: 2463430
acuucagauaaaggcuccc

SEQ ID NO: 2463432 - RNA, 19 nt, Artificial Sequence
  Description of Artificial Sequence: Synthetic oligonucleotide
  Sense strand starting at position 2305 of SEQ ID NO: 1887322
aucugaagucauugaacuu

SEQ ID NO: 2463433 - RNA, 19 nt, Artificial Sequence
  Description of Artificial Sequence: Synthetic oligonucleotide
  Antisense strand to SEQ ID NO: 2463432
aaguucaaugacuucagau

SEQ ID NO: 2463434 - RNA, 19 nt, Artificial Sequence
  Description of Artificial Sequence: Synthetic oligonucleotide
  Sense strand starting at position 2550 of SEQ ID NO: 1887322
agagcaaugucagugauca

SEQ ID NO: 2463435 - RNA, 19 nt, Artificial Sequence
  Description of Artificial Sequence: Synthetic oligonucleotide
  Antisense strand to SEQ ID NO: 2463434
ugaucacugacauugcucu

SEQ ID NO: 2463436 - RNA, 19 nt, Artificial Sequence
  Description of Artificial Sequence: Synthetic oligonucleotide
  Sense strand starting at position 2745 of SEQ ID NO: 1887322
ucuuuaaaucacggacauu

SEQ ID NO: 2463437 - RNA, 19 nt, Artificial Sequence
  Description of Artificial Sequence: Synthetic oligonucleotide
  Antisense strand to SEQ ID NO: 2463436
aauguccgugauuuaaaga

SEQ ID NO: 2463438 - RNA, 19 nt, Artificial Sequence
  Description of Artificial Sequence: Synthetic oligonucleotide
  Sense strand starting at position 3207 of SEQ ID NO: 1887322
gguagcagagccuaaugaa

SEQ ID NO: 2463439 - RNA, 19 nt, Artificial Sequence
  Description of Artificial Sequence: Synthetic oligonucleotide
  Antisense strand to SEQ ID NO: 2463438
uucauuaggcucugcuacc

SEQ ID NO: 2463440 - RNA, 19 nt, Artificial Sequence
  Description of Artificial Sequence: Synthetic oligonucleotide
  Sense strand starting at position 3290 of SEQ ID NO: 1887322
aggaccagacuuugcuuaa

SEQ ID NO: 2463441 - RNA, 19 nt, Artificial Sequence
  Description of Artificial Sequence: Synthetic oligonucleotide
  Antisense strand to SEQ ID NO: 2463440
uuaagcaaagucugguccu

SEQ ID NO: 2463442 - RNA, 19 nt, Artificial Sequence
  Description of Artificial Sequence: Synthetic oligonucleotide
  Sense strand starting at position 3592 of SEQ ID NO: 1887322
gauucuaguccugaugcuu

SEQ ID NO: 2463443 - RNA, 19 nt, Artificial Sequence
  Description of Artificial Sequence: Synthetic oligonucleotide
  Antisense strand to SEQ ID NO: 2463442
aagcaucaggacuagaauc

SEQ ID NO: 2463444 - RNA, 19 nt, Artificial Sequence
  Description of Artificial Sequence: Synthetic oligonucleotide
  Sense strand starting at position 3617 of SEQ ID NO: 1887322
ucucuuuaggaugguuuau

SEQ ID NO: 2463445 - RNA, 19 nt, Artificial Sequence
  Description of Artificial Sequence: Synthetic oligonucleotide
  Antisense strand to SEQ ID NO: 2463444
auaaaccauccuaaagaga

SEQ ID NO: 2463446 - RNA, 19 nt, Artificial Sequence
  Description of Artificial Sequence: Synthetic oligonucleotide
  Sense strand starting at position 3619 of SEQ ID NO: 1887322
ucuuuaggaugguuuauua

SEQ ID NO: 2463447 - RNA, 19 nt, Artificial Sequence
  Description of Artificial Sequence: Synthetic oligonucleotide
  Antisense strand to SEQ ID NO: 2463446
uaauaaaccauccuaaaga

SEQ ID NO: 2463448 - RNA, 19 nt, Artificial Sequence
  Description of Artificial Sequence: Synthetic oligonucleotide
  Sense strand starting at position 3739 of SEQ ID NO: 1887322
agucaucgacauuagguau

SEQ ID NO: 2463449 - RNA, 19 nt, Artificial Sequence
  Description of Artificial Sequence: Synthetic oligonucleotide
  Antisense strand to SEQ ID NO: 2463448
auaccuaaugucgaugacu

SEQ ID NO: 2463450 - RNA, 19 nt, Artificial Sequence
  Description of Artificial Sequence: Synthetic oligonucleotide
  Sense strand starting at position 19 of SEQ ID NO: 1887323
gaaugcauaggguguaaga

SEQ ID NO: 2463451 - RNA, 19 nt, Artificial Sequence
  Description of Artificial Sequence: Synthetic oligonucleotide
  Antisense strand to SEQ ID NO: 2463450
ucuuacacccuaugcauuc

SEQ ID NO: 2463452 - RNA, 19 nt, Artificial Sequence
  Description of Artificial Sequence: Synthetic oligonucleotide
  Sense strand starting at position 69 of SEQ ID NO: 1887323
ggaagagcacuccaagcua

SEQ ID NO: 2463453 - RNA, 19 nt, Artificial Sequence
  Description of Artificial Sequence: Synthetic oligonucleotide
  Antisense strand to SEQ ID NO: 2463452
uagcuuggagugcucuucc

SEQ ID NO: 2463454 - RNA, 19 nt, Artificial Sequence
  Description of Artificial Sequence: Synthetic oligonucleotide
  Sense strand starting at position 116 of SEQ ID NO: 1887323
uggugaugucaucaccaag

SEQ ID NO: 2463455 - RNA, 19 nt, Artificial Sequence
  Description of Artificial Sequence: Synthetic oligonucleotide
  Antisense strand to SEQ ID NO: 2463454
cuuggugaugacaucacca

SEQ ID NO: 2463456 - RNA, 19 nt, Artificial Sequence
  Description of Artificial Sequence: Synthetic oligonucleotide
  Sense strand starting at position 284 of SEQ ID NO: 1887323
cggucuacuccagggagaa

SEQ ID NO: 2463457 - RNA, 19 nt, Artificial Sequence
  Description of Artificial Sequence: Synthetic oligonucleotide
  Antisense strand to SEQ ID NO: 2463456
uucucccuggaguagaccg

SEQ ID NO: 2463458 - RNA, 19 nt, Artificial Sequence
  Description of Artificial Sequence: Synthetic oligonucleotide
  Sense strand starting at position 285 of SEQ ID NO: 1887323
ggucuacuccagggagaag

SEQ ID NO: 2463459 - RNA, 19 nt, Artificial Sequence
  Description of Artificial Sequence: Synthetic oligonucleotide
  Antisense strand to SEQ ID NO: 2463458
cuucucccuggaguagacc

SEQ ID NO: 2463460 - RNA, 19 nt, Artificial Sequence
  Description of Artificial Sequence: Synthetic oligonucleotide
  Sense strand starting at position 286 of SEQ ID NO: 1887323
gucuacuccagggagaagu

SEQ ID NO: 2463461 - RNA, 19 nt, Artificial Sequence
  Description of Artificial Sequence: Synthetic oligonucleotide
  Antisense strand to SEQ ID NO: 2463460
acuucucccuggaguagac

SEQ ID NO: 2463462 - RNA, 19 nt, Artificial Sequence
  Description of Artificial Sequence: Synthetic oligonucleotide
  Sense strand starting at position 385 of SEQ ID NO: 1887323
gguacaauccucuggcaaa

SEQ ID NO: 2463463 - RNA, 19 nt, Artificial Sequence
  Description of Artificial Sequence: Synthetic oligonucleotide
  Antisense strand to SEQ ID NO: 2463462
uuugccagaggauuguacc

SEQ ID NO: 2463464 - RNA, 19 nt, Artificial Sequence
  Description of Artificial Sequence: Synthetic oligonucleotide
  Sense strand starting at position 569 of SEQ ID NO: 1887323
acucuuuaucugggugaca

SEQ ID NO: 2463465 - RNA, 19 nt, Artificial Sequence
  Description of Artificial Sequence: Synthetic oligonucleotide
  Antisense strand to SEQ ID NO: 2463464
ugucacccagauaaagagu

SEQ ID NO: 2463466 - RNA, 19 nt, Artificial Sequence
  Description of Artificial Sequence: Synthetic oligonucleotide
  Sense strand starting at position 844 of SEQ ID NO: 1887323
uugcucuuuagugagagaa

SEQ ID NO: 2463467 - RNA, 19 nt, Artificial Sequence
  Description of Artificial Sequence: Synthetic oligonucleotide
  Antisense strand to SEQ ID NO: 2463466
uucucucacuaaagagcaa

SEQ ID NO: 2463468 - RNA, 19 nt, Artificial Sequence
  Description of Artificial Sequence: Synthetic oligonucleotide
  Sense strand starting at position 1095 of SEQ ID NO: 1887323
accauaaagcuauggugau

SEQ ID NO: 2463469 - RNA, 19 nt, Artificial Sequence
  Description of Artificial Sequence: Synthetic oligonucleotide
  Antisense strand to SEQ ID NO: 2463468
aucaccauagcuuuauggu

SEQ ID NO: 2463470 - RNA, 19 nt, Artificial Sequence
  Description of Artificial Sequence: Synthetic oligonucleotide
  Sense strand starting at position 1801 of SEQ ID NO: 1887323
ugcauacauuagucaggau

SEQ ID NO: 2463471 - RNA, 19 nt, Artificial Sequence
  Description of Artificial Sequence: Synthetic oligonucleotide
  Antisense strand to SEQ ID NO: 2463470
auccugacuaauguaugca

SEQ ID NO: 2463472 - RNA, 19 nt, Artificial Sequence
  Description of Artificial Sequence: Synthetic oligonucleotide
  Sense strand starting at position 1836 of SEQ ID NO: 1887323
ggaauuggcccaugugacu

SEQ ID NO: 2463473 - RNA, 19 nt, Artificial Sequence
  Description of Artificial Sequence: Synthetic oligonucleotide
  Antisense strand to SEQ ID NO: 2463472
agucacaugggccaauucc

SEQ ID NO: 2463474 - RNA, 19 nt, Artificial Sequence
  Description of Artificial Sequence: Synthetic oligonucleotide
  Sense strand starting at position 1856 of SEQ ID NO: 1887323
uggagauuggcauguccaa

SEQ ID NO: 2463475 - RNA, 19 nt, Artificial Sequence
  Description of Artificial Sequence: Synthetic oligonucleotide
  Antisense strand to SEQ ID NO: 2463474
uuggacaugccaaucucca

SEQ ID NO: 2463476 - RNA, 19 nt, Artificial Sequence
  Description of Artificial Sequence: Synthetic oligonucleotide
  Sense strand starting at position 1884 of SEQ ID NO: 1887323
guuagagcagcagacuuaa

SEQ ID NO: 2463477 - RNA, 19 nt, Artificial Sequence
  Description of Artificial Sequence: Synthetic oligonucleotide
  Antisense strand to SEQ ID NO: 2463476
uuaagucugcugcucuaac

SEQ ID NO: 2463478 - RNA, 19 nt, Artificial Sequence
  Description of Artificial Sequence: Synthetic oligonucleotide
  Sense strand starting at position 1995 of SEQ ID NO: 1887323
ggcauuuaugccuagugcu

SEQ ID NO: 2463479 - RNA, 19 nt, Artificial Sequence
  Description of Artificial Sequence: Synthetic oligonucleotide
  Antisense strand to SEQ ID NO: 2463478
agcacuaggcauaaaugcc

SEQ ID NO: 2463480 - RNA, 19 nt, Artificial Sequence
  Description of Artificial Sequence: Synthetic oligonucleotide
  Sense strand starting at position 2129 of SEQ ID NO: 1887323
gccuucgacugacuggaua

SEQ ID NO: 2463481 - RNA, 19 nt, Artificial Sequence
  Description of Artificial Sequence: Synthetic oligonucleotide
  Antisense strand to SEQ ID NO: 2463480
uauccagucagucgaaggc

SEQ ID NO: 2463482 - RNA, 19 nt, Artificial Sequence
  Description of Artificial Sequence: Synthetic oligonucleotide
  Sense strand starting at position 2232 of SEQ ID NO: 1887323
cagcaauauccagaugugu

SEQ ID NO: 2463483 - RNA, 19 nt, Artificial Sequence
  Description of Artificial Sequence: Synthetic oligonucleotide
  Antisense strand to SEQ ID NO: 2463482
acacaucuggauauugcug

SEQ ID NO: 2463484 - RNA, 19 nt, Artificial Sequence
  Description of Artificial Sequence: Synthetic oligonucleotide
  Sense strand starting at position 2266 of SEQ ID NO: 1887323
ggugucaugaccuagccaa

SEQ ID NO: 2463485 - RNA, 19 nt, Artificial Sequence
  Description of Artificial Sequence: Synthetic oligonucleotide
  Antisense strand to SEQ ID NO: 2463484
uuggcuaggucaugacacc

SEQ ID NO: 2463486 - RNA, 19 nt, Artificial Sequence
  Description of Artificial Sequence: Synthetic oligonucleotide
  Sense strand starting at position 2391 of SEQ ID NO: 1887323
ugauguuugaaaggaugua

SEQ ID NO: 2463487 - RNA, 19 nt, Artificial Sequence
  Description of Artificial Sequence: Synthetic oligonucleotide
  Antisense strand to SEQ ID NO: 2463486
uacauccuuucaaacauca

SEQ ID NO: 2463488 - RNA, 19 nt, Artificial Sequence
  Description of Artificial Sequence: Synthetic oligonucleotide
  Sense strand starting at position 2527 of SEQ ID NO: 1887323
guuagacaucuugaaaugu

SEQ ID NO: 2463489 - RNA, 19 nt, Artificial Sequence
  Description of Artificial Sequence: Synthetic oligonucleotide
  Antisense strand to SEQ ID NO: 2463488
acauuucaagaugucuaac

SEQ ID NO: 2463490 - RNA, 19 nt, Artificial Sequence
  Description of Artificial Sequence: Synthetic oligonucleotide
  Sense strand starting at position 2586 of SEQ ID NO: 1887323
ggugaagaguuuccauaaa

SEQ ID NO: 2463491 - RNA, 19 nt, Artificial Sequence
  Description of Artificial Sequence: Synthetic oligonucleotide
  Antisense strand to SEQ ID NO: 2463490
uuuauggaaacucuucacc

SEQ ID NO: 2463492 - RNA, 19 nt, Artificial Sequence
  Description of Artificial Sequence: Synthetic oligonucleotide
  Sense strand starting at position 2913 of SEQ ID NO: 1887323
gcuggcuuuguggaauaua

SEQ ID NO: 2463493 - RNA, 19 nt, Artificial Sequence
  Description of Artificial Sequence: Synthetic oligonucleotide
  Antisense strand to SEQ ID NO: 2463492
uauauuccacaaagccagc

SEQ ID NO: 2463494 - RNA, 19 nt, Artificial Sequence
  Description of Artificial Sequence: Synthetic oligonucleotide
  Sense strand starting at position 2916 of SEQ ID NO: 1887323
ggcuuuguggaauauaucu

SEQ ID NO: 2463495 - RNA, 19 nt, Artificial Sequence
  Description of Artificial Sequence: Synthetic oligonucleotide
  Antisense strand to SEQ ID NO: 2463494
agauauauuccacaaagcc

SEQ ID NO: 2463496 - RNA, 19 nt, Artificial Sequence
  Description of Artificial Sequence: Synthetic oligonucleotide
  Sense strand starting at position 2927 of SEQ ID NO: 1887323
auauaucuccaugggcuaa

SEQ ID NO: 2463497 - RNA, 19 nt, Artificial Sequence
  Description of Artificial Sequence: Synthetic oligonucleotide
  Antisense strand to SEQ ID NO: 2463496
uuagcccauggagauauau

SEQ ID NO: 2463498 - RNA, 19 nt, Artificial Sequence
  Description of Artificial Sequence: Synthetic oligonucleotide
  Sense strand starting at position 3002 of SEQ ID NO: 1887323
agcagcucacagcauuaaa

SEQ ID NO: 2463499 - RNA, 19 nt, Artificial Sequence
  Description of Artificial Sequence: Synthetic oligonucleotide
  Antisense strand to SEQ ID NO: 2463498
uuuaaugcugugagcugcu

SEQ ID NO: 2463500 - RNA, 19 nt, Artificial Sequence
  Description of Artificial Sequence: Synthetic oligonucleotide
  Sense strand starting at position 3092 of SEQ ID NO: 1887323
guggguaguaggugacaga

SEQ ID NO: 2463501 - RNA, 19 nt, Artificial Sequence
  Description of Artificial Sequence: Synthetic oligonucleotide
  Antisense strand to SEQ ID NO: 2463500
ucugucaccuacuacccac

SEQ ID NO: 2463502 - RNA, 19 nt, Artificial Sequence
  Description of Artificial Sequence: Synthetic oligonucleotide
  Sense strand starting at position 3093 of SEQ ID NO: 1887323
uggguaguaggugacagau

SEQ ID NO: 2463503 - RNA, 19 nt, Artificial Sequence
  Description of Artificial Sequence: Synthetic oligonucleotide
  Antisense strand to SEQ ID NO: 2463502
aucugucaccuacuaccca

SEQ ID NO: 2463504 - RNA, 19 nt, Artificial Sequence
  Description of Artificial Sequence: Synthetic oligonucleotide
  Sense strand starting at position 3170 of SEQ ID NO: 1887323
aaagucaguguauguauua

SEQ ID NO: 2463505 - RNA, 19 nt, Artificial Sequence
  Description of Artificial Sequence: Synthetic oligonucleotide
  Antisense strand to SEQ ID NO: 2463504
uaauacauacacugacuuu

SEQ ID NO: 2463506 - RNA, 19 nt, Artificial Sequence
  Description of Artificial Sequence: Synthetic oligonucleotide
  Sense strand starting at position 3182 of SEQ ID NO: 1887323
uguauuauggguuacguga

SEQ ID NO: 2463507 - RNA, 19 nt, Artificial Sequence
  Description of Artificial Sequence: Synthetic oligonucleotide
  Antisense strand to SEQ ID NO: 2463506
ucacguaacccauaauaca

SEQ ID NO: 2463508 - RNA, 19 nt, Artificial Sequence
  Description of Artificial Sequence: Synthetic oligonucleotide
  Sense strand starting at position 3549 of SEQ ID NO: 1887323
ucaagauuguuguuccauu

SEQ ID NO: 2463509 - RNA, 19 nt, Artificial Sequence
  Description of Artificial Sequence: Synthetic oligonucleotide
  Antisense strand to SEQ ID NO: 2463508
aauggaacaacaaucuuga

SEQ ID NO: 2463510 - RNA, 19 nt, Artificial Sequence
  Description of Artificial Sequence: Synthetic oligonucleotide
  Sense strand starting at position 3572 of SEQ ID NO: 1887323
ucaugcugcguguuuaagu

SEQ ID NO: 2463511 - RNA, 19 nt, Artificial Sequence
  Description of Artificial Sequence: Synthetic oligonucleotide
  Antisense strand to SEQ ID NO: 2463510
acuuaaacacgcagcauga

SEQ ID NO: 2463512 - RNA, 19 nt, Artificial Sequence
  Description of Artificial Sequence: Synthetic oligonucleotide
  Sense strand starting at position 3579 of SEQ ID NO: 1887323
gcguguuuaagugccugua

SEQ ID NO: 2463513 - RNA, 19 nt, Artificial Sequence
  Description of Artificial Sequence: Synthetic oligonucleotide
  Antisense strand to SEQ ID NO: 2463512
uacaggcacuuaaacacgc

SEQ ID NO: 2463514 - RNA, 19 nt, Artificial Sequence
  Description of Artificial Sequence: Synthetic oligonucleotide
  Sense strand starting at position 3580 of SEQ ID NO: 1887323
cguguuuaagugccuguaa

SEQ ID NO: 2463515 - RNA, 19 nt, Artificial Sequence
  Description of Artificial Sequence: Synthetic oligonucleotide
  Antisense strand to SEQ ID NO: 2463514
uuacaggcacuuaaacacg

SEQ ID NO: 2463516 - RNA, 19 nt, Artificial Sequence
  Description of Artificial Sequence: Synthetic oligonucleotide
  Sense strand starting at position 3691 of SEQ ID NO: 1887323
guuuguacuugaccaggga

SEQ ID NO: 2463517 - RNA, 19 nt, Artificial Sequence
  Description of Artificial Sequence: Synthetic oligonucleotide
  Antisense strand to SEQ ID NO: 2463516
ucccuggucaaguacaaac

SEQ ID NO: 2463518 - RNA, 19 nt, Artificial Sequence
  Description of Artificial Sequence: Synthetic oligonucleotide
  Sense strand starting at position 3818 of SEQ ID NO: 1887323
ccaaauuauguuggagcau

SEQ ID NO: 2463519 - RNA, 19 nt, Artificial Sequence
  Description of Artificial Sequence: Synthetic oligonucleotide
  Antisense strand to SEQ ID NO: 2463518
augcuccaacauaauuugg

SEQ ID NO: 2463520 - RNA, 19 nt, Artificial Sequence
  Description of Artificial Sequence: Synthetic oligonucleotide
  Sense strand starting at position 3824 of SEQ ID NO: 1887323
uauguuggagcauaauuaa

SEQ ID NO: 2463521 - RNA, 19 nt, Artificial Sequence
  Description of Artificial Sequence: Synthetic oligonucleotide
  Antisense strand to SEQ ID NO: 2463520
uuaauuaugcuccaacaua

SEQ ID NO: 2463522 - RNA, 19 nt, Artificial Sequence
  Description of Artificial Sequence: Synthetic oligonucleotide
  Sense strand starting at position 3827 of SEQ ID NO: 1887323
guuggagcauaauuaaaga

SEQ ID NO: 2463523 - RNA, 19 nt, Artificial Sequence
  Description of Artificial Sequence: Synthetic oligonucleotide
  Antisense strand to SEQ ID NO: 2463522
ucuuuaauuaugcuccaac

SEQ ID NO: 2463524 - RNA, 19 nt, Artificial Sequence
  Description of Artificial Sequence: Synthetic oligonucleotide
  Sense strand starting at position 3869 of SEQ ID NO: 1887323
uaagaaacguaguuacaac

SEQ ID NO: 2463525 - RNA, 19 nt, Artificial Sequence
  Description of Artificial Sequence: Synthetic oligonucleotide
  Antisense strand to SEQ ID NO: 2463524
guuguaacuacguuucuua

SEQ ID NO: 2463526 - RNA, 19 nt, Artificial Sequence
  Description of Artificial Sequence: Synthetic oligonucleotide
  Sense strand starting at position 3916 of SEQ ID NO: 1887323
gaaagaaauguacguguau

SEQ ID NO: 2463527 - RNA, 19 nt, Artificial Sequence
  Description of Artificial Sequence: Synthetic oligonucleotide
  Antisense strand to SEQ ID NO: 2463526
auacacguacauuucuuuc

SEQ ID NO: 2463528 - RNA, 19 nt, Artificial Sequence
  Description of Artificial Sequence: Synthetic oligonucleotide
  Sense strand starting at position 3917 of SEQ ID NO: 1887323
aaagaaauguacguguauu

SEQ ID NO: 2463529 - RNA, 19 nt, Artificial Sequence
  Description of Artificial Sequence: Synthetic oligonucleotide
  Antisense strand to SEQ ID NO: 2463528
aauacacguacauuucuuu

SEQ ID NO: 2463530 - RNA, 19 nt, Artificial Sequence
  Description of Artificial Sequence: Synthetic oligonucleotide
  Sense strand starting at position 64 of SEQ ID NO: 1887324
aaauuauacugacucggua

SEQ ID NO: 2463531 - RNA, 19 nt, Artificial Sequence
  Description of Artificial Sequence: Synthetic oligonucleotide
  Antisense strand to SEQ ID NO: 2463530
uaccgagucaguauaauuu

SEQ ID NO: 2463532 - RNA, 19 nt, Artificial Sequence
  Description of Artificial Sequence: Synthetic oligonucleotide
  Sense strand starting at position 66 of SEQ ID NO: 1887324
auuauacugacucgguaga

SEQ ID NO: 2463533 - RNA, 19 nt, Artificial Sequence
  Description of Artificial Sequence: Synthetic oligonucleotide
  Antisense strand to SEQ ID NO: 2463532
ucuaccgagucaguauaau

SEQ ID NO: 2463534 - RNA, 19 nt, Artificial Sequence
  Description of Artificial Sequence: Synthetic oligonucleotide
  Sense strand starting at position 67 of SEQ ID NO: 1887324
uuauacugacucgguagau

SEQ ID NO: 2463535 - RNA, 19 nt, Artificial Sequence
  Description of Artificial Sequence: Synthetic oligonucleotide
  Antisense strand to SEQ ID NO: 2463534
aucuaccgagucaguauaa

SEQ ID NO: 2463536 - RNA, 19 nt, Artificial Sequence
  Description of Artificial Sequence: Synthetic oligonucleotide
  Sense strand starting at position 68 of SEQ ID NO: 1887324
uauacugacucgguagaug

SEQ ID NO: 2463537 - RNA, 19 nt, Artificial Sequence
  Description of Artificial Sequence: Synthetic oligonucleotide
  Antisense strand to SEQ ID NO: 2463536
caucuaccgagucaguaua

SEQ ID NO: 2463538 - RNA, 19 nt, Artificial Sequence
  Description of Artificial Sequence: Synthetic oligonucleotide
  Sense strand starting at position 149 of SEQ ID NO: 1887324
aacgucuagcuauaaagga

SEQ ID NO: 2463539 - RNA, 19 nt, Artificial Sequence
  Description of Artificial Sequence: Synthetic oligonucleotide
  Antisense strand to SEQ ID NO: 2463538
uccuuuauagcuagacguu

SEQ ID NO: 2463540 - RNA, 19 nt, Artificial Sequence
  Description of Artificial Sequence: Synthetic oligonucleotide
  Sense strand starting at position 357 of SEQ ID NO: 1887324
ugaaucagucagcacuaga

SEQ ID NO: 2463541 - RNA, 19 nt, Artificial Sequence
  Description of Artificial Sequence: Synthetic oligonucleotide
  Antisense strand to SEQ ID NO: 2463540
ucuagugcugacugauuca

SEQ ID NO: 2463542 - RNA, 19 nt, Artificial Sequence
  Description of Artificial Sequence: Synthetic oligonucleotide
  Sense strand starting at position 460 of SEQ ID NO: 1887324
uuugguuaaauugggaagu

SEQ ID NO: 2463543 - RNA, 19 nt, Artificial Sequence
  Description of Artificial Sequence: Synthetic oligonucleotide
  Antisense strand to SEQ ID NO: 2463542
acuucccaauuuaaccaaa

SEQ ID NO: 2463544 - RNA, 19 nt, Artificial Sequence
  Description of Artificial Sequence: Synthetic oligonucleotide
  Sense strand starting at position 484 of SEQ ID NO: 1887324
gugagaaguugguugacag

SEQ ID NO: 2463545 - RNA, 19 nt, Artificial Sequence
  Description of Artificial Sequence: Synthetic oligonucleotide
  Antisense strand to SEQ ID NO: 2463544
cugucaaccaacuucucac

SEQ ID NO: 2463546 - RNA, 19 nt, Artificial Sequence
  Description of Artificial Sequence: Synthetic oligonucleotide
  Sense strand starting at position 485 of SEQ ID NO: 1887324
ugagaaguugguugacagu

SEQ ID NO: 2463547 - RNA, 19 nt, Artificial Sequence
  Description of Artificial Sequence: Synthetic oligonucleotide
  Antisense strand to SEQ ID NO: 2463546
acugucaaccaacuucuca

SEQ ID NO: 2463548 - RNA, 19 nt, Artificial Sequence
  Description of Artificial Sequence: Synthetic oligonucleotide
  Sense strand starting at position 649 of SEQ ID NO: 1887324
guaugaauuuguucuuccu

SEQ ID NO: 2463549 - RNA, 19 nt, Artificial Sequence
  Description of Artificial Sequence: Synthetic oligonucleotide
  Antisense strand to SEQ ID NO: 2463548
aggaagaacaaauucauac

SEQ ID NO: 2463550 - RNA, 19 nt, Artificial Sequence
  Description of Artificial Sequence: Synthetic oligonucleotide
  Sense strand starting at position 890 of SEQ ID NO: 1887324
caaauuacguucuuugaag

SEQ ID NO: 2463551 - RNA, 19 nt, Artificial Sequence
  Description of Artificial Sequence: Synthetic oligonucleotide
  Antisense strand to SEQ ID NO: 2463550
cuucaaagaacguaauuug

SEQ ID NO: 2463552 - RNA, 19 nt, Artificial Sequence
  Description of Artificial Sequence: Synthetic oligonucleotide
  Sense strand starting at position 891 of SEQ ID NO: 1887324
aaauuacguucuuugaagu

SEQ ID NO: 2463553 - RNA, 19 nt, Artificial Sequence
  Description of Artificial Sequence: Synthetic oligonucleotide
  Antisense strand to SEQ ID NO: 2463552
acuucaaagaacguaauuu

SEQ ID NO: 2463554 - RNA, 19 nt, Artificial Sequence
  Description of Artificial Sequence: Synthetic oligonucleotide
  Sense strand starting at position 892 of SEQ ID NO: 1887324
aauuacguucuuugaagua

SEQ ID NO: 2463555 - RNA, 19 nt, Artificial Sequence
  Description of Artificial Sequence: Synthetic oligonucleotide
  Antisense strand to SEQ ID NO: 2463554
uacuucaaagaacguaauu

SEQ ID NO: 2463556 - RNA, 19 nt, Artificial Sequence
  Description of Artificial Sequence: Synthetic oligonucleotide
  Sense strand starting at position 897 of SEQ ID NO: 1887324
cguucuuugaaguaaguau

SEQ ID NO: 2463557 - RNA, 19 nt, Artificial Sequence
  Description of Artificial Sequence: Synthetic oligonucleotide
  Antisense strand to SEQ ID NO: 2463556
auacuuacuucaaagaacg

SEQ ID NO: 2463558 - RNA, 19 nt, Artificial Sequence
  Description of Artificial Sequence: Synthetic oligonucleotide
  Sense strand starting at position 1061 of SEQ ID NO: 1887324
gacccagaagccugaaagu

SEQ ID NO: 2463559 - RNA, 19 nt, Artificial Sequence
  Description of Artificial Sequence: Synthetic oligonucleotide
  Antisense strand to SEQ ID NO: 2463558
acuuucaggcuucuggguc

SEQ ID NO: 2463560 - RNA, 19 nt, Artificial Sequence
  Description of Artificial Sequence: Synthetic oligonucleotide
  Sense strand starting at position 1186 of SEQ ID NO: 1887324
acuuguuaagaaugguuga

SEQ ID NO: 2463561 - RNA, 19 nt, Artificial Sequence
  Description of Artificial Sequence: Synthetic oligonucleotide
  Antisense strand to SEQ ID NO: 2463560
ucaaccauucuuaacaagu

SEQ ID NO: 2463562 - RNA, 19 nt, Artificial Sequence
  Description of Artificial Sequence: Synthetic oligonucleotide
  Sense strand starting at position 1189 of SEQ ID NO: 1887324
uguuaagaaugguugagcu

SEQ ID NO: 2463563 - RNA, 19 nt, Artificial Sequence
  Description of Artificial Sequence: Synthetic oligonucleotide
  Antisense strand to SEQ ID NO: 2463562
agcucaaccauucuuaaca

SEQ ID NO: 2463564 - RNA, 19 nt, Artificial Sequence
  Description of Artificial Sequence: Synthetic oligonucleotide
  Sense strand starting at position 1305 of SEQ ID NO: 1887324
aguuuaagcucaucuugga

SEQ ID NO: 2463565 - RNA, 19 nt, Artificial Sequence
  Description of Artificial Sequence: Synthetic oligonucleotide
  Antisense strand to SEQ ID NO: 2463564
uccaagaugagcuuaaacu

SEQ ID NO: 2463566 - RNA, 19 nt, Artificial Sequence
  Description of Artificial Sequence: Synthetic oligonucleotide
  Sense strand starting at position 1442 of SEQ ID NO: 1887324
uggauaauuugcgcuguga

SEQ ID NO: 2463567 - RNA, 19 nt, Artificial Sequence
  Description of Artificial Sequence: Synthetic oligonucleotide
  Antisense strand to SEQ ID NO: 2463566
ucacagcgcaaauuaucca

SEQ ID NO: 2463568 - RNA, 19 nt, Artificial Sequence
  Description of Artificial Sequence: Synthetic oligonucleotide
  Sense strand starting at position 1444 of SEQ ID NO: 1887324
gauaauuugcgcugugagg

SEQ ID NO: 2463569 - RNA, 19 nt, Artificial Sequence
  Description of Artificial Sequence: Synthetic oligonucleotide
  Antisense strand to SEQ ID NO: 2463568
ccucacagcgcaaauuauc

SEQ ID NO: 2463570 - RNA, 19 nt, Artificial Sequence
  Description of Artificial Sequence: Synthetic oligonucleotide
  Sense strand starting at position 1590 of SEQ ID NO: 1887324
gucagaaauugccuucuug

SEQ ID NO: 2463571 - RNA, 19 nt, Artificial Sequence
  Description of Artificial Sequence: Synthetic oligonucleotide
  Antisense strand to SEQ ID NO: 2463570
caagaaggcaauuucugac

SEQ ID NO: 2463572 - RNA, 19 nt, Artificial Sequence
  Description of Artificial Sequence: Synthetic oligonucleotide
  Sense strand starting at position 1662 of SEQ ID NO: 1887324
acauuaaggcuaggaugua

SEQ ID NO: 2463573 - RNA, 19 nt, Artificial Sequence
  Description of Artificial Sequence: Synthetic oligonucleotide
  Antisense strand to SEQ ID NO: 2463572
uacauccuagccuuaaugu

SEQ ID NO: 2463574 - RNA, 19 nt, Artificial Sequence
  Description of Artificial Sequence: Synthetic oligonucleotide
  Sense strand starting at position 3067 of SEQ ID NO: 1887324
uacaguagugcuuggaaga

SEQ ID NO: 2463575 - RNA, 19 nt, Artificial Sequence
  Description of Artificial Sequence: Synthetic oligonucleotide
  Antisense strand to SEQ ID NO: 2463574
ucuuccaagcacuacugua

SEQ ID NO: 2463576 - RNA, 19 nt, Artificial Sequence
  Description of Artificial Sequence: Synthetic oligonucleotide
  Sense strand starting at position 3068 of SEQ ID NO: 1887324
acaguagugcuuggaagaa

SEQ ID NO: 2463577 - RNA, 19 nt, Artificial Sequence
  Description of Artificial Sequence: Synthetic oligonucleotide
  Antisense strand to SEQ ID NO: 2463576
uucuuccaagcacuacugu

SEQ ID NO: 2463578 - RNA, 19 nt, Artificial Sequence
  Description of Artificial Sequence: Synthetic oligonucleotide
  Sense strand starting at position 3128 of SEQ ID NO: 1887324
cguucugagaaagaauucu

SEQ ID NO: 2463579 - RNA, 19 nt, Artificial Sequence
  Description of Artificial Sequence: Synthetic oligonucleotide
  Antisense strand to SEQ ID NO: 2463578
agaauucuuucucagaacg

SEQ ID NO: 2463580 - RNA, 19 nt, Artificial Sequence
  Description of Artificial Sequence: Synthetic oligonucleotide
  Sense strand starting at position 3153 of SEQ ID NO: 1887324
agauucuaaugucugguaa

SEQ ID NO: 2463581 - RNA, 19 nt, Artificial Sequence
  Description of Artificial Sequence: Synthetic oligonucleotide
  Antisense strand to SEQ ID NO: 2463580
uuaccagacauuagaaucu

SEQ ID NO: 2463582 - RNA, 19 nt, Artificial Sequence
  Description of Artificial Sequence: Synthetic oligonucleotide
  Sense strand starting at position 3154 of SEQ ID NO: 1887324
gauucuaaugucugguaaa

SEQ ID NO: 2463583 - RNA, 19 nt, Artificial Sequence
  Description of Artificial Sequence: Synthetic oligonucleotide
  Antisense strand to SEQ ID NO: 2463582
uuuaccagacauuagaauc

SEQ ID NO: 2463584 - RNA, 19 nt, Artificial Sequence
  Description of Artificial Sequence: Synthetic oligonucleotide
  Sense strand starting at position 3172 of SEQ ID NO: 1887324
aaugcuuuacaguguaaag

SEQ ID NO: 2463585 - RNA, 19 nt, Artificial Sequence
  Description of Artificial Sequence: Synthetic oligonucleotide
  Antisense strand to SEQ ID NO: 2463584
cuuuacacuguaaagcauu

SEQ ID NO: 2463586 - RNA, 19 nt, Artificial Sequence
  Description of Artificial Sequence: Synthetic oligonucleotide
  Sense strand starting at position 3174 of SEQ ID NO: 1887324
ugcuuuacaguguaaagaa

SEQ ID NO: 2463587 - RNA, 19 nt, Artificial Sequence
  Description of Artificial Sequence: Synthetic oligonucleotide
  Antisense strand to SEQ ID NO: 2463586
uucuuuacacuguaaagca

SEQ ID NO: 2463588 - RNA, 19 nt, Artificial Sequence
  Description of Artificial Sequence: Synthetic oligonucleotide
  Sense strand starting at position 3181 of SEQ ID NO: 1887324
caguguaaagaaugcauau

SEQ ID NO: 2463589 - RNA, 19 nt, Artificial Sequence
  Description of Artificial Sequence: Synthetic oligonucleotide
  Antisense strand to SEQ ID NO: 2463588
auaugcauucuuuacacug

SEQ ID NO: 2463590 - RNA, 19 nt, Artificial Sequence
  Description of Artificial Sequence: Synthetic oligonucleotide
  Sense strand starting at position 3397 of SEQ ID NO: 1887324
uuggcauuauucucuugga

SEQ ID NO: 2463591 - RNA, 19 nt, Artificial Sequence
  Description of Artificial Sequence: Synthetic oligonucleotide
  Antisense strand to SEQ ID NO: 2463590
uccaagagaauaaugccaa

SEQ ID NO: 2463592 - RNA, 19 nt, Artificial Sequence
  Description of Artificial Sequence: Synthetic oligonucleotide
  Sense strand starting at position 3479 of SEQ ID NO: 1887324
uuucucagguaauuagaga

SEQ ID NO: 2463593 - RNA, 19 nt, Artificial Sequence
  Description of Artificial Sequence: Synthetic oligonucleotide
  Antisense strand to SEQ ID NO: 2463592
ucucuaauuaccugagaaa

SEQ ID NO: 2463594 - RNA, 19 nt, Artificial Sequence
  Description of Artificial Sequence: Synthetic oligonucleotide
  Sense strand starting at position 3648 of SEQ ID NO: 1887324
auggguuugucauucugau

SEQ ID NO: 2463595 - RNA, 19 nt, Artificial Sequence
  Description of Artificial Sequence: Synthetic oligonucleotide
  Antisense strand to SEQ ID NO: 2463594
aucagaaugacaaacccau

SEQ ID NO: 2463596 - RNA, 19 nt, Artificial Sequence
  Description of Artificial Sequence: Synthetic oligonucleotide
  Sense strand starting at position 3655 of SEQ ID NO: 1887324
ugucauucugaugaucaau

SEQ ID NO: 2463597 - RNA, 19 nt, Artificial Sequence
  Description of Artificial Sequence: Synthetic oligonucleotide
  Antisense strand to SEQ ID NO: 2463596
auugaucaucagaaugaca

SEQ ID NO: 2463598 - RNA, 19 nt, Artificial Sequence
  Description of Artificial Sequence: Synthetic oligonucleotide
  Sense strand starting at position 3666 of SEQ ID NO: 1887324
ugaucaauaucgucccacu

SEQ ID NO: 2463599 - RNA, 19 nt, Artificial Sequence
  Description of Artificial Sequence: Synthetic oligonucleotide
  Antisense strand to SEQ ID NO: 2463598
agugggacgauauugauca

SEQ ID NO: 2463600 - RNA, 19 nt, Artificial Sequence
  Description of Artificial Sequence: Synthetic oligonucleotide
  Sense strand starting at position 3696 of SEQ ID NO: 1887324
uugaauuccuaguuaggaa

SEQ ID NO: 2463601 - RNA, 19 nt, Artificial Sequence
  Description of Artificial Sequence: Synthetic oligonucleotide
  Antisense strand to SEQ ID NO: 2463600
uuccuaacuaggaauucaa

SEQ ID NO: 2463602 - RNA, 19 nt, Artificial Sequence
  Description of Artificial Sequence: Synthetic oligonucleotide
  Sense strand starting at position 3710 of SEQ ID NO: 1887324
aggaaucuuuauguuaaga

SEQ ID NO: 2463603 - RNA, 19 nt, Artificial Sequence
  Description of Artificial Sequence: Synthetic oligonucleotide
  Antisense strand to SEQ ID NO: 2463602
ucuuaacauaaagauuccu

SEQ ID NO: 2463604 - RNA, 19 nt, Artificial Sequence
  Description of Artificial Sequence: Synthetic oligonucleotide
  Sense strand starting at position 3752 of SEQ ID NO: 1887324
uggacaguuuaucuaccua

SEQ ID NO: 2463605 - RNA, 19 nt, Artificial Sequence
  Description of Artificial Sequence: Synthetic oligonucleotide
  Antisense strand to SEQ ID NO: 2463604
uagguagauaaacugucca

SEQ ID NO: 2463606 - RNA, 19 nt, Artificial Sequence
  Description of Artificial Sequence: Synthetic oligonucleotide
  Sense strand starting at position 3876 of SEQ ID NO: 1887324
uuaacuuggccucauauga

SEQ ID NO: 2463607 - RNA, 19 nt, Artificial Sequence
  Description of Artificial Sequence: Synthetic oligonucleotide
  Antisense strand to SEQ ID NO: 2463606
ucauaugaggccaaguuaa

SEQ ID NO: 2463608 - RNA, 19 nt, Artificial Sequence
  Description of Artificial Sequence: Synthetic oligonucleotide
  Sense strand starting at position 3919 of SEQ ID NO: 1887324
uugagucuugaucguauuu

SEQ ID NO: 2463609 - RNA, 19 nt, Artificial Sequence
  Description of Artificial Sequence: Synthetic oligonucleotide
  Antisense strand to SEQ ID NO: 2463608
aaauacgaucaagacucaa

SEQ ID NO: 2463610 - RNA, 19 nt, Artificial Sequence
  Description of Artificial Sequence: Synthetic oligonucleotide
  Sense strand starting at position 29 of SEQ ID NO: 1887325
ucuugugagguuuacugaa

SEQ ID NO: 2463611 - RNA, 19 nt, Artificial Sequence
  Description of Artificial Sequence: Synthetic oligonucleotide
  Antisense strand to SEQ ID NO: 2463610
uucaguaaaccucacaaga

SEQ ID NO: 2463612 - RNA, 19 nt, Artificial Sequence
  Description of Artificial Sequence: Synthetic oligonucleotide
  Sense strand starting at position 121 of SEQ ID NO: 1887325
uugaaacugucaguaaaua

SEQ ID NO: 2463613 - RNA, 19 nt, Artificial Sequence
  Description of Artificial Sequence: Synthetic oligonucleotide
  Antisense strand to SEQ ID NO: 2463612
uauuuacugacaguuucaa

SEQ ID NO: 2463614 - RNA, 19 nt, Artificial Sequence
  Description of Artificial Sequence: Synthetic oligonucleotide
  Sense strand starting at position 218 of SEQ ID NO: 1887325
uuguaauacuaacuggcaa

SEQ ID NO: 2463615 - RNA, 19 nt, Artificial Sequence
  Description of Artificial Sequence: Synthetic oligonucleotide
  Antisense strand to SEQ ID NO: 2463614
uugccaguuaguauuacaa

SEQ ID NO: 2463616 - RNA, 19 nt, Artificial Sequence
  Description of Artificial Sequence: Synthetic oligonucleotide
  Sense strand starting at position 306 of SEQ ID NO: 1887325
uagauaaacuguccacgaa

SEQ ID NO: 2463617 - RNA, 19 nt, Artificial Sequence
  Description of Artificial Sequence: Synthetic oligonucleotide
  Antisense strand to SEQ ID NO: 2463616
uucguggacaguuuaucua

SEQ ID NO: 2463618 - RNA, 19 nt, Artificial Sequence
  Description of Artificial Sequence: Synthetic oligonucleotide
  Sense strand starting at position 309 of SEQ ID NO: 1887325
auaaacuguccacgaagga

SEQ ID NO: 2463619 - RNA, 19 nt, Artificial Sequence
  Description of Artificial Sequence: Synthetic oligonucleotide
  Antisense strand to SEQ ID NO: 2463618
uccuucguggacaguuuau

SEQ ID NO: 2463620 - RNA, 19 nt, Artificial Sequence
  Description of Artificial Sequence: Synthetic oligonucleotide
  Sense strand starting at position 330 of SEQ ID NO: 1887325
gagugaucaguuuaucuua

SEQ ID NO: 2463621 - RNA, 19 nt, Artificial Sequence
  Description of Artificial Sequence: Synthetic oligonucleotide
  Antisense strand to SEQ ID NO: 2463620
uaagauaaacugaucacuc

SEQ ID NO: 2463622 - RNA, 19 nt, Artificial Sequence
  Description of Artificial Sequence: Synthetic oligonucleotide
  Sense strand starting at position 332 of SEQ ID NO: 1887325
gugaucaguuuaucuuaac

SEQ ID NO: 2463623 - RNA, 19 nt, Artificial Sequence
  Description of Artificial Sequence: Synthetic oligonucleotide
  Antisense strand to SEQ ID NO: 2463622
guuaagauaaacugaucac

SEQ ID NO: 2463624 - RNA, 19 nt, Artificial Sequence
  Description of Artificial Sequence: Synthetic oligonucleotide
  Sense strand starting at position 383 of SEQ ID NO: 1887325
acuucagugggacgauauu

SEQ ID NO: 2463625 - RNA, 19 nt, Artificial Sequence
  Description of Artificial Sequence: Synthetic oligonucleotide
  Antisense strand to SEQ ID NO: 2463624
aauaucgucccacugaagu

SEQ ID NO: 2463626 - RNA, 19 nt, Artificial Sequence
  Description of Artificial Sequence: Synthetic oligonucleotide
  Sense strand starting at position 392 of SEQ ID NO: 1887325
ggacgauauugaucaucag

SEQ ID NO: 2463627 - RNA, 19 nt, Artificial Sequence
  Description of Artificial Sequence: Synthetic oligonucleotide
  Antisense strand to SEQ ID NO: 2463626
cugaugaucaauaucgucc

SEQ ID NO: 2463628 - RNA, 19 nt, Artificial Sequence
  Description of Artificial Sequence: Synthetic oligonucleotide
  Sense strand starting at position 395 of SEQ ID NO: 1887325
cgauauugaucaucagaau

SEQ ID NO: 2463629 - RNA, 19 nt, Artificial Sequence
  Description of Artificial Sequence: Synthetic oligonucleotide
  Antisense strand to SEQ ID NO: 2463628
auucugaugaucaauaucg

SEQ ID NO: 2463630 - RNA, 19 nt, Artificial Sequence
  Description of Artificial Sequence: Synthetic oligonucleotide
  Sense strand starting at position 573 of SEQ ID NO: 1887325
agucucuaauuaccugaga

SEQ ID NO: 2463631 - RNA, 19 nt, Artificial Sequence
  Description of Artificial Sequence: Synthetic oligonucleotide
  Antisense strand to SEQ ID NO: 2463630
ucucagguaauuagagacu

SEQ ID NO: 2463632 - RNA, 19 nt, Artificial Sequence
  Description of Artificial Sequence: Synthetic oligonucleotide
  Sense strand starting at position 574 of SEQ ID NO: 1887325
gucucuaauuaccugagaa

SEQ ID NO: 2463633 - RNA, 19 nt, Artificial Sequence
  Description of Artificial Sequence: Synthetic oligonucleotide
  Antisense strand to SEQ ID NO: 2463632
uucucagguaauuagagac

SEQ ID NO: 2463634 - RNA, 19 nt, Artificial Sequence
  Description of Artificial Sequence: Synthetic oligonucleotide
  Sense strand starting at position 685 of SEQ ID NO: 1887325
gcucaaagacugcaccauu

SEQ ID NO: 2463635 - RNA, 19 nt, Artificial Sequence
  Description of Artificial Sequence: Synthetic oligonucleotide
  Antisense strand to SEQ ID NO: 2463634
aauggugcagucuuugagc

SEQ ID NO: 2463636 - RNA, 19 nt, Artificial Sequence
  Description of Artificial Sequence: Synthetic oligonucleotide
  Sense strand starting at position 944 of SEQ ID NO: 1887325
guaaguguucuugaagaca

SEQ ID NO: 2463637 - RNA, 19 nt, Artificial Sequence
  Description of Artificial Sequence: Synthetic oligonucleotide
  Antisense strand to SEQ ID NO: 2463636
ugucuucaagaacacuuac

SEQ ID NO: 2463638 - RNA, 19 nt, Artificial Sequence
  Description of Artificial Sequence: Synthetic oligonucleotide
  Sense strand starting at position 947 of SEQ ID NO: 1887325
aguguucuugaagacauau

SEQ ID NO: 2463639 - RNA, 19 nt, Artificial Sequence
  Description of Artificial Sequence: Synthetic oligonucleotide
  Antisense strand to SEQ ID NO: 2463638
auaugucuucaagaacacu

SEQ ID NO: 2463640 - RNA, 19 nt, Artificial Sequence
  Description of Artificial Sequence: Synthetic oligonucleotide
  Sense strand starting at position 1006 of SEQ ID NO: 1887325
cuaggcauacgguaaagau

SEQ ID NO: 2463641 - RNA, 19 nt, Artificial Sequence
  Description of Artificial Sequence: Synthetic oligonucleotide
  Antisense strand to SEQ ID NO: 2463640
aucuuuaccguaugccuag

SEQ ID NO: 2463642 - RNA, 19 nt, Artificial Sequence
  Description of Artificial Sequence: Synthetic oligonucleotide
  Sense strand starting at position 2452 of SEQ ID NO: 1887325
gucucauagcuacaagaag

SEQ ID NO: 2463643 - RNA, 19 nt, Artificial Sequence
  Description of Artificial Sequence: Synthetic oligonucleotide
  Antisense strand to SEQ ID NO: 2463642
cuucuuguagcuaugagac

SEQ ID NO: 2463644 - RNA, 19 nt, Artificial Sequence
  Description of Artificial Sequence: Synthetic oligonucleotide
  Sense strand starting at position 2468 of SEQ ID NO: 1887325
aaggcaauuucugacgaag

SEQ ID NO: 2463645 - RNA, 19 nt, Artificial Sequence
  Description of Artificial Sequence: Synthetic oligonucleotide
  Antisense strand to SEQ ID NO: 2463644
cuucgucagaaauugccuu

SEQ ID NO: 2463646 - RNA, 19 nt, Artificial Sequence
  Description of Artificial Sequence: Synthetic oligonucleotide
  Sense strand starting at position 2737 of SEQ ID NO: 1887325
agugucagguccuccaaga

SEQ ID NO: 2463647 - RNA, 19 nt, Artificial Sequence
  Description of Artificial Sequence: Synthetic oligonucleotide
  Antisense strand to SEQ ID NO: 2463646
ucuuggaggaccugacacu

SEQ ID NO: 2463648 - RNA, 19 nt, Artificial Sequence
  Description of Artificial Sequence: Synthetic oligonucleotide
  Sense strand starting at position 2747 of SEQ ID NO: 1887325
ccuccaagaugagcuuaaa

SEQ ID NO: 2463649 - RNA, 19 nt, Artificial Sequence
  Description of Artificial Sequence: Synthetic oligonucleotide
  Antisense strand to SEQ ID NO: 2463648
uuuaagcucaucuuggagg

SEQ ID NO: 2463650 - RNA, 19 nt, Artificial Sequence
  Description of Artificial Sequence: Synthetic oligonucleotide
  Sense strand starting at position 2926 of SEQ ID NO: 1887325
ccagcaauguaagugauga

SEQ ID NO: 2463651 - RNA, 19 nt, Artificial Sequence
  Description of Artificial Sequence: Synthetic oligonucleotide
  Antisense strand to SEQ ID NO: 2463650
ucaucacuuacauugcugg

SEQ ID NO: 2463652 - RNA, 19 nt, Artificial Sequence
  Description of Artificial Sequence: Synthetic oligonucleotide
  Sense strand starting at position 2971 of SEQ ID NO: 1887325
uggacaaagucggucaaga

SEQ ID NO: 2463653 - RNA, 19 nt, Artificial Sequence
  Description of Artificial Sequence: Synthetic oligonucleotide
  Antisense strand to SEQ ID NO: 2463652
ucuugaccgacuuugucca

SEQ ID NO: 2463654 - RNA, 19 nt, Artificial Sequence
  Description of Artificial Sequence: Synthetic oligonucleotide
  Sense strand starting at position 3020 of SEQ ID NO: 1887325
uuugucucccuguauccaa

SEQ ID NO: 2463655 - RNA, 19 nt, Artificial Sequence
  Description of Artificial Sequence: Synthetic oligonucleotide
  Antisense strand to SEQ ID NO: 2463654
uuggauacagggagacaaa

SEQ ID NO: 2463656 - RNA, 19 nt, Artificial Sequence
  Description of Artificial Sequence: Synthetic oligonucleotide
  Sense strand starting at position 3080 of SEQ ID NO: 1887325
cgaaauaccaaccgugaaa

SEQ ID NO: 2463657 - RNA, 19 nt, Artificial Sequence
  Description of Artificial Sequence: Synthetic oligonucleotide
  Antisense strand to SEQ ID NO: 2463656
uuucacgguugguauuucg

SEQ ID NO: 2463658 - RNA, 19 nt, Artificial Sequence
  Description of Artificial Sequence: Synthetic oligonucleotide
  Sense strand starting at position 3116 of SEQ ID NO: 1887325
ggaggugauauugaugugu

SEQ ID NO: 2463659 - RNA, 19 nt, Artificial Sequence
  Description of Artificial Sequence: Synthetic oligonucleotide
  Antisense strand to SEQ ID NO: 2463658
acacaucaauaucaccucc

SEQ ID NO: 2463660 - RNA, 19 nt, Artificial Sequence
  Description of Artificial Sequence: Synthetic oligonucleotide
  Sense strand starting at position 3121 of SEQ ID NO: 1887325
ugauauugauguguauagu

SEQ ID NO: 2463661 - RNA, 19 nt, Artificial Sequence
  Description of Artificial Sequence: Synthetic oligonucleotide
  Antisense strand to SEQ ID NO: 2463660
acuauacacaucaauauca

SEQ ID NO: 2463662 - RNA, 19 nt, Artificial Sequence
  Description of Artificial Sequence: Synthetic oligonucleotide
  Sense strand starting at position 3127 of SEQ ID NO: 1887325
ugauguguauaguuuagga

SEQ ID NO: 2463663 - RNA, 19 nt, Artificial Sequence
  Description of Artificial Sequence: Synthetic oligonucleotide
  Antisense strand to SEQ ID NO: 2463662
uccuaaacuauacacauca

SEQ ID NO: 2463664 - RNA, 19 nt, Artificial Sequence
  Description of Artificial Sequence: Synthetic oligonucleotide
  Sense strand starting at position 3129 of SEQ ID NO: 1887325
auguguauaguuuaggaaa

SEQ ID NO: 2463665 - RNA, 19 nt, Artificial Sequence
  Description of Artificial Sequence: Synthetic oligonucleotide
  Antisense strand to SEQ ID NO: 2463664
uuuccuaaacuauacacau

SEQ ID NO: 2463666 - RNA, 19 nt, Artificial Sequence
  Description of Artificial Sequence: Synthetic oligonucleotide
  Sense strand starting at position 3217 of SEQ ID NO: 1887325
ucauuugucgucuacaugu

SEQ ID NO: 2463667 - RNA, 19 nt, Artificial Sequence
  Description of Artificial Sequence: Synthetic oligonucleotide
  Antisense strand to SEQ ID NO: 2463666
acauguagacgacaaauga

SEQ ID NO: 2463668 - RNA, 19 nt, Artificial Sequence
  Description of Artificial Sequence: Synthetic oligonucleotide
  Sense strand starting at position 3219 of SEQ ID NO: 1887325
auuugucgucuacauguau

SEQ ID NO: 2463669 - RNA, 19 nt, Artificial Sequence
  Description of Artificial Sequence: Synthetic oligonucleotide
  Antisense strand to SEQ ID NO: 2463668
auacauguagacgacaaau

SEQ ID NO: 2463670 - RNA, 19 nt, Artificial Sequence
  Description of Artificial Sequence: Synthetic oligonucleotide
  Sense strand starting at position 3433 of SEQ ID NO: 1887325
uuaucuuuggguggaguau

SEQ ID NO: 2463671 - RNA, 19 nt, Artificial Sequence
  Description of Artificial Sequence: Synthetic oligonucleotide
  Antisense strand to SEQ ID NO: 2463670
auacuccacccaaagauaa

SEQ ID NO: 2463672 - RNA, 19 nt, Artificial Sequence
  Description of Artificial Sequence: Synthetic oligonucleotide
  Sense strand starting at position 3434 of SEQ ID NO: 1887325
uaucuuuggguggaguauu

SEQ ID NO: 2463673 - RNA, 19 nt, Artificial Sequence
  Description of Artificial Sequence: Synthetic oligonucleotide
  Antisense strand to SEQ ID NO: 2463672
aauacuccacccaaagaua

SEQ ID NO: 2463674 - RNA, 19 nt, Artificial Sequence
  Description of Artificial Sequence: Synthetic oligonucleotide
  Sense strand starting at position 3689 of SEQ ID NO: 1887325
gcuuguggucuagugcuga

SEQ ID NO: 2463675 - RNA, 19 nt, Artificial Sequence
  Description of Artificial Sequence: Synthetic oligonucleotide
  Antisense strand to SEQ ID NO: 2463674
ucagcacuagaccacaagc

SEQ ID NO: 2463676 - RNA, 19 nt, Artificial Sequence
  Description of Artificial Sequence: Synthetic oligonucleotide
  Sense strand starting at position 3694 of SEQ ID NO: 1887325
uggucuagugcugacugau

SEQ ID NO: 2463677 - RNA, 19 nt, Artificial Sequence
  Description of Artificial Sequence: Synthetic oligonucleotide
  Antisense strand to SEQ ID NO: 2463676
aucagucagcacuagacca

SEQ ID NO: 2463678 - RNA, 19 nt, Artificial Sequence
  Description of Artificial Sequence: Synthetic oligonucleotide
  Sense strand starting at position 3719 of SEQ ID NO: 1887325
aucacuggaugcucaaaua

SEQ ID NO: 2463679 - RNA, 19 nt, Artificial Sequence
  Description of Artificial Sequence: Synthetic oligonucleotide
  Antisense strand to SEQ ID NO: 2463678
uauuugagcauccagugau

SEQ ID NO: 2463680 - RNA, 19 nt, Artificial Sequence
  Description of Artificial Sequence: Synthetic oligonucleotide
  Sense strand starting at position 3830 of SEQ ID NO: 1887325
gaugcaugcagagguuaag

SEQ ID NO: 2463681 - RNA, 19 nt, Artificial Sequence
  Description of Artificial Sequence: Synthetic oligonucleotide
  Antisense strand to SEQ ID NO: 2463680
cuuaaccucugcaugcauc

SEQ ID NO: 2463682 - RNA, 19 nt, Artificial Sequence
  Description of Artificial Sequence: Synthetic oligonucleotide
  Sense strand starting at position 3868 of SEQ ID NO: 1887325
ugaggcucgaucugaagaa

SEQ ID NO: 2463683 - RNA, 19 nt, Artificial Sequence
  Description of Artificial Sequence: Synthetic oligonucleotide
  Antisense strand to SEQ ID NO: 2463682
uucuucagaucgagccuca

SEQ ID NO: 2463684 - RNA, 19 nt, Artificial Sequence
  Description of Artificial Sequence: Synthetic oligonucleotide
  Sense strand starting at position 3872 of SEQ ID NO: 1887325
gcucgaucugaagaacaug

SEQ ID NO: 2463685 - RNA, 19 nt, Artificial Sequence
  Description of Artificial Sequence: Synthetic oligonucleotide
  Antisense strand to SEQ ID NO: 2463684
cauguucuucagaucgagc

SEQ ID NO: 2463686 - RNA, 19 nt, Artificial Sequence
  Description of Artificial Sequence: Synthetic oligonucleotide
  Sense strand starting at position 3906 of SEQ ID NO: 1887325
ccuuuauagcuagacguua

SEQ ID NO: 2463687 - RNA, 19 nt, Artificial Sequence
  Description of Artificial Sequence: Synthetic oligonucleotide
  Antisense strand to SEQ ID NO: 2463686
uaacgucuagcuauaaagg

SEQ ID NO: 2463688 - RNA, 19 nt, Artificial Sequence
  Description of Artificial Sequence: Synthetic oligonucleotide
  Sense strand starting at position 3944 of SEQ ID NO: 1887325
aggaacaugucauuauauu

SEQ ID NO: 2463689 - RNA, 19 nt, Artificial Sequence
  Description of Artificial Sequence: Synthetic oligonucleotide
  Antisense strand to SEQ ID NO: 2463688
aauauaaugacauguuccu

SEQ ID NO: 2463690 - RNA, 19 nt, Artificial Sequence
  Description of Artificial Sequence: Synthetic oligonucleotide
  Sense strand starting at position 41 of SEQ ID NO: 1887326
aggucagcauucguaauua

SEQ ID NO: 2463691 - RNA, 19 nt, Artificial Sequence
  Description of Artificial Sequence: Synthetic oligonucleotide
  Antisense strand to SEQ ID NO: 2463690
uaauuacgaaugcugaccu

SEQ ID NO: 2463692 - RNA, 19 nt, Artificial Sequence
  Description of Artificial Sequence: Synthetic oligonucleotide
  Sense strand starting at position 151 of SEQ ID NO: 1887326
uuggccuuccacuagauca

SEQ ID NO: 2463693 - RNA, 19 nt, Artificial Sequence
  Description of Artificial Sequence: Synthetic oligonucleotide
  Antisense strand to SEQ ID NO: 2463692
ugaucuaguggaaggccaa

SEQ ID NO: 2463694 - RNA, 19 nt, Artificial Sequence
  Description of Artificial Sequence: Synthetic oligonucleotide
  Sense strand starting at position 185 of SEQ ID NO: 1887326
agaccaugacugcagcaau

SEQ ID NO: 2463695 - RNA, 19 nt, Artificial Sequence
  Description of Artificial Sequence: Synthetic oligonucleotide
  Antisense strand to SEQ ID NO: 2463694
auugcugcagucauggucu

SEQ ID NO: 2463696 - RNA, 19 nt, Artificial Sequence
  Description of Artificial Sequence: Synthetic oligonucleotide
  Sense strand starting at position 214 of SEQ ID NO: 1887326
uguuucuuugcagacaaac

SEQ ID NO: 2463697 - RNA, 19 nt, Artificial Sequence
  Description of Artificial Sequence: Synthetic oligonucleotide
  Antisense strand to SEQ ID NO: 2463696
guuugucugcaaagaaaca

SEQ ID NO: 2463698 - RNA, 19 nt, Artificial Sequence
  Description of Artificial Sequence: Synthetic oligonucleotide
  Sense strand starting at position 339 of SEQ ID NO: 1887326
gugccuuccgagcugugau

SEQ ID NO: 2463699 - RNA, 19 nt, Artificial Sequence
  Description of Artificial Sequence: Synthetic oligonucleotide
  Antisense strand to SEQ ID NO: 2463698
aucacagcucggaaggcac

SEQ ID NO: 2463700 - RNA, 19 nt, Artificial Sequence
  Description of Artificial Sequence: Synthetic oligonucleotide
  Sense strand starting at position 342 of SEQ ID NO: 1887326
ccuuccgagcugugauaga

SEQ ID NO: 2463701 - RNA, 19 nt, Artificial Sequence
  Description of Artificial Sequence: Synthetic oligonucleotide
  Antisense strand to SEQ ID NO: 2463700
ucuaucacagcucggaagg

SEQ ID NO: 2463702 - RNA, 19 nt, Artificial Sequence
  Description of Artificial Sequence: Synthetic oligonucleotide
  Sense strand starting at position 347 of SEQ ID NO: 1887326
cgagcugugauagaagagu

SEQ ID NO: 2463703 - RNA, 19 nt, Artificial Sequence
  Description of Artificial Sequence: Synthetic oligonucleotide
  Antisense strand to SEQ ID NO: 2463702
acucuucuaucacagcucg

SEQ ID NO: 2463704 - RNA, 19 nt, Artificial Sequence
  Description of Artificial Sequence: Synthetic oligonucleotide
  Sense strand starting at position 560 of SEQ ID NO: 1887326
aagguuaccugggaauaga

SEQ ID NO: 2463705 - RNA, 19 nt, Artificial Sequence
  Description of Artificial Sequence: Synthetic oligonucleotide
  Antisense strand to SEQ ID NO: 2463704
ucuauucccagguaaccuu

SEQ ID NO: 2463706 - RNA, 19 nt, Artificial Sequence
  Description of Artificial Sequence: Synthetic oligonucleotide
  Sense strand starting at position 927 of SEQ ID NO: 1887326
auguguccaugucuuuaau

SEQ ID NO: 2463707 - RNA, 19 nt, Artificial Sequence
  Description of Artificial Sequence: Synthetic oligonucleotide
  Antisense strand to SEQ ID NO: 2463706
auuaaagacauggacacau

SEQ ID NO: 2463708 - RNA, 19 nt, Artificial Sequence
  Description of Artificial Sequence: Synthetic oligonucleotide
  Sense strand starting at position 940 of SEQ ID NO: 1887326
uuuaaucuucuuggugcaa

SEQ ID NO: 2463709 - RNA, 19 nt, Artificial Sequence
  Description of Artificial Sequence: Synthetic oligonucleotide
  Antisense strand to SEQ ID NO: 2463708
uugcaccaagaagauuaaa

SEQ ID NO: 2463710 - RNA, 19 nt, Artificial Sequence
  Description of Artificial Sequence: Synthetic oligonucleotide
  Sense strand starting at position 974 of SEQ ID NO: 1887326
guauuuaccucagacagug

SEQ ID NO: 2463711 - RNA, 19 nt, Artificial Sequence
  Description of Artificial Sequence: Synthetic oligonucleotide
  Antisense strand to SEQ ID NO: 2463710
cacugucugagguaaauac

SEQ ID NO: 2463712 - RNA, 19 nt, Artificial Sequence
  Description of Artificial Sequence: Synthetic oligonucleotide
  Sense strand starting at position 1012 of SEQ ID NO: 1887326
gcucuugaaugccuccaua

SEQ ID NO: 2463713 - RNA, 19 nt, Artificial Sequence
  Description of Artificial Sequence: Synthetic oligonucleotide
  Antisense strand to SEQ ID NO: 2463712
uauggaggcauucaagagc

SEQ ID NO: 2463714 - RNA, 19 nt, Artificial Sequence
  Description of Artificial Sequence: Synthetic oligonucleotide
  Sense strand starting at position 1015 of SEQ ID NO: 1887326
cuugaaugccuccauagag

SEQ ID NO: 2463715 - RNA, 19 nt, Artificial Sequence
  Description of Artificial Sequence: Synthetic oligonucleotide
  Antisense strand to SEQ ID NO: 2463714
cucuauggaggcauucaag

SEQ ID NO: 2463716 - RNA, 19 nt, Artificial Sequence
  Description of Artificial Sequence: Synthetic oligonucleotide
  Sense strand starting at position 1139 of SEQ ID NO: 1887326
acauacugaugcucucaga

SEQ ID NO: 2463717 - RNA, 19 nt, Artificial Sequence
  Description of Artificial Sequence: Synthetic oligonucleotide
  Antisense strand to SEQ ID NO: 2463716
ucugagagcaucaguaugu

SEQ ID NO: 2463718 - RNA, 19 nt, Artificial Sequence
  Description of Artificial Sequence: Synthetic oligonucleotide
  Sense strand starting at position 1192 of SEQ ID NO: 1887326
ggaucccacagagguauau

SEQ ID NO: 2463719 - RNA, 19 nt, Artificial Sequence
  Description of Artificial Sequence: Synthetic oligonucleotide
  Antisense strand to SEQ ID NO: 2463718
auauaccucugugggaucc

SEQ ID NO: 2463720 - RNA, 19 nt, Artificial Sequence
  Description of Artificial Sequence: Synthetic oligonucleotide
  Sense strand starting at position 1220 of SEQ ID NO: 1887326
gcagaaauauugucuuaug

SEQ ID NO: 2463721 - RNA, 19 nt, Artificial Sequence
  Description of Artificial Sequence: Synthetic oligonucleotide
  Antisense strand to SEQ ID NO: 2463720
cauaagacaauauuucugc

SEQ ID NO: 2463722 - RNA, 19 nt, Artificial Sequence
  Description of Artificial Sequence: Synthetic oligonucleotide
  Sense strand starting at position 1231 of SEQ ID NO: 1887326
gucuuaugacgacagacau

SEQ ID NO: 2463723 - RNA, 19 nt, Artificial Sequence
  Description of Artificial Sequence: Synthetic oligonucleotide
  Antisense strand to SEQ ID NO: 2463722
augucugucgucauaagac

SEQ ID NO: 2463724 - RNA, 19 nt, Artificial Sequence
  Description of Artificial Sequence: Synthetic oligonucleotide
  Sense strand starting at position 1316 of SEQ ID NO: 1887326
ggaaauuccucagcucucu

SEQ ID NO: 2463725 - RNA, 19 nt, Artificial Sequence
  Description of Artificial Sequence: Synthetic oligonucleotide
  Antisense strand to SEQ ID NO: 2463724
agagagcugaggaauuucc

SEQ ID NO: 2463726 - RNA, 19 nt, Artificial Sequence
  Description of Artificial Sequence: Synthetic oligonucleotide
  Sense strand starting at position 1404 of SEQ ID NO: 1887326
acugauuucuaccaaggac

SEQ ID NO: 2463727 - RNA, 19 nt, Artificial Sequence
  Description of Artificial Sequence: Synthetic oligonucleotide
  Antisense strand to SEQ ID NO: 2463726
guccuugguagaaaucagu

SEQ ID NO: 2463728 - RNA, 19 nt, Artificial Sequence
  Description of Artificial Sequence: Synthetic oligonucleotide
  Sense strand starting at position 1419 of SEQ ID NO: 1887326
ggacaauuauaagaaguca

SEQ ID NO: 2463729 - RNA, 19 nt, Artificial Sequence
  Description of Artificial Sequence: Synthetic oligonucleotide
  Antisense strand to SEQ ID NO: 2463728
ugacuucuuauaauugucc

SEQ ID NO: 2463730 - RNA, 19 nt, Artificial Sequence
  Description of Artificial Sequence: Synthetic oligonucleotide
  Sense strand starting at position 1684 of SEQ ID NO: 1887326
gauccacccugcgugaaua

SEQ ID NO: 2463731 - RNA, 19 nt, Artificial Sequence
  Description of Artificial Sequence: Synthetic oligonucleotide
  Antisense strand to SEQ ID NO: 2463730
uauucacgcaggguggauc

SEQ ID NO: 2463732 - RNA, 19 nt, Artificial Sequence
  Description of Artificial Sequence: Synthetic oligonucleotide
  Sense strand starting at position 1927 of SEQ ID NO: 1887326
uggacuuacugcuuccaaa

SEQ ID NO: 2463733 - RNA, 19 nt, Artificial Sequence
  Description of Artificial Sequence: Synthetic oligonucleotide
  Antisense strand to SEQ ID NO: 2463732
uuuggaagcaguaagucca

SEQ ID NO: 2463734 - RNA, 19 nt, Artificial Sequence
  Description of Artificial Sequence: Synthetic oligonucleotide
  Sense strand starting at position 1951 of SEQ ID NO: 1887326
ugggcacagccuuauauga

SEQ ID NO: 2463735 - RNA, 19 nt, Artificial Sequence
  Description of Artificial Sequence: Synthetic oligonucleotide
  Antisense strand to SEQ ID NO: 2463734
ucauauaaggcugugccca

SEQ ID NO: 2463736 - RNA, 19 nt, Artificial Sequence
  Description of Artificial Sequence: Synthetic oligonucleotide
  Sense strand starting at position 2305 of SEQ ID NO: 1887326
ccauguguaccagaugucu

SEQ ID NO: 2463737 - RNA, 19 nt, Artificial Sequence
  Description of Artificial Sequence: Synthetic oligonucleotide
  Antisense strand to SEQ ID NO: 2463736
agacaucugguacacaugg

SEQ ID NO: 2463738 - RNA, 19 nt, Artificial Sequence
  Description of Artificial Sequence: Synthetic oligonucleotide
  Sense strand starting at position 2515 of SEQ ID NO: 1887326
ugagauggucuauguaaga

SEQ ID NO: 2463739 - RNA, 19 nt, Artificial Sequence
  Description of Artificial Sequence: Synthetic oligonucleotide
  Antisense strand to SEQ ID NO: 2463738
ucuuacauagaccaucuca

SEQ ID NO: 2463740 - RNA, 19 nt, Artificial Sequence
  Description of Artificial Sequence: Synthetic oligonucleotide
  Sense strand starting at position 2725 of SEQ ID NO: 1887326
augauuucuucuuaaaggu

SEQ ID NO: 2463741 - RNA, 19 nt, Artificial Sequence
  Description of Artificial Sequence: Synthetic oligonucleotide
  Antisense strand to SEQ ID NO: 2463740
accuuuaagaagaaaucau

SEQ ID NO: 2463742 - RNA, 19 nt, Artificial Sequence
  Description of Artificial Sequence: Synthetic oligonucleotide
  Sense strand starting at position 2855 of SEQ ID NO: 1887326
uggaaucuuuagguaugaa

SEQ ID NO: 2463743 - RNA, 19 nt, Artificial Sequence
  Description of Artificial Sequence: Synthetic oligonucleotide
  Antisense strand to SEQ ID NO: 2463742
uucauaccuaaagauucca

SEQ ID NO: 2463744 - RNA, 19 nt, Artificial Sequence
  Description of Artificial Sequence: Synthetic oligonucleotide
  Sense strand starting at position 2858 of SEQ ID NO: 1887326
aaucuuuagguaugaaaug

SEQ ID NO: 2463745 - RNA, 19 nt, Artificial Sequence
  Description of Artificial Sequence: Synthetic oligonucleotide
  Antisense strand to SEQ ID NO: 2463744
cauuucauaccuaaagauu

SEQ ID NO: 2463746 - RNA, 19 nt, Artificial Sequence
  Description of Artificial Sequence: Synthetic oligonucleotide
  Sense strand starting at position 2881 of SEQ ID NO: 1887326
augcuugccugguugaaac

SEQ ID NO: 2463747 - RNA, 19 nt, Artificial Sequence
  Description of Artificial Sequence: Synthetic oligonucleotide
  Antisense strand to SEQ ID NO: 2463746
guuucaaccaggcaagcau

SEQ ID NO: 2463748 - RNA, 19 nt, Artificial Sequence
  Description of Artificial Sequence: Synthetic oligonucleotide
  Sense strand starting at position 2993 of SEQ ID NO: 1887326
aggccaacugcucagaaga

SEQ ID NO: 2463749 - RNA, 19 nt, Artificial Sequence
  Description of Artificial Sequence: Synthetic oligonucleotide
  Antisense strand to SEQ ID NO: 2463748
ucuucugagcaguuggccu

SEQ ID NO: 2463750 - RNA, 19 nt, Artificial Sequence
  Description of Artificial Sequence: Synthetic oligonucleotide
  Sense strand starting at position 3042 of SEQ ID NO: 1887326
cugagaccuggcuggguaa

SEQ ID NO: 2463751 - RNA, 19 nt, Artificial Sequence
  Description of Artificial Sequence: Synthetic oligonucleotide
  Antisense strand to SEQ ID NO: 2463750
uuacccagccaggucucag

SEQ ID NO: 2463752 - RNA, 19 nt, Artificial Sequence
  Description of Artificial Sequence: Synthetic oligonucleotide
  Sense strand starting at position 3098 of SEQ ID NO: 1887326
acucguaaauaaguacaaa

SEQ ID NO: 2463753 - RNA, 19 nt, Artificial Sequence
  Description of Artificial Sequence: Synthetic oligonucleotide
  Antisense strand to SEQ ID NO: 2463752
uuuguacuuauuuacgagu

SEQ ID NO: 2463754 - RNA, 19 nt, Artificial Sequence
  Description of Artificial Sequence: Synthetic oligonucleotide
  Sense strand starting at position 3177 of SEQ ID NO: 1887326
uauuuaugguugcuauagu

SEQ ID NO: 2463755 - RNA, 19 nt, Artificial Sequence
  Description of Artificial Sequence: Synthetic oligonucleotide
  Antisense strand to SEQ ID NO: 2463754
acuauagcaaccauaaaua

SEQ ID NO: 2463756 - RNA, 19 nt, Artificial Sequence
  Description of Artificial Sequence: Synthetic oligonucleotide
  Sense strand starting at position 3185 of SEQ ID NO: 1887326
guugcuauaguauaggaau

SEQ ID NO: 2463757 - RNA, 19 nt, Artificial Sequence
  Description of Artificial Sequence: Synthetic oligonucleotide
  Antisense strand to SEQ ID NO: 2463756
auuccuauacuauagcaac

SEQ ID NO: 2463758 - RNA, 19 nt, Artificial Sequence
  Description of Artificial Sequence: Synthetic oligonucleotide
  Sense strand starting at position 3318 of SEQ ID NO: 1887326
ccucaugaaugguuucuca

SEQ ID NO: 2463759 - RNA, 19 nt, Artificial Sequence
  Description of Artificial Sequence: Synthetic oligonucleotide
  Antisense strand to SEQ ID NO: 2463758
ugagaaaccauucaugagg

SEQ ID NO: 2463760 - RNA, 19 nt, Artificial Sequence
  Description of Artificial Sequence: Synthetic oligonucleotide
  Sense strand starting at position 3368 of SEQ ID NO: 1887326
ucauucuugguugagaucu

SEQ ID NO: 2463761 - RNA, 19 nt, Artificial Sequence
  Description of Artificial Sequence: Synthetic oligonucleotide
  Antisense strand to SEQ ID NO: 2463760
agaucucaaccaagaauga

SEQ ID NO: 2463762 - RNA, 19 nt, Artificial Sequence
  Description of Artificial Sequence: Synthetic oligonucleotide
  Sense strand starting at position 3391 of SEQ ID NO: 1887326
guuugaaagaguuggacau

SEQ ID NO: 2463763 - RNA, 19 nt, Artificial Sequence
  Description of Artificial Sequence: Synthetic oligonucleotide
  Antisense strand to SEQ ID NO: 2463762
auguccaacucuuucaaac

SEQ ID NO: 2463764 - RNA, 19 nt, Artificial Sequence
  Description of Artificial Sequence: Synthetic oligonucleotide
  Sense strand starting at position 3647 of SEQ ID NO: 1887326
aaaguagagucagccugaa

SEQ ID NO: 2463765 - RNA, 19 nt, Artificial Sequence
  Description of Artificial Sequence: Synthetic oligonucleotide
  Antisense strand to SEQ ID NO: 2463764
uucaggcugacucuacuuu

SEQ ID NO: 2463766 - RNA, 19 nt, Artificial Sequence
  Description of Artificial Sequence: Synthetic oligonucleotide
  Sense strand starting at position 3939 of SEQ ID NO: 1887326
ggguauccucugugucuaa

SEQ ID NO: 2463767 - RNA, 19 nt, Artificial Sequence
  Description of Artificial Sequence: Synthetic oligonucleotide
  Antisense strand to SEQ ID NO: 2463766
uuagacacagaggauaccc

SEQ ID NO: 2463768 - RNA, 19 nt, Artificial Sequence
  Description of Artificial Sequence: Synthetic oligonucleotide
  Sense strand starting at position 3943 of SEQ ID NO: 1887326
auccucugugucuaacuua

SEQ ID NO: 2463769 - RNA, 19 nt, Artificial Sequence
  Description of Artificial Sequence: Synthetic oligonucleotide
  Antisense strand to SEQ ID NO: 2463768
uaaguuagacacagaggau

SEQ ID NO: 2463770 - RNA, 19 nt, Artificial Sequence
  Description of Artificial Sequence: Synthetic oligonucleotide
  Sense strand starting at position 102 of SEQ ID NO: 1887327
uggacuucccagcauacaa

SEQ ID NO: 2463771 - RNA, 19 nt, Artificial Sequence
  Description of Artificial Sequence: Synthetic oligonucleotide
  Antisense strand to SEQ ID NO: 2463770
uuguaugcugggaagucca

SEQ ID NO: 2463772 - RNA, 19 nt, Artificial Sequence
  Description of Artificial Sequence: Synthetic oligonucleotide
  Sense strand starting at position 226 of SEQ ID NO: 1887327
auucccacucagugugaaa

SEQ ID NO: 2463773 - RNA, 19 nt, Artificial Sequence
  Description of Artificial Sequence: Synthetic oligonucleotide
  Antisense strand to SEQ ID NO: 2463772
uuucacacugagugggaau

SEQ ID NO: 2463774 - RNA, 19 nt, Artificial Sequence
  Description of Artificial Sequence: Synthetic oligonucleotide
  Sense strand starting at position 292 of SEQ ID NO: 1887327
uuacuucuuuggguucuua

SEQ ID NO: 2463775 - RNA, 19 nt, Artificial Sequence
  Description of Artificial Sequence: Synthetic oligonucleotide
  Antisense strand to SEQ ID NO: 2463774
uaagaacccaaagaaguaa

SEQ ID NO: 2463776 - RNA, 19 nt, Artificial Sequence
  Description of Artificial Sequence: Synthetic oligonucleotide
  Sense strand starting at position 402 of SEQ ID NO: 1887327
ggucaauauaagugaaggu

SEQ ID NO: 2463777 - RNA, 19 nt, Artificial Sequence
  Description of Artificial Sequence: Synthetic oligonucleotide
  Antisense strand to SEQ ID NO: 2463776
accuucacuuauauugacc

SEQ ID NO: 2463778 - RNA, 19 nt, Artificial Sequence
  Description of Artificial Sequence: Synthetic oligonucleotide
  Sense strand starting at position 608 of SEQ ID NO: 1887327
uggugaaaucugggucuuu

SEQ ID NO: 2463779 - RNA, 19 nt, Artificial Sequence
  Description of Artificial Sequence: Synthetic oligonucleotide
  Antisense strand to SEQ ID NO: 2463778
aaagacccagauuucacca

SEQ ID NO: 2463780 - RNA, 19 nt, Artificial Sequence
  Description of Artificial Sequence: Synthetic oligonucleotide
  Sense strand starting at position 609 of SEQ ID NO: 1887327
ggugaaaucugggucuuug

SEQ ID NO: 2463781 - RNA, 19 nt, Artificial Sequence
  Description of Artificial Sequence: Synthetic oligonucleotide
  Antisense strand to SEQ ID NO: 2463780
caaagacccagauuucacc

SEQ ID NO: 2463782 - RNA, 19 nt, Artificial Sequence
  Description of Artificial Sequence: Synthetic oligonucleotide
  Sense strand starting at position 618 of SEQ ID NO: 1887327
ugggucuuugggcaugauu

SEQ ID NO: 2463783 - RNA, 19 nt, Artificial Sequence
  Description of Artificial Sequence: Synthetic oligonucleotide
  Antisense strand to SEQ ID NO: 2463782
aaucaugcccaaagaccca

SEQ ID NO: 2463784 - RNA, 19 nt, Artificial Sequence
  Description of Artificial Sequence: Synthetic oligonucleotide
  Sense strand starting at position 626 of SEQ ID NO: 1887327
ugggcaugauuccuagaga

SEQ ID NO: 2463785 - RNA, 19 nt, Artificial Sequence
  Description of Artificial Sequence: Synthetic oligonucleotide
  Antisense strand to SEQ ID NO: 2463784
ucucuaggaaucaugccca

SEQ ID NO: 2463786 - RNA, 19 nt, Artificial Sequence
  Description of Artificial Sequence: Synthetic oligonucleotide
  Sense strand starting at position 705 of SEQ ID NO: 1887327
ugaggcuuaaucugggaau

SEQ ID NO: 2463787 - RNA, 19 nt, Artificial Sequence
  Description of Artificial Sequence: Synthetic oligonucleotide
  Antisense strand to SEQ ID NO: 2463786
auucccagauuaagccuca

SEQ ID NO: 2463788 - RNA, 19 nt, Artificial Sequence
  Description of Artificial Sequence: Synthetic oligonucleotide
  Sense strand starting at position 707 of SEQ ID NO: 1887327
aggcuuaaucugggaauaa

SEQ ID NO: 2463789 - RNA, 19 nt, Artificial Sequence
  Description of Artificial Sequence: Synthetic oligonucleotide
  Antisense strand to SEQ ID NO: 2463788
uuauucccagauuaagccu

SEQ ID NO: 2463790 - RNA, 19 nt, Artificial Sequence
  Description of Artificial Sequence: Synthetic oligonucleotide
  Sense strand starting at position 947 of SEQ ID NO: 1887327
ggaauuagccacuaucagu

SEQ ID NO: 2463791 - RNA, 19 nt, Artificial Sequence
  Description of Artificial Sequence: Synthetic oligonucleotide
  Antisense strand to SEQ ID NO: 2463790
acugauaguggcuaauucc

SEQ ID NO: 2463792 - RNA, 19 nt, Artificial Sequence
  Description of Artificial Sequence: Synthetic oligonucleotide
  Sense strand starting at position 1005 of SEQ ID NO: 1887327
uguuguaaccauuagcaga

SEQ ID NO: 2463793 - RNA, 19 nt, Artificial Sequence
  Description of Artificial Sequence: Synthetic oligonucleotide
  Antisense strand to SEQ ID NO: 2463792
ucugcuaaugguuacaaca

SEQ ID NO: 2463794 - RNA, 19 nt, Artificial Sequence
  Description of Artificial Sequence: Synthetic oligonucleotide
  Sense strand starting at position 1018 of SEQ ID NO: 1887327
agcagacaaccauguuaug

SEQ ID NO: 2463795 - RNA, 19 nt, Artificial Sequence
  Description of Artificial Sequence: Synthetic oligonucleotide
  Antisense strand to SEQ ID NO: 2463794
cauaacaugguugucugcu

SEQ ID NO: 2463796 - RNA, 19 nt, Artificial Sequence
  Description of Artificial Sequence: Synthetic oligonucleotide
  Sense strand starting at position 1057 of SEQ ID NO: 1887327
aagauuaugucuccaggua

SEQ ID NO: 2463797 - RNA, 19 nt, Artificial Sequence
  Description of Artificial Sequence: Synthetic oligonucleotide
  Antisense strand to SEQ ID NO: 2463796
uaccuggagacauaaucuu

SEQ ID NO: 2463798 - RNA, 19 nt, Artificial Sequence
  Description of Artificial Sequence: Synthetic oligonucleotide
  Sense strand starting at position 1058 of SEQ ID NO: 1887327
agauuaugucuccagguau

SEQ ID NO: 2463799 - RNA, 19 nt, Artificial Sequence
  Description of Artificial Sequence: Synthetic oligonucleotide
  Antisense strand to SEQ ID NO: 2463798
auaccuggagacauaaucu

SEQ ID NO: 2463800 - RNA, 19 nt, Artificial Sequence
  Description of Artificial Sequence: Synthetic oligonucleotide
  Sense strand starting at position 1113 of SEQ ID NO: 1887327
gcucuauguuuauuucuga

SEQ ID NO: 2463801 - RNA, 19 nt, Artificial Sequence
  Description of Artificial Sequence: Synthetic oligonucleotide
  Antisense strand to SEQ ID NO: 2463800
ucagaaauaaacauagagc

SEQ ID NO: 2463802 - RNA, 19 nt, Artificial Sequence
  Description of Artificial Sequence: Synthetic oligonucleotide
  Sense strand starting at position 1173 of SEQ ID NO: 1887327
agacaaaucuaauacagga

SEQ ID NO: 2463803 - RNA, 19 nt, Artificial Sequence
  Description of Artificial Sequence: Synthetic oligonucleotide
  Antisense strand to SEQ ID NO: 2463802
uccuguauuagauuugucu

SEQ ID NO: 2463804 - RNA, 19 nt, Artificial Sequence
  Description of Artificial Sequence: Synthetic oligonucleotide
  Sense strand starting at position 1325 of SEQ ID NO: 1887327
agcacuuaccagcagaaca

SEQ ID NO: 2463805 - RNA, 19 nt, Artificial Sequence
  Description of Artificial Sequence: Synthetic oligonucleotide
  Antisense strand to SEQ ID NO: 2463804
uguucugcugguaagugcu

SEQ ID NO: 2463806 - RNA, 19 nt, Artificial Sequence
  Description of Artificial Sequence: Synthetic oligonucleotide
  Sense strand starting at position 1738 of SEQ ID NO: 1887327
auacacagauguucugaau

SEQ ID NO: 2463807 - RNA, 19 nt, Artificial Sequence
  Description of Artificial Sequence: Synthetic oligonucleotide
  Antisense strand to SEQ ID NO: 2463806
auucagaacaucuguguau

SEQ ID NO: 2463808 - RNA, 19 nt, Artificial Sequence
  Description of Artificial Sequence: Synthetic oligonucleotide
  Sense strand starting at position 1747 of SEQ ID NO: 1887327
uguucugaaucaguuagga

SEQ ID NO: 2463809 - RNA, 19 nt, Artificial Sequence
  Description of Artificial Sequence: Synthetic oligonucleotide
  Antisense strand to SEQ ID NO: 2463808
uccuaacugauucagaaca

SEQ ID NO: 2463810 - RNA, 19 nt, Artificial Sequence
  Description of Artificial Sequence: Synthetic oligonucleotide
  Sense strand starting at position 1783 of SEQ ID NO: 1887327
aucaucacuugucuugauu

SEQ ID NO: 2463811 - RNA, 19 nt, Artificial Sequence
  Description of Artificial Sequence: Synthetic oligonucleotide
  Antisense strand to SEQ ID NO: 2463810
aaucaagacaagugaugau

SEQ ID NO: 2463812 - RNA, 19 nt, Artificial Sequence
  Description of Artificial Sequence: Synthetic oligonucleotide
  Sense strand starting at position 1918 of SEQ ID NO: 1887327
cagagucuccauggaauuc

SEQ ID NO: 2463813 - RNA, 19 nt, Artificial Sequence
  Description of Artificial Sequence: Synthetic oligonucleotide
  Antisense strand to SEQ ID NO: 2463812
gaauuccauggagacucug

SEQ ID NO: 2463814 - RNA, 19 nt, Artificial Sequence
  Description of Artificial Sequence: Synthetic oligonucleotide
  Sense strand starting at position 1929 of SEQ ID NO: 1887327
uggaauucucugcguauuu

SEQ ID NO: 2463815 - RNA, 19 nt, Artificial Sequence
  Description of Artificial Sequence: Synthetic oligonucleotide
  Antisense strand to SEQ ID NO: 2463814
aaauacgcagagaauucca

SEQ ID NO: 2463816 - RNA, 19 nt, Artificial Sequence
  Description of Artificial Sequence: Synthetic oligonucleotide
  Sense strand starting at position 1930 of SEQ ID NO: 1887327
ggaauucucugcguauuuc

SEQ ID NO: 2463817 - RNA, 19 nt, Artificial Sequence
  Description of Artificial Sequence: Synthetic oligonucleotide
  Antisense strand to SEQ ID NO: 2463816
gaaauacgcagagaauucc

SEQ ID NO: 2463818 - RNA, 19 nt, Artificial Sequence
  Description of Artificial Sequence: Synthetic oligonucleotide
  Sense strand starting at position 1948 of SEQ ID NO: 1887327
caauauggucugcauguga

SEQ ID NO: 2463819 - RNA, 19 nt, Artificial Sequence
  Description of Artificial Sequence: Synthetic oligonucleotide
  Antisense strand to SEQ ID NO: 2463818
ucacaugcagaccauauug

SEQ ID NO: 2463820 - RNA, 19 nt, Artificial Sequence
  Description of Artificial Sequence: Synthetic oligonucleotide
  Sense strand starting at position 1955 of SEQ ID NO: 1887327
gucugcaugugacuuauuu

SEQ ID NO: 2463821 - RNA, 19 nt, Artificial Sequence
  Description of Artificial Sequence: Synthetic oligonucleotide
  Antisense strand to SEQ ID NO: 2463820
aaauaagucacaugcagac

SEQ ID NO: 2463822 - RNA, 19 nt, Artificial Sequence
  Description of Artificial Sequence: Synthetic oligonucleotide
  Sense strand starting at position 2117 of SEQ ID NO: 1887327
cuuguucugccagauuugu

SEQ ID NO: 2463823 - RNA, 19 nt, Artificial Sequence
  Description of Artificial Sequence: Synthetic oligonucleotide
  Antisense strand to SEQ ID NO: 2463822
acaaaucuggcagaacaag

SEQ ID NO: 2463824 - RNA, 19 nt, Artificial Sequence
  Description of Artificial Sequence: Synthetic oligonucleotide
  Sense strand starting at position 2246 of SEQ ID NO: 1887327
guaagcuagaaugagcaau

SEQ ID NO: 2463825 - RNA, 19 nt, Artificial Sequence
  Description of Artificial Sequence: Synthetic oligonucleotide
  Antisense strand to SEQ ID NO: 2463824
auugcucauucuagcuuac

SEQ ID NO: 2463826 - RNA, 19 nt, Artificial Sequence
  Description of Artificial Sequence: Synthetic oligonucleotide
  Sense strand starting at position 2252 of SEQ ID NO: 1887327
uagaaugagcaaugucuua

SEQ ID NO: 2463827 - RNA, 19 nt, Artificial Sequence
  Description of Artificial Sequence: Synthetic oligonucleotide
  Antisense strand to SEQ ID NO: 2463826
uaagacauugcucauucua

SEQ ID NO: 2463828 - RNA, 19 nt, Artificial Sequence
  Description of Artificial Sequence: Synthetic oligonucleotide
  Sense strand starting at position 2353 of SEQ ID NO: 1887327
uccaauggguauucuuuaa

SEQ ID NO: 2463829 - RNA, 19 nt, Artificial Sequence
  Description of Artificial Sequence: Synthetic oligonucleotide
  Antisense strand to SEQ ID NO: 2463828
uuaaagaauacccauugga

SEQ ID NO: 2463830 - RNA, 19 nt, Artificial Sequence
  Description of Artificial Sequence: Synthetic oligonucleotide
  Sense strand starting at position 2445 of SEQ ID NO: 1887327
uuguucugugagcagaacu

SEQ ID NO: 2463831 - RNA, 19 nt, Artificial Sequence
  Description of Artificial Sequence: Synthetic oligonucleotide
  Antisense strand to SEQ ID NO: 2463830
aguucugcucacagaacaa

SEQ ID NO: 2463832 - RNA, 19 nt, Artificial Sequence
  Description of Artificial Sequence: Synthetic oligonucleotide
  Sense strand starting at position 2502 of SEQ ID NO: 1887327
uguucuuguccucaaauag

SEQ ID NO: 2463833 - RNA, 19 nt, Artificial Sequence
  Description of Artificial Sequence: Synthetic oligonucleotide
  Antisense strand to SEQ ID NO: 2463832
cuauuugaggacaagaaca

SEQ ID NO: 2463834 - RNA, 19 nt, Artificial Sequence
  Description of Artificial Sequence: Synthetic oligonucleotide
  Sense strand starting at position 2530 of SEQ ID NO: 1887327
ugaucugaauaguuccaga

SEQ ID NO: 2463835 - RNA, 19 nt, Artificial Sequence
  Description of Artificial Sequence: Synthetic oligonucleotide
  Antisense strand to SEQ ID NO: 2463834
ucuggaacuauucagauca

SEQ ID NO: 2463836 - RNA, 19 nt, Artificial Sequence
  Description of Artificial Sequence: Synthetic oligonucleotide
  Sense strand starting at position 2543 of SEQ ID NO: 1887327
uccagauuauuugaaguaa

SEQ ID NO: 2463837 - RNA, 19 nt, Artificial Sequence
  Description of Artificial Sequence: Synthetic oligonucleotide
  Antisense strand to SEQ ID NO: 2463836
uuacuucaaauaaucugga

SEQ ID NO: 2463838 - RNA, 19 nt, Artificial Sequence
  Description of Artificial Sequence: Synthetic oligonucleotide
  Sense strand starting at position 2752 of SEQ ID NO: 1887327
auccauucuugugugaaug

SEQ ID NO: 2463839 - RNA, 19 nt, Artificial Sequence
  Description of Artificial Sequence: Synthetic oligonucleotide
  Antisense strand to SEQ ID NO: 2463838
cauucacacaagaauggau

SEQ ID NO: 2463840 - RNA, 19 nt, Artificial Sequence
  Description of Artificial Sequence: Synthetic oligonucleotide
  Sense strand starting at position 2766 of SEQ ID NO: 1887327
gaaugucaguuucuaugga

SEQ ID NO: 2463841 - RNA, 19 nt, Artificial Sequence
  Description of Artificial Sequence: Synthetic oligonucleotide
  Antisense strand to SEQ ID NO: 2463840
uccauagaaacugacauuc

SEQ ID NO: 2463842 - RNA, 19 nt, Artificial Sequence
  Description of Artificial Sequence: Synthetic oligonucleotide
  Sense strand starting at position 2834 of SEQ ID NO: 1887327
aaucuaguggcaugauuau

SEQ ID NO: 2463843 - RNA, 19 nt, Artificial Sequence
  Description of Artificial Sequence: Synthetic oligonucleotide
  Antisense strand to SEQ ID NO: 2463842
auaaucaugccacuagauu

SEQ ID NO: 2463844 - RNA, 19 nt, Artificial Sequence
  Description of Artificial Sequence: Synthetic oligonucleotide
  Sense strand starting at position 3138 of SEQ ID NO: 1887327
aggagauccucugugcauu

SEQ ID NO: 2463845 - RNA, 19 nt, Artificial Sequence
  Description of Artificial Sequence: Synthetic oligonucleotide
  Antisense strand to SEQ ID NO: 2463844
aaugcacagaggaucuccu

SEQ ID NO: 2463846 - RNA, 19 nt, Artificial Sequence
  Description of Artificial Sequence: Synthetic oligonucleotide
  Sense strand starting at position 3278 of SEQ ID NO: 1887327
acuggagacugccugaaau

SEQ ID NO: 2463847 - RNA, 19 nt, Artificial Sequence
  Description of Artificial Sequence: Synthetic oligonucleotide
  Antisense strand to SEQ ID NO: 2463846
auuucaggcagucuccagu

SEQ ID NO: 2463848 - RNA, 19 nt, Artificial Sequence
  Description of Artificial Sequence: Synthetic oligonucleotide
  Sense strand starting at position 3389 of SEQ ID NO: 1887327
ggaggaauuucccauggca

SEQ ID NO: 2463849 - RNA, 19 nt, Artificial Sequence
  Description of Artificial Sequence: Synthetic oligonucleotide
  Antisense strand to SEQ ID NO: 2463848
ugccaugggaaauuccucc

SEQ ID NO: 2463850 - RNA, 19 nt, Artificial Sequence
  Description of Artificial Sequence: Synthetic oligonucleotide
  Sense strand starting at position 143 of SEQ ID NO: 1887328
gggaaucaguguuuaccau

SEQ ID NO: 2463851 - RNA, 19 nt, Artificial Sequence
  Description of Artificial Sequence: Synthetic oligonucleotide
  Antisense strand to SEQ ID NO: 2463850
augguaaacacugauuccc

SEQ ID NO: 2463852 - RNA, 19 nt, Artificial Sequence
  Description of Artificial Sequence: Synthetic oligonucleotide
  Sense strand starting at position 144 of SEQ ID NO: 1887328
ggaaucaguguuuaccauu

SEQ ID NO: 2463853 - RNA, 19 nt, Artificial Sequence
  Description of Artificial Sequence: Synthetic oligonucleotide
  Antisense strand to SEQ ID NO: 2463852
aaugguaaacacugauucc

SEQ ID NO: 2463854 - RNA, 19 nt, Artificial Sequence
  Description of Artificial Sequence: Synthetic oligonucleotide
  Sense strand starting at position 160 of SEQ ID NO: 1887328
auuuaaggguccugauaga

SEQ ID NO: 2463855 - RNA, 19 nt, Artificial Sequence
  Description of Artificial Sequence: Synthetic oligonucleotide
  Antisense strand to SEQ ID NO: 2463854
ucuaucaggacccuuaaau

SEQ ID NO: 2463856 - RNA, 19 nt, Artificial Sequence
  Description of Artificial Sequence: Synthetic oligonucleotide
  Sense strand starting at position 246 of SEQ ID NO: 1887328
ugccguauuucucuucuga

SEQ ID NO: 2463857 - RNA, 19 nt, Artificial Sequence
  Description of Artificial Sequence: Synthetic oligonucleotide
  Antisense strand to SEQ ID NO: 2463856
ucagaagagaaauacggca

SEQ ID NO: 2463858 - RNA, 19 nt, Artificial Sequence
  Description of Artificial Sequence: Synthetic oligonucleotide
  Sense strand starting at position 248 of SEQ ID NO: 1887328
ccguauuucucuucugaau

SEQ ID NO: 2463859 - RNA, 19 nt, Artificial Sequence
  Description of Artificial Sequence: Synthetic oligonucleotide
  Antisense strand to SEQ ID NO: 2463858
auucagaagagaaauacgg

SEQ ID NO: 2463860 - RNA, 19 nt, Artificial Sequence
  Description of Artificial Sequence: Synthetic oligonucleotide
  Sense strand starting at position 254 of SEQ ID NO: 1887328
uucucuucugaauggaaca

SEQ ID NO: 2463861 - RNA, 19 nt, Artificial Sequence
  Description of Artificial Sequence: Synthetic oligonucleotide
  Antisense strand to SEQ ID NO: 2463860
uguuccauucagaagagaa

SEQ ID NO: 2463862 - RNA, 19 nt, Artificial Sequence
  Description of Artificial Sequence: Synthetic oligonucleotide
  Sense strand starting at position 291 of SEQ ID NO: 1887328
agucuccuuccacauguaa

SEQ ID NO: 2463863 - RNA, 19 nt, Artificial Sequence
  Description of Artificial Sequence: Synthetic oligonucleotide
  Antisense strand to SEQ ID NO: 2463862
uuacauguggaaggagacu

SEQ ID NO: 2463864 - RNA, 19 nt, Artificial Sequence
  Description of Artificial Sequence: Synthetic oligonucleotide
  Sense strand starting at position 345 of SEQ ID NO: 1887328
guacuaaagaacgguguuu

SEQ ID NO: 2463865 - RNA, 19 nt, Artificial Sequence
  Description of Artificial Sequence: Synthetic oligonucleotide
  Antisense strand to SEQ ID NO: 2463864
aaacaccguucuuuaguac

SEQ ID NO: 2463866 - RNA, 19 nt, Artificial Sequence
  Description of Artificial Sequence: Synthetic oligonucleotide
  Sense strand starting at position 350 of SEQ ID NO: 1887328
aaagaacgguguuuagagu

SEQ ID NO: 2463867 - RNA, 19 nt, Artificial Sequence
  Description of Artificial Sequence: Synthetic oligonucleotide
  Antisense strand to SEQ ID NO: 2463866
acucuaaacaccguucuuu

SEQ ID NO: 2463868 - RNA, 19 nt, Artificial Sequence
  Description of Artificial Sequence: Synthetic oligonucleotide
  Sense strand starting at position 486 of SEQ ID NO: 1887328
auuuauugcuucuaggaag

SEQ ID NO: 2463869 - RNA, 19 nt, Artificial Sequence
  Description of Artificial Sequence: Synthetic oligonucleotide
  Antisense strand to SEQ ID NO: 2463868
cuuccuagaagcaauaaau

SEQ ID NO: 2463870 - RNA, 19 nt, Artificial Sequence
  Description of Artificial Sequence: Synthetic oligonucleotide
  Sense strand starting at position 520 of SEQ ID NO: 1887328
uggaucucuucggcagaau

SEQ ID NO: 2463871 - RNA, 19 nt, Artificial Sequence
  Description of Artificial Sequence: Synthetic oligonucleotide
  Antisense strand to SEQ ID NO: 2463870
auucugccgaagagaucca

SEQ ID NO: 2463872 - RNA, 19 nt, Artificial Sequence
  Description of Artificial Sequence: Synthetic oligonucleotide
  Sense strand starting at position 521 of SEQ ID NO: 1887328
ggaucucuucggcagaauc

SEQ ID NO: 2463873 - RNA, 19 nt, Artificial Sequence
  Description of Artificial Sequence: Synthetic oligonucleotide
  Antisense strand to SEQ ID NO: 2463872
gauucugccgaagagaucc

SEQ ID NO: 2463874 - RNA, 19 nt, Artificial Sequence
  Description of Artificial Sequence: Synthetic oligonucleotide
  Sense strand starting at position 535 of SEQ ID NO: 1887328
gaaucacugcuuuguguga

SEQ ID NO: 2463875 - RNA, 19 nt, Artificial Sequence
  Description of Artificial Sequence: Synthetic oligonucleotide
  Antisense strand to SEQ ID NO: 2463874
ucacacaaagcagugauuc

SEQ ID NO: 2463876 - RNA, 19 nt, Artificial Sequence
  Description of Artificial Sequence: Synthetic oligonucleotide
  Sense strand starting at position 536 of SEQ ID NO: 1887328
aaucacugcuuugugugaa

SEQ ID NO: 2463877 - RNA, 19 nt, Artificial Sequence
  Description of Artificial Sequence: Synthetic oligonucleotide
  Antisense strand to SEQ ID NO: 2463876
uucacacaaagcagugauu

SEQ ID NO: 2463878 - RNA, 19 nt, Artificial Sequence
  Description of Artificial Sequence: Synthetic oligonucleotide
  Sense strand starting at position 564 of SEQ ID NO: 1887328
uguaauuauugagcaccua

SEQ ID NO: 2463879 - RNA, 19 nt, Artificial Sequence
  Description of Artificial Sequence: Synthetic oligonucleotide
  Antisense strand to SEQ ID NO: 2463878
uaggugcucaauaauuaca

SEQ ID NO: 2463880 - RNA, 19 nt, Artificial Sequence
  Description of Artificial Sequence: Synthetic oligonucleotide
  Sense strand starting at position 2124 of SEQ ID NO: 1887328
gagagccuuuggucaaaug

SEQ ID NO: 2463881 - RNA, 19 nt, Artificial Sequence
  Description of Artificial Sequence: Synthetic oligonucleotide
  Antisense strand to SEQ ID NO: 2463880
cauuugaccaaaggcucuc

SEQ ID NO: 2463882 - RNA, 19 nt, Artificial Sequence
  Description of Artificial Sequence: Synthetic oligonucleotide
  Sense strand starting at position 2298 of SEQ ID NO: 1887328
gaagccagcuucucuguaa

SEQ ID NO: 2463883 - RNA, 19 nt, Artificial Sequence
  Description of Artificial Sequence: Synthetic oligonucleotide
  Antisense strand to SEQ ID NO: 2463882
uuacagagaagcuggcuuc

SEQ ID NO: 2463884 - RNA, 19 nt, Artificial Sequence
  Description of Artificial Sequence: Synthetic oligonucleotide
  Sense strand starting at position 2309 of SEQ ID NO: 1887328
cucuguaaccaccgagaca

SEQ ID NO: 2463885 - RNA, 19 nt, Artificial Sequence
  Description of Artificial Sequence: Synthetic oligonucleotide
  Antisense strand to SEQ ID NO: 2463884
ugucucggugguuacagag

SEQ ID NO: 2463886 - RNA, 19 nt, Artificial Sequence
  Description of Artificial Sequence: Synthetic oligonucleotide
  Sense strand starting at position 2386 of SEQ ID NO: 1887328
gccuuaucaccuggucaug

SEQ ID NO: 2463887 - RNA, 19 nt, Artificial Sequence
  Description of Artificial Sequence: Synthetic oligonucleotide
  Antisense strand to SEQ ID NO: 2463886
caugaccaggugauaaggc

SEQ ID NO: 2463888 - RNA, 19 nt, Artificial Sequence
  Description of Artificial Sequence: Synthetic oligonucleotide
  Sense strand starting at position 2405 of SEQ ID NO: 1887328
uggccugagcgucaggaua

SEQ ID NO: 2463889 - RNA, 19 nt, Artificial Sequence
  Description of Artificial Sequence: Synthetic oligonucleotide
  Antisense strand to SEQ ID NO: 2463888
uauccugacgcucaggcca

SEQ ID NO: 2463890 - RNA, 19 nt, Artificial Sequence
  Description of Artificial Sequence: Synthetic oligonucleotide
  Sense strand starting at position 2520 of SEQ ID NO: 1887328
uuacaucuccuguguauuu

SEQ ID NO: 2463891 - RNA, 19 nt, Artificial Sequence
  Description of Artificial Sequence: Synthetic oligonucleotide
  Antisense strand to SEQ ID NO: 2463890
aaauacacaggagauguaa

SEQ ID NO: 2463892 - RNA, 19 nt, Artificial Sequence
  Description of Artificial Sequence: Synthetic oligonucleotide
  Sense strand starting at position 2587 of SEQ ID NO: 1887328
gguggacaucucuggcauu

SEQ ID NO: 2463893 - RNA, 19 nt, Artificial Sequence
  Description of Artificial Sequence: Synthetic oligonucleotide
  Antisense strand to SEQ ID NO: 2463892
aaugccagagauguccacc

SEQ ID NO: 2463894 - RNA, 19 nt, Artificial Sequence
  Description of Artificial Sequence: Synthetic oligonucleotide
  Sense strand starting at position 2661 of SEQ ID NO: 1887328
gaaaguucccaauacugug

SEQ ID NO: 2463895 - RNA, 19 nt, Artificial Sequence
  Description of Artificial Sequence: Synthetic oligonucleotide
  Antisense strand to SEQ ID NO: 2463894
cacaguauugggaacuuuc

SEQ ID NO: 2463896 - RNA, 19 nt, Artificial Sequence
  Description of Artificial Sequence: Synthetic oligonucleotide
  Sense strand starting at position 2669 of SEQ ID NO: 1887328
ccaauacugugauuaugau

SEQ ID NO: 2463897 - RNA, 19 nt, Artificial Sequence
  Description of Artificial Sequence: Synthetic oligonucleotide
  Antisense strand to SEQ ID NO: 2463896
aucauaaucacaguauugg

SEQ ID NO: 2463898 - RNA, 19 nt, Artificial Sequence
  Description of Artificial Sequence: Synthetic oligonucleotide
  Sense strand starting at position 3020 of SEQ ID NO: 1887328
ggaucaguuuaccucugga

SEQ ID NO: 2463899 - RNA, 19 nt, Artificial Sequence
  Description of Artificial Sequence: Synthetic oligonucleotide
  Antisense strand to SEQ ID NO: 2463898
uccagagguaaacugaucc

SEQ ID NO: 2463900 - RNA, 19 nt, Artificial Sequence
  Description of Artificial Sequence: Synthetic oligonucleotide
  Sense strand starting at position 3023 of SEQ ID NO: 1887328
ucaguuuaccucuggauuc

SEQ ID NO: 2463901 - RNA, 19 nt, Artificial Sequence
  Description of Artificial Sequence: Synthetic oligonucleotide
  Antisense strand to SEQ ID NO: 2463900
gaauccagagguaaacuga

SEQ ID NO: 2463902 - RNA, 19 nt, Artificial Sequence
  Description of Artificial Sequence: Synthetic oligonucleotide
  Sense strand starting at position 3106 of SEQ ID NO: 1887328
ccauucugacuucgguaau

SEQ ID NO: 2463903 - RNA, 19 nt, Artificial Sequence
  Description of Artificial Sequence: Synthetic oligonucleotide
  Antisense strand to SEQ ID NO: 2463902
auuaccgaagucagaaugg

SEQ ID NO: 2463904 - RNA, 19 nt, Artificial Sequence
  Description of Artificial Sequence: Synthetic oligonucleotide
  Sense strand starting at position 3109 of SEQ ID NO: 1887328
uucugacuucgguaaucac

SEQ ID NO: 2463905 - RNA, 19 nt, Artificial Sequence
  Description of Artificial Sequence: Synthetic oligonucleotide
  Antisense strand to SEQ ID NO: 2463904
gugauuaccgaagucagaa

SEQ ID NO: 2463906 - RNA, 19 nt, Artificial Sequence
  Description of Artificial Sequence: Synthetic oligonucleotide
  Sense strand starting at position 3112 of SEQ ID NO: 1887328
ugacuucgguaaucaccaa

SEQ ID NO: 2463907 - RNA, 19 nt, Artificial Sequence
  Description of Artificial Sequence: Synthetic oligonucleotide
  Antisense strand to SEQ ID NO: 2463906
uuggugauuaccgaaguca

SEQ ID NO: 2463908 - RNA, 19 nt, Artificial Sequence
  Description of Artificial Sequence: Synthetic oligonucleotide
  Sense strand starting at position 3169 of SEQ ID NO: 1887328
gcauuaaaugccuauugug

SEQ ID NO: 2463909 - RNA, 19 nt, Artificial Sequence
  Description of Artificial Sequence: Synthetic oligonucleotide
  Antisense strand to SEQ ID NO: 2463908
cacaauaggcauuuaaugc

SEQ ID NO: 2463910 - RNA, 19 nt, Artificial Sequence
  Description of Artificial Sequence: Synthetic oligonucleotide
  Sense strand starting at position 3178 of SEQ ID NO: 1887328
gccuauugugugccaagua

SEQ ID NO: 2463911 - RNA, 19 nt, Artificial Sequence
  Description of Artificial Sequence: Synthetic oligonucleotide
  Antisense strand to SEQ ID NO: 2463910
uacuuggcacacaauaggc

SEQ ID NO: 2463912 - RNA, 19 nt, Artificial Sequence
  Description of Artificial Sequence: Synthetic oligonucleotide
  Sense strand starting at position 3263 of SEQ ID NO: 1887328
uggccacuucucgaguuga

SEQ ID NO: 2463913 - RNA, 19 nt, Artificial Sequence
  Description of Artificial Sequence: Synthetic oligonucleotide
  Antisense strand to SEQ ID NO: 2463912
ucaacucgagaaguggcca

SEQ ID NO: 2463914 - RNA, 19 nt, Artificial Sequence
  Description of Artificial Sequence: Synthetic oligonucleotide
  Sense strand starting at position 3278 of SEQ ID NO: 1887328
uugauccucagguggaauu

SEQ ID NO: 2463915 - RNA, 19 nt, Artificial Sequence
  Description of Artificial Sequence: Synthetic oligonucleotide
  Antisense strand to SEQ ID NO: 2463914
aauuccaccugaggaucaa

SEQ ID NO: 2463916 - RNA, 19 nt, Artificial Sequence
  Description of Artificial Sequence: Synthetic oligonucleotide
  Sense strand starting at position 3422 of SEQ ID NO: 1887328
cccaguuaucucuagaaug

SEQ ID NO: 2463917 - RNA, 19 nt, Artificial Sequence
  Description of Artificial Sequence: Synthetic oligonucleotide
  Antisense strand to SEQ ID NO: 2463916
cauucuagagauaacuggg

SEQ ID NO: 2463918 - RNA, 19 nt, Artificial Sequence
  Description of Artificial Sequence: Synthetic oligonucleotide
  Sense strand starting at position 3691 of SEQ ID NO: 1887328
acucuuagauccguauaau

SEQ ID NO: 2463919 - RNA, 19 nt, Artificial Sequence
  Description of Artificial Sequence: Synthetic oligonucleotide
  Antisense strand to SEQ ID NO: 2463918
auuauacggaucuaagagu

SEQ ID NO: 2463920 - RNA, 19 nt, Artificial Sequence
  Description of Artificial Sequence: Synthetic oligonucleotide
  Sense strand starting at position 3692 of SEQ ID NO: 1887328
cucuuagauccguauaauc

SEQ ID NO: 2463921 - RNA, 19 nt, Artificial Sequence
  Description of Artificial Sequence: Synthetic oligonucleotide
  Antisense strand to SEQ ID NO: 2463920
gauuauacggaucuaagag

SEQ ID NO: 2463922 - RNA, 19 nt, Artificial Sequence
  Description of Artificial Sequence: Synthetic oligonucleotide
  Sense strand starting at position 3694 of SEQ ID NO: 1887328
cuuagauccguauaaucug

SEQ ID NO: 2463923 - RNA, 19 nt, Artificial Sequence
  Description of Artificial Sequence: Synthetic oligonucleotide
  Antisense strand to SEQ ID NO: 2463922
cagauuauacggaucuaag

SEQ ID NO: 2463924 - RNA, 19 nt, Artificial Sequence
  Description of Artificial Sequence: Synthetic oligonucleotide
  Sense strand starting at position 3726 of SEQ ID NO: 1887328
accuucugccguuauacau

SEQ ID NO: 2463925 - RNA, 19 nt, Artificial Sequence
  Description of Artificial Sequence: Synthetic oligonucleotide
  Antisense strand to SEQ ID NO: 2463924
auguauaacggcagaaggu

SEQ ID NO: 2463926 - RNA, 19 nt, Artificial Sequence
  Description of Artificial Sequence: Synthetic oligonucleotide
  Sense strand starting at position 3873 of SEQ ID NO: 1887328
cugucaccacauugguaaa

SEQ ID NO: 2463927 - RNA, 19 nt, Artificial Sequence
  Description of Artificial Sequence: Synthetic oligonucleotide
  Antisense strand to SEQ ID NO: 2463926
uuuaccaauguggugacag

SEQ ID NO: 2463928 - RNA, 19 nt, Artificial Sequence
  Description of Artificial Sequence: Synthetic oligonucleotide
  Sense strand starting at position 3921 of SEQ ID NO: 1887328
uguccuaacccgggaggaa

SEQ ID NO: 2463929 - RNA, 19 nt, Artificial Sequence
  Description of Artificial Sequence: Synthetic oligonucleotide
  Antisense strand to SEQ ID NO: 2463928
uuccucccggguuaggaca

SEQ ID NO: 2463930 - RNA, 19 nt, Artificial Sequence
  Description of Artificial Sequence: Synthetic oligonucleotide
  Sense strand starting at position 4 of SEQ ID NO: 1887329
gccuaacugcaugauguau

SEQ ID NO: 2463931 - RNA, 19 nt, Artificial Sequence
  Description of Artificial Sequence: Synthetic oligonucleotide
  Antisense strand to SEQ ID NO: 2463930
auacaucaugcaguuaggc

SEQ ID NO: 2463932 - RNA, 19 nt, Artificial Sequence
  Description of Artificial Sequence: Synthetic oligonucleotide
  Sense strand starting at position 45 of SEQ ID NO: 1887329
ugaauauacugagaauuuc

SEQ ID NO: 2463933 - RNA, 19 nt, Artificial Sequence
  Description of Artificial Sequence: Synthetic oligonucleotide
  Antisense strand to SEQ ID NO: 2463932
gaaauucucaguauauuca

SEQ ID NO: 2463934 - RNA, 19 nt, Artificial Sequence
  Description of Artificial Sequence: Synthetic oligonucleotide
  Sense strand starting at position 61 of SEQ ID NO: 1887329
uuccuucuugcacagagua

SEQ ID NO: 2463935 - RNA, 19 nt, Artificial Sequence
  Description of Artificial Sequence: Synthetic oligonucleotide
  Antisense strand to SEQ ID NO: 2463934
uacucugugcaagaaggaa

SEQ ID NO: 2463936 - RNA, 19 nt, Artificial Sequence
  Description of Artificial Sequence: Synthetic oligonucleotide
  Sense strand starting at position 259 of SEQ ID NO: 1887329
cucuaauuguauccaggau

SEQ ID NO: 2463937 - RNA, 19 nt, Artificial Sequence
  Description of Artificial Sequence: Synthetic oligonucleotide
  Antisense strand to SEQ ID NO: 2463936
auccuggauacaauuagag

SEQ ID NO: 2463938 - RNA, 19 nt, Artificial Sequence
  Description of Artificial Sequence: Synthetic oligonucleotide
  Sense strand starting at position 612 of SEQ ID NO: 1887329
agaacugccucugucacua

SEQ ID NO: 2463939 - RNA, 19 nt, Artificial Sequence
  Description of Artificial Sequence: Synthetic oligonucleotide
  Antisense strand to SEQ ID NO: 2463938
uagugacagaggcaguucu

SEQ ID NO: 2463940 - RNA, 19 nt, Artificial Sequence
  Description of Artificial Sequence: Synthetic oligonucleotide
  Sense strand starting at position 698 of SEQ ID NO: 1887329
uuaucuuaccuauaugagu

SEQ ID NO: 2463941 - RNA, 19 nt, Artificial Sequence
  Description of Artificial Sequence: Synthetic oligonucleotide
  Antisense strand to SEQ ID NO: 2463940
acucauauagguaagauaa

SEQ ID NO: 2463942 - RNA, 19 nt, Artificial Sequence
  Description of Artificial Sequence: Synthetic oligonucleotide
  Sense strand starting at position 1082 of SEQ ID NO: 1887329
aagaguuacuauguacagu

SEQ ID NO: 2463943 - RNA, 19 nt, Artificial Sequence
  Description of Artificial Sequence: Synthetic oligonucleotide
  Antisense strand to SEQ ID NO: 2463942
acuguacauaguaacucuu

SEQ ID NO: 2463944 - RNA, 19 nt, Artificial Sequence
  Description of Artificial Sequence: Synthetic oligonucleotide
  Sense strand starting at position 1083 of SEQ ID NO: 1887329
agaguuacuauguacagua

SEQ ID NO: 2463945 - RNA, 19 nt, Artificial Sequence
  Description of Artificial Sequence: Synthetic oligonucleotide
  Antisense strand to SEQ ID NO: 2463944
uacuguacauaguaacucu

SEQ ID NO: 2463946 - RNA, 19 nt, Artificial Sequence
  Description of Artificial Sequence: Synthetic oligonucleotide
  Sense strand starting at position 1085 of SEQ ID NO: 1887329
aguuacuauguacaguaaa

SEQ ID NO: 2463947 - RNA, 19 nt, Artificial Sequence
  Description of Artificial Sequence: Synthetic oligonucleotide
  Antisense strand to SEQ ID NO: 2463946
uuuacuguacauaguaacu

SEQ ID NO: 2463948 - RNA, 19 nt, Artificial Sequence
  Description of Artificial Sequence: Synthetic oligonucleotide
  Sense strand starting at position 1119 of SEQ ID NO: 1887329
acccucagcuauucugaga

SEQ ID NO: 2463949 - RNA, 19 nt, Artificial Sequence
  Description of Artificial Sequence: Synthetic oligonucleotide
  Antisense strand to SEQ ID NO: 2463948
ucucagaauagcugagggu

SEQ ID NO: 2463950 - RNA, 19 nt, Artificial Sequence
  Description of Artificial Sequence: Synthetic oligonucleotide
  Sense strand starting at position 1280 of SEQ ID NO: 1887329
gaaagccaggacuguuaaa

SEQ ID NO: 2463951 - RNA, 19 nt, Artificial Sequence
  Description of Artificial Sequence: Synthetic oligonucleotide
  Antisense strand to SEQ ID NO: 2463950
uuuaacaguccuggcuuuc

SEQ ID NO: 2463952 - RNA, 19 nt, Artificial Sequence
  Description of Artificial Sequence: Synthetic oligonucleotide
  Sense strand starting at position 1670 of SEQ ID NO: 1887329
auuaaaucaugccuagaug

SEQ ID NO: 2463953 - RNA, 19 nt, Artificial Sequence
  Description of Artificial Sequence: Synthetic oligonucleotide
  Antisense strand to SEQ ID NO: 2463952
caucuaggcaugauuuaau

SEQ ID NO: 2463954 - RNA, 19 nt, Artificial Sequence
  Description of Artificial Sequence: Synthetic oligonucleotide
  Sense strand starting at position 1673 of SEQ ID NO: 1887329
aaaucaugccuagaugguu

SEQ ID NO: 2463955 - RNA, 19 nt, Artificial Sequence
  Description of Artificial Sequence: Synthetic oligonucleotide
  Antisense strand to SEQ ID NO: 2463954
aaccaucuaggcaugauuu

SEQ ID NO: 2463956 - RNA, 19 nt, Artificial Sequence
  Description of Artificial Sequence: Synthetic oligonucleotide
  Sense strand starting at position 1679 of SEQ ID NO: 1887329
ugccuagaugguuaugcua

SEQ ID NO: 2463957 - RNA, 19 nt, Artificial Sequence
  Description of Artificial Sequence: Synthetic oligonucleotide
  Antisense strand to SEQ ID NO: 2463956
uagcauaaccaucuaggca

SEQ ID NO: 2463958 - RNA, 19 nt, Artificial Sequence
  Description of Artificial Sequence: Synthetic oligonucleotide
  Sense strand starting at position 1797 of SEQ ID NO: 1887329
aucagugagucccuuugau

SEQ ID NO: 2463959 - RNA, 19 nt, Artificial Sequence
  Description of Artificial Sequence: Synthetic oligonucleotide
  Antisense strand to SEQ ID NO: 2463958
aucaaagggacucacugau

SEQ ID NO: 2463960 - RNA, 19 nt, Artificial Sequence
  Description of Artificial Sequence: Synthetic oligonucleotide
  Sense strand starting at position 1838 of SEQ ID NO: 1887329
cucacacugcgauaaggau

SEQ ID NO: 2463961 - RNA, 19 nt, Artificial Sequence
  Description of Artificial Sequence: Synthetic oligonucleotide
  Antisense strand to SEQ ID NO: 2463960
auccuuaucgcagugugag

SEQ ID NO: 2463962 - RNA, 19 nt, Artificial Sequence
  Description of Artificial Sequence: Synthetic oligonucleotide
  Sense strand starting at position 1844 of SEQ ID NO: 1887329
cugcgauaaggauacuauc

SEQ ID NO: 2463963 - RNA, 19 nt, Artificial Sequence
  Description of Artificial Sequence: Synthetic oligonucleotide
  Antisense strand to SEQ ID NO: 2463962
gauaguauccuuaucgcag

SEQ ID NO: 2463964 - RNA, 19 nt, Artificial Sequence
  Description of Artificial Sequence: Synthetic oligonucleotide
  Sense strand starting at position 1997 of SEQ ID NO: 1887329
agugcaaucaggugaaaua

SEQ ID NO: 2463965 - RNA, 19 nt, Artificial Sequence
  Description of Artificial Sequence: Synthetic oligonucleotide
  Antisense strand to SEQ ID NO: 2463964
uauuucaccugauugcacu

SEQ ID NO: 2463966 - RNA, 19 nt, Artificial Sequence
  Description of Artificial Sequence: Synthetic oligonucleotide
  Sense strand starting at position 1998 of SEQ ID NO: 1887329
gugcaaucaggugaaauac

SEQ ID NO: 2463967 - RNA, 19 nt, Artificial Sequence
  Description of Artificial Sequence: Synthetic oligonucleotide
  Antisense strand to SEQ ID NO: 2463966
guauuucaccugauugcac

SEQ ID NO: 2463968 - RNA, 19 nt, Artificial Sequence
  Description of Artificial Sequence: Synthetic oligonucleotide
  Sense strand starting at position 2007 of SEQ ID NO: 1887329
ggugaaauaccagacgcuu

SEQ ID NO: 2463969 - RNA, 19 nt, Artificial Sequence
  Description of Artificial Sequence: Synthetic oligonucleotide
  Antisense strand to SEQ ID NO: 2463968
aagcgucugguauuucacc

SEQ ID NO: 2463970 - RNA, 19 nt, Artificial Sequence
  Description of Artificial Sequence: Synthetic oligonucleotide
  Sense strand starting at position 2310 of SEQ ID NO: 1887329
uuccuuguucgcucggauu

SEQ ID NO: 2463971 - RNA, 19 nt, Artificial Sequence
  Description of Artificial Sequence: Synthetic oligonucleotide
  Antisense strand to SEQ ID NO: 2463970
aauccgagcgaacaaggaa

SEQ ID NO: 2463972 - RNA, 19 nt, Artificial Sequence
  Description of Artificial Sequence: Synthetic oligonucleotide
  Sense strand starting at position 2322 of SEQ ID NO: 1887329
ucggauugguacucauauc

SEQ ID NO: 2463973 - RNA, 19 nt, Artificial Sequence
  Description of Artificial Sequence: Synthetic oligonucleotide
  Antisense strand to SEQ ID NO: 2463972
gauaugaguaccaauccga

SEQ ID NO: 2463974 - RNA, 19 nt, Artificial Sequence
  Description of Artificial Sequence: Synthetic oligonucleotide
  Sense strand starting at position 2323 of SEQ ID NO: 1887329
cggauugguacucauaucu

SEQ ID NO: 2463975 - RNA, 19 nt, Artificial Sequence
  Description of Artificial Sequence: Synthetic oligonucleotide
  Antisense strand to SEQ ID NO: 2463974
agauaugaguaccaauccg

SEQ ID NO: 2463976 - RNA, 19 nt, Artificial Sequence
  Description of Artificial Sequence: Synthetic oligonucleotide
  Sense strand starting at position 2421 of SEQ ID NO: 1887329
agacuuagguucucaguga

SEQ ID NO: 2463977 - RNA, 19 nt, Artificial Sequence
  Description of Artificial Sequence: Synthetic oligonucleotide
  Antisense strand to SEQ ID NO: 2463976
ucacugagaaccuaagucu

SEQ ID NO: 2463978 - RNA, 19 nt, Artificial Sequence
  Description of Artificial Sequence: Synthetic oligonucleotide
  Sense strand starting at position 2435 of SEQ ID NO: 1887329
agugaagcauuccugaaau

SEQ ID NO: 2463979 - RNA, 19 nt, Artificial Sequence
  Description of Artificial Sequence: Synthetic oligonucleotide
  Antisense strand to SEQ ID NO: 2463978
auuucaggaaugcuucacu

SEQ ID NO: 2463980 - RNA, 19 nt, Artificial Sequence
  Description of Artificial Sequence: Synthetic oligonucleotide
  Sense strand starting at position 2437 of SEQ ID NO: 1887329
ugaagcauuccugaaaugu

SEQ ID NO: 2463981 - RNA, 19 nt, Artificial Sequence
  Description of Artificial Sequence: Synthetic oligonucleotide
  Antisense strand to SEQ ID NO: 2463980
acauuucaggaaugcuuca

SEQ ID NO: 2463982 - RNA, 19 nt, Artificial Sequence
  Description of Artificial Sequence: Synthetic oligonucleotide
  Sense strand starting at position 2574 of SEQ ID NO: 1887329
cuuugagacuuacccugua

SEQ ID NO: 2463983 - RNA, 19 nt, Artificial Sequence
  Description of Artificial Sequence: Synthetic oligonucleotide
  Antisense strand to SEQ ID NO: 2463982
uacaggguaagucucaaag

SEQ ID NO: 2463984 - RNA, 19 nt, Artificial Sequence
  Description of Artificial Sequence: Synthetic oligonucleotide
  Sense strand starting at position 2577 of SEQ ID NO: 1887329
ugagacuuacccuguauca

SEQ ID NO: 2463985 - RNA, 19 nt, Artificial Sequence
  Description of Artificial Sequence: Synthetic oligonucleotide
  Antisense strand to SEQ ID NO: 2463984
ugauacaggguaagucuca

SEQ ID NO: 2463986 - RNA, 19 nt, Artificial Sequence
  Description of Artificial Sequence: Synthetic oligonucleotide
  Sense strand starting at position 2768 of SEQ ID NO: 1887329
acuccacggcuuugauaaa

SEQ ID NO: 2463987 - RNA, 19 nt, Artificial Sequence
  Description of Artificial Sequence: Synthetic oligonucleotide
  Antisense strand to SEQ ID NO: 2463986
uuuaucaaagccguggagu

SEQ ID NO: 2463988 - RNA, 19 nt, Artificial Sequence
  Description of Artificial Sequence: Synthetic oligonucleotide
  Sense strand starting at position 2775 of SEQ ID NO: 1887329
ggcuuugauaaauagaguu

SEQ ID NO: 2463989 - RNA, 19 nt, Artificial Sequence
  Description of Artificial Sequence: Synthetic oligonucleotide
  Antisense strand to SEQ ID NO: 2463988
aacucuauuuaucaaagcc

SEQ ID NO: 2463990 - RNA, 19 nt, Artificial Sequence
  Description of Artificial Sequence: Synthetic oligonucleotide
  Sense strand starting at position 3020 of SEQ ID NO: 1887329
gagauuggauaugaaagau

SEQ ID NO: 2463991 - RNA, 19 nt, Artificial Sequence
  Description of Artificial Sequence: Synthetic oligonucleotide
  Antisense strand to SEQ ID NO: 2463990
aucuuucauauccaaucuc

SEQ ID NO: 2463992 - RNA, 19 nt, Artificial Sequence
  Description of Artificial Sequence: Synthetic oligonucleotide
  Sense strand starting at position 3035 of SEQ ID NO: 1887329
agaucuuuccaaggguuag

SEQ ID NO: 2463993 - RNA, 19 nt, Artificial Sequence
  Description of Artificial Sequence: Synthetic oligonucleotide
  Antisense strand to SEQ ID NO: 2463992
cuaacccuuggaaagaucu

SEQ ID NO: 2463994 - RNA, 19 nt, Artificial Sequence
  Description of Artificial Sequence: Synthetic oligonucleotide
  Sense strand starting at position 3084 of SEQ ID NO: 1887329
uggcauguggcugaaggau

SEQ ID NO: 2463995 - RNA, 19 nt, Artificial Sequence
  Description of Artificial Sequence: Synthetic oligonucleotide
  Antisense strand to SEQ ID NO: 2463994
auccuucagccacaugcca

SEQ ID NO: 2463996 - RNA, 19 nt, Artificial Sequence
  Description of Artificial Sequence: Synthetic oligonucleotide
  Sense strand starting at position 3197 of SEQ ID NO: 1887329
ugagaaggcugguucuaac

SEQ ID NO: 2463997 - RNA, 19 nt, Artificial Sequence
  Description of Artificial Sequence: Synthetic oligonucleotide
  Antisense strand to SEQ ID NO: 2463996
guuagaaccagccuucuca

SEQ ID NO: 2463998 - RNA, 19 nt, Artificial Sequence
  Description of Artificial Sequence: Synthetic oligonucleotide
  Sense strand starting at position 3293 of SEQ ID NO: 1887329
ggcugcuaucacuaaagca

SEQ ID NO: 2463999 - RNA, 19 nt, Artificial Sequence
  Description of Artificial Sequence: Synthetic oligonucleotide
  Antisense strand to SEQ ID NO: 2463998
ugcuuuagugauagcagcc

SEQ ID NO: 2464000 - RNA, 19 nt, Artificial Sequence
  Description of Artificial Sequence: Synthetic oligonucleotide
  Sense strand starting at position 3356 of SEQ ID NO: 1887329
ggcucaauugugcaauaca

SEQ ID NO: 2464001 - RNA, 19 nt, Artificial Sequence
  Description of Artificial Sequence: Synthetic oligonucleotide
  Antisense strand to SEQ ID NO: 2464000
uguauugcacaauugagcc

SEQ ID NO: 2464002 - RNA, 19 nt, Artificial Sequence
  Description of Artificial Sequence: Synthetic oligonucleotide
  Sense strand starting at position 3465 of SEQ ID NO: 1887329
ucaugaauaucucccguau

SEQ ID NO: 2464003 - RNA, 19 nt, Artificial Sequence
  Description of Artificial Sequence: Synthetic oligonucleotide
  Antisense strand to SEQ ID NO: 2464002
auacgggagauauucauga

SEQ ID NO: 2464004 - RNA, 19 nt, Artificial Sequence
  Description of Artificial Sequence: Synthetic oligonucleotide
  Sense strand starting at position 3469 of SEQ ID NO: 1887329
gaauaucucccguauuagc

SEQ ID NO: 2464005 - RNA, 19 nt, Artificial Sequence
  Description of Artificial Sequence: Synthetic oligonucleotide
  Antisense strand to SEQ ID NO: 2464004
gcuaauacgggagauauuc

SEQ ID NO: 2464006 - RNA, 19 nt, Artificial Sequence
  Description of Artificial Sequence: Synthetic oligonucleotide
  Sense strand starting at position 3525 of SEQ ID NO: 1887329
gauugaagggugcaaugua

SEQ ID NO: 2464007 - RNA, 19 nt, Artificial Sequence
  Description of Artificial Sequence: Synthetic oligonucleotide
  Antisense strand to SEQ ID NO: 2464006
uacauugcacccuucaauc

SEQ ID NO: 2464008 - RNA, 19 nt, Artificial Sequence
  Description of Artificial Sequence: Synthetic oligonucleotide
  Sense strand starting at position 3653 of SEQ ID NO: 1887329
cugacaguguaacuagaau

SEQ ID NO: 2464009 - RNA, 19 nt, Artificial Sequence
  Description of Artificial Sequence: Synthetic oligonucleotide
  Antisense strand to SEQ ID NO: 2464008
auucuaguuacacugucag

SEQ ID NO: 2464010 - RNA, 19 nt, Artificial Sequence
  Description of Artificial Sequence: Synthetic oligonucleotide
  Sense strand starting at position 158 of SEQ ID NO: 1887330
cggagaaaucaccgccaac

SEQ ID NO: 2464011 - RNA, 19 nt, Artificial Sequence
  Description of Artificial Sequence: Synthetic oligonucleotide
  Antisense strand to SEQ ID NO: 2464010
guuggcggugauuucuccg

SEQ ID NO: 2464012 - RNA, 19 nt, Artificial Sequence
  Description of Artificial Sequence: Synthetic oligonucleotide
  Sense strand starting at position 293 of SEQ ID NO: 1887330
uggucuuaauucucagagu

SEQ ID NO: 2464013 - RNA, 19 nt, Artificial Sequence
  Description of Artificial Sequence: Synthetic oligonucleotide
  Antisense strand to SEQ ID NO: 2464012
acucugagaauuaagacca

SEQ ID NO: 2464014 - RNA, 19 nt, Artificial Sequence
  Description of Artificial Sequence: Synthetic oligonucleotide
  Sense strand starting at position 310 of SEQ ID NO: 1887330
gugucauaagcaugaaaug

SEQ ID NO: 2464015 - RNA, 19 nt, Artificial Sequence
  Description of Artificial Sequence: Synthetic oligonucleotide
  Antisense strand to SEQ ID NO: 2464014
cauuucaugcuuaugacac

SEQ ID NO: 2464016 - RNA, 19 nt, Artificial Sequence
  Description of Artificial Sequence: Synthetic oligonucleotide
  Sense strand starting at position 737 of SEQ ID NO: 1887330
gauguuguucgucacagaa

SEQ ID NO: 2464017 - RNA, 19 nt, Artificial Sequence
  Description of Artificial Sequence: Synthetic oligonucleotide
  Antisense strand to SEQ ID NO: 2464016
uucugugacgaacaacauc

SEQ ID NO: 2464018 - RNA, 19 nt, Artificial Sequence
  Description of Artificial Sequence: Synthetic oligonucleotide
  Sense strand starting at position 994 of SEQ ID NO: 1887330
cugugaaaugcacauucca

SEQ ID NO: 2464019 - RNA, 19 nt, Artificial Sequence
  Description of Artificial Sequence: Synthetic oligonucleotide
  Antisense strand to SEQ ID NO: 2464018
uggaaugugcauuucacag

SEQ ID NO: 2464020 - RNA, 19 nt, Artificial Sequence
  Description of Artificial Sequence: Synthetic oligonucleotide
  Sense strand starting at position 1177 of SEQ ID NO: 1887330
auacuuauugaccgagaga

SEQ ID NO: 2464021 - RNA, 19 nt, Artificial Sequence
  Description of Artificial Sequence: Synthetic oligonucleotide
  Antisense strand to SEQ ID NO: 2464020
ucucucggucaauaaguau

SEQ ID NO: 2464022 - RNA, 19 nt, Artificial Sequence
  Description of Artificial Sequence: Synthetic oligonucleotide
  Sense strand starting at position 1253 of SEQ ID NO: 1887330
gguugaccugauugaugga

SEQ ID NO: 2464023 - RNA, 19 nt, Artificial Sequence
  Description of Artificial Sequence: Synthetic oligonucleotide
  Antisense strand to SEQ ID NO: 2464022
uccaucaaucaggucaacc

SEQ ID NO: 2464024 - RNA, 19 nt, Artificial Sequence
  Description of Artificial Sequence: Synthetic oligonucleotide
  Sense strand starting at position 1343 of SEQ ID NO: 1887330
cggauaauauggguucagu

SEQ ID NO: 2464025 - RNA, 19 nt, Artificial Sequence
  Description of Artificial Sequence: Synthetic oligonucleotide
  Antisense strand to SEQ ID NO: 2464024
acugaacccauauuauccg

SEQ ID NO: 2464026 - RNA, 19 nt, Artificial Sequence
  Description of Artificial Sequence: Synthetic oligonucleotide
  Sense strand starting at position 1374 of SEQ ID NO: 1887330
ccaggauguuaucugcaaa

SEQ ID NO: 2464027 - RNA, 19 nt, Artificial Sequence
  Description of Artificial Sequence: Synthetic oligonucleotide
  Antisense strand to SEQ ID NO: 2464026
uuugcagauaacauccugg

SEQ ID NO: 2464028 - RNA, 19 nt, Artificial Sequence
  Description of Artificial Sequence: Synthetic oligonucleotide
  Sense strand starting at position 1443 of SEQ ID NO: 1887330
gggagaugcagccggaaau

SEQ ID NO: 2464029 - RNA, 19 nt, Artificial Sequence
  Description of Artificial Sequence: Synthetic oligonucleotide
  Antisense strand to SEQ ID NO: 2464028
auuuccggcugcaucuccc

SEQ ID NO: 2464030 - RNA, 19 nt, Artificial Sequence
  Description of Artificial Sequence: Synthetic oligonucleotide
  Sense strand starting at position 2032 of SEQ ID NO: 1887330
cugggucuccagugaaacu

SEQ ID NO: 2464031 - RNA, 19 nt, Artificial Sequence
  Description of Artificial Sequence: Synthetic oligonucleotide
  Antisense strand to SEQ ID NO: 2464030
aguuucacuggagacccag

SEQ ID NO: 2464032 - RNA, 19 nt, Artificial Sequence
  Description of Artificial Sequence: Synthetic oligonucleotide
  Sense strand starting at position 2033 of SEQ ID NO: 1887330
ugggucuccagugaaacuu

SEQ ID NO: 2464033 - RNA, 19 nt, Artificial Sequence
  Description of Artificial Sequence: Synthetic oligonucleotide
  Antisense strand to SEQ ID NO: 2464032
aaguuucacuggagaccca

SEQ ID NO: 2464034 - RNA, 19 nt, Artificial Sequence
  Description of Artificial Sequence: Synthetic oligonucleotide
  Sense strand starting at position 2056 of SEQ ID NO: 1887330
ccauuugcaucugcaagua

SEQ ID NO: 2464035 - RNA, 19 nt, Artificial Sequence
  Description of Artificial Sequence: Synthetic oligonucleotide
  Antisense strand to SEQ ID NO: 2464034
uacuugcagaugcaaaugg

SEQ ID NO: 2464036 - RNA, 19 nt, Artificial Sequence
  Description of Artificial Sequence: Synthetic oligonucleotide
  Sense strand starting at position 2142 of SEQ ID NO: 1887330
ugacucaucccgcauaauu

SEQ ID NO: 2464037 - RNA, 19 nt, Artificial Sequence
  Description of Artificial Sequence: Synthetic oligonucleotide
  Antisense strand to SEQ ID NO: 2464036
aauuaugcgggaugaguca

SEQ ID NO: 2464038 - RNA, 19 nt, Artificial Sequence
  Description of Artificial Sequence: Synthetic oligonucleotide
  Sense strand starting at position 2205 of SEQ ID NO: 1887330
caguccugucuugaaagcu

SEQ ID NO: 2464039 - RNA, 19 nt, Artificial Sequence
  Description of Artificial Sequence: Synthetic oligonucleotide
  Antisense strand to SEQ ID NO: 2464038
agcuuucaagacaggacug

SEQ ID NO: 2464040 - RNA, 19 nt, Artificial Sequence
  Description of Artificial Sequence: Synthetic oligonucleotide
  Sense strand starting at position 2213 of SEQ ID NO: 1887330
ucuugaaagcugugaagac

SEQ ID NO: 2464041 - RNA, 19 nt, Artificial Sequence
  Description of Artificial Sequence: Synthetic oligonucleotide
  Antisense strand to SEQ ID NO: 2464040
gucuucacagcuuucaaga

SEQ ID NO: 2464042 - RNA, 19 nt, Artificial Sequence
  Description of Artificial Sequence: Synthetic oligonucleotide
  Sense strand starting at position 2353 of SEQ ID NO: 1887330
aaauguuaauguguuggga

SEQ ID NO: 2464043 - RNA, 19 nt, Artificial Sequence
  Description of Artificial Sequence: Synthetic oligonucleotide
  Antisense strand to SEQ ID NO: 2464042
ucccaacacauuaacauuu

SEQ ID NO: 2464044 - RNA, 19 nt, Artificial Sequence
  Description of Artificial Sequence: Synthetic oligonucleotide
  Sense strand starting at position 2356 of SEQ ID NO: 1887330
uguuaauguguugggauga

SEQ ID NO: 2464045 - RNA, 19 nt, Artificial Sequence
  Description of Artificial Sequence: Synthetic oligonucleotide
  Antisense strand to SEQ ID NO: 2464044
ucaucccaacacauuaaca

SEQ ID NO: 2464046 - RNA, 19 nt, Artificial Sequence
  Description of Artificial Sequence: Synthetic oligonucleotide
  Sense strand starting at position 2461 of SEQ ID NO: 1887330
uagguauucguugacauac

SEQ ID NO: 2464047 - RNA, 19 nt, Artificial Sequence
  Description of Artificial Sequence: Synthetic oligonucleotide
  Antisense strand to SEQ ID NO: 2464046
guaugucaacgaauaccua

SEQ ID NO: 2464048 - RNA, 19 nt, Artificial Sequence
  Description of Artificial Sequence: Synthetic oligonucleotide
  Sense strand starting at position 2502 of SEQ ID NO: 1887330
guauguauugccgugugua

SEQ ID NO: 2464049 - RNA, 19 nt, Artificial Sequence
  Description of Artificial Sequence: Synthetic oligonucleotide
  Antisense strand to SEQ ID NO: 2464048
uacacacggcaauacauac

SEQ ID NO: 2464050 - RNA, 19 nt, Artificial Sequence
  Description of Artificial Sequence: Synthetic oligonucleotide
  Sense strand starting at position 2504 of SEQ ID NO: 1887330
auguauugccguguguaca

SEQ ID NO: 2464051 - RNA, 19 nt, Artificial Sequence
  Description of Artificial Sequence: Synthetic oligonucleotide
  Antisense strand to SEQ ID NO: 2464050
uguacacacggcaauacau

SEQ ID NO: 2464052 - RNA, 19 nt, Artificial Sequence
  Description of Artificial Sequence: Synthetic oligonucleotide
  Sense strand starting at position 2577 of SEQ ID NO: 1887330
acgagaagucguguugcuc

SEQ ID NO: 2464053 - RNA, 19 nt, Artificial Sequence
  Description of Artificial Sequence: Synthetic oligonucleotide
  Antisense strand to SEQ ID NO: 2464052
gagcaacacgacuucucgu

SEQ ID NO: 2464054 - RNA, 19 nt, Artificial Sequence
  Description of Artificial Sequence: Synthetic oligonucleotide
  Sense strand starting at position 2578 of SEQ ID NO: 1887330
cgagaagucguguugcuca

SEQ ID NO: 2464055 - RNA, 19 nt, Artificial Sequence
  Description of Artificial Sequence: Synthetic oligonucleotide
  Antisense strand to SEQ ID NO: 2464054
ugagcaacacgacuucucg

SEQ ID NO: 2464056 - RNA, 19 nt, Artificial Sequence
  Description of Artificial Sequence: Synthetic oligonucleotide
  Sense strand starting at position 2683 of SEQ ID NO: 1887330
acuggaguucuggaaugca

SEQ ID NO: 2464057 - RNA, 19 nt, Artificial Sequence
  Description of Artificial Sequence: Synthetic oligonucleotide
  Antisense strand to SEQ ID NO: 2464056
ugcauuccagaacuccagu

SEQ ID NO: 2464058 - RNA, 19 nt, Artificial Sequence
  Description of Artificial Sequence: Synthetic oligonucleotide
  Sense strand starting at position 2686 of SEQ ID NO: 1887330
ggaguucuggaaugcaucu

SEQ ID NO: 2464059 - RNA, 19 nt, Artificial Sequence
  Description of Artificial Sequence: Synthetic oligonucleotide
  Antisense strand to SEQ ID NO: 2464058
agaugcauuccagaacucc

SEQ ID NO: 2464060 - RNA, 19 nt, Artificial Sequence
  Description of Artificial Sequence: Synthetic oligonucleotide
  Sense strand starting at position 2795 of SEQ ID NO: 1887330
uaucaagagauguggguuu

SEQ ID NO: 2464061 - RNA, 19 nt, Artificial Sequence
  Description of Artificial Sequence: Synthetic oligonucleotide
  Antisense strand to SEQ ID NO: 2464060
aaacccacaucucuugaua

SEQ ID NO: 2464062 - RNA, 19 nt, Artificial Sequence
  Description of Artificial Sequence: Synthetic oligonucleotide
  Sense strand starting at position 2840 of SEQ ID NO: 1887330
gggugacagaauugucugu

SEQ ID NO: 2464063 - RNA, 19 nt, Artificial Sequence
  Description of Artificial Sequence: Synthetic oligonucleotide
  Antisense strand to SEQ ID NO: 2464062
acagacaauucugucaccc

SEQ ID NO: 2464064 - RNA, 19 nt, Artificial Sequence
  Description of Artificial Sequence: Synthetic oligonucleotide
  Sense strand starting at position 2844 of SEQ ID NO: 1887330
gacagaauugucuguggag

SEQ ID NO: 2464065 - RNA, 19 nt, Artificial Sequence
  Description of Artificial Sequence: Synthetic oligonucleotide
  Antisense strand to SEQ ID NO: 2464064
cuccacagacaauucuguc

SEQ ID NO: 2464066 - RNA, 19 nt, Artificial Sequence
  Description of Artificial Sequence: Synthetic oligonucleotide
  Sense strand starting at position 2845 of SEQ ID NO: 1887330
acagaauugucuguggagu

SEQ ID NO: 2464067 - RNA, 19 nt, Artificial Sequence
  Description of Artificial Sequence: Synthetic oligonucleotide
  Antisense strand to SEQ ID NO: 2464066
acuccacagacaauucugu

SEQ ID NO: 2464068 - RNA, 19 nt, Artificial Sequence
  Description of Artificial Sequence: Synthetic oligonucleotide
  Sense strand starting at position 2846 of SEQ ID NO: 1887330
cagaauugucuguggagug

SEQ ID NO: 2464069 - RNA, 19 nt, Artificial Sequence
  Description of Artificial Sequence: Synthetic oligonucleotide
  Antisense strand to SEQ ID NO: 2464068
cacuccacagacaauucug

SEQ ID NO: 2464070 - RNA, 19 nt, Artificial Sequence
  Description of Artificial Sequence: Synthetic oligonucleotide
  Sense strand starting at position 2933 of SEQ ID NO: 1887330
ggagcuggccaagaguauu

SEQ ID NO: 2464071 - RNA, 19 nt, Artificial Sequence
  Description of Artificial Sequence: Synthetic oligonucleotide
  Antisense strand to SEQ ID NO: 2464070
aauacucuuggccagcucc

SEQ ID NO: 2464072 - RNA, 19 nt, Artificial Sequence
  Description of Artificial Sequence: Synthetic oligonucleotide
  Sense strand starting at position 3254 of SEQ ID NO: 1887330
ugcacuuccucucugaaga

SEQ ID NO: 2464073 - RNA, 19 nt, Artificial Sequence
  Description of Artificial Sequence: Synthetic oligonucleotide
  Antisense strand to SEQ ID NO: 2464072
ucuucagagaggaagugca

SEQ ID NO: 2464074 - RNA, 19 nt, Artificial Sequence
  Description of Artificial Sequence: Synthetic oligonucleotide
  Sense strand starting at position 3255 of SEQ ID NO: 1887330
gcacuuccucucugaagag

SEQ ID NO: 2464075 - RNA, 19 nt, Artificial Sequence
  Description of Artificial Sequence: Synthetic oligonucleotide
  Antisense strand to SEQ ID NO: 2464074
cucuucagagaggaagugc

SEQ ID NO: 2464076 - RNA, 19 nt, Artificial Sequence
  Description of Artificial Sequence: Synthetic oligonucleotide
  Sense strand starting at position 3365 of SEQ ID NO: 1887330
gaggguuugcuugaccaga

SEQ ID NO: 2464077 - RNA, 19 nt, Artificial Sequence
  Description of Artificial Sequence: Synthetic oligonucleotide
  Antisense strand to SEQ ID NO: 2464076
ucuggucaagcaaacccuc

SEQ ID NO: 2464078 - RNA, 19 nt, Artificial Sequence
  Description of Artificial Sequence: Synthetic oligonucleotide
  Sense strand starting at position 3367 of SEQ ID NO: 1887330
ggguuugcuugaccagaca

SEQ ID NO: 2464079 - RNA, 19 nt, Artificial Sequence
  Description of Artificial Sequence: Synthetic oligonucleotide
  Antisense strand to SEQ ID NO: 2464078
ugucuggucaagcaaaccc

SEQ ID NO: 2464080 - RNA, 19 nt, Artificial Sequence
  Description of Artificial Sequence: Synthetic oligonucleotide
  Sense strand starting at position 3419 of SEQ ID NO: 1887330
ugaugagcuccuuaugcca

SEQ ID NO: 2464081 - RNA, 19 nt, Artificial Sequence
  Description of Artificial Sequence: Synthetic oligonucleotide
  Antisense strand to SEQ ID NO: 2464080
uggcauaaggagcucauca

SEQ ID NO: 2464082 - RNA, 19 nt, Artificial Sequence
  Description of Artificial Sequence: Synthetic oligonucleotide
  Sense strand starting at position 3624 of SEQ ID NO: 1887330
aagccuuaugcugagugga

SEQ ID NO: 2464083 - RNA, 19 nt, Artificial Sequence
  Description of Artificial Sequence: Synthetic oligonucleotide
  Antisense strand to SEQ ID NO: 2464082
uccacucagcauaaggcuu

SEQ ID NO: 2464084 - RNA, 19 nt, Artificial Sequence
  Description of Artificial Sequence: Synthetic oligonucleotide
  Sense strand starting at position 3677 of SEQ ID NO: 1887330
agcccaguuguaugaaaug

SEQ ID NO: 2464085 - RNA, 19 nt, Artificial Sequence
  Description of Artificial Sequence: Synthetic oligonucleotide
  Antisense strand to SEQ ID NO: 2464084
cauuucauacaacugggcu

SEQ ID NO: 2464086 - RNA, 19 nt, Artificial Sequence
  Description of Artificial Sequence: Synthetic oligonucleotide
  Sense strand starting at position 3831 of SEQ ID NO: 1887330
ggaggugaugguggcauaa

SEQ ID NO: 2464087 - RNA, 19 nt, Artificial Sequence
  Description of Artificial Sequence: Synthetic oligonucleotide
  Antisense strand to SEQ ID NO: 2464086
uuaugccaccaucaccucc

SEQ ID NO: 2464088 - RNA, 19 nt, Artificial Sequence
  Description of Artificial Sequence: Synthetic oligonucleotide
  Sense strand starting at position 3844 of SEQ ID NO: 1887330
gcauaacaccgugacuaca

SEQ ID NO: 2464089 - RNA, 19 nt, Artificial Sequence
  Description of Artificial Sequence: Synthetic oligonucleotide
  Antisense strand to SEQ ID NO: 2464088
uguagucacgguguuaugc

SEQ ID NO: 2464090 - RNA, 19 nt, Artificial Sequence
  Description of Artificial Sequence: Synthetic oligonucleotide
  Sense strand starting at position 110 of SEQ ID NO: 1887331
gaacucuuugaaggcagaa

SEQ ID NO: 2464091 - RNA, 19 nt, Artificial Sequence
  Description of Artificial Sequence: Synthetic oligonucleotide
  Antisense strand to SEQ ID NO: 2464090
uucugccuucaaagaguuc

SEQ ID NO: 2464092 - RNA, 19 nt, Artificial Sequence
  Description of Artificial Sequence: Synthetic oligonucleotide
  Sense strand starting at position 158 of SEQ ID NO: 1887331
ccaauaaauguugguuaau

SEQ ID NO: 2464093 - RNA, 19 nt, Artificial Sequence
  Description of Artificial Sequence: Synthetic oligonucleotide
  Antisense strand to SEQ ID NO: 2464092
auuaaccaacauuuauugg

SEQ ID NO: 2464094 - RNA, 19 nt, Artificial Sequence
  Description of Artificial Sequence: Synthetic oligonucleotide
  Sense strand starting at position 159 of SEQ ID NO: 1887331
caauaaauguugguuaaug

SEQ ID NO: 2464095 - RNA, 19 nt, Artificial Sequence
  Description of Artificial Sequence: Synthetic oligonucleotide
  Antisense strand to SEQ ID NO: 2464094
cauuaaccaacauuuauug

SEQ ID NO: 2464096 - RNA, 19 nt, Artificial Sequence
  Description of Artificial Sequence: Synthetic oligonucleotide
  Sense strand starting at position 202 of SEQ ID NO: 1887331
gucacuugugaggaaauug

SEQ ID NO: 2464097 - RNA, 19 nt, Artificial Sequence
  Description of Artificial Sequence: Synthetic oligonucleotide
  Antisense strand to SEQ ID NO: 2464096
caauuuccucacaagugac

SEQ ID NO: 2464098 - RNA, 19 nt, Artificial Sequence
  Description of Artificial Sequence: Synthetic oligonucleotide
  Sense strand starting at position 212 of SEQ ID NO: 1887331
aggaaauuguuucccacau

SEQ ID NO: 2464099 - RNA, 19 nt, Artificial Sequence
  Description of Artificial Sequence: Synthetic oligonucleotide
  Antisense strand to SEQ ID NO: 2464098
augugggaaacaauuuccu

SEQ ID NO: 2464100 - RNA, 19 nt, Artificial Sequence
  Description of Artificial Sequence: Synthetic oligonucleotide
  Sense strand starting at position 213 of SEQ ID NO: 1887331
ggaaauuguuucccacauu

SEQ ID NO: 2464101 - RNA, 19 nt, Artificial Sequence
  Description of Artificial Sequence: Synthetic oligonucleotide
  Antisense strand to SEQ ID NO: 2464100
aaugugggaaacaauuucc

SEQ ID NO: 2464102 - RNA, 19 nt, Artificial Sequence
  Description of Artificial Sequence: Synthetic oligonucleotide
  Sense strand starting at position 286 of SEQ ID NO: 1887331
aaagcuugacucuggaguu

SEQ ID NO: 2464103 - RNA, 19 nt, Artificial Sequence
  Description of Artificial Sequence: Synthetic oligonucleotide
  Antisense strand to SEQ ID NO: 2464102
aacuccagagucaagcuuu

SEQ ID NO: 2464104 - RNA, 19 nt, Artificial Sequence
  Description of Artificial Sequence: Synthetic oligonucleotide
  Sense strand starting at position 330 of SEQ ID NO: 1887331
cugugugaucuuggaacag

SEQ ID NO: 2464105 - RNA, 19 nt, Artificial Sequence
  Description of Artificial Sequence: Synthetic oligonucleotide
  Antisense strand to SEQ ID NO: 2464104
cuguuccaagaucacacag

SEQ ID NO: 2464106 - RNA, 19 nt, Artificial Sequence
  Description of Artificial Sequence: Synthetic oligonucleotide
  Sense strand starting at position 334 of SEQ ID NO: 1887331
gugaucuuggaacaguuua

SEQ ID NO: 2464107 - RNA, 19 nt, Artificial Sequence
  Description of Artificial Sequence: Synthetic oligonucleotide
  Antisense strand to SEQ ID NO: 2464106
uaaacuguuccaagaucac

SEQ ID NO: 2464108 - RNA, 19 nt, Artificial Sequence
  Description of Artificial Sequence: Synthetic oligonucleotide
  Sense strand starting at position 339 of SEQ ID NO: 1887331
cuuggaacaguuuauuagu

SEQ ID NO: 2464109 - RNA, 19 nt, Artificial Sequence
  Description of Artificial Sequence: Synthetic oligonucleotide
  Antisense strand to SEQ ID NO: 2464108
acuaauaaacuguuccaag

SEQ ID NO: 2464110 - RNA, 19 nt, Artificial Sequence
  Description of Artificial Sequence: Synthetic oligonucleotide
  Sense strand starting at position 469 of SEQ ID NO: 1887331
ggaauuaucacucgaaugu

SEQ ID NO: 2464111 - RNA, 19 nt, Artificial Sequence
  Description of Artificial Sequence: Synthetic oligonucleotide
  Antisense strand to SEQ ID NO: 2464110
acauucgagugauaauucc

SEQ ID NO: 2464112 - RNA, 19 nt, Artificial Sequence
  Description of Artificial Sequence: Synthetic oligonucleotide
  Sense strand starting at position 470 of SEQ ID NO: 1887331
gaauuaucacucgaaugua

SEQ ID NO: 2464113 - RNA, 19 nt, Artificial Sequence
  Description of Artificial Sequence: Synthetic oligonucleotide
  Antisense strand to SEQ ID NO: 2464112
uacauucgagugauaauuc

SEQ ID NO: 2464114 - RNA, 19 nt, Artificial Sequence
  Description of Artificial Sequence: Synthetic oligonucleotide
  Sense strand starting at position 478 of SEQ ID NO: 1887331
acucgaauguauucugauu

SEQ ID NO: 2464115 - RNA, 19 nt, Artificial Sequence
  Description of Artificial Sequence: Synthetic oligonucleotide
  Antisense strand to SEQ ID NO: 2464114
aaucagaauacauucgagu

SEQ ID NO: 2464116 - RNA, 19 nt, Artificial Sequence
  Description of Artificial Sequence: Synthetic oligonucleotide
  Sense strand starting at position 952 of SEQ ID NO: 1887331
gucaaaccucuuuagcaag

SEQ ID NO: 2464117 - RNA, 19 nt, Artificial Sequence
  Description of Artificial Sequence: Synthetic oligonucleotide
  Antisense strand to SEQ ID NO: 2464116
cuugcuaaagagguuugac

SEQ ID NO: 2464118 - RNA, 19 nt, Artificial Sequence
  Description of Artificial Sequence: Synthetic oligonucleotide
  Sense strand starting at position 1053 of SEQ ID NO: 1887331
acaggucuucccuacuaga

SEQ ID NO: 2464119 - RNA, 19 nt, Artificial Sequence
  Description of Artificial Sequence: Synthetic oligonucleotide
  Antisense strand to SEQ ID NO: 2464118
ucuaguagggaagaccugu

SEQ ID NO: 2464120 - RNA, 19 nt, Artificial Sequence
  Description of Artificial Sequence: Synthetic oligonucleotide
  Sense strand starting at position 1372 of SEQ ID NO: 1887331
uugggagccauucgagaga

SEQ ID NO: 2464121 - RNA, 19 nt, Artificial Sequence
  Description of Artificial Sequence: Synthetic oligonucleotide
  Antisense strand to SEQ ID NO: 2464120
ucucucgaauggcucccaa

SEQ ID NO: 2464122 - RNA, 19 nt, Artificial Sequence
  Description of Artificial Sequence: Synthetic oligonucleotide
  Sense strand starting at position 1412 of SEQ ID NO: 1887331
agcauucucgccuugcaca

SEQ ID NO: 2464123 - RNA, 19 nt, Artificial Sequence
  Description of Artificial Sequence: Synthetic oligonucleotide
  Antisense strand to SEQ ID NO: 2464122
ugugcaaggcgagaaugcu

SEQ ID NO: 2464124 - RNA, 19 nt, Artificial Sequence
  Description of Artificial Sequence: Synthetic oligonucleotide
  Sense strand starting at position 1892 of SEQ ID NO: 1887331
gaacucgaccuggauugua

SEQ ID NO: 2464125 - RNA, 19 nt, Artificial Sequence
  Description of Artificial Sequence: Synthetic oligonucleotide
  Antisense strand to SEQ ID NO: 2464124
uacaauccaggucgaguuc

SEQ ID NO: 2464126 - RNA, 19 nt, Artificial Sequence
  Description of Artificial Sequence: Synthetic oligonucleotide
  Sense strand starting at position 1991 of SEQ ID NO: 1887331
gaaguccuucgacggagaa

SEQ ID NO: 2464127 - RNA, 19 nt, Artificial Sequence
  Description of Artificial Sequence: Synthetic oligonucleotide
  Antisense strand to SEQ ID NO: 2464126
uucuccgucgaaggacuuc

SEQ ID NO: 2464128 - RNA, 19 nt, Artificial Sequence
  Description of Artificial Sequence: Synthetic oligonucleotide
  Sense strand starting at position 1992 of SEQ ID NO: 1887331
aaguccuucgacggagaaa

SEQ ID NO: 2464129 - RNA, 19 nt, Artificial Sequence
  Description of Artificial Sequence: Synthetic oligonucleotide
  Antisense strand to SEQ ID NO: 2464128
uuucuccgucgaaggacuu

SEQ ID NO: 2464130 - RNA, 19 nt, Artificial Sequence
  Description of Artificial Sequence: Synthetic oligonucleotide
  Sense strand starting at position 1993 of SEQ ID NO: 1887331
aguccuucgacggagaaac

SEQ ID NO: 2464131 - RNA, 19 nt, Artificial Sequence
  Description of Artificial Sequence: Synthetic oligonucleotide
  Antisense strand to SEQ ID NO: 2464130
guuucuccgucgaaggacu

SEQ ID NO: 2464132 - RNA, 19 nt, Artificial Sequence
  Description of Artificial Sequence: Synthetic oligonucleotide
  Sense strand starting at position 2092 of SEQ ID NO: 1887331
ucgccaaacagguaaguua

SEQ ID NO: 2464133 - RNA, 19 nt, Artificial Sequence
  Description of Artificial Sequence: Synthetic oligonucleotide
  Antisense strand to SEQ ID NO: 2464132
uaacuuaccuguuuggcga

SEQ ID NO: 2464134 - RNA, 19 nt, Artificial Sequence
  Description of Artificial Sequence: Synthetic oligonucleotide
  Sense strand starting at position 3084 of SEQ ID NO: 1887331
cguggacacacauguagaa

SEQ ID NO: 2464135 - RNA, 19 nt, Artificial Sequence
  Description of Artificial Sequence: Synthetic oligonucleotide
  Antisense strand to SEQ ID NO: 2464134
uucuacauguguguccacg

SEQ ID NO: 2464136 - RNA, 19 nt, Artificial Sequence
  Description of Artificial Sequence: Synthetic oligonucleotide
  Sense strand starting at position 3266 of SEQ ID NO: 1887331
uuaagaagagcuuauaugu

SEQ ID NO: 2464137 - RNA, 19 nt, Artificial Sequence
  Description of Artificial Sequence: Synthetic oligonucleotide
  Antisense strand to SEQ ID NO: 2464136
acauauaagcucuucuuaa

SEQ ID NO: 2464138 - RNA, 19 nt, Artificial Sequence
  Description of Artificial Sequence: Synthetic oligonucleotide
  Sense strand starting at position 3275 of SEQ ID NO: 1887331
gcuuauaugucauuuggca

SEQ ID NO: 2464139 - RNA, 19 nt, Artificial Sequence
  Description of Artificial Sequence: Synthetic oligonucleotide
  Antisense strand to SEQ ID NO: 2464138
ugccaaaugacauauaagc

SEQ ID NO: 2464140 - RNA, 19 nt, Artificial Sequence
  Description of Artificial Sequence: Synthetic oligonucleotide
  Sense strand starting at position 3358 of SEQ ID NO: 1887331
ugagacucacuuugcuaua

SEQ ID NO: 2464141 - RNA, 19 nt, Artificial Sequence
  Description of Artificial Sequence: Synthetic oligonucleotide
  Antisense strand to SEQ ID NO: 2464140
uauagcaaagugagucuca

SEQ ID NO: 2464142 - RNA, 19 nt, Artificial Sequence
  Description of Artificial Sequence: Synthetic oligonucleotide
  Sense strand starting at position 3438 of SEQ ID NO: 1887331
ugugauaauugcucacaac

SEQ ID NO: 2464143 - RNA, 19 nt, Artificial Sequence
  Description of Artificial Sequence: Synthetic oligonucleotide
  Antisense strand to SEQ ID NO: 2464142
guugugagcaauuaucaca

SEQ ID NO: 2464144 - RNA, 19 nt, Artificial Sequence
  Description of Artificial Sequence: Synthetic oligonucleotide
  Sense strand starting at position 3439 of SEQ ID NO: 1887331
gugauaauugcucacaaca

SEQ ID NO: 2464145 - RNA, 19 nt, Artificial Sequence
  Description of Artificial Sequence: Synthetic oligonucleotide
  Antisense strand to SEQ ID NO: 2464144
uguugugagcaauuaucac

SEQ ID NO: 2464146 - RNA, 19 nt, Artificial Sequence
  Description of Artificial Sequence: Synthetic oligonucleotide
  Sense strand starting at position 3615 of SEQ ID NO: 1887331
cuucuagguguuggaaaua

SEQ ID NO: 2464147 - RNA, 19 nt, Artificial Sequence
  Description of Artificial Sequence: Synthetic oligonucleotide
  Antisense strand to SEQ ID NO: 2464146
uauuuccaacaccuagaag

SEQ ID NO: 2464148 - RNA, 19 nt, Artificial Sequence
  Description of Artificial Sequence: Synthetic oligonucleotide
  Sense strand starting at position 3620 of SEQ ID NO: 1887331
agguguuggaaauaguaau

SEQ ID NO: 2464149 - RNA, 19 nt, Artificial Sequence
  Description of Artificial Sequence: Synthetic oligonucleotide
  Antisense strand to SEQ ID NO: 2464148
auuacuauuuccaacaccu

SEQ ID NO: 2464150 - RNA, 19 nt, Artificial Sequence
  Description of Artificial Sequence: Synthetic oligonucleotide
  Sense strand starting at position 3634 of SEQ ID NO: 1887331
guaauauacuucccuagag

SEQ ID NO: 2464151 - RNA, 19 nt, Artificial Sequence
  Description of Artificial Sequence: Synthetic oligonucleotide
  Antisense strand to SEQ ID NO: 2464150
cucuagggaaguauauuac

SEQ ID NO: 2464152 - RNA, 19 nt, Artificial Sequence
  Description of Artificial Sequence: Synthetic oligonucleotide
  Sense strand starting at position 3657 of SEQ ID NO: 1887331
uugagaucugguugaauag

SEQ ID NO: 2464153 - RNA, 19 nt, Artificial Sequence
  Description of Artificial Sequence: Synthetic oligonucleotide
  Antisense strand to SEQ ID NO: 2464152
cuauucaaccagaucucaa

SEQ ID NO: 2464154 - RNA, 19 nt, Artificial Sequence
  Description of Artificial Sequence: Synthetic oligonucleotide
  Sense strand starting at position 3741 of SEQ ID NO: 1887331
gaaguuacggcugauugau

SEQ ID NO: 2464155 - RNA, 19 nt, Artificial Sequence
  Description of Artificial Sequence: Synthetic oligonucleotide
  Antisense strand to SEQ ID NO: 2464154
aucaaucagccguaacuuc

SEQ ID NO: 2464156 - RNA, 19 nt, Artificial Sequence
  Description of Artificial Sequence: Synthetic oligonucleotide
  Sense strand starting at position 3778 of SEQ ID NO: 1887331
cuucuugcaggauauguga

SEQ ID NO: 2464157 - RNA, 19 nt, Artificial Sequence
  Description of Artificial Sequence: Synthetic oligonucleotide
  Antisense strand to SEQ ID NO: 2464156
ucacauauccugcaagaag

SEQ ID NO: 2464158 - RNA, 19 nt, Artificial Sequence
  Description of Artificial Sequence: Synthetic oligonucleotide
  Sense strand starting at position 3822 of SEQ ID NO: 1887331
ggguauucaccugguugaa

SEQ ID NO: 2464159 - RNA, 19 nt, Artificial Sequence
  Description of Artificial Sequence: Synthetic oligonucleotide
  Antisense strand to SEQ ID NO: 2464158
uucaaccaggugaauaccc

SEQ ID NO: 2464160 - RNA, 19 nt, Artificial Sequence
  Description of Artificial Sequence: Synthetic oligonucleotide
  Sense strand starting at position 3887 of SEQ ID NO: 1887331
aguagaacucgcuaaucuu

SEQ ID NO: 2464161 - RNA, 19 nt, Artificial Sequence
  Description of Artificial Sequence: Synthetic oligonucleotide
  Antisense strand to SEQ ID NO: 2464160
aagauuagcgaguucuacu

SEQ ID NO: 2464162 - RNA, 19 nt, Artificial Sequence
  Description of Artificial Sequence: Synthetic oligonucleotide
  Sense strand starting at position 3890 of SEQ ID NO: 1887331
agaacucgcuaaucuuaau

SEQ ID NO: 2464163 - RNA, 19 nt, Artificial Sequence
  Description of Artificial Sequence: Synthetic oligonucleotide
  Antisense strand to SEQ ID NO: 2464162
auuaagauuagcgaguucu

SEQ ID NO: 2464164 - RNA, 19 nt, Artificial Sequence
  Description of Artificial Sequence: Synthetic oligonucleotide
  Sense strand starting at position 3914 of SEQ ID NO: 1887331
auacucuccuaguuugauu

SEQ ID NO: 2464165 - RNA, 19 nt, Artificial Sequence
  Description of Artificial Sequence: Synthetic oligonucleotide
  Antisense strand to SEQ ID NO: 2464164
aaucaaacuaggagaguau

SEQ ID NO: 2464166 - RNA, 19 nt, Artificial Sequence
  Description of Artificial Sequence: Synthetic oligonucleotide
  Sense strand starting at position 3952 of SEQ ID NO: 1887331
uuaagaaggugguuuguau

SEQ ID NO: 2464167 - RNA, 19 nt, Artificial Sequence
  Description of Artificial Sequence: Synthetic oligonucleotide
  Antisense strand to SEQ ID NO: 2464166
auacaaaccaccuucuuaa

SEQ ID NO: 2464168 - RNA, 19 nt, Artificial Sequence
  Description of Artificial Sequence: Synthetic oligonucleotide
  Sense strand starting at position 3963 of SEQ ID NO: 1887331
guuuguaucccagauagug

SEQ ID NO: 2464169 - RNA, 19 nt, Artificial Sequence
  Description of Artificial Sequence: Synthetic oligonucleotide
  Antisense strand to SEQ ID NO: 2464168
cacuaucugggauacaaac

SEQ ID NO: 2464170 - RNA, 19 nt, Artificial Sequence
  Description of Artificial Sequence: Synthetic oligonucleotide
  Sense strand starting at position 8 of SEQ ID NO: 1887332
augaauccugcugaugacu

SEQ ID NO: 2464171 - RNA, 19 nt, Artificial Sequence
  Description of Artificial Sequence: Synthetic oligonucleotide
  Antisense strand to SEQ ID NO: 2464170
agucaucagcaggauucau

SEQ ID NO: 2464172 - RNA, 19 nt, Artificial Sequence
  Description of Artificial Sequence: Synthetic oligonucleotide
  Sense strand starting at position 26 of SEQ ID NO: 1887332
uagcuaucccagggaugga

SEQ ID NO: 2464173 - RNA, 19 nt, Artificial Sequence
  Description of Artificial Sequence: Synthetic oligonucleotide
  Antisense strand to SEQ ID NO: 2464172
uccaucccugggauagcua

SEQ ID NO: 2464174 - RNA, 19 nt, Artificial Sequence
  Description of Artificial Sequence: Synthetic oligonucleotide
  Sense strand starting at position 117 of SEQ ID NO: 1887332
gaagaugugaguuacaggu

SEQ ID NO: 2464175 - RNA, 19 nt, Artificial Sequence
  Description of Artificial Sequence: Synthetic oligonucleotide
  Antisense strand to SEQ ID NO: 2464174
accuguaacucacaucuuc

SEQ ID NO: 2464176 - RNA, 19 nt, Artificial Sequence
  Description of Artificial Sequence: Synthetic oligonucleotide
  Sense strand starting at position 121 of SEQ ID NO: 1887332
augugaguuacagguaacu

SEQ ID NO: 2464177 - RNA, 19 nt, Artificial Sequence
  Description of Artificial Sequence: Synthetic oligonucleotide
  Antisense strand to SEQ ID NO: 2464176
aguuaccuguaacucacau

SEQ ID NO: 2464178 - RNA, 19 nt, Artificial Sequence
  Description of Artificial Sequence: Synthetic oligonucleotide
  Sense strand starting at position 428 of SEQ ID NO: 1887332
caggcuuggccugauaauu

SEQ ID NO: 2464179 - RNA, 19 nt, Artificial Sequence
  Description of Artificial Sequence: Synthetic oligonucleotide
  Antisense strand to SEQ ID NO: 2464178
aauuaucaggccaagccug

SEQ ID NO: 2464180 - RNA, 19 nt, Artificial Sequence
  Description of Artificial Sequence: Synthetic oligonucleotide
  Sense strand starting at position 455 of SEQ ID NO: 1887332
auguguguucaggcuugca

SEQ ID NO: 2464181 - RNA, 19 nt, Artificial Sequence
  Description of Artificial Sequence: Synthetic oligonucleotide
  Antisense strand to SEQ ID NO: 2464180
ugcaagccugaacacacau

SEQ ID NO: 2464182 - RNA, 19 nt, Artificial Sequence
  Description of Artificial Sequence: Synthetic oligonucleotide
  Sense strand starting at position 457 of SEQ ID NO: 1887332
guguguucaggcuugcaug

SEQ ID NO: 2464183 - RNA, 19 nt, Artificial Sequence
  Description of Artificial Sequence: Synthetic oligonucleotide
  Antisense strand to SEQ ID NO: 2464182
caugcaagccugaacacac

SEQ ID NO: 2464184 - RNA, 19 nt, Artificial Sequence
  Description of Artificial Sequence: Synthetic oligonucleotide
  Sense strand starting at position 533 of SEQ ID NO: 1887332
gcacaugugugggucauuu

SEQ ID NO: 2464185 - RNA, 19 nt, Artificial Sequence
  Description of Artificial Sequence: Synthetic oligonucleotide
  Antisense strand to SEQ ID NO: 2464184
aaaugacccacacaugugc

SEQ ID NO: 2464186 - RNA, 19 nt, Artificial Sequence
  Description of Artificial Sequence: Synthetic oligonucleotide
  Sense strand starting at position 596 of SEQ ID NO: 1887332
gaguucaagugagugauga

SEQ ID NO: 2464187 - RNA, 19 nt, Artificial Sequence
  Description of Artificial Sequence: Synthetic oligonucleotide
  Antisense strand to SEQ ID NO: 2464186
ucaucacucacuugaacuc

SEQ ID NO: 2464188 - RNA, 19 nt, Artificial Sequence
  Description of Artificial Sequence: Synthetic oligonucleotide
  Sense strand starting at position 604 of SEQ ID NO: 1887332
gugagugaugacgggaaug

SEQ ID NO: 2464189 - RNA, 19 nt, Artificial Sequence
  Description of Artificial Sequence: Synthetic oligonucleotide
  Antisense strand to SEQ ID NO: 2464188
cauucccgucaucacucac

SEQ ID NO: 2464190 - RNA, 19 nt, Artificial Sequence
  Description of Artificial Sequence: Synthetic oligonucleotide
  Sense strand starting at position 606 of SEQ ID NO: 1887332
gagugaugacgggaauggu

SEQ ID NO: 2464191 - RNA, 19 nt, Artificial Sequence
  Description of Artificial Sequence: Synthetic oligonucleotide
  Antisense strand to SEQ ID NO: 2464190
accauucccgucaucacuc

SEQ ID NO: 2464192 - RNA, 19 nt, Artificial Sequence
  Description of Artificial Sequence: Synthetic oligonucleotide
  Sense strand starting at position 671 of SEQ ID NO: 1887332
uuugauagaggugguuaga

SEQ ID NO: 2464193 - RNA, 19 nt, Artificial Sequence
  Description of Artificial Sequence: Synthetic oligonucleotide
  Antisense strand to SEQ ID NO: 2464192
ucuaaccaccucuaucaaa

SEQ ID NO: 2464194 - RNA, 19 nt, Artificial Sequence
  Description of Artificial Sequence: Synthetic oligonucleotide
  Sense strand starting at position 896 of SEQ ID NO: 1887332
gggagagagccaugaguuu

SEQ ID NO: 2464195 - RNA, 19 nt, Artificial Sequence
  Description of Artificial Sequence: Synthetic oligonucleotide
  Antisense strand to SEQ ID NO: 2464194
aaacucauggcucucuccc

SEQ ID NO: 2464196 - RNA, 19 nt, Artificial Sequence
  Description of Artificial Sequence: Synthetic oligonucleotide
  Sense strand starting at position 1013 of SEQ ID NO: 1887332
ggccauaagugacuauaau

SEQ ID NO: 2464197 - RNA, 19 nt, Artificial Sequence
  Description of Artificial Sequence: Synthetic oligonucleotide
  Antisense strand to SEQ ID NO: 2464196
auuauagucacuuauggcc

SEQ ID NO: 2464198 - RNA, 19 nt, Artificial Sequence
  Description of Artificial Sequence: Synthetic oligonucleotide
  Sense strand starting at position 1014 of SEQ ID NO: 1887332
gccauaagugacuauaauc

SEQ ID NO: 2464199 - RNA, 19 nt, Artificial Sequence
  Description of Artificial Sequence: Synthetic oligonucleotide
  Antisense strand to SEQ ID NO: 2464198
gauuauagucacuuauggc

SEQ ID NO: 2464200 - RNA, 19 nt, Artificial Sequence
  Description of Artificial Sequence: Synthetic oligonucleotide
  Sense strand starting at position 1127 of SEQ ID NO: 1887332
gucgaaucugcagaacaca

SEQ ID NO: 2464201 - RNA, 19 nt, Artificial Sequence
  Description of Artificial Sequence: Synthetic oligonucleotide
  Antisense strand to SEQ ID NO: 2464200
uguguucugcagauucgac

SEQ ID NO: 2464202 - RNA, 19 nt, Artificial Sequence
  Description of Artificial Sequence: Synthetic oligonucleotide
  Sense strand starting at position 1186 of SEQ ID NO: 1887332
acaaguuguucuuugaaga

SEQ ID NO: 2464203 - RNA, 19 nt, Artificial Sequence
  Description of Artificial Sequence: Synthetic oligonucleotide
  Antisense strand to SEQ ID NO: 2464202
ucuucaaagaacaacuugu

SEQ ID NO: 2464204 - RNA, 19 nt, Artificial Sequence
  Description of Artificial Sequence: Synthetic oligonucleotide
  Sense strand starting at position 1207 of SEQ ID NO: 1887332
uuuagaucauucguacaug

SEQ ID NO: 2464205 - RNA, 19 nt, Artificial Sequence
  Description of Artificial Sequence: Synthetic oligonucleotide
  Antisense strand to SEQ ID NO: 2464204
cauguacgaaugaucuaaa

SEQ ID NO: 2464206 - RNA, 19 nt, Artificial Sequence
  Description of Artificial Sequence: Synthetic oligonucleotide
  Sense strand starting at position 1392 of SEQ ID NO: 1887332
auuggaauucguuacugga

SEQ ID NO: 2464207 - RNA, 19 nt, Artificial Sequence
  Description of Artificial Sequence: Synthetic oligonucleotide
  Antisense strand to SEQ ID NO: 2464206
uccaguaacgaauuccaau

SEQ ID NO: 2464208 - RNA, 19 nt, Artificial Sequence
  Description of Artificial Sequence: Synthetic oligonucleotide
  Sense strand starting at position 1394 of SEQ ID NO: 1887332
uggaauucguuacuggaca

SEQ ID NO: 2464209 - RNA, 19 nt, Artificial Sequence
  Description of Artificial Sequence: Synthetic oligonucleotide
  Antisense strand to SEQ ID NO: 2464208
uguccaguaacgaauucca

SEQ ID NO: 2464210 - RNA, 19 nt, Artificial Sequence
  Description of Artificial Sequence: Synthetic oligonucleotide
  Sense strand starting at position 1519 of SEQ ID NO: 1887332
cuagucuugccgucucuau

SEQ ID NO: 2464211 - RNA, 19 nt, Artificial Sequence
  Description of Artificial Sequence: Synthetic oligonucleotide
  Antisense strand to SEQ ID NO: 2464210
auagagacggcaagacuag

SEQ ID NO: 2464212 - RNA, 19 nt, Artificial Sequence
  Description of Artificial Sequence: Synthetic oligonucleotide
  Sense strand starting at position 1520 of SEQ ID NO: 1887332
uagucuugccgucucuauu

SEQ ID NO: 2464213 - RNA, 19 nt, Artificial Sequence
  Description of Artificial Sequence: Synthetic oligonucleotide
  Antisense strand to SEQ ID NO: 2464212
aauagagacggcaagacua

SEQ ID NO: 2464214 - RNA, 19 nt, Artificial Sequence
  Description of Artificial Sequence: Synthetic oligonucleotide
  Sense strand starting at position 1567 of SEQ ID NO: 1887332
ccagacaauggcugaucau

SEQ ID NO: 2464215 - RNA, 19 nt, Artificial Sequence
  Description of Artificial Sequence: Synthetic oligonucleotide
  Antisense strand to SEQ ID NO: 2464214
augaucagccauugucugg

SEQ ID NO: 2464216 - RNA, 19 nt, Artificial Sequence
  Description of Artificial Sequence: Synthetic oligonucleotide
  Sense strand starting at position 1754 of SEQ ID NO: 1887332
agccauuuguguucccuau

SEQ ID NO: 2464217 - RNA, 19 nt, Artificial Sequence
  Description of Artificial Sequence: Synthetic oligonucleotide
  Antisense strand to SEQ ID NO: 2464216
auagggaacacaaauggcu

SEQ ID NO: 2464218 - RNA, 19 nt, Artificial Sequence
  Description of Artificial Sequence: Synthetic oligonucleotide
  Sense strand starting at position 1784 of SEQ ID NO: 1887332
gaagaucugggcuggaagu

SEQ ID NO: 2464219 - RNA, 19 nt, Artificial Sequence
  Description of Artificial Sequence: Synthetic oligonucleotide
  Antisense strand to SEQ ID NO: 2464218
acuuccagcccagaucuuc

SEQ ID NO: 2464220 - RNA, 19 nt, Artificial Sequence
  Description of Artificial Sequence: Synthetic oligonucleotide
  Sense strand starting at position 1883 of SEQ ID NO: 1887332
aagaaagacgcuuaauugu

SEQ ID NO: 2464221 - RNA, 19 nt, Artificial Sequence
  Description of Artificial Sequence: Synthetic oligonucleotide
  Antisense strand to SEQ ID NO: 2464220
acaauuaagcgucuuucuu

SEQ ID NO: 2464222 - RNA, 19 nt, Artificial Sequence
  Description of Artificial Sequence: Synthetic oligonucleotide
  Sense strand starting at position 2182 of SEQ ID NO: 1887332
gcaauagguacuggucaga

SEQ ID NO: 2464223 - RNA, 19 nt, Artificial Sequence
  Description of Artificial Sequence: Synthetic oligonucleotide
  Antisense strand to SEQ ID NO: 2464222
ucugaccaguaccuauugc

SEQ ID NO: 2464224 - RNA, 19 nt, Artificial Sequence
  Description of Artificial Sequence: Synthetic oligonucleotide
  Sense strand starting at position 2681 of SEQ ID NO: 1887332
caguguuuccugcugccaa

SEQ ID NO: 2464225 - RNA, 19 nt, Artificial Sequence
  Description of Artificial Sequence: Synthetic oligonucleotide
  Antisense strand to SEQ ID NO: 2464224
uuggcagcaggaaacacug

SEQ ID NO: 2464226 - RNA, 19 nt, Artificial Sequence
  Description of Artificial Sequence: Synthetic oligonucleotide
  Sense strand starting at position 2696 of SEQ ID NO: 1887332
ccaagacaugaaugagcua

SEQ ID NO: 2464227 - RNA, 19 nt, Artificial Sequence
  Description of Artificial Sequence: Synthetic oligonucleotide
  Antisense strand to SEQ ID NO: 2464226
uagcucauucaugucuugg

SEQ ID NO: 2464228 - RNA, 19 nt, Artificial Sequence
  Description of Artificial Sequence: Synthetic oligonucleotide
  Sense strand starting at position 2858 of SEQ ID NO: 1887332
acugaaaccucaguguaau

SEQ ID NO: 2464229 - RNA, 19 nt, Artificial Sequence
  Description of Artificial Sequence: Synthetic oligonucleotide
  Antisense strand to SEQ ID NO: 2464228
auuacacugagguuucagu

SEQ ID NO: 2464230 - RNA, 19 nt, Artificial Sequence
  Description of Artificial Sequence: Synthetic oligonucleotide
  Sense strand starting at position 2859 of SEQ ID NO: 1887332
cugaaaccucaguguaauu

SEQ ID NO: 2464231 - RNA, 19 nt, Artificial Sequence
  Description of Artificial Sequence: Synthetic oligonucleotide
  Antisense strand to SEQ ID NO: 2464230
aauuacacugagguuucag

SEQ ID NO: 2464232 - RNA, 19 nt, Artificial Sequence
  Description of Artificial Sequence: Synthetic oligonucleotide
  Sense strand starting at position 2870 of SEQ ID NO: 1887332
guguaauuaguguagauug

SEQ ID NO: 2464233 - RNA, 19 nt, Artificial Sequence
  Description of Artificial Sequence: Synthetic oligonucleotide
  Antisense strand to SEQ ID NO: 2464232
caaucuacacuaauuacac

SEQ ID NO: 2464234 - RNA, 19 nt, Artificial Sequence
  Description of Artificial Sequence: Synthetic oligonucleotide
  Sense strand starting at position 2872 of SEQ ID NO: 1887332
guaauuaguguagauugca

SEQ ID NO: 2464235 - RNA, 19 nt, Artificial Sequence
  Description of Artificial Sequence: Synthetic oligonucleotide
  Antisense strand to SEQ ID NO: 2464234
ugcaaucuacacuaauuac

SEQ ID NO: 2464236 - RNA, 19 nt, Artificial Sequence
  Description of Artificial Sequence: Synthetic oligonucleotide
  Sense strand starting at position 2880 of SEQ ID NO: 1887332
uguagauugcaggacaugu

SEQ ID NO: 2464237 - RNA, 19 nt, Artificial Sequence
  Description of Artificial Sequence: Synthetic oligonucleotide
  Antisense strand to SEQ ID NO: 2464236
acauguccugcaaucuaca

SEQ ID NO: 2464238 - RNA, 19 nt, Artificial Sequence
  Description of Artificial Sequence: Synthetic oligonucleotide
  Sense strand starting at position 2888 of SEQ ID NO: 1887332
gcaggacaugugugaaaua

SEQ ID NO: 2464239 - RNA, 19 nt, Artificial Sequence
  Description of Artificial Sequence: Synthetic oligonucleotide
  Antisense strand to SEQ ID NO: 2464238
uauuucacacauguccugc

SEQ ID NO: 2464240 - RNA, 19 nt, Artificial Sequence
  Description of Artificial Sequence: Synthetic oligonucleotide
  Sense strand starting at position 3244 of SEQ ID NO: 1887332
ucuguccuuuaucuauaga

SEQ ID NO: 2464241 - RNA, 19 nt, Artificial Sequence
  Description of Artificial Sequence: Synthetic oligonucleotide
  Antisense strand to SEQ ID NO: 2464240
ucuauagauaaaggacaga

SEQ ID NO: 2464242 - RNA, 19 nt, Artificial Sequence
  Description of Artificial Sequence: Synthetic oligonucleotide
  Sense strand starting at position 3437 of SEQ ID NO: 1887332
ucagaacauucugugaugu

SEQ ID NO: 2464243 - RNA, 19 nt, Artificial Sequence
  Description of Artificial Sequence: Synthetic oligonucleotide
  Antisense strand to SEQ ID NO: 2464242
acaucacagaauguucuga

SEQ ID NO: 2464244 - RNA, 19 nt, Artificial Sequence
  Description of Artificial Sequence: Synthetic oligonucleotide
  Sense strand starting at position 3438 of SEQ ID NO: 1887332
cagaacauucugugauguu

SEQ ID NO: 2464245 - RNA, 19 nt, Artificial Sequence
  Description of Artificial Sequence: Synthetic oligonucleotide
  Antisense strand to SEQ ID NO: 2464244
aacaucacagaauguucug

SEQ ID NO: 2464246 - RNA, 19 nt, Artificial Sequence
  Description of Artificial Sequence: Synthetic oligonucleotide
  Sense strand starting at position 3965 of SEQ ID NO: 1887332
gaggacaguucugcagaga

SEQ ID NO: 2464247 - RNA, 19 nt, Artificial Sequence
  Description of Artificial Sequence: Synthetic oligonucleotide
  Antisense strand to SEQ ID NO: 2464246
ucucugcagaacuguccuc

SEQ ID NO: 2464248 - RNA, 19 nt, Artificial Sequence
  Description of Artificial Sequence: Synthetic oligonucleotide
  Sense strand starting at position 3970 of SEQ ID NO: 1887332
caguucugcagagagaagu

SEQ ID NO: 2464249 - RNA, 19 nt, Artificial Sequence
  Description of Artificial Sequence: Synthetic oligonucleotide
  Antisense strand to SEQ ID NO: 2464248
acuucucucugcagaacug

SEQ ID NO: 2464250 - RNA, 19 nt, Artificial Sequence
  Description of Artificial Sequence: Synthetic oligonucleotide
  Sense strand starting at position 67 of SEQ ID NO: 1887333
ggaugaugugggugggcau

SEQ ID NO: 2464251 - RNA, 19 nt, Artificial Sequence
  Description of Artificial Sequence: Synthetic oligonucleotide
  Antisense strand to SEQ ID NO: 2464250
augcccacccacaucaucc

SEQ ID NO: 2464252 - RNA, 19 nt, Artificial Sequence
  Description of Artificial Sequence: Synthetic oligonucleotide
  Sense strand starting at position 513 of SEQ ID NO: 1887333
aucuaugggcuccaacaau

SEQ ID NO: 2464253 - RNA, 19 nt, Artificial Sequence
  Description of Artificial Sequence: Synthetic oligonucleotide
  Antisense strand to SEQ ID NO: 2464252
auuguuggagcccauagau

SEQ ID NO: 2464254 - RNA, 19 nt, Artificial Sequence
  Description of Artificial Sequence: Synthetic oligonucleotide
  Sense strand starting at position 644 of SEQ ID NO: 1887333
aguguuacaugggcagaga

SEQ ID NO: 2464255 - RNA, 19 nt, Artificial Sequence
  Description of Artificial Sequence: Synthetic oligonucleotide
  Antisense strand to SEQ ID NO: 2464254
ucucugcccauguaacacu

SEQ ID NO: 2464256 - RNA, 19 nt, Artificial Sequence
  Description of Artificial Sequence: Synthetic oligonucleotide
  Sense strand starting at position 688 of SEQ ID NO: 1887333
ucccauuugugagcagagu

SEQ ID NO: 2464257 - RNA, 19 nt, Artificial Sequence
  Description of Artificial Sequence: Synthetic oligonucleotide
  Antisense strand to SEQ ID NO: 2464256
acucugcucacaaauggga

SEQ ID NO: 2464258 - RNA, 19 nt, Artificial Sequence
  Description of Artificial Sequence: Synthetic oligonucleotide
  Sense strand starting at position 838 of SEQ ID NO: 1887333
aaggcauuacuguguggga

SEQ ID NO: 2464259 - RNA, 19 nt, Artificial Sequence
  Description of Artificial Sequence: Synthetic oligonucleotide
  Antisense strand to SEQ ID NO: 2464258
ucccacacaguaaugccuu

SEQ ID NO: 2464260 - RNA, 19 nt, Artificial Sequence
  Description of Artificial Sequence: Synthetic oligonucleotide
  Sense strand starting at position 839 of SEQ ID NO: 1887333
aggcauuacugugugggaa

SEQ ID NO: 2464261 - RNA, 19 nt, Artificial Sequence
  Description of Artificial Sequence: Synthetic oligonucleotide
  Antisense strand to SEQ ID NO: 2464260
uucccacacaguaaugccu

SEQ ID NO: 2464262 - RNA, 19 nt, Artificial Sequence
  Description of Artificial Sequence: Synthetic oligonucleotide
  Sense strand starting at position 859 of SEQ ID NO: 1887333
ggcacccuugccuaaugau

SEQ ID NO: 2464263 - RNA, 19 nt, Artificial Sequence
  Description of Artificial Sequence: Synthetic oligonucleotide
  Antisense strand to SEQ ID NO: 2464262
aucauuaggcaagggugcc

SEQ ID NO: 2464264 - RNA, 19 nt, Artificial Sequence
  Description of Artificial Sequence: Synthetic oligonucleotide
  Sense strand starting at position 869 of SEQ ID NO: 1887333
ccuaaugaucuuggccaaa

SEQ ID NO: 2464265 - RNA, 19 nt, Artificial Sequence
  Description of Artificial Sequence: Synthetic oligonucleotide
  Antisense strand to SEQ ID NO: 2464264
uuuggccaagaucauuagg

SEQ ID NO: 2464266 - RNA, 19 nt, Artificial Sequence
  Description of Artificial Sequence: Synthetic oligonucleotide
  Sense strand starting at position 881 of SEQ ID NO: 1887333
ggccaaauccaguaucucu

SEQ ID NO: 2464267 - RNA, 19 nt, Artificial Sequence
  Description of Artificial Sequence: Synthetic oligonucleotide
  Antisense strand to SEQ ID NO: 2464266
agagauacuggauuuggcc

SEQ ID NO: 2464268 - RNA, 19 nt, Artificial Sequence
  Description of Artificial Sequence: Synthetic oligonucleotide
  Sense strand starting at position 945 of SEQ ID NO: 1887333
gcaguugaagcugaguaaa

SEQ ID NO: 2464269 - RNA, 19 nt, Artificial Sequence
  Description of Artificial Sequence: Synthetic oligonucleotide
  Antisense strand to SEQ ID NO: 2464268
uuuacucagcuucaacugc

SEQ ID NO: 2464270 - RNA, 19 nt, Artificial Sequence
  Description of Artificial Sequence: Synthetic oligonucleotide
  Sense strand starting at position 947 of SEQ ID NO: 1887333
aguugaagcugaguaaaca

SEQ ID NO: 2464271 - RNA, 19 nt, Artificial Sequence
  Description of Artificial Sequence: Synthetic oligonucleotide
  Antisense strand to SEQ ID NO: 2464270
uguuuacucagcuucaacu

SEQ ID NO: 2464272 - RNA, 19 nt, Artificial Sequence
  Description of Artificial Sequence: Synthetic oligonucleotide
  Sense strand starting at position 948 of SEQ ID NO: 1887333
guugaagcugaguaaacaa

SEQ ID NO: 2464273 - RNA, 19 nt, Artificial Sequence
  Description of Artificial Sequence: Synthetic oligonucleotide
  Antisense strand to SEQ ID NO: 2464272
uuguuuacucagcuucaac

SEQ ID NO: 2464274 - RNA, 19 nt, Artificial Sequence
  Description of Artificial Sequence: Synthetic oligonucleotide
  Sense strand starting at position 1020 of SEQ ID NO: 1887333
ucacguuugcuguucugau

SEQ ID NO: 2464275 - RNA, 19 nt, Artificial Sequence
  Description of Artificial Sequence: Synthetic oligonucleotide
  Antisense strand to SEQ ID NO: 2464274
aucagaacagcaaacguga

SEQ ID NO: 2464276 - RNA, 19 nt, Artificial Sequence
  Description of Artificial Sequence: Synthetic oligonucleotide
  Sense strand starting at position 1028 of SEQ ID NO: 1887333
gcuguucugaucuagaaga

SEQ ID NO: 2464277 - RNA, 19 nt, Artificial Sequence
  Description of Artificial Sequence: Synthetic oligonucleotide
  Antisense strand to SEQ ID NO: 2464276
ucuucuagaucagaacagc

SEQ ID NO: 2464278 - RNA, 19 nt, Artificial Sequence
  Description of Artificial Sequence: Synthetic oligonucleotide
  Sense strand starting at position 1371 of SEQ ID NO: 1887333
ugaugcuaguauuuaucuu

SEQ ID NO: 2464279 - RNA, 19 nt, Artificial Sequence
  Description of Artificial Sequence: Synthetic oligonucleotide
  Antisense strand to SEQ ID NO: 2464278
aagauaaauacuagcauca

SEQ ID NO: 2464280 - RNA, 19 nt, Artificial Sequence
  Description of Artificial Sequence: Synthetic oligonucleotide
  Sense strand starting at position 1378 of SEQ ID NO: 1887333
aguauuuaucuuugagccu

SEQ ID NO: 2464281 - RNA, 19 nt, Artificial Sequence
  Description of Artificial Sequence: Synthetic oligonucleotide
  Antisense strand to SEQ ID NO: 2464280
aggcucaaagauaaauacu

SEQ ID NO: 2464282 - RNA, 19 nt, Artificial Sequence
  Description of Artificial Sequence: Synthetic oligonucleotide
  Sense strand starting at position 1432 of SEQ ID NO: 1887333
aguucuggcccuuagagau

SEQ ID NO: 2464283 - RNA, 19 nt, Artificial Sequence
  Description of Artificial Sequence: Synthetic oligonucleotide
  Antisense strand to SEQ ID NO: 2464282
aucucuaagggccagaacu

SEQ ID NO: 2464284 - RNA, 19 nt, Artificial Sequence
  Description of Artificial Sequence: Synthetic oligonucleotide
  Sense strand starting at position 1444 of SEQ ID NO: 1887333
uagagaucuuucuuaugga

SEQ ID NO: 2464285 - RNA, 19 nt, Artificial Sequence
  Description of Artificial Sequence: Synthetic oligonucleotide
  Antisense strand to SEQ ID NO: 2464284
uccauaagaaagaucucua

SEQ ID NO: 2464286 - RNA, 19 nt, Artificial Sequence
  Description of Artificial Sequence: Synthetic oligonucleotide
  Sense strand starting at position 1484 of SEQ ID NO: 1887333
accaucaugccucauggaa

SEQ ID NO: 2464287 - RNA, 19 nt, Artificial Sequence
  Description of Artificial Sequence: Synthetic oligonucleotide
  Antisense strand to SEQ ID NO: 2464286
uuccaugaggcaugauggu

SEQ ID NO: 2464288 - RNA, 19 nt, Artificial Sequence
  Description of Artificial Sequence: Synthetic oligonucleotide
  Sense strand starting at position 1506 of SEQ ID NO: 1887333
uggccuggcagacauuaaa

SEQ ID NO: 2464289 - RNA, 19 nt, Artificial Sequence
  Description of Artificial Sequence: Synthetic oligonucleotide
  Antisense strand to SEQ ID NO: 2464288
uuuaaugucugccaggcca

SEQ ID NO: 2464290 - RNA, 19 nt, Artificial Sequence
  Description of Artificial Sequence: Synthetic oligonucleotide
  Sense strand starting at position 1545 of SEQ ID NO: 1887333
ggaaguggguucuuugaaa

SEQ ID NO: 2464291 - RNA, 19 nt, Artificial Sequence
  Description of Artificial Sequence: Synthetic oligonucleotide
  Antisense strand to SEQ ID NO: 2464290
uuucaaagaacccacuucc

SEQ ID NO: 2464292 - RNA, 19 nt, Artificial Sequence
  Description of Artificial Sequence: Synthetic oligonucleotide
  Sense strand starting at position 1552 of SEQ ID NO: 1887333
gguucuuugaaaugaacag

SEQ ID NO: 2464293 - RNA, 19 nt, Artificial Sequence
  Description of Artificial Sequence: Synthetic oligonucleotide
  Antisense strand to SEQ ID NO: 2464292
cuguucauuucaaagaacc

SEQ ID NO: 2464294 - RNA, 19 nt, Artificial Sequence
  Description of Artificial Sequence: Synthetic oligonucleotide
  Sense strand starting at position 1646 of SEQ ID NO: 1887333
uugggaauuaccugugaag

SEQ ID NO: 2464295 - RNA, 19 nt, Artificial Sequence
  Description of Artificial Sequence: Synthetic oligonucleotide
  Antisense strand to SEQ ID NO: 2464294
cuucacagguaauucccaa

SEQ ID NO: 2464296 - RNA, 19 nt, Artificial Sequence
  Description of Artificial Sequence: Synthetic oligonucleotide
  Sense strand starting at position 1648 of SEQ ID NO: 1887333
gggaauuaccugugaaggc

SEQ ID NO: 2464297 - RNA, 19 nt, Artificial Sequence
  Description of Artificial Sequence: Synthetic oligonucleotide
  Antisense strand to SEQ ID NO: 2464296
gccuucacagguaauuccc

SEQ ID NO: 2464298 - RNA, 19 nt, Artificial Sequence
  Description of Artificial Sequence: Synthetic oligonucleotide
  Sense strand starting at position 1773 of SEQ ID NO: 1887333
guaucuccuggugguagaa

SEQ ID NO: 2464299 - RNA, 19 nt, Artificial Sequence
  Description of Artificial Sequence: Synthetic oligonucleotide
  Antisense strand to SEQ ID NO: 2464298
uucuaccaccaggagauac

SEQ ID NO: 2464300 - RNA, 19 nt, Artificial Sequence
  Description of Artificial Sequence: Synthetic oligonucleotide
  Sense strand starting at position 1853 of SEQ ID NO: 1887333
guucuuccaucaccagaua

SEQ ID NO: 2464301 - RNA, 19 nt, Artificial Sequence
  Description of Artificial Sequence: Synthetic oligonucleotide
  Antisense strand to SEQ ID NO: 2464300
uaucuggugauggaagaac

SEQ ID NO: 2464302 - RNA, 19 nt, Artificial Sequence
  Description of Artificial Sequence: Synthetic oligonucleotide
  Sense strand starting at position 1864 of SEQ ID NO: 1887333
accagauaccuggguuucu

SEQ ID NO: 2464303 - RNA, 19 nt, Artificial Sequence
  Description of Artificial Sequence: Synthetic oligonucleotide
  Antisense strand to SEQ ID NO: 2464302
agaaacccagguaucuggu

SEQ ID NO: 2464304 - RNA, 19 nt, Artificial Sequence
  Description of Artificial Sequence: Synthetic oligonucleotide
  Sense strand starting at position 2341 of SEQ ID NO: 1887333
uguaaaggcuuccucacau

SEQ ID NO: 2464305 - RNA, 19 nt, Artificial Sequence
  Description of Artificial Sequence: Synthetic oligonucleotide
  Antisense strand to SEQ ID NO: 2464304
augugaggaagccuuuaca

SEQ ID NO: 2464306 - RNA, 19 nt, Artificial Sequence
  Description of Artificial Sequence: Synthetic oligonucleotide
  Sense strand starting at position 2521 of SEQ ID NO: 1887333
agucuuguucccugauuua

SEQ ID NO: 2464307 - RNA, 19 nt, Artificial Sequence
  Description of Artificial Sequence: Synthetic oligonucleotide
  Antisense strand to SEQ ID NO: 2464306
uaaaucagggaacaagacu

SEQ ID NO: 2464308 - RNA, 19 nt, Artificial Sequence
  Description of Artificial Sequence: Synthetic oligonucleotide
  Sense strand starting at position 3102 of SEQ ID NO: 1887333
guauccuucguguauagga

SEQ ID NO: 2464309 - RNA, 19 nt, Artificial Sequence
  Description of Artificial Sequence: Synthetic oligonucleotide
  Antisense strand to SEQ ID NO: 2464308
uccuauacacgaaggauac

SEQ ID NO: 2464310 - RNA, 19 nt, Artificial Sequence
  Description of Artificial Sequence: Synthetic oligonucleotide
  Sense strand starting at position 3252 of SEQ ID NO: 1887333
cuuguaggaaugugaaauc

SEQ ID NO: 2464311 - RNA, 19 nt, Artificial Sequence
  Description of Artificial Sequence: Synthetic oligonucleotide
  Antisense strand to SEQ ID NO: 2464310
gauuucacauuccuacaag

SEQ ID NO: 2464312 - RNA, 19 nt, Artificial Sequence
  Description of Artificial Sequence: Synthetic oligonucleotide
  Sense strand starting at position 3261 of SEQ ID NO: 1887333
augugaaaucugcauguug

SEQ ID NO: 2464313 - RNA, 19 nt, Artificial Sequence
  Description of Artificial Sequence: Synthetic oligonucleotide
  Antisense strand to SEQ ID NO: 2464312
caacaugcagauuucacau

SEQ ID NO: 2464314 - RNA, 19 nt, Artificial Sequence
  Description of Artificial Sequence: Synthetic oligonucleotide
  Sense strand starting at position 3322 of SEQ ID NO: 1887333
ggcguaugacguaaauguc

SEQ ID NO: 2464315 - RNA, 19 nt, Artificial Sequence
  Description of Artificial Sequence: Synthetic oligonucleotide
  Antisense strand to SEQ ID NO: 2464314
gacauuuacgucauacgcc

SEQ ID NO: 2464316 - RNA, 19 nt, Artificial Sequence
  Description of Artificial Sequence: Synthetic oligonucleotide
  Sense strand starting at position 3362 of SEQ ID NO: 1887333
auauguucugaaggcacaa

SEQ ID NO: 2464317 - RNA, 19 nt, Artificial Sequence
  Description of Artificial Sequence: Synthetic oligonucleotide
  Antisense strand to SEQ ID NO: 2464316
uugugccuucagaacauau

SEQ ID NO: 2464318 - RNA, 19 nt, Artificial Sequence
  Description of Artificial Sequence: Synthetic oligonucleotide
  Sense strand starting at position 3550 of SEQ ID NO: 1887333
uuugcuucuguauauugau

SEQ ID NO: 2464319 - RNA, 19 nt, Artificial Sequence
  Description of Artificial Sequence: Synthetic oligonucleotide
  Antisense strand to SEQ ID NO: 2464318
aucaauauacagaagcaaa

SEQ ID NO: 2464320 - RNA, 19 nt, Artificial Sequence
  Description of Artificial Sequence: Synthetic oligonucleotide
  Sense strand starting at position 3629 of SEQ ID NO: 1887333
gacagagccugacuuguga

SEQ ID NO: 2464321 - RNA, 19 nt, Artificial Sequence
  Description of Artificial Sequence: Synthetic oligonucleotide
  Antisense strand to SEQ ID NO: 2464320
ucacaagucaggcucuguc

SEQ ID NO: 2464322 - RNA, 19 nt, Artificial Sequence
  Description of Artificial Sequence: Synthetic oligonucleotide
  Sense strand starting at position 3638 of SEQ ID NO: 1887333
ugacuugugauuugcaguu

SEQ ID NO: 2464323 - RNA, 19 nt, Artificial Sequence
  Description of Artificial Sequence: Synthetic oligonucleotide
  Antisense strand to SEQ ID NO: 2464322
aacugcaaaucacaaguca

SEQ ID NO: 2464324 - RNA, 19 nt, Artificial Sequence
  Description of Artificial Sequence: Synthetic oligonucleotide
  Sense strand starting at position 3820 of SEQ ID NO: 1887333
gguguaauugccgauacag

SEQ ID NO: 2464325 - RNA, 19 nt, Artificial Sequence
  Description of Artificial Sequence: Synthetic oligonucleotide
  Antisense strand to SEQ ID NO: 2464324
cuguaucggcaauuacacc

SEQ ID NO: 2464326 - RNA, 19 nt, Artificial Sequence
  Description of Artificial Sequence: Synthetic oligonucleotide
  Sense strand starting at position 3829 of SEQ ID NO: 1887333
gccgauacagcauauaaga

SEQ ID NO: 2464327 - RNA, 19 nt, Artificial Sequence
  Description of Artificial Sequence: Synthetic oligonucleotide
  Antisense strand to SEQ ID NO: 2464326
ucuuauaugcuguaucggc

SEQ ID NO: 2464328 - RNA, 19 nt, Artificial Sequence
  Description of Artificial Sequence: Synthetic oligonucleotide
  Sense strand starting at position 3945 of SEQ ID NO: 1887333
guguuauaacuguaaagag

SEQ ID NO: 2464329 - RNA, 19 nt, Artificial Sequence
  Description of Artificial Sequence: Synthetic oligonucleotide
  Antisense strand to SEQ ID NO: 2464328
cucuuuacaguuauaacac

SEQ ID NO: 2464330 - RNA, 19 nt, Artificial Sequence
  Description of Artificial Sequence: Synthetic oligonucleotide
  Sense strand starting at position 44 of SEQ ID NO: 1887335
uauggaugucugggagaac

SEQ ID NO: 2464331 - RNA, 19 nt, Artificial Sequence
  Description of Artificial Sequence: Synthetic oligonucleotide
  Antisense strand to SEQ ID NO: 2464330
guucucccagacauccaua

SEQ ID NO: 2464332 - RNA, 19 nt, Artificial Sequence
  Description of Artificial Sequence: Synthetic oligonucleotide
  Sense strand starting at position 63 of SEQ ID NO: 1887335
agcuacagguucuugaaga

SEQ ID NO: 2464333 - RNA, 19 nt, Artificial Sequence
  Description of Artificial Sequence: Synthetic oligonucleotide
  Antisense strand to SEQ ID NO: 2464332
ucuucaagaaccuguagcu

SEQ ID NO: 2464334 - RNA, 19 nt, Artificial Sequence
  Description of Artificial Sequence: Synthetic oligonucleotide
  Sense strand starting at position 71 of SEQ ID NO: 1887335
guucuugaagauuaagcuu

SEQ ID NO: 2464335 - RNA, 19 nt, Artificial Sequence
  Description of Artificial Sequence: Synthetic oligonucleotide
  Antisense strand to SEQ ID NO: 2464334
aagcuuaaucuucaagaac

SEQ ID NO: 2464336 - RNA, 19 nt, Artificial Sequence
  Description of Artificial Sequence: Synthetic oligonucleotide
  Sense strand starting at position 104 of SEQ ID NO: 1887335
gguaucacagccugauaag

SEQ ID NO: 2464337 - RNA, 19 nt, Artificial Sequence
  Description of Artificial Sequence: Synthetic oligonucleotide
  Antisense strand to SEQ ID NO: 2464336
cuuaucaggcugugauacc

SEQ ID NO: 2464338 - RNA, 19 nt, Artificial Sequence
  Description of Artificial Sequence: Synthetic oligonucleotide
  Sense strand starting at position 139 of SEQ ID NO: 1887335
uugauccugcuugagagua

SEQ ID NO: 2464339 - RNA, 19 nt, Artificial Sequence
  Description of Artificial Sequence: Synthetic oligonucleotide
  Antisense strand to SEQ ID NO: 2464338
uacucucaagcaggaucaa

SEQ ID NO: 2464340 - RNA, 19 nt, Artificial Sequence
  Description of Artificial Sequence: Synthetic oligonucleotide
  Sense strand starting at position 144 of SEQ ID NO: 1887335
ccugcuugagaguaggaua

SEQ ID NO: 2464341 - RNA, 19 nt, Artificial Sequence
  Description of Artificial Sequence: Synthetic oligonucleotide
  Antisense strand to SEQ ID NO: 2464340
uauccuacucucaagcagg

SEQ ID NO: 2464342 - RNA, 19 nt, Artificial Sequence
  Description of Artificial Sequence: Synthetic oligonucleotide
  Sense strand starting at position 161 of SEQ ID NO: 1887335
uagagaaauuaggaaagaa

SEQ ID NO: 2464343 - RNA, 19 nt, Artificial Sequence
  Description of Artificial Sequence: Synthetic oligonucleotide
  Antisense strand to SEQ ID NO: 2464342
uucuuuccuaauuucucua

SEQ ID NO: 2464344 - RNA, 19 nt, Artificial Sequence
  Description of Artificial Sequence: Synthetic oligonucleotide
  Sense strand starting at position 333 of SEQ ID NO: 1887335
agagauauuugugacauau

SEQ ID NO: 2464345 - RNA, 19 nt, Artificial Sequence
  Description of Artificial Sequence: Synthetic oligonucleotide
  Antisense strand to SEQ ID NO: 2464344
auaugucacaaauaucucu

SEQ ID NO: 2464346 - RNA, 19 nt, Artificial Sequence
  Description of Artificial Sequence: Synthetic oligonucleotide
  Sense strand starting at position 462 of SEQ ID NO: 1887335
gaugauguccuuugaauau

SEQ ID NO: 2464347 - RNA, 19 nt, Artificial Sequence
  Description of Artificial Sequence: Synthetic oligonucleotide
  Antisense strand to SEQ ID NO: 2464346
auauucaaaggacaucauc

SEQ ID NO: 2464348 - RNA, 19 nt, Artificial Sequence
  Description of Artificial Sequence: Synthetic oligonucleotide
  Sense strand starting at position 717 of SEQ ID NO: 1887335
gggacagcaggccauauau

SEQ ID NO: 2464349 - RNA, 19 nt, Artificial Sequence
  Description of Artificial Sequence: Synthetic oligonucleotide
  Antisense strand to SEQ ID NO: 2464348
auauauggccugcuguccc

SEQ ID NO: 2464350 - RNA, 19 nt, Artificial Sequence
  Description of Artificial Sequence: Synthetic oligonucleotide
  Sense strand starting at position 769 of SEQ ID NO: 1887335
uacucuggguccucagaga

SEQ ID NO: 2464351 - RNA, 19 nt, Artificial Sequence
  Description of Artificial Sequence: Synthetic oligonucleotide
  Antisense strand to SEQ ID NO: 2464350
ucucugaggacccagagua

SEQ ID NO: 2464352 - RNA, 19 nt, Artificial Sequence
  Description of Artificial Sequence: Synthetic oligonucleotide
  Sense strand starting at position 1034 of SEQ ID NO: 1887335
ucgacuucucugcauaaua

SEQ ID NO: 2464353 - RNA, 19 nt, Artificial Sequence
  Description of Artificial Sequence: Synthetic oligonucleotide
  Antisense strand to SEQ ID NO: 2464352
uauuaugcagagaagucga

SEQ ID NO: 2464354 - RNA, 19 nt, Artificial Sequence
  Description of Artificial Sequence: Synthetic oligonucleotide
  Sense strand starting at position 1062 of SEQ ID NO: 1887335
auuaguacuugaguaauga

SEQ ID NO: 2464355 - RNA, 19 nt, Artificial Sequence
  Description of Artificial Sequence: Synthetic oligonucleotide
  Antisense strand to SEQ ID NO: 2464354
ucauuacucaaguacuaau

SEQ ID NO: 2464356 - RNA, 19 nt, Artificial Sequence
  Description of Artificial Sequence: Synthetic oligonucleotide
  Sense strand starting at position 1063 of SEQ ID NO: 1887335
uuaguacuugaguaaugau

SEQ ID NO: 2464357 - RNA, 19 nt, Artificial Sequence
  Description of Artificial Sequence: Synthetic oligonucleotide
  Antisense strand to SEQ ID NO: 2464356
aucauuacucaaguacuaa

SEQ ID NO: 2464358 - RNA, 19 nt, Artificial Sequence
  Description of Artificial Sequence: Synthetic oligonucleotide
  Sense strand starting at position 1072 of SEQ ID NO: 1887335
gaguaaugauacuuaaguu

SEQ ID NO: 2464359 - RNA, 19 nt, Artificial Sequence
  Description of Artificial Sequence: Synthetic oligonucleotide
  Antisense strand to SEQ ID NO: 2464358
aacuuaaguaucauuacuc

SEQ ID NO: 2464360 - RNA, 19 nt, Artificial Sequence
  Description of Artificial Sequence: Synthetic oligonucleotide
  Sense strand starting at position 1096 of SEQ ID NO: 1887335
acaggaacuauucgaaagu

SEQ ID NO: 2464361 - RNA, 19 nt, Artificial Sequence
  Description of Artificial Sequence: Synthetic oligonucleotide
  Antisense strand to SEQ ID NO: 2464360
acuuucgaauaguuccugu

SEQ ID NO: 2464362 - RNA, 19 nt, Artificial Sequence
  Description of Artificial Sequence: Synthetic oligonucleotide
  Sense strand starting at position 1143 of SEQ ID NO: 1887335
gcgaauuucucuuucucca

SEQ ID NO: 2464363 - RNA, 19 nt, Artificial Sequence
  Description of Artificial Sequence: Synthetic oligonucleotide
  Antisense strand to SEQ ID NO: 2464362
uggagaaagagaaauucgc

SEQ ID NO: 2464364 - RNA, 19 nt, Artificial Sequence
  Description of Artificial Sequence: Synthetic oligonucleotide
  Sense strand starting at position 1189 of SEQ ID NO: 1887335
caguuauuacaugaucgca

SEQ ID NO: 2464365 - RNA, 19 nt, Artificial Sequence
  Description of Artificial Sequence: Synthetic oligonucleotide
  Antisense strand to SEQ ID NO: 2464364
ugcgaucauguaauaacug

SEQ ID NO: 2464366 - RNA, 19 nt, Artificial Sequence
  Description of Artificial Sequence: Synthetic oligonucleotide
  Sense strand starting at position 1504 of SEQ ID NO: 1887335
ccagacuuccuccacggaa

SEQ ID NO: 2464367 - RNA, 19 nt, Artificial Sequence
  Description of Artificial Sequence: Synthetic oligonucleotide
  Antisense strand to SEQ ID NO: 2464366
uuccguggaggaagucugg

SEQ ID NO: 2464368 - RNA, 19 nt, Artificial Sequence
  Description of Artificial Sequence: Synthetic oligonucleotide
  Sense strand starting at position 1506 of SEQ ID NO: 1887335
agacuuccuccacggaaga

SEQ ID NO: 2464369 - RNA, 19 nt, Artificial Sequence
  Description of Artificial Sequence: Synthetic oligonucleotide
  Antisense strand to SEQ ID NO: 2464368
ucuuccguggaggaagucu

SEQ ID NO: 2464370 - RNA, 19 nt, Artificial Sequence
  Description of Artificial Sequence: Synthetic oligonucleotide
  Sense strand starting at position 1561 of SEQ ID NO: 1887335
uggaguauggugcaaggaa

SEQ ID NO: 2464371 - RNA, 19 nt, Artificial Sequence
  Description of Artificial Sequence: Synthetic oligonucleotide
  Antisense strand to SEQ ID NO: 2464370
uuccuugcaccauacucca

SEQ ID NO: 2464372 - RNA, 19 nt, Artificial Sequence
  Description of Artificial Sequence: Synthetic oligonucleotide
  Sense strand starting at position 1562 of SEQ ID NO: 1887335
ggaguauggugcaaggaac

SEQ ID NO: 2464373 - RNA, 19 nt, Artificial Sequence
  Description of Artificial Sequence: Synthetic oligonucleotide
  Antisense strand to SEQ ID NO: 2464372
guuccuugcaccauacucc

SEQ ID NO: 2464374 - RNA, 19 nt, Artificial Sequence
  Description of Artificial Sequence: Synthetic oligonucleotide
  Sense strand starting at position 1672 of SEQ ID NO: 1887335
ggauguuggcgggauagau

SEQ ID NO: 2464375 - RNA, 19 nt, Artificial Sequence
  Description of Artificial Sequence: Synthetic oligonucleotide
  Antisense strand to SEQ ID NO: 2464374
aucuaucccgccaacaucc

SEQ ID NO: 2464376 - RNA, 19 nt, Artificial Sequence
  Description of Artificial Sequence: Synthetic oligonucleotide
  Sense strand starting at position 1710 of SEQ ID NO: 1887335
uucaguagaguuugggaaa

SEQ ID NO: 2464377 - RNA, 19 nt, Artificial Sequence
  Description of Artificial Sequence: Synthetic oligonucleotide
  Antisense strand to SEQ ID NO: 2464376
uuucccaaacucuacugaa

SEQ ID NO: 2464378 - RNA, 19 nt, Artificial Sequence
  Description of Artificial Sequence: Synthetic oligonucleotide
  Sense strand starting at position 2452 of SEQ ID NO: 1887335
agugcacuccauugauaaa

SEQ ID NO: 2464379 - RNA, 19 nt, Artificial Sequence
  Description of Artificial Sequence: Synthetic oligonucleotide
  Antisense strand to SEQ ID NO: 2464378
uuuaucaauggagugcacu

SEQ ID NO: 2464380 - RNA, 19 nt, Artificial Sequence
  Description of Artificial Sequence: Synthetic oligonucleotide
  Sense strand starting at position 2495 of SEQ ID NO: 1887335
cagguucugcuccagggaa

SEQ ID NO: 2464381 - RNA, 19 nt, Artificial Sequence
  Description of Artificial Sequence: Synthetic oligonucleotide
  Antisense strand to SEQ ID NO: 2464380
uucccuggagcagaaccug

SEQ ID NO: 2464382 - RNA, 19 nt, Artificial Sequence
  Description of Artificial Sequence: Synthetic oligonucleotide
  Sense strand starting at position 3031 of SEQ ID NO: 1887335
gaggcuucuacagggauga

SEQ ID NO: 2464383 - RNA, 19 nt, Artificial Sequence
  Description of Artificial Sequence: Synthetic oligonucleotide
  Antisense strand to SEQ ID NO: 2464382
ucaucccuguagaagccuc

SEQ ID NO: 2464384 - RNA, 19 nt, Artificial Sequence
  Description of Artificial Sequence: Synthetic oligonucleotide
  Sense strand starting at position 3032 of SEQ ID NO: 1887335
aggcuucuacagggaugau

SEQ ID NO: 2464385 - RNA, 19 nt, Artificial Sequence
  Description of Artificial Sequence: Synthetic oligonucleotide
  Antisense strand to SEQ ID NO: 2464384
aucaucccuguagaagccu

SEQ ID NO: 2464386 - RNA, 19 nt, Artificial Sequence
  Description of Artificial Sequence: Synthetic oligonucleotide
  Sense strand starting at position 3205 of SEQ ID NO: 1887335
ggagauucucucuguggag

SEQ ID NO: 2464387 - RNA, 19 nt, Artificial Sequence
  Description of Artificial Sequence: Synthetic oligonucleotide
  Antisense strand to SEQ ID NO: 2464386
cuccacagagagaaucucc

SEQ ID NO: 2464388 - RNA, 19 nt, Artificial Sequence
  Description of Artificial Sequence: Synthetic oligonucleotide
  Sense strand starting at position 3233 of SEQ ID NO: 1887335
ggaggucuuagucacaauc

SEQ ID NO: 2464389 - RNA, 19 nt, Artificial Sequence
  Description of Artificial Sequence: Synthetic oligonucleotide
  Antisense strand to SEQ ID NO: 2464388
gauugugacuaagaccucc

SEQ ID NO: 2464390 - RNA, 19 nt, Artificial Sequence
  Description of Artificial Sequence: Synthetic oligonucleotide
  Sense strand starting at position 3398 of SEQ ID NO: 1887335
guugaaacaucuuugugaa

SEQ ID NO: 2464391 - RNA, 19 nt, Artificial Sequence
  Description of Artificial Sequence: Synthetic oligonucleotide
  Antisense strand to SEQ ID NO: 2464390
uucacaaagauguuucaac

SEQ ID NO: 2464392 - RNA, 19 nt, Artificial Sequence
  Description of Artificial Sequence: Synthetic oligonucleotide
  Sense strand starting at position 3399 of SEQ ID NO: 1887335
uugaaacaucuuugugaau

SEQ ID NO: 2464393 - RNA, 19 nt, Artificial Sequence
  Description of Artificial Sequence: Synthetic oligonucleotide
  Antisense strand to SEQ ID NO: 2464392
auucacaaagauguuucaa

SEQ ID NO: 2464394 - RNA, 19 nt, Artificial Sequence
  Description of Artificial Sequence: Synthetic oligonucleotide
  Sense strand starting at position 3400 of SEQ ID NO: 1887335
ugaaacaucuuugugaauc

SEQ ID NO: 2464395 - RNA, 19 nt, Artificial Sequence
  Description of Artificial Sequence: Synthetic oligonucleotide
  Antisense strand to SEQ ID NO: 2464394
gauucacaaagauguuuca

SEQ ID NO: 2464396 - RNA, 19 nt, Artificial Sequence
  Description of Artificial Sequence: Synthetic oligonucleotide
  Sense strand starting at position 3515 of SEQ ID NO: 1887335
ccuuaaugaccucagagca

SEQ ID NO: 2464397 - RNA, 19 nt, Artificial Sequence
  Description of Artificial Sequence: Synthetic oligonucleotide
  Antisense strand to SEQ ID NO: 2464396
ugcucugaggucauuaagg

SEQ ID NO: 2464398 - RNA, 19 nt, Artificial Sequence
  Description of Artificial Sequence: Synthetic oligonucleotide
  Sense strand starting at position 3528 of SEQ ID NO: 1887335
agagcaugagcaggauauu

SEQ ID NO: 2464399 - RNA, 19 nt, Artificial Sequence
  Description of Artificial Sequence: Synthetic oligonucleotide
  Antisense strand to SEQ ID NO: 2464398
aauauccugcucaugcucu

SEQ ID NO: 2464400 - RNA, 19 nt, Artificial Sequence
  Description of Artificial Sequence: Synthetic oligonucleotide
  Sense strand starting at position 3531 of SEQ ID NO: 1887335
gcaugagcaggauauuaua

SEQ ID NO: 2464401 - RNA, 19 nt, Artificial Sequence
  Description of Artificial Sequence: Synthetic oligonucleotide
  Antisense strand to SEQ ID NO: 2464400
uauaauauccugcucaugc

SEQ ID NO: 2464402 - RNA, 19 nt, Artificial Sequence
  Description of Artificial Sequence: Synthetic oligonucleotide
  Sense strand starting at position 3575 of SEQ ID NO: 1887335
gggugcauuucuucgcaaa

SEQ ID NO: 2464403 - RNA, 19 nt, Artificial Sequence
  Description of Artificial Sequence: Synthetic oligonucleotide
  Antisense strand to SEQ ID NO: 2464402
uuugcgaagaaaugcaccc

SEQ ID NO: 2464404 - RNA, 19 nt, Artificial Sequence
  Description of Artificial Sequence: Synthetic oligonucleotide
  Sense strand starting at position 3576 of SEQ ID NO: 1887335
ggugcauuucuucgcaaau

SEQ ID NO: 2464405 - RNA, 19 nt, Artificial Sequence
  Description of Artificial Sequence: Synthetic oligonucleotide
  Antisense strand to SEQ ID NO: 2464404
auuugcgaagaaaugcacc

SEQ ID NO: 2464406 - RNA, 19 nt, Artificial Sequence
  Description of Artificial Sequence: Synthetic oligonucleotide
  Sense strand starting at position 3627 of SEQ ID NO: 1887335
cagccaaccgaguauuaca

SEQ ID NO: 2464407 - RNA, 19 nt, Artificial Sequence
  Description of Artificial Sequence: Synthetic oligonucleotide
  Antisense strand to SEQ ID NO: 2464406
uguaauacucgguuggcug

SEQ ID NO: 2464408 - RNA, 19 nt, Artificial Sequence
  Description of Artificial Sequence: Synthetic oligonucleotide
  Sense strand starting at position 3818 of SEQ ID NO: 1887335
accacaguuuguccaaacu

SEQ ID NO: 2464409 - RNA, 19 nt, Artificial Sequence
  Description of Artificial Sequence: Synthetic oligonucleotide
  Antisense strand to SEQ ID NO: 2464408
aguuuggacaaacuguggu

SEQ ID NO: 2464410 - RNA, 19 nt, Artificial Sequence
  Description of Artificial Sequence: Synthetic oligonucleotide
  Sense strand starting at position 26 of SEQ ID NO: 1887334
ccagacuuccuccacggaa

SEQ ID NO: 2464411 - RNA, 19 nt, Artificial Sequence
  Description of Artificial Sequence: Synthetic oligonucleotide
  Antisense strand to SEQ ID NO: 2464410
uuccguggaggaagucugg

SEQ ID NO: 2464412 - RNA, 19 nt, Artificial Sequence
  Description of Artificial Sequence: Synthetic oligonucleotide
  Sense strand starting at position 28 of SEQ ID NO: 1887334
agacuuccuccacggaaga

SEQ ID NO: 2464413 - RNA, 19 nt, Artificial Sequence
  Description of Artificial Sequence: Synthetic oligonucleotide
  Antisense strand to SEQ ID NO: 2464412
ucuuccguggaggaagucu

SEQ ID NO: 2464414 - RNA, 19 nt, Artificial Sequence
  Description of Artificial Sequence: Synthetic oligonucleotide
  Sense strand starting at position 83 of SEQ ID NO: 1887334
uggaguauggugcaaggaa

SEQ ID NO: 2464415 - RNA, 19 nt, Artificial Sequence
  Description of Artificial Sequence: Synthetic oligonucleotide
  Antisense strand to SEQ ID NO: 2464414
uuccuugcaccauacucca

SEQ ID NO: 2464416 - RNA, 19 nt, Artificial Sequence
  Description of Artificial Sequence: Synthetic oligonucleotide
  Sense strand starting at position 84 of SEQ ID NO: 1887334
ggaguauggugcaaggaac

SEQ ID NO: 2464417 - RNA, 19 nt, Artificial Sequence
  Description of Artificial Sequence: Synthetic oligonucleotide
  Antisense strand to SEQ ID NO: 2464416
guuccuugcaccauacucc

SEQ ID NO: 2464418 - RNA, 19 nt, Artificial Sequence
  Description of Artificial Sequence: Synthetic oligonucleotide
  Sense strand starting at position 194 of SEQ ID NO: 1887334
ggauguuggcgggauagau

SEQ ID NO: 2464419 - RNA, 19 nt, Artificial Sequence
  Description of Artificial Sequence: Synthetic oligonucleotide
  Antisense strand to SEQ ID NO: 2464418
aucuaucccgccaacaucc

SEQ ID NO: 2464420 - RNA, 19 nt, Artificial Sequence
  Description of Artificial Sequence: Synthetic oligonucleotide
  Sense strand starting at position 232 of SEQ ID NO: 1887334
uucaguagaguuugggaaa

SEQ ID NO: 2464421 - RNA, 19 nt, Artificial Sequence
  Description of Artificial Sequence: Synthetic oligonucleotide
  Antisense strand to SEQ ID NO: 2464420
uuucccaaacucuacugaa

SEQ ID NO: 2464422 - RNA, 19 nt, Artificial Sequence
  Description of Artificial Sequence: Synthetic oligonucleotide
  Sense strand starting at position 974 of SEQ ID NO: 1887334
agugcacuccauugauaaa

SEQ ID NO: 2464423 - RNA, 19 nt, Artificial Sequence
  Description of Artificial Sequence: Synthetic oligonucleotide
  Antisense strand to SEQ ID NO: 2464422
uuuaucaauggagugcacu

SEQ ID NO: 2464424 - RNA, 19 nt, Artificial Sequence
  Description of Artificial Sequence: Synthetic oligonucleotide
  Sense strand starting at position 1017 of SEQ ID NO: 1887334
cagguucugcuccagggaa

SEQ ID NO: 2464425 - RNA, 19 nt, Artificial Sequence
  Description of Artificial Sequence: Synthetic oligonucleotide
  Antisense strand to SEQ ID NO: 2464424
uucccuggagcagaaccug

SEQ ID NO: 2464426 - RNA, 19 nt, Artificial Sequence
  Description of Artificial Sequence: Synthetic oligonucleotide
  Sense strand starting at position 1553 of SEQ ID NO: 1887334
gaggcuucuacagggauga

SEQ ID NO: 2464427 - RNA, 19 nt, Artificial Sequence
  Description of Artificial Sequence: Synthetic oligonucleotide
  Antisense strand to SEQ ID NO: 2464426
ucaucccuguagaagccuc

SEQ ID NO: 2464428 - RNA, 19 nt, Artificial Sequence
  Description of Artificial Sequence: Synthetic oligonucleotide
  Sense strand starting at position 1554 of SEQ ID NO: 1887334
aggcuucuacagggaugau

SEQ ID NO: 2464429 - RNA, 19 nt, Artificial Sequence
  Description of Artificial Sequence: Synthetic oligonucleotide
  Antisense strand to SEQ ID NO: 2464428
aucaucccuguagaagccu

SEQ ID NO: 2464430 - RNA, 19 nt, Artificial Sequence
  Description of Artificial Sequence: Synthetic oligonucleotide
  Sense strand starting at position 1727 of SEQ ID NO: 1887334
ggagauucucucuguggag

SEQ ID NO: 2464431 - RNA, 19 nt, Artificial Sequence
  Description of Artificial Sequence: Synthetic oligonucleotide
  Antisense strand to SEQ ID NO: 2464430
cuccacagagagaaucucc

SEQ ID NO: 2464432 - RNA, 19 nt, Artificial Sequence
  Description of Artificial Sequence: Synthetic oligonucleotide
  Sense strand starting at position 1755 of SEQ ID NO: 1887334
ggaggucuuagucacaauc

SEQ ID NO: 2464433 - RNA, 19 nt, Artificial Sequence
  Description of Artificial Sequence: Synthetic oligonucleotide
  Antisense strand to SEQ ID NO: 2464432
gauugugacuaagaccucc

SEQ ID NO: 2464434 - RNA, 19 nt, Artificial Sequence
  Description of Artificial Sequence: Synthetic oligonucleotide
  Sense strand starting at position 1920 of SEQ ID NO: 1887334
guugaaacaucuuugugaa

SEQ ID NO: 2464435 - RNA, 19 nt, Artificial Sequence
  Description of Artificial Sequence: Synthetic oligonucleotide
  Antisense strand to SEQ ID NO: 2464434
uucacaaagauguuucaac

SEQ ID NO: 2464436 - RNA, 19 nt, Artificial Sequence
  Description of Artificial Sequence: Synthetic oligonucleotide
  Sense strand starting at position 1921 of SEQ ID NO: 1887334
uugaaacaucuuugugaau

SEQ ID NO: 2464437 - RNA, 19 nt, Artificial Sequence
  Description of Artificial Sequence: Synthetic oligonucleotide
  Antisense strand to SEQ ID NO: 2464436
auucacaaagauguuucaa

SEQ ID NO: 2464438 - RNA, 19 nt, Artificial Sequence
  Description of Artificial Sequence: Synthetic oligonucleotide
  Sense strand starting at position 1922 of SEQ ID NO: 1887334
ugaaacaucuuugugaauc

SEQ ID NO: 2464439 - RNA, 19 nt, Artificial Sequence
  Description of Artificial Sequence: Synthetic oligonucleotide
  Antisense strand to SEQ ID NO: 2464438
gauucacaaagauguuuca

SEQ ID NO: 2464440 - RNA, 19 nt, Artificial Sequence
  Description of Artificial Sequence: Synthetic oligonucleotide
  Sense strand starting at position 2037 of SEQ ID NO: 1887334
ccuuaaugaccucagagca

SEQ ID NO: 2464441 - RNA, 19 nt, Artificial Sequence
  Description of Artificial Sequence: Synthetic oligonucleotide
  Antisense strand to SEQ ID NO: 2464440
ugcucugaggucauuaagg

SEQ ID NO: 2464442 - RNA, 19 nt, Artificial Sequence
  Description of Artificial Sequence: Synthetic oligonucleotide
  Sense strand starting at position 2050 of SEQ ID NO: 1887334
agagcaugagcaggauauu

SEQ ID NO: 2464443 - RNA, 19 nt, Artificial Sequence
  Description of Artificial Sequence: Synthetic oligonucleotide
  Antisense strand to SEQ ID NO: 2464442
aauauccugcucaugcucu

SEQ ID NO: 2464444 - RNA, 19 nt, Artificial Sequence
  Description of Artificial Sequence: Synthetic oligonucleotide
  Sense strand starting at position 2053 of SEQ ID NO: 1887334
gcaugagcaggauauuaua

SEQ ID NO: 2464445 - RNA, 19 nt, Artificial Sequence
  Description of Artificial Sequence: Synthetic oligonucleotide
  Antisense strand to SEQ ID NO: 2464444
uauaauauccugcucaugc

SEQ ID NO: 2464446 - RNA, 19 nt, Artificial Sequence
  Description of Artificial Sequence: Synthetic oligonucleotide
  Sense strand starting at position 2097 of SEQ ID NO: 1887334
gggugcauuucuucgcaaa

SEQ ID NO: 2464447 - RNA, 19 nt, Artificial Sequence
  Description of Artificial Sequence: Synthetic oligonucleotide
  Antisense strand to SEQ ID NO: 2464446
uuugcgaagaaaugcaccc

SEQ ID NO: 2464448 - RNA, 19 nt, Artificial Sequence
  Description of Artificial Sequence: Synthetic oligonucleotide
  Sense strand starting at position 2098 of SEQ ID NO: 1887334
ggugcauuucuucgcaaau

SEQ ID NO: 2464449 - RNA, 19 nt, Artificial Sequence
  Description of Artificial Sequence: Synthetic oligonucleotide
  Antisense strand to SEQ ID NO: 2464448
auuugcgaagaaaugcacc

SEQ ID NO: 2464450 - RNA, 19 nt, Artificial Sequence
  Description of Artificial Sequence: Synthetic oligonucleotide
  Sense strand starting at position 2149 of SEQ ID NO: 1887334
cagccaaccgaguauuaca

SEQ ID NO: 2464451 - RNA, 19 nt, Artificial Sequence
  Description of Artificial Sequence: Synthetic oligonucleotide
  Antisense strand to SEQ ID NO: 2464450
uguaauacucgguuggcug

SEQ ID NO: 2464452 - RNA, 19 nt, Artificial Sequence
  Description of Artificial Sequence: Synthetic oligonucleotide
  Sense strand starting at position 2536 of SEQ ID NO: 1887334
aagucuagcuaucugauga

SEQ ID NO: 2464453 - RNA, 19 nt, Artificial Sequence
  Description of Artificial Sequence: Synthetic oligonucleotide
  Antisense strand to SEQ ID NO: 2464452
ucaucagauagcuagacuu

SEQ ID NO: 2464454 - RNA, 19 nt, Artificial Sequence
  Description of Artificial Sequence: Synthetic oligonucleotide
  Sense strand starting at position 2541 of SEQ ID NO: 1887334
uagcuaucugaugaaguaa

SEQ ID NO: 2464455 - RNA, 19 nt, Artificial Sequence
  Description of Artificial Sequence: Synthetic oligonucleotide
  Antisense strand to SEQ ID NO: 2464454
uuacuucaucagauagcua

SEQ ID NO: 2464456 - RNA, 19 nt, Artificial Sequence
  Description of Artificial Sequence: Synthetic oligonucleotide
  Sense strand starting at position 2713 of SEQ ID NO: 1887334
gugguuugacagcaaguga

SEQ ID NO: 2464457 - RNA, 19 nt, Artificial Sequence
  Description of Artificial Sequence: Synthetic oligonucleotide
  Antisense strand to SEQ ID NO: 2464456
ucacuugcugucaaaccac

SEQ ID NO: 2464458 - RNA, 19 nt, Artificial Sequence
  Description of Artificial Sequence: Synthetic oligonucleotide
  Sense strand starting at position 2717 of SEQ ID NO: 1887334
uuugacagcaagugauaga

SEQ ID NO: 2464459 - RNA, 19 nt, Artificial Sequence
  Description of Artificial Sequence: Synthetic oligonucleotide
  Antisense strand to SEQ ID NO: 2464458
ucuaucacuugcugucaaa

SEQ ID NO: 2464460 - RNA, 19 nt, Artificial Sequence
  Description of Artificial Sequence: Synthetic oligonucleotide
  Sense strand starting at position 2790 of SEQ ID NO: 1887334
acaguaggaucuccuggaa

SEQ ID NO: 2464461 - RNA, 19 nt, Artificial Sequence
  Description of Artificial Sequence: Synthetic oligonucleotide
  Antisense strand to SEQ ID NO: 2464460
uuccaggagauccuacugu

SEQ ID NO: 2464462 - RNA, 19 nt, Artificial Sequence
  Description of Artificial Sequence: Synthetic oligonucleotide
  Sense strand starting at position 2793 of SEQ ID NO: 1887334
guaggaucuccuggaauuc

SEQ ID NO: 2464463 - RNA, 19 nt, Artificial Sequence
  Description of Artificial Sequence: Synthetic oligonucleotide
  Antisense strand to SEQ ID NO: 2464462
gaauuccaggagauccuac

SEQ ID NO: 2464464 - RNA, 19 nt, Artificial Sequence
  Description of Artificial Sequence: Synthetic oligonucleotide
  Sense strand starting at position 2802 of SEQ ID NO: 1887334
ccuggaauucuaggguaag

SEQ ID NO: 2464465 - RNA, 19 nt, Artificial Sequence
  Description of Artificial Sequence: Synthetic oligonucleotide
  Antisense strand to SEQ ID NO: 2464464
cuuacccuagaauuccagg

SEQ ID NO: 2464466 - RNA, 19 nt, Artificial Sequence
  Description of Artificial Sequence: Synthetic oligonucleotide
  Sense strand starting at position 2875 of SEQ ID NO: 1887334
aauguaguggcauagaaca

SEQ ID NO: 2464467 - RNA, 19 nt, Artificial Sequence
  Description of Artificial Sequence: Synthetic oligonucleotide
  Antisense strand to SEQ ID NO: 2464466
uguucuaugccacuacauu

SEQ ID NO: 2464468 - RNA, 19 nt, Artificial Sequence
  Description of Artificial Sequence: Synthetic oligonucleotide
  Sense strand starting at position 2911 of SEQ ID NO: 1887334
gacuacugugggugaggaa

SEQ ID NO: 2464469 - RNA, 19 nt, Artificial Sequence
  Description of Artificial Sequence: Synthetic oligonucleotide
  Antisense strand to SEQ ID NO: 2464468
uuccucacccacaguaguc

SEQ ID NO: 2464470 - RNA, 19 nt, Artificial Sequence
  Description of Artificial Sequence: Synthetic oligonucleotide
  Sense strand starting at position 3032 of SEQ ID NO: 1887334
acuagaguccuggagaugu

SEQ ID NO: 2464471 - RNA, 19 nt, Artificial Sequence
  Description of Artificial Sequence: Synthetic oligonucleotide
  Antisense strand to SEQ ID NO: 2464470
acaucuccaggacucuagu

SEQ ID NO: 2464472 - RNA, 19 nt, Artificial Sequence
  Description of Artificial Sequence: Synthetic oligonucleotide
  Sense strand starting at position 3163 of SEQ ID NO: 1887334
uggucuuaggauggucaga

SEQ ID NO: 2464473 - RNA, 19 nt, Artificial Sequence
  Description of Artificial Sequence: Synthetic oligonucleotide
  Antisense strand to SEQ ID NO: 2464472
ucugaccauccuaagacca

SEQ ID NO: 2464474 - RNA, 19 nt, Artificial Sequence
  Description of Artificial Sequence: Synthetic oligonucleotide
  Sense strand starting at position 3165 of SEQ ID NO: 1887334
gucuuaggauggucagacu

SEQ ID NO: 2464475 - RNA, 19 nt, Artificial Sequence
  Description of Artificial Sequence: Synthetic oligonucleotide
  Antisense strand to SEQ ID NO: 2464474
agucugaccauccuaagac

SEQ ID NO: 2464476 - RNA, 19 nt, Artificial Sequence
  Description of Artificial Sequence: Synthetic oligonucleotide
  Sense strand starting at position 3174 of SEQ ID NO: 1887334
uggucagacucuuuauaca

SEQ ID NO: 2464477 - RNA, 19 nt, Artificial Sequence
  Description of Artificial Sequence: Synthetic oligonucleotide
  Antisense strand to SEQ ID NO: 2464476
uguauaaagagucugacca

SEQ ID NO: 2464478 - RNA, 19 nt, Artificial Sequence
  Description of Artificial Sequence: Synthetic oligonucleotide
  Sense strand starting at position 3254 of SEQ ID NO: 1887334
gugaccuagcuuuagaagu

SEQ ID NO: 2464479 - RNA, 19 nt, Artificial Sequence
  Description of Artificial Sequence: Synthetic oligonucleotide
  Antisense strand to SEQ ID NO: 2464478
acuucuaaagcuaggucac

SEQ ID NO: 2464480 - RNA, 19 nt, Artificial Sequence
  Description of Artificial Sequence: Synthetic oligonucleotide
  Sense strand starting at position 3279 of SEQ ID NO: 1887334
gcguuaauucugcugcauu

SEQ ID NO: 2464481 - RNA, 19 nt, Artificial Sequence
  Description of Artificial Sequence: Synthetic oligonucleotide
  Antisense strand to SEQ ID NO: 2464480
aaugcagcagaauuaacgc

SEQ ID NO: 2464482 - RNA, 19 nt, Artificial Sequence
  Description of Artificial Sequence: Synthetic oligonucleotide
  Sense strand starting at position 3556 of SEQ ID NO: 1887334
agaagauguuauuccauga

SEQ ID NO: 2464483 - RNA, 19 nt, Artificial Sequence
  Description of Artificial Sequence: Synthetic oligonucleotide
  Antisense strand to SEQ ID NO: 2464482
ucauggaauaacaucuucu

SEQ ID NO: 2464484 - RNA, 19 nt, Artificial Sequence
  Description of Artificial Sequence: Synthetic oligonucleotide
  Sense strand starting at position 3561 of SEQ ID NO: 1887334
auguuauuccaugaucuuc

SEQ ID NO: 2464485 - RNA, 19 nt, Artificial Sequence
  Description of Artificial Sequence: Synthetic oligonucleotide
  Antisense strand to SEQ ID NO: 2464484
gaagaucauggaauaacau

SEQ ID NO: 2464486 - RNA, 19 nt, Artificial Sequence
  Description of Artificial Sequence: Synthetic oligonucleotide
  Sense strand starting at position 3787 of SEQ ID NO: 1887334
gggucaugggcccaagcau

SEQ ID NO: 2464487 - RNA, 19 nt, Artificial Sequence
  Description of Artificial Sequence: Synthetic oligonucleotide
  Antisense strand to SEQ ID NO: 2464486
augcuugggcccaugaccc

SEQ ID NO: 2464488 - RNA, 19 nt, Artificial Sequence
  Description of Artificial Sequence: Synthetic oligonucleotide
  Sense strand starting at position 3852 of SEQ ID NO: 1887334
ugucacauuuccuuugcau

SEQ ID NO: 2464489 - RNA, 19 nt, Artificial Sequence
  Description of Artificial Sequence: Synthetic oligonucleotide
  Antisense strand to SEQ ID NO: 2464488
augcaaaggaaaugugaca

SEQ ID NO: 2464490 - RNA, 19 nt, Artificial Sequence
  Description of Artificial Sequence: Synthetic oligonucleotide
  Sense strand starting at position 59 of SEQ ID NO: 1887336
ggaagcauagcuuagccaa

SEQ ID NO: 2464491 - RNA, 19 nt, Artificial Sequence
  Description of Artificial Sequence: Synthetic oligonucleotide
  Antisense strand to SEQ ID NO: 2464490
uuggcuaagcuaugcuucc

SEQ ID NO: 2464492 - RNA, 19 nt, Artificial Sequence
  Description of Artificial Sequence: Synthetic oligonucleotide
  Sense strand starting at position 152 of SEQ ID NO: 1887336
ccgugugugccacuuggau

SEQ ID NO: 2464493 - RNA, 19 nt, Artificial Sequence
  Description of Artificial Sequence: Synthetic oligonucleotide
  Antisense strand to SEQ ID NO: 2464492
auccaaguggcacacacgg

SEQ ID NO: 2464494 - RNA, 19 nt, Artificial Sequence
  Description of Artificial Sequence: Synthetic oligonucleotide
  Sense strand starting at position 178 of SEQ ID NO: 1887336
cccaauuaugcaggguagu

SEQ ID NO: 2464495 - RNA, 19 nt, Artificial Sequence
  Description of Artificial Sequence: Synthetic oligonucleotide
  Antisense strand to SEQ ID NO: 2464494
acuacccugcauaauuggg

SEQ ID NO: 2464496 - RNA, 19 nt, Artificial Sequence
  Description of Artificial Sequence: Synthetic oligonucleotide
  Sense strand starting at position 244 of SEQ ID NO: 1887336
gcuaacauccuaggguuua

SEQ ID NO: 2464497 - RNA, 19 nt, Artificial Sequence
  Description of Artificial Sequence: Synthetic oligonucleotide
  Antisense strand to SEQ ID NO: 2464496
uaaacccuaggauguuagc

SEQ ID NO: 2464498 - RNA, 19 nt, Artificial Sequence
  Description of Artificial Sequence: Synthetic oligonucleotide
  Sense strand starting at position 307 of SEQ ID NO: 1887336
aacucaugcugguuggaaa

SEQ ID NO: 2464499 - RNA, 19 nt, Artificial Sequence
  Description of Artificial Sequence: Synthetic oligonucleotide
  Antisense strand to SEQ ID NO: 2464498
uuuccaaccagcaugaguu

SEQ ID NO: 2464500 - RNA, 19 nt, Artificial Sequence
  Description of Artificial Sequence: Synthetic oligonucleotide
  Sense strand starting at position 326 of SEQ ID NO: 1887336
guuucaaguguugaguaaa

SEQ ID NO: 2464501 - RNA, 19 nt, Artificial Sequence
  Description of Artificial Sequence: Synthetic oligonucleotide
  Antisense strand to SEQ ID NO: 2464500
uuuacucaacacuugaaac

SEQ ID NO: 2464502 - RNA, 19 nt, Artificial Sequence
  Description of Artificial Sequence: Synthetic oligonucleotide
  Sense strand starting at position 329 of SEQ ID NO: 1887336
ucaaguguugaguaaacuc

SEQ ID NO: 2464503 - RNA, 19 nt, Artificial Sequence
  Description of Artificial Sequence: Synthetic oligonucleotide
  Antisense strand to SEQ ID NO: 2464502
gaguuuacucaacacuuga

SEQ ID NO: 2464504 - RNA, 19 nt, Artificial Sequence
  Description of Artificial Sequence: Synthetic oligonucleotide
  Sense strand starting at position 367 of SEQ ID NO: 1887336
guauaacacucccuguuua

SEQ ID NO: 2464505 - RNA, 19 nt, Artificial Sequence
  Description of Artificial Sequence: Synthetic oligonucleotide
  Antisense strand to SEQ ID NO: 2464504
uaaacagggaguguuauac

SEQ ID NO: 2464506 - RNA, 19 nt, Artificial Sequence
  Description of Artificial Sequence: Synthetic oligonucleotide
  Sense strand starting at position 849 of SEQ ID NO: 1887336
auauacauguguguuuaca

SEQ ID NO: 2464507 - RNA, 19 nt, Artificial Sequence
  Description of Artificial Sequence: Synthetic oligonucleotide
  Antisense strand to SEQ ID NO: 2464506
uguaaacacacauguauau

SEQ ID NO: 2464508 - RNA, 19 nt, Artificial Sequence
  Description of Artificial Sequence: Synthetic oligonucleotide
  Sense strand starting at position 924 of SEQ ID NO: 1887336
acacucuugugauuagaag

SEQ ID NO: 2464509 - RNA, 19 nt, Artificial Sequence
  Description of Artificial Sequence: Synthetic oligonucleotide
  Antisense strand to SEQ ID NO: 2464508
cuucuaaucacaagagugu

SEQ ID NO: 2464510 - RNA, 19 nt, Artificial Sequence
  Description of Artificial Sequence: Synthetic oligonucleotide
  Sense strand starting at position 972 of SEQ ID NO: 1887336
gggaguugggucuggguuu

SEQ ID NO: 2464511 - RNA, 19 nt, Artificial Sequence
  Description of Artificial Sequence: Synthetic oligonucleotide
  Antisense strand to SEQ ID NO: 2464510
aaacccagacccaacuccc

SEQ ID NO: 2464512 - RNA, 19 nt, Artificial Sequence
  Description of Artificial Sequence: Synthetic oligonucleotide
  Sense strand starting at position 1074 of SEQ ID NO: 1887336
gcaucucggaguuagguaa

SEQ ID NO: 2464513 - RNA, 19 nt, Artificial Sequence
  Description of Artificial Sequence: Synthetic oligonucleotide
  Antisense strand to SEQ ID NO: 2464512
uuaccuaacuccgagaugc

SEQ ID NO: 2464514 - RNA, 19 nt, Artificial Sequence
  Description of Artificial Sequence: Synthetic oligonucleotide
  Sense strand starting at position 1078 of SEQ ID NO: 1887336
cucggaguuagguaagugu

SEQ ID NO: 2464515 - RNA, 19 nt, Artificial Sequence
  Description of Artificial Sequence: Synthetic oligonucleotide
  Antisense strand to SEQ ID NO: 2464514
acacuuaccuaacuccgag

SEQ ID NO: 2464516 - RNA, 19 nt, Artificial Sequence
  Description of Artificial Sequence: Synthetic oligonucleotide
  Sense strand starting at position 1142 of SEQ ID NO: 1887336
auaugaaaucugggcccau

SEQ ID NO: 2464517 - RNA, 19 nt, Artificial Sequence
  Description of Artificial Sequence: Synthetic oligonucleotide
  Antisense strand to SEQ ID NO: 2464516
augggcccagauuucauau

SEQ ID NO: 2464518 - RNA, 19 nt, Artificial Sequence
  Description of Artificial Sequence: Synthetic oligonucleotide
  Sense strand starting at position 1280 of SEQ ID NO: 1887336
aggugucuacauggagaga

SEQ ID NO: 2464519 - RNA, 19 nt, Artificial Sequence
  Description of Artificial Sequence: Synthetic oligonucleotide
  Antisense strand to SEQ ID NO: 2464518
ucucuccauguagacaccu

SEQ ID NO: 2464520 - RNA, 19 nt, Artificial Sequence
  Description of Artificial Sequence: Synthetic oligonucleotide
  Sense strand starting at position 1283 of SEQ ID NO: 1887336
ugucuacauggagagaguu

SEQ ID NO: 2464521 - RNA, 19 nt, Artificial Sequence
  Description of Artificial Sequence: Synthetic oligonucleotide
  Antisense strand to SEQ ID NO: 2464520
aacucucuccauguagaca

SEQ ID NO: 2464522 - RNA, 19 nt, Artificial Sequence
  Description of Artificial Sequence: Synthetic oligonucleotide
  Sense strand starting at position 1314 of SEQ ID NO: 1887336
acacaucacucuguagacu

SEQ ID NO: 2464523 - RNA, 19 nt, Artificial Sequence
  Description of Artificial Sequence: Synthetic oligonucleotide
  Antisense strand to SEQ ID NO: 2464522
agucuacagagugaugugu

SEQ ID NO: 2464524 - RNA, 19 nt, Artificial Sequence
  Description of Artificial Sequence: Synthetic oligonucleotide
  Sense strand starting at position 1500 of SEQ ID NO: 1887336
gaagacaauucugcguuau

SEQ ID NO: 2464525 - RNA, 19 nt, Artificial Sequence
  Description of Artificial Sequence: Synthetic oligonucleotide
  Antisense strand to SEQ ID NO: 2464524
auaacgcagaauugucuuc

SEQ ID NO: 2464526 - RNA, 19 nt, Artificial Sequence
  Description of Artificial Sequence: Synthetic oligonucleotide
  Sense strand starting at position 1502 of SEQ ID NO: 1887336
agacaauucugcguuauca

SEQ ID NO: 2464527 - RNA, 19 nt, Artificial Sequence
  Description of Artificial Sequence: Synthetic oligonucleotide
  Antisense strand to SEQ ID NO: 2464526
ugauaacgcagaauugucu

SEQ ID NO: 2464528 - RNA, 19 nt, Artificial Sequence
  Description of Artificial Sequence: Synthetic oligonucleotide
  Sense strand starting at position 1504 of SEQ ID NO: 1887336
acaauucugcguuaucaaa

SEQ ID NO: 2464529 - RNA, 19 nt, Artificial Sequence
  Description of Artificial Sequence: Synthetic oligonucleotide
  Antisense strand to SEQ ID NO: 2464528
uuugauaacgcagaauugu

SEQ ID NO: 2464530 - RNA, 19 nt, Artificial Sequence
  Description of Artificial Sequence: Synthetic oligonucleotide
  Sense strand starting at position 1609 of SEQ ID NO: 1887336
ugguucuccuucccaugaa

SEQ ID NO: 2464531 - RNA, 19 nt, Artificial Sequence
  Description of Artificial Sequence: Synthetic oligonucleotide
  Antisense strand to SEQ ID NO: 2464530
uucaugggaaggagaacca

SEQ ID NO: 2464532 - RNA, 19 nt, Artificial Sequence
  Description of Artificial Sequence: Synthetic oligonucleotide
  Sense strand starting at position 1628 of SEQ ID NO: 1887336
uggaaauuccugugcaauc

SEQ ID NO: 2464533 - RNA, 19 nt, Artificial Sequence
  Description of Artificial Sequence: Synthetic oligonucleotide
  Antisense strand to SEQ ID NO: 2464532
gauugcacaggaauuucca

SEQ ID NO: 2464534 - RNA, 19 nt, Artificial Sequence
  Description of Artificial Sequence: Synthetic oligonucleotide
  Sense strand starting at position 1629 of SEQ ID NO: 1887336
ggaaauuccugugcaaucu

SEQ ID NO: 2464535 - RNA, 19 nt, Artificial Sequence
  Description of Artificial Sequence: Synthetic oligonucleotide
  Antisense strand to SEQ ID NO: 2464534
agauugcacaggaauuucc

SEQ ID NO: 2464536 - RNA, 19 nt, Artificial Sequence
  Description of Artificial Sequence: Synthetic oligonucleotide
  Sense strand starting at position 1659 of SEQ ID NO: 1887336
ugcuguaaucaauguacag

SEQ ID NO: 2464537 - RNA, 19 nt, Artificial Sequence
  Description of Artificial Sequence: Synthetic oligonucleotide
  Antisense strand to SEQ ID NO: 2464536
cuguacauugauuacagca

SEQ ID NO: 2464538 - RNA, 19 nt, Artificial Sequence
  Description of Artificial Sequence: Synthetic oligonucleotide
  Sense strand starting at position 1723 of SEQ ID NO: 1887336
ucagaugagaccugaaugu

SEQ ID NO: 2464539 - RNA, 19 nt, Artificial Sequence
  Description of Artificial Sequence: Synthetic oligonucleotide
  Antisense strand to SEQ ID NO: 2464538
acauucaggucucaucuga

SEQ ID NO: 2464540 - RNA, 19 nt, Artificial Sequence
  Description of Artificial Sequence: Synthetic oligonucleotide
  Sense strand starting at position 1993 of SEQ ID NO: 1887336
uugaaauacucauccuggu

SEQ ID NO: 2464541 - RNA, 19 nt, Artificial Sequence
  Description of Artificial Sequence: Synthetic oligonucleotide
  Antisense strand to SEQ ID NO: 2464540
accaggaugaguauuucaa

SEQ ID NO: 2464542 - RNA, 19 nt, Artificial Sequence
  Description of Artificial Sequence: Synthetic oligonucleotide
  Sense strand starting at position 2036 of SEQ ID NO: 1887336
guccuaguauuaucccuga

SEQ ID NO: 2464543 - RNA, 19 nt, Artificial Sequence
  Description of Artificial Sequence: Synthetic oligonucleotide
  Antisense strand to SEQ ID NO: 2464542
ucagggauaauacuaggac

SEQ ID NO: 2464544 - RNA, 19 nt, Artificial Sequence
  Description of Artificial Sequence: Synthetic oligonucleotide
  Sense strand starting at position 2039 of SEQ ID NO: 1887336
cuaguauuaucccugaguu

SEQ ID NO: 2464545 - RNA, 19 nt, Artificial Sequence
  Description of Artificial Sequence: Synthetic oligonucleotide
  Antisense strand to SEQ ID NO: 2464544
aacucagggauaauacuag

SEQ ID NO: 2464546 - RNA, 19 nt, Artificial Sequence
  Description of Artificial Sequence: Synthetic oligonucleotide
  Sense strand starting at position 2041 of SEQ ID NO: 1887336
aguauuaucccugaguuau

SEQ ID NO: 2464547 - RNA, 19 nt, Artificial Sequence
  Description of Artificial Sequence: Synthetic oligonucleotide
  Antisense strand to SEQ ID NO: 2464546
auaacucagggauaauacu

SEQ ID NO: 2464548 - RNA, 19 nt, Artificial Sequence
  Description of Artificial Sequence: Synthetic oligonucleotide
  Sense strand starting at position 2094 of SEQ ID NO: 1887336
gucuucucagcuuauguaa

SEQ ID NO: 2464549 - RNA, 19 nt, Artificial Sequence
  Description of Artificial Sequence: Synthetic oligonucleotide
  Antisense strand to SEQ ID NO: 2464548
uuacauaagcugagaagac

SEQ ID NO: 2464550 - RNA, 19 nt, Artificial Sequence
  Description of Artificial Sequence: Synthetic oligonucleotide
  Sense strand starting at position 2376 of SEQ ID NO: 1887336
gugacucugccugagggau

SEQ ID NO: 2464551 - RNA, 19 nt, Artificial Sequence
  Description of Artificial Sequence: Synthetic oligonucleotide
  Antisense strand to SEQ ID NO: 2464550
aucccucaggcagagucac

SEQ ID NO: 2464552 - RNA, 19 nt, Artificial Sequence
  Description of Artificial Sequence: Synthetic oligonucleotide
  Sense strand starting at position 2380 of SEQ ID NO: 1887336
cucugccugagggauuauu

SEQ ID NO: 2464553 - RNA, 19 nt, Artificial Sequence
  Description of Artificial Sequence: Synthetic oligonucleotide
  Antisense strand to SEQ ID NO: 2464552
aauaaucccucaggcagag

SEQ ID NO: 2464554 - RNA, 19 nt, Artificial Sequence
  Description of Artificial Sequence: Synthetic oligonucleotide
  Sense strand starting at position 2415 of SEQ ID NO: 1887336
ggaauacacuuagcucuua

SEQ ID NO: 2464555 - RNA, 19 nt, Artificial Sequence
  Description of Artificial Sequence: Synthetic oligonucleotide
  Antisense strand to SEQ ID NO: 2464554
uaagagcuaaguguauucc

SEQ ID NO: 2464556 - RNA, 19 nt, Artificial Sequence
  Description of Artificial Sequence: Synthetic oligonucleotide
  Sense strand starting at position 2549 of SEQ ID NO: 1887336
augggauaacucugaggug

SEQ ID NO: 2464557 - RNA, 19 nt, Artificial Sequence
  Description of Artificial Sequence: Synthetic oligonucleotide
  Antisense strand to SEQ ID NO: 2464556
caccucagaguuaucccau

SEQ ID NO: 2464558 - RNA, 19 nt, Artificial Sequence
  Description of Artificial Sequence: Synthetic oligonucleotide
  Sense strand starting at position 2834 of SEQ ID NO: 1887336
auguguauaggccauagaa

SEQ ID NO: 2464559 - RNA, 19 nt, Artificial Sequence
  Description of Artificial Sequence: Synthetic oligonucleotide
  Antisense strand to SEQ ID NO: 2464558
uucuauggccuauacacau

SEQ ID NO: 2464560 - RNA, 19 nt, Artificial Sequence
  Description of Artificial Sequence: Synthetic oligonucleotide
  Sense strand starting at position 3046 of SEQ ID NO: 1887336
cuaggauuguaggaaauuu

SEQ ID NO: 2464561 - RNA, 19 nt, Artificial Sequence
  Description of Artificial Sequence: Synthetic oligonucleotide
  Antisense strand to SEQ ID NO: 2464560
aaauuuccuacaauccuag

SEQ ID NO: 2464562 - RNA, 19 nt, Artificial Sequence
  Description of Artificial Sequence: Synthetic oligonucleotide
  Sense strand starting at position 3206 of SEQ ID NO: 1887336
guuacagagucuccuugaa

SEQ ID NO: 2464563 - RNA, 19 nt, Artificial Sequence
  Description of Artificial Sequence: Synthetic oligonucleotide
  Antisense strand to SEQ ID NO: 2464562
uucaaggagacucuguaac

SEQ ID NO: 2464564 - RNA, 19 nt, Artificial Sequence
  Description of Artificial Sequence: Synthetic oligonucleotide
  Sense strand starting at position 3570 of SEQ ID NO: 1887336
ugccuuguccuauaagaau

SEQ ID NO: 2464565 - RNA, 19 nt, Artificial Sequence
  Description of Artificial Sequence: Synthetic oligonucleotide
  Antisense strand to SEQ ID NO: 2464564
auucuuauaggacaaggca

SEQ ID NO: 2464566 - RNA, 19 nt, Artificial Sequence
  Description of Artificial Sequence: Synthetic oligonucleotide
  Sense strand starting at position 3665 of SEQ ID NO: 1887336
uucucugaggcauauauca

SEQ ID NO: 2464567 - RNA, 19 nt, Artificial Sequence
  Description of Artificial Sequence: Synthetic oligonucleotide
  Antisense strand to SEQ ID NO: 2464566
ugauauaugccucagagaa

SEQ ID NO: 2464568 - RNA, 19 nt, Artificial Sequence
  Description of Artificial Sequence: Synthetic oligonucleotide
  Sense strand starting at position 3688 of SEQ ID NO: 1887336
gcaggacauugccuacuua

SEQ ID NO: 2464569 - RNA, 19 nt, Artificial Sequence
  Description of Artificial Sequence: Synthetic oligonucleotide
  Antisense strand to SEQ ID NO: 2464568
uaaguaggcaauguccugc

SEQ ID NO: 2464570 - RNA, 19 nt, Artificial Sequence
  Description of Artificial Sequence: Synthetic oligonucleotide
  Sense strand starting at position 135 of SEQ ID NO: 1887337
ugcuaagagcuagaaauau

SEQ ID NO: 2464571 - RNA, 19 nt, Artificial Sequence
  Description of Artificial Sequence: Synthetic oligonucleotide
  Antisense strand to SEQ ID NO: 2464570
auauuucuagcucuuagca

SEQ ID NO: 2464572 - RNA, 19 nt, Artificial Sequence
  Description of Artificial Sequence: Synthetic oligonucleotide
  Sense strand starting at position 350 of SEQ ID NO: 1887337
auuagucacuuucugauga

SEQ ID NO: 2464573 - RNA, 19 nt, Artificial Sequence
  Description of Artificial Sequence: Synthetic oligonucleotide
  Antisense strand to SEQ ID NO: 2464572
ucaucagaaagugacuaau

SEQ ID NO: 2464574 - RNA, 19 nt, Artificial Sequence
  Description of Artificial Sequence: Synthetic oligonucleotide
  Sense strand starting at position 366 of SEQ ID NO: 1887337
ugaagaagauuccacaaag

SEQ ID NO: 2464575 - RNA, 19 nt, Artificial Sequence
  Description of Artificial Sequence: Synthetic oligonucleotide
  Antisense strand to SEQ ID NO: 2464574
cuuuguggaaucuucuuca

SEQ ID NO: 2464576 - RNA, 19 nt, Artificial Sequence
  Description of Artificial Sequence: Synthetic oligonucleotide
  Sense strand starting at position 385 of SEQ ID NO: 1887337
ggcccaucuccagaaauug

SEQ ID NO: 2464577 - RNA, 19 nt, Artificial Sequence
  Description of Artificial Sequence: Synthetic oligonucleotide
  Antisense strand to SEQ ID NO: 2464576
caauuucuggagaugggcc

SEQ ID NO: 2464578 - RNA, 19 nt, Artificial Sequence
  Description of Artificial Sequence: Synthetic oligonucleotide
  Sense strand starting at position 393 of SEQ ID NO: 1887337
uccagaaauugauugagcu

SEQ ID NO: 2464579 - RNA, 19 nt, Artificial Sequence
  Description of Artificial Sequence: Synthetic oligonucleotide
  Antisense strand to SEQ ID NO: 2464578
agcucaaucaauuucugga

SEQ ID NO: 2464580 - RNA, 19 nt, Artificial Sequence
  Description of Artificial Sequence: Synthetic oligonucleotide
  Sense strand starting at position 394 of SEQ ID NO: 1887337
ccagaaauugauugagcug

SEQ ID NO: 2464581 - RNA, 19 nt, Artificial Sequence
  Description of Artificial Sequence: Synthetic oligonucleotide
  Antisense strand to SEQ ID NO: 2464580
cagcucaaucaauuucugg

SEQ ID NO: 2464582 - RNA, 19 nt, Artificial Sequence
  Description of Artificial Sequence: Synthetic oligonucleotide
  Sense strand starting at position 519 of SEQ ID NO: 1887337
ugugaaugucuccacuggu

SEQ ID NO: 2464583 - RNA, 19 nt, Artificial Sequence
  Description of Artificial Sequence: Synthetic oligonucleotide
  Antisense strand to SEQ ID NO: 2464582
accaguggagacauucaca

SEQ ID NO: 2464584 - RNA, 19 nt, Artificial Sequence
  Description of Artificial Sequence: Synthetic oligonucleotide
  Sense strand starting at position 522 of SEQ ID NO: 1887337
gaaugucuccacuggucca

SEQ ID NO: 2464585 - RNA, 19 nt, Artificial Sequence
  Description of Artificial Sequence: Synthetic oligonucleotide
  Antisense strand to SEQ ID NO: 2464584
uggaccaguggagacauuc

SEQ ID NO: 2464586 - RNA, 19 nt, Artificial Sequence
  Description of Artificial Sequence: Synthetic oligonucleotide
  Sense strand starting at position 541 of SEQ ID NO: 1887337
gccugaacacucugacauc

SEQ ID NO: 2464587 - RNA, 19 nt, Artificial Sequence
  Description of Artificial Sequence: Synthetic oligonucleotide
  Antisense strand to SEQ ID NO: 2464586
gaugucagaguguucaggc

SEQ ID NO: 2464588 - RNA, 19 nt, Artificial Sequence
  Description of Artificial Sequence: Synthetic oligonucleotide
  Sense strand starting at position 854 of SEQ ID NO: 1887337
aaaugaugucagugaaagc

SEQ ID NO: 2464589 - RNA, 19 nt, Artificial Sequence
  Description of Artificial Sequence: Synthetic oligonucleotide
  Antisense strand to SEQ ID NO: 2464588
gcuuucacugacaucauuu

SEQ ID NO: 2464590 - RNA, 19 nt, Artificial Sequence
  Description of Artificial Sequence: Synthetic oligonucleotide
  Sense strand starting at position 1017 of SEQ ID NO: 1887337
ggcugaaguaggugaaauc

SEQ ID NO: 2464591 - RNA, 19 nt, Artificial Sequence
  Description of Artificial Sequence: Synthetic oligonucleotide
  Antisense strand to SEQ ID NO: 2464590
gauuucaccuacuucagcc

SEQ ID NO: 2464592 - RNA, 19 nt, Artificial Sequence
  Description of Artificial Sequence: Synthetic oligonucleotide
  Sense strand starting at position 1307 of SEQ ID NO: 1887337
gggauuagcacugaugugu

SEQ ID NO: 2464593 - RNA, 19 nt, Artificial Sequence
  Description of Artificial Sequence: Synthetic oligonucleotide
  Antisense strand to SEQ ID NO: 2464592
acacaucagugcuaauccc

SEQ ID NO: 2464594 - RNA, 19 nt, Artificial Sequence
  Description of Artificial Sequence: Synthetic oligonucleotide
  Sense strand starting at position 1320 of SEQ ID NO: 1887337
auguguugacaaggaaaua

SEQ ID NO: 2464595 - RNA, 19 nt, Artificial Sequence
  Description of Artificial Sequence: Synthetic oligonucleotide
  Antisense strand to SEQ ID NO: 2464594
uauuuccuugucaacacau

SEQ ID NO: 2464596 - RNA, 19 nt, Artificial Sequence
  Description of Artificial Sequence: Synthetic oligonucleotide
  Sense strand starting at position 1379 of SEQ ID NO: 1887337
cuguuugguguagagcaaa

SEQ ID NO: 2464597 - RNA, 19 nt, Artificial Sequence
  Description of Artificial Sequence: Synthetic oligonucleotide
  Antisense strand to SEQ ID NO: 2464596
uuugcucuacaccaaacag

SEQ ID NO: 2464598 - RNA, 19 nt, Artificial Sequence
  Description of Artificial Sequence: Synthetic oligonucleotide
  Sense strand starting at position 1607 of SEQ ID NO: 1887337
gaugguaucaggugaaauc

SEQ ID NO: 2464599 - RNA, 19 nt, Artificial Sequence
  Description of Artificial Sequence: Synthetic oligonucleotide
  Antisense strand to SEQ ID NO: 2464598
gauuucaccugauaccauc

SEQ ID NO: 2464600 - RNA, 19 nt, Artificial Sequence
  Description of Artificial Sequence: Synthetic oligonucleotide
  Sense strand starting at position 1617 of SEQ ID NO: 1887337
ggugaaauccgaggcucau

SEQ ID NO: 2464601 - RNA, 19 nt, Artificial Sequence
  Description of Artificial Sequence: Synthetic oligonucleotide
  Antisense strand to SEQ ID NO: 2464600
augagccucggauuucacc

SEQ ID NO: 2464602 - RNA, 19 nt, Artificial Sequence
  Description of Artificial Sequence: Synthetic oligonucleotide
  Sense strand starting at position 1675 of SEQ ID NO: 1887337
gauaaauacugagugggua

SEQ ID NO: 2464603 - RNA, 19 nt, Artificial Sequence
  Description of Artificial Sequence: Synthetic oligonucleotide
  Antisense strand to SEQ ID NO: 2464602
uacccacucaguauuuauc

SEQ ID NO: 2464604 - RNA, 19 nt, Artificial Sequence
  Description of Artificial Sequence: Synthetic oligonucleotide
  Sense strand starting at position 1676 of SEQ ID NO: 1887337
auaaauacugaguggguau

SEQ ID NO: 2464605 - RNA, 19 nt, Artificial Sequence
  Description of Artificial Sequence: Synthetic oligonucleotide
  Antisense strand to SEQ ID NO: 2464604
auacccacucaguauuuau

SEQ ID NO: 2464606 - RNA, 19 nt, Artificial Sequence
  Description of Artificial Sequence: Synthetic oligonucleotide
  Sense strand starting at position 1736 of SEQ ID NO: 1887337
guuaaauccaguuggaagg

SEQ ID NO: 2464607 - RNA, 19 nt, Artificial Sequence
  Description of Artificial Sequence: Synthetic oligonucleotide
  Antisense strand to SEQ ID NO: 2464606
ccuuccaacuggauuuaac

SEQ ID NO: 2464608 - RNA, 19 nt, Artificial Sequence
  Description of Artificial Sequence: Synthetic oligonucleotide
  Sense strand starting at position 1752 of SEQ ID NO: 1887337
aggucagucucagcaaaga

SEQ ID NO: 2464609 - RNA, 19 nt, Artificial Sequence
  Description of Artificial Sequence: Synthetic oligonucleotide
  Antisense strand to SEQ ID NO: 2464608
ucuuugcugagacugaccu

SEQ ID NO: 2464610 - RNA, 19 nt, Artificial Sequence
  Description of Artificial Sequence: Synthetic oligonucleotide
  Sense strand starting at position 1785 of SEQ ID NO: 1887337
aaaguuucugaugaagucu

SEQ ID NO: 2464611 - RNA, 19 nt, Artificial Sequence
  Description of Artificial Sequence: Synthetic oligonucleotide
  Antisense strand to SEQ ID NO: 2464610
agacuucaucagaaacuuu

SEQ ID NO: 2464612 - RNA, 19 nt, Artificial Sequence
  Description of Artificial Sequence: Synthetic oligonucleotide
  Sense strand starting at position 2188 of SEQ ID NO: 1887337
ugugauccuggacagucau

SEQ ID NO: 2464613 - RNA, 19 nt, Artificial Sequence
  Description of Artificial Sequence: Synthetic oligonucleotide
  Antisense strand to SEQ ID NO: 2464612
augacuguccaggaucaca

SEQ ID NO: 2464614 - RNA, 19 nt, Artificial Sequence
  Description of Artificial Sequence: Synthetic oligonucleotide
  Sense strand starting at position 2408 of SEQ ID NO: 1887337
gucuaaaucuuaguuucca

SEQ ID NO: 2464615 - RNA, 19 nt, Artificial Sequence
  Description of Artificial Sequence: Synthetic oligonucleotide
  Antisense strand to SEQ ID NO: 2464614
uggaaacuaagauuuagac

SEQ ID NO: 2464616 - RNA, 19 nt, Artificial Sequence
  Description of Artificial Sequence: Synthetic oligonucleotide
  Sense strand starting at position 2446 of SEQ ID NO: 1887337
gccauugguagaggguuaa

SEQ ID NO: 2464617 - RNA, 19 nt, Artificial Sequence
  Description of Artificial Sequence: Synthetic oligonucleotide
  Antisense strand to SEQ ID NO: 2464616
uuaacccucuaccaauggc

SEQ ID NO: 2464618 - RNA, 19 nt, Artificial Sequence
  Description of Artificial Sequence: Synthetic oligonucleotide
  Sense strand starting at position 2452 of SEQ ID NO: 1887337
gguagaggguuaaagaagu

SEQ ID NO: 2464619 - RNA, 19 nt, Artificial Sequence
  Description of Artificial Sequence: Synthetic oligonucleotide
  Antisense strand to SEQ ID NO: 2464618
acuucuuuaacccucuacc

SEQ ID NO: 2464620 - RNA, 19 nt, Artificial Sequence
  Description of Artificial Sequence: Synthetic oligonucleotide
  Sense strand starting at position 2487 of SEQ ID NO: 1887337
ggaguagguagccaaggau

SEQ ID NO: 2464621 - RNA, 19 nt, Artificial Sequence
  Description of Artificial Sequence: Synthetic oligonucleotide
  Antisense strand to SEQ ID NO: 2464620
auccuuggcuaccuacucc

SEQ ID NO: 2464622 - RNA, 19 nt, Artificial Sequence
  Description of Artificial Sequence: Synthetic oligonucleotide
  Sense strand starting at position 2490 of SEQ ID NO: 1887337
guagguagccaaggauauu

SEQ ID NO: 2464623 - RNA, 19 nt, Artificial Sequence
  Description of Artificial Sequence: Synthetic oligonucleotide
  Antisense strand to SEQ ID NO: 2464622
aauauccuuggcuaccuac

SEQ ID NO: 2464624 - RNA, 19 nt, Artificial Sequence
  Description of Artificial Sequence: Synthetic oligonucleotide
  Sense strand starting at position 2862 of SEQ ID NO: 1887337
gagggauuuccgugcugug

SEQ ID NO: 2464625 - RNA, 19 nt, Artificial Sequence
  Description of Artificial Sequence: Synthetic oligonucleotide
  Antisense strand to SEQ ID NO: 2464624
cacagcacggaaaucccuc

SEQ ID NO: 2464626 - RNA, 19 nt, Artificial Sequence
  Description of Artificial Sequence: Synthetic oligonucleotide
  Sense strand starting at position 2908 of SEQ ID NO: 1887337
aucuauuccucuguacaug

SEQ ID NO: 2464627 - RNA, 19 nt, Artificial Sequence
  Description of Artificial Sequence: Synthetic oligonucleotide
  Antisense strand to SEQ ID NO: 2464626
cauguacagaggaauagau

SEQ ID NO: 2464628 - RNA, 19 nt, Artificial Sequence
  Description of Artificial Sequence: Synthetic oligonucleotide
  Sense strand starting at position 2909 of SEQ ID NO: 1887337
ucuauuccucuguacauga

SEQ ID NO: 2464629 - RNA, 19 nt, Artificial Sequence
  Description of Artificial Sequence: Synthetic oligonucleotide
  Antisense strand to SEQ ID NO: 2464628
ucauguacagaggaauaga

SEQ ID NO: 2464630 - RNA, 19 nt, Artificial Sequence
  Description of Artificial Sequence: Synthetic oligonucleotide
  Sense strand starting at position 2980 of SEQ ID NO: 1887337
gggagaugguuucuccuga

SEQ ID NO: 2464631 - RNA, 19 nt, Artificial Sequence
  Description of Artificial Sequence: Synthetic oligonucleotide
  Antisense strand to SEQ ID NO: 2464630
ucaggagaaaccaucuccc

SEQ ID NO: 2464632 - RNA, 19 nt, Artificial Sequence
  Description of Artificial Sequence: Synthetic oligonucleotide
  Sense strand starting at position 3015 of SEQ ID NO: 1887337
cuaagaagucagugccaug

SEQ ID NO: 2464633 - RNA, 19 nt, Artificial Sequence
  Description of Artificial Sequence: Synthetic oligonucleotide
  Antisense strand to SEQ ID NO: 2464632
cauggcacugacuucuuag

SEQ ID NO: 2464634 - RNA, 19 nt, Artificial Sequence
  Description of Artificial Sequence: Synthetic oligonucleotide
  Sense strand starting at position 3020 of SEQ ID NO: 1887337
aagucagugccauggaaga

SEQ ID NO: 2464635 - RNA, 19 nt, Artificial Sequence
  Description of Artificial Sequence: Synthetic oligonucleotide
  Antisense strand to SEQ ID NO: 2464634
ucuuccauggcacugacuu

SEQ ID NO: 2464636 - RNA, 19 nt, Artificial Sequence
  Description of Artificial Sequence: Synthetic oligonucleotide
  Sense strand starting at position 3104 of SEQ ID NO: 1887337
guuccuggccucuagaaag

SEQ ID NO: 2464637 - RNA, 19 nt, Artificial Sequence
  Description of Artificial Sequence: Synthetic oligonucleotide
  Antisense strand to SEQ ID NO: 2464636
cuuucuagaggccaggaac

SEQ ID NO: 2464638 - RNA, 19 nt, Artificial Sequence
  Description of Artificial Sequence: Synthetic oligonucleotide
  Sense strand starting at position 3411 of SEQ ID NO: 1887337
ggccuaagggauugaauca

SEQ ID NO: 2464639 - RNA, 19 nt, Artificial Sequence
  Description of Artificial Sequence: Synthetic oligonucleotide
  Antisense strand to SEQ ID NO: 2464638
ugauucaaucccuuaggcc

SEQ ID NO: 2464640 - RNA, 19 nt, Artificial Sequence
  Description of Artificial Sequence: Synthetic oligonucleotide
  Sense strand starting at position 3450 of SEQ ID NO: 1887337
aggucuuacuucuugucaa

SEQ ID NO: 2464641 - RNA, 19 nt, Artificial Sequence
  Description of Artificial Sequence: Synthetic oligonucleotide
  Antisense strand to SEQ ID NO: 2464640
uugacaagaaguaagaccu

SEQ ID NO: 2464642 - RNA, 19 nt, Artificial Sequence
  Description of Artificial Sequence: Synthetic oligonucleotide
  Sense strand starting at position 3593 of SEQ ID NO: 1887337
gcacgaaauccuggacgaa

SEQ ID NO: 2464643 - RNA, 19 nt, Artificial Sequence
  Description of Artificial Sequence: Synthetic oligonucleotide
  Antisense strand to SEQ ID NO: 2464642
uucguccaggauuucgugc

SEQ ID NO: 2464644 - RNA, 19 nt, Artificial Sequence
  Description of Artificial Sequence: Synthetic oligonucleotide
  Sense strand starting at position 3797 of SEQ ID NO: 1887337
ugauccuguccugaguaua

SEQ ID NO: 2464645 - RNA, 19 nt, Artificial Sequence
  Description of Artificial Sequence: Synthetic oligonucleotide
  Antisense strand to SEQ ID NO: 2464644
uauacucaggacaggauca

SEQ ID NO: 2464646 - RNA, 19 nt, Artificial Sequence
  Description of Artificial Sequence: Synthetic oligonucleotide
  Sense strand starting at position 3837 of SEQ ID NO: 1887337
gcucguggacauugaagaa

SEQ ID NO: 2464647 - RNA, 19 nt, Artificial Sequence
  Description of Artificial Sequence: Synthetic oligonucleotide
  Antisense strand to SEQ ID NO: 2464646
uucuucaauguccacgagc

SEQ ID NO: 2464648 - RNA, 19 nt, Artificial Sequence
  Description of Artificial Sequence: Synthetic oligonucleotide
  Sense strand starting at position 3863 of SEQ ID NO: 1887337
ggaaguaagugacccagua

SEQ ID NO: 2464649 - RNA, 19 nt, Artificial Sequence
  Description of Artificial Sequence: Synthetic oligonucleotide
  Antisense strand to SEQ ID NO: 2464648
uacugggucacuuacuucc

SEQ ID NO: 2464650 - RNA, 19 nt, Artificial Sequence
  Description of Artificial Sequence: Synthetic oligonucleotide
  Sense strand starting at position 190 of SEQ ID NO: 1887338
accuguguuggugaggaua

SEQ ID NO: 2464651 - RNA, 19 nt, Artificial Sequence
  Description of Artificial Sequence: Synthetic oligonucleotide
  Antisense strand to SEQ ID NO: 2464650
uauccucaccaacacaggu

SEQ ID NO: 2464652 - RNA, 19 nt, Artificial Sequence
  Description of Artificial Sequence: Synthetic oligonucleotide
  Sense strand starting at position 252 of SEQ ID NO: 1887338
uuaguagagcccggaugaa

SEQ ID NO: 2464653 - RNA, 19 nt, Artificial Sequence
  Description of Artificial Sequence: Synthetic oligonucleotide
  Antisense strand to SEQ ID NO: 2464652
uucauccgggcucuacuaa

SEQ ID NO: 2464654 - RNA, 19 nt, Artificial Sequence
  Description of Artificial Sequence: Synthetic oligonucleotide
  Sense strand starting at position 276 of SEQ ID NO: 1887338
ccugaagcuuccucaggaa

SEQ ID NO: 2464655 - RNA, 19 nt, Artificial Sequence
  Description of Artificial Sequence: Synthetic oligonucleotide
  Antisense strand to SEQ ID NO: 2464654
uuccugaggaagcuucagg

SEQ ID NO: 2464656 - RNA, 19 nt, Artificial Sequence
  Description of Artificial Sequence: Synthetic oligonucleotide
  Sense strand starting at position 542 of SEQ ID NO: 1887338
aggugaaaucuggguguac

SEQ ID NO: 2464657 - RNA, 19 nt, Artificial Sequence
  Description of Artificial Sequence: Synthetic oligonucleotide
  Antisense strand to SEQ ID NO: 2464656
guacacccagauuucaccu

SEQ ID NO: 2464658 - RNA, 19 nt, Artificial Sequence
  Description of Artificial Sequence: Synthetic oligonucleotide
  Sense strand starting at position 543 of SEQ ID NO: 1887338
ggugaaaucuggguguacu

SEQ ID NO: 2464659 - RNA, 19 nt, Artificial Sequence
  Description of Artificial Sequence: Synthetic oligonucleotide
  Antisense strand to SEQ ID NO: 2464658
aguacacccagauuucacc

SEQ ID NO: 2464660 - RNA, 19 nt, Artificial Sequence
  Description of Artificial Sequence: Synthetic oligonucleotide
  Sense strand starting at position 715 of SEQ ID NO: 1887338
cugccugugcuaucguuaa

SEQ ID NO: 2464661 - RNA, 19 nt, Artificial Sequence
  Description of Artificial Sequence: Synthetic oligonucleotide
  Antisense strand to SEQ ID NO: 2464660
uuaacgauagcacaggcag

SEQ ID NO: 2464662 - RNA, 19 nt, Artificial Sequence
  Description of Artificial Sequence: Synthetic oligonucleotide
  Sense strand starting at position 717 of SEQ ID NO: 1887338
gccugugcuaucguuaaga

SEQ ID NO: 2464663 - RNA, 19 nt, Artificial Sequence
  Description of Artificial Sequence: Synthetic oligonucleotide
  Antisense strand to SEQ ID NO: 2464662
ucuuaacgauagcacaggc

SEQ ID NO: 2464664 - RNA, 19 nt, Artificial Sequence
  Description of Artificial Sequence: Synthetic oligonucleotide
  Sense strand starting at position 840 of SEQ ID NO: 1887338
aucucacaucuuuagguuu

SEQ ID NO: 2464665 - RNA, 19 nt, Artificial Sequence
  Description of Artificial Sequence: Synthetic oligonucleotide
  Antisense strand to SEQ ID NO: 2464664
aaaccuaaagaugugagau

SEQ ID NO: 2464666 - RNA, 19 nt, Artificial Sequence
  Description of Artificial Sequence: Synthetic oligonucleotide
  Sense strand starting at position 938 of SEQ ID NO: 1887338
gagauuccugaauguacaa

SEQ ID NO: 2464667 - RNA, 19 nt, Artificial Sequence
  Description of Artificial Sequence: Synthetic oligonucleotide
  Antisense strand to SEQ ID NO: 2464666
uuguacauucaggaaucuc

SEQ ID NO: 2464668 - RNA, 19 nt, Artificial Sequence
  Description of Artificial Sequence: Synthetic oligonucleotide
  Sense strand starting at position 1126 of SEQ ID NO: 1887338
gcgagucaaacaugaaauc

SEQ ID NO: 2464669 - RNA, 19 nt, Artificial Sequence
  Description of Artificial Sequence: Synthetic oligonucleotide
  Antisense strand to SEQ ID NO: 2464668
gauuucauguuugacucgc

SEQ ID NO: 2464670 - RNA, 19 nt, Artificial Sequence
  Description of Artificial Sequence: Synthetic oligonucleotide
  Sense strand starting at position 1209 of SEQ ID NO: 1887338
aggcaugacuaaucagauc

SEQ ID NO: 2464671 - RNA, 19 nt, Artificial Sequence
  Description of Artificial Sequence: Synthetic oligonucleotide
  Antisense strand to SEQ ID NO: 2464670
gaucugauuagucaugccu

SEQ ID NO: 2464672 - RNA, 19 nt, Artificial Sequence
  Description of Artificial Sequence: Synthetic oligonucleotide
  Sense strand starting at position 1569 of SEQ ID NO: 1887338
gcugaauggcaucagcuua

SEQ ID NO: 2464673 - RNA, 19 nt, Artificial Sequence
  Description of Artificial Sequence: Synthetic oligonucleotide
  Antisense strand to SEQ ID NO: 2464672
uaagcugaugccauucagc

SEQ ID NO: 2464674 - RNA, 19 nt, Artificial Sequence
  Description of Artificial Sequence: Synthetic oligonucleotide
  Sense strand starting at position 1698 of SEQ ID NO: 1887338
guggacaacucuuugagua

SEQ ID NO: 2464675 - RNA, 19 nt, Artificial Sequence
  Description of Artificial Sequence: Synthetic oligonucleotide
  Antisense strand to SEQ ID NO: 2464674
uacucaaagaguuguccac

SEQ ID NO: 2464676 - RNA, 19 nt, Artificial Sequence
  Description of Artificial Sequence: Synthetic oligonucleotide
  Sense strand starting at position 1699 of SEQ ID NO: 1887338
uggacaacucuuugaguac

SEQ ID NO: 2464677 - RNA, 19 nt, Artificial Sequence
  Description of Artificial Sequence: Synthetic oligonucleotide
  Antisense strand to SEQ ID NO: 2464676
guacucaaagaguugucca

SEQ ID NO: 2464678 - RNA, 19 nt, Artificial Sequence
  Description of Artificial Sequence: Synthetic oligonucleotide
  Sense strand starting at position 1770 of SEQ ID NO: 1887338
guaccuccugacuggauaa

SEQ ID NO: 2464679 - RNA, 19 nt, Artificial Sequence
  Description of Artificial Sequence: Synthetic oligonucleotide
  Antisense strand to SEQ ID NO: 2464678
uuauccagucaggagguac

SEQ ID NO: 2464680 - RNA, 19 nt, Artificial Sequence
  Description of Artificial Sequence: Synthetic oligonucleotide
  Sense strand starting at position 1796 of SEQ ID NO: 1887338
ugggacuguuggucaggaa

SEQ ID NO: 2464681 - RNA, 19 nt, Artificial Sequence
  Description of Artificial Sequence: Synthetic oligonucleotide
  Antisense strand to SEQ ID NO: 2464680
uuccugaccaacaguccca

SEQ ID NO: 2464682 - RNA, 19 nt, Artificial Sequence
  Description of Artificial Sequence: Synthetic oligonucleotide
  Sense strand starting at position 1844 of SEQ ID NO: 1887338
gacucaagcuggcugauua

SEQ ID NO: 2464683 - RNA, 19 nt, Artificial Sequence
  Description of Artificial Sequence: Synthetic oligonucleotide
  Antisense strand to SEQ ID NO: 2464682
uaaucagccagcuugaguc

SEQ ID NO: 2464684 - RNA, 19 nt, Artificial Sequence
  Description of Artificial Sequence: Synthetic oligonucleotide
  Sense strand starting at position 1863 of SEQ ID NO: 1887338
ucuggauccucugugaaag

SEQ ID NO: 2464685 - RNA, 19 nt, Artificial Sequence
  Description of Artificial Sequence: Synthetic oligonucleotide
  Antisense strand to SEQ ID NO: 2464684
cuuucacagaggauccaga

SEQ ID NO: 2464686 - RNA, 19 nt, Artificial Sequence
  Description of Artificial Sequence: Synthetic oligonucleotide
  Sense strand starting at position 1864 of SEQ ID NO: 1887338
cuggauccucugugaaagu

SEQ ID NO: 2464687 - RNA, 19 nt, Artificial Sequence
  Description of Artificial Sequence: Synthetic oligonucleotide
  Antisense strand to SEQ ID NO: 2464686
acuuucacagaggauccag

SEQ ID NO: 2464688 - RNA, 19 nt, Artificial Sequence
  Description of Artificial Sequence: Synthetic oligonucleotide
  Sense strand starting at position 1939 of SEQ ID NO: 1887338
auuacaaugacaugcgaga

SEQ ID NO: 2464689 - RNA, 19 nt, Artificial Sequence
  Description of Artificial Sequence: Synthetic oligonucleotide
  Antisense strand to SEQ ID NO: 2464688
ucucgcaugucauuguaau

SEQ ID NO: 2464690 - RNA, 19 nt, Artificial Sequence
  Description of Artificial Sequence: Synthetic oligonucleotide
  Sense strand starting at position 1992 of SEQ ID NO: 1887338
uacuauggcuuauuaggua

SEQ ID NO: 2464691 - RNA, 19 nt, Artificial Sequence
  Description of Artificial Sequence: Synthetic oligonucleotide
  Antisense strand to SEQ ID NO: 2464690
uaccuaauaagccauagua

SEQ ID NO: 2464692 - RNA, 19 nt, Artificial Sequence
  Description of Artificial Sequence: Synthetic oligonucleotide
  Sense strand starting at position 2160 of SEQ ID NO: 1887338
uguaucaaccugcauguua

SEQ ID NO: 2464693 - RNA, 19 nt, Artificial Sequence
  Description of Artificial Sequence: Synthetic oligonucleotide
  Antisense strand to SEQ ID NO: 2464692
uaacaugcagguugauaca

SEQ ID NO: 2464694 - RNA, 19 nt, Artificial Sequence
  Description of Artificial Sequence: Synthetic oligonucleotide
  Sense strand starting at position 2301 of SEQ ID NO: 1887338
uuucucccuccguaaagaa

SEQ ID NO: 2464695 - RNA, 19 nt, Artificial Sequence
  Description of Artificial Sequence: Synthetic oligonucleotide
  Antisense strand to SEQ ID NO: 2464694
uucuuuacggagggagaaa

SEQ ID NO: 2464696 - RNA, 19 nt, Artificial Sequence
  Description of Artificial Sequence: Synthetic oligonucleotide
  Sense strand starting at position 2384 of SEQ ID NO: 1887338
cucucacuucugggaagga

SEQ ID NO: 2464697 - RNA, 19 nt, Artificial Sequence
  Description of Artificial Sequence: Synthetic oligonucleotide
  Antisense strand to SEQ ID NO: 2464696
uccuucccagaagugagag

SEQ ID NO: 2464698 - RNA, 19 nt, Artificial Sequence
  Description of Artificial Sequence: Synthetic oligonucleotide
  Sense strand starting at position 2399 of SEQ ID NO: 1887338
aggacugguccuggccaaa

SEQ ID NO: 2464699 - RNA, 19 nt, Artificial Sequence
  Description of Artificial Sequence: Synthetic oligonucleotide
  Antisense strand to SEQ ID NO: 2464698
uuuggccaggaccaguccu

SEQ ID NO: 2464700 - RNA, 19 nt, Artificial Sequence
  Description of Artificial Sequence: Synthetic oligonucleotide
  Sense strand starting at position 2612 of SEQ ID NO: 1887338
agacaauccaaguguguag

SEQ ID NO: 2464701 - RNA, 19 nt, Artificial Sequence
  Description of Artificial Sequence: Synthetic oligonucleotide
  Antisense strand to SEQ ID NO: 2464700
cuacacacuuggauugucu

SEQ ID NO: 2464702 - RNA, 19 nt, Artificial Sequence
  Description of Artificial Sequence: Synthetic oligonucleotide
  Sense strand starting at position 2630 of SEQ ID NO: 1887338
gucaguauuggcuauugac

SEQ ID NO: 2464703 - RNA, 19 nt, Artificial Sequence
  Description of Artificial Sequence: Synthetic oligonucleotide
  Antisense strand to SEQ ID NO: 2464702
gucaauagccaauacugac

SEQ ID NO: 2464704 - RNA, 19 nt, Artificial Sequence
  Description of Artificial Sequence: Synthetic oligonucleotide
  Sense strand starting at position 2750 of SEQ ID NO: 1887338
cagucaguaccugggagaa

SEQ ID NO: 2464705 - RNA, 19 nt, Artificial Sequence
  Description of Artificial Sequence: Synthetic oligonucleotide
  Antisense strand to SEQ ID NO: 2464704
uucucccagguacugacug

SEQ ID NO: 2464706 - RNA, 19 nt, Artificial Sequence
  Description of Artificial Sequence: Synthetic oligonucleotide
  Sense strand starting at position 2826 of SEQ ID NO: 1887338
uuacuaaucaagggugagu

SEQ ID NO: 2464707 - RNA, 19 nt, Artificial Sequence
  Description of Artificial Sequence: Synthetic oligonucleotide
  Antisense strand to SEQ ID NO: 2464706
acucacccuugauuaguaa

SEQ ID NO: 2464708 - RNA, 19 nt, Artificial Sequence
  Description of Artificial Sequence: Synthetic oligonucleotide
  Sense strand starting at position 2968 of SEQ ID NO: 1887338
cccugauuaacggaguaca

SEQ ID NO: 2464709 - RNA, 19 nt, Artificial Sequence
  Description of Artificial Sequence: Synthetic oligonucleotide
  Antisense strand to SEQ ID NO: 2464708
uguacuccguuaaucaggg

SEQ ID NO: 2464710 - RNA, 19 nt, Artificial Sequence
  Description of Artificial Sequence: Synthetic oligonucleotide
  Sense strand starting at position 3045 of SEQ ID NO: 1887338
ccugguucucuugggauga

SEQ ID NO: 2464711 - RNA, 19 nt, Artificial Sequence
  Description of Artificial Sequence: Synthetic oligonucleotide
  Antisense strand to SEQ ID NO: 2464710
ucaucccaagagaaccagg

SEQ ID NO: 2464712 - RNA, 19 nt, Artificial Sequence
  Description of Artificial Sequence: Synthetic oligonucleotide
  Sense strand starting at position 3166 of SEQ ID NO: 1887338
caucaacugccaugugaag

SEQ ID NO: 2464713 - RNA, 19 nt, Artificial Sequence
  Description of Artificial Sequence: Synthetic oligonucleotide
  Antisense strand to SEQ ID NO: 2464712
cuucacauggcaguugaug

SEQ ID NO: 2464714 - RNA, 19 nt, Artificial Sequence
  Description of Artificial Sequence: Synthetic oligonucleotide
  Sense strand starting at position 3262 of SEQ ID NO: 1887338
gacaguguggagcagagau

SEQ ID NO: 2464715 - RNA, 19 nt, Artificial Sequence
  Description of Artificial Sequence: Synthetic oligonucleotide
  Antisense strand to SEQ ID NO: 2464714
aucucugcuccacacuguc

SEQ ID NO: 2464716 - RNA, 19 nt, Artificial Sequence
  Description of Artificial Sequence: Synthetic oligonucleotide
  Sense strand starting at position 3264 of SEQ ID NO: 1887338
caguguggagcagagauaa

SEQ ID NO: 2464717 - RNA, 19 nt, Artificial Sequence
  Description of Artificial Sequence: Synthetic oligonucleotide
  Antisense strand to SEQ ID NO: 2464716
uuaucucugcuccacacug

SEQ ID NO: 2464718 - RNA, 19 nt, Artificial Sequence
  Description of Artificial Sequence: Synthetic oligonucleotide
  Sense strand starting at position 3646 of SEQ ID NO: 1887338
guaggaauucucuggucug

SEQ ID NO: 2464719 - RNA, 19 nt, Artificial Sequence
  Description of Artificial Sequence: Synthetic oligonucleotide
  Antisense strand to SEQ ID NO: 2464718
cagaccagagaauuccuac

SEQ ID NO: 2464720 - RNA, 19 nt, Artificial Sequence
  Description of Artificial Sequence: Synthetic oligonucleotide
  Sense strand starting at position 3664 of SEQ ID NO: 1887338
gguugauggaguuaagcuu

SEQ ID NO: 2464721 - RNA, 19 nt, Artificial Sequence
  Description of Artificial Sequence: Synthetic oligonucleotide
  Antisense strand to SEQ ID NO: 2464720
aagcuuaacuccaucaacc

SEQ ID NO: 2464722 - RNA, 19 nt, Artificial Sequence
  Description of Artificial Sequence: Synthetic oligonucleotide
  Sense strand starting at position 3776 of SEQ ID NO: 1887338
ugaagaauuucccauugag

SEQ ID NO: 2464723 - RNA, 19 nt, Artificial Sequence
  Description of Artificial Sequence: Synthetic oligonucleotide
  Antisense strand to SEQ ID NO: 2464722
cucaaugggaaauucuuca

SEQ ID NO: 2464724 - RNA, 19 nt, Artificial Sequence
  Description of Artificial Sequence: Synthetic oligonucleotide
  Sense strand starting at position 3793 of SEQ ID NO: 1887338
aguccaaccuaguuuaaug

SEQ ID NO: 2464725 - RNA, 19 nt, Artificial Sequence
  Description of Artificial Sequence: Synthetic oligonucleotide
  Antisense strand to SEQ ID NO: 2464724
cauuaaacuagguuggacu

SEQ ID NO: 2464726 - RNA, 19 nt, Artificial Sequence
  Description of Artificial Sequence: Synthetic oligonucleotide
  Sense strand starting at position 3809 of SEQ ID NO: 1887338
auggaauucuguuuggaga

SEQ ID NO: 2464727 - RNA, 19 nt, Artificial Sequence
  Description of Artificial Sequence: Synthetic oligonucleotide
  Antisense strand to SEQ ID NO: 2464726
ucuccaaacagaauuccau

SEQ ID NO: 2464728 - RNA, 19 nt, Artificial Sequence
  Description of Artificial Sequence: Synthetic oligonucleotide
  Sense strand starting at position 3810 of SEQ ID NO: 1887338
uggaauucuguuuggagac

SEQ ID NO: 2464729 - RNA, 19 nt, Artificial Sequence
  Description of Artificial Sequence: Synthetic oligonucleotide
  Antisense strand to SEQ ID NO: 2464728
gucuccaaacagaauucca

SEQ ID NO: 2464730 - RNA, 19 nt, Artificial Sequence
  Description of Artificial Sequence: Synthetic oligonucleotide
  Sense strand starting at position 230 of SEQ ID NO: 1887339
agagucuuugaguaggcca

SEQ ID NO: 2464731 - RNA, 19 nt, Artificial Sequence
  Description of Artificial Sequence: Synthetic oligonucleotide
  Antisense strand to SEQ ID NO: 2464730
uggccuacucaaagacucu

SEQ ID NO: 2464732 - RNA, 19 nt, Artificial Sequence
  Description of Artificial Sequence: Synthetic oligonucleotide
  Sense strand starting at position 279 of SEQ ID NO: 1887339
uauguuagugaugaguaua

SEQ ID NO: 2464733 - RNA, 19 nt, Artificial Sequence
  Description of Artificial Sequence: Synthetic oligonucleotide
  Antisense strand to SEQ ID NO: 2464732
uauacucaucacuaacaua

SEQ ID NO: 2464734 - RNA, 19 nt, Artificial Sequence
  Description of Artificial Sequence: Synthetic oligonucleotide
  Sense strand starting at position 282 of SEQ ID NO: 1887339
guuagugaugaguauacug

SEQ ID NO: 2464735 - RNA, 19 nt, Artificial Sequence
  Description of Artificial Sequence: Synthetic oligonucleotide
  Antisense strand to SEQ ID NO: 2464734
caguauacucaucacuaac

SEQ ID NO: 2464736 - RNA, 19 nt, Artificial Sequence
  Description of Artificial Sequence: Synthetic oligonucleotide
  Sense strand starting at position 510 of SEQ ID NO: 1887339
cgacucuuugaagagguca

SEQ ID NO: 2464737 - RNA, 19 nt, Artificial Sequence
  Description of Artificial Sequence: Synthetic oligonucleotide
  Antisense strand to SEQ ID NO: 2464736
ugaccucuucaaagagucg

SEQ ID NO: 2464738 - RNA, 19 nt, Artificial Sequence
  Description of Artificial Sequence: Synthetic oligonucleotide
  Sense strand starting at position 512 of SEQ ID NO: 1887339
acucuuugaagaggucaga

SEQ ID NO: 2464739 - RNA, 19 nt, Artificial Sequence
  Description of Artificial Sequence: Synthetic oligonucleotide
  Antisense strand to SEQ ID NO: 2464738
ucugaccucuucaaagagu

SEQ ID NO: 2464740 - RNA, 19 nt, Artificial Sequence
  Description of Artificial Sequence: Synthetic oligonucleotide
  Sense strand starting at position 658 of SEQ ID NO: 1887339
cuggucugucuauacuaaa

SEQ ID NO: 2464741 - RNA, 19 nt, Artificial Sequence
  Description of Artificial Sequence: Synthetic oligonucleotide
  Antisense strand to SEQ ID NO: 2464740
uuuaguauagacagaccag

SEQ ID NO: 2464742 - RNA, 19 nt, Artificial Sequence
  Description of Artificial Sequence: Synthetic oligonucleotide
  Sense strand starting at position 696 of SEQ ID NO: 1887339
auaaaugaguaucuugacu

SEQ ID NO: 2464743 - RNA, 19 nt, Artificial Sequence
  Description of Artificial Sequence: Synthetic oligonucleotide
  Antisense strand to SEQ ID NO: 2464742
agucaagauacucauuuau

SEQ ID NO: 2464744 - RNA, 19 nt, Artificial Sequence
  Description of Artificial Sequence: Synthetic oligonucleotide
  Sense strand starting at position 748 of SEQ ID NO: 1887339
uugaguaaaucuuccagac

SEQ ID NO: 2464745 - RNA, 19 nt, Artificial Sequence
  Description of Artificial Sequence: Synthetic oligonucleotide
  Antisense strand to SEQ ID NO: 2464744
gucuggaagauuuacucaa

SEQ ID NO: 2464746 - RNA, 19 nt, Artificial Sequence
  Description of Artificial Sequence: Synthetic oligonucleotide
  Sense strand starting at position 779 of SEQ ID NO: 1887339
ccagcuguuugggcauuua

SEQ ID NO: 2464747 - RNA, 19 nt, Artificial Sequence
  Description of Artificial Sequence: Synthetic oligonucleotide
  Antisense strand to SEQ ID NO: 2464746
uaaaugcccaaacagcugg

SEQ ID NO: 2464748 - RNA, 19 nt, Artificial Sequence
  Description of Artificial Sequence: Synthetic oligonucleotide
  Sense strand starting at position 944 of SEQ ID NO: 1887339
ucucacaauccaugggauu

SEQ ID NO: 2464749 - RNA, 19 nt, Artificial Sequence
  Description of Artificial Sequence: Synthetic oligonucleotide
  Antisense strand to SEQ ID NO: 2464748
aaucccauggauugugaga

SEQ ID NO: 2464750 - RNA, 19 nt, Artificial Sequence
  Description of Artificial Sequence: Synthetic oligonucleotide
  Sense strand starting at position 1018 of SEQ ID NO: 1887339
uagacaaguuauucuggua

SEQ ID NO: 2464751 - RNA, 19 nt, Artificial Sequence
  Description of Artificial Sequence: Synthetic oligonucleotide
  Antisense strand to SEQ ID NO: 2464750
uaccagaauaacuugucua

SEQ ID NO: 2464752 - RNA, 19 nt, Artificial Sequence
  Description of Artificial Sequence: Synthetic oligonucleotide
  Sense strand starting at position 1025 of SEQ ID NO: 1887339
guuauucugguacauaaua

SEQ ID NO: 2464753 - RNA, 19 nt, Artificial Sequence
  Description of Artificial Sequence: Synthetic oligonucleotide
  Antisense strand to SEQ ID NO: 2464752
uauuauguaccagaauaac

SEQ ID NO: 2464754 - RNA, 19 nt, Artificial Sequence
  Description of Artificial Sequence: Synthetic oligonucleotide
  Sense strand starting at position 2082 of SEQ ID NO: 1887339
caagguagaucaucugaau

SEQ ID NO: 2464755 - RNA, 19 nt, Artificial Sequence
  Description of Artificial Sequence: Synthetic oligonucleotide
  Antisense strand to SEQ ID NO: 2464754
auucagaugaucuaccuug

SEQ ID NO: 2464756 - RNA, 19 nt, Artificial Sequence
  Description of Artificial Sequence: Synthetic oligonucleotide
  Sense strand starting at position 2239 of SEQ ID NO: 1887339
acuugcagugauggaagau

SEQ ID NO: 2464757 - RNA, 19 nt, Artificial Sequence
  Description of Artificial Sequence: Synthetic oligonucleotide
  Antisense strand to SEQ ID NO: 2464756
aucuuccaucacugcaagu

SEQ ID NO: 2464758 - RNA, 19 nt, Artificial Sequence
  Description of Artificial Sequence: Synthetic oligonucleotide
  Sense strand starting at position 2248 of SEQ ID NO: 1887339
gauggaagauguuuggguu

SEQ ID NO: 2464759 - RNA, 19 nt, Artificial Sequence
  Description of Artificial Sequence: Synthetic oligonucleotide
  Antisense strand to SEQ ID NO: 2464758
aacccaaacaucuuccauc

SEQ ID NO: 2464760 - RNA, 19 nt, Artificial Sequence
  Description of Artificial Sequence: Synthetic oligonucleotide
  Sense strand starting at position 2249 of SEQ ID NO: 1887339
auggaagauguuuggguuu

SEQ ID NO: 2464761 - RNA, 19 nt, Artificial Sequence
  Description of Artificial Sequence: Synthetic oligonucleotide
  Antisense strand to SEQ ID NO: 2464760
aaacccaaacaucuuccau

SEQ ID NO: 2464762 - RNA, 19 nt, Artificial Sequence
  Description of Artificial Sequence: Synthetic oligonucleotide
  Sense strand starting at position 2263 of SEQ ID NO: 1887339
gguuuauucugaguggaaa

SEQ ID NO: 2464763 - RNA, 19 nt, Artificial Sequence
  Description of Artificial Sequence: Synthetic oligonucleotide
  Antisense strand to SEQ ID NO: 2464762
uuuccacucagaauaaacc

SEQ ID NO: 2464764 - RNA, 19 nt, Artificial Sequence
  Description of Artificial Sequence: Synthetic oligonucleotide
  Sense strand starting at position 2331 of SEQ ID NO: 1887339
gauugaggagccugaagau

SEQ ID NO: 2464765 - RNA, 19 nt, Artificial Sequence
  Description of Artificial Sequence: Synthetic oligonucleotide
  Antisense strand to SEQ ID NO: 2464764
aucuucaggcuccucaauc

SEQ ID NO: 2464766 - RNA, 19 nt, Artificial Sequence
  Description of Artificial Sequence: Synthetic oligonucleotide
  Sense strand starting at position 2340 of SEQ ID NO: 1887339
gccugaagauauccacacu

SEQ ID NO: 2464767 - RNA, 19 nt, Artificial Sequence
  Description of Artificial Sequence: Synthetic oligonucleotide
  Antisense strand to SEQ ID NO: 2464766
aguguggauaucuucaggc

SEQ ID NO: 2464768 - RNA, 19 nt, Artificial Sequence
  Description of Artificial Sequence: Synthetic oligonucleotide
  Sense strand starting at position 2346 of SEQ ID NO: 1887339
agauauccacacugagcau

SEQ ID NO: 2464769 - RNA, 19 nt, Artificial Sequence
  Description of Artificial Sequence: Synthetic oligonucleotide
  Antisense strand to SEQ ID NO: 2464768
augcucaguguggauaucu

SEQ ID NO: 2464770 - RNA, 19 nt, Artificial Sequence
  Description of Artificial Sequence: Synthetic oligonucleotide
  Sense strand starting at position 2376 of SEQ ID NO: 1887339
ucaguaagucuggaucuaa

SEQ ID NO: 2464771 - RNA, 19 nt, Artificial Sequence
  Description of Artificial Sequence: Synthetic oligonucleotide
  Antisense strand to SEQ ID NO: 2464770
uuagauccagacuuacuga

SEQ ID NO: 2464772 - RNA, 19 nt, Artificial Sequence
  Description of Artificial Sequence: Synthetic oligonucleotide
  Sense strand starting at position 2417 of SEQ ID NO: 1887339
acaggucuucuacaaugua

SEQ ID NO: 2464773 - RNA, 19 nt, Artificial Sequence
  Description of Artificial Sequence: Synthetic oligonucleotide
  Antisense strand to SEQ ID NO: 2464772
uacauuguagaagaccugu

SEQ ID NO: 2464774 - RNA, 19 nt, Artificial Sequence
  Description of Artificial Sequence: Synthetic oligonucleotide
  Sense strand starting at position 2680 of SEQ ID NO: 1887339
ucaacuguauucgcauuua

SEQ ID NO: 2464775 - RNA, 19 nt, Artificial Sequence
  Description of Artificial Sequence: Synthetic oligonucleotide
  Antisense strand to SEQ ID NO: 2464774
uaaaugcgaauacaguuga

SEQ ID NO: 2464776 - RNA, 19 nt, Artificial Sequence
  Description of Artificial Sequence: Synthetic oligonucleotide
  Sense strand starting at position 2689 of SEQ ID NO: 1887339
uucgcauuuauagaguguu

SEQ ID NO: 2464777 - RNA, 19 nt, Artificial Sequence
  Description of Artificial Sequence: Synthetic oligonucleotide
  Antisense strand to SEQ ID NO: 2464776
aacacucuauaaaugcgaa

SEQ ID NO: 2464778 - RNA, 19 nt, Artificial Sequence
  Description of Artificial Sequence: Synthetic oligonucleotide
  Sense strand starting at position 2821 of SEQ ID NO: 1887339
gauagcucuccaugagaca

SEQ ID NO: 2464779 - RNA, 19 nt, Artificial Sequence
  Description of Artificial Sequence: Synthetic oligonucleotide
  Antisense strand to SEQ ID NO: 2464778
ugucucauggagagcuauc

SEQ ID NO: 2464780 - RNA, 19 nt, Artificial Sequence
  Description of Artificial Sequence: Synthetic oligonucleotide
  Sense strand starting at position 2822 of SEQ ID NO: 1887339
auagcucuccaugagacau

SEQ ID NO: 2464781 - RNA, 19 nt, Artificial Sequence
  Description of Artificial Sequence: Synthetic oligonucleotide
  Antisense strand to SEQ ID NO: 2464780
augucucauggagagcuau

SEQ ID NO: 2464782 - RNA, 19 nt, Artificial Sequence
  Description of Artificial Sequence: Synthetic oligonucleotide
  Sense strand starting at position 2859 of SEQ ID NO: 1887339
gcuuauuguacagaugaug

SEQ ID NO: 2464783 - RNA, 19 nt, Artificial Sequence
  Description of Artificial Sequence: Synthetic oligonucleotide
  Antisense strand to SEQ ID NO: 2464782
caucaucuguacaauaagc

SEQ ID NO: 2464784 - RNA, 19 nt, Artificial Sequence
  Description of Artificial Sequence: Synthetic oligonucleotide
  Sense strand starting at position 3120 of SEQ ID NO: 1887339
gagagaauggugcagaugu

SEQ ID NO: 2464785 - RNA, 19 nt, Artificial Sequence
  Description of Artificial Sequence: Synthetic oligonucleotide
  Antisense strand to SEQ ID NO: 2464784
acaucugcaccauucucuc

SEQ ID NO: 2464786 - RNA, 19 nt, Artificial Sequence
  Description of Artificial Sequence: Synthetic oligonucleotide
  Sense strand starting at position 3285 of SEQ ID NO: 1887339
accuaagauucucugauug

SEQ ID NO: 2464787 - RNA, 19 nt, Artificial Sequence
  Description of Artificial Sequence: Synthetic oligonucleotide
  Antisense strand to SEQ ID NO: 2464786
caaucagagaaucuuaggu

SEQ ID NO: 2464788 - RNA, 19 nt, Artificial Sequence
  Description of Artificial Sequence: Synthetic oligonucleotide
  Sense strand starting at position 3289 of SEQ ID NO: 1887339
aagauucucugauuguaug

SEQ ID NO: 2464789 - RNA, 19 nt, Artificial Sequence
  Description of Artificial Sequence: Synthetic oligonucleotide
  Antisense strand to SEQ ID NO: 2464788
cauacaaucagagaaucuu

SEQ ID NO: 2464790 - RNA, 19 nt, Artificial Sequence
  Description of Artificial Sequence: Synthetic oligonucleotide
  Sense strand starting at position 3290 of SEQ ID NO: 1887339
agauucucugauuguauga

SEQ ID NO: 2464791 - RNA, 19 nt, Artificial Sequence
  Description of Artificial Sequence: Synthetic oligonucleotide
  Antisense strand to SEQ ID NO: 2464790
ucauacaaucagagaaucu

SEQ ID NO: 2464792 - RNA, 19 nt, Artificial Sequence
  Description of Artificial Sequence: Synthetic oligonucleotide
  Sense strand starting at position 3367 of SEQ ID NO: 1887339
gugugugcucucuuuccaa

SEQ ID NO: 2464793 - RNA, 19 nt, Artificial Sequence
  Description of Artificial Sequence: Synthetic oligonucleotide
  Antisense strand to SEQ ID NO: 2464792
uuggaaagagagcacacac

SEQ ID NO: 2464794 - RNA, 19 nt, Artificial Sequence
  Description of Artificial Sequence: Synthetic oligonucleotide
  Sense strand starting at position 3443 of SEQ ID NO: 1887339
ucugaaacuccuggaagca

SEQ ID NO: 2464795 - RNA, 19 nt, Artificial Sequence
  Description of Artificial Sequence: Synthetic oligonucleotide
  Antisense strand to SEQ ID NO: 2464794
ugcuuccaggaguuucaga

SEQ ID NO: 2464796 - RNA, 19 nt, Artificial Sequence
  Description of Artificial Sequence: Synthetic oligonucleotide
  Sense strand starting at position 3599 of SEQ ID NO: 1887339
guaucucauccuggauuga

SEQ ID NO: 2464797 - RNA, 19 nt, Artificial Sequence
  Description of Artificial Sequence: Synthetic oligonucleotide
  Antisense strand to SEQ ID NO: 2464796
ucaauccaggaugagauac

SEQ ID NO: 2464798 - RNA, 19 nt, Artificial Sequence
  Description of Artificial Sequence: Synthetic oligonucleotide
  Sense strand starting at position 3603 of SEQ ID NO: 1887339
cucauccuggauugaguua

SEQ ID NO: 2464799 - RNA, 19 nt, Artificial Sequence
  Description of Artificial Sequence: Synthetic oligonucleotide
  Antisense strand to SEQ ID NO: 2464798
uaacucaauccaggaugag

SEQ ID NO: 2464800 - RNA, 19 nt, Artificial Sequence
  Description of Artificial Sequence: Synthetic oligonucleotide
  Sense strand starting at position 3614 of SEQ ID NO: 1887339
uugaguuacuuaucccaag

SEQ ID NO: 2464801 - RNA, 19 nt, Artificial Sequence
  Description of Artificial Sequence: Synthetic oligonucleotide
  Antisense strand to SEQ ID NO: 2464800
cuugggauaaguaacucaa

SEQ ID NO: 2464802 - RNA, 19 nt, Artificial Sequence
  Description of Artificial Sequence: Synthetic oligonucleotide
  Sense strand starting at position 3639 of SEQ ID NO: 1887339
cuugcuaaacuguagaaua

SEQ ID NO: 2464803 - RNA, 19 nt, Artificial Sequence
  Description of Artificial Sequence: Synthetic oligonucleotide
  Antisense strand to SEQ ID NO: 2464802
uauucuacaguuuagcaag

SEQ ID NO: 2464804 - RNA, 19 nt, Artificial Sequence
  Description of Artificial Sequence: Synthetic oligonucleotide
  Sense strand starting at position 3779 of SEQ ID NO: 1887339
cugcauuucuuuguucuua

SEQ ID NO: 2464805 - RNA, 19 nt, Artificial Sequence
  Description of Artificial Sequence: Synthetic oligonucleotide
  Antisense strand to SEQ ID NO: 2464804
uaagaacaaagaaaugcag

SEQ ID NO: 2464806 - RNA, 19 nt, Artificial Sequence
  Description of Artificial Sequence: Synthetic oligonucleotide
  Sense strand starting at position 3780 of SEQ ID NO: 1887339
ugcauuucuuuguucuuau

SEQ ID NO: 2464807 - RNA, 19 nt, Artificial Sequence
  Description of Artificial Sequence: Synthetic oligonucleotide
  Antisense strand to SEQ ID NO: 2464806
auaagaacaaagaaaugca

SEQ ID NO: 2464808 - RNA, 19 nt, Artificial Sequence
  Description of Artificial Sequence: Synthetic oligonucleotide
  Sense strand starting at position 3781 of SEQ ID NO: 1887339
gcauuucuuuguucuuauu

SEQ ID NO: 2464809 - RNA, 19 nt, Artificial Sequence
  Description of Artificial Sequence: Synthetic oligonucleotide
  Antisense strand to SEQ ID NO: 2464808
aauaagaacaaagaaaugc

SEQ ID NO: 2464810 - RNA, 19 nt, Artificial Sequence
  Description of Artificial Sequence: Synthetic oligonucleotide
  Sense strand starting at position 93 of SEQ ID NO: 1887340
uccacccucugagagauuu

SEQ ID NO: 2464811 - RNA, 19 nt, Artificial Sequence
  Description of Artificial Sequence: Synthetic oligonucleotide
  Antisense strand to SEQ ID NO: 2464810
aaaucucucagagggugga

SEQ ID NO: 2464812 - RNA, 19 nt, Artificial Sequence
  Description of Artificial Sequence: Synthetic oligonucleotide
  Sense strand starting at position 139 of SEQ ID NO: 1887340
ggauccuuauggcuuaaau

SEQ ID NO: 2464813 - RNA, 19 nt, Artificial Sequence
  Description of Artificial Sequence: Synthetic oligonucleotide
  Antisense strand to SEQ ID NO: 2464812
auuuaagccauaaggaucc

SEQ ID NO: 2464814 - RNA, 19 nt, Artificial Sequence
  Description of Artificial Sequence: Synthetic oligonucleotide
  Sense strand starting at position 455 of SEQ ID NO: 1887340
agcccugaguaaccugaau

SEQ ID NO: 2464815 - RNA, 19 nt, Artificial Sequence
  Description of Artificial Sequence: Synthetic oligonucleotide
  Antisense strand to SEQ ID NO: 2464814
auucagguuacucagggcu

SEQ ID NO: 2464816 - RNA, 19 nt, Artificial Sequence
  Description of Artificial Sequence: Synthetic oligonucleotide
  Sense strand starting at position 546 of SEQ ID NO: 1887340
gaaagauuccuuggaaagc

SEQ ID NO: 2464817 - RNA, 19 nt, Artificial Sequence
  Description of Artificial Sequence: Synthetic oligonucleotide
  Antisense strand to SEQ ID NO: 2464816
gcuuuccaaggaaucuuuc

SEQ ID NO: 2464818 - RNA, 19 nt, Artificial Sequence
  Description of Artificial Sequence: Synthetic oligonucleotide
  Sense strand starting at position 691 of SEQ ID NO: 1887340
gggccagugccagcguaau

SEQ ID NO: 2464819 - RNA, 19 nt, Artificial Sequence
  Description of Artificial Sequence: Synthetic oligonucleotide
  Antisense strand to SEQ ID NO: 2464818
auuacgcuggcacuggccc

SEQ ID NO: 2464820 - RNA, 19 nt, Artificial Sequence
  Description of Artificial Sequence: Synthetic oligonucleotide
  Sense strand starting at position 837 of SEQ ID NO: 1887340
gugugagguacuggaaauu

SEQ ID NO: 2464821 - RNA, 19 nt, Artificial Sequence
  Description of Artificial Sequence: Synthetic oligonucleotide
  Antisense strand to SEQ ID NO: 2464820
aauuuccaguaccucacac

SEQ ID NO: 2464822 - RNA, 19 nt, Artificial Sequence
  Description of Artificial Sequence: Synthetic oligonucleotide
  Sense strand starting at position 874 of SEQ ID NO: 1887340
cagaacgauuuacauagua

SEQ ID NO: 2464823 - RNA, 19 nt, Artificial Sequence
  Description of Artificial Sequence: Synthetic oligonucleotide
  Antisense strand to SEQ ID NO: 2464822
uacuauguaaaucguucug

SEQ ID NO: 2464824 - RNA, 19 nt, Artificial Sequence
  Description of Artificial Sequence: Synthetic oligonucleotide
  Sense strand starting at position 899 of SEQ ID NO: 1887340
cugucuaaaguuuagcaau

SEQ ID NO: 2464825 - RNA, 19 nt, Artificial Sequence
  Description of Artificial Sequence: Synthetic oligonucleotide
  Antisense strand to SEQ ID NO: 2464824
auugcuaaacuuuagacag

SEQ ID NO: 2464826 - RNA, 19 nt, Artificial Sequence
  Description of Artificial Sequence: Synthetic oligonucleotide
  Sense strand starting at position 973 of SEQ ID NO: 1887340
gguuaugauagaugugaaa

SEQ ID NO: 2464827 - RNA, 19 nt, Artificial Sequence
  Description of Artificial Sequence: Synthetic oligonucleotide
  Antisense strand to SEQ ID NO: 2464826
uuucacaucuaucauaacc

SEQ ID NO: 2464828 - RNA, 19 nt, Artificial Sequence
  Description of Artificial Sequence: Synthetic oligonucleotide
  Sense strand starting at position 1038 of SEQ ID NO: 1887340
uuugcaaguguuuauaaug

SEQ ID NO: 2464829 - RNA, 19 nt, Artificial Sequence
  Description of Artificial Sequence: Synthetic oligonucleotide
  Antisense strand to SEQ ID NO: 2464828
cauuauaaacacuugcaaa

SEQ ID NO: 2464830 - RNA, 19 nt, Artificial Sequence
  Description of Artificial Sequence: Synthetic oligonucleotide
  Sense strand starting at position 1125 of SEQ ID NO: 1887340
acacuuaggcaagaguuau

SEQ ID NO: 2464831 - RNA, 19 nt, Artificial Sequence
  Description of Artificial Sequence: Synthetic oligonucleotide
  Antisense strand to SEQ ID NO: 2464830
auaacucuugccuaagugu

SEQ ID NO: 2464832 - RNA, 19 nt, Artificial Sequence
  Description of Artificial Sequence: Synthetic oligonucleotide
  Sense strand starting at position 1146 of SEQ ID NO: 1887340
gugacauauuuagugcuuu

SEQ ID NO: 2464833 - RNA, 19 nt, Artificial Sequence
  Description of Artificial Sequence: Synthetic oligonucleotide
  Antisense strand to SEQ ID NO: 2464832
aaagcacuaaauaugucac

SEQ ID NO: 2464834 - RNA, 19 nt, Artificial Sequence
  Description of Artificial Sequence: Synthetic oligonucleotide
  Sense strand starting at position 1193 of SEQ ID NO: 1887340
ugguaaucauuaccuugau

SEQ ID NO: 2464835 - RNA, 19 nt, Artificial Sequence
  Description of Artificial Sequence: Synthetic oligonucleotide
  Antisense strand to SEQ ID NO: 2464834
aucaagguaaugauuacca

SEQ ID NO: 2464836 - RNA, 19 nt, Artificial Sequence
  Description of Artificial Sequence: Synthetic oligonucleotide
  Sense strand starting at position 1194 of SEQ ID NO: 1887340
gguaaucauuaccuugaua

SEQ ID NO: 2464837 - RNA, 19 nt, Artificial Sequence
  Description of Artificial Sequence: Synthetic oligonucleotide
  Antisense strand to SEQ ID NO: 2464836
uaucaagguaaugauuacc

SEQ ID NO: 2464838 - RNA, 19 nt, Artificial Sequence
  Description of Artificial Sequence: Synthetic oligonucleotide
  Sense strand starting at position 1249 of SEQ ID NO: 1887340
augcuccuucucuagugaa

SEQ ID NO: 2464839 - RNA, 19 nt, Artificial Sequence
  Description of Artificial Sequence: Synthetic oligonucleotide
  Antisense strand to SEQ ID NO: 2464838
uucacuagagaaggagcau

SEQ ID NO: 2464840 - RNA, 19 nt, Artificial Sequence
  Description of Artificial Sequence: Synthetic oligonucleotide
  Sense strand starting at position 1498 of SEQ ID NO: 1887340
gcugucaggcugucaaguu

SEQ ID NO: 2464841 - RNA, 19 nt, Artificial Sequence
  Description of Artificial Sequence: Synthetic oligonucleotide
  Antisense strand to SEQ ID NO: 2464840
aacuugacagccugacagc

SEQ ID NO: 2464842 - RNA, 19 nt, Artificial Sequence
  Description of Artificial Sequence: Synthetic oligonucleotide
  Sense strand starting at position 1527 of SEQ ID NO: 1887340
ugggcacguugauuucaau

SEQ ID NO: 2464843 - RNA, 19 nt, Artificial Sequence
  Description of Artificial Sequence: Synthetic oligonucleotide
  Antisense strand to SEQ ID NO: 2464842
auugaaaucaacgugccca

SEQ ID NO: 2464844 - RNA, 19 nt, Artificial Sequence
  Description of Artificial Sequence: Synthetic oligonucleotide
  Sense strand starting at position 1717 of SEQ ID NO: 1887340
gagguuaugaaaggcaguu

SEQ ID NO: 2464845 - RNA, 19 nt, Artificial Sequence
  Description of Artificial Sequence: Synthetic oligonucleotide
  Antisense strand to SEQ ID NO: 2464844
aacugccuuucauaaccuc

SEQ ID NO: 2464846 - RNA, 19 nt, Artificial Sequence
  Description of Artificial Sequence: Synthetic oligonucleotide
  Sense strand starting at position 1719 of SEQ ID NO: 1887340
gguuaugaaaggcaguuua

SEQ ID NO: 2464847 - RNA, 19 nt, Artificial Sequence
  Description of Artificial Sequence: Synthetic oligonucleotide
  Antisense strand to SEQ ID NO: 2464846
uaaacugccuuucauaacc

SEQ ID NO: 2464848 - RNA, 19 nt, Artificial Sequence
  Description of Artificial Sequence: Synthetic oligonucleotide
  Sense strand starting at position 1735 of SEQ ID NO: 1887340
uuaaacguggcuuauaaac

SEQ ID NO: 2464849 - RNA, 19 nt, Artificial Sequence
  Description of Artificial Sequence: Synthetic oligonucleotide
  Antisense strand to SEQ ID NO: 2464848
guuuauaagccacguuuaa

SEQ ID NO: 2464850 - RNA, 19 nt, Artificial Sequence
  Description of Artificial Sequence: Synthetic oligonucleotide
  Sense strand starting at position 1774 of SEQ ID NO: 1887340
guguguaucgcaguauucu

SEQ ID NO: 2464851 - RNA, 19 nt, Artificial Sequence
  Description of Artificial Sequence: Synthetic oligonucleotide
  Antisense strand to SEQ ID NO: 2464850
agaauacugcgauacacac

SEQ ID NO: 2464852 - RNA, 19 nt, Artificial Sequence
  Description of Artificial Sequence: Synthetic oligonucleotide
  Sense strand starting at position 1865 of SEQ ID NO: 1887340
guguuaacaguccauaucu

SEQ ID NO: 2464853 - RNA, 19 nt, Artificial Sequence
  Description of Artificial Sequence: Synthetic oligonucleotide
  Antisense strand to SEQ ID NO: 2464852
agauauggacuguuaacac

SEQ ID NO: 2464854 - RNA, 19 nt, Artificial Sequence
  Description of Artificial Sequence: Synthetic oligonucleotide
  Sense strand starting at position 2118 of SEQ ID NO: 1887340
gauaauuaugaugguaggu

SEQ ID NO: 2464855 - RNA, 19 nt, Artificial Sequence
  Description of Artificial Sequence: Synthetic oligonucleotide
  Antisense strand to SEQ ID NO: 2464854
accuaccaucauaauuauc

SEQ ID NO: 2464856 - RNA, 19 nt, Artificial Sequence
  Description of Artificial Sequence: Synthetic oligonucleotide
  Sense strand starting at position 2138 of SEQ ID NO: 1887340
auguuaucggucuauuugu

SEQ ID NO: 2464857 - RNA, 19 nt, Artificial Sequence
  Description of Artificial Sequence: Synthetic oligonucleotide
  Antisense strand to SEQ ID NO: 2464856
acaaauagaccgauaacau

SEQ ID NO: 2464858 - RNA, 19 nt, Artificial Sequence
  Description of Artificial Sequence: Synthetic oligonucleotide
  Sense strand starting at position 2149 of SEQ ID NO: 1887340
cuauuugugucccuccaag

SEQ ID NO: 2464859 - RNA, 19 nt, Artificial Sequence
  Description of Artificial Sequence: Synthetic oligonucleotide
  Antisense strand to SEQ ID NO: 2464858
cuuggagggacacaaauag

SEQ ID NO: 2464860 - RNA, 19 nt, Artificial Sequence
  Description of Artificial Sequence: Synthetic oligonucleotide
  Sense strand starting at position 2223 of SEQ ID NO: 1887340
agggccauugcagauauaa

SEQ ID NO: 2464861 - RNA, 19 nt, Artificial Sequence
  Description of Artificial Sequence: Synthetic oligonucleotide
  Antisense strand to SEQ ID NO: 2464860
uuauaucugcaauggcccu

SEQ ID NO: 2464862 - RNA, 19 nt, Artificial Sequence
  Description of Artificial Sequence: Synthetic oligonucleotide
  Sense strand starting at position 2362 of SEQ ID NO: 1887340
ggcaaagaucuauaagcca

SEQ ID NO: 2464863 - RNA, 19 nt, Artificial Sequence
  Description of Artificial Sequence: Synthetic oligonucleotide
  Antisense strand to SEQ ID NO: 2464862
uggcuuauagaucuuugcc

SEQ ID NO: 2464864 - RNA, 19 nt, Artificial Sequence
  Description of Artificial Sequence: Synthetic oligonucleotide
  Sense strand starting at position 2428 of SEQ ID NO: 1887340
ugaaacagauucucuguca

SEQ ID NO: 2464865 - RNA, 19 nt, Artificial Sequence
  Description of Artificial Sequence: Synthetic oligonucleotide
  Antisense strand to SEQ ID NO: 2464864
ugacagagaaucuguuuca

SEQ ID NO: 2464866 - RNA, 19 nt, Artificial Sequence
  Description of Artificial Sequence: Synthetic oligonucleotide
  Sense strand starting at position 2491 of SEQ ID NO: 1887340
uucugaauccuagaacugu

SEQ ID NO: 2464867 - RNA, 19 nt, Artificial Sequence
  Description of Artificial Sequence: Synthetic oligonucleotide
  Antisense strand to SEQ ID NO: 2464866
acaguucuaggauucagaa

SEQ ID NO: 2464868 - RNA, 19 nt, Artificial Sequence
  Description of Artificial Sequence: Synthetic oligonucleotide
  Sense strand starting at position 2777 of SEQ ID NO: 1887340
agaacugacuuucugcaga

SEQ ID NO: 2464869 - RNA, 19 nt, Artificial Sequence
  Description of Artificial Sequence: Synthetic oligonucleotide
  Antisense strand to SEQ ID NO: 2464868
ucugcagaaagucaguucu

SEQ ID NO: 2464870 - RNA, 19 nt, Artificial Sequence
  Description of Artificial Sequence: Synthetic oligonucleotide
  Sense strand starting at position 2854 of SEQ ID NO: 1887340
cuaugacuccuagauaguc

SEQ ID NO: 2464871 - RNA, 19 nt, Artificial Sequence
  Description of Artificial Sequence: Synthetic oligonucleotide
  Antisense strand to SEQ ID NO: 2464870
gacuaucuaggagucauag

SEQ ID NO: 2464872 - RNA, 19 nt, Artificial Sequence
  Description of Artificial Sequence: Synthetic oligonucleotide
  Sense strand starting at position 2931 of SEQ ID NO: 1887340
gaaggagaugggugcuaua

SEQ ID NO: 2464873 - RNA, 19 nt, Artificial Sequence
  Description of Artificial Sequence: Synthetic oligonucleotide
  Antisense strand to SEQ ID NO: 2464872
uauagcacccaucuccuuc

SEQ ID NO: 2464874 - RNA, 19 nt, Artificial Sequence
  Description of Artificial Sequence: Synthetic oligonucleotide
  Sense strand starting at position 3064 of SEQ ID NO: 1887340
gagauaguagcccacuuau

SEQ ID NO: 2464875 - RNA, 19 nt, Artificial Sequence
  Description of Artificial Sequence: Synthetic oligonucleotide
  Antisense strand to SEQ ID NO: 2464874
auaagugggcuacuaucuc

SEQ ID NO: 2464876 - RNA, 19 nt, Artificial Sequence
  Description of Artificial Sequence: Synthetic oligonucleotide
  Sense strand starting at position 3213 of SEQ ID NO: 1887340
gaauuuguguaagaacaua

SEQ ID NO: 2464877 - RNA, 19 nt, Artificial Sequence
  Description of Artificial Sequence: Synthetic oligonucleotide
  Antisense strand to SEQ ID NO: 2464876
uauguucuuacacaaauuc

SEQ ID NO: 2464878 - RNA, 19 nt, Artificial Sequence
  Description of Artificial Sequence: Synthetic oligonucleotide
  Sense strand starting at position 3483 of SEQ ID NO: 1887340
cuggcauuggucuacccaa

SEQ ID NO: 2464879 - RNA, 19 nt, Artificial Sequence
  Description of Artificial Sequence: Synthetic oligonucleotide
  Antisense strand to SEQ ID NO: 2464878
uuggguagaccaaugccag

SEQ ID NO: 2464880 - RNA, 19 nt, Artificial Sequence
  Description of Artificial Sequence: Synthetic oligonucleotide
  Sense strand starting at position 3577 of SEQ ID NO: 1887340
ggguuaaaccucugcaaac

SEQ ID NO: 2464881 - RNA, 19 nt, Artificial Sequence
  Description of Artificial Sequence: Synthetic oligonucleotide
  Antisense strand to SEQ ID NO: 2464880
guuugcagagguuuaaccc

SEQ ID NO: 2464882 - RNA, 19 nt, Artificial Sequence
  Description of Artificial Sequence: Synthetic oligonucleotide
  Sense strand starting at position 3578 of SEQ ID NO: 1887340
gguuaaaccucugcaaaca

SEQ ID NO: 2464883 - RNA, 19 nt, Artificial Sequence
  Description of Artificial Sequence: Synthetic oligonucleotide
  Antisense strand to SEQ ID NO: 2464882
uguuugcagagguuuaacc

SEQ ID NO: 2464884 - RNA, 19 nt, Artificial Sequence
  Description of Artificial Sequence: Synthetic oligonucleotide
  Sense strand starting at position 3600 of SEQ ID NO: 1887340
gauugauugcaucacugca

SEQ ID NO: 2464885 - RNA, 19 nt, Artificial Sequence
  Description of Artificial Sequence: Synthetic oligonucleotide
  Antisense strand to SEQ ID NO: 2464884
ugcagugaugcaaucaauc

SEQ ID NO: 2464886 - RNA, 19 nt, Artificial Sequence
  Description of Artificial Sequence: Synthetic oligonucleotide
  Sense strand starting at position 3677 of SEQ ID NO: 1887340
auucgucaccuggguauuu

SEQ ID NO: 2464887 - RNA, 19 nt, Artificial Sequence
  Description of Artificial Sequence: Synthetic oligonucleotide
  Antisense strand to SEQ ID NO: 2464886
aaauacccaggugacgaau

SEQ ID NO: 2464888 - RNA, 19 nt, Artificial Sequence
  Description of Artificial Sequence: Synthetic oligonucleotide
  Sense strand starting at position 3678 of SEQ ID NO: 1887340
uucgucaccuggguauuua

SEQ ID NO: 2464889 - RNA, 19 nt, Artificial Sequence
  Description of Artificial Sequence: Synthetic oligonucleotide
  Antisense strand to SEQ ID NO: 2464888
uaaauacccaggugacgaa

SEQ ID NO: 2464890 - RNA, 19 nt, Artificial Sequence
  Description of Artificial Sequence: Synthetic oligonucleotide
  Sense strand starting at position 302 of SEQ ID NO: 1887341
cgaguauaugugaguggua

SEQ ID NO: 2464891 - RNA, 19 nt, Artificial Sequence
  Description of Artificial Sequence: Synthetic oligonucleotide
  Antisense strand to SEQ ID NO: 2464890
uaccacucacauauacucg

SEQ ID NO: 2464892 - RNA, 19 nt, Artificial Sequence
  Description of Artificial Sequence: Synthetic oligonucleotide
  Sense strand starting at position 335 of SEQ ID NO: 1887341
auucuucuagggugaccaa

SEQ ID NO: 2464893 - RNA, 19 nt, Artificial Sequence
  Description of Artificial Sequence: Synthetic oligonucleotide
  Antisense strand to SEQ ID NO: 2464892
uuggucacccuagaagaau

SEQ ID NO: 2464894 - RNA, 19 nt, Artificial Sequence
  Description of Artificial Sequence: Synthetic oligonucleotide
  Sense strand starting at position 398 of SEQ ID NO: 1887341
uccuaaauugcaggaaguu

SEQ ID NO: 2464895 - RNA, 19 nt, Artificial Sequence
  Description of Artificial Sequence: Synthetic oligonucleotide
  Antisense strand to SEQ ID NO: 2464894
aacuuccugcaauuuagga

SEQ ID NO: 2464896 - RNA, 19 nt, Artificial Sequence
  Description of Artificial Sequence: Synthetic oligonucleotide
  Sense strand starting at position 399 of SEQ ID NO: 1887341
ccuaaauugcaggaaguua

SEQ ID NO: 2464897 - RNA, 19 nt, Artificial Sequence
  Description of Artificial Sequence: Synthetic oligonucleotide
  Antisense strand to SEQ ID NO: 2464896
uaacuuccugcaauuuagg

SEQ ID NO: 2464898 - RNA, 19 nt, Artificial Sequence
  Description of Artificial Sequence: Synthetic oligonucleotide
  Sense strand starting at position 410 of SEQ ID NO: 1887341
ggaaguuacucauuccuug

SEQ ID NO: 2464899 - RNA, 19 nt, Artificial Sequence
  Description of Artificial Sequence: Synthetic oligonucleotide
  Antisense strand to SEQ ID NO: 2464898
caaggaaugaguaacuucc

SEQ ID NO: 2464900 - RNA, 19 nt, Artificial Sequence
  Description of Artificial Sequence: Synthetic oligonucleotide
  Sense strand starting at position 435 of SEQ ID NO: 1887341
ugggaugguggucaucaua

SEQ ID NO: 2464901 - RNA, 19 nt, Artificial Sequence
  Description of Artificial Sequence: Synthetic oligonucleotide
  Antisense strand to SEQ ID NO: 2464900
uaugaugaccaccauccca

SEQ ID NO: 2464902 - RNA, 19 nt, Artificial Sequence
  Description of Artificial Sequence: Synthetic oligonucleotide
  Sense strand starting at position 494 of SEQ ID NO: 1887341
cuacuuguacaguagauaa

SEQ ID NO: 2464903 - RNA, 19 nt, Artificial Sequence
  Description of Artificial Sequence: Synthetic oligonucleotide
  Antisense strand to SEQ ID NO: 2464902
uuaucuacuguacaaguag

SEQ ID NO: 2464904 - RNA, 19 nt, Artificial Sequence
  Description of Artificial Sequence: Synthetic oligonucleotide
  Sense strand starting at position 582 of SEQ ID NO: 1887341
agaagugaugagugagcua

SEQ ID NO: 2464905 - RNA, 19 nt, Artificial Sequence
  Description of Artificial Sequence: Synthetic oligonucleotide
  Antisense strand to SEQ ID NO: 2464904
uagcucacucaucacuucu

SEQ ID NO: 2464906 - RNA, 19 nt, Artificial Sequence
  Description of Artificial Sequence: Synthetic oligonucleotide
  Sense strand starting at position 587 of SEQ ID NO: 1887341
ugaugagugagcuacuucu

SEQ ID NO: 2464907 - RNA, 19 nt, Artificial Sequence
  Description of Artificial Sequence: Synthetic oligonucleotide
  Antisense strand to SEQ ID NO: 2464906
agaaguagcucacucauca

SEQ ID NO: 2464908 - RNA, 19 nt, Artificial Sequence
  Description of Artificial Sequence: Synthetic oligonucleotide
  Sense strand starting at position 685 of SEQ ID NO: 1887341
ucuuccggucaauauagau

SEQ ID NO: 2464909 - RNA, 19 nt, Artificial Sequence
  Description of Artificial Sequence: Synthetic oligonucleotide
  Antisense strand to SEQ ID NO: 2464908
aucuauauugaccggaaga

SEQ ID NO: 2464910 - RNA, 19 nt, Artificial Sequence
  Description of Artificial Sequence: Synthetic oligonucleotide
  Sense strand starting at position 711 of SEQ ID NO: 1887341
accugaucucagugauuga

SEQ ID NO: 2464911 - RNA, 19 nt, Artificial Sequence
  Description of Artificial Sequence: Synthetic oligonucleotide
  Antisense strand to SEQ ID NO: 2464910
ucaaucacugagaucaggu

SEQ ID NO: 2464912 - RNA, 19 nt, Artificial Sequence
  Description of Artificial Sequence: Synthetic oligonucleotide
  Sense strand starting at position 714 of SEQ ID NO: 1887341
ugaucucagugauugauug

SEQ ID NO: 2464913 - RNA, 19 nt, Artificial Sequence
  Description of Artificial Sequence: Synthetic oligonucleotide
  Antisense strand to SEQ ID NO: 2464912
caaucaaucacugagauca

SEQ ID NO: 2464914 - RNA, 19 nt, Artificial Sequence
  Description of Artificial Sequence: Synthetic oligonucleotide
  Sense strand starting at position 721 of SEQ ID NO: 1887341
agugauugauugguccaca

SEQ ID NO: 2464915 - RNA, 19 nt, Artificial Sequence
  Description of Artificial Sequence: Synthetic oligonucleotide
  Antisense strand to SEQ ID NO: 2464914
uguggaccaaucaaucacu

SEQ ID NO: 2464916 - RNA, 19 nt, Artificial Sequence
  Description of Artificial Sequence: Synthetic oligonucleotide
  Sense strand starting at position 722 of SEQ ID NO: 1887341
gugauugauugguccacag

SEQ ID NO: 2464917 - RNA, 19 nt, Artificial Sequence
  Description of Artificial Sequence: Synthetic oligonucleotide
  Antisense strand to SEQ ID NO: 2464916
cuguggaccaaucaaucac

SEQ ID NO: 2464918 - RNA, 19 nt, Artificial Sequence
  Description of Artificial Sequence: Synthetic oligonucleotide
  Sense strand starting at position 724 of SEQ ID NO: 1887341
gauugauugguccacaggu

SEQ ID NO: 2464919 - RNA, 19 nt, Artificial Sequence
  Description of Artificial Sequence: Synthetic oligonucleotide
  Antisense strand to SEQ ID NO: 2464918
accuguggaccaaucaauc

SEQ ID NO: 2464920 - RNA, 19 nt, Artificial Sequence
  Description of Artificial Sequence: Synthetic oligonucleotide
  Sense strand starting at position 734 of SEQ ID NO: 1887341
uccacagguggucaugaua

SEQ ID NO: 2464921 - RNA, 19 nt, Artificial Sequence
  Description of Artificial Sequence: Synthetic oligonucleotide
  Antisense strand to SEQ ID NO: 2464920
uaucaugaccaccugugga

SEQ ID NO: 2464922 - RNA, 19 nt, Artificial Sequence
  Description of Artificial Sequence: Synthetic oligonucleotide
  Sense strand starting at position 858 of SEQ ID NO: 1887341
agaugcuucuuagugggaa

SEQ ID NO: 2464923 - RNA, 19 nt, Artificial Sequence
  Description of Artificial Sequence: Synthetic oligonucleotide
  Antisense strand to SEQ ID NO: 2464922
uucccacuaagaagcaucu

SEQ ID NO: 2464924 - RNA, 19 nt, Artificial Sequence
  Description of Artificial Sequence: Synthetic oligonucleotide
  Sense strand starting at position 977 of SEQ ID NO: 1887341
aacugauaaugcucuguga

SEQ ID NO: 2464925 - RNA, 19 nt, Artificial Sequence
  Description of Artificial Sequence: Synthetic oligonucleotide
  Antisense strand to SEQ ID NO: 2464924
ucacagagcauuaucaguu

SEQ ID NO: 2464926 - RNA, 19 nt, Artificial Sequence
  Description of Artificial Sequence: Synthetic oligonucleotide
  Sense strand starting at position 988 of SEQ ID NO: 1887341
cucugugaguuucuaagaa

SEQ ID NO: 2464927 - RNA, 19 nt, Artificial Sequence
  Description of Artificial Sequence: Synthetic oligonucleotide
  Antisense strand to SEQ ID NO: 2464926
uucuuagaaacucacagag

SEQ ID NO: 2464928 - RNA, 19 nt, Artificial Sequence
  Description of Artificial Sequence: Synthetic oligonucleotide
  Sense strand starting at position 1324 of SEQ ID NO: 1887341
aucaccagguuguuauaua

SEQ ID NO: 2464929 - RNA, 19 nt, Artificial Sequence
  Description of Artificial Sequence: Synthetic oligonucleotide
  Antisense strand to SEQ ID NO: 2464928
uauauaacaaccuggugau

SEQ ID NO: 2464930 - RNA, 19 nt, Artificial Sequence
  Description of Artificial Sequence: Synthetic oligonucleotide
  Sense strand starting at position 1362 of SEQ ID NO: 1887341
guauuugcuuguuucucua

SEQ ID NO: 2464931 - RNA, 19 nt, Artificial Sequence
  Description of Artificial Sequence: Synthetic oligonucleotide
  Antisense strand to SEQ ID NO: 2464930
uagagaaacaagcaaauac

SEQ ID NO: 2464932 - RNA, 19 nt, Artificial Sequence
  Description of Artificial Sequence: Synthetic oligonucleotide
  Sense strand starting at position 1364 of SEQ ID NO: 1887341
auuugcuuguuucucuaua

SEQ ID NO: 2464933 - RNA, 19 nt, Artificial Sequence
  Description of Artificial Sequence: Synthetic oligonucleotide
  Antisense strand to SEQ ID NO: 2464932
uauagagaaacaagcaaau

SEQ ID NO: 2464934 - RNA, 19 nt, Artificial Sequence
  Description of Artificial Sequence: Synthetic oligonucleotide
  Sense strand starting at position 1495 of SEQ ID NO: 1887341
uuacuuuggguccauaaug

SEQ ID NO: 2464935 - RNA, 19 nt, Artificial Sequence
  Description of Artificial Sequence: Synthetic oligonucleotide
  Antisense strand to SEQ ID NO: 2464934
cauuauggacccaaaguaa

SEQ ID NO: 2464936 - RNA, 19 nt, Artificial Sequence
  Description of Artificial Sequence: Synthetic oligonucleotide
  Sense strand starting at position 1511 of SEQ ID NO: 1887341
augccaaugguuuaauuaa

SEQ ID NO: 2464937 - RNA, 19 nt, Artificial Sequence
  Description of Artificial Sequence: Synthetic oligonucleotide
  Antisense strand to SEQ ID NO: 2464936
uuaauuaaaccauuggcau

SEQ ID NO: 2464938 - RNA, 19 nt, Artificial Sequence
  Description of Artificial Sequence: Synthetic oligonucleotide
  Sense strand starting at position 1774 of SEQ ID NO: 1887341
gcaauacaccagcagucau

SEQ ID NO: 2464939 - RNA, 19 nt, Artificial Sequence
  Description of Artificial Sequence: Synthetic oligonucleotide
  Antisense strand to SEQ ID NO: 2464938
augacugcugguguauugc

SEQ ID NO: 2464940 - RNA, 19 nt, Artificial Sequence
  Description of Artificial Sequence: Synthetic oligonucleotide
  Sense strand starting at position 1844 of SEQ ID NO: 1887341
agggaaagaugcuuaccau

SEQ ID NO: 2464941 - RNA, 19 nt, Artificial Sequence
  Description of Artificial Sequence: Synthetic oligonucleotide
  Antisense strand to SEQ ID NO: 2464940
augguaagcaucuuucccu

SEQ ID NO: 2464942 - RNA, 19 nt, Artificial Sequence
  Description of Artificial Sequence: Synthetic oligonucleotide
  Sense strand starting at position 1869 of SEQ ID NO: 1887341
ggcucuguuccagggaaag

SEQ ID NO: 2464943 - RNA, 19 nt, Artificial Sequence
  Description of Artificial Sequence: Synthetic oligonucleotide
  Antisense strand to SEQ ID NO: 2464942
cuuucccuggaacagagcc

SEQ ID NO: 2464944 - RNA, 19 nt, Artificial Sequence
  Description of Artificial Sequence: Synthetic oligonucleotide
  Sense strand starting at position 2178 of SEQ ID NO: 1887341
gaugaagucgaauguaaac

SEQ ID NO: 2464945 - RNA, 19 nt, Artificial Sequence
  Description of Artificial Sequence: Synthetic oligonucleotide
  Antisense strand to SEQ ID NO: 2464944
guuuacauucgacuucauc

SEQ ID NO: 2464946 - RNA, 19 nt, Artificial Sequence
  Description of Artificial Sequence: Synthetic oligonucleotide
  Sense strand starting at position 2180 of SEQ ID NO: 1887341
ugaagucgaauguaaacau

SEQ ID NO: 2464947 - RNA, 19 nt, Artificial Sequence
  Description of Artificial Sequence: Synthetic oligonucleotide
  Antisense strand to SEQ ID NO: 2464946
auguuuacauucgacuuca

SEQ ID NO: 2464948 - RNA, 19 nt, Artificial Sequence
  Description of Artificial Sequence: Synthetic oligonucleotide
  Sense strand starting at position 2297 of SEQ ID NO: 1887341
gcagauuugacacguaugu

SEQ ID NO: 2464949 - RNA, 19 nt, Artificial Sequence
  Description of Artificial Sequence: Synthetic oligonucleotide
  Antisense strand to SEQ ID NO: 2464948
acauacgugucaaaucugc

SEQ ID NO: 2464950 - RNA, 19 nt, Artificial Sequence
  Description of Artificial Sequence: Synthetic oligonucleotide
  Sense strand starting at position 2310 of SEQ ID NO: 1887341
guauguagaggauaucagu

SEQ ID NO: 2464951 - RNA, 19 nt, Artificial Sequence
  Description of Artificial Sequence: Synthetic oligonucleotide
  Antisense strand to SEQ ID NO: 2464950
acugauauccucuacauac

SEQ ID NO: 2464952 - RNA, 19 nt, Artificial Sequence
  Description of Artificial Sequence: Synthetic oligonucleotide
  Sense strand starting at position 2316 of SEQ ID NO: 1887341
agaggauaucagugcucua

SEQ ID NO: 2464953 - RNA, 19 nt, Artificial Sequence
  Description of Artificial Sequence: Synthetic oligonucleotide
  Antisense strand to SEQ ID NO: 2464952
uagagcacugauauccucu

SEQ ID NO: 2464954 - RNA, 19 nt, Artificial Sequence
  Description of Artificial Sequence: Synthetic oligonucleotide
  Sense strand starting at position 2530 of SEQ ID NO: 1887341
gcuuauuaccuugaaaguc

SEQ ID NO: 2464955 - RNA, 19 nt, Artificial Sequence
  Description of Artificial Sequence: Synthetic oligonucleotide
  Antisense strand to SEQ ID NO: 2464954
gacuuucaagguaauaagc

SEQ ID NO: 2464956 - RNA, 19 nt, Artificial Sequence
  Description of Artificial Sequence: Synthetic oligonucleotide
  Sense strand starting at position 2968 of SEQ ID NO: 1887341
ggugaaccuccagguauaa

SEQ ID NO: 2464957 - RNA, 19 nt, Artificial Sequence
  Description of Artificial Sequence: Synthetic oligonucleotide
  Antisense strand to SEQ ID NO: 2464956
uuauaccuggagguucacc

SEQ ID NO: 2464958 - RNA, 19 nt, Artificial Sequence
  Description of Artificial Sequence: Synthetic oligonucleotide
  Sense strand starting at position 3354 of SEQ ID NO: 1887341
guauuuguaaugugcagac

SEQ ID NO: 2464959 - RNA, 19 nt, Artificial Sequence
  Description of Artificial Sequence: Synthetic oligonucleotide
  Antisense strand to SEQ ID NO: 2464958
gucugcacauuacaaauac

SEQ ID NO: 2464960 - RNA, 19 nt, Artificial Sequence
  Description of Artificial Sequence: Synthetic oligonucleotide
  Sense strand starting at position 3368 of SEQ ID NO: 1887341
cagacaaggugcuuuauga

SEQ ID NO: 2464961 - RNA, 19 nt, Artificial Sequence
  Description of Artificial Sequence: Synthetic oligonucleotide
  Antisense strand to SEQ ID NO: 2464960
ucauaaagcaccuugucug

SEQ ID NO: 2464962 - RNA, 19 nt, Artificial Sequence
  Description of Artificial Sequence: Synthetic oligonucleotide
  Sense strand starting at position 3554 of SEQ ID NO: 1887341
uaucuaauguaggucuuga

SEQ ID NO: 2464963 - RNA, 19 nt, Artificial Sequence
  Description of Artificial Sequence: Synthetic oligonucleotide
  Antisense strand to SEQ ID NO: 2464962
ucaagaccuacauuagaua

SEQ ID NO: 2464964 - RNA, 19 nt, Artificial Sequence
  Description of Artificial Sequence: Synthetic oligonucleotide
  Sense strand starting at position 3680 of SEQ ID NO: 1887341
ccacguaguguguuauguu

SEQ ID NO: 2464965 - RNA, 19 nt, Artificial Sequence
  Description of Artificial Sequence: Synthetic oligonucleotide
  Antisense strand to SEQ ID NO: 2464964
aacauaacacacuacgugg

SEQ ID NO: 2464966 - RNA, 19 nt, Artificial Sequence
  Description of Artificial Sequence: Synthetic oligonucleotide
  Sense strand starting at position 3687 of SEQ ID NO: 1887341
guguguuauguuucagguu

SEQ ID NO: 2464967 - RNA, 19 nt, Artificial Sequence
  Description of Artificial Sequence: Synthetic oligonucleotide
  Antisense strand to SEQ ID NO: 2464966
aaccugaaacauaacacac

SEQ ID NO: 2464968 - RNA, 19 nt, Artificial Sequence
  Description of Artificial Sequence: Synthetic oligonucleotide
  Sense strand starting at position 3959 of SEQ ID NO: 1887341
uugaaauauggcuauguuu

SEQ ID NO: 2464969 - RNA, 19 nt, Artificial Sequence
  Description of Artificial Sequence: Synthetic oligonucleotide
  Antisense strand to SEQ ID NO: 2464968
aaacauagccauauuucaa

SEQ ID NO: 2464970 - RNA, 19 nt, Artificial Sequence
  Description of Artificial Sequence: Synthetic oligonucleotide
  Sense strand starting at position 114 of SEQ ID NO: 1887342
cagaauuaggaacguggua

SEQ ID NO: 2464971 - RNA, 19 nt, Artificial Sequence
  Description of Artificial Sequence: Synthetic oligonucleotide
  Antisense strand to SEQ ID NO: 2464970
uaccacguuccuaauucug

SEQ ID NO: 2464972 - RNA, 19 nt, Artificial Sequence
  Description of Artificial Sequence: Synthetic oligonucleotide
  Sense strand starting at position 116 of SEQ ID NO: 1887342
gaauuaggaacgugguaaa

SEQ ID NO: 2464973 - RNA, 19 nt, Artificial Sequence
  Description of Artificial Sequence: Synthetic oligonucleotide
  Antisense strand to SEQ ID NO: 2464972
uuuaccacguuccuaauuc

SEQ ID NO: 2464974 - RNA, 19 nt, Artificial Sequence
  Description of Artificial Sequence: Synthetic oligonucleotide
  Sense strand starting at position 574 of SEQ ID NO: 1887342
ucugauagacucuguuuaa

SEQ ID NO: 2464975 - RNA, 19 nt, Artificial Sequence
  Description of Artificial Sequence: Synthetic oligonucleotide
  Antisense strand to SEQ ID NO: 2464974
uuaaacagagucuaucaga

SEQ ID NO: 2464976 - RNA, 19 nt, Artificial Sequence
  Description of Artificial Sequence: Synthetic oligonucleotide
  Sense strand starting at position 575 of SEQ ID NO: 1887342
cugauagacucuguuuaaa

SEQ ID NO: 2464977 - RNA, 19 nt, Artificial Sequence
  Description of Artificial Sequence: Synthetic oligonucleotide
  Antisense strand to SEQ ID NO: 2464976
uuuaaacagagucuaucag

SEQ ID NO: 2464978 - RNA, 19 nt, Artificial Sequence
  Description of Artificial Sequence: Synthetic oligonucleotide
  Sense strand starting at position 756 of SEQ ID NO: 1887342
gauugugcauuugcauauu

SEQ ID NO: 2464979 - RNA, 19 nt, Artificial Sequence
  Description of Artificial Sequence: Synthetic oligonucleotide
  Antisense strand to SEQ ID NO: 2464978
aauaugcaaaugcacaauc

SEQ ID NO: 2464980 - RNA, 19 nt, Artificial Sequence
  Description of Artificial Sequence: Synthetic oligonucleotide
  Sense strand starting at position 845 of SEQ ID NO: 1887342
gcauauuuacagcguuaau

SEQ ID NO: 2464981 - RNA, 19 nt, Artificial Sequence
  Description of Artificial Sequence: Synthetic oligonucleotide
  Antisense strand to SEQ ID NO: 2464980
auuaacgcuguaaauaugc

SEQ ID NO: 2464982 - RNA, 19 nt, Artificial Sequence
  Description of Artificial Sequence: Synthetic oligonucleotide
  Sense strand starting at position 895 of SEQ ID NO: 1887342
gcaacaaauuaagugaaau

SEQ ID NO: 2464983 - RNA, 19 nt, Artificial Sequence
  Description of Artificial Sequence: Synthetic oligonucleotide
  Antisense strand to SEQ ID NO: 2464982
auuucacuuaauuuguugc

SEQ ID NO: 2464984 - RNA, 19 nt, Artificial Sequence
  Description of Artificial Sequence: Synthetic oligonucleotide
  Sense strand starting at position 961 of SEQ ID NO: 1887342
gcuuguaaacuugaaauuc

SEQ ID NO: 2464985 - RNA, 19 nt, Artificial Sequence
  Description of Artificial Sequence: Synthetic oligonucleotide
  Antisense strand to SEQ ID NO: 2464984
gaauuucaaguuuacaagc

SEQ ID NO: 2464986 - RNA, 19 nt, Artificial Sequence
  Description of Artificial Sequence: Synthetic oligonucleotide
  Sense strand starting at position 993 of SEQ ID NO: 1887342
ugaauaaacgcuuauuguu

SEQ ID NO: 2464987 - RNA, 19 nt, Artificial Sequence
  Description of Artificial Sequence: Synthetic oligonucleotide
  Antisense strand to SEQ ID NO: 2464986
aacaauaagcguuuauuca

SEQ ID NO: 2464988 - RNA, 19 nt, Artificial Sequence
  Description of Artificial Sequence: Synthetic oligonucleotide
  Sense strand starting at position 1026 of SEQ ID NO: 1887342
augcacucugugcaaagaa

SEQ ID NO: 2464989 - RNA, 19 nt, Artificial Sequence
  Description of Artificial Sequence: Synthetic oligonucleotide
  Antisense strand to SEQ ID NO: 2464988
uucuuugcacagagugcau

SEQ ID NO: 2464990 - RNA, 19 nt, Artificial Sequence
  Description of Artificial Sequence: Synthetic oligonucleotide
  Sense strand starting at position 1142 of SEQ ID NO: 1887342
gaaggcaaaugugucauau

SEQ ID NO: 2464991 - RNA, 19 nt, Artificial Sequence
  Description of Artificial Sequence: Synthetic oligonucleotide
  Antisense strand to SEQ ID NO: 2464990
auaugacacauuugccuuc

SEQ ID NO: 2464992 - RNA, 19 nt, Artificial Sequence
  Description of Artificial Sequence: Synthetic oligonucleotide
  Sense strand starting at position 1214 of SEQ ID NO: 1887342
auauguuugguguaacaac

SEQ ID NO: 2464993 - RNA, 19 nt, Artificial Sequence
  Description of Artificial Sequence: Synthetic oligonucleotide
  Antisense strand to SEQ ID NO: 2464992
guuguuacaccaaacauau

SEQ ID NO: 2464994 - RNA, 19 nt, Artificial Sequence
  Description of Artificial Sequence: Synthetic oligonucleotide
  Sense strand starting at position 1375 of SEQ ID NO: 1887342
auaauccaugcauacgaau

SEQ ID NO: 2464995 - RNA, 19 nt, Artificial Sequence
  Description of Artificial Sequence: Synthetic oligonucleotide
  Antisense strand to SEQ ID NO: 2464994
auucguaugcauggauuau

SEQ ID NO: 2464996 - RNA, 19 nt, Artificial Sequence
  Description of Artificial Sequence: Synthetic oligonucleotide
  Sense strand starting at position 1729 of SEQ ID NO: 1887342
aaauaucaucucuggguga

SEQ ID NO: 2464997 - RNA, 19 nt, Artificial Sequence
  Description of Artificial Sequence: Synthetic oligonucleotide
  Antisense strand to SEQ ID NO: 2464996
ucacccagagaugauauuu

SEQ ID NO: 2464998 - RNA, 19 nt, Artificial Sequence
  Description of Artificial Sequence: Synthetic oligonucleotide
  Sense strand starting at position 1731 of SEQ ID NO: 1887342
auaucaucucugggugaau

SEQ ID NO: 2464999 - RNA, 19 nt, Artificial Sequence
  Description of Artificial Sequence: Synthetic oligonucleotide
  Antisense strand to SEQ ID NO: 2464998
auucacccagagaugauau

SEQ ID NO: 2465000 - RNA, 19 nt, Artificial Sequence
  Description of Artificial Sequence: Synthetic oligonucleotide
  Sense strand starting at position 1732 of SEQ ID NO: 1887342
uaucaucucugggugaaug

SEQ ID NO: 2465001 - RNA, 19 nt, Artificial Sequence
  Description of Artificial Sequence: Synthetic oligonucleotide
  Antisense strand to SEQ ID NO: 2465000
cauucacccagagaugaua

SEQ ID NO: 2465002 - RNA, 19 nt, Artificial Sequence
  Description of Artificial Sequence: Synthetic oligonucleotide
  Sense strand starting at position 1733 of SEQ ID NO: 1887342
aucaucucugggugaauga

SEQ ID NO: 2465003 - RNA, 19 nt, Artificial Sequence
  Description of Artificial Sequence: Synthetic oligonucleotide
  Antisense strand to SEQ ID NO: 2465002
ucauucacccagagaugau

SEQ ID NO: 2465004 - RNA, 19 nt, Artificial Sequence
  Description of Artificial Sequence: Synthetic oligonucleotide
  Sense strand starting at position 1744 of SEQ ID NO: 1887342
gugaaugaaugugugagau

SEQ ID NO: 2465005 - RNA, 19 nt, Artificial Sequence
  Description of Artificial Sequence: Synthetic oligonucleotide
  Antisense strand to SEQ ID NO: 2465004
aucucacacauucauucac

SEQ ID NO: 2465006 - RNA, 19 nt, Artificial Sequence
  Description of Artificial Sequence: Synthetic oligonucleotide
  Sense strand starting at position 1750 of SEQ ID NO: 1887342
gaaugugugagauagcuca

SEQ ID NO: 2465007 - RNA, 19 nt, Artificial Sequence
  Description of Artificial Sequence: Synthetic oligonucleotide
  Antisense strand to SEQ ID NO: 2465006
ugagcuaucucacacauuc

SEQ ID NO: 2465008 - RNA, 19 nt, Artificial Sequence
  Description of Artificial Sequence: Synthetic oligonucleotide
  Sense strand starting at position 1757 of SEQ ID NO: 1887342
ugagauagcucaccauauc

SEQ ID NO: 2465009 - RNA, 19 nt, Artificial Sequence
  Description of Artificial Sequence: Synthetic oligonucleotide
  Antisense strand to SEQ ID NO: 2465008
gauauggugagcuaucuca

SEQ ID NO: 2465010 - RNA, 19 nt, Artificial Sequence
  Description of Artificial Sequence: Synthetic oligonucleotide
  Sense strand starting at position 1877 of SEQ ID NO: 1887342
ggcauuacugcugaaaucu

SEQ ID NO: 2465011 - RNA, 19 nt, Artificial Sequence
  Description of Artificial Sequence: Synthetic oligonucleotide
  Antisense strand to SEQ ID NO: 2465010
agauuucagcaguaaugcc

SEQ ID NO: 2465012 - RNA, 19 nt, Artificial Sequence
  Description of Artificial Sequence: Synthetic oligonucleotide
  Sense strand starting at position 1885 of SEQ ID NO: 1887342
ugcugaaaucugcaacuag

SEQ ID NO: 2465013 - RNA, 19 nt, Artificial Sequence
  Description of Artificial Sequence: Synthetic oligonucleotide
  Antisense strand to SEQ ID NO: 2465012
cuaguugcagauuucagca

SEQ ID NO: 2465014 - RNA, 19 nt, Artificial Sequence
  Description of Artificial Sequence: Synthetic oligonucleotide
  Sense strand starting at position 1995 of SEQ ID NO: 1887342
aucuaugaggucugaaagu

SEQ ID NO: 2465015 - RNA, 19 nt, Artificial Sequence
  Description of Artificial Sequence: Synthetic oligonucleotide
  Antisense strand to SEQ ID NO: 2465014
acuuucagaccucauagau

SEQ ID NO: 2465016 - RNA, 19 nt, Artificial Sequence
  Description of Artificial Sequence: Synthetic oligonucleotide
  Sense strand starting at position 2075 of SEQ ID NO: 1887342
ucaccaucccugcagugau

SEQ ID NO: 2465017 - RNA, 19 nt, Artificial Sequence
  Description of Artificial Sequence: Synthetic oligonucleotide
  Antisense strand to SEQ ID NO: 2465016
aucacugcagggaugguga

SEQ ID NO: 2465018 - RNA, 19 nt, Artificial Sequence
  Description of Artificial Sequence: Synthetic oligonucleotide
  Sense strand starting at position 2197 of SEQ ID NO: 1887342
gguguucuaggguacuaau

SEQ ID NO: 2465019 - RNA, 19 nt, Artificial Sequence
  Description of Artificial Sequence: Synthetic oligonucleotide
  Antisense strand to SEQ ID NO: 2465018
auuaguacccuagaacacc

SEQ ID NO: 2465020 - RNA, 19 nt, Artificial Sequence
  Description of Artificial Sequence: Synthetic oligonucleotide
  Sense strand starting at position 2294 of SEQ ID NO: 1887342
gaaauuauuccaugaagug

SEQ ID NO: 2465021 - RNA, 19 nt, Artificial Sequence
  Description of Artificial Sequence: Synthetic oligonucleotide
  Antisense strand to SEQ ID NO: 2465020
cacuucauggaauaauuuc

SEQ ID NO: 2465022 - RNA, 19 nt, Artificial Sequence
  Description of Artificial Sequence: Synthetic oligonucleotide
  Sense strand starting at position 2309 of SEQ ID NO: 1887342
agugaucccuucucagaau

SEQ ID NO: 2465023 - RNA, 19 nt, Artificial Sequence
  Description of Artificial Sequence: Synthetic oligonucleotide
  Antisense strand to SEQ ID NO: 2465022
auucugagaagggaucacu

SEQ ID NO: 2465024 - RNA, 19 nt, Artificial Sequence
  Description of Artificial Sequence: Synthetic oligonucleotide
  Sense strand starting at position 2406 of SEQ ID NO: 1887342
aggugaguccaacauguuu

SEQ ID NO: 2465025 - RNA, 19 nt, Artificial Sequence
  Description of Artificial Sequence: Synthetic oligonucleotide
  Antisense strand to SEQ ID NO: 2465024
aaacauguuggacucaccu

SEQ ID NO: 2465026 - RNA, 19 nt, Artificial Sequence
  Description of Artificial Sequence: Synthetic oligonucleotide
  Sense strand starting at position 2661 of SEQ ID NO: 1887342
agccuuugaugagucagaa

SEQ ID NO: 2465027 - RNA, 19 nt, Artificial Sequence
  Description of Artificial Sequence: Synthetic oligonucleotide
  Antisense strand to SEQ ID NO: 2465026
uucugacucaucaaaggcu

SEQ ID NO: 2465028 - RNA, 19 nt, Artificial Sequence
  Description of Artificial Sequence: Synthetic oligonucleotide
  Sense strand starting at position 3106 of SEQ ID NO: 1887342
gguggaagaucguuugaag

SEQ ID NO: 2465029 - RNA, 19 nt, Artificial Sequence
  Description of Artificial Sequence: Synthetic oligonucleotide
  Antisense strand to SEQ ID NO: 2465028
cuucaaacgaucuuccacc

SEQ ID NO: 2465030 - RNA, 19 nt, Artificial Sequence
  Description of Artificial Sequence: Synthetic oligonucleotide
  Sense strand starting at position 3253 of SEQ ID NO: 1887342
cggugagaggauggaucau

SEQ ID NO: 2465031 - RNA, 19 nt, Artificial Sequence
  Description of Artificial Sequence: Synthetic oligonucleotide
  Antisense strand to SEQ ID NO: 2465030
augauccauccucucaccg

SEQ ID NO: 2465032 - RNA, 19 nt, Artificial Sequence
  Description of Artificial Sequence: Synthetic oligonucleotide
  Sense strand starting at position 3262 of SEQ ID NO: 1887342
gauggaucauaagcuuaga

SEQ ID NO: 2465033 - RNA, 19 nt, Artificial Sequence
  Description of Artificial Sequence: Synthetic oligonucleotide
  Antisense strand to SEQ ID NO: 2465032
ucuaagcuuaugauccauc

SEQ ID NO: 2465034 - RNA, 19 nt, Artificial Sequence
  Description of Artificial Sequence: Synthetic oligonucleotide
  Sense strand starting at position 3375 of SEQ ID NO: 1887342
ggcuacuauguugggaaca

SEQ ID NO: 2465035 - RNA, 19 nt, Artificial Sequence
  Description of Artificial Sequence: Synthetic oligonucleotide
  Antisense strand to SEQ ID NO: 2465034
uguucccaacauaguagcc

SEQ ID NO: 2465036 - RNA, 19 nt, Artificial Sequence
  Description of Artificial Sequence: Synthetic oligonucleotide
  Sense strand starting at position 3443 of SEQ ID NO: 1887342
uacaauauuccagguggga

SEQ ID NO: 2465037 - RNA, 19 nt, Artificial Sequence
  Description of Artificial Sequence: Synthetic oligonucleotide
  Antisense strand to SEQ ID NO: 2465036
ucccaccuggaauauugua

SEQ ID NO: 2465038 - RNA, 19 nt, Artificial Sequence
  Description of Artificial Sequence: Synthetic oligonucleotide
  Sense strand starting at position 3713 of SEQ ID NO: 1887342
ucuagaguucaaggaguag

SEQ ID NO: 2465039 - RNA, 19 nt, Artificial Sequence
  Description of Artificial Sequence: Synthetic oligonucleotide
  Antisense strand to SEQ ID NO: 2465038
cuacuccuugaacucuaga

SEQ ID NO: 2465040 - RNA, 19 nt, Artificial Sequence
  Description of Artificial Sequence: Synthetic oligonucleotide
  Sense strand starting at position 3766 of SEQ ID NO: 1887342
gcauacagaugacauuuaa

SEQ ID NO: 2465041 - RNA, 19 nt, Artificial Sequence
  Description of Artificial Sequence: Synthetic oligonucleotide
  Antisense strand to SEQ ID NO: 2465040
uuaaaugucaucuguaugc

SEQ ID NO: 2465042 - RNA, 19 nt, Artificial Sequence
  Description of Artificial Sequence: Synthetic oligonucleotide
  Sense strand starting at position 3786 of SEQ ID NO: 1887342
gccauauacuaggugggau

SEQ ID NO: 2465043 - RNA, 19 nt, Artificial Sequence
  Description of Artificial Sequence: Synthetic oligonucleotide
  Antisense strand to SEQ ID NO: 2465042
aucccaccuaguauauggc

SEQ ID NO: 2465044 - RNA, 19 nt, Artificial Sequence
  Description of Artificial Sequence: Synthetic oligonucleotide
  Sense strand starting at position 3845 of SEQ ID NO: 1887342
gaucuugaucucuggagca

SEQ ID NO: 2465045 - RNA, 19 nt, Artificial Sequence
  Description of Artificial Sequence: Synthetic oligonucleotide
  Antisense strand to SEQ ID NO: 2465044
ugcuccagagaucaagauc

SEQ ID NO: 2465046 - RNA, 19 nt, Artificial Sequence
  Description of Artificial Sequence: Synthetic oligonucleotide
  Sense strand starting at position 3847 of SEQ ID NO: 1887342
ucuugaucucuggagcacu

SEQ ID NO: 2465047 - RNA, 19 nt, Artificial Sequence
  Description of Artificial Sequence: Synthetic oligonucleotide
  Antisense strand to SEQ ID NO: 2465046
agugcuccagagaucaaga

SEQ ID NO: 2465048 - RNA, 19 nt, Artificial Sequence
  Description of Artificial Sequence: Synthetic oligonucleotide
  Sense strand starting at position 3973 of SEQ ID NO: 1887342
aggagagacuguguugagu

SEQ ID NO: 2465049 - RNA, 19 nt, Artificial Sequence
  Description of Artificial Sequence: Synthetic oligonucleotide
  Antisense strand to SEQ ID NO: 2465048
acucaacacagucucuccu

SEQ ID NO: 2465050 - RNA, 19 nt, Artificial Sequence
  Description of Artificial Sequence: Synthetic oligonucleotide
  Sense strand starting at position 5 of SEQ ID NO: 1887343
aguguaagacucuggagca

SEQ ID NO: 2465051 - RNA, 19 nt, Artificial Sequence
  Description of Artificial Sequence: Synthetic oligonucleotide
  Antisense strand to SEQ ID NO: 2465050
ugcuccagagucuuacacu

SEQ ID NO: 2465052 - RNA, 19 nt, Artificial Sequence
  Description of Artificial Sequence: Synthetic oligonucleotide
  Sense strand starting at position 31 of SEQ ID NO: 1887343
gggaaaugugccuggaaag

SEQ ID NO: 2465053 - RNA, 19 nt, Artificial Sequence
  Description of Artificial Sequence: Synthetic oligonucleotide
  Antisense strand to SEQ ID NO: 2465052
cuuuccaggcacauuuccc

SEQ ID NO: 2465054 - RNA, 19 nt, Artificial Sequence
  Description of Artificial Sequence: Synthetic oligonucleotide
  Sense strand starting at position 32 of SEQ ID NO: 1887343
ggaaaugugccuggaaagg

SEQ ID NO: 2465055 - RNA, 19 nt, Artificial Sequence
  Description of Artificial Sequence: Synthetic oligonucleotide
  Antisense strand to SEQ ID NO: 2465054
ccuuuccaggcacauuucc

SEQ ID NO: 2465056 - RNA, 19 nt, Artificial Sequence
  Description of Artificial Sequence: Synthetic oligonucleotide
  Sense strand starting at position 74 of SEQ ID NO: 1887343
ugaaccugucauugagagu

SEQ ID NO: 2465057 - RNA, 19 nt, Artificial Sequence
  Description of Artificial Sequence: Synthetic oligonucleotide
  Antisense strand to SEQ ID NO: 2465056
acucucaaugacagguuca

SEQ ID NO: 2465058 - RNA, 19 nt, Artificial Sequence
  Description of Artificial Sequence: Synthetic oligonucleotide
  Sense strand starting at position 643 of SEQ ID NO: 1887343
gauuguccagccuggacaa

SEQ ID NO: 2465059 - RNA, 19 nt, Artificial Sequence
  Description of Artificial Sequence: Synthetic oligonucleotide
  Antisense strand to SEQ ID NO: 2465058
uuguccaggcuggacaauc

SEQ ID NO: 2465060 - RNA, 19 nt, Artificial Sequence
  Description of Artificial Sequence: Synthetic oligonucleotide
  Sense strand starting at position 688 of SEQ ID NO: 1887343
aggguaagagcucaacuuu

SEQ ID NO: 2465061 - RNA, 19 nt, Artificial Sequence
  Description of Artificial Sequence: Synthetic oligonucleotide
  Antisense strand to SEQ ID NO: 2465060
aaaguugagcucuuacccu

SEQ ID NO: 2465062 - RNA, 19 nt, Artificial Sequence
  Description of Artificial Sequence: Synthetic oligonucleotide
  Sense strand starting at position 754 of SEQ ID NO: 1887343
ggguacugccauuauguuu

SEQ ID NO: 2465063 - RNA, 19 nt, Artificial Sequence
  Description of Artificial Sequence: Synthetic oligonucleotide
  Antisense strand to SEQ ID NO: 2465062
aaacauaauggcaguaccc

SEQ ID NO: 2465064 - RNA, 19 nt, Artificial Sequence
  Description of Artificial Sequence: Synthetic oligonucleotide
  Sense strand starting at position 765 of SEQ ID NO: 1887343
uuauguuucuagcucagag

SEQ ID NO: 2465065 - RNA, 19 nt, Artificial Sequence
  Description of Artificial Sequence: Synthetic oligonucleotide
  Antisense strand to SEQ ID NO: 2465064
cucugagcuagaaacauaa

SEQ ID NO: 2465066 - RNA, 19 nt, Artificial Sequence
  Description of Artificial Sequence: Synthetic oligonucleotide
  Sense strand starting at position 767 of SEQ ID NO: 1887343
auguuucuagcucagaguu

SEQ ID NO: 2465067 - RNA, 19 nt, Artificial Sequence
  Description of Artificial Sequence: Synthetic oligonucleotide
  Antisense strand to SEQ ID NO: 2465066
aacucugagcuagaaacau

SEQ ID NO: 2465068 - RNA, 19 nt, Artificial Sequence
  Description of Artificial Sequence: Synthetic oligonucleotide
  Sense strand starting at position 797 of SEQ ID NO: 1887343
gccaaagccucaguuacua

SEQ ID NO: 2465069 - RNA, 19 nt, Artificial Sequence
  Description of Artificial Sequence: Synthetic oligonucleotide
  Antisense strand to SEQ ID NO: 2465068
uaguaacugaggcuuuggc

SEQ ID NO: 2465070 - RNA, 19 nt, Artificial Sequence
  Description of Artificial Sequence: Synthetic oligonucleotide
  Sense strand starting at position 824 of SEQ ID NO: 1887343
accuguuauccagguguca

SEQ ID NO: 2465071 - RNA, 19 nt, Artificial Sequence
  Description of Artificial Sequence: Synthetic oligonucleotide
  Antisense strand to SEQ ID NO: 2465070
ugacaccuggauaacaggu

SEQ ID NO: 2465072 - RNA, 19 nt, Artificial Sequence
  Description of Artificial Sequence: Synthetic oligonucleotide
  Sense strand starting at position 826 of SEQ ID NO: 1887343
cuguuauccaggugucaac

SEQ ID NO: 2465073 - RNA, 19 nt, Artificial Sequence
  Description of Artificial Sequence: Synthetic oligonucleotide
  Antisense strand to SEQ ID NO: 2465072
guugacaccuggauaacag

SEQ ID NO: 2465074 - RNA, 19 nt, Artificial Sequence
  Description of Artificial Sequence: Synthetic oligonucleotide
  Sense strand starting at position 874 of SEQ ID NO: 1887343
gcugcauuacgacaacaga

SEQ ID NO: 2465075 - RNA, 19 nt, Artificial Sequence
  Description of Artificial Sequence: Synthetic oligonucleotide
  Antisense strand to SEQ ID NO: 2465074
ucuguugucguaaugcagc

SEQ ID NO: 2465076 - RNA, 19 nt, Artificial Sequence
  Description of Artificial Sequence: Synthetic oligonucleotide
  Sense strand starting at position 877 of SEQ ID NO: 1887343
gcauuacgacaacagaguu

SEQ ID NO: 2465077 - RNA, 19 nt, Artificial Sequence
  Description of Artificial Sequence: Synthetic oligonucleotide
  Antisense strand to SEQ ID NO: 2465076
aacucuguugucguaaugc

SEQ ID NO: 2465078 - RNA, 19 nt, Artificial Sequence
  Description of Artificial Sequence: Synthetic oligonucleotide
  Sense strand starting at position 903 of SEQ ID NO: 1887343
acugaauuguuguuacuuc

SEQ ID NO: 2465079 - RNA, 19 nt, Artificial Sequence
  Description of Artificial Sequence: Synthetic oligonucleotide
  Antisense strand to SEQ ID NO: 2465078
gaaguaacaacaauucagu

SEQ ID NO: 2465080 - RNA, 19 nt, Artificial Sequence
  Description of Artificial Sequence: Synthetic oligonucleotide
  Sense strand starting at position 913 of SEQ ID NO: 1887343
uguuacuuccagcauuaga

SEQ ID NO: 2465081 - RNA, 19 nt, Artificial Sequence
  Description of Artificial Sequence: Synthetic oligonucleotide
  Antisense strand to SEQ ID NO: 2465080
ucuaaugcuggaaguaaca

SEQ ID NO: 2465082 - RNA, 19 nt, Artificial Sequence
  Description of Artificial Sequence: Synthetic oligonucleotide
  Sense strand starting at position 926 of SEQ ID NO: 1887343
auuagacgcaggcauuaau

SEQ ID NO: 2465083 - RNA, 19 nt, Artificial Sequence
  Description of Artificial Sequence: Synthetic oligonucleotide
  Antisense strand to SEQ ID NO: 2465082
auuaaugccugcgucuaau

SEQ ID NO: 2465084 - RNA, 19 nt, Artificial Sequence
  Description of Artificial Sequence: Synthetic oligonucleotide
  Sense strand starting at position 1155 of SEQ ID NO: 1887343
gagauuagagccugcucua

SEQ ID NO: 2465085 - RNA, 19 nt, Artificial Sequence
  Description of Artificial Sequence: Synthetic oligonucleotide
  Antisense strand to SEQ ID NO: 2465084
uagagcaggcucuaaucuc

SEQ ID NO: 2465086 - RNA, 19 nt, Artificial Sequence
  Description of Artificial Sequence: Synthetic oligonucleotide
  Sense strand starting at position 1206 of SEQ ID NO: 1887343
ggcucugagagcugaucaa

SEQ ID NO: 2465087 - RNA, 19 nt, Artificial Sequence
  Description of Artificial Sequence: Synthetic oligonucleotide
  Antisense strand to SEQ ID NO: 2465086
uugaucagcucucagagcc

SEQ ID NO: 2465088 - RNA, 19 nt, Artificial Sequence
  Description of Artificial Sequence: Synthetic oligonucleotide
  Sense strand starting at position 1247 of SEQ ID NO: 1887343
uaacacagaguuggugaau

SEQ ID NO: 2465089 - RNA, 19 nt, Artificial Sequence
  Description of Artificial Sequence: Synthetic oligonucleotide
  Antisense strand to SEQ ID NO: 2465088
auucaccaacucuguguua

SEQ ID NO: 2465090 - RNA, 19 nt, Artificial Sequence
  Description of Artificial Sequence: Synthetic oligonucleotide
  Sense strand starting at position 1467 of SEQ ID NO: 1887343
ucuuuaccucaugguguau

SEQ ID NO: 2465091 - RNA, 19 nt, Artificial Sequence
  Description of Artificial Sequence: Synthetic oligonucleotide
  Antisense strand to SEQ ID NO: 2465090
auacaccaugagguaaaga

SEQ ID NO: 2465092 - RNA, 19 nt, Artificial Sequence
  Description of Artificial Sequence: Synthetic oligonucleotide
  Sense strand starting at position 1479 of SEQ ID NO: 1887343
gguguauaccauugaagac

SEQ ID NO: 2465093 - RNA, 19 nt, Artificial Sequence
  Description of Artificial Sequence: Synthetic oligonucleotide
  Antisense strand to SEQ ID NO: 2465092
gucuucaaugguauacacc

SEQ ID NO: 2465094 - RNA, 19 nt, Artificial Sequence
  Description of Artificial Sequence: Synthetic oligonucleotide
  Sense strand starting at position 1562 of SEQ ID NO: 1887343
augggaaggcauugucaua

SEQ ID NO: 2465095 - RNA, 19 nt, Artificial Sequence
  Description of Artificial Sequence: Synthetic oligonucleotide
  Antisense strand to SEQ ID NO: 2465094
uaugacaaugccuucccau

SEQ ID NO: 2465096 - RNA, 19 nt, Artificial Sequence
  Description of Artificial Sequence: Synthetic oligonucleotide
  Sense strand starting at position 1598 of SEQ ID NO: 1887343
uaaugcaggugggauuuau

SEQ ID NO: 2465097 - RNA, 19 nt, Artificial Sequence
  Description of Artificial Sequence: Synthetic oligonucleotide
  Antisense strand to SEQ ID NO: 2465096
auaaaucccaccugcauua

SEQ ID NO: 2465098 - RNA, 19 nt, Artificial Sequence
  Description of Artificial Sequence: Synthetic oligonucleotide
  Sense strand starting at position 1865 of SEQ ID NO: 1887343
cgaauaauagauuaagugu

SEQ ID NO: 2465099 - RNA, 19 nt, Artificial Sequence
  Description of Artificial Sequence: Synthetic oligonucleotide
  Antisense strand to SEQ ID NO: 2465098
acacuuaaucuauuauucg

SEQ ID NO: 2465100 - RNA, 19 nt, Artificial Sequence
  Description of Artificial Sequence: Synthetic oligonucleotide
  Sense strand starting at position 1878 of SEQ ID NO: 1887343
aaguguuaauacuuacgca

SEQ ID NO: 2465101 - RNA, 19 nt, Artificial Sequence
  Description of Artificial Sequence: Synthetic oligonucleotide
  Antisense strand to SEQ ID NO: 2465100
ugcguaaguauuaacacuu

SEQ ID NO: 2465102 - RNA, 19 nt, Artificial Sequence
  Description of Artificial Sequence: Synthetic oligonucleotide
  Sense strand starting at position 1882 of SEQ ID NO: 1887343
guuaauacuuacgcagaga

SEQ ID NO: 2465103 - RNA, 19 nt, Artificial Sequence
  Description of Artificial Sequence: Synthetic oligonucleotide
  Antisense strand to SEQ ID NO: 2465102
ucucugcguaaguauuaac

SEQ ID NO: 2465104 - RNA, 19 nt, Artificial Sequence
  Description of Artificial Sequence: Synthetic oligonucleotide
  Sense strand starting at position 2106 of SEQ ID NO: 1887343
gcauaugauuaucugccaa

SEQ ID NO: 2465105 - RNA, 19 nt, Artificial Sequence
  Description of Artificial Sequence: Synthetic oligonucleotide
  Antisense strand to SEQ ID NO: 2465104
uuggcagauaaucauaugc

SEQ ID NO: 2465106 - RNA, 19 nt, Artificial Sequence
  Description of Artificial Sequence: Synthetic oligonucleotide
  Sense strand starting at position 2108 of SEQ ID NO: 1887343
auaugauuaucugccaaag

SEQ ID NO: 2465107 - RNA, 19 nt, Artificial Sequence
  Description of Artificial Sequence: Synthetic oligonucleotide
  Antisense strand to SEQ ID NO: 2465106
cuuuggcagauaaucauau

SEQ ID NO: 2465108 - RNA, 19 nt, Artificial Sequence
  Description of Artificial Sequence: Synthetic oligonucleotide
  Sense strand starting at position 2202 of SEQ ID NO: 1887343
guggaaagagugugagcaa

SEQ ID NO: 2465109 - RNA, 19 nt, Artificial Sequence
  Description of Artificial Sequence: Synthetic oligonucleotide
  Antisense strand to SEQ ID NO: 2465108
uugcucacacucuuuccac

SEQ ID NO: 2465110 - RNA, 19 nt, Artificial Sequence
  Description of Artificial Sequence: Synthetic oligonucleotide
  Sense strand starting at position 2277 of SEQ ID NO: 1887343
aacuuugaagagugucagu

SEQ ID NO: 2465111 - RNA, 19 nt, Artificial Sequence
  Description of Artificial Sequence: Synthetic oligonucleotide
  Antisense strand to SEQ ID NO: 2465110
acugacacucuucaaaguu

SEQ ID NO: 2465112 - RNA, 19 nt, Artificial Sequence
  Description of Artificial Sequence: Synthetic oligonucleotide
  Sense strand starting at position 2282 of SEQ ID NO: 1887343
ugaagagugucaguuuccu

SEQ ID NO: 2465113 - RNA, 19 nt, Artificial Sequence
  Description of Artificial Sequence: Synthetic oligonucleotide
  Antisense strand to SEQ ID NO: 2465112
aggaaacugacacucuuca

SEQ ID NO: 2465114 - RNA, 19 nt, Artificial Sequence
  Description of Artificial Sequence: Synthetic oligonucleotide
  Sense strand starting at position 2404 of SEQ ID NO: 1887343
auauaagguguuugauaag

SEQ ID NO: 2465115 - RNA, 19 nt, Artificial Sequence
  Description of Artificial Sequence: Synthetic oligonucleotide
  Antisense strand to SEQ ID NO: 2465114
cuuaucaaacaccuuauau

SEQ ID NO: 2465116 - RNA, 19 nt, Artificial Sequence
  Description of Artificial Sequence: Synthetic oligonucleotide
  Sense strand starting at position 2410 of SEQ ID NO: 1887343
gguguuugauaaguacauc

SEQ ID NO: 2465117 - RNA, 19 nt, Artificial Sequence
  Description of Artificial Sequence: Synthetic oligonucleotide
  Antisense strand to SEQ ID NO: 2465116
gauguacuuaucaaacacc

SEQ ID NO: 2465118 - RNA, 19 nt, Artificial Sequence
  Description of Artificial Sequence: Synthetic oligonucleotide
  Sense strand starting at position 2411 of SEQ ID NO: 1887343
guguuugauaaguacaucu

SEQ ID NO: 2465119 - RNA, 19 nt, Artificial Sequence
  Description of Artificial Sequence: Synthetic oligonucleotide
  Antisense strand to SEQ ID NO: 2465118
agauguacuuaucaaacac

SEQ ID NO: 2465120 - RNA, 19 nt, Artificial Sequence
  Description of Artificial Sequence: Synthetic oligonucleotide
  Sense strand starting at position 2413 of SEQ ID NO: 1887343
guuugauaaguacaucuuu

SEQ ID NO: 2465121 - RNA, 19 nt, Artificial Sequence
  Description of Artificial Sequence: Synthetic oligonucleotide
  Antisense strand to SEQ ID NO: 2465120
aaagauguacuuaucaaac

SEQ ID NO: 2465122 - RNA, 19 nt, Artificial Sequence
  Description of Artificial Sequence: Synthetic oligonucleotide
  Sense strand starting at position 2917 of SEQ ID NO: 1887343
uugugaaaugacugaauca

SEQ ID NO: 2465123 - RNA, 19 nt, Artificial Sequence
  Description of Artificial Sequence: Synthetic oligonucleotide
  Antisense strand to SEQ ID NO: 2465122
ugauucagucauuucacaa

SEQ ID NO: 2465124 - RNA, 19 nt, Artificial Sequence
  Description of Artificial Sequence: Synthetic oligonucleotide
  Sense strand starting at position 2933 of SEQ ID NO: 1887343
ucaagcuguuaauuagaga

SEQ ID NO: 2465125 - RNA, 19 nt, Artificial Sequence
  Description of Artificial Sequence: Synthetic oligonucleotide
  Antisense strand to SEQ ID NO: 2465124
ucucuaauuaacagcuuga

SEQ ID NO: 2465126 - RNA, 19 nt, Artificial Sequence
  Description of Artificial Sequence: Synthetic oligonucleotide
  Sense strand starting at position 2965 of SEQ ID NO: 1887343
gauguucuagauuguguag

SEQ ID NO: 2465127 - RNA, 19 nt, Artificial Sequence
  Description of Artificial Sequence: Synthetic oligonucleotide
  Antisense strand to SEQ ID NO: 2465126
cuacacaaucuagaacauc

SEQ ID NO: 2465128 - RNA, 19 nt, Artificial Sequence
  Description of Artificial Sequence: Synthetic oligonucleotide
  Sense strand starting at position 2968 of SEQ ID NO: 1887343
guucuagauuguguagauu

SEQ ID NO: 2465129 - RNA, 19 nt, Artificial Sequence
  Description of Artificial Sequence: Synthetic oligonucleotide
  Antisense strand to SEQ ID NO: 2465128
aaucuacacaaucuagaac

SEQ ID NO: 2465130 - RNA, 19 nt, Artificial Sequence
  Description of Artificial Sequence: Synthetic oligonucleotide
  Sense strand starting at position 20 of SEQ ID NO: 1887344
ccaggaugugccuagcuga

SEQ ID NO: 2465131 - RNA, 19 nt, Artificial Sequence
  Description of Artificial Sequence: Synthetic oligonucleotide
  Antisense strand to SEQ ID NO: 2465130
ucagcuaggcacauccugg

SEQ ID NO: 2465132 - RNA, 19 nt, Artificial Sequence
  Description of Artificial Sequence: Synthetic oligonucleotide
  Sense strand starting at position 565 of SEQ ID NO: 1887344
ggcaaauaauagguaugau

SEQ ID NO: 2465133 - RNA, 19 nt, Artificial Sequence
  Description of Artificial Sequence: Synthetic oligonucleotide
  Antisense strand to SEQ ID NO: 2465132
aucauaccuauuauuugcc

SEQ ID NO: 2465134 - RNA, 19 nt, Artificial Sequence
  Description of Artificial Sequence: Synthetic oligonucleotide
  Sense strand starting at position 774 of SEQ ID NO: 1887344
aaucuuaagguauguaaag

SEQ ID NO: 2465135 - RNA, 19 nt, Artificial Sequence
  Description of Artificial Sequence: Synthetic oligonucleotide
  Antisense strand to SEQ ID NO: 2465134
cuuuacauaccuuaagauu

SEQ ID NO: 2465136 - RNA, 19 nt, Artificial Sequence
  Description of Artificial Sequence: Synthetic oligonucleotide
  Sense strand starting at position 775 of SEQ ID NO: 1887344
aucuuaagguauguaaaga

SEQ ID NO: 2465137 - RNA, 19 nt, Artificial Sequence
  Description of Artificial Sequence: Synthetic oligonucleotide
  Antisense strand to SEQ ID NO: 2465136
ucuuuacauaccuuaagau

SEQ ID NO: 2465138 - RNA, 19 nt, Artificial Sequence
  Description of Artificial Sequence: Synthetic oligonucleotide
  Sense strand starting at position 1039 of SEQ ID NO: 1887344
aacgauggaguucguaaga

SEQ ID NO: 2465139 - RNA, 19 nt, Artificial Sequence
  Description of Artificial Sequence: Synthetic oligonucleotide
  Antisense strand to SEQ ID NO: 2465138
ucuuacgaacuccaucguu

SEQ ID NO: 2465140 - RNA, 19 nt, Artificial Sequence
  Description of Artificial Sequence: Synthetic oligonucleotide
  Sense strand starting at position 1048 of SEQ ID NO: 1887344
guucguaagacugaaagga

SEQ ID NO: 2465141 - RNA, 19 nt, Artificial Sequence
  Description of Artificial Sequence: Synthetic oligonucleotide
  Antisense strand to SEQ ID NO: 2465140
uccuuucagucuuacgaac

SEQ ID NO: 2465142 - RNA, 19 nt, Artificial Sequence
  Description of Artificial Sequence: Synthetic oligonucleotide
  Sense strand starting at position 1080 of SEQ ID NO: 1887344
auagaaacgucuccaguag

SEQ ID NO: 2465143 - RNA, 19 nt, Artificial Sequence
  Description of Artificial Sequence: Synthetic oligonucleotide
  Antisense strand to SEQ ID NO: 2465142
cuacuggagacguuucuau

SEQ ID NO: 2465144 - RNA, 19 nt, Artificial Sequence
  Description of Artificial Sequence: Synthetic oligonucleotide
  Sense strand starting at position 1084 of SEQ ID NO: 1887344
aaacgucuccaguagguaa

SEQ ID NO: 2465145 - RNA, 19 nt, Artificial Sequence
  Description of Artificial Sequence: Synthetic oligonucleotide
  Antisense strand to SEQ ID NO: 2465144
uuaccuacuggagacguuu

SEQ ID NO: 2465146 - RNA, 19 nt, Artificial Sequence
  Description of Artificial Sequence: Synthetic oligonucleotide
  Sense strand starting at position 1088 of SEQ ID NO: 1887344
gucuccaguagguaaaguu

SEQ ID NO: 2465147 - RNA, 19 nt, Artificial Sequence
  Description of Artificial Sequence: Synthetic oligonucleotide
  Antisense strand to SEQ ID NO: 2465146
aacuuuaccuacuggagac

SEQ ID NO: 2465148 - RNA, 19 nt, Artificial Sequence
  Description of Artificial Sequence: Synthetic oligonucleotide
  Sense strand starting at position 1105 of SEQ ID NO: 1887344
uuguuuccugaaggaauau

SEQ ID NO: 2465149 - RNA, 19 nt, Artificial Sequence
  Description of Artificial Sequence: Synthetic oligonucleotide
  Antisense strand to SEQ ID NO: 2465148
auauuccuucaggaaacaa

SEQ ID NO: 2465150 - RNA, 19 nt, Artificial Sequence
  Description of Artificial Sequence: Synthetic oligonucleotide
  Sense strand starting at position 1111 of SEQ ID NO: 1887344
ccugaaggaauauguguua

SEQ ID NO: 2465151 - RNA, 19 nt, Artificial Sequence
  Description of Artificial Sequence: Synthetic oligonucleotide
  Antisense strand to SEQ ID NO: 2465150
uaacacauauuccuucagg

SEQ ID NO: 2465152 - RNA, 19 nt, Artificial Sequence
  Description of Artificial Sequence: Synthetic oligonucleotide
  Sense strand starting at position 1114 of SEQ ID NO: 1887344
gaaggaauauguguuaauu

SEQ ID NO: 2465153 - RNA, 19 nt, Artificial Sequence
  Description of Artificial Sequence: Synthetic oligonucleotide
  Antisense strand to SEQ ID NO: 2465152
aauuaacacauauuccuuc

SEQ ID NO: 2465154 - RNA, 19 nt, Artificial Sequence
  Description of Artificial Sequence: Synthetic oligonucleotide
  Sense strand starting at position 1210 of SEQ ID NO: 1887344
uuuauagugggagguuaca

SEQ ID NO: 2465155 - RNA, 19 nt, Artificial Sequence
  Description of Artificial Sequence: Synthetic oligonucleotide
  Antisense strand to SEQ ID NO: 2465154
uguaaccucccacuauaaa

SEQ ID NO: 2465156 - RNA, 19 nt, Artificial Sequence
  Description of Artificial Sequence: Synthetic oligonucleotide
  Sense strand starting at position 1439 of SEQ ID NO: 1887344
uugauauaaucagcagagu

SEQ ID NO: 2465157 - RNA, 19 nt, Artificial Sequence
  Description of Artificial Sequence: Synthetic oligonucleotide
  Antisense strand to SEQ ID NO: 2465156
acucugcugauuauaucaa

SEQ ID NO: 2465158 - RNA, 19 nt, Artificial Sequence
  Description of Artificial Sequence: Synthetic oligonucleotide
  Sense strand starting at position 1445 of SEQ ID NO: 1887344
uaaucagcagagugauaga

SEQ ID NO: 2465159 - RNA, 19 nt, Artificial Sequence
  Description of Artificial Sequence: Synthetic oligonucleotide
  Antisense strand to SEQ ID NO: 2465158
ucuaucacucugcugauua

SEQ ID NO: 2465160 - RNA, 19 nt, Artificial Sequence
  Description of Artificial Sequence: Synthetic oligonucleotide
  Sense strand starting at position 1456 of SEQ ID NO: 1887344
gugauagaauaagcaaauu

SEQ ID NO: 2465161 - RNA, 19 nt, Artificial Sequence
  Description of Artificial Sequence: Synthetic oligonucleotide
  Antisense strand to SEQ ID NO: 2465160
aauuugcuuauucuaucac

SEQ ID NO: 2465162 - RNA, 19 nt, Artificial Sequence
  Description of Artificial Sequence: Synthetic oligonucleotide
  Sense strand starting at position 1836 of SEQ ID NO: 1887344
gugcauccuccuuaccaga

SEQ ID NO: 2465163 - RNA, 19 nt, Artificial Sequence
  Description of Artificial Sequence: Synthetic oligonucleotide
  Antisense strand to SEQ ID NO: 2465162
ucugguaaggaggaugcac

SEQ ID NO: 2465164 - RNA, 19 nt, Artificial Sequence
  Description of Artificial Sequence: Synthetic oligonucleotide
  Sense strand starting at position 1988 of SEQ ID NO: 1887344
uggcucuuucuguaacaag

SEQ ID NO: 2465165 - RNA, 19 nt, Artificial Sequence
  Description of Artificial Sequence: Synthetic oligonucleotide
  Antisense strand to SEQ ID NO: 2465164
cuuguuacagaaagagcca

SEQ ID NO: 2465166 - RNA, 19 nt, Artificial Sequence
  Description of Artificial Sequence: Synthetic oligonucleotide
  Sense strand starting at position 2192 of SEQ ID NO: 1887344
gggacuuggugaucauugu

SEQ ID NO: 2465167 - RNA, 19 nt, Artificial Sequence
  Description of Artificial Sequence: Synthetic oligonucleotide
  Antisense strand to SEQ ID NO: 2465166
acaaugaucaccaaguccc

SEQ ID NO: 2465168 - RNA, 19 nt, Artificial Sequence
  Description of Artificial Sequence: Synthetic oligonucleotide
  Sense strand starting at position 2387 of SEQ ID NO: 1887344
gcugaagagaauugcagaa

SEQ ID NO: 2465169 - RNA, 19 nt, Artificial Sequence
  Description of Artificial Sequence: Synthetic oligonucleotide
  Antisense strand to SEQ ID NO: 2465168
uucugcaauucucuucagc

SEQ ID NO: 2465170 - RNA, 19 nt, Artificial Sequence
  Description of Artificial Sequence: Synthetic oligonucleotide
  Sense strand starting at position 2399 of SEQ ID NO: 1887344
ugcagaauaccaggcaaau

SEQ ID NO: 2465171 - RNA, 19 nt, Artificial Sequence
  Description of Artificial Sequence: Synthetic oligonucleotide
  Antisense strand to SEQ ID NO: 2465170
auuugccugguauucugca

SEQ ID NO: 2465172 - RNA, 19 nt, Artificial Sequence
  Description of Artificial Sequence: Synthetic oligonucleotide
  Sense strand starting at position 2552 of SEQ ID NO: 1887344
aaguguacauagguuaauu

SEQ ID NO: 2465173 - RNA, 19 nt, Artificial Sequence
  Description of Artificial Sequence: Synthetic oligonucleotide
  Antisense strand to SEQ ID NO: 2465172
aauuaaccuauguacacuu

SEQ ID NO: 2465174 - RNA, 19 nt, Artificial Sequence
  Description of Artificial Sequence: Synthetic oligonucleotide
  Sense strand starting at position 3020 of SEQ ID NO: 1887344
auguacuuguaaucuugaa

SEQ ID NO: 2465175 - RNA, 19 nt, Artificial Sequence
  Description of Artificial Sequence: Synthetic oligonucleotide
  Antisense strand to SEQ ID NO: 2465174
uucaagauuacaaguacau

SEQ ID NO: 2465176 - RNA, 19 nt, Artificial Sequence
  Description of Artificial Sequence: Synthetic oligonucleotide
  Sense strand starting at position 3049 of SEQ ID NO: 1887344
auggauguuauggguuaag

SEQ ID NO: 2465177 - RNA, 19 nt, Artificial Sequence
  Description of Artificial Sequence: Synthetic oligonucleotide
  Antisense strand to SEQ ID NO: 2465176
cuuaacccauaacauccau

SEQ ID NO: 2465178 - RNA, 19 nt, Artificial Sequence
  Description of Artificial Sequence: Synthetic oligonucleotide
  Sense strand starting at position 3052 of SEQ ID NO: 1887344
gauguuauggguuaaguau

SEQ ID NO: 2465179 - RNA, 19 nt, Artificial Sequence
  Description of Artificial Sequence: Synthetic oligonucleotide
  Antisense strand to SEQ ID NO: 2465178
auacuuaacccauaacauc

SEQ ID NO: 2465180 - RNA, 19 nt, Artificial Sequence
  Description of Artificial Sequence: Synthetic oligonucleotide
  Sense strand starting at position 3058 of SEQ ID NO: 1887344
auggguuaaguauaaugca

SEQ ID NO: 2465181 - RNA, 19 nt, Artificial Sequence
  Description of Artificial Sequence: Synthetic oligonucleotide
  Antisense strand to SEQ ID NO: 2465180
ugcauuauacuuaacccau

SEQ ID NO: 2465182 - RNA, 19 nt, Artificial Sequence
  Description of Artificial Sequence: Synthetic oligonucleotide
  Sense strand starting at position 3200 of SEQ ID NO: 1887344
guuguaauuucccuucuuc

SEQ ID NO: 2465183 - RNA, 19 nt, Artificial Sequence
  Description of Artificial Sequence: Synthetic oligonucleotide
  Antisense strand to SEQ ID NO: 2465182
gaagaagggaaauuacaac

SEQ ID NO: 2465184 - RNA, 19 nt, Artificial Sequence
  Description of Artificial Sequence: Synthetic oligonucleotide
  Sense strand starting at position 3407 of SEQ ID NO: 1887344
cguaauaugauggguuuga

SEQ ID NO: 2465185 - RNA, 19 nt, Artificial Sequence
  Description of Artificial Sequence: Synthetic oligonucleotide
  Antisense strand to SEQ ID NO: 2465184
ucaaacccaucauauuacg

SEQ ID NO: 2465186 - RNA, 19 nt, Artificial Sequence
  Description of Artificial Sequence: Synthetic oligonucleotide
  Sense strand starting at position 3408 of SEQ ID NO: 1887344
guaauaugauggguuugag

SEQ ID NO: 2465187 - RNA, 19 nt, Artificial Sequence
  Description of Artificial Sequence: Synthetic oligonucleotide
  Antisense strand to SEQ ID NO: 2465186
cucaaacccaucauauuac

SEQ ID NO: 2465188 - RNA, 19 nt, Artificial Sequence
  Description of Artificial Sequence: Synthetic oligonucleotide
  Sense strand starting at position 3494 of SEQ ID NO: 1887344
ucagauacauuggugguau

SEQ ID NO: 2465189 - RNA, 19 nt, Artificial Sequence
  Description of Artificial Sequence: Synthetic oligonucleotide
  Antisense strand to SEQ ID NO: 2465188
auaccaccaauguaucuga

SEQ ID NO: 2465190 - RNA, 19 nt, Artificial Sequence
  Description of Artificial Sequence: Synthetic oligonucleotide
  Sense strand starting at position 3505 of SEQ ID NO: 1887344
ggugguaugccugcauugu

SEQ ID NO: 2465191 - RNA, 19 nt, Artificial Sequence
  Description of Artificial Sequence: Synthetic oligonucleotide
  Antisense strand to SEQ ID NO: 2465190
acaaugcaggcauaccacc

SEQ ID NO: 2465192 - RNA, 19 nt, Artificial Sequence
  Description of Artificial Sequence: Synthetic oligonucleotide
  Sense strand starting at position 3557 of SEQ ID NO: 1887344
gggaaaugcuauguguaca

SEQ ID NO: 2465193 - RNA, 19 nt, Artificial Sequence
  Description of Artificial Sequence: Synthetic oligonucleotide
  Antisense strand to SEQ ID NO: 2465192
uguacacauagcauuuccc

SEQ ID NO: 2465194 - RNA, 19 nt, Artificial Sequence
  Description of Artificial Sequence: Synthetic oligonucleotide
  Sense strand starting at position 3609 of SEQ ID NO: 1887344
ggcuauucccauuaaguaa

SEQ ID NO: 2465195 - RNA, 19 nt, Artificial Sequence
  Description of Artificial Sequence: Synthetic oligonucleotide
  Antisense strand to SEQ ID NO: 2465194
uuacuuaaugggaauagcc

SEQ ID NO: 2465196 - RNA, 19 nt, Artificial Sequence
  Description of Artificial Sequence: Synthetic oligonucleotide
  Sense strand starting at position 3675 of SEQ ID NO: 1887344
cauuucuccuguguuacga

SEQ ID NO: 2465197 - RNA, 19 nt, Artificial Sequence
  Description of Artificial Sequence: Synthetic oligonucleotide
  Antisense strand to SEQ ID NO: 2465196
ucguaacacaggagaaaug

SEQ ID NO: 2465198 - RNA, 19 nt, Artificial Sequence
  Description of Artificial Sequence: Synthetic oligonucleotide
  Sense strand starting at position 3782 of SEQ ID NO: 1887344
uggaauacauuaucaaguu

SEQ ID NO: 2465199 - RNA, 19 nt, Artificial Sequence
  Description of Artificial Sequence: Synthetic oligonucleotide
  Antisense strand to SEQ ID NO: 2465198
aacuugauaauguauucca

SEQ ID NO: 2465200 - RNA, 19 nt, Artificial Sequence
  Description of Artificial Sequence: Synthetic oligonucleotide
  Sense strand starting at position 3811 of SEQ ID NO: 1887344
aucgucugacauugaccaa

SEQ ID NO: 2465201 - RNA, 19 nt, Artificial Sequence
  Description of Artificial Sequence: Synthetic oligonucleotide
  Antisense strand to SEQ ID NO: 2465200
uuggucaaugucagacgau

SEQ ID NO: 2465202 - RNA, 19 nt, Artificial Sequence
  Description of Artificial Sequence: Synthetic oligonucleotide
  Sense strand starting at position 3862 of SEQ ID NO: 1887344
ccugaaauccugcaugcag

SEQ ID NO: 2465203 - RNA, 19 nt, Artificial Sequence
  Description of Artificial Sequence: Synthetic oligonucleotide
  Antisense strand to SEQ ID NO: 2465202
cugcaugcaggauuucagg

SEQ ID NO: 2465204 - RNA, 19 nt, Artificial Sequence
  Description of Artificial Sequence: Synthetic oligonucleotide
  Sense strand starting at position 3899 of SEQ ID NO: 1887344
gaggaugcacuuuguuuga

SEQ ID NO: 2465205 - RNA, 19 nt, Artificial Sequence
  Description of Artificial Sequence: Synthetic oligonucleotide
  Antisense strand to SEQ ID NO: 2465204
ucaaacaaagugcauccuc

SEQ ID NO: 2465206 - RNA, 19 nt, Artificial Sequence
  Description of Artificial Sequence: Synthetic oligonucleotide
  Sense strand starting at position 3901 of SEQ ID NO: 1887344
ggaugcacuuuguuugaaa

SEQ ID NO: 2465207 - RNA, 19 nt, Artificial Sequence
  Description of Artificial Sequence: Synthetic oligonucleotide
  Antisense strand to SEQ ID NO: 2465206
uuucaaacaaagugcaucc

SEQ ID NO: 2465208 - RNA, 19 nt, Artificial Sequence
  Description of Artificial Sequence: Synthetic oligonucleotide
  Sense strand starting at position 3902 of SEQ ID NO: 1887344
gaugcacuuuguuugaaag

SEQ ID NO: 2465209 - RNA, 19 nt, Artificial Sequence
  Description of Artificial Sequence: Synthetic oligonucleotide
  Antisense strand to SEQ ID NO: 2465208
cuuucaaacaaagugcauc

SEQ ID NO: 2465210 - RNA, 19 nt, Artificial Sequence
  Description of Artificial Sequence: Synthetic oligonucleotide
  Sense strand starting at position 100 of SEQ ID NO: 1887345
uuguaagaagcucauugaa

SEQ ID NO: 2465211 - RNA, 19 nt, Artificial Sequence
  Description of Artificial Sequence: Synthetic oligonucleotide
  Antisense strand to SEQ ID NO: 2465210
uucaaugagcuucuuacaa

SEQ ID NO: 2465212 - RNA, 19 nt, Artificial Sequence
  Description of Artificial Sequence: Synthetic oligonucleotide
  Sense strand starting at position 102 of SEQ ID NO: 1887345
guaagaagcucauugaaga

SEQ ID NO: 2465213 - RNA, 19 nt, Artificial Sequence
  Description of Artificial Sequence: Synthetic oligonucleotide
  Antisense strand to SEQ ID NO: 2465212
ucuucaaugagcuucuuac

SEQ ID NO: 2465214 - RNA, 19 nt, Artificial Sequence
  Description of Artificial Sequence: Synthetic oligonucleotide
  Sense strand starting at position 228 of SEQ ID NO: 1887345
ggccauucucuggacacau

SEQ ID NO: 2465215 - RNA, 19 nt, Artificial Sequence
  Description of Artificial Sequence: Synthetic oligonucleotide
  Antisense strand to SEQ ID NO: 2465214
auguguccagagaauggcc

SEQ ID NO: 2465216 - RNA, 19 nt, Artificial Sequence
  Description of Artificial Sequence: Synthetic oligonucleotide
  Sense strand starting at position 319 of SEQ ID NO: 1887345
ccucacgucugauccuaaa

SEQ ID NO: 2465217 - RNA, 19 nt, Artificial Sequence
  Description of Artificial Sequence: Synthetic oligonucleotide
  Antisense strand to SEQ ID NO: 2465216
uuuaggaucagacgugagg

SEQ ID NO: 2465218 - RNA, 19 nt, Artificial Sequence
  Description of Artificial Sequence: Synthetic oligonucleotide
  Sense strand starting at position 414 of SEQ ID NO: 1887345
uggcucuuccaagauuaaa

SEQ ID NO: 2465219 - RNA, 19 nt, Artificial Sequence
  Description of Artificial Sequence: Synthetic oligonucleotide
  Antisense strand to SEQ ID NO: 2465218
uuuaaucuuggaagagcca

SEQ ID NO: 2465220 - RNA, 19 nt, Artificial Sequence
  Description of Artificial Sequence: Synthetic oligonucleotide
  Sense strand starting at position 771 of SEQ ID NO: 1887345
cuucccagguuucuauaga

SEQ ID NO: 2465221 - RNA, 19 nt, Artificial Sequence
  Description of Artificial Sequence: Synthetic oligonucleotide
  Antisense strand to SEQ ID NO: 2465220
ucuauagaaaccugggaag

SEQ ID NO: 2465222 - RNA, 19 nt, Artificial Sequence
  Description of Artificial Sequence: Synthetic oligonucleotide
  Sense strand starting at position 836 of SEQ ID NO: 1887345
gcccauuacucagcggcaa

SEQ ID NO: 2465223 - RNA, 19 nt, Artificial Sequence
  Description of Artificial Sequence: Synthetic oligonucleotide
  Antisense strand to SEQ ID NO: 2465222
uugccgcugaguaaugggc

SEQ ID NO: 2465224 - RNA, 19 nt, Artificial Sequence
  Description of Artificial Sequence: Synthetic oligonucleotide
  Sense strand starting at position 837 of SEQ ID NO: 1887345
cccauuacucagcggcaaa

SEQ ID NO: 2465225 - RNA, 19 nt, Artificial Sequence
  Description of Artificial Sequence: Synthetic oligonucleotide
  Antisense strand to SEQ ID NO: 2465224
uuugccgcugaguaauggg

SEQ ID NO: 2465226 - RNA, 19 nt, Artificial Sequence
  Description of Artificial Sequence: Synthetic oligonucleotide
  Sense strand starting at position 1161 of SEQ ID NO: 1887345
gcguguuugggacauuuca

SEQ ID NO: 2465227 - RNA, 19 nt, Artificial Sequence
  Description of Artificial Sequence: Synthetic oligonucleotide
  Antisense strand to SEQ ID NO: 2465226
ugaaaugucccaaacacgc

SEQ ID NO: 2465228 - RNA, 19 nt, Artificial Sequence
  Description of Artificial Sequence: Synthetic oligonucleotide
  Sense strand starting at position 1194 of SEQ ID NO: 1887345
uacacuauguguucuugga

SEQ ID NO: 2465229 - RNA, 19 nt, Artificial Sequence
  Description of Artificial Sequence: Synthetic oligonucleotide
  Antisense strand to SEQ ID NO: 2465228
uccaagaacacauagugua

SEQ ID NO: 2465230 - RNA, 19 nt, Artificial Sequence
  Description of Artificial Sequence: Synthetic oligonucleotide
  Sense strand starting at position 1196 of SEQ ID NO: 1887345
cacuauguguucuuggaag

SEQ ID NO: 2465231 - RNA, 19 nt, Artificial Sequence
  Description of Artificial Sequence: Synthetic oligonucleotide
  Antisense strand to SEQ ID NO: 2465230
cuuccaagaacacauagug

SEQ ID NO: 2465232 - RNA, 19 nt, Artificial Sequence
  Description of Artificial Sequence: Synthetic oligonucleotide
  Sense strand starting at position 1233 of SEQ ID NO: 1887345
acaaacaguuguguuauga

SEQ ID NO: 2465233 - RNA, 19 nt, Artificial Sequence
  Description of Artificial Sequence: Synthetic oligonucleotide
  Antisense strand to SEQ ID NO: 2465232
ucauaacacaacuguuugu

SEQ ID NO: 2465234 - RNA, 19 nt, Artificial Sequence
  Description of Artificial Sequence: Synthetic oligonucleotide
  Sense strand starting at position 1301 of SEQ ID NO: 1887345
agaaaucucccaugugucu

SEQ ID NO: 2465235 - RNA, 19 nt, Artificial Sequence
  Description of Artificial Sequence: Synthetic oligonucleotide
  Antisense strand to SEQ ID NO: 2465234
agacacaugggagauuucu

SEQ ID NO: 2465236 - RNA, 19 nt, Artificial Sequence
  Description of Artificial Sequence: Synthetic oligonucleotide
  Sense strand starting at position 1382 of SEQ ID NO: 1887345
gggccacuugguggaaauu

SEQ ID NO: 2465237 - RNA, 19 nt, Artificial Sequence
  Description of Artificial Sequence: Synthetic oligonucleotide
  Antisense strand to SEQ ID NO: 2465236
aauuuccaccaaguggccc

SEQ ID NO: 2465238 - RNA, 19 nt, Artificial Sequence
  Description of Artificial Sequence: Synthetic oligonucleotide
  Sense strand starting at position 1572 of SEQ ID NO: 1887345
ggucuacauuuagaauaac

SEQ ID NO: 2465239 - RNA, 19 nt, Artificial Sequence
  Description of Artificial Sequence: Synthetic oligonucleotide
  Antisense strand to SEQ ID NO: 2465238
guuauucuaaauguagacc

SEQ ID NO: 2465240 - RNA, 19 nt, Artificial Sequence
  Description of Artificial Sequence: Synthetic oligonucleotide
  Sense strand starting at position 1603 of SEQ ID NO: 1887345
agagaaugaucccacuauu

SEQ ID NO: 2465241 - RNA, 19 nt, Artificial Sequence
  Description of Artificial Sequence: Synthetic oligonucleotide
  Antisense strand to SEQ ID NO: 2465240
aauagugggaucauucucu

SEQ ID NO: 2465242 - RNA, 19 nt, Artificial Sequence
  Description of Artificial Sequence: Synthetic oligonucleotide
  Sense strand starting at position 1624 of SEQ ID NO: 1887345
agauuuccaugugaaagaa

SEQ ID NO: 2465243 - RNA, 19 nt, Artificial Sequence
  Description of Artificial Sequence: Synthetic oligonucleotide
  Antisense strand to SEQ ID NO: 2465242
uucuuucacauggaaaucu

SEQ ID NO: 2465244 - RNA, 19 nt, Artificial Sequence
  Description of Artificial Sequence: Synthetic oligonucleotide
  Sense strand starting at position 1995 of SEQ ID NO: 1887345
acugcucacuaaggaauuu

SEQ ID NO: 2465245 - RNA, 19 nt, Artificial Sequence
  Description of Artificial Sequence: Synthetic oligonucleotide
  Antisense strand to SEQ ID NO: 2465244
aaauuccuuagugagcagu

SEQ ID NO: 2465246 - RNA, 19 nt, Artificial Sequence
  Description of Artificial Sequence: Synthetic oligonucleotide
  Sense strand starting at position 2020 of SEQ ID NO: 1887345
gaagaacugugaguggguu

SEQ ID NO: 2465247 - RNA, 19 nt, Artificial Sequence
  Description of Artificial Sequence: Synthetic oligonucleotide
  Antisense strand to SEQ ID NO: 2465246
aacccacucacaguucuuc

SEQ ID NO: 2465248 - RNA, 19 nt, Artificial Sequence
  Description of Artificial Sequence: Synthetic oligonucleotide
  Sense strand starting at position 2106 of SEQ ID NO: 1887345
auuugaccuucccagaagu

SEQ ID NO: 2465249 - RNA, 19 nt, Artificial Sequence
  Description of Artificial Sequence: Synthetic oligonucleotide
  Antisense strand to SEQ ID NO: 2465248
acuucugggaaggucaaau

SEQ ID NO: 2465250 - RNA, 19 nt, Artificial Sequence
  Description of Artificial Sequence: Synthetic oligonucleotide
  Sense strand starting at position 2189 of SEQ ID NO: 1887345
cccagcacuuagguagaau

SEQ ID NO: 2465251 - RNA, 19 nt, Artificial Sequence
  Description of Artificial Sequence: Synthetic oligonucleotide
  Antisense strand to SEQ ID NO: 2465250
auucuaccuaagugcuggg

SEQ ID NO: 2465252 - RNA, 19 nt, Artificial Sequence
  Description of Artificial Sequence: Synthetic oligonucleotide
  Sense strand starting at position 2442 of SEQ ID NO: 1887345
augcuugugcuggaggaga

SEQ ID NO: 2465253 - RNA, 19 nt, Artificial Sequence
  Description of Artificial Sequence: Synthetic oligonucleotide
  Antisense strand to SEQ ID NO: 2465252
ucuccuccagcacaagcau

SEQ ID NO: 2465254 - RNA, 19 nt, Artificial Sequence
  Description of Artificial Sequence: Synthetic oligonucleotide
  Sense strand starting at position 2474 of SEQ ID NO: 1887345
ccuuguucuuccuuuguau

SEQ ID NO: 2465255 - RNA, 19 nt, Artificial Sequence
  Description of Artificial Sequence: Synthetic oligonucleotide
  Antisense strand to SEQ ID NO: 2465254
auacaaaggaagaacaagg

SEQ ID NO: 2465256 - RNA, 19 nt, Artificial Sequence
  Description of Artificial Sequence: Synthetic oligonucleotide
  Sense strand starting at position 2485 of SEQ ID NO: 1887345
cuuuguauugggcauaaag

SEQ ID NO: 2465257 - RNA, 19 nt, Artificial Sequence
  Description of Artificial Sequence: Synthetic oligonucleotide
  Antisense strand to SEQ ID NO: 2465256
cuuuaugcccaauacaaag

SEQ ID NO: 2465258 - RNA, 19 nt, Artificial Sequence
  Description of Artificial Sequence: Synthetic oligonucleotide
  Sense strand starting at position 2545 of SEQ ID NO: 1887345
gcagucugagcauagaugu

SEQ ID NO: 2465259 - RNA, 19 nt, Artificial Sequence
  Description of Artificial Sequence: Synthetic oligonucleotide
  Antisense strand to SEQ ID NO: 2465258
acaucuaugcucagacugc

SEQ ID NO: 2465260 - RNA, 19 nt, Artificial Sequence
  Description of Artificial Sequence: Synthetic oligonucleotide
  Sense strand starting at position 2556 of SEQ ID NO: 1887345
auagaugugggcuguuuca

SEQ ID NO: 2465261 - RNA, 19 nt, Artificial Sequence
  Description of Artificial Sequence: Synthetic oligonucleotide
  Antisense strand to SEQ ID NO: 2465260
ugaaacagcccacaucuau

SEQ ID NO: 2465262 - RNA, 19 nt, Artificial Sequence
  Description of Artificial Sequence: Synthetic oligonucleotide
  Sense strand starting at position 2643 of SEQ ID NO: 1887345
gggucacccauugaacgau

SEQ ID NO: 2465263 - RNA, 19 nt, Artificial Sequence
  Description of Artificial Sequence: Synthetic oligonucleotide
  Antisense strand to SEQ ID NO: 2465262
aucguucaaugggugaccc

SEQ ID NO: 2465264 - RNA, 19 nt, Artificial Sequence
  Description of Artificial Sequence: Synthetic oligonucleotide
  Sense strand starting at position 2675 of SEQ ID NO: 1887345
cugcaaccucucgaaagau

SEQ ID NO: 2465265 - RNA, 19 nt, Artificial Sequence
  Description of Artificial Sequence: Synthetic oligonucleotide
  Antisense strand to SEQ ID NO: 2465264
aucuuucgagagguugcag

SEQ ID NO: 2465266 - RNA, 19 nt, Artificial Sequence
  Description of Artificial Sequence: Synthetic oligonucleotide
  Sense strand starting at position 2684 of SEQ ID NO: 1887345
cucgaaagaucaguuuccu

SEQ ID NO: 2465267 - RNA, 19 nt, Artificial Sequence
  Description of Artificial Sequence: Synthetic oligonucleotide
  Antisense strand to SEQ ID NO: 2465266
aggaaacugaucuuucgag

SEQ ID NO: 2465268 - RNA, 19 nt, Artificial Sequence
  Description of Artificial Sequence: Synthetic oligonucleotide
  Sense strand starting at position 2707 of SEQ ID NO: 1887345
ugccuucucagaggauugu

SEQ ID NO: 2465269 - RNA, 19 nt, Artificial Sequence
  Description of Artificial Sequence: Synthetic oligonucleotide
  Antisense strand to SEQ ID NO: 2465268
acaauccucugagaaggca

SEQ ID NO: 2465270 - RNA, 19 nt, Artificial Sequence
  Description of Artificial Sequence: Synthetic oligonucleotide
  Sense strand starting at position 2720 of SEQ ID NO: 1887345
gauuguggcgagggucaaa

SEQ ID NO: 2465271 - RNA, 19 nt, Artificial Sequence
  Description of Artificial Sequence: Synthetic oligonucleotide
  Antisense strand to SEQ ID NO: 2465270
uuugacccucgccacaauc

SEQ ID NO: 2465272 - RNA, 19 nt, Artificial Sequence
  Description of Artificial Sequence: Synthetic oligonucleotide
  Sense strand starting at position 2752 of SEQ ID NO: 1887345
gaagaucuguugcccagaa

SEQ ID NO: 2465273 - RNA, 19 nt, Artificial Sequence
  Description of Artificial Sequence: Synthetic oligonucleotide
  Antisense strand to SEQ ID NO: 2465272
uucugggcaacagaucuuc

SEQ ID NO: 2465274 - RNA, 19 nt, Artificial Sequence
  Description of Artificial Sequence: Synthetic oligonucleotide
  Sense strand starting at position 2930 of SEQ ID NO: 1887345
cucagagcuguuuaaugac

SEQ ID NO: 2465275 - RNA, 19 nt, Artificial Sequence
  Description of Artificial Sequence: Synthetic oligonucleotide
  Antisense strand to SEQ ID NO: 2465274
gucauuaaacagcucugag

SEQ ID NO: 2465276 - RNA, 19 nt, Artificial Sequence
  Description of Artificial Sequence: Synthetic oligonucleotide
  Sense strand starting at position 3040 of SEQ ID NO: 1887345
uucucaggacgucacaaau

SEQ ID NO: 2465277 - RNA, 19 nt, Artificial Sequence
  Description of Artificial Sequence: Synthetic oligonucleotide
  Antisense strand to SEQ ID NO: 2465276
auuugugacguccugagaa

SEQ ID NO: 2465278 - RNA, 19 nt, Artificial Sequence
  Description of Artificial Sequence: Synthetic oligonucleotide
  Sense strand starting at position 3175 of SEQ ID NO: 1887345
gggcauuugucccauggaa

SEQ ID NO: 2465279 - RNA, 19 nt, Artificial Sequence
  Description of Artificial Sequence: Synthetic oligonucleotide
  Antisense strand to SEQ ID NO: 2465278
uuccaugggacaaaugccc

SEQ ID NO: 2465280 - RNA, 19 nt, Artificial Sequence
  Description of Artificial Sequence: Synthetic oligonucleotide
  Sense strand starting at position 3484 of SEQ ID NO: 1887345
aguugcugaugccuuuaau

SEQ ID NO: 2465281 - RNA, 19 nt, Artificial Sequence
  Description of Artificial Sequence: Synthetic oligonucleotide
  Antisense strand to SEQ ID NO: 2465280
auuaaaggcaucagcaacu

SEQ ID NO: 2465282 - RNA, 19 nt, Artificial Sequence
  Description of Artificial Sequence: Synthetic oligonucleotide
  Sense strand starting at position 3836 of SEQ ID NO: 1887345
gguccaguaacauagguaa

SEQ ID NO: 2465283 - RNA, 19 nt, Artificial Sequence
  Description of Artificial Sequence: Synthetic oligonucleotide
  Antisense strand to SEQ ID NO: 2465282
uuaccuauguuacuggacc

SEQ ID NO: 2465284 - RNA, 19 nt, Artificial Sequence
  Description of Artificial Sequence: Synthetic oligonucleotide
  Sense strand starting at position 3955 of SEQ ID NO: 1887345
uugcauugauaugaagaug

SEQ ID NO: 2465285 - RNA, 19 nt, Artificial Sequence
  Description of Artificial Sequence: Synthetic oligonucleotide
  Antisense strand to SEQ ID NO: 2465284
caucuucauaucaaugcaa

SEQ ID NO: 2465286 - RNA, 19 nt, Artificial Sequence
  Description of Artificial Sequence: Synthetic oligonucleotide
  Sense strand starting at position 3963 of SEQ ID NO: 1887345
auaugaagaugucuuaguu

SEQ ID NO: 2465287 - RNA, 19 nt, Artificial Sequence
  Description of Artificial Sequence: Synthetic oligonucleotide
  Antisense strand to SEQ ID NO: 2465286
aacuaagacaucuucauau

SEQ ID NO: 2465288 - RNA, 19 nt, Artificial Sequence
  Description of Artificial Sequence: Synthetic oligonucleotide
  Sense strand starting at position 3967 of SEQ ID NO: 1887345
gaagaugucuuaguuuguu

SEQ ID NO: 2465289 - RNA, 19 nt, Artificial Sequence
  Description of Artificial Sequence: Synthetic oligonucleotide
  Antisense strand to SEQ ID NO: 2465288
aacaaacuaagacaucuuc

SEQ ID NO: 2465290 - RNA, 19 nt, Artificial Sequence
  Description of Artificial Sequence: Synthetic oligonucleotide
  Sense strand starting at position 371 of SEQ ID NO: 1887346
uguugugaaaguuagauga

SEQ ID NO: 2465291 - RNA, 19 nt, Artificial Sequence
  Description of Artificial Sequence: Synthetic oligonucleotide
  Antisense strand to SEQ ID NO: 2465290
ucaucuaacuuucacaaca

SEQ ID NO: 2465292 - RNA, 19 nt, Artificial Sequence
  Description of Artificial Sequence: Synthetic oligonucleotide
  Sense strand starting at position 375 of SEQ ID NO: 1887346
gugaaaguuagaugaguua

SEQ ID NO: 2465293 - RNA, 19 nt, Artificial Sequence
  Description of Artificial Sequence: Synthetic oligonucleotide
  Antisense strand to SEQ ID NO: 2465292
uaacucaucuaacuuucac

SEQ ID NO: 2465294 - RNA, 19 nt, Artificial Sequence
  Description of Artificial Sequence: Synthetic oligonucleotide
  Sense strand starting at position 650 of SEQ ID NO: 1887346
cauuauagaugucugagaa

SEQ ID NO: 2465295 - RNA, 19 nt, Artificial Sequence
  Description of Artificial Sequence: Synthetic oligonucleotide
  Antisense strand to SEQ ID NO: 2465294
uucucagacaucuauaaug

SEQ ID NO: 2465296 - RNA, 19 nt, Artificial Sequence
  Description of Artificial Sequence: Synthetic oligonucleotide
  Sense strand starting at position 651 of SEQ ID NO: 1887346
auuauagaugucugagaau

SEQ ID NO: 2465297 - RNA, 19 nt, Artificial Sequence
  Description of Artificial Sequence: Synthetic oligonucleotide
  Antisense strand to SEQ ID NO: 2465296
auucucagacaucuauaau

SEQ ID NO: 2465298 - RNA, 19 nt, Artificial Sequence
  Description of Artificial Sequence: Synthetic oligonucleotide
  Sense strand starting at position 780 of SEQ ID NO: 1887346
uugaauuugugccugguuu

SEQ ID NO: 2465299 - RNA, 19 nt, Artificial Sequence
  Description of Artificial Sequence: Synthetic oligonucleotide
  Antisense strand to SEQ ID NO: 2465298
aaaccaggcacaaauucaa

SEQ ID NO: 2465300 - RNA, 19 nt, Artificial Sequence
  Description of Artificial Sequence: Synthetic oligonucleotide
  Sense strand starting at position 782 of SEQ ID NO: 1887346
gaauuugugccugguuuga

SEQ ID NO: 2465301 - RNA, 19 nt, Artificial Sequence
  Description of Artificial Sequence: Synthetic oligonucleotide
  Antisense strand to SEQ ID NO: 2465300
ucaaaccaggcacaaauuc

SEQ ID NO: 2465302 - RNA, 19 nt, Artificial Sequence
  Description of Artificial Sequence: Synthetic oligonucleotide
  Sense strand starting at position 872 of SEQ ID NO: 1887346
agggauauauucccauucu

SEQ ID NO: 2465303 - RNA, 19 nt, Artificial Sequence
  Description of Artificial Sequence: Synthetic oligonucleotide
  Antisense strand to SEQ ID NO: 2465302
agaaugggaauauaucccu

SEQ ID NO: 2465304 - RNA, 19 nt, Artificial Sequence
  Description of Artificial Sequence: Synthetic oligonucleotide
  Sense strand starting at position 1081 of SEQ ID NO: 1887346
auuuguggcccauguuaca

SEQ ID NO: 2465305 - RNA, 19 nt, Artificial Sequence
  Description of Artificial Sequence: Synthetic oligonucleotide
  Antisense strand to SEQ ID NO: 2465304
uguaacaugggccacaaau

SEQ ID NO: 2465306 - RNA, 19 nt, Artificial Sequence
  Description of Artificial Sequence: Synthetic oligonucleotide
  Sense strand starting at position 1099 of SEQ ID NO: 1887346
agaacuggcuuccucagau

SEQ ID NO: 2465307 - RNA, 19 nt, Artificial Sequence
  Description of Artificial Sequence: Synthetic oligonucleotide
  Antisense strand to SEQ ID NO: 2465306
aucugaggaagccaguucu

SEQ ID NO: 2465308 - RNA, 19 nt, Artificial Sequence
  Description of Artificial Sequence: Synthetic oligonucleotide
  Sense strand starting at position 1260 of SEQ ID NO: 1887346
aguaauagcagauggaauc

SEQ ID NO: 2465309 - RNA, 19 nt, Artificial Sequence
  Description of Artificial Sequence: Synthetic oligonucleotide
  Antisense strand to SEQ ID NO: 2465308
gauuccaucugcuauuacu

SEQ ID NO: 2465310 - RNA, 19 nt, Artificial Sequence
  Description of Artificial Sequence: Synthetic oligonucleotide
  Sense strand starting at position 1733 of SEQ ID NO: 1887346
uuaaguauagcucauagaa

SEQ ID NO: 2465311 - RNA, 19 nt, Artificial Sequence
  Description of Artificial Sequence: Synthetic oligonucleotide
  Antisense strand to SEQ ID NO: 2465310
uucuaugagcuauacuuaa

SEQ ID NO: 2465312 - RNA, 19 nt, Artificial Sequence
  Description of Artificial Sequence: Synthetic oligonucleotide
  Sense strand starting at position 1762 of SEQ ID NO: 1887346
ggccaagaaucauccauca

SEQ ID NO: 2465313 - RNA, 19 nt, Artificial Sequence
  Description of Artificial Sequence: Synthetic oligonucleotide
  Antisense strand to SEQ ID NO: 2465312
ugauggaugauucuuggcc

SEQ ID NO: 2465314 - RNA, 19 nt, Artificial Sequence
  Description of Artificial Sequence: Synthetic oligonucleotide
  Sense strand starting at position 1833 of SEQ ID NO: 1887346
gcacgacaaugaccagauu

SEQ ID NO: 2465315 - RNA, 19 nt, Artificial Sequence
  Description of Artificial Sequence: Synthetic oligonucleotide
  Antisense strand to SEQ ID NO: 2465314
aaucuggucauugucgugc

SEQ ID NO: 2465316 - RNA, 19 nt, Artificial Sequence
  Description of Artificial Sequence: Synthetic oligonucleotide
  Sense strand starting at position 1998 of SEQ ID NO: 1887346
gaaugcugaguguaacaau

SEQ ID NO: 2465317 - RNA, 19 nt, Artificial Sequence
  Description of Artificial Sequence: Synthetic oligonucleotide
  Antisense strand to SEQ ID NO: 2465316
auuguuacacucagcauuc

SEQ ID NO: 2465318 - RNA, 19 nt, Artificial Sequence
  Description of Artificial Sequence: Synthetic oligonucleotide
  Sense strand starting at position 2168 of SEQ ID NO: 1887346
aagaaugacugguuauugu

SEQ ID NO: 2465319 - RNA, 19 nt, Artificial Sequence
  Description of Artificial Sequence: Synthetic oligonucleotide
  Antisense strand to SEQ ID NO: 2465318
acaauaaccagucauucuu

SEQ ID NO: 2465320 - RNA, 19 nt, Artificial Sequence
  Description of Artificial Sequence: Synthetic oligonucleotide
  Sense strand starting at position 2238 of SEQ ID NO: 1887346
ggaagaccauuugauaauc

SEQ ID NO: 2465321 - RNA, 19 nt, Artificial Sequence
  Description of Artificial Sequence: Synthetic oligonucleotide
  Antisense strand to SEQ ID NO: 2465320
gauuaucaaauggucuucc

SEQ ID NO: 2465322 - RNA, 19 nt, Artificial Sequence
  Description of Artificial Sequence: Synthetic oligonucleotide
  Sense strand starting at position 2265 of SEQ ID NO: 1887346
aggccaaagaauuguauga

SEQ ID NO: 2465323 - RNA, 19 nt, Artificial Sequence
  Description of Artificial Sequence: Synthetic oligonucleotide
  Antisense strand to SEQ ID NO: 2465322
ucauacaauucuuuggccu

SEQ ID NO: 2465324 - RNA, 19 nt, Artificial Sequence
  Description of Artificial Sequence: Synthetic oligonucleotide
  Sense strand starting at position 2357 of SEQ ID NO: 1887346
gaacgugaacucugaacau

SEQ ID NO: 2465325 - RNA, 19 nt, Artificial Sequence
  Description of Artificial Sequence: Synthetic oligonucleotide
  Antisense strand to SEQ ID NO: 2465324
auguucagaguucacguuc

SEQ ID NO: 2465326 - RNA, 19 nt, Artificial Sequence
  Description of Artificial Sequence: Synthetic oligonucleotide
  Sense strand starting at position 2767 of SEQ ID NO: 1887346
aaugaauguuuguuaagag

SEQ ID NO: 2465327 - RNA, 19 nt, Artificial Sequence
  Description of Artificial Sequence: Synthetic oligonucleotide
  Antisense strand to SEQ ID NO: 2465326
cucuuaacaaacauucauu

SEQ ID NO: 2465328 - RNA, 19 nt, Artificial Sequence
  Description of Artificial Sequence: Synthetic oligonucleotide
  Sense strand starting at position 2913 of SEQ ID NO: 1887346
uccuacuguugaccagaau

SEQ ID NO: 2465329 - RNA, 19 nt, Artificial Sequence
  Description of Artificial Sequence: Synthetic oligonucleotide
  Antisense strand to SEQ ID NO: 2465328
auucuggucaacaguagga

SEQ ID NO: 2465330 - RNA, 19 nt, Artificial Sequence
  Description of Artificial Sequence: Synthetic oligonucleotide
  Sense strand starting at position 2940 of SEQ ID NO: 1887346
augacauaaggucgauuaa

SEQ ID NO: 2465331 - RNA, 19 nt, Artificial Sequence
  Description of Artificial Sequence: Synthetic oligonucleotide
  Antisense strand to SEQ ID NO: 2465330
uuaaucgaccuuaugucau

SEQ ID NO: 2465332 - RNA, 19 nt, Artificial Sequence
  Description of Artificial Sequence: Synthetic oligonucleotide
  Sense strand starting at position 3205 of SEQ ID NO: 1887346
aagggucaacucuauguuu

SEQ ID NO: 2465333 - RNA, 19 nt, Artificial Sequence
  Description of Artificial Sequence: Synthetic oligonucleotide
  Antisense strand to SEQ ID NO: 2465332
aaacauagaguugacccuu

SEQ ID NO: 2465334 - RNA, 19 nt, Artificial Sequence
  Description of Artificial Sequence: Synthetic oligonucleotide
  Sense strand starting at position 3253 of SEQ ID NO: 1887346
ggaagaaauacaggugcuu

SEQ ID NO: 2465335 - RNA, 19 nt, Artificial Sequence
  Description of Artificial Sequence: Synthetic oligonucleotide
  Antisense strand to SEQ ID NO: 2465334
aagcaccuguauuucuucc

SEQ ID NO: 2465336 - RNA, 19 nt, Artificial Sequence
  Description of Artificial Sequence: Synthetic oligonucleotide
  Sense strand starting at position 3272 of SEQ ID NO: 1887346
ugaggaaacuguucugagu

SEQ ID NO: 2465337 - RNA, 19 nt, Artificial Sequence
  Description of Artificial Sequence: Synthetic oligonucleotide
  Antisense strand to SEQ ID NO: 2465336
acucagaacaguuuccuca

SEQ ID NO: 2465338 - RNA, 19 nt, Artificial Sequence
  Description of Artificial Sequence: Synthetic oligonucleotide
  Sense strand starting at position 3285 of SEQ ID NO: 1887346
cugagugaaagcugggaau

SEQ ID NO: 2465339 - RNA, 19 nt, Artificial Sequence
  Description of Artificial Sequence: Synthetic oligonucleotide
  Antisense strand to SEQ ID NO: 2465338
auucccagcuuucacucag

SEQ ID NO: 2465340 - RNA, 19 nt, Artificial Sequence
  Description of Artificial Sequence: Synthetic oligonucleotide
  Sense strand starting at position 3387 of SEQ ID NO: 1887346
uagggaaauugauugguuu

SEQ ID NO: 2465341 - RNA, 19 nt, Artificial Sequence
  Description of Artificial Sequence: Synthetic oligonucleotide
  Antisense strand to SEQ ID NO: 2465340
aaaccaaucaauuucccua

SEQ ID NO: 2465342 - RNA, 19 nt, Artificial Sequence
  Description of Artificial Sequence: Synthetic oligonucleotide
  Sense strand starting at position 3429 of SEQ ID NO: 1887346
gggcaauucugacugagga

SEQ ID NO: 2465343 - RNA, 19 nt, Artificial Sequence
  Description of Artificial Sequence: Synthetic oligonucleotide
  Antisense strand to SEQ ID NO: 2465342
uccucagucagaauugccc

SEQ ID NO: 2465344 - RNA, 19 nt, Artificial Sequence
  Description of Artificial Sequence: Synthetic oligonucleotide
  Sense strand starting at position 3430 of SEQ ID NO: 1887346
ggcaauucugacugaggac

SEQ ID NO: 2465345 - RNA, 19 nt, Artificial Sequence
  Description of Artificial Sequence: Synthetic oligonucleotide
  Antisense strand to SEQ ID NO: 2465344
guccucagucagaauugcc

SEQ ID NO: 2465346 - RNA, 19 nt, Artificial Sequence
  Description of Artificial Sequence: Synthetic oligonucleotide
  Sense strand starting at position 3449 of SEQ ID NO: 1887346
aagguagauaaguguagau

SEQ ID NO: 2465347 - RNA, 19 nt, Artificial Sequence
  Description of Artificial Sequence: Synthetic oligonucleotide
  Antisense strand to SEQ ID NO: 2465346
aucuacacuuaucuaccuu

SEQ ID NO: 2465348 - RNA, 19 nt, Artificial Sequence
  Description of Artificial Sequence: Synthetic oligonucleotide
  Sense strand starting at position 3465 of SEQ ID NO: 1887346
gauggaugccucugagaaa

SEQ ID NO: 2465349 - RNA, 19 nt, Artificial Sequence
  Description of Artificial Sequence: Synthetic oligonucleotide
  Antisense strand to SEQ ID NO: 2465348
uuucucagaggcauccauc

SEQ ID NO: 2465350 - RNA, 19 nt, Artificial Sequence
  Description of Artificial Sequence: Synthetic oligonucleotide
  Sense strand starting at position 3534 of SEQ ID NO: 1887346
aguugcucuaaagagugaa

SEQ ID NO: 2465351 - RNA, 19 nt, Artificial Sequence
  Description of Artificial Sequence: Synthetic oligonucleotide
  Antisense strand to SEQ ID NO: 2465350
uucacucuuuagagcaacu

SEQ ID NO: 2465352 - RNA, 19 nt, Artificial Sequence
  Description of Artificial Sequence: Synthetic oligonucleotide
  Sense strand starting at position 3538 of SEQ ID NO: 1887346
gcucuaaagagugaaaguu

SEQ ID NO: 2465353 - RNA, 19 nt, Artificial Sequence
  Description of Artificial Sequence: Synthetic oligonucleotide
  Antisense strand to SEQ ID NO: 2465352
aacuuucacucuuuagagc

SEQ ID NO: 2465354 - RNA, 19 nt, Artificial Sequence
  Description of Artificial Sequence: Synthetic oligonucleotide
  Sense strand starting at position 3547 of SEQ ID NO: 1887346
agugaaaguuaaguaagaa

SEQ ID NO: 2465355 - RNA, 19 nt, Artificial Sequence
  Description of Artificial Sequence: Synthetic oligonucleotide
  Antisense strand to SEQ ID NO: 2465354
uucuuacuuaacuuucacu

SEQ ID NO: 2465356 - RNA, 19 nt, Artificial Sequence
  Description of Artificial Sequence: Synthetic oligonucleotide
  Sense strand starting at position 3572 of SEQ ID NO: 1887346
gagucauacugacugugag

SEQ ID NO: 2465357 - RNA, 19 nt, Artificial Sequence
  Description of Artificial Sequence: Synthetic oligonucleotide
  Antisense strand to SEQ ID NO: 2465356
cucacagucaguaugacuc

SEQ ID NO: 2465358 - RNA, 19 nt, Artificial Sequence
  Description of Artificial Sequence: Synthetic oligonucleotide
  Sense strand starting at position 3573 of SEQ ID NO: 1887346
agucauacugacugugaga

SEQ ID NO: 2465359 - RNA, 19 nt, Artificial Sequence
  Description of Artificial Sequence: Synthetic oligonucleotide
  Antisense strand to SEQ ID NO: 2465358
ucucacagucaguaugacu

SEQ ID NO: 2465360 - RNA, 19 nt, Artificial Sequence
  Description of Artificial Sequence: Synthetic oligonucleotide
  Sense strand starting at position 3575 of SEQ ID NO: 1887346
ucauacugacugugagaaa

SEQ ID NO: 2465361 - RNA, 19 nt, Artificial Sequence
  Description of Artificial Sequence: Synthetic oligonucleotide
  Antisense strand to SEQ ID NO: 2465360
uuucucacagucaguauga

SEQ ID NO: 2465362 - RNA, 19 nt, Artificial Sequence
  Description of Artificial Sequence: Synthetic oligonucleotide
  Sense strand starting at position 3695 of SEQ ID NO: 1887346
uauuuagugucuucuagua

SEQ ID NO: 2465363 - RNA, 19 nt, Artificial Sequence
  Description of Artificial Sequence: Synthetic oligonucleotide
  Antisense strand to SEQ ID NO: 2465362
uacuagaagacacuaaaua

SEQ ID NO: 2465364 - RNA, 19 nt, Artificial Sequence
  Description of Artificial Sequence: Synthetic oligonucleotide
  Sense strand starting at position 3705 of SEQ ID NO: 1887346
cuucuaguaucacuagaug

SEQ ID NO: 2465365 - RNA, 19 nt, Artificial Sequence
  Description of Artificial Sequence: Synthetic oligonucleotide
  Antisense strand to SEQ ID NO: 2465364
caucuagugauacuagaag

SEQ ID NO: 2465366 - RNA, 19 nt, Artificial Sequence
  Description of Artificial Sequence: Synthetic oligonucleotide
  Sense strand starting at position 3711 of SEQ ID NO: 1887346
guaucacuagaugaugcua

SEQ ID NO: 2465367 - RNA, 19 nt, Artificial Sequence
  Description of Artificial Sequence: Synthetic oligonucleotide
  Antisense strand to SEQ ID NO: 2465366
uagcaucaucuagugauac

SEQ ID NO: 2465368 - RNA, 19 nt, Artificial Sequence
  Description of Artificial Sequence: Synthetic oligonucleotide
  Sense strand starting at position 3947 of SEQ ID NO: 1887346
ccauucuuaccucaugagu

SEQ ID NO: 2465369 - RNA, 19 nt, Artificial Sequence
  Description of Artificial Sequence: Synthetic oligonucleotide
  Antisense strand to SEQ ID NO: 2465368
acucaugagguaagaaugg

SEQ ID NO: 2465370 - RNA, 19 nt, Artificial Sequence
  Description of Artificial Sequence: Synthetic oligonucleotide
  Sense strand starting at position 278 of SEQ ID NO: 1887347
ugcugaacgagucaugaau

SEQ ID NO: 2465371 - RNA, 19 nt, Artificial Sequence
  Description of Artificial Sequence: Synthetic oligonucleotide
  Antisense strand to SEQ ID NO: 2465370
auucaugacucguucagca

SEQ ID NO: 2465372 - RNA, 19 nt, Artificial Sequence
  Description of Artificial Sequence: Synthetic oligonucleotide
  Sense strand starting at position 1822 of SEQ ID NO: 1887347
ggucuaaggaccugagguu

SEQ ID NO: 2465373 - RNA, 19 nt, Artificial Sequence
  Description of Artificial Sequence: Synthetic oligonucleotide
  Antisense strand to SEQ ID NO: 2465372
aaccucagguccuuagacc

SEQ ID NO: 2465374 - RNA, 19 nt, Artificial Sequence
  Description of Artificial Sequence: Synthetic oligonucleotide
  Sense strand starting at position 1914 of SEQ ID NO: 1887347
cgagucacaucaccaaauu

SEQ ID NO: 2465375 - RNA, 19 nt, Artificial Sequence
  Description of Artificial Sequence: Synthetic oligonucleotide
  Antisense strand to SEQ ID NO: 2465374
aauuuggugaugugacucg

SEQ ID NO: 2465376 - RNA, 19 nt, Artificial Sequence
  Description of Artificial Sequence: Synthetic oligonucleotide
  Sense strand starting at position 2392 of SEQ ID NO: 1887347
uagggaaauuauccuguga

SEQ ID NO: 2465377 - RNA, 19 nt, Artificial Sequence
  Description of Artificial Sequence: Synthetic oligonucleotide
  Antisense strand to SEQ ID NO: 2465376
ucacaggauaauuucccua

SEQ ID NO: 2465378 - RNA, 19 nt, Artificial Sequence
  Description of Artificial Sequence: Synthetic oligonucleotide
  Sense strand starting at position 2396 of SEQ ID NO: 1887347
gaaauuauccugugagucc

SEQ ID NO: 2465379 - RNA, 19 nt, Artificial Sequence
  Description of Artificial Sequence: Synthetic oligonucleotide
  Antisense strand to SEQ ID NO: 2465378
ggacucacaggauaauuuc

SEQ ID NO: 2465380 - RNA, 19 nt, Artificial Sequence
  Description of Artificial Sequence: Synthetic oligonucleotide
  Sense strand starting at position 2488 of SEQ ID NO: 1887347
uccuaagugucuguacaua

SEQ ID NO: 2465381 - RNA, 19 nt, Artificial Sequence
  Description of Artificial Sequence: Synthetic oligonucleotide
  Antisense strand to SEQ ID NO: 2465380
uauguacagacacuuagga

SEQ ID NO: 2465382 - RNA, 19 nt, Artificial Sequence
  Description of Artificial Sequence: Synthetic oligonucleotide
  Sense strand starting at position 2514 of SEQ ID NO: 1887347
gugcauuucugugugucca

SEQ ID NO: 2465383 - RNA, 19 nt, Artificial Sequence
  Description of Artificial Sequence: Synthetic oligonucleotide
  Antisense strand to SEQ ID NO: 2465382
uggacacacagaaaugcac

SEQ ID NO: 2465384 - RNA, 19 nt, Artificial Sequence
  Description of Artificial Sequence: Synthetic oligonucleotide
  Sense strand starting at position 2515 of SEQ ID NO: 1887347
ugcauuucuguguguccau

SEQ ID NO: 2465385 - RNA, 19 nt, Artificial Sequence
  Description of Artificial Sequence: Synthetic oligonucleotide
  Antisense strand to SEQ ID NO: 2465384
auggacacacagaaaugca

SEQ ID NO: 2465386 - RNA, 19 nt, Artificial Sequence
  Description of Artificial Sequence: Synthetic oligonucleotide
  Sense strand starting at position 2516 of SEQ ID NO: 1887347
gcauuucuguguguccaua

SEQ ID NO: 2465387 - RNA, 19 nt, Artificial Sequence
  Description of Artificial Sequence: Synthetic oligonucleotide
  Antisense strand to SEQ ID NO: 2465386
uauggacacacagaaaugc

SEQ ID NO: 2465388 - RNA, 19 nt, Artificial Sequence
  Description of Artificial Sequence: Synthetic oligonucleotide
  Sense strand starting at position 2576 of SEQ ID NO: 1887347
gugugugcacuuguauuau

SEQ ID NO: 2465389 - RNA, 19 nt, Artificial Sequence
  Description of Artificial Sequence: Synthetic oligonucleotide
  Antisense strand to SEQ ID NO: 2465388
auaauacaagugcacacac

SEQ ID NO: 2465390 - RNA, 19 nt, Artificial Sequence
  Description of Artificial Sequence: Synthetic oligonucleotide
  Sense strand starting at position 2637 of SEQ ID NO: 1887347
gugugcaugccuguguauu

SEQ ID NO: 2465391 - RNA, 19 nt, Artificial Sequence
  Description of Artificial Sequence: Synthetic oligonucleotide
  Antisense strand to SEQ ID NO: 2465390
aauacacaggcaugcacac

SEQ ID NO: 2465392 - RNA, 19 nt, Artificial Sequence
  Description of Artificial Sequence: Synthetic oligonucleotide
  Sense strand starting at position 2714 of SEQ ID NO: 1887347
guuggauugauaugggaau

SEQ ID NO: 2465393 - RNA, 19 nt, Artificial Sequence
  Description of Artificial Sequence: Synthetic oligonucleotide
  Antisense strand to SEQ ID NO: 2465392
auucccauaucaauccaac

SEQ ID NO: 2465394 - RNA, 19 nt, Artificial Sequence
  Description of Artificial Sequence: Synthetic oligonucleotide
  Sense strand starting at position 2728 of SEQ ID NO: 1887347
ggaauaugggaaugcuauu

SEQ ID NO: 2465395 - RNA, 19 nt, Artificial Sequence
  Description of Artificial Sequence: Synthetic oligonucleotide
  Antisense strand to SEQ ID NO: 2465394
aauagcauucccauauucc

SEQ ID NO: 2465396 - RNA, 19 nt, Artificial Sequence
  Description of Artificial Sequence: Synthetic oligonucleotide
  Sense strand starting at position 2859 of SEQ ID NO: 1887347
agucaugagaccugggauc

SEQ ID NO: 2465397 - RNA, 19 nt, Artificial Sequence
  Description of Artificial Sequence: Synthetic oligonucleotide
  Antisense strand to SEQ ID NO: 2465396
gaucccaggucucaugacu

SEQ ID NO: 2465398 - RNA, 19 nt, Artificial Sequence
  Description of Artificial Sequence: Synthetic oligonucleotide
  Sense strand starting at position 2873 of SEQ ID NO: 1887347
ggaucugaccaguggauca

SEQ ID NO: 2465399 - RNA, 19 nt, Artificial Sequence
  Description of Artificial Sequence: Synthetic oligonucleotide
  Antisense strand to SEQ ID NO: 2465398
ugauccacuggucagaucc

SEQ ID NO: 2465400 - RNA, 19 nt, Artificial Sequence
  Description of Artificial Sequence: Synthetic oligonucleotide
  Sense strand starting at position 2884 of SEQ ID NO: 1887347
guggaucagucagcagaua

SEQ ID NO: 2465401 - RNA, 19 nt, Artificial Sequence
  Description of Artificial Sequence: Synthetic oligonucleotide
  Antisense strand to SEQ ID NO: 2465400
uaucugcugacugauccac

SEQ ID NO: 2465402 - RNA, 19 nt, Artificial Sequence
  Description of Artificial Sequence: Synthetic oligonucleotide
  Sense strand starting at position 2885 of SEQ ID NO: 1887347
uggaucagucagcagauau

SEQ ID NO: 2465403 - RNA, 19 nt, Artificial Sequence
  Description of Artificial Sequence: Synthetic oligonucleotide
  Antisense strand to SEQ ID NO: 2465402
auaucugcugacugaucca

SEQ ID NO: 2465404 - RNA, 19 nt, Artificial Sequence
  Description of Artificial Sequence: Synthetic oligonucleotide
  Sense strand starting at position 3017 of SEQ ID NO: 1887347
gggcccucugacuaugaau

SEQ ID NO: 2465405 - RNA, 19 nt, Artificial Sequence
  Description of Artificial Sequence: Synthetic oligonucleotide
  Antisense strand to SEQ ID NO: 2465404
auucauagucagagggccc

SEQ ID NO: 2465406 - RNA, 19 nt, Artificial Sequence
  Description of Artificial Sequence: Synthetic oligonucleotide
  Sense strand starting at position 3125 of SEQ ID NO: 1887347
agggaauugagcugacuca

SEQ ID NO: 2465407 - RNA, 19 nt, Artificial Sequence
  Description of Artificial Sequence: Synthetic oligonucleotide
  Antisense strand to SEQ ID NO: 2465406
ugagucagcucaauucccu

SEQ ID NO: 2465408 - RNA, 19 nt, Artificial Sequence
  Description of Artificial Sequence: Synthetic oligonucleotide
  Sense strand starting at position 3168 of SEQ ID NO: 1887347
gaauuccggucugugauua

SEQ ID NO: 2465409 - RNA, 19 nt, Artificial Sequence
  Description of Artificial Sequence: Synthetic oligonucleotide
  Antisense strand to SEQ ID NO: 2465408
uaaucacagaccggaauuc

SEQ ID NO: 2465410 - RNA, 19 nt, Artificial Sequence
  Description of Artificial Sequence: Synthetic oligonucleotide
  Sense strand starting at position 3180 of SEQ ID NO: 1887347
gugauuauugaccaguuga

SEQ ID NO: 2465411 - RNA, 19 nt, Artificial Sequence
  Description of Artificial Sequence: Synthetic oligonucleotide
  Antisense strand to SEQ ID NO: 2465410
ucaacuggucaauaaucac

SEQ ID NO: 2465412 - RNA, 19 nt, Artificial Sequence
  Description of Artificial Sequence: Synthetic oligonucleotide
  Sense strand starting at position 3383 of SEQ ID NO: 1887347
ggaugaaagugacucggau

SEQ ID NO: 2465413 - RNA, 19 nt, Artificial Sequence
  Description of Artificial Sequence: Synthetic oligonucleotide
  Antisense strand to SEQ ID NO: 2465412
auccgagucacuuucaucc

SEQ ID NO: 2465414 - RNA, 19 nt, Artificial Sequence
  Description of Artificial Sequence: Synthetic oligonucleotide
  Sense strand starting at position 3385 of SEQ ID NO: 1887347
augaaagugacucggauua

SEQ ID NO: 2465415 - RNA, 19 nt, Artificial Sequence
  Description of Artificial Sequence: Synthetic oligonucleotide
  Antisense strand to SEQ ID NO: 2465414
uaauccgagucacuuucau

SEQ ID NO: 2465416 - RNA, 19 nt, Artificial Sequence
  Description of Artificial Sequence: Synthetic oligonucleotide
  Sense strand starting at position 3396 of SEQ ID NO: 1887347
ucggauuagaacugcauua

SEQ ID NO: 2465417 - RNA, 19 nt, Artificial Sequence
  Description of Artificial Sequence: Synthetic oligonucleotide
  Antisense strand to SEQ ID NO: 2465416
uaaugcaguucuaauccga

SEQ ID NO: 2465418 - RNA, 19 nt, Artificial Sequence
  Description of Artificial Sequence: Synthetic oligonucleotide
  Sense strand starting at position 3508 of SEQ ID NO: 1887347
uucagaacacgaugugagu

SEQ ID NO: 2465419 - RNA, 19 nt, Artificial Sequence
  Description of Artificial Sequence: Synthetic oligonucleotide
  Antisense strand to SEQ ID NO: 2465418
acucacaucguguucugaa

SEQ ID NO: 2465420 - RNA, 19 nt, Artificial Sequence
  Description of Artificial Sequence: Synthetic oligonucleotide
  Sense strand starting at position 3514 of SEQ ID NO: 1887347
acacgaugugaguacuauu

SEQ ID NO: 2465421 - RNA, 19 nt, Artificial Sequence
  Description of Artificial Sequence: Synthetic oligonucleotide
  Antisense strand to SEQ ID NO: 2465420
aauaguacucacaucgugu

SEQ ID NO: 2465422 - RNA, 19 nt, Artificial Sequence
  Description of Artificial Sequence: Synthetic oligonucleotide
  Sense strand starting at position 3528 of SEQ ID NO: 1887347
cuauuauuaucugugguuu

SEQ ID NO: 2465423 - RNA, 19 nt, Artificial Sequence
  Description of Artificial Sequence: Synthetic oligonucleotide
  Antisense strand to SEQ ID NO: 2465422
aaaccacagauaauaauag

SEQ ID NO: 2465424 - RNA, 19 nt, Artificial Sequence
  Description of Artificial Sequence: Synthetic oligonucleotide
  Sense strand starting at position 3540 of SEQ ID NO: 1887347
gugguuuauguguaaggac

SEQ ID NO: 2465425 - RNA, 19 nt, Artificial Sequence
  Description of Artificial Sequence: Synthetic oligonucleotide
  Antisense strand to SEQ ID NO: 2465424
guccuuacacauaaaccac

SEQ ID NO: 2465426 - RNA, 19 nt, Artificial Sequence
  Description of Artificial Sequence: Synthetic oligonucleotide
  Sense strand starting at position 3581 of SEQ ID NO: 1887347
agacuugcccagugacaca

SEQ ID NO: 2465427 - RNA, 19 nt, Artificial Sequence
  Description of Artificial Sequence: Synthetic oligonucleotide
  Antisense strand to SEQ ID NO: 2465426
ugugucacugggcaagucu

SEQ ID NO: 2465428 - RNA, 19 nt, Artificial Sequence
  Description of Artificial Sequence: Synthetic oligonucleotide
  Sense strand starting at position 3599 of SEQ ID NO: 1887347
auaguuggugccuggauuu

SEQ ID NO: 2465429 - RNA, 19 nt, Artificial Sequence
  Description of Artificial Sequence: Synthetic oligonucleotide
  Antisense strand to SEQ ID NO: 2465428
aaauccaggcaccaacuau

SEQ ID NO: 2465430 - RNA, 19 nt, Artificial Sequence
  Description of Artificial Sequence: Synthetic oligonucleotide
  Sense strand starting at position 3611 of SEQ ID NO: 1887347
uggauuugcgcaugaauac

SEQ ID NO: 2465431 - RNA, 19 nt, Artificial Sequence
  Description of Artificial Sequence: Synthetic oligonucleotide
  Antisense strand to SEQ ID NO: 2465430
guauucaugcgcaaaucca

SEQ ID NO: 2465432 - RNA, 19 nt, Artificial Sequence
  Description of Artificial Sequence: Synthetic oligonucleotide
  Sense strand starting at position 3632 of SEQ ID NO: 1887347
gcuccagugguugagcaaa

SEQ ID NO: 2465433 - RNA, 19 nt, Artificial Sequence
  Description of Artificial Sequence: Synthetic oligonucleotide
  Antisense strand to SEQ ID NO: 2465432
uuugcucaaccacuggagc

SEQ ID NO: 2465434 - RNA, 19 nt, Artificial Sequence
  Description of Artificial Sequence: Synthetic oligonucleotide
  Sense strand starting at position 3682 of SEQ ID NO: 1887347
uacgauucccaaggacagu

SEQ ID NO: 2465435 - RNA, 19 nt, Artificial Sequence
  Description of Artificial Sequence: Synthetic oligonucleotide
  Antisense strand to SEQ ID NO: 2465434
acuguccuugggaaucgua

SEQ ID NO: 2465436 - RNA, 19 nt, Artificial Sequence
  Description of Artificial Sequence: Synthetic oligonucleotide
  Sense strand starting at position 3693 of SEQ ID NO: 1887347
aggacagucuaccauuuau

SEQ ID NO: 2465437 - RNA, 19 nt, Artificial Sequence
  Description of Artificial Sequence: Synthetic oligonucleotide
  Antisense strand to SEQ ID NO: 2465436
auaaaugguagacuguccu

SEQ ID NO: 2465438 - RNA, 19 nt, Artificial Sequence
  Description of Artificial Sequence: Synthetic oligonucleotide
  Sense strand starting at position 3729 of SEQ ID NO: 1887347
ugcuauuucuauguuaaug

SEQ ID NO: 2465439 - RNA, 19 nt, Artificial Sequence
  Description of Artificial Sequence: Synthetic oligonucleotide
  Antisense strand to SEQ ID NO: 2465438
cauuaacauagaaauagca

SEQ ID NO: 2465440 - RNA, 19 nt, Artificial Sequence
  Description of Artificial Sequence: Synthetic oligonucleotide
  Sense strand starting at position 3876 of SEQ ID NO: 1887347
gaggaacuguaauuaaguc

SEQ ID NO: 2465441 - RNA, 19 nt, Artificial Sequence
  Description of Artificial Sequence: Synthetic oligonucleotide
  Antisense strand to SEQ ID NO: 2465440
gacuuaauuacaguuccuc

SEQ ID NO: 2465442 - RNA, 19 nt, Artificial Sequence
  Description of Artificial Sequence: Synthetic oligonucleotide
  Sense strand starting at position 3890 of SEQ ID NO: 1887347
aagucugugguguaacaga

SEQ ID NO: 2465443 - RNA, 19 nt, Artificial Sequence
  Description of Artificial Sequence: Synthetic oligonucleotide
  Antisense strand to SEQ ID NO: 2465442
ucuguuacaccacagacuu

SEQ ID NO: 2465444 - RNA, 19 nt, Artificial Sequence
  Description of Artificial Sequence: Synthetic oligonucleotide
  Sense strand starting at position 3895 of SEQ ID NO: 1887347
ugugguguaacagacuaaa

SEQ ID NO: 2465445 - RNA, 19 nt, Artificial Sequence
  Description of Artificial Sequence: Synthetic oligonucleotide
  Antisense strand to SEQ ID NO: 2465444
uuuagucuguuacaccaca

SEQ ID NO: 2465446 - RNA, 19 nt, Artificial Sequence
  Description of Artificial Sequence: Synthetic oligonucleotide
  Sense strand starting at position 3920 of SEQ ID NO: 1887347
ugcgaaauuacuggagucu

SEQ ID NO: 2465447 - RNA, 19 nt, Artificial Sequence
  Description of Artificial Sequence: Synthetic oligonucleotide
  Antisense strand to SEQ ID NO: 2465446
agacuccaguaauuucgca

SEQ ID NO: 2465448 - RNA, 19 nt, Artificial Sequence
  Description of Artificial Sequence: Synthetic oligonucleotide
  Sense strand starting at position 3921 of SEQ ID NO: 1887347
gcgaaauuacuggagucuu

SEQ ID NO: 2465449 - RNA, 19 nt, Artificial Sequence
  Description of Artificial Sequence: Synthetic oligonucleotide
  Antisense strand to SEQ ID NO: 2465448
aagacuccaguaauuucgc

SEQ ID NO: 2465450 - RNA, 19 nt, Artificial Sequence
  Description of Artificial Sequence: Synthetic oligonucleotide
  Sense strand starting at position 565 of SEQ ID NO: 1887348
aagaaagcuggugguguua

SEQ ID NO: 2465451 - RNA, 19 nt, Artificial Sequence
  Description of Artificial Sequence: Synthetic oligonucleotide
  Antisense strand to SEQ ID NO: 2465450
uaacaccaccagcuuucuu

SEQ ID NO: 2465452 - RNA, 19 nt, Artificial Sequence
  Description of Artificial Sequence: Synthetic oligonucleotide
  Sense strand starting at position 576 of SEQ ID NO: 1887348
ugguguuauuuacauauga

SEQ ID NO: 2465453 - RNA, 19 nt, Artificial Sequence
  Description of Artificial Sequence: Synthetic oligonucleotide
  Antisense strand to SEQ ID NO: 2465452
ucauauguaaauaacacca

SEQ ID NO: 2465454 - RNA, 19 nt, Artificial Sequence
  Description of Artificial Sequence: Synthetic oligonucleotide
  Sense strand starting at position 756 of SEQ ID NO: 1887348
guaucuguaaucuagguga

SEQ ID NO: 2465455 - RNA, 19 nt, Artificial Sequence
  Description of Artificial Sequence: Synthetic oligonucleotide
  Antisense strand to SEQ ID NO: 2465454
ucaccuagauuacagauac

SEQ ID NO: 2465456 - RNA, 19 nt, Artificial Sequence
  Description of Artificial Sequence: Synthetic oligonucleotide
  Sense strand starting at position 758 of SEQ ID NO: 1887348
aucuguaaucuaggugaga

SEQ ID NO: 2465457 - RNA, 19 nt, Artificial Sequence
  Description of Artificial Sequence: Synthetic oligonucleotide
  Antisense strand to SEQ ID NO: 2465456
ucucaccuagauuacagau

SEQ ID NO: 2465458 - RNA, 19 nt, Artificial Sequence
  Description of Artificial Sequence: Synthetic oligonucleotide
  Sense strand starting at position 759 of SEQ ID NO: 1887348
ucuguaaucuaggugagag

SEQ ID NO: 2465459 - RNA, 19 nt, Artificial Sequence
  Description of Artificial Sequence: Synthetic oligonucleotide
  Antisense strand to SEQ ID NO: 2465458
cucucaccuagauuacaga

SEQ ID NO: 2465460 - RNA, 19 nt, Artificial Sequence
  Description of Artificial Sequence: Synthetic oligonucleotide
  Sense strand starting at position 760 of SEQ ID NO: 1887348
cuguaaucuaggugagaga

SEQ ID NO: 2465461 - RNA, 19 nt, Artificial Sequence
  Description of Artificial Sequence: Synthetic oligonucleotide
  Antisense strand to SEQ ID NO: 2465460
ucucucaccuagauuacag

SEQ ID NO: 2465462 - RNA, 19 nt, Artificial Sequence
  Description of Artificial Sequence: Synthetic oligonucleotide
  Sense strand starting at position 790 of SEQ ID NO: 1887348
ggguaauauacgugggaau

SEQ ID NO: 2465463 - RNA, 19 nt, Artificial Sequence
  Description of Artificial Sequence: Synthetic oligonucleotide
  Antisense strand to SEQ ID NO: 2465462
auucccacguauauuaccc

SEQ ID NO: 2465464 - RNA, 19 nt, Artificial Sequence
  Description of Artificial Sequence: Synthetic oligonucleotide
  Sense strand starting at position 791 of SEQ ID NO: 1887348
gguaauauacgugggaaug

SEQ ID NO: 2465465 - RNA, 19 nt, Artificial Sequence
  Description of Artificial Sequence: Synthetic oligonucleotide
  Antisense strand to SEQ ID NO: 2465464
cauucccacguauauuacc

SEQ ID NO: 2465466 - RNA, 19 nt, Artificial Sequence
  Description of Artificial Sequence: Synthetic oligonucleotide
  Sense strand starting at position 814 of SEQ ID NO: 1887348
ggauuugguuuauauauug

SEQ ID NO: 2465467 - RNA, 19 nt, Artificial Sequence
  Description of Artificial Sequence: Synthetic oligonucleotide
  Antisense strand to SEQ ID NO: 2465466
caauauauaaaccaaaucc

SEQ ID NO: 2465468 - RNA, 19 nt, Artificial Sequence
  Description of Artificial Sequence: Synthetic oligonucleotide
  Sense strand starting at position 820 of SEQ ID NO: 1887348
gguuuauauauuggagcua

SEQ ID NO: 2465469 - RNA, 19 nt, Artificial Sequence
  Description of Artificial Sequence: Synthetic oligonucleotide
  Antisense strand to SEQ ID NO: 2465468
uagcuccaauauauaaacc

SEQ ID NO: 2465470 - RNA, 19 nt, Artificial Sequence
  Description of Artificial Sequence: Synthetic oligonucleotide
  Sense strand starting at position 832 of SEQ ID NO: 1887348
ggagcuagaucuuugauga

SEQ ID NO: 2465471 - RNA, 19 nt, Artificial Sequence
  Description of Artificial Sequence: Synthetic oligonucleotide
  Antisense strand to SEQ ID NO: 2465470
ucaucaaagaucuagcucc

SEQ ID NO: 2465472 - RNA, 19 nt, Artificial Sequence
  Description of Artificial Sequence: Synthetic oligonucleotide
  Sense strand starting at position 833 of SEQ ID NO: 1887348
gagcuagaucuuugaugag

SEQ ID NO: 2465473 - RNA, 19 nt, Artificial Sequence
  Description of Artificial Sequence: Synthetic oligonucleotide
  Antisense strand to SEQ ID NO: 2465472
cucaucaaagaucuagcuc

SEQ ID NO: 2465474 - RNA, 19 nt, Artificial Sequence
  Description of Artificial Sequence: Synthetic oligonucleotide
  Sense strand starting at position 839 of SEQ ID NO: 1887348
gaucuuugaugagauugag

SEQ ID NO: 2465475 - RNA, 19 nt, Artificial Sequence
  Description of Artificial Sequence: Synthetic oligonucleotide
  Antisense strand to SEQ ID NO: 2465474
cucaaucucaucaaagauc

SEQ ID NO: 2465476 - RNA, 19 nt, Artificial Sequence
  Description of Artificial Sequence: Synthetic oligonucleotide
  Sense strand starting at position 842 of SEQ ID NO: 1887348
cuuugaugagauugaguga

SEQ ID NO: 2465477 - RNA, 19 nt, Artificial Sequence
  Description of Artificial Sequence: Synthetic oligonucleotide
  Antisense strand to SEQ ID NO: 2465476
ucacucaaucucaucaaag

SEQ ID NO: 2465478 - RNA, 19 nt, Artificial Sequence
  Description of Artificial Sequence: Synthetic oligonucleotide
  Sense strand starting at position 990 of SEQ ID NO: 1887348
ccuaaagauuacgugcgau

SEQ ID NO: 2465479 - RNA, 19 nt, Artificial Sequence
  Description of Artificial Sequence: Synthetic oligonucleotide
  Antisense strand to SEQ ID NO: 2465478
aucgcacguaaucuuuagg

SEQ ID NO: 2465480 - RNA, 19 nt, Artificial Sequence
  Description of Artificial Sequence: Synthetic oligonucleotide
  Sense strand starting at position 993 of SEQ ID NO: 1887348
aaagauuacgugcgauaca

SEQ ID NO: 2465481 - RNA, 19 nt, Artificial Sequence
  Description of Artificial Sequence: Synthetic oligonucleotide
  Antisense strand to SEQ ID NO: 2465480
uguaucgcacguaaucuuu

SEQ ID NO: 2465482 - RNA, 19 nt, Artificial Sequence
  Description of Artificial Sequence: Synthetic oligonucleotide
  Sense strand starting at position 996 of SEQ ID NO: 1887348
gauuacgugcgauacaauu

SEQ ID NO: 2465483 - RNA, 19 nt, Artificial Sequence
  Description of Artificial Sequence: Synthetic oligonucleotide
  Antisense strand to SEQ ID NO: 2465482
aauuguaucgcacguaauc

SEQ ID NO: 2465484 - RNA, 19 nt, Artificial Sequence
  Description of Artificial Sequence: Synthetic oligonucleotide
  Sense strand starting at position 1004 of SEQ ID NO: 1887348
gcgauacaauuccauuuau

SEQ ID NO: 2465485 - RNA, 19 nt, Artificial Sequence
  Description of Artificial Sequence: Synthetic oligonucleotide
  Antisense strand to SEQ ID NO: 2465484
auaaauggaauuguaucgc

SEQ ID NO: 2465486 - RNA, 19 nt, Artificial Sequence
  Description of Artificial Sequence: Synthetic oligonucleotide
  Sense strand starting at position 1101 of SEQ ID NO: 1887348
gucaauugaagcuaggagu

SEQ ID NO: 2465487 - RNA, 19 nt, Artificial Sequence
  Description of Artificial Sequence: Synthetic oligonucleotide
  Antisense strand to SEQ ID NO: 2465486
acuccuagcuucaauugac

SEQ ID NO: 2465488 - RNA, 19 nt, Artificial Sequence
  Description of Artificial Sequence: Synthetic oligonucleotide
  Sense strand starting at position 1313 of SEQ ID NO: 1887348
gagacccagucuguauaaa

SEQ ID NO: 2465489 - RNA, 19 nt, Artificial Sequence
  Description of Artificial Sequence: Synthetic oligonucleotide
  Antisense strand to SEQ ID NO: 2465488
uuuauacagacugggucuc

SEQ ID NO: 2465490 - RNA, 19 nt, Artificial Sequence
  Description of Artificial Sequence: Synthetic oligonucleotide
  Sense strand starting at position 1477 of SEQ ID NO: 1887348
aguguauacaugugucaag

SEQ ID NO: 2465491 - RNA, 19 nt, Artificial Sequence
  Description of Artificial Sequence: Synthetic oligonucleotide
  Antisense strand to SEQ ID NO: 2465490
cuugacacauguauacacu

SEQ ID NO: 2465492 - RNA, 19 nt, Artificial Sequence
  Description of Artificial Sequence: Synthetic oligonucleotide
  Sense strand starting at position 1478 of SEQ ID NO: 1887348
guguauacaugugucaaga

SEQ ID NO: 2465493 - RNA, 19 nt, Artificial Sequence
  Description of Artificial Sequence: Synthetic oligonucleotide
  Antisense strand to SEQ ID NO: 2465492
ucuugacacauguauacac

SEQ ID NO: 2465494 - RNA, 19 nt, Artificial Sequence
  Description of Artificial Sequence: Synthetic oligonucleotide
  Sense strand starting at position 1622 of SEQ ID NO: 1887348
uugccacuucguguaaguu

SEQ ID NO: 2465495 - RNA, 19 nt, Artificial Sequence
  Description of Artificial Sequence: Synthetic oligonucleotide
  Antisense strand to SEQ ID NO: 2465494
aacuuacacgaaguggcaa

SEQ ID NO: 2465496 - RNA, 19 nt, Artificial Sequence
  Description of Artificial Sequence: Synthetic oligonucleotide
  Sense strand starting at position 2696 of SEQ ID NO: 1887348
gcugaacuugagggaaagu

SEQ ID NO: 2465497 - RNA, 19 nt, Artificial Sequence
  Description of Artificial Sequence: Synthetic oligonucleotide
  Antisense strand to SEQ ID NO: 2465496
acuuucccucaaguucagc

SEQ ID NO: 2465498 - RNA, 19 nt, Artificial Sequence
  Description of Artificial Sequence: Synthetic oligonucleotide
  Sense strand starting at position 2957 of SEQ ID NO: 1887348
cagugugcuccaguguuau

SEQ ID NO: 2465499 - RNA, 19 nt, Artificial Sequence
  Description of Artificial Sequence: Synthetic oligonucleotide
  Antisense strand to SEQ ID NO: 2465498
auaacacuggagcacacug

SEQ ID NO: 2465500 - RNA, 19 nt, Artificial Sequence
  Description of Artificial Sequence: Synthetic oligonucleotide
  Sense strand starting at position 3010 of SEQ ID NO: 1887348
gccauugugauccgggaac

SEQ ID NO: 2465501 - RNA, 19 nt, Artificial Sequence
  Description of Artificial Sequence: Synthetic oligonucleotide
  Antisense strand to SEQ ID NO: 2465500
guucccggaucacaauggc

SEQ ID NO: 2465502 - RNA, 19 nt, Artificial Sequence
  Description of Artificial Sequence: Synthetic oligonucleotide
  Sense strand starting at position 3012 of SEQ ID NO: 1887348
cauugugauccgggaacuu

SEQ ID NO: 2465503 - RNA, 19 nt, Artificial Sequence
  Description of Artificial Sequence: Synthetic oligonucleotide
  Antisense strand to SEQ ID NO: 2465502
aaguucccggaucacaaug

SEQ ID NO: 2465504 - RNA, 19 nt, Artificial Sequence
  Description of Artificial Sequence: Synthetic oligonucleotide
  Sense strand starting at position 3055 of SEQ ID NO: 1887348
guggguagugcauacagua

SEQ ID NO: 2465505 - RNA, 19 nt, Artificial Sequence
  Description of Artificial Sequence: Synthetic oligonucleotide
  Antisense strand to SEQ ID NO: 2465504
uacuguaugcacuacccac

SEQ ID NO: 2465506 - RNA, 19 nt, Artificial Sequence
  Description of Artificial Sequence: Synthetic oligonucleotide
  Sense strand starting at position 3119 of SEQ ID NO: 1887348
gcgcugugggucgugcaaa

SEQ ID NO: 2465507 - RNA, 19 nt, Artificial Sequence
  Description of Artificial Sequence: Synthetic oligonucleotide
  Antisense strand to SEQ ID NO: 2465506
uuugcacgacccacagcgc

SEQ ID NO: 2465508 - RNA, 19 nt, Artificial Sequence
  Description of Artificial Sequence: Synthetic oligonucleotide
  Sense strand starting at position 3124 of SEQ ID NO: 1887348
gugggucgugcaaacagua

SEQ ID NO: 2465509 - RNA, 19 nt, Artificial Sequence
  Description of Artificial Sequence: Synthetic oligonucleotide
  Antisense strand to SEQ ID NO: 2465508
uacuguuugcacgacccac

SEQ ID NO: 2465510 - RNA, 19 nt, Artificial Sequence
  Description of Artificial Sequence: Synthetic oligonucleotide
  Sense strand starting at position 3233 of SEQ ID NO: 1887348
gcgcuagaucgugcacaca

SEQ ID NO: 2465511 - RNA, 19 nt, Artificial Sequence
  Description of Artificial Sequence: Synthetic oligonucleotide
  Antisense strand to SEQ ID NO: 2465510
ugugugcacgaucuagcgc

SEQ ID NO: 2465512 - RNA, 19 nt, Artificial Sequence
  Description of Artificial Sequence: Synthetic oligonucleotide
  Sense strand starting at position 3282 of SEQ ID NO: 1887348
uuuauucuccaugguacuu

SEQ ID NO: 2465513 - RNA, 19 nt, Artificial Sequence
  Description of Artificial Sequence: Synthetic oligonucleotide
  Antisense strand to SEQ ID NO: 2465512
aaguaccauggagaauaaa

SEQ ID NO: 2465514 - RNA, 19 nt, Artificial Sequence
  Description of Artificial Sequence: Synthetic oligonucleotide
  Sense strand starting at position 3291 of SEQ ID NO: 1887348
caugguacuuugcuaaagu

SEQ ID NO: 2465515 - RNA, 19 nt, Artificial Sequence
  Description of Artificial Sequence: Synthetic oligonucleotide
  Antisense strand to SEQ ID NO: 2465514
acuuuagcaaaguaccaug

SEQ ID NO: 2465516 - RNA, 19 nt, Artificial Sequence
  Description of Artificial Sequence: Synthetic oligonucleotide
  Sense strand starting at position 3418 of SEQ ID NO: 1887348
ggaauugacuugccuucca

SEQ ID NO: 2465517 - RNA, 19 nt, Artificial Sequence
  Description of Artificial Sequence: Synthetic oligonucleotide
  Antisense strand to SEQ ID NO: 2465516
uggaaggcaagucaauucc

SEQ ID NO: 2465518 - RNA, 19 nt, Artificial Sequence
  Description of Artificial Sequence: Synthetic oligonucleotide
  Sense strand starting at position 3644 of SEQ ID NO: 1887348
ggcgcuccgcguuuggaaa

SEQ ID NO: 2465519 - RNA, 19 nt, Artificial Sequence
  Description of Artificial Sequence: Synthetic oligonucleotide
  Antisense strand to SEQ ID NO: 2465518
uuuccaaacgcggagcgcc

SEQ ID NO: 2465520 - RNA, 19 nt, Artificial Sequence
  Description of Artificial Sequence: Synthetic oligonucleotide
  Sense strand starting at position 3710 of SEQ ID NO: 1887348
augggagucgguggguuau

SEQ ID NO: 2465521 - RNA, 19 nt, Artificial Sequence
  Description of Artificial Sequence: Synthetic oligonucleotide
  Antisense strand to SEQ ID NO: 2465520
auaacccaccgacucccau

SEQ ID NO: 2465522 - RNA, 19 nt, Artificial Sequence
  Description of Artificial Sequence: Synthetic oligonucleotide
  Sense strand starting at position 3711 of SEQ ID NO: 1887348
ugggagucgguggguuaua

SEQ ID NO: 2465523 - RNA, 19 nt, Artificial Sequence
  Description of Artificial Sequence: Synthetic oligonucleotide
  Antisense strand to SEQ ID NO: 2465522
uauaacccaccgacuccca

SEQ ID NO: 2465524 - RNA, 19 nt, Artificial Sequence
  Description of Artificial Sequence: Synthetic oligonucleotide
  Sense strand starting at position 3761 of SEQ ID NO: 1887348
uuagcuuagugacucaagu

SEQ ID NO: 2465525 - RNA, 19 nt, Artificial Sequence
  Description of Artificial Sequence: Synthetic oligonucleotide
  Antisense strand to SEQ ID NO: 2465524
acuugagucacuaagcuaa

SEQ ID NO: 2465526 - RNA, 19 nt, Artificial Sequence
  Description of Artificial Sequence: Synthetic oligonucleotide
  Sense strand starting at position 3763 of SEQ ID NO: 1887348
agcuuagugacucaagugu

SEQ ID NO: 2465527 - RNA, 19 nt, Artificial Sequence
  Description of Artificial Sequence: Synthetic oligonucleotide
  Antisense strand to SEQ ID NO: 2465526
acacuugagucacuaagcu

SEQ ID NO: 2465528 - RNA, 19 nt, Artificial Sequence
  Description of Artificial Sequence: Synthetic oligonucleotide
  Sense strand starting at position 3820 of SEQ ID NO: 1887348
aagagcuugugaccaaaca

SEQ ID NO: 2465529 - RNA, 19 nt, Artificial Sequence
  Description of Artificial Sequence: Synthetic oligonucleotide
  Antisense strand to SEQ ID NO: 2465528
uguuuggucacaagcucuu

SEQ ID NO: 2465530 - RNA, 19 nt, Artificial Sequence
  Description of Artificial Sequence: Synthetic oligonucleotide
  Sense strand starting at position 326 of SEQ ID NO: 1887349
gucucuucugggcaaauca

SEQ ID NO: 2465531 - RNA, 19 nt, Artificial Sequence
  Description of Artificial Sequence: Synthetic oligonucleotide
  Antisense strand to SEQ ID NO: 2465530
ugauuugcccagaagagac

SEQ ID NO: 2465532 - RNA, 19 nt, Artificial Sequence
  Description of Artificial Sequence: Synthetic oligonucleotide
  Sense strand starting at position 434 of SEQ ID NO: 1887349
gggaguugcaaugaucuug

SEQ ID NO: 2465533 - RNA, 19 nt, Artificial Sequence
  Description of Artificial Sequence: Synthetic oligonucleotide
  Antisense strand to SEQ ID NO: 2465532
caagaucauugcaacuccc

SEQ ID NO: 2465534 - RNA, 19 nt, Artificial Sequence
  Description of Artificial Sequence: Synthetic oligonucleotide
  Sense strand starting at position 464 of SEQ ID NO: 1887349
uuggaaauugacugucucu

SEQ ID NO: 2465535 - RNA, 19 nt, Artificial Sequence
  Description of Artificial Sequence: Synthetic oligonucleotide
  Antisense strand to SEQ ID NO: 2465534
agagacagucaauuuccaa

SEQ ID NO: 2465536 - RNA, 19 nt, Artificial Sequence
  Description of Artificial Sequence: Synthetic oligonucleotide
  Sense strand starting at position 469 of SEQ ID NO: 1887349
aauugacugucucugagau

SEQ ID NO: 2465537 - RNA, 19 nt, Artificial Sequence
  Description of Artificial Sequence: Synthetic oligonucleotide
  Antisense strand to SEQ ID NO: 2465536
aucucagagacagucaauu

SEQ ID NO: 2465538 - RNA, 19 nt, Artificial Sequence
  Description of Artificial Sequence: Synthetic oligonucleotide
  Sense strand starting at position 470 of SEQ ID NO: 1887349
auugacugucucugagauu

SEQ ID NO: 2465539 - RNA, 19 nt, Artificial Sequence
  Description of Artificial Sequence: Synthetic oligonucleotide
  Antisense strand to SEQ ID NO: 2465538
aaucucagagacagucaau

SEQ ID NO: 2465540 - RNA, 19 nt, Artificial Sequence
  Description of Artificial Sequence: Synthetic oligonucleotide
  Sense strand starting at position 493 of SEQ ID NO: 1887349
gcagcuauauuugauuuga

SEQ ID NO: 2465541 - RNA, 19 nt, Artificial Sequence
  Description of Artificial Sequence: Synthetic oligonucleotide
  Antisense strand to SEQ ID NO: 2465540
ucaaaucaaauauagcugc

SEQ ID NO: 2465542 - RNA, 19 nt, Artificial Sequence
  Description of Artificial Sequence: Synthetic oligonucleotide
  Sense strand starting at position 536 of SEQ ID NO: 1887349
uguguugggaguuaaucaa

SEQ ID NO: 2465543 - RNA, 19 nt, Artificial Sequence
  Description of Artificial Sequence: Synthetic oligonucleotide
  Antisense strand to SEQ ID NO: 2465542
uugauuaacucccaacaca

SEQ ID NO: 2465544 - RNA, 19 nt, Artificial Sequence
  Description of Artificial Sequence: Synthetic oligonucleotide
  Sense strand starting at position 621 of SEQ ID NO: 1887349
agauaagguuugagggaga

SEQ ID NO: 2465545 - RNA, 19 nt, Artificial Sequence
  Description of Artificial Sequence: Synthetic oligonucleotide
  Antisense strand to SEQ ID NO: 2465544
ucucccucaaaccuuaucu

SEQ ID NO: 2465546 - RNA, 19 nt, Artificial Sequence
  Description of Artificial Sequence: Synthetic oligonucleotide
  Sense strand starting at position 777 of SEQ ID NO: 1887349
ucugaauuccuguagacau

SEQ ID NO: 2465547 - RNA, 19 nt, Artificial Sequence
  Description of Artificial Sequence: Synthetic oligonucleotide
  Antisense strand to SEQ ID NO: 2465546
augucuacaggaauucaga

SEQ ID NO: 2465548 - RNA, 19 nt, Artificial Sequence
  Description of Artificial Sequence: Synthetic oligonucleotide
  Sense strand starting at position 779 of SEQ ID NO: 1887349
ugaauuccuguagacaucu

SEQ ID NO: 2465549 - RNA, 19 nt, Artificial Sequence
  Description of Artificial Sequence: Synthetic oligonucleotide
  Antisense strand to SEQ ID NO: 2465548
agaugucuacaggaauuca

SEQ ID NO: 2465550 - RNA, 19 nt, Artificial Sequence
  Description of Artificial Sequence: Synthetic oligonucleotide
  Sense strand starting at position 818 of SEQ ID NO: 1887349
aucacuuaauagucggaau

SEQ ID NO: 2465551 - RNA, 19 nt, Artificial Sequence
  Description of Artificial Sequence: Synthetic oligonucleotide
  Antisense strand to SEQ ID NO: 2465550
auuccgacuauuaagugau

SEQ ID NO: 2465552 - RNA, 19 nt, Artificial Sequence
  Description of Artificial Sequence: Synthetic oligonucleotide
  Sense strand starting at position 1061 of SEQ ID NO: 1887349
ccagcuaagugauucuaau

SEQ ID NO: 2465553 - RNA, 19 nt, Artificial Sequence
  Description of Artificial Sequence: Synthetic oligonucleotide
  Antisense strand to SEQ ID NO: 2465552
auuagaaucacuuagcugg

SEQ ID NO: 2465554 - RNA, 19 nt, Artificial Sequence
  Description of Artificial Sequence: Synthetic oligonucleotide
  Sense strand starting at position 1094 of SEQ ID NO: 1887349
gggaacugcugacuucuua

SEQ ID NO: 2465555 - RNA, 19 nt, Artificial Sequence
  Description of Artificial Sequence: Synthetic oligonucleotide
  Antisense strand to SEQ ID NO: 2465554
uaagaagucagcaguuccc

SEQ ID NO: 2465556 - RNA, 19 nt, Artificial Sequence
  Description of Artificial Sequence: Synthetic oligonucleotide
  Sense strand starting at position 1098 of SEQ ID NO: 1887349
acugcugacuucuuagaac

SEQ ID NO: 2465557 - RNA, 19 nt, Artificial Sequence
  Description of Artificial Sequence: Synthetic oligonucleotide
  Antisense strand to SEQ ID NO: 2465556
guucuaagaagucagcagu

SEQ ID NO: 2465558 - RNA, 19 nt, Artificial Sequence
  Description of Artificial Sequence: Synthetic oligonucleotide
  Sense strand starting at position 1140 of SEQ ID NO: 1887349
auguccuauuuacagauga

SEQ ID NO: 2465559 - RNA, 19 nt, Artificial Sequence
  Description of Artificial Sequence: Synthetic oligonucleotide
  Antisense strand to SEQ ID NO: 2465558
ucaucuguaaauaggacau

SEQ ID NO: 2465560 - RNA, 19 nt, Artificial Sequence
  Description of Artificial Sequence: Synthetic oligonucleotide
  Sense strand starting at position 1245 of SEQ ID NO: 1887349
gcagcugugcugucucaau

SEQ ID NO: 2465561 - RNA, 19 nt, Artificial Sequence
  Description of Artificial Sequence: Synthetic oligonucleotide
  Antisense strand to SEQ ID NO: 2465560
auugagacagcacagcugc

SEQ ID NO: 2465562 - RNA, 19 nt, Artificial Sequence
  Description of Artificial Sequence: Synthetic oligonucleotide
  Sense strand starting at position 1276 of SEQ ID NO: 1887349
cagugugguccagagacca

SEQ ID NO: 2465563 - RNA, 19 nt, Artificial Sequence
  Description of Artificial Sequence: Synthetic oligonucleotide
  Antisense strand to SEQ ID NO: 2465562
uggucucuggaccacacug

SEQ ID NO: 2465564 - RNA, 19 nt, Artificial Sequence
  Description of Artificial Sequence: Synthetic oligonucleotide
  Sense strand starting at position 1426 of SEQ ID NO: 1887349
gucaaaugcccugaagguu

SEQ ID NO: 2465565 - RNA, 19 nt, Artificial Sequence
  Description of Artificial Sequence: Synthetic oligonucleotide
  Antisense strand to SEQ ID NO: 2465564
aaccuucagggcauuugac

SEQ ID NO: 2465566 - RNA, 19 nt, Artificial Sequence
  Description of Artificial Sequence: Synthetic oligonucleotide
  Sense strand starting at position 1573 of SEQ ID NO: 1887349
guuagaaauccuggaguua

SEQ ID NO: 2465567 - RNA, 19 nt, Artificial Sequence
  Description of Artificial Sequence: Synthetic oligonucleotide
  Antisense strand to SEQ ID NO: 2465566
uaacuccaggauuucuaac

SEQ ID NO: 2465568 - RNA, 19 nt, Artificial Sequence
  Description of Artificial Sequence: Synthetic oligonucleotide
  Sense strand starting at position 1603 of SEQ ID NO: 1887349
ugcuguuucguguuuguga

SEQ ID NO: 2465569 - RNA, 19 nt, Artificial Sequence
  Description of Artificial Sequence: Synthetic oligonucleotide
  Antisense strand to SEQ ID NO: 2465568
ucacaaacacgaaacagca

SEQ ID NO: 2465570 - RNA, 19 nt, Artificial Sequence
  Description of Artificial Sequence: Synthetic oligonucleotide
  Sense strand starting at position 1716 of SEQ ID NO: 1887349
gacuguuagccugauugau

SEQ ID NO: 2465571 - RNA, 19 nt, Artificial Sequence
  Description of Artificial Sequence: Synthetic oligonucleotide
  Antisense strand to SEQ ID NO: 2465570
aucaaucaggcuaacaguc

SEQ ID NO: 2465572 - RNA, 19 nt, Artificial Sequence
  Description of Artificial Sequence: Synthetic oligonucleotide
  Sense strand starting at position 1728 of SEQ ID NO: 1887349
gauugauggccugguggaa

SEQ ID NO: 2465573 - RNA, 19 nt, Artificial Sequence
  Description of Artificial Sequence: Synthetic oligonucleotide
  Antisense strand to SEQ ID NO: 2465572
uuccaccaggccaucaauc

SEQ ID NO: 2465574 - RNA, 19 nt, Artificial Sequence
  Description of Artificial Sequence: Synthetic oligonucleotide
  Sense strand starting at position 1764 of SEQ ID NO: 1887349
agguaauuagacgaucugu

SEQ ID NO: 2465575 - RNA, 19 nt, Artificial Sequence
  Description of Artificial Sequence: Synthetic oligonucleotide
  Antisense strand to SEQ ID NO: 2465574
acagaucgucuaauuaccu

SEQ ID NO: 2465576 - RNA, 19 nt, Artificial Sequence
  Description of Artificial Sequence: Synthetic oligonucleotide
  Sense strand starting at position 1816 of SEQ ID NO: 1887349
gccuuacgugauuaggaug

SEQ ID NO: 2465577 - RNA, 19 nt, Artificial Sequence
  Description of Artificial Sequence: Synthetic oligonucleotide
  Antisense strand to SEQ ID NO: 2465576
cauccuaaucacguaaggc

SEQ ID NO: 2465578 - RNA, 19 nt, Artificial Sequence
  Description of Artificial Sequence: Synthetic oligonucleotide
  Sense strand starting at position 2210 of SEQ ID NO: 1887349
cgggauauucugggagaug

SEQ ID NO: 2465579 - RNA, 19 nt, Artificial Sequence
  Description of Artificial Sequence: Synthetic oligonucleotide
  Antisense strand to SEQ ID NO: 2465578
caucucccagaauaucccg

SEQ ID NO: 2465580 - RNA, 19 nt, Artificial Sequence
  Description of Artificial Sequence: Synthetic oligonucleotide
  Sense strand starting at position 2317 of SEQ ID NO: 1887349
gcacgcauucuagaaggaa

SEQ ID NO: 2465581 - RNA, 19 nt, Artificial Sequence
  Description of Artificial Sequence: Synthetic oligonucleotide
  Antisense strand to SEQ ID NO: 2465580
uuccuucuagaaugcgugc

SEQ ID NO: 2465582 - RNA, 19 nt, Artificial Sequence
  Description of Artificial Sequence: Synthetic oligonucleotide
  Sense strand starting at position 3224 of SEQ ID NO: 1887349
augaaaucauuguuacugu

SEQ ID NO: 2465583 - RNA, 19 nt, Artificial Sequence
  Description of Artificial Sequence: Synthetic oligonucleotide
  Antisense strand to SEQ ID NO: 2465582
acaguaacaaugauuucau

SEQ ID NO: 2465584 - RNA, 19 nt, Artificial Sequence
  Description of Artificial Sequence: Synthetic oligonucleotide
  Sense strand starting at position 3267 of SEQ ID NO: 1887349
acaugaucugcucaaacug

SEQ ID NO: 2465585 - RNA, 19 nt, Artificial Sequence
  Description of Artificial Sequence: Synthetic oligonucleotide
  Antisense strand to SEQ ID NO: 2465584
caguuugagcagaucaugu

SEQ ID NO: 2465586 - RNA, 19 nt, Artificial Sequence
  Description of Artificial Sequence: Synthetic oligonucleotide
  Sense strand starting at position 3303 of SEQ ID NO: 1887349
ggagaaauuguaggucucu

SEQ ID NO: 2465587 - RNA, 19 nt, Artificial Sequence
  Description of Artificial Sequence: Synthetic oligonucleotide
  Antisense strand to SEQ ID NO: 2465586
agagaccuacaauuucucc

SEQ ID NO: 2465588 - RNA, 19 nt, Artificial Sequence
  Description of Artificial Sequence: Synthetic oligonucleotide
  Sense strand starting at position 3304 of SEQ ID NO: 1887349
gagaaauuguaggucucuc

SEQ ID NO: 2465589 - RNA, 19 nt, Artificial Sequence
  Description of Artificial Sequence: Synthetic oligonucleotide
  Antisense strand to SEQ ID NO: 2465588
gagagaccuacaauuucuc

SEQ ID NO: 2465590 - RNA, 19 nt, Artificial Sequence
  Description of Artificial Sequence: Synthetic oligonucleotide
  Sense strand starting at position 3317 of SEQ ID NO: 1887349
ucucucuuacucugggaua

SEQ ID NO: 2465591 - RNA, 19 nt, Artificial Sequence
  Description of Artificial Sequence: Synthetic oligonucleotide
  Antisense strand to SEQ ID NO: 2465590
uaucccagaguaagagaga

SEQ ID NO: 2465592 - RNA, 19 nt, Artificial Sequence
  Description of Artificial Sequence: Synthetic oligonucleotide
  Sense strand starting at position 3319 of SEQ ID NO: 1887349
ucucuuacucugggauauu

SEQ ID NO: 2465593 - RNA, 19 nt, Artificial Sequence
  Description of Artificial Sequence: Synthetic oligonucleotide
  Antisense strand to SEQ ID NO: 2465592
aauaucccagaguaagaga

SEQ ID NO: 2465594 - RNA, 19 nt, Artificial Sequence
  Description of Artificial Sequence: Synthetic oligonucleotide
  Sense strand starting at position 3345 of SEQ ID NO: 1887349
gagcaaagguauccaugau

SEQ ID NO: 2465595 - RNA, 19 nt, Artificial Sequence
  Description of Artificial Sequence: Synthetic oligonucleotide
  Antisense strand to SEQ ID NO: 2465594
aucauggauaccuuugcuc

SEQ ID NO: 2465596 - RNA, 19 nt, Artificial Sequence
  Description of Artificial Sequence: Synthetic oligonucleotide
  Sense strand starting at position 3546 of SEQ ID NO: 1887349
uaaugaggcuucccuggaa

SEQ ID NO: 2465597 - RNA, 19 nt, Artificial Sequence
  Description of Artificial Sequence: Synthetic oligonucleotide
  Antisense strand to SEQ ID NO: 2465596
uuccagggaagccucauua

SEQ ID NO: 2465598 - RNA, 19 nt, Artificial Sequence
  Description of Artificial Sequence: Synthetic oligonucleotide
  Sense strand starting at position 3570 of SEQ ID NO: 1887349
cugaauccauggccagaaa

SEQ ID NO: 2465599 - RNA, 19 nt, Artificial Sequence
  Description of Artificial Sequence: Synthetic oligonucleotide
  Antisense strand to SEQ ID NO: 2465598
uuucuggccauggauucag

SEQ ID NO: 2465600 - RNA, 19 nt, Artificial Sequence
  Description of Artificial Sequence: Synthetic oligonucleotide
  Sense strand starting at position 3573 of SEQ ID NO: 1887349
aauccauggccagaaaguu

SEQ ID NO: 2465601 - RNA, 19 nt, Artificial Sequence
  Description of Artificial Sequence: Synthetic oligonucleotide
  Antisense strand to SEQ ID NO: 2465600
aacuuucuggccauggauu

SEQ ID NO: 2465602 - RNA, 19 nt, Artificial Sequence
  Description of Artificial Sequence: Synthetic oligonucleotide
  Sense strand starting at position 3853 of SEQ ID NO: 1887349
uuaugugcuggccaggaau

SEQ ID NO: 2465603 - RNA, 19 nt, Artificial Sequence
  Description of Artificial Sequence: Synthetic oligonucleotide
  Antisense strand to SEQ ID NO: 2465602
auuccuggccagcacauaa

SEQ ID NO: 2465604 - RNA, 19 nt, Artificial Sequence
  Description of Artificial Sequence: Synthetic oligonucleotide
  Sense strand starting at position 3889 of SEQ ID NO: 1887349
gugcaagaagggcaucaua

SEQ ID NO: 2465605 - RNA, 19 nt, Artificial Sequence
  Description of Artificial Sequence: Synthetic oligonucleotide
  Antisense strand to SEQ ID NO: 2465604
uaugaugcccuucuugcac

SEQ ID NO: 2465606 - RNA, 19 nt, Artificial Sequence
  Description of Artificial Sequence: Synthetic oligonucleotide
  Sense strand starting at position 3900 of SEQ ID NO: 1887349
gcaucauaccagggucaga

SEQ ID NO: 2465607 - RNA, 19 nt, Artificial Sequence
  Description of Artificial Sequence: Synthetic oligonucleotide
  Antisense strand to SEQ ID NO: 2465606
ucugacccugguaugaugc

SEQ ID NO: 2465608 - RNA, 19 nt, Artificial Sequence
  Description of Artificial Sequence: Synthetic oligonucleotide
  Sense strand starting at position 3966 of SEQ ID NO: 1887349
gagucuuugaaggagugca

SEQ ID NO: 2465609 - RNA, 19 nt, Artificial Sequence
  Description of Artificial Sequence: Synthetic oligonucleotide
  Antisense strand to SEQ ID NO: 2465608
ugcacuccuucaaagacuc

SEQ ID NO: 2465610 - RNA, 19 nt, Artificial Sequence
  Description of Artificial Sequence: Synthetic oligonucleotide
  Sense strand starting at position 235 of SEQ ID NO: 1887350
ggagaugccuuccuuuaca

SEQ ID NO: 2465611 - RNA, 19 nt, Artificial Sequence
  Description of Artificial Sequence: Synthetic oligonucleotide
  Antisense strand to SEQ ID NO: 2465610
uguaaaggaaggcaucucc

SEQ ID NO: 2465612 - RNA, 19 nt, Artificial Sequence
  Description of Artificial Sequence: Synthetic oligonucleotide
  Sense strand starting at position 432 of SEQ ID NO: 1887350
ugaccaucccuguacuaca

SEQ ID NO: 2465613 - RNA, 19 nt, Artificial Sequence
  Description of Artificial Sequence: Synthetic oligonucleotide
  Antisense strand to SEQ ID NO: 2465612
uguaguacagggaugguca

SEQ ID NO: 2465614 - RNA, 19 nt, Artificial Sequence
  Description of Artificial Sequence: Synthetic oligonucleotide
  Sense strand starting at position 463 of SEQ ID NO: 1887350
ggaagagaguuggcuugaa

SEQ ID NO: 2465615 - RNA, 19 nt, Artificial Sequence
  Description of Artificial Sequence: Synthetic oligonucleotide
  Antisense strand to SEQ ID NO: 2465614
uucaagccaacucucuucc

SEQ ID NO: 2465616 - RNA, 19 nt, Artificial Sequence
  Description of Artificial Sequence: Synthetic oligonucleotide
  Sense strand starting at position 467 of SEQ ID NO: 1887350
gagaguuggcuugaaaugu

SEQ ID NO: 2465617 - RNA, 19 nt, Artificial Sequence
  Description of Artificial Sequence: Synthetic oligonucleotide
  Antisense strand to SEQ ID NO: 2465616
acauuucaagccaacucuc

SEQ ID NO: 2465618 - RNA, 19 nt, Artificial Sequence
  Description of Artificial Sequence: Synthetic oligonucleotide
  Sense strand starting at position 500 of SEQ ID NO: 1887350
aggaauuacugggaagaga

SEQ ID NO: 2465619 - RNA, 19 nt, Artificial Sequence
  Description of Artificial Sequence: Synthetic oligonucleotide
  Antisense strand to SEQ ID NO: 2465618
ucucuucccaguaauuccu

SEQ ID NO: 2465620 - RNA, 19 nt, Artificial Sequence
  Description of Artificial Sequence: Synthetic oligonucleotide
  Sense strand starting at position 1026 of SEQ ID NO: 1887350
uuaaaucuaggugguagau

SEQ ID NO: 2465621 - RNA, 19 nt, Artificial Sequence
  Description of Artificial Sequence: Synthetic oligonucleotide
  Antisense strand to SEQ ID NO: 2465620
aucuaccaccuagauuuaa

SEQ ID NO: 2465622 - RNA, 19 nt, Artificial Sequence
  Description of Artificial Sequence: Synthetic oligonucleotide
  Sense strand starting at position 1779 of SEQ ID NO: 1887350
aaguuaccucaugagaguu

SEQ ID NO: 2465623 - RNA, 19 nt, Artificial Sequence
  Description of Artificial Sequence: Synthetic oligonucleotide
  Antisense strand to SEQ ID NO: 2465622
aacucucaugagguaacuu

SEQ ID NO: 2465624 - RNA, 19 nt, Artificial Sequence
  Description of Artificial Sequence: Synthetic oligonucleotide
  Sense strand starting at position 2118 of SEQ ID NO: 1887350
agcuguggccagggagaaa

SEQ ID NO: 2465625 - RNA, 19 nt, Artificial Sequence
  Description of Artificial Sequence: Synthetic oligonucleotide
  Antisense strand to SEQ ID NO: 2465624
uuucucccuggccacagcu

SEQ ID NO: 2465626 - RNA, 19 nt, Artificial Sequence
  Description of Artificial Sequence: Synthetic oligonucleotide
  Sense strand starting at position 2292 of SEQ ID NO: 1887350
uuugcaaggaugugaagaa

SEQ ID NO: 2465627 - RNA, 19 nt, Artificial Sequence
  Description of Artificial Sequence: Synthetic oligonucleotide
  Antisense strand to SEQ ID NO: 2465626
uucuucacauccuugcaaa

SEQ ID NO: 2465628 - RNA, 19 nt, Artificial Sequence
  Description of Artificial Sequence: Synthetic oligonucleotide
  Sense strand starting at position 2308 of SEQ ID NO: 1887350
gaagaaauuccuggguuuc

SEQ ID NO: 2465629 - RNA, 19 nt, Artificial Sequence
  Description of Artificial Sequence: Synthetic oligonucleotide
  Antisense strand to SEQ ID NO: 2465628
gaaacccaggaauuucuuc

SEQ ID NO: 2465630 - RNA, 19 nt, Artificial Sequence
  Description of Artificial Sequence: Synthetic oligonucleotide
  Sense strand starting at position 2309 of SEQ ID NO: 1887350
aagaaauuccuggguuucu

SEQ ID NO: 2465631 - RNA, 19 nt, Artificial Sequence
  Description of Artificial Sequence: Synthetic oligonucleotide
  Antisense strand to SEQ ID NO: 2465630
agaaacccaggaauuucuu

SEQ ID NO: 2465632 - RNA, 19 nt, Artificial Sequence
  Description of Artificial Sequence: Synthetic oligonucleotide
  Sense strand starting at position 2310 of SEQ ID NO: 1887350
agaaauuccuggguuucua

SEQ ID NO: 2465633 - RNA, 19 nt, Artificial Sequence
  Description of Artificial Sequence: Synthetic oligonucleotide
  Antisense strand to SEQ ID NO: 2465632
uagaaacccaggaauuucu

SEQ ID NO: 2465634 - RNA, 19 nt, Artificial Sequence
  Description of Artificial Sequence: Synthetic oligonucleotide
  Sense strand starting at position 2341 of SEQ ID NO: 1887350
ggaccauuguaucccauga

SEQ ID NO: 2465635 - RNA, 19 nt, Artificial Sequence
  Description of Artificial Sequence: Synthetic oligonucleotide
  Antisense strand to SEQ ID NO: 2465634
ucaugggauacaauggucc

SEQ ID NO: 2465636 - RNA, 19 nt, Artificial Sequence
  Description of Artificial Sequence: Synthetic oligonucleotide
  Sense strand starting at position 2354 of SEQ ID NO: 1887350
ccaugagaucauugucuag

SEQ ID NO: 2465637 - RNA, 19 nt, Artificial Sequence
  Description of Artificial Sequence: Synthetic oligonucleotide
  Antisense strand to SEQ ID NO: 2465636
cuagacaaugaucucaugg

SEQ ID NO: 2465638 - RNA, 19 nt, Artificial Sequence
  Description of Artificial Sequence: Synthetic oligonucleotide
  Sense strand starting at position 2358 of SEQ ID NO: 1887350
gagaucauugucuagcuga

SEQ ID NO: 2465639 - RNA, 19 nt, Artificial Sequence
  Description of Artificial Sequence: Synthetic oligonucleotide
  Antisense strand to SEQ ID NO: 2465638
ucagcuagacaaugaucuc

SEQ ID NO: 2465640 - RNA, 19 nt, Artificial Sequence
  Description of Artificial Sequence: Synthetic oligonucleotide
  Sense strand starting at position 2368 of SEQ ID NO: 1887350
ucuagcugauuaguauaaa

SEQ ID NO: 2465641 - RNA, 19 nt, Artificial Sequence
  Description of Artificial Sequence: Synthetic oligonucleotide
  Antisense strand to SEQ ID NO: 2465640
uuuauacuaaucagcuaga

SEQ ID NO: 2465642 - RNA, 19 nt, Artificial Sequence
  Description of Artificial Sequence: Synthetic oligonucleotide
  Sense strand starting at position 2371 of SEQ ID NO: 1887350
agcugauuaguauaaagca

SEQ ID NO: 2465643 - RNA, 19 nt, Artificial Sequence
  Description of Artificial Sequence: Synthetic oligonucleotide
  Antisense strand to SEQ ID NO: 2465642
ugcuuuauacuaaucagcu

SEQ ID NO: 2465644 - RNA, 19 nt, Artificial Sequence
  Description of Artificial Sequence: Synthetic oligonucleotide
  Sense strand starting at position 2379 of SEQ ID NO: 1887350
aguauaaagcagugauuau

SEQ ID NO: 2465645 - RNA, 19 nt, Artificial Sequence
  Description of Artificial Sequence: Synthetic oligonucleotide
  Antisense strand to SEQ ID NO: 2465644
auaaucacugcuuuauacu

SEQ ID NO: 2465646 - RNA, 19 nt, Artificial Sequence
  Description of Artificial Sequence: Synthetic oligonucleotide
  Sense strand starting at position 2386 of SEQ ID NO: 1887350
agcagugauuaucucagaa

SEQ ID NO: 2465647 - RNA, 19 nt, Artificial Sequence
  Description of Artificial Sequence: Synthetic oligonucleotide
  Antisense strand to SEQ ID NO: 2465646
uucugagauaaucacugcu

SEQ ID NO: 2465648 - RNA, 19 nt, Artificial Sequence
  Description of Artificial Sequence: Synthetic oligonucleotide
  Sense strand starting at position 2539 of SEQ ID NO: 1887350
uuucuuuauuuagccagua

SEQ ID NO: 2465649 - RNA, 19 nt, Artificial Sequence
  Description of Artificial Sequence: Synthetic oligonucleotide
  Antisense strand to SEQ ID NO: 2465648
uacuggcuaaauaaagaaa

SEQ ID NO: 2465650 - RNA, 19 nt, Artificial Sequence
  Description of Artificial Sequence: Synthetic oligonucleotide
  Sense strand starting at position 2555 of SEQ ID NO: 1887350
guaaacauacauugaguga

SEQ ID NO: 2465651 - RNA, 19 nt, Artificial Sequence
  Description of Artificial Sequence: Synthetic oligonucleotide
  Antisense strand to SEQ ID NO: 2465650
ucacucaauguauguuuac

SEQ ID NO: 2465652 - RNA, 19 nt, Artificial Sequence
  Description of Artificial Sequence: Synthetic oligonucleotide
  Sense strand starting at position 2559 of SEQ ID NO: 1887350
acauacauugagugaaugu

SEQ ID NO: 2465653 - RNA, 19 nt, Artificial Sequence
  Description of Artificial Sequence: Synthetic oligonucleotide
  Antisense strand to SEQ ID NO: 2465652
acauucacucaauguaugu

SEQ ID NO: 2465654 - RNA, 19 nt, Artificial Sequence
  Description of Artificial Sequence: Synthetic oligonucleotide
  Sense strand starting at position 2640 of SEQ ID NO: 1887350
agccucuguggguaagaau

SEQ ID NO: 2465655 - RNA, 19 nt, Artificial Sequence
  Description of Artificial Sequence: Synthetic oligonucleotide
  Antisense strand to SEQ ID NO: 2465654
auucuuacccacagaggcu

SEQ ID NO: 2465656 - RNA, 19 nt, Artificial Sequence
  Description of Artificial Sequence: Synthetic oligonucleotide
  Sense strand starting at position 2661 of SEQ ID NO: 1887350
uacacuacuguugagugaa

SEQ ID NO: 2465657 - RNA, 19 nt, Artificial Sequence
  Description of Artificial Sequence: Synthetic oligonucleotide
  Antisense strand to SEQ ID NO: 2465656
uucacucaacaguagugua

SEQ ID NO: 2465658 - RNA, 19 nt, Artificial Sequence
  Description of Artificial Sequence: Synthetic oligonucleotide
  Sense strand starting at position 2663 of SEQ ID NO: 1887350
cacuacuguugagugaaau

SEQ ID NO: 2465659 - RNA, 19 nt, Artificial Sequence
  Description of Artificial Sequence: Synthetic oligonucleotide
  Antisense strand to SEQ ID NO: 2465658
auuucacucaacaguagug

SEQ ID NO: 2465660 - RNA, 19 nt, Artificial Sequence
  Description of Artificial Sequence: Synthetic oligonucleotide
  Sense strand starting at position 2664 of SEQ ID NO: 1887350
acuacuguugagugaaaug

SEQ ID NO: 2465661 - RNA, 19 nt, Artificial Sequence
  Description of Artificial Sequence: Synthetic oligonucleotide
  Antisense strand to SEQ ID NO: 2465660
cauuucacucaacaguagu

SEQ ID NO: 2465662 - RNA, 19 nt, Artificial Sequence
  Description of Artificial Sequence: Synthetic oligonucleotide
  Sense strand starting at position 2669 of SEQ ID NO: 1887350
uguugagugaaaugauaua

SEQ ID NO: 2465663 - RNA, 19 nt, Artificial Sequence
  Description of Artificial Sequence: Synthetic oligonucleotide
  Antisense strand to SEQ ID NO: 2465662
uauaucauuucacucaaca

SEQ ID NO: 2465664 - RNA, 19 nt, Artificial Sequence
  Description of Artificial Sequence: Synthetic oligonucleotide
  Sense strand starting at position 2805 of SEQ ID NO: 1887350
agcuuucuggaaggagauu

SEQ ID NO: 2465665 - RNA, 19 nt, Artificial Sequence
  Description of Artificial Sequence: Synthetic oligonucleotide
  Antisense strand to SEQ ID NO: 2465664
aaucuccuuccagaaagcu

SEQ ID NO: 2465666 - RNA, 19 nt, Artificial Sequence
  Description of Artificial Sequence: Synthetic oligonucleotide
  Sense strand starting at position 2817 of SEQ ID NO: 1887350
ggagauuggccuuggagga

SEQ ID NO: 2465667 - RNA, 19 nt, Artificial Sequence
  Description of Artificial Sequence: Synthetic oligonucleotide
  Antisense strand to SEQ ID NO: 2465666
uccuccaaggccaaucucc

SEQ ID NO: 2465668 - RNA, 19 nt, Artificial Sequence
  Description of Artificial Sequence: Synthetic oligonucleotide
  Sense strand starting at position 2883 of SEQ ID NO: 1887350
gaucgaaugcaagaaaugu

SEQ ID NO: 2465669 - RNA, 19 nt, Artificial Sequence
  Description of Artificial Sequence: Synthetic oligonucleotide
  Antisense strand to SEQ ID NO: 2465668
acauuucuugcauucgauc

SEQ ID NO: 2465670 - RNA, 19 nt, Artificial Sequence
  Description of Artificial Sequence: Synthetic oligonucleotide
  Sense strand starting at position 2961 of SEQ ID NO: 1887350
agacaaguggacggucauu

SEQ ID NO: 2465671 - RNA, 19 nt, Artificial Sequence
  Description of Artificial Sequence: Synthetic oligonucleotide
  Antisense strand to SEQ ID NO: 2465670
aaugaccguccacuugucu

SEQ ID NO: 2465672 - RNA, 19 nt, Artificial Sequence
  Description of Artificial Sequence: Synthetic oligonucleotide
  Sense strand starting at position 3020 of SEQ ID NO: 1887350
ccuugaaugccaggauaau

SEQ ID NO: 2465673 - RNA, 19 nt, Artificial Sequence
  Description of Artificial Sequence: Synthetic oligonucleotide
  Antisense strand to SEQ ID NO: 2465672
auuauccuggcauucaagg

SEQ ID NO: 2465674 - RNA, 19 nt, Artificial Sequence
  Description of Artificial Sequence: Synthetic oligonucleotide
  Sense strand starting at position 3044 of SEQ ID NO: 1887350
ucaucuucugaguaaggcu

SEQ ID NO: 2465675 - RNA, 19 nt, Artificial Sequence
  Description of Artificial Sequence: Synthetic oligonucleotide
  Antisense strand to SEQ ID NO: 2465674
agccuuacucagaagauga

SEQ ID NO: 2465676 - RNA, 19 nt, Artificial Sequence
  Description of Artificial Sequence: Synthetic oligonucleotide
  Sense strand starting at position 3052 of SEQ ID NO: 1887350
ugaguaaggcuuuagaguc

SEQ ID NO: 2465677 - RNA, 19 nt, Artificial Sequence
  Description of Artificial Sequence: Synthetic oligonucleotide
  Antisense strand to SEQ ID NO: 2465676
gacucuaaagccuuacuca

SEQ ID NO: 2465678 - RNA, 19 nt, Artificial Sequence
  Description of Artificial Sequence: Synthetic oligonucleotide
  Sense strand starting at position 3130 of SEQ ID NO: 1887350
aggccagagcgcuuugcaa

SEQ ID NO: 2465679 - RNA, 19 nt, Artificial Sequence
  Description of Artificial Sequence: Synthetic oligonucleotide
  Antisense strand to SEQ ID NO: 2465678
uugcaaagcgcucuggccu

SEQ ID NO: 2465680 - RNA, 19 nt, Artificial Sequence
  Description of Artificial Sequence: Synthetic oligonucleotide
  Sense strand starting at position 3165 of SEQ ID NO: 1887350
acauaugagucaucuacuu

SEQ ID NO: 2465681 - RNA, 19 nt, Artificial Sequence
  Description of Artificial Sequence: Synthetic oligonucleotide
  Antisense strand to SEQ ID NO: 2465680
aaguagaugacucauaugu

SEQ ID NO: 2465682 - RNA, 19 nt, Artificial Sequence
  Description of Artificial Sequence: Synthetic oligonucleotide
  Sense strand starting at position 3399 of SEQ ID NO: 1887350
uaagucagcgaaggaaaua

SEQ ID NO: 2465683 - RNA, 19 nt, Artificial Sequence
  Description of Artificial Sequence: Synthetic oligonucleotide
  Antisense strand to SEQ ID NO: 2465682
uauuuccuucgcugacuua

SEQ ID NO: 2465684 - RNA, 19 nt, Artificial Sequence
  Description of Artificial Sequence: Synthetic oligonucleotide
  Sense strand starting at position 3537 of SEQ ID NO: 1887350
ucucaaauguugguugaua

SEQ ID NO: 2465685 - RNA, 19 nt, Artificial Sequence
  Description of Artificial Sequence: Synthetic oligonucleotide
  Antisense strand to SEQ ID NO: 2465684
uaucaaccaacauuugaga

SEQ ID NO: 2465686 - RNA, 19 nt, Artificial Sequence
  Description of Artificial Sequence: Synthetic oligonucleotide
  Sense strand starting at position 3538 of SEQ ID NO: 1887350
cucaaauguugguugauau

SEQ ID NO: 2465687 - RNA, 19 nt, Artificial Sequence
  Description of Artificial Sequence: Synthetic oligonucleotide
  Antisense strand to SEQ ID NO: 2465686
auaucaaccaacauuugag

SEQ ID NO: 2465688 - RNA, 19 nt, Artificial Sequence
  Description of Artificial Sequence: Synthetic oligonucleotide
  Sense strand starting at position 3643 of SEQ ID NO: 1887350
uaagccagacugugauaaa

SEQ ID NO: 2465689 - RNA, 19 nt, Artificial Sequence
  Description of Artificial Sequence: Synthetic oligonucleotide
  Antisense strand to SEQ ID NO: 2465688
uuuaucacagucuggcuua

SEQ ID NO: 2465690 - RNA, 19 nt, Artificial Sequence
  Description of Artificial Sequence: Synthetic oligonucleotide
  Sense strand starting at position 1161 of SEQ ID NO: 1887351
gaggucauggugcggaaau

SEQ ID NO: 2465691 - RNA, 19 nt, Artificial Sequence
  Description of Artificial Sequence: Synthetic oligonucleotide
  Antisense strand to SEQ ID NO: 2465690
auuuccgcaccaugaccuc

SEQ ID NO: 2465692 - RNA, 19 nt, Artificial Sequence
  Description of Artificial Sequence: Synthetic oligonucleotide
  Sense strand starting at position 1163 of SEQ ID NO: 1887351
ggucauggugcggaaauaa

SEQ ID NO: 2465693 - RNA, 19 nt, Artificial Sequence
  Description of Artificial Sequence: Synthetic oligonucleotide
  Antisense strand to SEQ ID NO: 2465692
uuauuuccgcaccaugacc

SEQ ID NO: 2465694 - RNA, 19 nt, Artificial Sequence
  Description of Artificial Sequence: Synthetic oligonucleotide
  Sense strand starting at position 1499 of SEQ ID NO: 1887351
acccuugaaauguggguau

SEQ ID NO: 2465695 - RNA, 19 nt, Artificial Sequence
  Description of Artificial Sequence: Synthetic oligonucleotide
  Antisense strand to SEQ ID NO: 2465694
auacccacauuucaagggu

SEQ ID NO: 2465696 - RNA, 19 nt, Artificial Sequence
  Description of Artificial Sequence: Synthetic oligonucleotide
  Sense strand starting at position 1501 of SEQ ID NO: 1887351
ccuugaaauguggguauau

SEQ ID NO: 2465697 - RNA, 19 nt, Artificial Sequence
  Description of Artificial Sequence: Synthetic oligonucleotide
  Antisense strand to SEQ ID NO: 2465696
auauacccacauuucaagg

SEQ ID NO: 2465698 - RNA, 19 nt, Artificial Sequence
  Description of Artificial Sequence: Synthetic oligonucleotide
  Sense strand starting at position 1502 of SEQ ID NO: 1887351
cuugaaauguggguauaua

SEQ ID NO: 2465699 - RNA, 19 nt, Artificial Sequence
  Description of Artificial Sequence: Synthetic oligonucleotide
  Antisense strand to SEQ ID NO: 2465698
uauauacccacauuucaag

SEQ ID NO: 2465700 - RNA, 19 nt, Artificial Sequence
  Description of Artificial Sequence: Synthetic oligonucleotide
  Sense strand starting at position 1525 of SEQ ID NO: 1887351
gagagucaucccugcaaug

SEQ ID NO: 2465701 - RNA, 19 nt, Artificial Sequence
  Description of Artificial Sequence: Synthetic oligonucleotide
  Antisense strand to SEQ ID NO: 2465700
cauugcagggaugacucuc

SEQ ID NO: 2465702 - RNA, 19 nt, Artificial Sequence
  Description of Artificial Sequence: Synthetic oligonucleotide
  Sense strand starting at position 1527 of SEQ ID NO: 1887351
gagucaucccugcaaugau

SEQ ID NO: 2465703 - RNA, 19 nt, Artificial Sequence
  Description of Artificial Sequence: Synthetic oligonucleotide
  Antisense strand to SEQ ID NO: 2465702
aucauugcagggaugacuc

SEQ ID NO: 2465704 - RNA, 19 nt, Artificial Sequence
  Description of Artificial Sequence: Synthetic oligonucleotide
  Sense strand starting at position 2256 of SEQ ID NO: 1887351
ucaggacaucugggcguau

SEQ ID NO: 2465705 - RNA, 19 nt, Artificial Sequence
  Description of Artificial Sequence: Synthetic oligonucleotide
  Antisense strand to SEQ ID NO: 2465704
auacgcccagauguccuga

SEQ ID NO: 2465706 - RNA, 19 nt, Artificial Sequence
  Description of Artificial Sequence: Synthetic oligonucleotide
  Sense strand starting at position 2257 of SEQ ID NO: 1887351
caggacaucugggcguaua

SEQ ID NO: 2465707 - RNA, 19 nt, Artificial Sequence
  Description of Artificial Sequence: Synthetic oligonucleotide
  Antisense strand to SEQ ID NO: 2465706
uauacgcccagauguccug

SEQ ID NO: 2465708 - RNA, 19 nt, Artificial Sequence
  Description of Artificial Sequence: Synthetic oligonucleotide
  Sense strand starting at position 2260 of SEQ ID NO: 1887351
gacaucugggcguauacau

SEQ ID NO: 2465709 - RNA, 19 nt, Artificial Sequence
  Description of Artificial Sequence: Synthetic oligonucleotide
  Antisense strand to SEQ ID NO: 2465708
auguauacgcccagauguc

SEQ ID NO: 2465710 - RNA, 19 nt, Artificial Sequence
  Description of Artificial Sequence: Synthetic oligonucleotide
  Sense strand starting at position 2344 of SEQ ID NO: 1887351
ucaugagugguagagccua

SEQ ID NO: 2465711 - RNA, 19 nt, Artificial Sequence
  Description of Artificial Sequence: Synthetic oligonucleotide
  Antisense strand to SEQ ID NO: 2465710
uaggcucuaccacucauga

SEQ ID NO: 2465712 - RNA, 19 nt, Artificial Sequence
  Description of Artificial Sequence: Synthetic oligonucleotide
  Sense strand starting at position 2462 of SEQ ID NO: 1887351
guauauggauuuggaagua

SEQ ID NO: 2465713 - RNA, 19 nt, Artificial Sequence
  Description of Artificial Sequence: Synthetic oligonucleotide
  Antisense strand to SEQ ID NO: 2465712
uacuuccaaauccauauac

SEQ ID NO: 2465714 - RNA, 19 nt, Artificial Sequence
  Description of Artificial Sequence: Synthetic oligonucleotide
  Sense strand starting at position 2490 of SEQ ID NO: 1887351
cuuaaacaacgugaaguuu

SEQ ID NO: 2465715 - RNA, 19 nt, Artificial Sequence
  Description of Artificial Sequence: Synthetic oligonucleotide
  Antisense strand to SEQ ID NO: 2465714
aaacuucacguuguuuaag

SEQ ID NO: 2465716 - RNA, 19 nt, Artificial Sequence
  Description of Artificial Sequence: Synthetic oligonucleotide
  Sense strand starting at position 2788 of SEQ ID NO: 1887351
uccucauguugaguagacu

SEQ ID NO: 2465717 - RNA, 19 nt, Artificial Sequence
  Description of Artificial Sequence: Synthetic oligonucleotide
  Antisense strand to SEQ ID NO: 2465716
agucuacucaacaugagga

SEQ ID NO: 2465718 - RNA, 19 nt, Artificial Sequence
  Description of Artificial Sequence: Synthetic oligonucleotide
  Sense strand starting at position 2818 of SEQ ID NO: 1887351
agaggaaggauuggucuuu

SEQ ID NO: 2465719 - RNA, 19 nt, Artificial Sequence
  Description of Artificial Sequence: Synthetic oligonucleotide
  Antisense strand to SEQ ID NO: 2465718
aaagaccaauccuuccucu

SEQ ID NO: 2465720 - RNA, 19 nt, Artificial Sequence
  Description of Artificial Sequence: Synthetic oligonucleotide
  Sense strand starting at position 2823 of SEQ ID NO: 1887351
aaggauuggucuuucuauc

SEQ ID NO: 2465721 - RNA, 19 nt, Artificial Sequence
  Description of Artificial Sequence: Synthetic oligonucleotide
  Antisense strand to SEQ ID NO: 2465720
gauagaaagaccaauccuu

SEQ ID NO: 2465722 - RNA, 19 nt, Artificial Sequence
  Description of Artificial Sequence: Synthetic oligonucleotide
  Sense strand starting at position 2829 of SEQ ID NO: 1887351
uggucuuucuaucucauga

SEQ ID NO: 2465723 - RNA, 19 nt, Artificial Sequence
  Description of Artificial Sequence: Synthetic oligonucleotide
  Antisense strand to SEQ ID NO: 2465722
ucaugagauagaaagacca

SEQ ID NO: 2465724 - RNA, 19 nt, Artificial Sequence
  Description of Artificial Sequence: Synthetic oligonucleotide
  Sense strand starting at position 2837 of SEQ ID NO: 1887351
cuaucucaugagugccaga

SEQ ID NO: 2465725 - RNA, 19 nt, Artificial Sequence
  Description of Artificial Sequence: Synthetic oligonucleotide
  Antisense strand to SEQ ID NO: 2465724
ucuggcacucaugagauag

SEQ ID NO: 2465726 - RNA, 19 nt, Artificial Sequence
  Description of Artificial Sequence: Synthetic oligonucleotide
  Sense strand starting at position 2914 of SEQ ID NO: 1887351
ggucaaauguauuugcuua

SEQ ID NO: 2465727 - RNA, 19 nt, Artificial Sequence
  Description of Artificial Sequence: Synthetic oligonucleotide
  Antisense strand to SEQ ID NO: 2465726
uaagcaaauacauuugacc

SEQ ID NO: 2465728 - RNA, 19 nt, Artificial Sequence
  Description of Artificial Sequence: Synthetic oligonucleotide
  Sense strand starting at position 2979 of SEQ ID NO: 1887351
auguuugagguuuggagaa

SEQ ID NO: 2465729 - RNA, 19 nt, Artificial Sequence
  Description of Artificial Sequence: Synthetic oligonucleotide
  Antisense strand to SEQ ID NO: 2465728
uucuccaaaccucaaacau

SEQ ID NO: 2465730 - RNA, 19 nt, Artificial Sequence
  Description of Artificial Sequence: Synthetic oligonucleotide
  Sense strand starting at position 3009 of SEQ ID NO: 1887351
uuaauuaguggcuguagga

SEQ ID NO: 2465731 - RNA, 19 nt, Artificial Sequence
  Description of Artificial Sequence: Synthetic oligonucleotide
  Antisense strand to SEQ ID NO: 2465730
uccuacagccacuaauuaa

SEQ ID NO: 2465732 - RNA, 19 nt, Artificial Sequence
  Description of Artificial Sequence: Synthetic oligonucleotide
  Sense strand starting at position 3070 of SEQ ID NO: 1887351
uugaacaauugagaacuua

SEQ ID NO: 2465733 - RNA, 19 nt, Artificial Sequence
  Description of Artificial Sequence: Synthetic oligonucleotide
  Antisense strand to SEQ ID NO: 2465732
uaaguucucaauuguucaa

SEQ ID NO: 2465734 - RNA, 19 nt, Artificial Sequence
  Description of Artificial Sequence: Synthetic oligonucleotide
  Sense strand starting at position 3079 of SEQ ID NO: 1887351
ugagaacuuaaaugugagu

SEQ ID NO: 2465735 - RNA, 19 nt, Artificial Sequence
  Description of Artificial Sequence: Synthetic oligonucleotide
  Antisense strand to SEQ ID NO: 2465734
acucacauuuaaguucuca

SEQ ID NO: 2465736 - RNA, 19 nt, Artificial Sequence
  Description of Artificial Sequence: Synthetic oligonucleotide
  Sense strand starting at position 3084 of SEQ ID NO: 1887351
acuuaaaugugaguuggau

SEQ ID NO: 2465737 - RNA, 19 nt, Artificial Sequence
  Description of Artificial Sequence: Synthetic oligonucleotide
  Antisense strand to SEQ ID NO: 2465736
auccaacucacauuuaagu

SEQ ID NO: 2465738 - RNA, 19 nt, Artificial Sequence
  Description of Artificial Sequence: Synthetic oligonucleotide
  Sense strand starting at position 3086 of SEQ ID NO: 1887351
uuaaaugugaguuggauga

SEQ ID NO: 2465739 - RNA, 19 nt, Artificial Sequence
  Description of Artificial Sequence: Synthetic oligonucleotide
  Antisense strand to SEQ ID NO: 2465738
ucauccaacucacauuuaa

SEQ ID NO: 2465740 - RNA, 19 nt, Artificial Sequence
  Description of Artificial Sequence: Synthetic oligonucleotide
  Sense strand starting at position 3204 of SEQ ID NO: 1887351
aauuguagacauugugaca

SEQ ID NO: 2465741 - RNA, 19 nt, Artificial Sequence
  Description of Artificial Sequence: Synthetic oligonucleotide
  Antisense strand to SEQ ID NO: 2465740
ugucacaaugucuacaauu

SEQ ID NO: 2465742 - RNA, 19 nt, Artificial Sequence
  Description of Artificial Sequence: Synthetic oligonucleotide
  Sense strand starting at position 3354 of SEQ ID NO: 1887351
uuggaaauaucuuuaaacg

SEQ ID NO: 2465743 - RNA, 19 nt, Artificial Sequence
  Description of Artificial Sequence: Synthetic oligonucleotide
  Antisense strand to SEQ ID NO: 2465742
cguuuaaagauauuuccaa

SEQ ID NO: 2465744 - RNA, 19 nt, Artificial Sequence
  Description of Artificial Sequence: Synthetic oligonucleotide
  Sense strand starting at position 3355 of SEQ ID NO: 1887351
uggaaauaucuuuaaacgu

SEQ ID NO: 2465745 - RNA, 19 nt, Artificial Sequence
  Description of Artificial Sequence: Synthetic oligonucleotide
  Antisense strand to SEQ ID NO: 2465744
acguuuaaagauauuucca

SEQ ID NO: 2465746 - RNA, 19 nt, Artificial Sequence
  Description of Artificial Sequence: Synthetic oligonucleotide
  Sense strand starting at position 3679 of SEQ ID NO: 1887351
augauauguugaucacuug

SEQ ID NO: 2465747 - RNA, 19 nt, Artificial Sequence
  Description of Artificial Sequence: Synthetic oligonucleotide
  Antisense strand to SEQ ID NO: 2465746
caagugaucaacauaucau

SEQ ID NO: 2465748 - RNA, 19 nt, Artificial Sequence
  Description of Artificial Sequence: Synthetic oligonucleotide
  Sense strand starting at position 3685 of SEQ ID NO: 1887351
uguugaucacuuggcuaau

SEQ ID NO: 2465749 - RNA, 19 nt, Artificial Sequence
  Description of Artificial Sequence: Synthetic oligonucleotide
  Antisense strand to SEQ ID NO: 2465748
auuagccaagugaucaaca

SEQ ID NO: 2465750 - RNA, 19 nt, Artificial Sequence
  Description of Artificial Sequence: Synthetic oligonucleotide
  Sense strand starting at position 3686 of SEQ ID NO: 1887351
guugaucacuuggcuaaua

SEQ ID NO: 2465751 - RNA, 19 nt, Artificial Sequence
  Description of Artificial Sequence: Synthetic oligonucleotide
  Antisense strand to SEQ ID NO: 2465750
uauuagccaagugaucaac

SEQ ID NO: 2465752 - RNA, 19 nt, Artificial Sequence
  Description of Artificial Sequence: Synthetic oligonucleotide
  Sense strand starting at position 3687 of SEQ ID NO: 1887351
uugaucacuuggcuaauau

SEQ ID NO: 2465753 - RNA, 19 nt, Artificial Sequence
  Description of Artificial Sequence: Synthetic oligonucleotide
  Antisense strand to SEQ ID NO: 2465752
auauuagccaagugaucaa

SEQ ID NO: 2465754 - RNA, 19 nt, Artificial Sequence
  Description of Artificial Sequence: Synthetic oligonucleotide
  Sense strand starting at position 3688 of SEQ ID NO: 1887351
ugaucacuuggcuaauaug

SEQ ID NO: 2465755 - RNA, 19 nt, Artificial Sequence
  Description of Artificial Sequence: Synthetic oligonucleotide
  Antisense strand to SEQ ID NO: 2465754
cauauuagccaagugauca

SEQ ID NO: 2465756 - RNA, 19 nt, Artificial Sequence
  Description of Artificial Sequence: Synthetic oligonucleotide
  Sense strand starting at position 3699 of SEQ ID NO: 1887351
cuaauauguuguccaucag

SEQ ID NO: 2465757 - RNA, 19 nt, Artificial Sequence
  Description of Artificial Sequence: Synthetic oligonucleotide
  Antisense strand to SEQ ID NO: 2465756
cugauggacaacauauuag

SEQ ID NO: 2465758 - RNA, 19 nt, Artificial Sequence
  Description of Artificial Sequence: Synthetic oligonucleotide
  Sense strand starting at position 3743 of SEQ ID NO: 1887351
uaauuaucaggcugguacu

SEQ ID NO: 2465759 - RNA, 19 nt, Artificial Sequence
  Description of Artificial Sequence: Synthetic oligonucleotide
  Antisense strand to SEQ ID NO: 2465758
aguaccagccugauaauua

SEQ ID NO: 2465760 - RNA, 19 nt, Artificial Sequence
  Description of Artificial Sequence: Synthetic oligonucleotide
  Sense strand starting at position 3783 of SEQ ID NO: 1887351
uugagauccuguuccuuaa

SEQ ID NO: 2465761 - RNA, 19 nt, Artificial Sequence
  Description of Artificial Sequence: Synthetic oligonucleotide
  Antisense strand to SEQ ID NO: 2465760
uuaaggaacaggaucucaa

SEQ ID NO: 2465762 - RNA, 19 nt, Artificial Sequence
  Description of Artificial Sequence: Synthetic oligonucleotide
  Sense strand starting at position 3811 of SEQ ID NO: 1887351
aacugaugguuauuagcaa

SEQ ID NO: 2465763 - RNA, 19 nt, Artificial Sequence
  Description of Artificial Sequence: Synthetic oligonucleotide
  Antisense strand to SEQ ID NO: 2465762
uugcuaauaaccaucaguu

SEQ ID NO: 2465764 - RNA, 19 nt, Artificial Sequence
  Description of Artificial Sequence: Synthetic oligonucleotide
  Sense strand starting at position 3849 of SEQ ID NO: 1887351
cuccauuaauaguuguaaa

SEQ ID NO: 2465765 - RNA, 19 nt, Artificial Sequence
  Description of Artificial Sequence: Synthetic oligonucleotide
  Antisense strand to SEQ ID NO: 2465764
uuuacaacuauuaauggag

SEQ ID NO: 2465766 - RNA, 19 nt, Artificial Sequence
  Description of Artificial Sequence: Synthetic oligonucleotide
  Sense strand starting at position 3902 of SEQ ID NO: 1887351
acauguaguuaggugaaau

SEQ ID NO: 2465767 - RNA, 19 nt, Artificial Sequence
  Description of Artificial Sequence: Synthetic oligonucleotide
  Antisense strand to SEQ ID NO: 2465766
auuucaccuaacuacaugu

SEQ ID NO: 2465768 - RNA, 19 nt, Artificial Sequence
  Description of Artificial Sequence: Synthetic oligonucleotide
  Sense strand starting at position 3967 of SEQ ID NO: 1887351
ucuuaugagucagugugaa

SEQ ID NO: 2465769 - RNA, 19 nt, Artificial Sequence
  Description of Artificial Sequence: Synthetic oligonucleotide
  Antisense strand to SEQ ID NO: 2465768
uucacacugacucauaaga

SEQ ID NO: 2465770 - RNA, 19 nt, Artificial Sequence
  Description of Artificial Sequence: Synthetic oligonucleotide
  Sense strand starting at position 102 of SEQ ID NO: 1887352
aaauaaagucagugacagu

SEQ ID NO: 2465771 - RNA, 19 nt, Artificial Sequence
  Description of Artificial Sequence: Synthetic oligonucleotide
  Antisense strand to SEQ ID NO: 2465770
acugucacugacuuuauuu

SEQ ID NO: 2465772 - RNA, 19 nt, Artificial Sequence
  Description of Artificial Sequence: Synthetic oligonucleotide
  Sense strand starting at position 158 of SEQ ID NO: 1887352
ugccucagaguuuaaaugu

SEQ ID NO: 2465773 - RNA, 19 nt, Artificial Sequence
  Description of Artificial Sequence: Synthetic oligonucleotide
  Antisense strand to SEQ ID NO: 2465772
acauuuaaacucugaggca

SEQ ID NO: 2465774 - RNA, 19 nt, Artificial Sequence
  Description of Artificial Sequence: Synthetic oligonucleotide
  Sense strand starting at position 505 of SEQ ID NO: 1887352
cugaguuuccaguagguag

SEQ ID NO: 2465775 - RNA, 19 nt, Artificial Sequence
  Description of Artificial Sequence: Synthetic oligonucleotide
  Antisense strand to SEQ ID NO: 2465774
cuaccuacuggaaacucag

SEQ ID NO: 2465776 - RNA, 19 nt, Artificial Sequence
  Description of Artificial Sequence: Synthetic oligonucleotide
  Sense strand starting at position 523 of SEQ ID NO: 1887352
ggcaucuuugaaggcuauu

SEQ ID NO: 2465777 - RNA, 19 nt, Artificial Sequence
  Description of Artificial Sequence: Synthetic oligonucleotide
  Antisense strand to SEQ ID NO: 2465776
aauagccuucaaagaugcc

SEQ ID NO: 2465778 - RNA, 19 nt, Artificial Sequence
  Description of Artificial Sequence: Synthetic oligonucleotide
  Sense strand starting at position 556 of SEQ ID NO: 1887352
augaccaguguuugaaacu

SEQ ID NO: 2465779 - RNA, 19 nt, Artificial Sequence
  Description of Artificial Sequence: Synthetic oligonucleotide
  Antisense strand to SEQ ID NO: 2465778
aguuucaaacacuggucau

SEQ ID NO: 2465780 - RNA, 19 nt, Artificial Sequence
  Description of Artificial Sequence: Synthetic oligonucleotide
  Sense strand starting at position 627 of SEQ ID NO: 1887352
aauaauuagugguuccuga

SEQ ID NO: 2465781 - RNA, 19 nt, Artificial Sequence
  Description of Artificial Sequence: Synthetic oligonucleotide
  Antisense strand to SEQ ID NO: 2465780
ucaggaaccacuaauuauu

SEQ ID NO: 2465782 - RNA, 19 nt, Artificial Sequence
  Description of Artificial Sequence: Synthetic oligonucleotide
  Sense strand starting at position 693 of SEQ ID NO: 1887352
ccagaaugguuucccacuu

SEQ ID NO: 2465783 - RNA, 19 nt, Artificial Sequence
  Description of Artificial Sequence: Synthetic oligonucleotide
  Antisense strand to SEQ ID NO: 2465782
aagugggaaaccauucugg

SEQ ID NO: 2465784 - RNA, 19 nt, Artificial Sequence
  Description of Artificial Sequence: Synthetic oligonucleotide
  Sense strand starting at position 946 of SEQ ID NO: 1887352
gcaccuacuacgugacaga

SEQ ID NO: 2465785 - RNA, 19 nt, Artificial Sequence
  Description of Artificial Sequence: Synthetic oligonucleotide
  Antisense strand to SEQ ID NO: 2465784
ucugucacguaguaggugc

SEQ ID NO: 2465786 - RNA, 19 nt, Artificial Sequence
  Description of Artificial Sequence: Synthetic oligonucleotide
  Sense strand starting at position 953 of SEQ ID NO: 1887352
cuacgugacagacaugguu

SEQ ID NO: 2465787 - RNA, 19 nt, Artificial Sequence
  Description of Artificial Sequence: Synthetic oligonucleotide
  Antisense strand to SEQ ID NO: 2465786
aaccaugucugucacguag

SEQ ID NO: 2465788 - RNA, 19 nt, Artificial Sequence
  Description of Artificial Sequence: Synthetic oligonucleotide
  Sense strand starting at position 956 of SEQ ID NO: 1887352
cgugacagacaugguucua

SEQ ID NO: 2465789 - RNA, 19 nt, Artificial Sequence
  Description of Artificial Sequence: Synthetic oligonucleotide
  Antisense strand to SEQ ID NO: 2465788
uagaaccaugucugucacg

SEQ ID NO: 2465790 - RNA, 19 nt, Artificial Sequence
  Description of Artificial Sequence: Synthetic oligonucleotide
  Sense strand starting at position 1013 of SEQ ID NO: 1887352
uuagacaggugauaaacaa

SEQ ID NO: 2465791 - RNA, 19 nt, Artificial Sequence
  Description of Artificial Sequence: Synthetic oligonucleotide
  Antisense strand to SEQ ID NO: 2465790
uuguuuaucaccugucuaa

SEQ ID NO: 2465792 - RNA, 19 nt, Artificial Sequence
  Description of Artificial Sequence: Synthetic oligonucleotide
  Sense strand starting at position 1037 of SEQ ID NO: 1887352
gggaaagugugcucuggug

SEQ ID NO: 2465793 - RNA, 19 nt, Artificial Sequence
  Description of Artificial Sequence: Synthetic oligonucleotide
  Antisense strand to SEQ ID NO: 2465792
caccagagcacacuuuccc

SEQ ID NO: 2465794 - RNA, 19 nt, Artificial Sequence
  Description of Artificial Sequence: Synthetic oligonucleotide
  Sense strand starting at position 1062 of SEQ ID NO: 1887352
gcuaauaacagcggauagu

SEQ ID NO: 2465795 - RNA, 19 nt, Artificial Sequence
  Description of Artificial Sequence: Synthetic oligonucleotide
  Antisense strand to SEQ ID NO: 2465794
acuauccgcuguuauuagc

SEQ ID NO: 2465796 - RNA, 19 nt, Artificial Sequence
  Description of Artificial Sequence: Synthetic oligonucleotide
  Sense strand starting at position 1430 of SEQ ID NO: 1887352
agaguaguguugaaggguu

SEQ ID NO: 2465797 - RNA, 19 nt, Artificial Sequence
  Description of Artificial Sequence: Synthetic oligonucleotide
  Antisense strand to SEQ ID NO: 2465796
aacccuucaacacuacucu

SEQ ID NO: 2465798 - RNA, 19 nt, Artificial Sequence
  Description of Artificial Sequence: Synthetic oligonucleotide
  Sense strand starting at position 1485 of SEQ ID NO: 1887352
auguuauuagcuugauuuc

SEQ ID NO: 2465799 - RNA, 19 nt, Artificial Sequence
  Description of Artificial Sequence: Synthetic oligonucleotide
  Antisense strand to SEQ ID NO: 2465798
gaaaucaagcuaauaacau

SEQ ID NO: 2465800 - RNA, 19 nt, Artificial Sequence
  Description of Artificial Sequence: Synthetic oligonucleotide
  Sense strand starting at position 1621 of SEQ ID NO: 1887352
agcagauuaguuugggaua

SEQ ID NO: 2465801 - RNA, 19 nt, Artificial Sequence
  Description of Artificial Sequence: Synthetic oligonucleotide
  Antisense strand to SEQ ID NO: 2465800
uaucccaaacuaaucugcu

SEQ ID NO: 2465802 - RNA, 19 nt, Artificial Sequence
  Description of Artificial Sequence: Synthetic oligonucleotide
  Sense strand starting at position 1632 of SEQ ID NO: 1887352
uugggauagucaccagugu

SEQ ID NO: 2465803 - RNA, 19 nt, Artificial Sequence
  Description of Artificial Sequence: Synthetic oligonucleotide
  Antisense strand to SEQ ID NO: 2465802
acacuggugacuaucccaa

SEQ ID NO: 2465804 - RNA, 19 nt, Artificial Sequence
  Description of Artificial Sequence: Synthetic oligonucleotide
  Sense strand starting at position 1846 of SEQ ID NO: 1887352
uucugcacucuuggaauca

SEQ ID NO: 2465805 - RNA, 19 nt, Artificial Sequence
  Description of Artificial Sequence: Synthetic oligonucleotide
  Antisense strand to SEQ ID NO: 2465804
ugauuccaagagugcagaa

SEQ ID NO: 2465806 - RNA, 19 nt, Artificial Sequence
  Description of Artificial Sequence: Synthetic oligonucleotide
  Sense strand starting at position 1891 of SEQ ID NO: 1887352
uccugaagucucuggagac

SEQ ID NO: 2465807 - RNA, 19 nt, Artificial Sequence
  Description of Artificial Sequence: Synthetic oligonucleotide
  Antisense strand to SEQ ID NO: 2465806
gucuccagagacuucagga

SEQ ID NO: 2465808 - RNA, 19 nt, Artificial Sequence
  Description of Artificial Sequence: Synthetic oligonucleotide
  Sense strand starting at position 2679 of SEQ ID NO: 1887352
ucggaauguggugaagaca

SEQ ID NO: 2465809 - RNA, 19 nt, Artificial Sequence
  Description of Artificial Sequence: Synthetic oligonucleotide
  Antisense strand to SEQ ID NO: 2465808
ugucuucaccacauuccga

SEQ ID NO: 2465810 - RNA, 19 nt, Artificial Sequence
  Description of Artificial Sequence: Synthetic oligonucleotide
  Sense strand starting at position 2832 of SEQ ID NO: 1887352
acaggugucuuggcagagu

SEQ ID NO: 2465811 - RNA, 19 nt, Artificial Sequence
  Description of Artificial Sequence: Synthetic oligonucleotide
  Antisense strand to SEQ ID NO: 2465810
acucugccaagacaccugu

SEQ ID NO: 2465812 - RNA, 19 nt, Artificial Sequence
  Description of Artificial Sequence: Synthetic oligonucleotide
  Sense strand starting at position 2835 of SEQ ID NO: 1887352
ggugucuuggcagagucaa

SEQ ID NO: 2465813 - RNA, 19 nt, Artificial Sequence
  Description of Artificial Sequence: Synthetic oligonucleotide
  Antisense strand to SEQ ID NO: 2465812
uugacucugccaagacacc

SEQ ID NO: 2465814 - RNA, 19 nt, Artificial Sequence
  Description of Artificial Sequence: Synthetic oligonucleotide
  Sense strand starting at position 2928 of SEQ ID NO: 1887352
acuugaaacugcucugaac

SEQ ID NO: 2465815 - RNA, 19 nt, Artificial Sequence
  Description of Artificial Sequence: Synthetic oligonucleotide
  Antisense strand to SEQ ID NO: 2465814
guucagagcaguuucaagu

SEQ ID NO: 2465816 - RNA, 19 nt, Artificial Sequence
  Description of Artificial Sequence: Synthetic oligonucleotide
  Sense strand starting at position 2930 of SEQ ID NO: 1887352
uugaaacugcucugaacuu

SEQ ID NO: 2465817 - RNA, 19 nt, Artificial Sequence
  Description of Artificial Sequence: Synthetic oligonucleotide
  Antisense strand to SEQ ID NO: 2465816
aaguucagagcaguuucaa

SEQ ID NO: 2465818 - RNA, 19 nt, Artificial Sequence
  Description of Artificial Sequence: Synthetic oligonucleotide
  Sense strand starting at position 2980 of SEQ ID NO: 1887352
aaccgacaaggcuguuuaa

SEQ ID NO: 2465819 - RNA, 19 nt, Artificial Sequence
  Description of Artificial Sequence: Synthetic oligonucleotide
  Antisense strand to SEQ ID NO: 2465818
uuaaacagccuugucgguu

SEQ ID NO: 2465820 - RNA, 19 nt, Artificial Sequence
  Description of Artificial Sequence: Synthetic oligonucleotide
  Sense strand starting at position 3080 of SEQ ID NO: 1887352
agagcagugccgccaucau

SEQ ID NO: 2465821 - RNA, 19 nt, Artificial Sequence
  Description of Artificial Sequence: Synthetic oligonucleotide
  Antisense strand to SEQ ID NO: 2465820
augauggcggcacugcucu

SEQ ID NO: 2465822 - RNA, 19 nt, Artificial Sequence
  Description of Artificial Sequence: Synthetic oligonucleotide
  Sense strand starting at position 3125 of SEQ ID NO: 1887352
gaagcuucugcagacgaca

SEQ ID NO: 2465823 - RNA, 19 nt, Artificial Sequence
  Description of Artificial Sequence: Synthetic oligonucleotide
  Antisense strand to SEQ ID NO: 2465822
ugucgucugcagaagcuuc

SEQ ID NO: 2465824 - RNA, 19 nt, Artificial Sequence
  Description of Artificial Sequence: Synthetic oligonucleotide
  Sense strand starting at position 3152 of SEQ ID NO: 1887352
ccuugagacuuugucaguu

SEQ ID NO: 2465825 - RNA, 19 nt, Artificial Sequence
  Description of Artificial Sequence: Synthetic oligonucleotide
  Antisense strand to SEQ ID NO: 2465824
aacugacaaagucucaagg

SEQ ID NO: 2465826 - RNA, 19 nt, Artificial Sequence
  Description of Artificial Sequence: Synthetic oligonucleotide
  Sense strand starting at position 3156 of SEQ ID NO: 1887352
gagacuuugucaguuuaac

SEQ ID NO: 2465827 - RNA, 19 nt, Artificial Sequence
  Description of Artificial Sequence: Synthetic oligonucleotide
  Antisense strand to SEQ ID NO: 2465826
guuaaacugacaaagucuc

SEQ ID NO: 2465828 - RNA, 19 nt, Artificial Sequence
  Description of Artificial Sequence: Synthetic oligonucleotide
  Sense strand starting at position 3195 of SEQ ID NO: 1887352
aagcgaaaucgugaagaga

SEQ ID NO: 2465829 - RNA, 19 nt, Artificial Sequence
  Description of Artificial Sequence: Synthetic oligonucleotide
  Antisense strand to SEQ ID NO: 2465828
ucucuucacgauuucgcuu

SEQ ID NO: 2465830 - RNA, 19 nt, Artificial Sequence
  Description of Artificial Sequence: Synthetic oligonucleotide
  Sense strand starting at position 3240 of SEQ ID NO: 1887352
uccacaucugccugucaua

SEQ ID NO: 2465831 - RNA, 19 nt, Artificial Sequence
  Description of Artificial Sequence: Synthetic oligonucleotide
  Antisense strand to SEQ ID NO: 2465830
uaugacaggcagaugugga

SEQ ID NO: 2465832 - RNA, 19 nt, Artificial Sequence
  Description of Artificial Sequence: Synthetic oligonucleotide
  Sense strand starting at position 3256 of SEQ ID NO: 1887352
auacucugguucccugaaa

SEQ ID NO: 2465833 - RNA, 19 nt, Artificial Sequence
  Description of Artificial Sequence: Synthetic oligonucleotide
  Antisense strand to SEQ ID NO: 2465832
uuucagggaaccagaguau

SEQ ID NO: 2465834 - RNA, 19 nt, Artificial Sequence
  Description of Artificial Sequence: Synthetic oligonucleotide
  Sense strand starting at position 3312 of SEQ ID NO: 1887352
acgugauaccaacagugga

SEQ ID NO: 2465835 - RNA, 19 nt, Artificial Sequence
  Description of Artificial Sequence: Synthetic oligonucleotide
  Antisense strand to SEQ ID NO: 2465834
uccacuguugguaucacgu

SEQ ID NO: 2465836 - RNA, 19 nt, Artificial Sequence
  Description of Artificial Sequence: Synthetic oligonucleotide
  Sense strand starting at position 3325 of SEQ ID NO: 1887352
aguggauguaaauagaguu

SEQ ID NO: 2465837 - RNA, 19 nt, Artificial Sequence
  Description of Artificial Sequence: Synthetic oligonucleotide
  Antisense strand to SEQ ID NO: 2465836
aacucuauuuacauccacu

SEQ ID NO: 2465838 - RNA, 19 nt, Artificial Sequence
  Description of Artificial Sequence: Synthetic oligonucleotide
  Sense strand starting at position 3331 of SEQ ID NO: 1887352
uguaaauagaguuauggcu

SEQ ID NO: 2465839 - RNA, 19 nt, Artificial Sequence
  Description of Artificial Sequence: Synthetic oligonucleotide
  Antisense strand to SEQ ID NO: 2465838
agccauaacucuauuuaca

SEQ ID NO: 2465840 - RNA, 19 nt, Artificial Sequence
  Description of Artificial Sequence: Synthetic oligonucleotide
  Sense strand starting at position 3665 of SEQ ID NO: 1887352
gugccaugugugccugauu

SEQ ID NO: 2465841 - RNA, 19 nt, Artificial Sequence
  Description of Artificial Sequence: Synthetic oligonucleotide
  Antisense strand to SEQ ID NO: 2465840
aaucaggcacacauggcac

SEQ ID NO: 2465842 - RNA, 19 nt, Artificial Sequence
  Description of Artificial Sequence: Synthetic oligonucleotide
  Sense strand starting at position 3759 of SEQ ID NO: 1887352
cuugcucugcccugagaga

SEQ ID NO: 2465843 - RNA, 19 nt, Artificial Sequence
  Description of Artificial Sequence: Synthetic oligonucleotide
  Antisense strand to SEQ ID NO: 2465842
ucucucagggcagagcaag

SEQ ID NO: 2465844 - RNA, 19 nt, Artificial Sequence
  Description of Artificial Sequence: Synthetic oligonucleotide
  Sense strand starting at position 3760 of SEQ ID NO: 1887352
uugcucugcccugagagaa

SEQ ID NO: 2465845 - RNA, 19 nt, Artificial Sequence
  Description of Artificial Sequence: Synthetic oligonucleotide
  Antisense strand to SEQ ID NO: 2465844
uucucucagggcagagcaa

SEQ ID NO: 2465846 - RNA, 19 nt, Artificial Sequence
  Description of Artificial Sequence: Synthetic oligonucleotide
  Sense strand starting at position 3773 of SEQ ID NO: 1887352
agagaaugugcuuggccca

SEQ ID NO: 2465847 - RNA, 19 nt, Artificial Sequence
  Description of Artificial Sequence: Synthetic oligonucleotide
  Antisense strand to SEQ ID NO: 2465846
ugggccaagcacauucucu

SEQ ID NO: 2465848 - RNA, 19 nt, Artificial Sequence
  Description of Artificial Sequence: Synthetic oligonucleotide
  Sense strand starting at position 3915 of SEQ ID NO: 1887352
ggugaauacacgcaacaug

SEQ ID NO: 2465849 - RNA, 19 nt, Artificial Sequence
  Description of Artificial Sequence: Synthetic oligonucleotide
  Antisense strand to SEQ ID NO: 2465848
cauguugcguguauucacc

SEQ ID NO: 2465850 - RNA, 19 nt, Artificial Sequence
  Description of Artificial Sequence: Synthetic oligonucleotide
  Sense strand starting at position 534 of SEQ ID NO: 1887353
gcuguuuauucccugguga

SEQ ID NO: 2465851 - RNA, 19 nt, Artificial Sequence
  Description of Artificial Sequence: Synthetic oligonucleotide
  Antisense strand to SEQ ID NO: 2465850
ucaccagggaauaaacagc

SEQ ID NO: 2465852 - RNA, 19 nt, Artificial Sequence
  Description of Artificial Sequence: Synthetic oligonucleotide
  Sense strand starting at position 535 of SEQ ID NO: 1887353
cuguuuauucccuggugaa

SEQ ID NO: 2465853 - RNA, 19 nt, Artificial Sequence
  Description of Artificial Sequence: Synthetic oligonucleotide
  Antisense strand to SEQ ID NO: 2465852
uucaccagggaauaaacag

SEQ ID NO: 2465854 - RNA, 19 nt, Artificial Sequence
  Description of Artificial Sequence: Synthetic oligonucleotide
  Sense strand starting at position 536 of SEQ ID NO: 1887353
uguuuauucccuggugaag

SEQ ID NO: 2465855 - RNA, 19 nt, Artificial Sequence
  Description of Artificial Sequence: Synthetic oligonucleotide
  Antisense strand to SEQ ID NO: 2465854
cuucaccagggaauaaaca

SEQ ID NO: 2465856 - RNA, 19 nt, Artificial Sequence
  Description of Artificial Sequence: Synthetic oligonucleotide
  Sense strand starting at position 631 of SEQ ID NO: 1887353
aggcuuuccacauguugga

SEQ ID NO: 2465857 - RNA, 19 nt, Artificial Sequence
  Description of Artificial Sequence: Synthetic oligonucleotide
  Antisense strand to SEQ ID NO: 2465856
uccaacauguggaaagccu

SEQ ID NO: 2465858 - RNA, 19 nt, Artificial Sequence
  Description of Artificial Sequence: Synthetic oligonucleotide
  Sense strand starting at position 640 of SEQ ID NO: 1887353
acauguuggaaaugugaca

SEQ ID NO: 2465859 - RNA, 19 nt, Artificial Sequence
  Description of Artificial Sequence: Synthetic oligonucleotide
  Antisense strand to SEQ ID NO: 2465858
ugucacauuuccaacaugu

SEQ ID NO: 2465860 - RNA, 19 nt, Artificial Sequence
  Description of Artificial Sequence: Synthetic oligonucleotide
  Sense strand starting at position 730 of SEQ ID NO: 1887353
gucuuugagccucaggauu

SEQ ID NO: 2465861 - RNA, 19 nt, Artificial Sequence
  Description of Artificial Sequence: Synthetic oligonucleotide
  Antisense strand to SEQ ID NO: 2465860
aauccugaggcucaaagac

SEQ ID NO: 2465862 - RNA, 19 nt, Artificial Sequence
  Description of Artificial Sequence: Synthetic oligonucleotide
  Sense strand starting at position 738 of SEQ ID NO: 1887353
gccucaggauuucucugua

SEQ ID NO: 2465863 - RNA, 19 nt, Artificial Sequence
  Description of Artificial Sequence: Synthetic oligonucleotide
  Antisense strand to SEQ ID NO: 2465862
uacagagaaauccugaggc

SEQ ID NO: 2465864 - RNA, 19 nt, Artificial Sequence
  Description of Artificial Sequence: Synthetic oligonucleotide
  Sense strand starting at position 790 of SEQ ID NO: 1887353
agacaauauuagcuuugaa

SEQ ID NO: 2465865 - RNA, 19 nt, Artificial Sequence
  Description of Artificial Sequence: Synthetic oligonucleotide
  Antisense strand to SEQ ID NO: 2465864
uucaaagcuaauauugucu

SEQ ID NO: 2465866 - RNA, 19 nt, Artificial Sequence
  Description of Artificial Sequence: Synthetic oligonucleotide
  Sense strand starting at position 959 of SEQ ID NO: 1887353
ggaauugacuccuugacga

SEQ ID NO: 2465867 - RNA, 19 nt, Artificial Sequence
  Description of Artificial Sequence: Synthetic oligonucleotide
  Antisense strand to SEQ ID NO: 2465866
ucgucaaggagucaauucc

SEQ ID NO: 2465868 - RNA, 19 nt, Artificial Sequence
  Description of Artificial Sequence: Synthetic oligonucleotide
  Sense strand starting at position 1014 of SEQ ID NO: 1887353
uuuagauaccucgagccua

SEQ ID NO: 2465869 - RNA, 19 nt, Artificial Sequence
  Description of Artificial Sequence: Synthetic oligonucleotide
  Antisense strand to SEQ ID NO: 2465868
uaggcucgagguaucuaaa

SEQ ID NO: 2465870 - RNA, 19 nt, Artificial Sequence
  Description of Artificial Sequence: Synthetic oligonucleotide
  Sense strand starting at position 1191 of SEQ ID NO: 1887353
ucggauuacuaucugcagu

SEQ ID NO: 2465871 - RNA, 19 nt, Artificial Sequence
  Description of Artificial Sequence: Synthetic oligonucleotide
  Antisense strand to SEQ ID NO: 2465870
acugcagauaguaauccga

SEQ ID NO: 2465872 - RNA, 19 nt, Artificial Sequence
  Description of Artificial Sequence: Synthetic oligonucleotide
  Sense strand starting at position 1192 of SEQ ID NO: 1887353
cggauuacuaucugcagua

SEQ ID NO: 2465873 - RNA, 19 nt, Artificial Sequence
  Description of Artificial Sequence: Synthetic oligonucleotide
  Antisense strand to SEQ ID NO: 2465872
uacugcagauaguaauccg

SEQ ID NO: 2465874 - RNA, 19 nt, Artificial Sequence
  Description of Artificial Sequence: Synthetic oligonucleotide
  Sense strand starting at position 1193 of SEQ ID NO: 1887353
ggauuacuaucugcaguau

SEQ ID NO: 2465875 - RNA, 19 nt, Artificial Sequence
  Description of Artificial Sequence: Synthetic oligonucleotide
  Antisense strand to SEQ ID NO: 2465874
auacugcagauaguaaucc

SEQ ID NO: 2465876 - RNA, 19 nt, Artificial Sequence
  Description of Artificial Sequence: Synthetic oligonucleotide
  Sense strand starting at position 1194 of SEQ ID NO: 1887353
gauuacuaucugcaguaug

SEQ ID NO: 2465877 - RNA, 19 nt, Artificial Sequence
  Description of Artificial Sequence: Synthetic oligonucleotide
  Antisense strand to SEQ ID NO: 2465876
cauacugcagauaguaauc

SEQ ID NO: 2465878 - RNA, 19 nt, Artificial Sequence
  Description of Artificial Sequence: Synthetic oligonucleotide
  Sense strand starting at position 1199 of SEQ ID NO: 1887353
cuaucugcaguaugaaacu

SEQ ID NO: 2465879 - RNA, 19 nt, Artificial Sequence
  Description of Artificial Sequence: Synthetic oligonucleotide
  Antisense strand to SEQ ID NO: 2465878
aguuucauacugcagauag

SEQ ID NO: 2465880 - RNA, 19 nt, Artificial Sequence
  Description of Artificial Sequence: Synthetic oligonucleotide
  Sense strand starting at position 1600 of SEQ ID NO: 1887353
ggccgaugcauguaaagca

SEQ ID NO: 2465881 - RNA, 19 nt, Artificial Sequence
  Description of Artificial Sequence: Synthetic oligonucleotide
  Antisense strand to SEQ ID NO: 2465880
ugcuuuacaugcaucggcc

SEQ ID NO: 2465882 - RNA, 19 nt, Artificial Sequence
  Description of Artificial Sequence: Synthetic oligonucleotide
  Sense strand starting at position 1698 of SEQ ID NO: 1887353
gcacaugggaagugguuau

SEQ ID NO: 2465883 - RNA, 19 nt, Artificial Sequence
  Description of Artificial Sequence: Synthetic oligonucleotide
  Antisense strand to SEQ ID NO: 2465882
auaaccacuucccaugugc

SEQ ID NO: 2465884 - RNA, 19 nt, Artificial Sequence
  Description of Artificial Sequence: Synthetic oligonucleotide
  Sense strand starting at position 1717 of SEQ ID NO: 1887353
uguuaucccugcuuugcau

SEQ ID NO: 2465885 - RNA, 19 nt, Artificial Sequence
  Description of Artificial Sequence: Synthetic oligonucleotide
  Antisense strand to SEQ ID NO: 2465884
augcaaagcagggauaaca

SEQ ID NO: 2465886 - RNA, 19 nt, Artificial Sequence
  Description of Artificial Sequence: Synthetic oligonucleotide
  Sense strand starting at position 1965 of SEQ ID NO: 1887353
agaagacuggaguguuauu

SEQ ID NO: 2465887 - RNA, 19 nt, Artificial Sequence
  Description of Artificial Sequence: Synthetic oligonucleotide
  Antisense strand to SEQ ID NO: 2465886
aauaacacuccagucuucu

SEQ ID NO: 2465888 - RNA, 19 nt, Artificial Sequence
  Description of Artificial Sequence: Synthetic oligonucleotide
  Sense strand starting at position 1976 of SEQ ID NO: 1887353
guguuauuauuacucagau

SEQ ID NO: 2465889 - RNA, 19 nt, Artificial Sequence
  Description of Artificial Sequence: Synthetic oligonucleotide
  Antisense strand to SEQ ID NO: 2465888
aucugaguaauaauaacac

SEQ ID NO: 2465890 - RNA, 19 nt, Artificial Sequence
  Description of Artificial Sequence: Synthetic oligonucleotide
  Sense strand starting at position 1977 of SEQ ID NO: 1887353
uguuauuauuacucagauc

SEQ ID NO: 2465891 - RNA, 19 nt, Artificial Sequence
  Description of Artificial Sequence: Synthetic oligonucleotide
  Antisense strand to SEQ ID NO: 2465890
gaucugaguaauaauaaca

SEQ ID NO: 2465892 - RNA, 19 nt, Artificial Sequence
  Description of Artificial Sequence: Synthetic oligonucleotide
  Sense strand starting at position 2380 of SEQ ID NO: 1887353
ugcuaccgucuuuguuuaa

SEQ ID NO: 2465893 - RNA, 19 nt, Artificial Sequence
  Description of Artificial Sequence: Synthetic oligonucleotide
  Antisense strand to SEQ ID NO: 2465892
uuaaacaaagacgguagca

SEQ ID NO: 2465894 - RNA, 19 nt, Artificial Sequence
  Description of Artificial Sequence: Synthetic oligonucleotide
  Sense strand starting at position 2381 of SEQ ID NO: 1887353
gcuaccgucuuuguuuaaa

SEQ ID NO: 2465895 - RNA, 19 nt, Artificial Sequence
  Description of Artificial Sequence: Synthetic oligonucleotide
  Antisense strand to SEQ ID NO: 2465894
uuuaaacaaagacgguagc

SEQ ID NO: 2465896 - RNA, 19 nt, Artificial Sequence
  Description of Artificial Sequence: Synthetic oligonucleotide
  Sense strand starting at position 2850 of SEQ ID NO: 1887353
ccuuaaacuuaagggaauu

SEQ ID NO: 2465897 - RNA, 19 nt, Artificial Sequence
  Description of Artificial Sequence: Synthetic oligonucleotide
  Antisense strand to SEQ ID NO: 2465896
aauucccuuaaguuuaagg

SEQ ID NO: 2465898 - RNA, 19 nt, Artificial Sequence
  Description of Artificial Sequence: Synthetic oligonucleotide
  Sense strand starting at position 2868 of SEQ ID NO: 1887353
uccuuucgacuguggagaa

SEQ ID NO: 2465899 - RNA, 19 nt, Artificial Sequence
  Description of Artificial Sequence: Synthetic oligonucleotide
  Antisense strand to SEQ ID NO: 2465898
uucuccacagucgaaagga

SEQ ID NO: 2465900 - RNA, 19 nt, Artificial Sequence
  Description of Artificial Sequence: Synthetic oligonucleotide
  Sense strand starting at position 2949 of SEQ ID NO: 1887353
caaugugaucagggccuuu

SEQ ID NO: 2465901 - RNA, 19 nt, Artificial Sequence
  Description of Artificial Sequence: Synthetic oligonucleotide
  Antisense strand to SEQ ID NO: 2465900
aaaggcccugaucacauug

SEQ ID NO: 2465902 - RNA, 19 nt, Artificial Sequence
  Description of Artificial Sequence: Synthetic oligonucleotide
  Sense strand starting at position 2991 of SEQ ID NO: 1887353
cagggacagugauccuauu

SEQ ID NO: 2465903 - RNA, 19 nt, Artificial Sequence
  Description of Artificial Sequence: Synthetic oligonucleotide
  Antisense strand to SEQ ID NO: 2465902
aauaggaucacugucccug

SEQ ID NO: 2465904 - RNA, 19 nt, Artificial Sequence
  Description of Artificial Sequence: Synthetic oligonucleotide
  Sense strand starting at position 3017 of SEQ ID NO: 1887353
agcauaaguccuggugagu

SEQ ID NO: 2465905 - RNA, 19 nt, Artificial Sequence
  Description of Artificial Sequence: Synthetic oligonucleotide
  Antisense strand to SEQ ID NO: 2465904
acucaccaggacuuaugcu

SEQ ID NO: 2465906 - RNA, 19 nt, Artificial Sequence
  Description of Artificial Sequence: Synthetic oligonucleotide
  Sense strand starting at position 3020 of SEQ ID NO: 1887353
auaaguccuggugagucua

SEQ ID NO: 2465907 - RNA, 19 nt, Artificial Sequence
  Description of Artificial Sequence: Synthetic oligonucleotide
  Antisense strand to SEQ ID NO: 2465906
uagacucaccaggacuuau

SEQ ID NO: 2465908 - RNA, 19 nt, Artificial Sequence
  Description of Artificial Sequence: Synthetic oligonucleotide
  Sense strand starting at position 3032 of SEQ ID NO: 1887353
gagucuaagucagcuguaa

SEQ ID NO: 2465909 - RNA, 19 nt, Artificial Sequence
  Description of Artificial Sequence: Synthetic oligonucleotide
  Antisense strand to SEQ ID NO: 2465908
uuacagcugacuuagacuc

SEQ ID NO: 2465910 - RNA, 19 nt, Artificial Sequence
  Description of Artificial Sequence: Synthetic oligonucleotide
  Sense strand starting at position 3034 of SEQ ID NO: 1887353
gucuaagucagcuguaaug

SEQ ID NO: 2465911 - RNA, 19 nt, Artificial Sequence
  Description of Artificial Sequence: Synthetic oligonucleotide
  Antisense strand to SEQ ID NO: 2465910
cauuacagcugacuuagac

SEQ ID NO: 2465912 - RNA, 19 nt, Artificial Sequence
  Description of Artificial Sequence: Synthetic oligonucleotide
  Sense strand starting at position 3036 of SEQ ID NO: 1887353
cuaagucagcuguaaugau

SEQ ID NO: 2465913 - RNA, 19 nt, Artificial Sequence
  Description of Artificial Sequence: Synthetic oligonucleotide
  Antisense strand to SEQ ID NO: 2465912
aucauuacagcugacuuag

SEQ ID NO: 2465914 - RNA, 19 nt, Artificial Sequence
  Description of Artificial Sequence: Synthetic oligonucleotide
  Sense strand starting at position 3167 of SEQ ID NO: 1887353
gagagaaucugaguccuug

SEQ ID NO: 2465915 - RNA, 19 nt, Artificial Sequence
  Description of Artificial Sequence: Synthetic oligonucleotide
  Antisense strand to SEQ ID NO: 2465914
caaggacucagauucucuc

SEQ ID NO: 2465916 - RNA, 19 nt, Artificial Sequence
  Description of Artificial Sequence: Synthetic oligonucleotide
  Sense strand starting at position 3171 of SEQ ID NO: 1887353
gaaucugaguccuugaagu

SEQ ID NO: 2465917 - RNA, 19 nt, Artificial Sequence
  Description of Artificial Sequence: Synthetic oligonucleotide
  Antisense strand to SEQ ID NO: 2465916
acuucaaggacucagauuc

SEQ ID NO: 2465918 - RNA, 19 nt, Artificial Sequence
  Description of Artificial Sequence: Synthetic oligonucleotide
  Sense strand starting at position 3173 of SEQ ID NO: 1887353
aucugaguccuugaaguug

SEQ ID NO: 2465919 - RNA, 19 nt, Artificial Sequence
  Description of Artificial Sequence: Synthetic oligonucleotide
  Antisense strand to SEQ ID NO: 2465918
caacuucaaggacucagau

SEQ ID NO: 2465920 - RNA, 19 nt, Artificial Sequence
  Description of Artificial Sequence: Synthetic oligonucleotide
  Sense strand starting at position 3190 of SEQ ID NO: 1887353
ugcuguggauuuguuuaau

SEQ ID NO: 2465921 - RNA, 19 nt, Artificial Sequence
  Description of Artificial Sequence: Synthetic oligonucleotide
  Antisense strand to SEQ ID NO: 2465920
auuaaacaaauccacagca

SEQ ID NO: 2465922 - RNA, 19 nt, Artificial Sequence
  Description of Artificial Sequence: Synthetic oligonucleotide
  Sense strand starting at position 3264 of SEQ ID NO: 1887353
uuuguuaggugagauaaua

SEQ ID NO: 2465923 - RNA, 19 nt, Artificial Sequence
  Description of Artificial Sequence: Synthetic oligonucleotide
  Antisense strand to SEQ ID NO: 2465922
uauuaucucaccuaacaaa

SEQ ID NO: 2465924 - RNA, 19 nt, Artificial Sequence
  Description of Artificial Sequence: Synthetic oligonucleotide
  Sense strand starting at position 3645 of SEQ ID NO: 1887353
uuauuugucugucaguauc

SEQ ID NO: 2465925 - RNA, 19 nt, Artificial Sequence
  Description of Artificial Sequence: Synthetic oligonucleotide
  Antisense strand to SEQ ID NO: 2465924
gauacugacagacaaauaa

SEQ ID NO: 2465926 - RNA, 19 nt, Artificial Sequence
  Description of Artificial Sequence: Synthetic oligonucleotide
  Sense strand starting at position 3647 of SEQ ID NO: 1887353
auuugucugucaguaucca

SEQ ID NO: 2465927 - RNA, 19 nt, Artificial Sequence
  Description of Artificial Sequence: Synthetic oligonucleotide
  Antisense strand to SEQ ID NO: 2465926
uggauacugacagacaaau

SEQ ID NO: 2465928 - RNA, 19 nt, Artificial Sequence
  Description of Artificial Sequence: Synthetic oligonucleotide
  Sense strand starting at position 3849 of SEQ ID NO: 1887353
uguauuguuacggaauaau

SEQ ID NO: 2465929 - RNA, 19 nt, Artificial Sequence
  Description of Artificial Sequence: Synthetic oligonucleotide
  Antisense strand to SEQ ID NO: 2465928
auuauuccguaacaauaca

SEQ ID NO: 2465930 - RNA, 19 nt, Artificial Sequence
  Description of Artificial Sequence: Synthetic oligonucleotide
  Sense strand starting at position 435 of SEQ ID NO: 1887354
gccaguucuggccaaauau

SEQ ID NO: 2465931 - RNA, 19 nt, Artificial Sequence
  Description of Artificial Sequence: Synthetic oligonucleotide
  Antisense strand to SEQ ID NO: 2465930
auauuuggccagaacuggc

SEQ ID NO: 2465932 - RNA, 19 nt, Artificial Sequence
  Description of Artificial Sequence: Synthetic oligonucleotide
  Sense strand starting at position 503 of SEQ ID NO: 1887354
cuguuucccugguuuaaag

SEQ ID NO: 2465933 - RNA, 19 nt, Artificial Sequence
  Description of Artificial Sequence: Synthetic oligonucleotide
  Antisense strand to SEQ ID NO: 2465932
cuuuaaaccagggaaacag

SEQ ID NO: 2465934 - RNA, 19 nt, Artificial Sequence
  Description of Artificial Sequence: Synthetic oligonucleotide
  Sense strand starting at position 514 of SEQ ID NO: 1887354
guuuaaagugugcacucua

SEQ ID NO: 2465935 - RNA, 19 nt, Artificial Sequence
  Description of Artificial Sequence: Synthetic oligonucleotide
  Antisense strand to SEQ ID NO: 2465934
uagagugcacacuuuaaac

SEQ ID NO: 2465936 - RNA, 19 nt, Artificial Sequence
  Description of Artificial Sequence: Synthetic oligonucleotide
  Sense strand starting at position 975 of SEQ ID NO: 1887354
agugaagccgagugggauu

SEQ ID NO: 2465937 - RNA, 19 nt, Artificial Sequence
  Description of Artificial Sequence: Synthetic oligonucleotide
  Antisense strand to SEQ ID NO: 2465936
aaucccacucggcuucacu

SEQ ID NO: 2465938 - RNA, 19 nt, Artificial Sequence
  Description of Artificial Sequence: Synthetic oligonucleotide
  Sense strand starting at position 986 of SEQ ID NO: 1887354
gugggauuaaggugacaga

SEQ ID NO: 2465939 - RNA, 19 nt, Artificial Sequence
  Description of Artificial Sequence: Synthetic oligonucleotide
  Antisense strand to SEQ ID NO: 2465938
ucugucaccuuaaucccac

SEQ ID NO: 2465940 - RNA, 19 nt, Artificial Sequence
  Description of Artificial Sequence: Synthetic oligonucleotide
  Sense strand starting at position 1045 of SEQ ID NO: 1887354
gcgagugcaucauuuaaac

SEQ ID NO: 2465941 - RNA, 19 nt, Artificial Sequence
  Description of Artificial Sequence: Synthetic oligonucleotide
  Antisense strand to SEQ ID NO: 2465940
guuuaaaugaugcacucgc

SEQ ID NO: 2465942 - RNA, 19 nt, Artificial Sequence
  Description of Artificial Sequence: Synthetic oligonucleotide
  Sense strand starting at position 1094 of SEQ ID NO: 1887354
gugguuguugcuguucuaa

SEQ ID NO: 2465943 - RNA, 19 nt, Artificial Sequence
  Description of Artificial Sequence: Synthetic oligonucleotide
  Antisense strand to SEQ ID NO: 2465942
uuagaacagcaacaaccac

SEQ ID NO: 2465944 - RNA, 19 nt, Artificial Sequence
  Description of Artificial Sequence: Synthetic oligonucleotide
  Sense strand starting at position 1112 of SEQ ID NO: 1887354
augggauugcuucguagau

SEQ ID NO: 2465945 - RNA, 19 nt, Artificial Sequence
  Description of Artificial Sequence: Synthetic oligonucleotide
  Antisense strand to SEQ ID NO: 2465944
aucuacgaagcaaucccau

SEQ ID NO: 2465946 - RNA, 19 nt, Artificial Sequence
  Description of Artificial Sequence: Synthetic oligonucleotide
  Sense strand starting at position 1113 of SEQ ID NO: 1887354
ugggauugcuucguagaug

SEQ ID NO: 2465947 - RNA, 19 nt, Artificial Sequence
  Description of Artificial Sequence: Synthetic oligonucleotide
  Antisense strand to SEQ ID NO: 2465946
caucuacgaagcaauccca

SEQ ID NO: 2465948 - RNA, 19 nt, Artificial Sequence
  Description of Artificial Sequence: Synthetic oligonucleotide
  Sense strand starting at position 1201 of SEQ ID NO: 1887354
ugucucuuacaggaacagu

SEQ ID NO: 2465949 - RNA, 19 nt, Artificial Sequence
  Description of Artificial Sequence: Synthetic oligonucleotide
  Antisense strand to SEQ ID NO: 2465948
acuguuccuguaagagaca

SEQ ID NO: 2465950 - RNA, 19 nt, Artificial Sequence
  Description of Artificial Sequence: Synthetic oligonucleotide
  Sense strand starting at position 1257 of SEQ ID NO: 1887354
ucaccaguuuggucucaca

SEQ ID NO: 2465951 - RNA, 19 nt, Artificial Sequence
  Description of Artificial Sequence: Synthetic oligonucleotide
  Antisense strand to SEQ ID NO: 2465950
ugugagaccaaacugguga

SEQ ID NO: 2465952 - RNA, 19 nt, Artificial Sequence
  Description of Artificial Sequence: Synthetic oligonucleotide
  Sense strand starting at position 1345 of SEQ ID NO: 1887354
ccuuaugcggcgucucauu

SEQ ID NO: 2465953 - RNA, 19 nt, Artificial Sequence
  Description of Artificial Sequence: Synthetic oligonucleotide
  Antisense strand to SEQ ID NO: 2465952
aaugagacgccgcauaagg

SEQ ID NO: 2465954 - RNA, 19 nt, Artificial Sequence
  Description of Artificial Sequence: Synthetic oligonucleotide
  Sense strand starting at position 1352 of SEQ ID NO: 1887354
cggcgucucauugcuagau

SEQ ID NO: 2465955 - RNA, 19 nt, Artificial Sequence
  Description of Artificial Sequence: Synthetic oligonucleotide
  Antisense strand to SEQ ID NO: 2465954
aucuagcaaugagacgccg

SEQ ID NO: 2465956 - RNA, 19 nt, Artificial Sequence
  Description of Artificial Sequence: Synthetic oligonucleotide
  Sense strand starting at position 1356 of SEQ ID NO: 1887354
gucucauugcuagauguau

SEQ ID NO: 2465957 - RNA, 19 nt, Artificial Sequence
  Description of Artificial Sequence: Synthetic oligonucleotide
  Antisense strand to SEQ ID NO: 2465956
auacaucuagcaaugagac

SEQ ID NO: 2465958 - RNA, 19 nt, Artificial Sequence
  Description of Artificial Sequence: Synthetic oligonucleotide
  Sense strand starting at position 1431 of SEQ ID NO: 1887354
ugaagugcuugauuugcaa

SEQ ID NO: 2465959 - RNA, 19 nt, Artificial Sequence
  Description of Artificial Sequence: Synthetic oligonucleotide
  Antisense strand to SEQ ID NO: 2465958
uugcaaaucaagcacuuca

SEQ ID NO: 2465960 - RNA, 19 nt, Artificial Sequence
  Description of Artificial Sequence: Synthetic oligonucleotide
  Sense strand starting at position 1464 of SEQ ID NO: 1887354
gaaggaauucaguguuggu

SEQ ID NO: 2465961 - RNA, 19 nt, Artificial Sequence
  Description of Artificial Sequence: Synthetic oligonucleotide
  Antisense strand to SEQ ID NO: 2465960
accaacacugaauuccuuc

SEQ ID NO: 2465962 - RNA, 19 nt, Artificial Sequence
  Description of Artificial Sequence: Synthetic oligonucleotide
  Sense strand starting at position 1604 of SEQ ID NO: 1887354
uuaagucuccuggaucuau

SEQ ID NO: 2465963 - RNA, 19 nt, Artificial Sequence
  Description of Artificial Sequence: Synthetic oligonucleotide
  Antisense strand to SEQ ID NO: 2465962
auagauccaggagacuuaa

SEQ ID NO: 2465964 - RNA, 19 nt, Artificial Sequence
  Description of Artificial Sequence: Synthetic oligonucleotide
  Sense strand starting at position 1616 of SEQ ID NO: 1887354
gaucuauuauugucuggac

SEQ ID NO: 2465965 - RNA, 19 nt, Artificial Sequence
  Description of Artificial Sequence: Synthetic oligonucleotide
  Antisense strand to SEQ ID NO: 2465964
guccagacaauaauagauc

SEQ ID NO: 2465966 - RNA, 19 nt, Artificial Sequence
  Description of Artificial Sequence: Synthetic oligonucleotide
  Sense strand starting at position 1617 of SEQ ID NO: 1887354
aucuauuauugucuggacu

SEQ ID NO: 2465967 - RNA, 19 nt, Artificial Sequence
  Description of Artificial Sequence: Synthetic oligonucleotide
  Antisense strand to SEQ ID NO: 2465966
aguccagacaauaauagau

SEQ ID NO: 2465968 - RNA, 19 nt, Artificial Sequence
  Description of Artificial Sequence: Synthetic oligonucleotide
  Sense strand starting at position 1618 of SEQ ID NO: 1887354
ucuauuauugucuggacuu

SEQ ID NO: 2465969 - RNA, 19 nt, Artificial Sequence
  Description of Artificial Sequence: Synthetic oligonucleotide
  Antisense strand to SEQ ID NO: 2465968
aaguccagacaauaauaga

SEQ ID NO: 2465970 - RNA, 19 nt, Artificial Sequence
  Description of Artificial Sequence: Synthetic oligonucleotide
  Sense strand starting at position 1670 of SEQ ID NO: 1887354
ugaugucuuugucuaccca

SEQ ID NO: 2465971 - RNA, 19 nt, Artificial Sequence
  Description of Artificial Sequence: Synthetic oligonucleotide
  Antisense strand to SEQ ID NO: 2465970
uggguagacaaagacauca

SEQ ID NO: 2465972 - RNA, 19 nt, Artificial Sequence
  Description of Artificial Sequence: Synthetic oligonucleotide
  Sense strand starting at position 1980 of SEQ ID NO: 1887354
ugccaucacucucugugaa

SEQ ID NO: 2465973 - RNA, 19 nt, Artificial Sequence
  Description of Artificial Sequence: Synthetic oligonucleotide
  Antisense strand to SEQ ID NO: 2465972
uucacagagagugauggca

SEQ ID NO: 2465974 - RNA, 19 nt, Artificial Sequence
  Description of Artificial Sequence: Synthetic oligonucleotide
  Sense strand starting at position 2019 of SEQ ID NO: 1887354
ugaccuuucugugcucaaa

SEQ ID NO: 2465975 - RNA, 19 nt, Artificial Sequence
  Description of Artificial Sequence: Synthetic oligonucleotide
  Antisense strand to SEQ ID NO: 2465974
uuugagcacagaaagguca

SEQ ID NO: 2465976 - RNA, 19 nt, Artificial Sequence
  Description of Artificial Sequence: Synthetic oligonucleotide
  Sense strand starting at position 2038 of SEQ ID NO: 1887354
cugugaucuguggaagguc

SEQ ID NO: 2465977 - RNA, 19 nt, Artificial Sequence
  Description of Artificial Sequence: Synthetic oligonucleotide
  Antisense strand to SEQ ID NO: 2465976
gaccuuccacagaucacag

SEQ ID NO: 2465978 - RNA, 19 nt, Artificial Sequence
  Description of Artificial Sequence: Synthetic oligonucleotide
  Sense strand starting at position 2466 of SEQ ID NO: 1887354
cugguuugagcuggauauc

SEQ ID NO: 2465979 - RNA, 19 nt, Artificial Sequence
  Description of Artificial Sequence: Synthetic oligonucleotide
  Antisense strand to SEQ ID NO: 2465978
gauauccagcucaaaccag

SEQ ID NO: 2465980 - RNA, 19 nt, Artificial Sequence
  Description of Artificial Sequence: Synthetic oligonucleotide
  Sense strand starting at position 2467 of SEQ ID NO: 1887354
ugguuugagcuggauauca

SEQ ID NO: 2465981 - RNA, 19 nt, Artificial Sequence
  Description of Artificial Sequence: Synthetic oligonucleotide
  Antisense strand to SEQ ID NO: 2465980
ugauauccagcucaaacca

SEQ ID NO: 2465982 - RNA, 19 nt, Artificial Sequence
  Description of Artificial Sequence: Synthetic oligonucleotide
  Sense strand starting at position 2469 of SEQ ID NO: 1887354
guuugagcuggauaucaua

SEQ ID NO: 2465983 - RNA, 19 nt, Artificial Sequence
  Description of Artificial Sequence: Synthetic oligonucleotide
  Antisense strand to SEQ ID NO: 2465982
uaugauauccagcucaaac

SEQ ID NO: 2465984 - RNA, 19 nt, Artificial Sequence
  Description of Artificial Sequence: Synthetic oligonucleotide
  Sense strand starting at position 2477 of SEQ ID NO: 1887354
uggauaucauagccgucaa

SEQ ID NO: 2465985 - RNA, 19 nt, Artificial Sequence
  Description of Artificial Sequence: Synthetic oligonucleotide
  Antisense strand to SEQ ID NO: 2465984
uugacggcuaugauaucca

SEQ ID NO: 2465986 - RNA, 19 nt, Artificial Sequence
  Description of Artificial Sequence: Synthetic oligonucleotide
  Sense strand starting at position 2478 of SEQ ID NO: 1887354
ggauaucauagccgucaau

SEQ ID NO: 2465987 - RNA, 19 nt, Artificial Sequence
  Description of Artificial Sequence: Synthetic oligonucleotide
  Antisense strand to SEQ ID NO: 2465986
auugacggcuaugauaucc

SEQ ID NO: 2465988 - RNA, 19 nt, Artificial Sequence
  Description of Artificial Sequence: Synthetic oligonucleotide
  Sense strand starting at position 2530 of SEQ ID NO: 1887354
agugcauugcucuaauaug

SEQ ID NO: 2465989 - RNA, 19 nt, Artificial Sequence
  Description of Artificial Sequence: Synthetic oligonucleotide
  Antisense strand to SEQ ID NO: 2465988
cauauuagagcaaugcacu

SEQ ID NO: 2465990 - RNA, 19 nt, Artificial Sequence
  Description of Artificial Sequence: Synthetic oligonucleotide
  Sense strand starting at position 2642 of SEQ ID NO: 1887354
acuugccucguugagaaga

SEQ ID NO: 2465991 - RNA, 19 nt, Artificial Sequence
  Description of Artificial Sequence: Synthetic oligonucleotide
  Antisense strand to SEQ ID NO: 2465990
ucuucucaacgaggcaagu

SEQ ID NO: 2465992 - RNA, 19 nt, Artificial Sequence
  Description of Artificial Sequence: Synthetic oligonucleotide
  Sense strand starting at position 2906 of SEQ ID NO: 1887354
aacuauugugcuggagguu

SEQ ID NO: 2465993 - RNA, 19 nt, Artificial Sequence
  Description of Artificial Sequence: Synthetic oligonucleotide
  Antisense strand to SEQ ID NO: 2465992
aaccuccagcacaauaguu

SEQ ID NO: 2465994 - RNA, 19 nt, Artificial Sequence
  Description of Artificial Sequence: Synthetic oligonucleotide
  Sense strand starting at position 3038 of SEQ ID NO: 1887354
gaggcaucugcucaaaguc

SEQ ID NO: 2465995 - RNA, 19 nt, Artificial Sequence
  Description of Artificial Sequence: Synthetic oligonucleotide
  Antisense strand to SEQ ID NO: 2465994
gacuuugagcagaugccuc

SEQ ID NO: 2465996 - RNA, 19 nt, Artificial Sequence
  Description of Artificial Sequence: Synthetic oligonucleotide
  Sense strand starting at position 3176 of SEQ ID NO: 1887354
ccugaaaccucggcuagua

SEQ ID NO: 2465997 - RNA, 19 nt, Artificial Sequence
  Description of Artificial Sequence: Synthetic oligonucleotide
  Antisense strand to SEQ ID NO: 2465996
uacuagccgagguuucagg

SEQ ID NO: 2465998 - RNA, 19 nt, Artificial Sequence
  Description of Artificial Sequence: Synthetic oligonucleotide
  Sense strand starting at position 3192 of SEQ ID NO: 1887354
guaccuaaacgucauauac

SEQ ID NO: 2465999 - RNA, 19 nt, Artificial Sequence
  Description of Artificial Sequence: Synthetic oligonucleotide
  Antisense strand to SEQ ID NO: 2465998
guauaugacguuuagguac

SEQ ID NO: 2466000 - RNA, 19 nt, Artificial Sequence
  Description of Artificial Sequence: Synthetic oligonucleotide
  Sense strand starting at position 3768 of SEQ ID NO: 1887354
cguggaucugcuggacaca

SEQ ID NO: 2466001 - RNA, 19 nt, Artificial Sequence
  Description of Artificial Sequence: Synthetic oligonucleotide
  Antisense strand to SEQ ID NO: 2466000
uguguccagcagauccacg

SEQ ID NO: 2466002 - RNA, 19 nt, Artificial Sequence
  Description of Artificial Sequence: Synthetic oligonucleotide
  Sense strand starting at position 3923 of SEQ ID NO: 1887354
gcgugaauccacuggacac

SEQ ID NO: 2466003 - RNA, 19 nt, Artificial Sequence
  Description of Artificial Sequence: Synthetic oligonucleotide
  Antisense strand to SEQ ID NO: 2466002
guguccaguggauucacgc

SEQ ID NO: 2466004 - RNA, 19 nt, Artificial Sequence
  Description of Artificial Sequence: Synthetic oligonucleotide
  Sense strand starting at position 3924 of SEQ ID NO: 1887354
cgugaauccacuggacaca

SEQ ID NO: 2466005 - RNA, 19 nt, Artificial Sequence
  Description of Artificial Sequence: Synthetic oligonucleotide
  Antisense strand to SEQ ID NO: 2466004
uguguccaguggauucacg

SEQ ID NO: 2466006 - RNA, 19 nt, Artificial Sequence
  Description of Artificial Sequence: Synthetic oligonucleotide
  Sense strand starting at position 3972 of SEQ ID NO: 1887354
gugggauggcaugagaucu

SEQ ID NO: 2466007 - RNA, 19 nt, Artificial Sequence
  Description of Artificial Sequence: Synthetic oligonucleotide
  Antisense strand to SEQ ID NO: 2466006
agaucucaugccaucccac

SEQ ID NO: 2466008 - RNA, 19 nt, Artificial Sequence
  Description of Artificial Sequence: Synthetic oligonucleotide
  Sense strand starting at position 3982 of SEQ ID NO: 1887354
augagaucucaucacgcua

SEQ ID NO: 2466009 - RNA, 19 nt, Artificial Sequence
  Description of Artificial Sequence: Synthetic oligonucleotide
  Antisense strand to SEQ ID NO: 2466008
uagcgugaugagaucucau

SEQ ID NO: 2466010 - RNA, 19 nt, Artificial Sequence
  Description of Artificial Sequence: Synthetic oligonucleotide
  Sense strand starting at position 32 of SEQ ID NO: 1887355
uacagaguggcucaucaaa

SEQ ID NO: 2466011 - RNA, 19 nt, Artificial Sequence
  Description of Artificial Sequence: Synthetic oligonucleotide
  Antisense strand to SEQ ID NO: 2466010
uuugaugagccacucugua

SEQ ID NO: 2466012 - RNA, 19 nt, Artificial Sequence
  Description of Artificial Sequence: Synthetic oligonucleotide
  Sense strand starting at position 34 of SEQ ID NO: 1887355
cagaguggcucaucaaacu

SEQ ID NO: 2466013 - RNA, 19 nt, Artificial Sequence
  Description of Artificial Sequence: Synthetic oligonucleotide
  Antisense strand to SEQ ID NO: 2466012
aguuugaugagccacucug

SEQ ID NO: 2466014 - RNA, 19 nt, Artificial Sequence
  Description of Artificial Sequence: Synthetic oligonucleotide
  Sense strand starting at position 217 of SEQ ID NO: 1887355
cuauaccgucaauguagaa

SEQ ID NO: 2466015 - RNA, 19 nt, Artificial Sequence
  Description of Artificial Sequence: Synthetic oligonucleotide
  Antisense strand to SEQ ID NO: 2466014
uucuacauugacgguauag

SEQ ID NO: 2466016 - RNA, 19 nt, Artificial Sequence
  Description of Artificial Sequence: Synthetic oligonucleotide
  Sense strand starting at position 321 of SEQ ID NO: 1887355
gugugugauguugaaugga

SEQ ID NO: 2466017 - RNA, 19 nt, Artificial Sequence
  Description of Artificial Sequence: Synthetic oligonucleotide
  Antisense strand to SEQ ID NO: 2466016
uccauucaacaucacacac

SEQ ID NO: 2466018 - RNA, 19 nt, Artificial Sequence
  Description of Artificial Sequence: Synthetic oligonucleotide
  Sense strand starting at position 382 of SEQ ID NO: 1887355
ggcucuuaagcauagucau

SEQ ID NO: 2466019 - RNA, 19 nt, Artificial Sequence
  Description of Artificial Sequence: Synthetic oligonucleotide
  Antisense strand to SEQ ID NO: 2466018
augacuaugcuuaagagcc

SEQ ID NO: 2466020 - RNA, 19 nt, Artificial Sequence
  Description of Artificial Sequence: Synthetic oligonucleotide
  Sense strand starting at position 461 of SEQ ID NO: 1887355
gcuacuaugccagaccuuu

SEQ ID NO: 2466021 - RNA, 19 nt, Artificial Sequence
  Description of Artificial Sequence: Synthetic oligonucleotide
  Antisense strand to SEQ ID NO: 2466020
aaaggucuggcauaguagc

SEQ ID NO: 2466022 - RNA, 19 nt, Artificial Sequence
  Description of Artificial Sequence: Synthetic oligonucleotide
  Sense strand starting at position 582 of SEQ ID NO: 1887355
gcuguagugacagaggaua

SEQ ID NO: 2466023 - RNA, 19 nt, Artificial Sequence
  Description of Artificial Sequence: Synthetic oligonucleotide
  Antisense strand to SEQ ID NO: 2466022
uauccucugucacuacagc

SEQ ID NO: 2466024 - RNA, 19 nt, Artificial Sequence
  Description of Artificial Sequence: Synthetic oligonucleotide
  Sense strand starting at position 613 of SEQ ID NO: 1887355
gauacuaaguucuugagga

SEQ ID NO: 2466025 - RNA, 19 nt, Artificial Sequence
  Description of Artificial Sequence: Synthetic oligonucleotide
  Antisense strand to SEQ ID NO: 2466024
uccucaagaacuuaguauc

SEQ ID NO: 2466026 - RNA, 19 nt, Artificial Sequence
  Description of Artificial Sequence: Synthetic oligonucleotide
  Sense strand starting at position 758 of SEQ ID NO: 1887355
agaauuggccucuagucau

SEQ ID NO: 2466027 - RNA, 19 nt, Artificial Sequence
  Description of Artificial Sequence: Synthetic oligonucleotide
  Antisense strand to SEQ ID NO: 2466026
augacuagaggccaauucu

SEQ ID NO: 2466028 - RNA, 19 nt, Artificial Sequence
  Description of Artificial Sequence: Synthetic oligonucleotide
  Sense strand starting at position 769 of SEQ ID NO: 1887355
cuagucaugguauacagau

SEQ ID NO: 2466029 - RNA, 19 nt, Artificial Sequence
  Description of Artificial Sequence: Synthetic oligonucleotide
  Antisense strand to SEQ ID NO: 2466028
aucuguauaccaugacuag

SEQ ID NO: 2466030 - RNA, 19 nt, Artificial Sequence
  Description of Artificial Sequence: Synthetic oligonucleotide
  Sense strand starting at position 776 of SEQ ID NO: 1887355
ugguauacagaucagucuu

SEQ ID NO: 2466031 - RNA, 19 nt, Artificial Sequence
  Description of Artificial Sequence: Synthetic oligonucleotide
  Antisense strand to SEQ ID NO: 2466030
aagacugaucuguauacca

SEQ ID NO: 2466032 - RNA, 19 nt, Artificial Sequence
  Description of Artificial Sequence: Synthetic oligonucleotide
  Sense strand starting at position 784 of SEQ ID NO: 1887355
agaucagucuuaguccaau

SEQ ID NO: 2466033 - RNA, 19 nt, Artificial Sequence
  Description of Artificial Sequence: Synthetic oligonucleotide
  Antisense strand to SEQ ID NO: 2466032
auuggacuaagacugaucu

SEQ ID NO: 2466034 - RNA, 19 nt, Artificial Sequence
  Description of Artificial Sequence: Synthetic oligonucleotide
  Sense strand starting at position 803 of SEQ ID NO: 1887355
gugauuguuacagguugaa

SEQ ID NO: 2466035 - RNA, 19 nt, Artificial Sequence
  Description of Artificial Sequence: Synthetic oligonucleotide
  Antisense strand to SEQ ID NO: 2466034
uucaaccuguaacaaucac

SEQ ID NO: 2466036 - RNA, 19 nt, Artificial Sequence
  Description of Artificial Sequence: Synthetic oligonucleotide
  Sense strand starting at position 806 of SEQ ID NO: 1887355
auuguuacagguugaacau

SEQ ID NO: 2466037 - RNA, 19 nt, Artificial Sequence
  Description of Artificial Sequence: Synthetic oligonucleotide
  Antisense strand to SEQ ID NO: 2466036
auguucaaccuguaacaau

SEQ ID NO: 2466038 - RNA, 19 nt, Artificial Sequence
  Description of Artificial Sequence: Synthetic oligonucleotide
  Sense strand starting at position 923 of SEQ ID NO: 1887355
augugauaugaucaaagcu

SEQ ID NO: 2466039 - RNA, 19 nt, Artificial Sequence
  Description of Artificial Sequence: Synthetic oligonucleotide
  Antisense strand to SEQ ID NO: 2466038
agcuuugaucauaucacau

SEQ ID NO: 2466040 - RNA, 19 nt, Artificial Sequence
  Description of Artificial Sequence: Synthetic oligonucleotide
  Sense strand starting at position 1208 of SEQ ID NO: 1887355
ugaaauacucacuggagca

SEQ ID NO: 2466041 - RNA, 19 nt, Artificial Sequence
  Description of Artificial Sequence: Synthetic oligonucleotide
  Antisense strand to SEQ ID NO: 2466040
ugcuccagugaguauuuca

SEQ ID NO: 2466042 - RNA, 19 nt, Artificial Sequence
  Description of Artificial Sequence: Synthetic oligonucleotide
  Sense strand starting at position 1257 of SEQ ID NO: 1887355
gcucaaccaguauaaugua

SEQ ID NO: 2466043 - RNA, 19 nt, Artificial Sequence
  Description of Artificial Sequence: Synthetic oligonucleotide
  Antisense strand to SEQ ID NO: 2466042
uacauuauacugguugagc

SEQ ID NO: 2466044 - RNA, 19 nt, Artificial Sequence
  Description of Artificial Sequence: Synthetic oligonucleotide
  Sense strand starting at position 1481 of SEQ ID NO: 1887355
ucuagagugucccuagaug

SEQ ID NO: 2466045 - RNA, 19 nt, Artificial Sequence
  Description of Artificial Sequence: Synthetic oligonucleotide
  Antisense strand to SEQ ID NO: 2466044
caucuagggacacucuaga

SEQ ID NO: 2466046 - RNA, 19 nt, Artificial Sequence
  Description of Artificial Sequence: Synthetic oligonucleotide
  Sense strand starting at position 1585 of SEQ ID NO: 1887355
auagcuuuauuugagggaa

SEQ ID NO: 2466047 - RNA, 19 nt, Artificial Sequence
  Description of Artificial Sequence: Synthetic oligonucleotide
  Antisense strand to SEQ ID NO: 2466046
uucccucaaauaaagcuau

SEQ ID NO: 2466048 - RNA, 19 nt, Artificial Sequence
  Description of Artificial Sequence: Synthetic oligonucleotide
  Sense strand starting at position 1705 of SEQ ID NO: 1887355
gaguguaucacugguggag

SEQ ID NO: 2466049 - RNA, 19 nt, Artificial Sequence
  Description of Artificial Sequence: Synthetic oligonucleotide
  Antisense strand to SEQ ID NO: 2466048
cuccaccagugauacacuc

SEQ ID NO: 2466050 - RNA, 19 nt, Artificial Sequence
  Description of Artificial Sequence: Synthetic oligonucleotide
  Sense strand starting at position 1708 of SEQ ID NO: 1887355
uguaucacugguggagaaa

SEQ ID NO: 2466051 - RNA, 19 nt, Artificial Sequence
  Description of Artificial Sequence: Synthetic oligonucleotide
  Antisense strand to SEQ ID NO: 2466050
uuucuccaccagugauaca

SEQ ID NO: 2466052 - RNA, 19 nt, Artificial Sequence
  Description of Artificial Sequence: Synthetic oligonucleotide
  Sense strand starting at position 1843 of SEQ ID NO: 1887355
augcaaacgcaucaugaaa

SEQ ID NO: 2466053 - RNA, 19 nt, Artificial Sequence
  Description of Artificial Sequence: Synthetic oligonucleotide
  Antisense strand to SEQ ID NO: 2466052
uuucaugaugcguuugcau

SEQ ID NO: 2466054 - RNA, 19 nt, Artificial Sequence
  Description of Artificial Sequence: Synthetic oligonucleotide
  Sense strand starting at position 1854 of SEQ ID NO: 1887355
ucaugaaauuaugucgaug

SEQ ID NO: 2466055 - RNA, 19 nt, Artificial Sequence
  Description of Artificial Sequence: Synthetic oligonucleotide
  Antisense strand to SEQ ID NO: 2466054
caucgacauaauuucauga

SEQ ID NO: 2466056 - RNA, 19 nt, Artificial Sequence
  Description of Artificial Sequence: Synthetic oligonucleotide
  Sense strand starting at position 1857 of SEQ ID NO: 1887355
ugaaauuaugucgauguga

SEQ ID NO: 2466057 - RNA, 19 nt, Artificial Sequence
  Description of Artificial Sequence: Synthetic oligonucleotide
  Antisense strand to SEQ ID NO: 2466056
ucacaucgacauaauuuca

SEQ ID NO: 2466058 - RNA, 19 nt, Artificial Sequence
  Description of Artificial Sequence: Synthetic oligonucleotide
  Sense strand starting at position 1859 of SEQ ID NO: 1887355
aaauuaugucgaugugaug

SEQ ID NO: 2466059 - RNA, 19 nt, Artificial Sequence
  Description of Artificial Sequence: Synthetic oligonucleotide
  Antisense strand to SEQ ID NO: 2466058
caucacaucgacauaauuu

SEQ ID NO: 2466060 - RNA, 19 nt, Artificial Sequence
  Description of Artificial Sequence: Synthetic oligonucleotide
  Sense strand starting at position 1868 of SEQ ID NO: 1887355
cgaugugaugcugaacuca

SEQ ID NO: 2466061 - RNA, 19 nt, Artificial Sequence
  Description of Artificial Sequence: Synthetic oligonucleotide
  Antisense strand to SEQ ID NO: 2466060
ugaguucagcaucacaucg

SEQ ID NO: 2466062 - RNA, 19 nt, Artificial Sequence
  Description of Artificial Sequence: Synthetic oligonucleotide
  Sense strand starting at position 1955 of SEQ ID NO: 1887355
gaaugcuauccagggucaa

SEQ ID NO: 2466063 - RNA, 19 nt, Artificial Sequence
  Description of Artificial Sequence: Synthetic oligonucleotide
  Antisense strand to SEQ ID NO: 2466062
uugacccuggauagcauuc

SEQ ID NO: 2466064 - RNA, 19 nt, Artificial Sequence
  Description of Artificial Sequence: Synthetic oligonucleotide
  Sense strand starting at position 2006 of SEQ ID NO: 1887355
gcccaagaaggauguaauc

SEQ ID NO: 2466065 - RNA, 19 nt, Artificial Sequence
  Description of Artificial Sequence: Synthetic oligonucleotide
  Antisense strand to SEQ ID NO: 2466064
gauuacauccuucuugggc

SEQ ID NO: 2466066 - RNA, 19 nt, Artificial Sequence
  Description of Artificial Sequence: Synthetic oligonucleotide
  Sense strand starting at position 2036 of SEQ ID NO: 1887355
gagucacacucacugaagu

SEQ ID NO: 2466067 - RNA, 19 nt, Artificial Sequence
  Description of Artificial Sequence: Synthetic oligonucleotide
  Antisense strand to SEQ ID NO: 2466066
acuucagugagugugacuc

SEQ ID NO: 2466068 - RNA, 19 nt, Artificial Sequence
  Description of Artificial Sequence: Synthetic oligonucleotide
  Sense strand starting at position 2055 of SEQ ID NO: 1887355
ggcuauauggcauagagac

SEQ ID NO: 2466069 - RNA, 19 nt, Artificial Sequence
  Description of Artificial Sequence: Synthetic oligonucleotide
  Antisense strand to SEQ ID NO: 2466068
gucucuaugccauauagcc

SEQ ID NO: 2466070 - RNA, 19 nt, Artificial Sequence
  Description of Artificial Sequence: Synthetic oligonucleotide
  Sense strand starting at position 2187 of SEQ ID NO: 1887355
aagucuuacuaacugagga

SEQ ID NO: 2466071 - RNA, 19 nt, Artificial Sequence
  Description of Artificial Sequence: Synthetic oligonucleotide
  Antisense strand to SEQ ID NO: 2466070
uccucaguuaguaagacuu

SEQ ID NO: 2466072 - RNA, 19 nt, Artificial Sequence
  Description of Artificial Sequence: Synthetic oligonucleotide
  Sense strand starting at position 2283 of SEQ ID NO: 1887355
uaauaugagcuuggaagau

SEQ ID NO: 2466073 - RNA, 19 nt, Artificial Sequence
  Description of Artificial Sequence: Synthetic oligonucleotide
  Antisense strand to SEQ ID NO: 2466072
aucuuccaagcucauauua

SEQ ID NO: 2466074 - RNA, 19 nt, Artificial Sequence
  Description of Artificial Sequence: Synthetic oligonucleotide
  Sense strand starting at position 2961 of SEQ ID NO: 1887355
aguggagugguuuggauau

SEQ ID NO: 2466075 - RNA, 19 nt, Artificial Sequence
  Description of Artificial Sequence: Synthetic oligonucleotide
  Antisense strand to SEQ ID NO: 2466074
auauccaaaccacuccacu

SEQ ID NO: 2466076 - RNA, 19 nt, Artificial Sequence
  Description of Artificial Sequence: Synthetic oligonucleotide
  Sense strand starting at position 2967 of SEQ ID NO: 1887355
gugguuuggauauaauuag

SEQ ID NO: 2466077 - RNA, 19 nt, Artificial Sequence
  Description of Artificial Sequence: Synthetic oligonucleotide
  Antisense strand to SEQ ID NO: 2466076
cuaauuauauccaaaccac

SEQ ID NO: 2466078 - RNA, 19 nt, Artificial Sequence
  Description of Artificial Sequence: Synthetic oligonucleotide
  Sense strand starting at position 3220 of SEQ ID NO: 1887355
gcaggugacccugagauga

SEQ ID NO: 2466079 - RNA, 19 nt, Artificial Sequence
  Description of Artificial Sequence: Synthetic oligonucleotide
  Antisense strand to SEQ ID NO: 2466078
ucaucucagggucaccugc

SEQ ID NO: 2466080 - RNA, 19 nt, Artificial Sequence
  Description of Artificial Sequence: Synthetic oligonucleotide
  Sense strand starting at position 3401 of SEQ ID NO: 1887355
ucucguuuccauguagugu

SEQ ID NO: 2466081 - RNA, 19 nt, Artificial Sequence
  Description of Artificial Sequence: Synthetic oligonucleotide
  Antisense strand to SEQ ID NO: 2466080
acacuacauggaaacgaga

SEQ ID NO: 2466082 - RNA, 19 nt, Artificial Sequence
  Description of Artificial Sequence: Synthetic oligonucleotide
  Sense strand starting at position 3410 of SEQ ID NO: 1887355
cauguaguguuugccauuu

SEQ ID NO: 2466083 - RNA, 19 nt, Artificial Sequence
  Description of Artificial Sequence: Synthetic oligonucleotide
  Antisense strand to SEQ ID NO: 2466082
aaauggcaaacacuacaug

SEQ ID NO: 2466084 - RNA, 19 nt, Artificial Sequence
  Description of Artificial Sequence: Synthetic oligonucleotide
  Sense strand starting at position 3551 of SEQ ID NO: 1887355
ggugacucucaugauccau

SEQ ID NO: 2466085 - RNA, 19 nt, Artificial Sequence
  Description of Artificial Sequence: Synthetic oligonucleotide
  Antisense strand to SEQ ID NO: 2466084
auggaucaugagagucacc

SEQ ID NO: 2466086 - RNA, 19 nt, Artificial Sequence
  Description of Artificial Sequence: Synthetic oligonucleotide
  Sense strand starting at position 3629 of SEQ ID NO: 1887355
auaaucuaucuugguuagu

SEQ ID NO: 2466087 - RNA, 19 nt, Artificial Sequence
  Description of Artificial Sequence: Synthetic oligonucleotide
  Antisense strand to SEQ ID NO: 2466086
acuaaccaagauagauuau

SEQ ID NO: 2466088 - RNA, 19 nt, Artificial Sequence
  Description of Artificial Sequence: Synthetic oligonucleotide
  Sense strand starting at position 3713 of SEQ ID NO: 1887355
aguccuggagucugaaagu

SEQ ID NO: 2466089 - RNA, 19 nt, Artificial Sequence
  Description of Artificial Sequence: Synthetic oligonucleotide
  Antisense strand to SEQ ID NO: 2466088
acuuucagacuccaggacu

SEQ ID NO: 2466090 - RNA, 19 nt, Artificial Sequence
  Description of Artificial Sequence: Synthetic oligonucleotide
  Sense strand starting at position 97 of SEQ ID NO: 1887356
acaggagcuaaaugguauu

SEQ ID NO: 2466091 - RNA, 19 nt, Artificial Sequence
  Description of Artificial Sequence: Synthetic oligonucleotide
  Antisense strand to SEQ ID NO: 2466090
aauaccauuuagcuccugu

SEQ ID NO: 2466092 - RNA, 19 nt, Artificial Sequence
  Description of Artificial Sequence: Synthetic oligonucleotide
  Sense strand starting at position 451 of SEQ ID NO: 1887356
gcuugcauaccagaauauu

SEQ ID NO: 2466093 - RNA, 19 nt, Artificial Sequence
  Description of Artificial Sequence: Synthetic oligonucleotide
  Antisense strand to SEQ ID NO: 2466092
aauauucugguaugcaagc

SEQ ID NO: 2466094 - RNA, 19 nt, Artificial Sequence
  Description of Artificial Sequence: Synthetic oligonucleotide
  Sense strand starting at position 485 of SEQ ID NO: 1887356
uaucacauggguuggagau

SEQ ID NO: 2466095 - RNA, 19 nt, Artificial Sequence
  Description of Artificial Sequence: Synthetic oligonucleotide
  Antisense strand to SEQ ID NO: 2466094
aucuccaacccaugugaua

SEQ ID NO: 2466096 - RNA, 19 nt, Artificial Sequence
  Description of Artificial Sequence: Synthetic oligonucleotide
  Sense strand starting at position 486 of SEQ ID NO: 1887356
aucacauggguuggagauu

SEQ ID NO: 2466097 - RNA, 19 nt, Artificial Sequence
  Description of Artificial Sequence: Synthetic oligonucleotide
  Antisense strand to SEQ ID NO: 2466096
aaucuccaacccaugugau

SEQ ID NO: 2466098 - RNA, 19 nt, Artificial Sequence
  Description of Artificial Sequence: Synthetic oligonucleotide
  Sense strand starting at position 544 of SEQ ID NO: 1887356
aucugugauuuagagaaag

SEQ ID NO: 2466099 - RNA, 19 nt, Artificial Sequence
  Description of Artificial Sequence: Synthetic oligonucleotide
  Antisense strand to SEQ ID NO: 2466098
cuuucucuaaaucacagau

SEQ ID NO: 2466100 - RNA, 19 nt, Artificial Sequence
  Description of Artificial Sequence: Synthetic oligonucleotide
  Sense strand starting at position 611 of SEQ ID NO: 1887356
gcagccucuguauaagaaa

SEQ ID NO: 2466101 - RNA, 19 nt, Artificial Sequence
  Description of Artificial Sequence: Synthetic oligonucleotide
  Antisense strand to SEQ ID NO: 2466100
uuucuuauacagaggcugc

SEQ ID NO: 2466102 - RNA, 19 nt, Artificial Sequence
  Description of Artificial Sequence: Synthetic oligonucleotide
  Sense strand starting at position 793 of SEQ ID NO: 1887356
cuggcuaugaauuggauau

SEQ ID NO: 2466103 - RNA, 19 nt, Artificial Sequence
  Description of Artificial Sequence: Synthetic oligonucleotide
  Antisense strand to SEQ ID NO: 2466102
auauccaauucauagccag

SEQ ID NO: 2466104 - RNA, 19 nt, Artificial Sequence
  Description of Artificial Sequence: Synthetic oligonucleotide
  Sense strand starting at position 794 of SEQ ID NO: 1887356
uggcuaugaauuggauauc

SEQ ID NO: 2466105 - RNA, 19 nt, Artificial Sequence
  Description of Artificial Sequence: Synthetic oligonucleotide
  Antisense strand to SEQ ID NO: 2466104
gauauccaauucauagcca

SEQ ID NO: 2466106 - RNA, 19 nt, Artificial Sequence
  Description of Artificial Sequence: Synthetic oligonucleotide
  Sense strand starting at position 852 of SEQ ID NO: 1887356
uguggugcuauuugguaua

SEQ ID NO: 2466107 - RNA, 19 nt, Artificial Sequence
  Description of Artificial Sequence: Synthetic oligonucleotide
  Antisense strand to SEQ ID NO: 2466106
uauaccaaauagcaccaca

SEQ ID NO: 2466108 - RNA, 19 nt, Artificial Sequence
  Description of Artificial Sequence: Synthetic oligonucleotide
  Sense strand starting at position 854 of SEQ ID NO: 1887356
uggugcuauuugguauaua

SEQ ID NO: 2466109 - RNA, 19 nt, Artificial Sequence
  Description of Artificial Sequence: Synthetic oligonucleotide
  Antisense strand to SEQ ID NO: 2466108
uauauaccaaauagcacca

SEQ ID NO: 2466110 - RNA, 19 nt, Artificial Sequence
  Description of Artificial Sequence: Synthetic oligonucleotide
  Sense strand starting at position 866 of SEQ ID NO: 1887356
guauauauugccuaucuug

SEQ ID NO: 2466111 - RNA, 19 nt, Artificial Sequence
  Description of Artificial Sequence: Synthetic oligonucleotide
  Antisense strand to SEQ ID NO: 2466110
caagauaggcaauauauac

SEQ ID NO: 2466112 - RNA, 19 nt, Artificial Sequence
  Description of Artificial Sequence: Synthetic oligonucleotide
  Sense strand starting at position 880 of SEQ ID NO: 1887356
ucuuguuaggauuggguaa

SEQ ID NO: 2466113 - RNA, 19 nt, Artificial Sequence
  Description of Artificial Sequence: Synthetic oligonucleotide
  Antisense strand to SEQ ID NO: 2466112
uuacccaauccuaacaaga

SEQ ID NO: 2466114 - RNA, 19 nt, Artificial Sequence
  Description of Artificial Sequence: Synthetic oligonucleotide
  Sense strand starting at position 933 of SEQ ID NO: 1887356
aguaaugguauaggauuaa

SEQ ID NO: 2466115 - RNA, 19 nt, Artificial Sequence
  Description of Artificial Sequence: Synthetic oligonucleotide
  Antisense strand to SEQ ID NO: 2466114
uuaauccuauaccauuacu

SEQ ID NO: 2466116 - RNA, 19 nt, Artificial Sequence
  Description of Artificial Sequence: Synthetic oligonucleotide
  Sense strand starting at position 1258 of SEQ ID NO: 1887356
gacagugaccauugugaga

SEQ ID NO: 2466117 - RNA, 19 nt, Artificial Sequence
  Description of Artificial Sequence: Synthetic oligonucleotide
  Antisense strand to SEQ ID NO: 2466116
ucucacaauggucacuguc

SEQ ID NO: 2466118 - RNA, 19 nt, Artificial Sequence
  Description of Artificial Sequence: Synthetic oligonucleotide
  Sense strand starting at position 1282 of SEQ ID NO: 1887356
ggauguucucaucauacac

SEQ ID NO: 2466119 - RNA, 19 nt, Artificial Sequence
  Description of Artificial Sequence: Synthetic oligonucleotide
  Antisense strand to SEQ ID NO: 2466118
guguaugaugagaacaucc

SEQ ID NO: 2466120 - RNA, 19 nt, Artificial Sequence
  Description of Artificial Sequence: Synthetic oligonucleotide
  Sense strand starting at position 1769 of SEQ ID NO: 1887356
cuuaaagugagauguuuag

SEQ ID NO: 2466121 - RNA, 19 nt, Artificial Sequence
  Description of Artificial Sequence: Synthetic oligonucleotide
  Antisense strand to SEQ ID NO: 2466120
cuaaacaucucacuuuaag

SEQ ID NO: 2466122 - RNA, 19 nt, Artificial Sequence
  Description of Artificial Sequence: Synthetic oligonucleotide
  Sense strand starting at position 1832 of SEQ ID NO: 1887356
cuuuguccucuuuagggau

SEQ ID NO: 2466123 - RNA, 19 nt, Artificial Sequence
  Description of Artificial Sequence: Synthetic oligonucleotide
  Antisense strand to SEQ ID NO: 2466122
aucccuaaagaggacaaag

SEQ ID NO: 2466124 - RNA, 19 nt, Artificial Sequence
  Description of Artificial Sequence: Synthetic oligonucleotide
  Sense strand starting at position 1862 of SEQ ID NO: 1887356
cuuauuuguuacucauguu

SEQ ID NO: 2466125 - RNA, 19 nt, Artificial Sequence
  Description of Artificial Sequence: Synthetic oligonucleotide
  Antisense strand to SEQ ID NO: 2466124
aacaugaguaacaaauaag

SEQ ID NO: 2466126 - RNA, 19 nt, Artificial Sequence
  Description of Artificial Sequence: Synthetic oligonucleotide
  Sense strand starting at position 2009 of SEQ ID NO: 1887356
cugugaugugcucaaauua

SEQ ID NO: 2466127 - RNA, 19 nt, Artificial Sequence
  Description of Artificial Sequence: Synthetic oligonucleotide
  Antisense strand to SEQ ID NO: 2466126
uaauuugagcacaucacag

SEQ ID NO: 2466128 - RNA, 19 nt, Artificial Sequence
  Description of Artificial Sequence: Synthetic oligonucleotide
  Sense strand starting at position 2050 of SEQ ID NO: 1887356
agucaacccuagucucaua

SEQ ID NO: 2466129 - RNA, 19 nt, Artificial Sequence
  Description of Artificial Sequence: Synthetic oligonucleotide
  Antisense strand to SEQ ID NO: 2466128
uaugagacuaggguugacu

SEQ ID NO: 2466130 - RNA, 19 nt, Artificial Sequence
  Description of Artificial Sequence: Synthetic oligonucleotide
  Sense strand starting at position 2089 of SEQ ID NO: 1887356
ggcauugugguuuagaacu

SEQ ID NO: 2466131 - RNA, 19 nt, Artificial Sequence
  Description of Artificial Sequence: Synthetic oligonucleotide
  Antisense strand to SEQ ID NO: 2466130
aguucuaaaccacaaugcc

SEQ ID NO: 2466132 - RNA, 19 nt, Artificial Sequence
  Description of Artificial Sequence: Synthetic oligonucleotide
  Sense strand starting at position 2154 of SEQ ID NO: 1887356
aauguaaacugagugucua

SEQ ID NO: 2466133 - RNA, 19 nt, Artificial Sequence
  Description of Artificial Sequence: Synthetic oligonucleotide
  Antisense strand to SEQ ID NO: 2466132
uagacacucaguuuacauu

SEQ ID NO: 2466134 - RNA, 19 nt, Artificial Sequence
  Description of Artificial Sequence: Synthetic oligonucleotide
  Sense strand starting at position 2187 of SEQ ID NO: 1887356
gcaggcaacagaugauauu

SEQ ID NO: 2466135 - RNA, 19 nt, Artificial Sequence
  Description of Artificial Sequence: Synthetic oligonucleotide
  Antisense strand to SEQ ID NO: 2466134
aauaucaucuguugccugc

SEQ ID NO: 2466136 - RNA, 19 nt, Artificial Sequence
  Description of Artificial Sequence: Synthetic oligonucleotide
  Sense strand starting at position 2290 of SEQ ID NO: 1887356
agaaacaguugaucuuagu

SEQ ID NO: 2466137 - RNA, 19 nt, Artificial Sequence
  Description of Artificial Sequence: Synthetic oligonucleotide
  Antisense strand to SEQ ID NO: 2466136
acuaagaucaacuguuucu

SEQ ID NO: 2466138 - RNA, 19 nt, Artificial Sequence
  Description of Artificial Sequence: Synthetic oligonucleotide
  Sense strand starting at position 2316 of SEQ ID NO: 1887356
uagugacaugcacaaaugu

SEQ ID NO: 2466139 - RNA, 19 nt, Artificial Sequence
  Description of Artificial Sequence: Synthetic oligonucleotide
  Antisense strand to SEQ ID NO: 2466138
acauuugugcaugucacua

SEQ ID NO: 2466140 - RNA, 19 nt, Artificial Sequence
  Description of Artificial Sequence: Synthetic oligonucleotide
  Sense strand starting at position 2369 of SEQ ID NO: 1887356
cuucgcuguagagauuaau

SEQ ID NO: 2466141 - RNA, 19 nt, Artificial Sequence
  Description of Artificial Sequence: Synthetic oligonucleotide
  Antisense strand to SEQ ID NO: 2466140
auuaaucucuacagcgaag

SEQ ID NO: 2466142 - RNA, 19 nt, Artificial Sequence
  Description of Artificial Sequence: Synthetic oligonucleotide
  Sense strand starting at position 2408 of SEQ ID NO: 1887356
guugaaauguuccuggauc

SEQ ID NO: 2466143 - RNA, 19 nt, Artificial Sequence
  Description of Artificial Sequence: Synthetic oligonucleotide
  Antisense strand to SEQ ID NO: 2466142
gauccaggaacauuucaac

SEQ ID NO: 2466144 - RNA, 19 nt, Artificial Sequence
  Description of Artificial Sequence: Synthetic oligonucleotide
  Sense strand starting at position 2410 of SEQ ID NO: 1887356
ugaaauguuccuggauccu

SEQ ID NO: 2466145 - RNA, 19 nt, Artificial Sequence
  Description of Artificial Sequence: Synthetic oligonucleotide
  Antisense strand to SEQ ID NO: 2466144
aggauccaggaacauuuca

SEQ ID NO: 2466146 - RNA, 19 nt, Artificial Sequence
  Description of Artificial Sequence: Synthetic oligonucleotide
  Sense strand starting at position 2536 of SEQ ID NO: 1887356
acaguugacucaucuuaua

SEQ ID NO: 2466147 - RNA, 19 nt, Artificial Sequence
  Description of Artificial Sequence: Synthetic oligonucleotide
  Antisense strand to SEQ ID NO: 2466146
uauaagaugagucaacugu

SEQ ID NO: 2466148 - RNA, 19 nt, Artificial Sequence
  Description of Artificial Sequence: Synthetic oligonucleotide
  Sense strand starting at position 2807 of SEQ ID NO: 1887356
guaugucucccuuaaccua

SEQ ID NO: 2466149 - RNA, 19 nt, Artificial Sequence
  Description of Artificial Sequence: Synthetic oligonucleotide
  Antisense strand to SEQ ID NO: 2466148
uagguuaagggagacauac

SEQ ID NO: 2466150 - RNA, 19 nt, Artificial Sequence
  Description of Artificial Sequence: Synthetic oligonucleotide
  Sense strand starting at position 3002 of SEQ ID NO: 1887356
auaauaauggucuaguggu

SEQ ID NO: 2466151 - RNA, 19 nt, Artificial Sequence
  Description of Artificial Sequence: Synthetic oligonucleotide
  Antisense strand to SEQ ID NO: 2466150
accacuagaccauuauuau

SEQ ID NO: 2466152 - RNA, 19 nt, Artificial Sequence
  Description of Artificial Sequence: Synthetic oligonucleotide
  Sense strand starting at position 3009 of SEQ ID NO: 1887356
uggucuaguggugauauag

SEQ ID NO: 2466153 - RNA, 19 nt, Artificial Sequence
  Description of Artificial Sequence: Synthetic oligonucleotide
  Antisense strand to SEQ ID NO: 2466152
cuauaucaccacuagacca

SEQ ID NO: 2466154 - RNA, 19 nt, Artificial Sequence
  Description of Artificial Sequence: Synthetic oligonucleotide
  Sense strand starting at position 3123 of SEQ ID NO: 1887356
ucaucugugcaauagggau

SEQ ID NO: 2466155 - RNA, 19 nt, Artificial Sequence
  Description of Artificial Sequence: Synthetic oligonucleotide
  Antisense strand to SEQ ID NO: 2466154
aucccuauugcacagauga

SEQ ID NO: 2466156 - RNA, 19 nt, Artificial Sequence
  Description of Artificial Sequence: Synthetic oligonucleotide
  Sense strand starting at position 3158 of SEQ ID NO: 1887356
cagauauguccaugaagau

SEQ ID NO: 2466157 - RNA, 19 nt, Artificial Sequence
  Description of Artificial Sequence: Synthetic oligonucleotide
  Antisense strand to SEQ ID NO: 2466156
aucuucauggacauaucug

SEQ ID NO: 2466158 - RNA, 19 nt, Artificial Sequence
  Description of Artificial Sequence: Synthetic oligonucleotide
  Sense strand starting at position 3226 of SEQ ID NO: 1887356
agugaauucccauaaaugc

SEQ ID NO: 2466159 - RNA, 19 nt, Artificial Sequence
  Description of Artificial Sequence: Synthetic oligonucleotide
  Antisense strand to SEQ ID NO: 2466158
gcauuuaugggaauucacu

SEQ ID NO: 2466160 - RNA, 19 nt, Artificial Sequence
  Description of Artificial Sequence: Synthetic oligonucleotide
  Sense strand starting at position 3332 of SEQ ID NO: 1887356
agacuacucuggcuaaagu

SEQ ID NO: 2466161 - RNA, 19 nt, Artificial Sequence
  Description of Artificial Sequence: Synthetic oligonucleotide
  Antisense strand to SEQ ID NO: 2466160
acuuuagccagaguagucu

SEQ ID NO: 2466162 - RNA, 19 nt, Artificial Sequence
  Description of Artificial Sequence: Synthetic oligonucleotide
  Sense strand starting at position 3333 of SEQ ID NO: 1887356
gacuacucuggcuaaagua

SEQ ID NO: 2466163 - RNA, 19 nt, Artificial Sequence
  Description of Artificial Sequence: Synthetic oligonucleotide
  Antisense strand to SEQ ID NO: 2466162
uacuuuagccagaguaguc

SEQ ID NO: 2466164 - RNA, 19 nt, Artificial Sequence
  Description of Artificial Sequence: Synthetic oligonucleotide
  Sense strand starting at position 3373 of SEQ ID NO: 1887356
gagcaauacuggucaacac

SEQ ID NO: 2466165 - RNA, 19 nt, Artificial Sequence
  Description of Artificial Sequence: Synthetic oligonucleotide
  Antisense strand to SEQ ID NO: 2466164
guguugaccaguauugcuc

SEQ ID NO: 2466166 - RNA, 19 nt, Artificial Sequence
  Description of Artificial Sequence: Synthetic oligonucleotide
  Sense strand starting at position 3374 of SEQ ID NO: 1887356
agcaauacuggucaacaca

SEQ ID NO: 2466167 - RNA, 19 nt, Artificial Sequence
  Description of Artificial Sequence: Synthetic oligonucleotide
  Antisense strand to SEQ ID NO: 2466166
uguguugaccaguauugcu

SEQ ID NO: 2466168 - RNA, 19 nt, Artificial Sequence
  Description of Artificial Sequence: Synthetic oligonucleotide
  Sense strand starting at position 3738 of SEQ ID NO: 1887356
ggacuuuguccuuagggua

SEQ ID NO: 2466169 - RNA, 19 nt, Artificial Sequence
  Description of Artificial Sequence: Synthetic oligonucleotide
  Antisense strand to SEQ ID NO: 2466168
uacccuaaggacaaagucc

SEQ ID NO: 2466170 - RNA, 19 nt, Artificial Sequence
  Description of Artificial Sequence: Synthetic oligonucleotide
  Sense strand starting at position 199 of SEQ ID NO: 1887357
cuaaaugucccagguagug

SEQ ID NO: 2466171 - RNA, 19 nt, Artificial Sequence
  Description of Artificial Sequence: Synthetic oligonucleotide
  Antisense strand to SEQ ID NO: 2466170
cacuaccugggacauuuag

SEQ ID NO: 2466172 - RNA, 19 nt, Artificial Sequence
  Description of Artificial Sequence: Synthetic oligonucleotide
  Sense strand starting at position 232 of SEQ ID NO: 1887357
augggaauugcugauggua

SEQ ID NO: 2466173 - RNA, 19 nt, Artificial Sequence
  Description of Artificial Sequence: Synthetic oligonucleotide
  Antisense strand to SEQ ID NO: 2466172
uaccaucagcaauucccau

SEQ ID NO: 2466174 - RNA, 19 nt, Artificial Sequence
  Description of Artificial Sequence: Synthetic oligonucleotide
  Sense strand starting at position 265 of SEQ ID NO: 1887357
ggcccuaauuucuagacuu

SEQ ID NO: 2466175 - RNA, 19 nt, Artificial Sequence
  Description of Artificial Sequence: Synthetic oligonucleotide
  Antisense strand to SEQ ID NO: 2466174
aagucuagaaauuagggcc

SEQ ID NO: 2466176 - RNA, 19 nt, Artificial Sequence
  Description of Artificial Sequence: Synthetic oligonucleotide
  Sense strand starting at position 632 of SEQ ID NO: 1887357
auuaguugacauuauugca

SEQ ID NO: 2466177 - RNA, 19 nt, Artificial Sequence
  Description of Artificial Sequence: Synthetic oligonucleotide
  Antisense strand to SEQ ID NO: 2466176
ugcaauaaugucaacuaau

SEQ ID NO: 2466178 - RNA, 19 nt, Artificial Sequence
  Description of Artificial Sequence: Synthetic oligonucleotide
  Sense strand starting at position 640 of SEQ ID NO: 1887357
acauuauugcaucacgauc

SEQ ID NO: 2466179 - RNA, 19 nt, Artificial Sequence
  Description of Artificial Sequence: Synthetic oligonucleotide
  Antisense strand to SEQ ID NO: 2466178
gaucgugaugcaauaaugu

SEQ ID NO: 2466180 - RNA, 19 nt, Artificial Sequence
  Description of Artificial Sequence: Synthetic oligonucleotide
  Sense strand starting at position 816 of SEQ ID NO: 1887357
ugggccauguccucuacau

SEQ ID NO: 2466181 - RNA, 19 nt, Artificial Sequence
  Description of Artificial Sequence: Synthetic oligonucleotide
  Antisense strand to SEQ ID NO: 2466180
auguagaggacauggccca

SEQ ID NO: 2466182 - RNA, 19 nt, Artificial Sequence
  Description of Artificial Sequence: Synthetic oligonucleotide
  Sense strand starting at position 1211 of SEQ ID NO: 1887357
ugggcuucugaaugacaug

SEQ ID NO: 2466183 - RNA, 19 nt, Artificial Sequence
  Description of Artificial Sequence: Synthetic oligonucleotide
  Antisense strand to SEQ ID NO: 2466182
caugucauucagaagccca

SEQ ID NO: 2466184 - RNA, 19 nt, Artificial Sequence
  Description of Artificial Sequence: Synthetic oligonucleotide
  Sense strand starting at position 1239 of SEQ ID NO: 1887357
gguguagauuggguauuca

SEQ ID NO: 2466185 - RNA, 19 nt, Artificial Sequence
  Description of Artificial Sequence: Synthetic oligonucleotide
  Antisense strand to SEQ ID NO: 2466184
ugaauacccaaucuacacc

SEQ ID NO: 2466186 - RNA, 19 nt, Artificial Sequence
  Description of Artificial Sequence: Synthetic oligonucleotide
  Sense strand starting at position 1302 of SEQ ID NO: 1887357
cgcugaugagucuaagggu

SEQ ID NO: 2466187 - RNA, 19 nt, Artificial Sequence
  Description of Artificial Sequence: Synthetic oligonucleotide
  Antisense strand to SEQ ID NO: 2466186
acccuuagacucaucagcg

SEQ ID NO: 2466188 - RNA, 19 nt, Artificial Sequence
  Description of Artificial Sequence: Synthetic oligonucleotide
  Sense strand starting at position 1309 of SEQ ID NO: 1887357
gagucuaagggucgcagaa

SEQ ID NO: 2466189 - RNA, 19 nt, Artificial Sequence
  Description of Artificial Sequence: Synthetic oligonucleotide
  Antisense strand to SEQ ID NO: 2466188
uucugcgacccuuagacuc

SEQ ID NO: 2466190 - RNA, 19 nt, Artificial Sequence
  Description of Artificial Sequence: Synthetic oligonucleotide
  Sense strand starting at position 1358 of SEQ ID NO: 1887357
ggucaauuaaugugagcuc

SEQ ID NO: 2466191 - RNA, 19 nt, Artificial Sequence
  Description of Artificial Sequence: Synthetic oligonucleotide
  Antisense strand to SEQ ID NO: 2466190
gagcucacauuaauugacc

SEQ ID NO: 2466192 - RNA, 19 nt, Artificial Sequence
  Description of Artificial Sequence: Synthetic oligonucleotide
  Sense strand starting at position 1371 of SEQ ID NO: 1887357
gagcucucccucgaaagua

SEQ ID NO: 2466193 - RNA, 19 nt, Artificial Sequence
  Description of Artificial Sequence: Synthetic oligonucleotide
  Antisense strand to SEQ ID NO: 2466192
uacuuucgagggagagcuc

SEQ ID NO: 2466194 - RNA, 19 nt, Artificial Sequence
  Description of Artificial Sequence: Synthetic oligonucleotide
  Sense strand starting at position 1407 of SEQ ID NO: 1887357
gguucuaaauaagucauca

SEQ ID NO: 2466195 - RNA, 19 nt, Artificial Sequence
  Description of Artificial Sequence: Synthetic oligonucleotide
  Antisense strand to SEQ ID NO: 2466194
ugaugacuuauuuagaacc

SEQ ID NO: 2466196 - RNA, 19 nt, Artificial Sequence
  Description of Artificial Sequence: Synthetic oligonucleotide
  Sense strand starting at position 1564 of SEQ ID NO: 1887357
aggucacuucaugggugau

SEQ ID NO: 2466197 - RNA, 19 nt, Artificial Sequence
  Description of Artificial Sequence: Synthetic oligonucleotide
  Antisense strand to SEQ ID NO: 2466196
aucacccaugaagugaccu

SEQ ID NO: 2466198 - RNA, 19 nt, Artificial Sequence
  Description of Artificial Sequence: Synthetic oligonucleotide
  Sense strand starting at position 1579 of SEQ ID NO: 1887357
ugaugcaugucaccaucaa

SEQ ID NO: 2466199 - RNA, 19 nt, Artificial Sequence
  Description of Artificial Sequence: Synthetic oligonucleotide
  Antisense strand to SEQ ID NO: 2466198
uugauggugacaugcauca

SEQ ID NO: 2466200 - RNA, 19 nt, Artificial Sequence
  Description of Artificial Sequence: Synthetic oligonucleotide
  Sense strand starting at position 1583 of SEQ ID NO: 1887357
gcaugucaccaucaaugau

SEQ ID NO: 2466201 - RNA, 19 nt, Artificial Sequence
  Description of Artificial Sequence: Synthetic oligonucleotide
  Antisense strand to SEQ ID NO: 2466200
aucauugauggugacaugc

SEQ ID NO: 2466202 - RNA, 19 nt, Artificial Sequence
  Description of Artificial Sequence: Synthetic oligonucleotide
  Sense strand starting at position 2290 of SEQ ID NO: 1887357
ggaaauaucugguuggccu

SEQ ID NO: 2466203 - RNA, 19 nt, Artificial Sequence
  Description of Artificial Sequence: Synthetic oligonucleotide
  Antisense strand to SEQ ID NO: 2466202
aggccaaccagauauuucc

SEQ ID NO: 2466204 - RNA, 19 nt, Artificial Sequence
  Description of Artificial Sequence: Synthetic oligonucleotide
  Sense strand starting at position 2291 of SEQ ID NO: 1887357
gaaauaucugguuggccuc

SEQ ID NO: 2466205 - RNA, 19 nt, Artificial Sequence
  Description of Artificial Sequence: Synthetic oligonucleotide
  Antisense strand to SEQ ID NO: 2466204
gaggccaaccagauauuuc

SEQ ID NO: 2466206 - RNA, 19 nt, Artificial Sequence
  Description of Artificial Sequence: Synthetic oligonucleotide
  Sense strand starting at position 2297 of SEQ ID NO: 1887357
ucugguuggccucauuaau

SEQ ID NO: 2466207 - RNA, 19 nt, Artificial Sequence
  Description of Artificial Sequence: Synthetic oligonucleotide
  Antisense strand to SEQ ID NO: 2466206
auuaaugaggccaaccaga

SEQ ID NO: 2466208 - RNA, 19 nt, Artificial Sequence
  Description of Artificial Sequence: Synthetic oligonucleotide
  Sense strand starting at position 2378 of SEQ ID NO: 1887357
agcagugagucaccuacuu

SEQ ID NO: 2466209 - RNA, 19 nt, Artificial Sequence
  Description of Artificial Sequence: Synthetic oligonucleotide
  Antisense strand to SEQ ID NO: 2466208
aaguaggugacucacugcu

SEQ ID NO: 2466210 - RNA, 19 nt, Artificial Sequence
  Description of Artificial Sequence: Synthetic oligonucleotide
  Sense strand starting at position 2548 of SEQ ID NO: 1887357
gcacauugccuugaaguua

SEQ ID NO: 2466211 - RNA, 19 nt, Artificial Sequence
  Description of Artificial Sequence: Synthetic oligonucleotide
  Antisense strand to SEQ ID NO: 2466210
uaacuucaaggcaaugugc

SEQ ID NO: 2466212 - RNA, 19 nt, Artificial Sequence
  Description of Artificial Sequence: Synthetic oligonucleotide
  Sense strand starting at position 2576 of SEQ ID NO: 1887357
guggauugccucugggaga

SEQ ID NO: 2466213 - RNA, 19 nt, Artificial Sequence
  Description of Artificial Sequence: Synthetic oligonucleotide
  Antisense strand to SEQ ID NO: 2466212
ucucccagaggcaauccac

SEQ ID NO: 2466214 - RNA, 19 nt, Artificial Sequence
  Description of Artificial Sequence: Synthetic oligonucleotide
  Sense strand starting at position 2599 of SEQ ID NO: 1887357
uuugauauaugggagggaa

SEQ ID NO: 2466215 - RNA, 19 nt, Artificial Sequence
  Description of Artificial Sequence: Synthetic oligonucleotide
  Antisense strand to SEQ ID NO: 2466214
uucccucccauauaucaaa

SEQ ID NO: 2466216 - RNA, 19 nt, Artificial Sequence
  Description of Artificial Sequence: Synthetic oligonucleotide
  Sense strand starting at position 2611 of SEQ ID NO: 1887357
gagggaaacgagugaguaa

SEQ ID NO: 2466217 - RNA, 19 nt, Artificial Sequence
  Description of Artificial Sequence: Synthetic oligonucleotide
  Antisense strand to SEQ ID NO: 2466216
uuacucacucguuucccuc

SEQ ID NO: 2466218 - RNA, 19 nt, Artificial Sequence
  Description of Artificial Sequence: Synthetic oligonucleotide
  Sense strand starting at position 2682 of SEQ ID NO: 1887357
caggaagagugccuggaaa

SEQ ID NO: 2466219 - RNA, 19 nt, Artificial Sequence
  Description of Artificial Sequence: Synthetic oligonucleotide
  Antisense strand to SEQ ID NO: 2466218
uuuccaggcacucuuccug

SEQ ID NO: 2466220 - RNA, 19 nt, Artificial Sequence
  Description of Artificial Sequence: Synthetic oligonucleotide
  Sense strand starting at position 2722 of SEQ ID NO: 1887357
ugcaguggucucuaaaguu

SEQ ID NO: 2466221 - RNA, 19 nt, Artificial Sequence
  Description of Artificial Sequence: Synthetic oligonucleotide
  Antisense strand to SEQ ID NO: 2466220
aacuuuagagaccacugca

SEQ ID NO: 2466222 - RNA, 19 nt, Artificial Sequence
  Description of Artificial Sequence: Synthetic oligonucleotide
  Sense strand starting at position 2795 of SEQ ID NO: 1887357
ccuccuggugugggaauau

SEQ ID NO: 2466223 - RNA, 19 nt, Artificial Sequence
  Description of Artificial Sequence: Synthetic oligonucleotide
  Antisense strand to SEQ ID NO: 2466222
auauucccacaccaggagg

SEQ ID NO: 2466224 - RNA, 19 nt, Artificial Sequence
  Description of Artificial Sequence: Synthetic oligonucleotide
  Sense strand starting at position 2961 of SEQ ID NO: 1887357
guuccaucucauggaggaa

SEQ ID NO: 2466225 - RNA, 19 nt, Artificial Sequence
  Description of Artificial Sequence: Synthetic oligonucleotide
  Antisense strand to SEQ ID NO: 2466224
uuccuccaugagauggaac

SEQ ID NO: 2466226 - RNA, 19 nt, Artificial Sequence
  Description of Artificial Sequence: Synthetic oligonucleotide
  Sense strand starting at position 3043 of SEQ ID NO: 1887357
cagggccucgguuaacauu

SEQ ID NO: 2466227 - RNA, 19 nt, Artificial Sequence
  Description of Artificial Sequence: Synthetic oligonucleotide
  Antisense strand to SEQ ID NO: 2466226
aauguuaaccgaggcccug

SEQ ID NO: 2466228 - RNA, 19 nt, Artificial Sequence
  Description of Artificial Sequence: Synthetic oligonucleotide
  Sense strand starting at position 3115 of SEQ ID NO: 1887357
cacauaugccgggagcuuu

SEQ ID NO: 2466229 - RNA, 19 nt, Artificial Sequence
  Description of Artificial Sequence: Synthetic oligonucleotide
  Antisense strand to SEQ ID NO: 2466228
aaagcucccggcauaugug

SEQ ID NO: 2466230 - RNA, 19 nt, Artificial Sequence
  Description of Artificial Sequence: Synthetic oligonucleotide
  Sense strand starting at position 3191 of SEQ ID NO: 1887357
cuaaauuaugaaugaugcu

SEQ ID NO: 2466231 - RNA, 19 nt, Artificial Sequence
  Description of Artificial Sequence: Synthetic oligonucleotide
  Antisense strand to SEQ ID NO: 2466230
agcaucauucauaauuuag

SEQ ID NO: 2466232 - RNA, 19 nt, Artificial Sequence
  Description of Artificial Sequence: Synthetic oligonucleotide
  Sense strand starting at position 3206 of SEQ ID NO: 1887357
ugcuguaucguggcaacca

SEQ ID NO: 2466233 - RNA, 19 nt, Artificial Sequence
  Description of Artificial Sequence: Synthetic oligonucleotide
  Antisense strand to SEQ ID NO: 2466232
ugguugccacgauacagca

SEQ ID NO: 2466234 - RNA, 19 nt, Artificial Sequence
  Description of Artificial Sequence: Synthetic oligonucleotide
  Sense strand starting at position 3229 of SEQ ID NO: 1887357
gaugcaaagcagugaacua

SEQ ID NO: 2466235 - RNA, 19 nt, Artificial Sequence
  Description of Artificial Sequence: Synthetic oligonucleotide
  Antisense strand to SEQ ID NO: 2466234
uaguucacugcuuugcauc

SEQ ID NO: 2466236 - RNA, 19 nt, Artificial Sequence
  Description of Artificial Sequence: Synthetic oligonucleotide
  Sense strand starting at position 3247 of SEQ ID NO: 1887357
auuaaugaaccuugccgau

SEQ ID NO: 2466237 - RNA, 19 nt, Artificial Sequence
  Description of Artificial Sequence: Synthetic oligonucleotide
  Antisense strand to SEQ ID NO: 2466236
aucggcaagguucauuaau

SEQ ID NO: 2466238 - RNA, 19 nt, Artificial Sequence
  Description of Artificial Sequence: Synthetic oligonucleotide
  Sense strand starting at position 3477 of SEQ ID NO: 1887357
ugauaugaguuccuacaug

SEQ ID NO: 2466239 - RNA, 19 nt, Artificial Sequence
  Description of Artificial Sequence: Synthetic oligonucleotide
  Antisense strand to SEQ ID NO: 2466238
cauguaggaacucauauca

SEQ ID NO: 2466240 - RNA, 19 nt, Artificial Sequence
  Description of Artificial Sequence: Synthetic oligonucleotide
  Sense strand starting at position 3568 of SEQ ID NO: 1887357
gcccuaagagccuaaucaa

SEQ ID NO: 2466241 - RNA, 19 nt, Artificial Sequence
  Description of Artificial Sequence: Synthetic oligonucleotide
  Antisense strand to SEQ ID NO: 2466240
uugauuaggcucuuagggc

SEQ ID NO: 2466242 - RNA, 19 nt, Artificial Sequence
  Description of Artificial Sequence: Synthetic oligonucleotide
  Sense strand starting at position 3741 of SEQ ID NO: 1887357
ggauguagggaaugagcua

SEQ ID NO: 2466243 - RNA, 19 nt, Artificial Sequence
  Description of Artificial Sequence: Synthetic oligonucleotide
  Antisense strand to SEQ ID NO: 2466242
uagcucauucccuacaucc

SEQ ID NO: 2466244 - RNA, 19 nt, Artificial Sequence
  Description of Artificial Sequence: Synthetic oligonucleotide
  Sense strand starting at position 3932 of SEQ ID NO: 1887357
auuuguucagguggcgaga

SEQ ID NO: 2466245 - RNA, 19 nt, Artificial Sequence
  Description of Artificial Sequence: Synthetic oligonucleotide
  Antisense strand to SEQ ID NO: 2466244
ucucgccaccugaacaaau

SEQ ID NO: 2466246 - RNA, 19 nt, Artificial Sequence
  Description of Artificial Sequence: Synthetic oligonucleotide
  Sense strand starting at position 3963 of SEQ ID NO: 1887357
augggucauuucuaauaca

SEQ ID NO: 2466247 - RNA, 19 nt, Artificial Sequence
  Description of Artificial Sequence: Synthetic oligonucleotide
  Antisense strand to SEQ ID NO: 2466246
uguauuagaaaugacccau

SEQ ID NO: 2466248 - RNA, 19 nt, Artificial Sequence
  Description of Artificial Sequence: Synthetic oligonucleotide
  Sense strand starting at position 3966 of SEQ ID NO: 1887357
ggucauuucuaauacaaga

SEQ ID NO: 2466249 - RNA, 19 nt, Artificial Sequence
  Description of Artificial Sequence: Synthetic oligonucleotide
  Antisense strand to SEQ ID NO: 2466248
ucuuguauuagaaaugacc

SEQ ID NO: 2466250 - RNA, 19 nt, Artificial Sequence
  Description of Artificial Sequence: Synthetic oligonucleotide
  Sense strand starting at position 1 of SEQ ID NO: 1887358
guuugaaugaguuaguuug

SEQ ID NO: 2466251 - RNA, 19 nt, Artificial Sequence
  Description of Artificial Sequence: Synthetic oligonucleotide
  Antisense strand to SEQ ID NO: 2466250
caaacuaacucauucaaac

SEQ ID NO: 2466252 - RNA, 19 nt, Artificial Sequence
  Description of Artificial Sequence: Synthetic oligonucleotide
  Sense strand starting at position 96 of SEQ ID NO: 1887358
gggaccugcugagucauua

SEQ ID NO: 2466253 - RNA, 19 nt, Artificial Sequence
  Description of Artificial Sequence: Synthetic oligonucleotide
  Antisense strand to SEQ ID NO: 2466252
uaaugacucagcagguccc

SEQ ID NO: 2466254 - RNA, 19 nt, Artificial Sequence
  Description of Artificial Sequence: Synthetic oligonucleotide
  Sense strand starting at position 100 of SEQ ID NO: 1887358
ccugcugagucauuagaga

SEQ ID NO: 2466255 - RNA, 19 nt, Artificial Sequence
  Description of Artificial Sequence: Synthetic oligonucleotide
  Antisense strand to SEQ ID NO: 2466254
ucucuaaugacucagcagg

SEQ ID NO: 2466256 - RNA, 19 nt, Artificial Sequence
  Description of Artificial Sequence: Synthetic oligonucleotide
  Sense strand starting at position 151 of SEQ ID NO: 1887358
uuaagcuaucuggaaucuu

SEQ ID NO: 2466257 - RNA, 19 nt, Artificial Sequence
  Description of Artificial Sequence: Synthetic oligonucleotide
  Antisense strand to SEQ ID NO: 2466256
aagauuccagauagcuuaa

SEQ ID NO: 2466258 - RNA, 19 nt, Artificial Sequence
  Description of Artificial Sequence: Synthetic oligonucleotide
  Sense strand starting at position 497 of SEQ ID NO: 1887358
ucgauucaguggcugaaga

SEQ ID NO: 2466259 - RNA, 19 nt, Artificial Sequence
  Description of Artificial Sequence: Synthetic oligonucleotide
  Antisense strand to SEQ ID NO: 2466258
ucuucagccacugaaucga

SEQ ID NO: 2466260 - RNA, 19 nt, Artificial Sequence
  Description of Artificial Sequence: Synthetic oligonucleotide
  Sense strand starting at position 498 of SEQ ID NO: 1887358
cgauucaguggcugaagaa

SEQ ID NO: 2466261 - RNA, 19 nt, Artificial Sequence
  Description of Artificial Sequence: Synthetic oligonucleotide
  Antisense strand to SEQ ID NO: 2466260
uucuucagccacugaaucg

SEQ ID NO: 2466262 - RNA, 19 nt, Artificial Sequence
  Description of Artificial Sequence: Synthetic oligonucleotide
  Sense strand starting at position 508 of SEQ ID NO: 1887358
gcugaagaacccuguaauu

SEQ ID NO: 2466263 - RNA, 19 nt, Artificial Sequence
  Description of Artificial Sequence: Synthetic oligonucleotide
  Antisense strand to SEQ ID NO: 2466262
aauuacaggguucuucagc

SEQ ID NO: 2466264 - RNA, 19 nt, Artificial Sequence
  Description of Artificial Sequence: Synthetic oligonucleotide
  Sense strand starting at position 510 of SEQ ID NO: 1887358
ugaagaacccuguaauugu

SEQ ID NO: 2466265 - RNA, 19 nt, Artificial Sequence
  Description of Artificial Sequence: Synthetic oligonucleotide
  Antisense strand to SEQ ID NO: 2466264
acaauuacaggguucuuca

SEQ ID NO: 2466266 - RNA, 19 nt, Artificial Sequence
  Description of Artificial Sequence: Synthetic oligonucleotide
  Sense strand starting at position 552 of SEQ ID NO: 1887358
gguaaauauuuccaagaac

SEQ ID NO: 2466267 - RNA, 19 nt, Artificial Sequence
  Description of Artificial Sequence: Synthetic oligonucleotide
  Antisense strand to SEQ ID NO: 2466266
guucuuggaaauauuuacc

SEQ ID NO: 2466268 - RNA, 19 nt, Artificial Sequence
  Description of Artificial Sequence: Synthetic oligonucleotide
  Sense strand starting at position 573 of SEQ ID NO: 1887358
acaugcuaaguuugagacu

SEQ ID NO: 2466269 - RNA, 19 nt, Artificial Sequence
  Description of Artificial Sequence: Synthetic oligonucleotide
  Antisense strand to SEQ ID NO: 2466268
agucucaaacuuagcaugu

SEQ ID NO: 2466270 - RNA, 19 nt, Artificial Sequence
  Description of Artificial Sequence: Synthetic oligonucleotide
  Sense strand starting at position 579 of SEQ ID NO: 1887358
uaaguuugagacugguuau

SEQ ID NO: 2466271 - RNA, 19 nt, Artificial Sequence
  Description of Artificial Sequence: Synthetic oligonucleotide
  Antisense strand to SEQ ID NO: 2466270
auaaccagucucaaacuua

SEQ ID NO: 2466272 - RNA, 19 nt, Artificial Sequence
  Description of Artificial Sequence: Synthetic oligonucleotide
  Sense strand starting at position 643 of SEQ ID NO: 1887358
ggguuaccuuucuugaauc

SEQ ID NO: 2466273 - RNA, 19 nt, Artificial Sequence
  Description of Artificial Sequence: Synthetic oligonucleotide
  Antisense strand to SEQ ID NO: 2466272
gauucaagaaagguaaccc

SEQ ID NO: 2466274 - RNA, 19 nt, Artificial Sequence
  Description of Artificial Sequence: Synthetic oligonucleotide
  Sense strand starting at position 702 of SEQ ID NO: 1887358
guucuucaagacugaggga

SEQ ID NO: 2466275 - RNA, 19 nt, Artificial Sequence
  Description of Artificial Sequence: Synthetic oligonucleotide
  Antisense strand to SEQ ID NO: 2466274
ucccucagucuugaagaac

SEQ ID NO: 2466276 - RNA, 19 nt, Artificial Sequence
  Description of Artificial Sequence: Synthetic oligonucleotide
  Sense strand starting at position 735 of SEQ ID NO: 1887358
ggaacaaccuacuugcuaa

SEQ ID NO: 2466277 - RNA, 19 nt, Artificial Sequence
  Description of Artificial Sequence: Synthetic oligonucleotide
  Antisense strand to SEQ ID NO: 2466276
uuagcaaguagguuguucc

SEQ ID NO: 2466278 - RNA, 19 nt, Artificial Sequence
  Description of Artificial Sequence: Synthetic oligonucleotide
  Sense strand starting at position 921 of SEQ ID NO: 1887358
acagcaagucuuuaccuga

SEQ ID NO: 2466279 - RNA, 19 nt, Artificial Sequence
  Description of Artificial Sequence: Synthetic oligonucleotide
  Antisense strand to SEQ ID NO: 2466278
ucagguaaagacuugcugu

SEQ ID NO: 2466280 - RNA, 19 nt, Artificial Sequence
  Description of Artificial Sequence: Synthetic oligonucleotide
  Sense strand starting at position 1223 of SEQ ID NO: 1887358
agaaaucauugccugucaa

SEQ ID NO: 2466281 - RNA, 19 nt, Artificial Sequence
  Description of Artificial Sequence: Synthetic oligonucleotide
  Antisense strand to SEQ ID NO: 2466280
uugacaggcaaugauuucu

SEQ ID NO: 2466282 - RNA, 19 nt, Artificial Sequence
  Description of Artificial Sequence: Synthetic oligonucleotide
  Sense strand starting at position 1306 of SEQ ID NO: 1887358
gaaaguugauguuucccau

SEQ ID NO: 2466283 - RNA, 19 nt, Artificial Sequence
  Description of Artificial Sequence: Synthetic oligonucleotide
  Antisense strand to SEQ ID NO: 2466282
augggaaacaucaacuuuc

SEQ ID NO: 2466284 - RNA, 19 nt, Artificial Sequence
  Description of Artificial Sequence: Synthetic oligonucleotide
  Sense strand starting at position 1491 of SEQ ID NO: 1887358
ggcaucaauuugcuucuca

SEQ ID NO: 2466285 - RNA, 19 nt, Artificial Sequence
  Description of Artificial Sequence: Synthetic oligonucleotide
  Antisense strand to SEQ ID NO: 2466284
ugagaagcaaauugaugcc

SEQ ID NO: 2466286 - RNA, 19 nt, Artificial Sequence
  Description of Artificial Sequence: Synthetic oligonucleotide
  Sense strand starting at position 1595 of SEQ ID NO: 1887358
aggugcuuggacuauuagu

SEQ ID NO: 2466287 - RNA, 19 nt, Artificial Sequence
  Description of Artificial Sequence: Synthetic oligonucleotide
  Antisense strand to SEQ ID NO: 2466286
acuaauaguccaagcaccu

SEQ ID NO: 2466288 - RNA, 19 nt, Artificial Sequence
  Description of Artificial Sequence: Synthetic oligonucleotide
  Sense strand starting at position 1632 of SEQ ID NO: 1887358
gguauagguucauugacag

SEQ ID NO: 2466289 - RNA, 19 nt, Artificial Sequence
  Description of Artificial Sequence: Synthetic oligonucleotide
  Antisense strand to SEQ ID NO: 2466288
cugucaaugaaccuauacc

SEQ ID NO: 2466290 - RNA, 19 nt, Artificial Sequence
  Description of Artificial Sequence: Synthetic oligonucleotide
  Sense strand starting at position 1766 of SEQ ID NO: 1887358
augggaugacacugcaaau

SEQ ID NO: 2466291 - RNA, 19 nt, Artificial Sequence
  Description of Artificial Sequence: Synthetic oligonucleotide
  Antisense strand to SEQ ID NO: 2466290
auuugcagugucaucccau

SEQ ID NO: 2466292 - RNA, 19 nt, Artificial Sequence
  Description of Artificial Sequence: Synthetic oligonucleotide
  Sense strand starting at position 1813 of SEQ ID NO: 1887358
guauuaauuccagaacagu

SEQ ID NO: 2466293 - RNA, 19 nt, Artificial Sequence
  Description of Artificial Sequence: Synthetic oligonucleotide
  Antisense strand to SEQ ID NO: 2466292
acuguucuggaauuaauac

SEQ ID NO: 2466294 - RNA, 19 nt, Artificial Sequence
  Description of Artificial Sequence: Synthetic oligonucleotide
  Sense strand starting at position 1862 of SEQ ID NO: 1887358
cugguaucauuauuguuga

SEQ ID NO: 2466295 - RNA, 19 nt, Artificial Sequence
  Description of Artificial Sequence: Synthetic oligonucleotide
  Antisense strand to SEQ ID NO: 2466294
ucaacaauaaugauaccag

SEQ ID NO: 2466296 - RNA, 19 nt, Artificial Sequence
  Description of Artificial Sequence: Synthetic oligonucleotide
  Sense strand starting at position 1865 of SEQ ID NO: 1887358
guaucauuauuguugacau

SEQ ID NO: 2466297 - RNA, 19 nt, Artificial Sequence
  Description of Artificial Sequence: Synthetic oligonucleotide
  Antisense strand to SEQ ID NO: 2466296
augucaacaauaaugauac

SEQ ID NO: 2466298 - RNA, 19 nt, Artificial Sequence
  Description of Artificial Sequence: Synthetic oligonucleotide
  Sense strand starting at position 1928 of SEQ ID NO: 1887358
gcuuaccucagagagaagu

SEQ ID NO: 2466299 - RNA, 19 nt, Artificial Sequence
  Description of Artificial Sequence: Synthetic oligonucleotide
  Antisense strand to SEQ ID NO: 2466298
acuucucucugagguaagc

SEQ ID NO: 2466300 - RNA, 19 nt, Artificial Sequence
  Description of Artificial Sequence: Synthetic oligonucleotide
  Sense strand starting at position 1942 of SEQ ID NO: 1887358
gaaguuugaugagauuuga

SEQ ID NO: 2466301 - RNA, 19 nt, Artificial Sequence
  Description of Artificial Sequence: Synthetic oligonucleotide
  Antisense strand to SEQ ID NO: 2466300
ucaaaucucaucaaacuuc

SEQ ID NO: 2466302 - RNA, 19 nt, Artificial Sequence
  Description of Artificial Sequence: Synthetic oligonucleotide
  Sense strand starting at position 1955 of SEQ ID NO: 1887358
auuugauuguccuuuaguu

SEQ ID NO: 2466303 - RNA, 19 nt, Artificial Sequence
  Description of Artificial Sequence: Synthetic oligonucleotide
  Antisense strand to SEQ ID NO: 2466302
aacuaaaggacaaucaaau

SEQ ID NO: 2466304 - RNA, 19 nt, Artificial Sequence
  Description of Artificial Sequence: Synthetic oligonucleotide
  Sense strand starting at position 2157 of SEQ ID NO: 1887358
ugcacucucugauugggau

SEQ ID NO: 2466305 - RNA, 19 nt, Artificial Sequence
  Description of Artificial Sequence: Synthetic oligonucleotide
  Antisense strand to SEQ ID NO: 2466304
aucccaaucagagagugca

SEQ ID NO: 2466306 - RNA, 19 nt, Artificial Sequence
  Description of Artificial Sequence: Synthetic oligonucleotide
  Sense strand starting at position 2158 of SEQ ID NO: 1887358
gcacucucugauugggauu

SEQ ID NO: 2466307 - RNA, 19 nt, Artificial Sequence
  Description of Artificial Sequence: Synthetic oligonucleotide
  Antisense strand to SEQ ID NO: 2466306
aaucccaaucagagagugc

SEQ ID NO: 2466308 - RNA, 19 nt, Artificial Sequence
  Description of Artificial Sequence: Synthetic oligonucleotide
  Sense strand starting at position 2176 of SEQ ID NO: 1887358
ugauuuaacugagaguaac

SEQ ID NO: 2466309 - RNA, 19 nt, Artificial Sequence
  Description of Artificial Sequence: Synthetic oligonucleotide
  Antisense strand to SEQ ID NO: 2466308
guuacucucaguuaaauca

SEQ ID NO: 2466310 - RNA, 19 nt, Artificial Sequence
  Description of Artificial Sequence: Synthetic oligonucleotide
  Sense strand starting at position 2396 of SEQ ID NO: 1887358
aggauaaguggcuauagca

SEQ ID NO: 2466311 - RNA, 19 nt, Artificial Sequence
  Description of Artificial Sequence: Synthetic oligonucleotide
  Antisense strand to SEQ ID NO: 2466310
ugcuauagccacuuauccu

SEQ ID NO: 2466312 - RNA, 19 nt, Artificial Sequence
  Description of Artificial Sequence: Synthetic oligonucleotide
  Sense strand starting at position 2419 of SEQ ID NO: 1887358
guggaacauuuccagaaac

SEQ ID NO: 2466313 - RNA, 19 nt, Artificial Sequence
  Description of Artificial Sequence: Synthetic oligonucleotide
  Antisense strand to SEQ ID NO: 2466312
guuucuggaaauguuccac

SEQ ID NO: 2466314 - RNA, 19 nt, Artificial Sequence
  Description of Artificial Sequence: Synthetic oligonucleotide
  Sense strand starting at position 2446 of SEQ ID NO: 1887358
auguauaucuugccugaac

SEQ ID NO: 2466315 - RNA, 19 nt, Artificial Sequence
  Description of Artificial Sequence: Synthetic oligonucleotide
  Antisense strand to SEQ ID NO: 2466314
guucaggcaagauauacau

SEQ ID NO: 2466316 - RNA, 19 nt, Artificial Sequence
  Description of Artificial Sequence: Synthetic oligonucleotide
  Sense strand starting at position 2840 of SEQ ID NO: 1887358
ggaguaaguaaagaucugu

SEQ ID NO: 2466317 - RNA, 19 nt, Artificial Sequence
  Description of Artificial Sequence: Synthetic oligonucleotide
  Antisense strand to SEQ ID NO: 2466316
acagaucuuuacuuacucc

SEQ ID NO: 2466318 - RNA, 19 nt, Artificial Sequence
  Description of Artificial Sequence: Synthetic oligonucleotide
  Sense strand starting at position 2845 of SEQ ID NO: 1887358
aaguaaagaucugugucuu

SEQ ID NO: 2466319 - RNA, 19 nt, Artificial Sequence
  Description of Artificial Sequence: Synthetic oligonucleotide
  Antisense strand to SEQ ID NO: 2466318
aagacacagaucuuuacuu

SEQ ID NO: 2466320 - RNA, 19 nt, Artificial Sequence
  Description of Artificial Sequence: Synthetic oligonucleotide
  Sense strand starting at position 2969 of SEQ ID NO: 1887358
gaaaucugguguccauuga

SEQ ID NO: 2466321 - RNA, 19 nt, Artificial Sequence
  Description of Artificial Sequence: Synthetic oligonucleotide
  Antisense strand to SEQ ID NO: 2466320
ucaauggacaccagauuuc

SEQ ID NO: 2466322 - RNA, 19 nt, Artificial Sequence
  Description of Artificial Sequence: Synthetic oligonucleotide
  Sense strand starting at position 2973 of SEQ ID NO: 1887358
ucugguguccauugagaac

SEQ ID NO: 2466323 - RNA, 19 nt, Artificial Sequence
  Description of Artificial Sequence: Synthetic oligonucleotide
  Antisense strand to SEQ ID NO: 2466322
guucucaauggacaccaga

SEQ ID NO: 2466324 - RNA, 19 nt, Artificial Sequence
  Description of Artificial Sequence: Synthetic oligonucleotide
  Sense strand starting at position 3196 of SEQ ID NO: 1887358
uggauaguaaagugagcuu

SEQ ID NO: 2466325 - RNA, 19 nt, Artificial Sequence
  Description of Artificial Sequence: Synthetic oligonucleotide
  Antisense strand to SEQ ID NO: 2466324
aagcucacuuuacuaucca

SEQ ID NO: 2466326 - RNA, 19 nt, Artificial Sequence
  Description of Artificial Sequence: Synthetic oligonucleotide
  Sense strand starting at position 3501 of SEQ ID NO: 1887358
ggagaagugcucuaugcac

SEQ ID NO: 2466327 - RNA, 19 nt, Artificial Sequence
  Description of Artificial Sequence: Synthetic oligonucleotide
  Antisense strand to SEQ ID NO: 2466326
gugcauagagcacuucucc

SEQ ID NO: 2466328 - RNA, 19 nt, Artificial Sequence
  Description of Artificial Sequence: Synthetic oligonucleotide
  Sense strand starting at position 3545 of SEQ ID NO: 1887358
gcucuuaucccaggaacuu

SEQ ID NO: 2466329 - RNA, 19 nt, Artificial Sequence
  Description of Artificial Sequence: Synthetic oligonucleotide
  Antisense strand to SEQ ID NO: 2466328
aaguuccugggauaagagc

SEQ ID NO: 2466330 - RNA, 19 nt, Artificial Sequence
  Description of Artificial Sequence: Synthetic oligonucleotide
  Sense strand starting at position 12 of SEQ ID NO: 1887359
auaaguugucccuaaauuc

SEQ ID NO: 2466331 - RNA, 19 nt, Artificial Sequence
  Description of Artificial Sequence: Synthetic oligonucleotide
  Antisense strand to SEQ ID NO: 2466330
gaauuuagggacaacuuau

SEQ ID NO: 2466332 - RNA, 19 nt, Artificial Sequence
  Description of Artificial Sequence: Synthetic oligonucleotide
  Sense strand starting at position 553 of SEQ ID NO: 1887359
agacuagccuaaguaaaug

SEQ ID NO: 2466333 - RNA, 19 nt, Artificial Sequence
  Description of Artificial Sequence: Synthetic oligonucleotide
  Antisense strand to SEQ ID NO: 2466332
cauuuacuuaggcuagucu

SEQ ID NO: 2466334 - RNA, 19 nt, Artificial Sequence
  Description of Artificial Sequence: Synthetic oligonucleotide
  Sense strand starting at position 754 of SEQ ID NO: 1887359
uuugauaaacacugguuua

SEQ ID NO: 2466335 - RNA, 19 nt, Artificial Sequence
  Description of Artificial Sequence: Synthetic oligonucleotide
  Antisense strand to SEQ ID NO: 2466334
uaaaccaguguuuaucaaa

SEQ ID NO: 2466336 - RNA, 19 nt, Artificial Sequence
  Description of Artificial Sequence: Synthetic oligonucleotide
  Sense strand starting at position 757 of SEQ ID NO: 1887359
gauaaacacugguuuagau

SEQ ID NO: 2466337 - RNA, 19 nt, Artificial Sequence
  Description of Artificial Sequence: Synthetic oligonucleotide
  Antisense strand to SEQ ID NO: 2466336
aucuaaaccaguguuuauc

SEQ ID NO: 2466338 - RNA, 19 nt, Artificial Sequence
  Description of Artificial Sequence: Synthetic oligonucleotide
  Sense strand starting at position 764 of SEQ ID NO: 1887359
acugguuuagaucauguca

SEQ ID NO: 2466339 - RNA, 19 nt, Artificial Sequence
  Description of Artificial Sequence: Synthetic oligonucleotide
  Antisense strand to SEQ ID NO: 2466338
ugacaugaucuaaaccagu

SEQ ID NO: 2466340 - RNA, 19 nt, Artificial Sequence
  Description of Artificial Sequence: Synthetic oligonucleotide
  Sense strand starting at position 823 of SEQ ID NO: 1887359
gggcauugugugagguacu

SEQ ID NO: 2466341 - RNA, 19 nt, Artificial Sequence
  Description of Artificial Sequence: Synthetic oligonucleotide
  Antisense strand to SEQ ID NO: 2466340
aguaccucacacaaugccc

SEQ ID NO: 2466342 - RNA, 19 nt, Artificial Sequence
  Description of Artificial Sequence: Synthetic oligonucleotide
  Sense strand starting at position 834 of SEQ ID NO: 1887359
gagguacuacugcagauau

SEQ ID NO: 2466343 - RNA, 19 nt, Artificial Sequence
  Description of Artificial Sequence: Synthetic oligonucleotide
  Antisense strand to SEQ ID NO: 2466342
auaucugcaguaguaccuc

SEQ ID NO: 2466344 - RNA, 19 nt, Artificial Sequence
  Description of Artificial Sequence: Synthetic oligonucleotide
  Sense strand starting at position 890 of SEQ ID NO: 1887359
uaaugaaguuuagucagaa

SEQ ID NO: 2466345 - RNA, 19 nt, Artificial Sequence
  Description of Artificial Sequence: Synthetic oligonucleotide
  Antisense strand to SEQ ID NO: 2466344
uucugacuaaacuucauua

SEQ ID NO: 2466346 - RNA, 19 nt, Artificial Sequence
  Description of Artificial Sequence: Synthetic oligonucleotide
  Sense strand starting at position 891 of SEQ ID NO: 1887359
aaugaaguuuagucagaac

SEQ ID NO: 2466347 - RNA, 19 nt, Artificial Sequence
  Description of Artificial Sequence: Synthetic oligonucleotide
  Antisense strand to SEQ ID NO: 2466346
guucugacuaaacuucauu

SEQ ID NO: 2466348 - RNA, 19 nt, Artificial Sequence
  Description of Artificial Sequence: Synthetic oligonucleotide
  Sense strand starting at position 1003 of SEQ ID NO: 1887359
aggaauguuagaugcuaaa

SEQ ID NO: 2466349 - RNA, 19 nt, Artificial Sequence
  Description of Artificial Sequence: Synthetic oligonucleotide
  Antisense strand to SEQ ID NO: 2466348
uuuagcaucuaacauuccu

SEQ ID NO: 2466350 - RNA, 19 nt, Artificial Sequence
  Description of Artificial Sequence: Synthetic oligonucleotide
  Sense strand starting at position 1013 of SEQ ID NO: 1887359
gaugcuaaaugguugagga

SEQ ID NO: 2466351 - RNA, 19 nt, Artificial Sequence
  Description of Artificial Sequence: Synthetic oligonucleotide
  Antisense strand to SEQ ID NO: 2466350
uccucaaccauuuagcauc

SEQ ID NO: 2466352 - RNA, 19 nt, Artificial Sequence
  Description of Artificial Sequence: Synthetic oligonucleotide
  Sense strand starting at position 1014 of SEQ ID NO: 1887359
augcuaaaugguugaggaa

SEQ ID NO: 2466353 - RNA, 19 nt, Artificial Sequence
  Description of Artificial Sequence: Synthetic oligonucleotide
  Antisense strand to SEQ ID NO: 2466352
uuccucaaccauuuagcau

SEQ ID NO: 2466354 - RNA, 19 nt, Artificial Sequence
  Description of Artificial Sequence: Synthetic oligonucleotide
  Sense strand starting at position 1029 of SEQ ID NO: 1887359
ggaaggugucuaggaggau

SEQ ID NO: 2466355 - RNA, 19 nt, Artificial Sequence
  Description of Artificial Sequence: Synthetic oligonucleotide
  Antisense strand to SEQ ID NO: 2466354
auccuccuagacaccuucc

SEQ ID NO: 2466356 - RNA, 19 nt, Artificial Sequence
  Description of Artificial Sequence: Synthetic oligonucleotide
  Sense strand starting at position 1032 of SEQ ID NO: 1887359
aggugucuaggaggauaua

SEQ ID NO: 2466357 - RNA, 19 nt, Artificial Sequence
  Description of Artificial Sequence: Synthetic oligonucleotide
  Antisense strand to SEQ ID NO: 2466356
uauauccuccuagacaccu

SEQ ID NO: 2466358 - RNA, 19 nt, Artificial Sequence
  Description of Artificial Sequence: Synthetic oligonucleotide
  Sense strand starting at position 1050 of SEQ ID NO: 1887359
augaguuaauccuugggag

SEQ ID NO: 2466359 - RNA, 19 nt, Artificial Sequence
  Description of Artificial Sequence: Synthetic oligonucleotide
  Antisense strand to SEQ ID NO: 2466358
cucccaaggauuaacucau

SEQ ID NO: 2466360 - RNA, 19 nt, Artificial Sequence
  Description of Artificial Sequence: Synthetic oligonucleotide
  Sense strand starting at position 1051 of SEQ ID NO: 1887359
ugaguuaauccuugggaga

SEQ ID NO: 2466361 - RNA, 19 nt, Artificial Sequence
  Description of Artificial Sequence: Synthetic oligonucleotide
  Antisense strand to SEQ ID NO: 2466360
ucucccaaggauuaacuca

SEQ ID NO: 2466362 - RNA, 19 nt, Artificial Sequence
  Description of Artificial Sequence: Synthetic oligonucleotide
  Sense strand starting at position 1117 of SEQ ID NO: 1887359
aucauauauuugggagaaa

SEQ ID NO: 2466363 - RNA, 19 nt, Artificial Sequence
  Description of Artificial Sequence: Synthetic oligonucleotide
  Antisense strand to SEQ ID NO: 2466362
uuucucccaaauauaugau

SEQ ID NO: 2466364 - RNA, 19 nt, Artificial Sequence
  Description of Artificial Sequence: Synthetic oligonucleotide
  Sense strand starting at position 1118 of SEQ ID NO: 1887359
ucauauauuugggagaaau

SEQ ID NO: 2466365 - RNA, 19 nt, Artificial Sequence
  Description of Artificial Sequence: Synthetic oligonucleotide
  Antisense strand to SEQ ID NO: 2466364
auuucucccaaauauauga

SEQ ID NO: 2466366 - RNA, 19 nt, Artificial Sequence
  Description of Artificial Sequence: Synthetic oligonucleotide
  Sense strand starting at position 1187 of SEQ ID NO: 1887359
aguaucuugcuuuaaggau

SEQ ID NO: 2466367 - RNA, 19 nt, Artificial Sequence
  Description of Artificial Sequence: Synthetic oligonucleotide
  Antisense strand to SEQ ID NO: 2466366
auccuuaaagcaagauacu

SEQ ID NO: 2466368 - RNA, 19 nt, Artificial Sequence
  Description of Artificial Sequence: Synthetic oligonucleotide
  Sense strand starting at position 1202 of SEQ ID NO: 1887359
ggaucuggaucuuuauuac

SEQ ID NO: 2466369 - RNA, 19 nt, Artificial Sequence
  Description of Artificial Sequence: Synthetic oligonucleotide
  Antisense strand to SEQ ID NO: 2466368
guaauaaagauccagaucc

SEQ ID NO: 2466370 - RNA, 19 nt, Artificial Sequence
  Description of Artificial Sequence: Synthetic oligonucleotide
  Sense strand starting at position 1232 of SEQ ID NO: 1887359
agaacuaauggaggucuuu

SEQ ID NO: 2466371 - RNA, 19 nt, Artificial Sequence
  Description of Artificial Sequence: Synthetic oligonucleotide
  Antisense strand to SEQ ID NO: 2466370
aaagaccuccauuaguucu

SEQ ID NO: 2466372 - RNA, 19 nt, Artificial Sequence
  Description of Artificial Sequence: Synthetic oligonucleotide
  Sense strand starting at position 1797 of SEQ ID NO: 1887359
cagcaauggcuggaguaaa

SEQ ID NO: 2466373 - RNA, 19 nt, Artificial Sequence
  Description of Artificial Sequence: Synthetic oligonucleotide
  Antisense strand to SEQ ID NO: 2466372
uuuacuccagccauugcug

SEQ ID NO: 2466374 - RNA, 19 nt, Artificial Sequence
  Description of Artificial Sequence: Synthetic oligonucleotide
  Sense strand starting at position 2160 of SEQ ID NO: 1887359
guucucagacaagauguau

SEQ ID NO: 2466375 - RNA, 19 nt, Artificial Sequence
  Description of Artificial Sequence: Synthetic oligonucleotide
  Antisense strand to SEQ ID NO: 2466374
auacaucuugucugagaac

SEQ ID NO: 2466376 - RNA, 19 nt, Artificial Sequence
  Description of Artificial Sequence: Synthetic oligonucleotide
  Sense strand starting at position 2393 of SEQ ID NO: 1887359
aacaaauauucguugagga

SEQ ID NO: 2466377 - RNA, 19 nt, Artificial Sequence
  Description of Artificial Sequence: Synthetic oligonucleotide
  Antisense strand to SEQ ID NO: 2466376
uccucaacgaauauuuguu

SEQ ID NO: 2466378 - RNA, 19 nt, Artificial Sequence
  Description of Artificial Sequence: Synthetic oligonucleotide
  Sense strand starting at position 2394 of SEQ ID NO: 1887359
acaaauauucguugaggac

SEQ ID NO: 2466379 - RNA, 19 nt, Artificial Sequence
  Description of Artificial Sequence: Synthetic oligonucleotide
  Antisense strand to SEQ ID NO: 2466378
guccucaacgaauauuugu

SEQ ID NO: 2466380 - RNA, 19 nt, Artificial Sequence
  Description of Artificial Sequence: Synthetic oligonucleotide
  Sense strand starting at position 2416 of SEQ ID NO: 1887359
cugugauccagguaugauu

SEQ ID NO: 2466381 - RNA, 19 nt, Artificial Sequence
  Description of Artificial Sequence: Synthetic oligonucleotide
  Antisense strand to SEQ ID NO: 2466380
aaucauaccuggaucacag

SEQ ID NO: 2466382 - RNA, 19 nt, Artificial Sequence
  Description of Artificial Sequence: Synthetic oligonucleotide
  Sense strand starting at position 2526 of SEQ ID NO: 1887359
auguaauauguugaauggu

SEQ ID NO: 2466383 - RNA, 19 nt, Artificial Sequence
  Description of Artificial Sequence: Synthetic oligonucleotide
  Antisense strand to SEQ ID NO: 2466382
accauucaacauauuacau

SEQ ID NO: 2466384 - RNA, 19 nt, Artificial Sequence
  Description of Artificial Sequence: Synthetic oligonucleotide
  Sense strand starting at position 2605 of SEQ ID NO: 1887359
aguggaaagauggguauca

SEQ ID NO: 2466385 - RNA, 19 nt, Artificial Sequence
  Description of Artificial Sequence: Synthetic oligonucleotide
  Antisense strand to SEQ ID NO: 2466384
ugauacccaucuuuccacu

SEQ ID NO: 2466386 - RNA, 19 nt, Artificial Sequence
  Description of Artificial Sequence: Synthetic oligonucleotide
  Sense strand starting at position 2682 of SEQ ID NO: 1887359
gaaugagccacguagauag

SEQ ID NO: 2466387 - RNA, 19 nt, Artificial Sequence
  Description of Artificial Sequence: Synthetic oligonucleotide
  Antisense strand to SEQ ID NO: 2466386
cuaucuacguggcucauuc

SEQ ID NO: 2466388 - RNA, 19 nt, Artificial Sequence
  Description of Artificial Sequence: Synthetic oligonucleotide
  Sense strand starting at position 2898 of SEQ ID NO: 1887359
agggcuuuacucuaauuga

SEQ ID NO: 2466389 - RNA, 19 nt, Artificial Sequence
  Description of Artificial Sequence: Synthetic oligonucleotide
  Antisense strand to SEQ ID NO: 2466388
ucaauuagaguaaagcccu

SEQ ID NO: 2466390 - RNA, 19 nt, Artificial Sequence
  Description of Artificial Sequence: Synthetic oligonucleotide
  Sense strand starting at position 3058 of SEQ ID NO: 1887359
agauaaugauggcccagau

SEQ ID NO: 2466391 - RNA, 19 nt, Artificial Sequence
  Description of Artificial Sequence: Synthetic oligonucleotide
  Antisense strand to SEQ ID NO: 2466390
aucugggccaucauuaucu

SEQ ID NO: 2466392 - RNA, 19 nt, Artificial Sequence
  Description of Artificial Sequence: Synthetic oligonucleotide
  Sense strand starting at position 3132 of SEQ ID NO: 1887359
gggcaagauuaguugauga

SEQ ID NO: 2466393 - RNA, 19 nt, Artificial Sequence
  Description of Artificial Sequence: Synthetic oligonucleotide
  Antisense strand to SEQ ID NO: 2466392
ucaucaacuaaucuugccc

SEQ ID NO: 2466394 - RNA, 19 nt, Artificial Sequence
  Description of Artificial Sequence: Synthetic oligonucleotide
  Sense strand starting at position 3205 of SEQ ID NO: 1887359
ugacgugaauugccauuua

SEQ ID NO: 2466395 - RNA, 19 nt, Artificial Sequence
  Description of Artificial Sequence: Synthetic oligonucleotide
  Antisense strand to SEQ ID NO: 2466394
uaaauggcaauucacguca

SEQ ID NO: 2466396 - RNA, 19 nt, Artificial Sequence
  Description of Artificial Sequence: Synthetic oligonucleotide
  Sense strand starting at position 3229 of SEQ ID NO: 1887359
aagagaacuguagguuuga

SEQ ID NO: 2466397 - RNA, 19 nt, Artificial Sequence
  Description of Artificial Sequence: Synthetic oligonucleotide
  Antisense strand to SEQ ID NO: 2466396
ucaaaccuacaguucucuu

SEQ ID NO: 2466398 - RNA, 19 nt, Artificial Sequence
  Description of Artificial Sequence: Synthetic oligonucleotide
  Sense strand starting at position 3342 of SEQ ID NO: 1887359
cgcaguccucuccuugcaa

SEQ ID NO: 2466399 - RNA, 19 nt, Artificial Sequence
  Description of Artificial Sequence: Synthetic oligonucleotide
  Antisense strand to SEQ ID NO: 2466398
uugcaaggagaggacugcg

SEQ ID NO: 2466400 - RNA, 19 nt, Artificial Sequence
  Description of Artificial Sequence: Synthetic oligonucleotide
  Sense strand starting at position 3459 of SEQ ID NO: 1887359
ugaauaaucgcauaaagua

SEQ ID NO: 2466401 - RNA, 19 nt, Artificial Sequence
  Description of Artificial Sequence: Synthetic oligonucleotide
  Antisense strand to SEQ ID NO: 2466400
uacuuuaugcgauuauuca

SEQ ID NO: 2466402 - RNA, 19 nt, Artificial Sequence
  Description of Artificial Sequence: Synthetic oligonucleotide
  Sense strand starting at position 3526 of SEQ ID NO: 1887359
guauauuaugauuagugac

SEQ ID NO: 2466403 - RNA, 19 nt, Artificial Sequence
  Description of Artificial Sequence: Synthetic oligonucleotide
  Antisense strand to SEQ ID NO: 2466402
gucacuaaucauaauauac

SEQ ID NO: 2466404 - RNA, 19 nt, Artificial Sequence
  Description of Artificial Sequence: Synthetic oligonucleotide
  Sense strand starting at position 3528 of SEQ ID NO: 1887359
auauuaugauuagugacca

SEQ ID NO: 2466405 - RNA, 19 nt, Artificial Sequence
  Description of Artificial Sequence: Synthetic oligonucleotide
  Antisense strand to SEQ ID NO: 2466404
uggucacuaaucauaauau

SEQ ID NO: 2466406 - RNA, 19 nt, Artificial Sequence
  Description of Artificial Sequence: Synthetic oligonucleotide
  Sense strand starting at position 3653 of SEQ ID NO: 1887359
ccugucucucaguaauaag

SEQ ID NO: 2466407 - RNA, 19 nt, Artificial Sequence
  Description of Artificial Sequence: Synthetic oligonucleotide
  Antisense strand to SEQ ID NO: 2466406
cuuauuacugagagacagg

SEQ ID NO: 2466408 - RNA, 19 nt, Artificial Sequence
  Description of Artificial Sequence: Synthetic oligonucleotide
  Sense strand starting at position 3664 of SEQ ID NO: 1887359
guaauaagcccacaugaca

SEQ ID NO: 2466409 - RNA, 19 nt, Artificial Sequence
  Description of Artificial Sequence: Synthetic oligonucleotide
  Antisense strand to SEQ ID NO: 2466408
ugucaugugggcuuauuac

SEQ ID NO: 2466410 - RNA, 19 nt, Artificial Sequence
  Description of Artificial Sequence: Synthetic oligonucleotide
  Sense strand starting at position 117 of SEQ ID NO: 1887360
ucaaguuuauguuugggaa

SEQ ID NO: 2466411 - RNA, 19 nt, Artificial Sequence
  Description of Artificial Sequence: Synthetic oligonucleotide
  Antisense strand to SEQ ID NO: 2466410
uucccaaacauaaacuuga

SEQ ID NO: 2466412 - RNA, 19 nt, Artificial Sequence
  Description of Artificial Sequence: Synthetic oligonucleotide
  Sense strand starting at position 118 of SEQ ID NO: 1887360
caaguuuauguuugggaag

SEQ ID NO: 2466413 - RNA, 19 nt, Artificial Sequence
  Description of Artificial Sequence: Synthetic oligonucleotide
  Antisense strand to SEQ ID NO: 2466412
cuucccaaacauaaacuug

SEQ ID NO: 2466414 - RNA, 19 nt, Artificial Sequence
  Description of Artificial Sequence: Synthetic oligonucleotide
  Sense strand starting at position 321 of SEQ ID NO: 1887360
guaaacauucugugaauau

SEQ ID NO: 2466415 - RNA, 19 nt, Artificial Sequence
  Description of Artificial Sequence: Synthetic oligonucleotide
  Antisense strand to SEQ ID NO: 2466414
auauucacagaauguuuac

SEQ ID NO: 2466416 - RNA, 19 nt, Artificial Sequence
  Description of Artificial Sequence: Synthetic oligonucleotide
  Sense strand starting at position 330 of SEQ ID NO: 1887360
cugugaauauaggcuccaa

SEQ ID NO: 2466417 - RNA, 19 nt, Artificial Sequence
  Description of Artificial Sequence: Synthetic oligonucleotide
  Antisense strand to SEQ ID NO: 2466416
uuggagccuauauucacag

SEQ ID NO: 2466418 - RNA, 19 nt, Artificial Sequence
  Description of Artificial Sequence: Synthetic oligonucleotide
  Sense strand starting at position 384 of SEQ ID NO: 1887360
cuacauaguuucuuuggaa

SEQ ID NO: 2466419 - RNA, 19 nt, Artificial Sequence
  Description of Artificial Sequence: Synthetic oligonucleotide
  Antisense strand to SEQ ID NO: 2466418
uuccaaagaaacuauguag

SEQ ID NO: 2466420 - RNA, 19 nt, Artificial Sequence
  Description of Artificial Sequence: Synthetic oligonucleotide
  Sense strand starting at position 720 of SEQ ID NO: 1887360
gugucuguuacagagagua

SEQ ID NO: 2466421 - RNA, 19 nt, Artificial Sequence
  Description of Artificial Sequence: Synthetic oligonucleotide
  Antisense strand to SEQ ID NO: 2466420
uacucucuguaacagacac

SEQ ID NO: 2466422 - RNA, 19 nt, Artificial Sequence
  Description of Artificial Sequence: Synthetic oligonucleotide
  Sense strand starting at position 722 of SEQ ID NO: 1887360
gucuguuacagagaguauc

SEQ ID NO: 2466423 - RNA, 19 nt, Artificial Sequence
  Description of Artificial Sequence: Synthetic oligonucleotide
  Antisense strand to SEQ ID NO: 2466422
gauacucucuguaacagac

SEQ ID NO: 2466424 - RNA, 19 nt, Artificial Sequence
  Description of Artificial Sequence: Synthetic oligonucleotide
  Sense strand starting at position 752 of SEQ ID NO: 1887360
gucucaaaguacuuugaga

SEQ ID NO: 2466425 - RNA, 19 nt, Artificial Sequence
  Description of Artificial Sequence: Synthetic oligonucleotide
  Antisense strand to SEQ ID NO: 2466424
ucucaaaguacuuugagac

SEQ ID NO: 2466426 - RNA, 19 nt, Artificial Sequence
  Description of Artificial Sequence: Synthetic oligonucleotide
  Sense strand starting at position 754 of SEQ ID NO: 1887360
cucaaaguacuuugagaug

SEQ ID NO: 2466427 - RNA, 19 nt, Artificial Sequence
  Description of Artificial Sequence: Synthetic oligonucleotide
  Antisense strand to SEQ ID NO: 2466426
caucucaaaguacuuugag

SEQ ID NO: 2466428 - RNA, 19 nt, Artificial Sequence
  Description of Artificial Sequence: Synthetic oligonucleotide
  Sense strand starting at position 782 of SEQ ID NO: 1887360
uucuauaaauggguauuga

SEQ ID NO: 2466429 - RNA, 19 nt, Artificial Sequence
  Description of Artificial Sequence: Synthetic oligonucleotide
  Antisense strand to SEQ ID NO: 2466428
ucaauacccauuuauagaa

SEQ ID NO: 2466430 - RNA, 19 nt, Artificial Sequence
  Description of Artificial Sequence: Synthetic oligonucleotide
  Sense strand starting at position 953 of SEQ ID NO: 1887360
ugccaucacccaugaggaa

SEQ ID NO: 2466431 - RNA, 19 nt, Artificial Sequence
  Description of Artificial Sequence: Synthetic oligonucleotide
  Antisense strand to SEQ ID NO: 2466430
uuccucaugggugauggca

SEQ ID NO: 2466432 - RNA, 19 nt, Artificial Sequence
  Description of Artificial Sequence: Synthetic oligonucleotide
  Sense strand starting at position 1584 of SEQ ID NO: 1887360
gggcaucuucuccaacagu

SEQ ID NO: 2466433 - RNA, 19 nt, Artificial Sequence
  Description of Artificial Sequence: Synthetic oligonucleotide
  Antisense strand to SEQ ID NO: 2466432
acuguuggagaagaugccc

SEQ ID NO: 2466434 - RNA, 19 nt, Artificial Sequence
  Description of Artificial Sequence: Synthetic oligonucleotide
  Sense strand starting at position 1640 of SEQ ID NO: 1887360
gaaucuuuccugugggauu

SEQ ID NO: 2466435 - RNA, 19 nt, Artificial Sequence
  Description of Artificial Sequence: Synthetic oligonucleotide
  Antisense strand to SEQ ID NO: 2466434
aaucccacaggaaagauuc

SEQ ID NO: 2466436 - RNA, 19 nt, Artificial Sequence
  Description of Artificial Sequence: Synthetic oligonucleotide
  Sense strand starting at position 1725 of SEQ ID NO: 1887360
gggagaaccuuccuuauug

SEQ ID NO: 2466437 - RNA, 19 nt, Artificial Sequence
  Description of Artificial Sequence: Synthetic oligonucleotide
  Antisense strand to SEQ ID NO: 2466436
caauaaggaagguucuccc

SEQ ID NO: 2466438 - RNA, 19 nt, Artificial Sequence
  Description of Artificial Sequence: Synthetic oligonucleotide
  Sense strand starting at position 1831 of SEQ ID NO: 1887360
ugaauaucucagcaaggca

SEQ ID NO: 2466439 - RNA, 19 nt, Artificial Sequence
  Description of Artificial Sequence: Synthetic oligonucleotide
  Antisense strand to SEQ ID NO: 2466438
ugccuugcugagauauuca

SEQ ID NO: 2466440 - RNA, 19 nt, Artificial Sequence
  Description of Artificial Sequence: Synthetic oligonucleotide
  Sense strand starting at position 1910 of SEQ ID NO: 1887360
ugcguugagugauuucaga

SEQ ID NO: 2466441 - RNA, 19 nt, Artificial Sequence
  Description of Artificial Sequence: Synthetic oligonucleotide
  Antisense strand to SEQ ID NO: 2466440
ucugaaaucacucaacgca

SEQ ID NO: 2466442 - RNA, 19 nt, Artificial Sequence
  Description of Artificial Sequence: Synthetic oligonucleotide
  Sense strand starting at position 1937 of SEQ ID NO: 1887360
uuucuuugccgucuucgaa

SEQ ID NO: 2466443 - RNA, 19 nt, Artificial Sequence
  Description of Artificial Sequence: Synthetic oligonucleotide
  Antisense strand to SEQ ID NO: 2466442
uucgaagacggcaaagaaa

SEQ ID NO: 2466444 - RNA, 19 nt, Artificial Sequence
  Description of Artificial Sequence: Synthetic oligonucleotide
  Sense strand starting at position 1943 of SEQ ID NO: 1887360
ugccgucuucgaaggguaa

SEQ ID NO: 2466445 - RNA, 19 nt, Artificial Sequence
  Description of Artificial Sequence: Synthetic oligonucleotide
  Antisense strand to SEQ ID NO: 2466444
uuacccuucgaagacggca

SEQ ID NO: 2466446 - RNA, 19 nt, Artificial Sequence
  Description of Artificial Sequence: Synthetic oligonucleotide
  Sense strand starting at position 1950 of SEQ ID NO: 1887360
uucgaaggguaaucuggau

SEQ ID NO: 2466447 - RNA, 19 nt, Artificial Sequence
  Description of Artificial Sequence: Synthetic oligonucleotide
  Antisense strand to SEQ ID NO: 2466446
auccagauuacccuucgaa

SEQ ID NO: 2466448 - RNA, 19 nt, Artificial Sequence
  Description of Artificial Sequence: Synthetic oligonucleotide
  Sense strand starting at position 1956 of SEQ ID NO: 1887360
ggguaaucuggaugcugga

SEQ ID NO: 2466449 - RNA, 19 nt, Artificial Sequence
  Description of Artificial Sequence: Synthetic oligonucleotide
  Antisense strand to SEQ ID NO: 2466448
uccagcauccagauuaccc

SEQ ID NO: 2466450 - RNA, 19 nt, Artificial Sequence
  Description of Artificial Sequence: Synthetic oligonucleotide
  Sense strand starting at position 2074 of SEQ ID NO: 1887360
ccugguaaccacgagauca

SEQ ID NO: 2466451 - RNA, 19 nt, Artificial Sequence
  Description of Artificial Sequence: Synthetic oligonucleotide
  Antisense strand to SEQ ID NO: 2466450
ugaucucgugguuaccagg

SEQ ID NO: 2466452 - RNA, 19 nt, Artificial Sequence
  Description of Artificial Sequence: Synthetic oligonucleotide
  Sense strand starting at position 2076 of SEQ ID NO: 1887360
ugguaaccacgagaucauu

SEQ ID NO: 2466453 - RNA, 19 nt, Artificial Sequence
  Description of Artificial Sequence: Synthetic oligonucleotide
  Antisense strand to SEQ ID NO: 2466452
aaugaucucgugguuacca

SEQ ID NO: 2466454 - RNA, 19 nt, Artificial Sequence
  Description of Artificial Sequence: Synthetic oligonucleotide
  Sense strand starting at position 2096 of SEQ ID NO: 1887360
ccugaauucgcagaccucu

SEQ ID NO: 2466455 - RNA, 19 nt, Artificial Sequence
  Description of Artificial Sequence: Synthetic oligonucleotide
  Antisense strand to SEQ ID NO: 2466454
agaggucugcgaauucagg

SEQ ID NO: 2466456 - RNA, 19 nt, Artificial Sequence
  Description of Artificial Sequence: Synthetic oligonucleotide
  Sense strand starting at position 2104 of SEQ ID NO: 1887360
cgcagaccucuuuaacauu

SEQ ID NO: 2466457 - RNA, 19 nt, Artificial Sequence
  Description of Artificial Sequence: Synthetic oligonucleotide
  Antisense strand to SEQ ID NO: 2466456
aauguuaaagaggucugcg

SEQ ID NO: 2466458 - RNA, 19 nt, Artificial Sequence
  Description of Artificial Sequence: Synthetic oligonucleotide
  Sense strand starting at position 2366 of SEQ ID NO: 1887360
agcucccuccuuggagaaa

SEQ ID NO: 2466459 - RNA, 19 nt, Artificial Sequence
  Description of Artificial Sequence: Synthetic oligonucleotide
  Antisense strand to SEQ ID NO: 2466458
uuucuccaaggagggagcu

SEQ ID NO: 2466460 - RNA, 19 nt, Artificial Sequence
  Description of Artificial Sequence: Synthetic oligonucleotide
  Sense strand starting at position 2436 of SEQ ID NO: 1887360
aucugagagaucuggacgu

SEQ ID NO: 2466461 - RNA, 19 nt, Artificial Sequence
  Description of Artificial Sequence: Synthetic oligonucleotide
  Antisense strand to SEQ ID NO: 2466460
acguccagaucucucagau

SEQ ID NO: 2466462 - RNA, 19 nt, Artificial Sequence
  Description of Artificial Sequence: Synthetic oligonucleotide
  Sense strand starting at position 2440 of SEQ ID NO: 1887360
gagagaucuggacguaaau

SEQ ID NO: 2466463 - RNA, 19 nt, Artificial Sequence
  Description of Artificial Sequence: Synthetic oligonucleotide
  Antisense strand to SEQ ID NO: 2466462
auuuacguccagaucucuc

SEQ ID NO: 2466464 - RNA, 19 nt, Artificial Sequence
  Description of Artificial Sequence: Synthetic oligonucleotide
  Sense strand starting at position 2817 of SEQ ID NO: 1887360
uucccuuaucugugaaaga

SEQ ID NO: 2466465 - RNA, 19 nt, Artificial Sequence
  Description of Artificial Sequence: Synthetic oligonucleotide
  Antisense strand to SEQ ID NO: 2466464
ucuuucacagauaagggaa

SEQ ID NO: 2466466 - RNA, 19 nt, Artificial Sequence
  Description of Artificial Sequence: Synthetic oligonucleotide
  Sense strand starting at position 2899 of SEQ ID NO: 1887360
gcacucaggaagugaucau

SEQ ID NO: 2466467 - RNA, 19 nt, Artificial Sequence
  Description of Artificial Sequence: Synthetic oligonucleotide
  Antisense strand to SEQ ID NO: 2466466
augaucacuuccugagugc

SEQ ID NO: 2466468 - RNA, 19 nt, Artificial Sequence
  Description of Artificial Sequence: Synthetic oligonucleotide
  Sense strand starting at position 2982 of SEQ ID NO: 1887360
aggacauguucaguggaga

SEQ ID NO: 2466469 - RNA, 19 nt, Artificial Sequence
  Description of Artificial Sequence: Synthetic oligonucleotide
  Antisense strand to SEQ ID NO: 2466468
ucuccacugaacauguccu

SEQ ID NO: 2466470 - RNA, 19 nt, Artificial Sequence
  Description of Artificial Sequence: Synthetic oligonucleotide
  Sense strand starting at position 2983 of SEQ ID NO: 1887360
ggacauguucaguggagau

SEQ ID NO: 2466471 - RNA, 19 nt, Artificial Sequence
  Description of Artificial Sequence: Synthetic oligonucleotide
  Antisense strand to SEQ ID NO: 2466470
aucuccacugaacaugucc

SEQ ID NO: 2466472 - RNA, 19 nt, Artificial Sequence
  Description of Artificial Sequence: Synthetic oligonucleotide
  Sense strand starting at position 3168 of SEQ ID NO: 1887360
ugaugaaacuccucuguac

SEQ ID NO: 2466473 - RNA, 19 nt, Artificial Sequence
  Description of Artificial Sequence: Synthetic oligonucleotide
  Antisense strand to SEQ ID NO: 2466472
guacagaggaguuucauca

SEQ ID NO: 2466474 - RNA, 19 nt, Artificial Sequence
  Description of Artificial Sequence: Synthetic oligonucleotide
  Sense strand starting at position 3333 of SEQ ID NO: 1887360
gagugauagucugucuaaa

SEQ ID NO: 2466475 - RNA, 19 nt, Artificial Sequence
  Description of Artificial Sequence: Synthetic oligonucleotide
  Antisense strand to SEQ ID NO: 2466474
uuuagacagacuaucacuc

SEQ ID NO: 2466476 - RNA, 19 nt, Artificial Sequence
  Description of Artificial Sequence: Synthetic oligonucleotide
  Sense strand starting at position 3395 of SEQ ID NO: 1887360
uguaaaugugguugcauuu

SEQ ID NO: 2466477 - RNA, 19 nt, Artificial Sequence
  Description of Artificial Sequence: Synthetic oligonucleotide
  Antisense strand to SEQ ID NO: 2466476
aaaugcaaccacauuuaca

SEQ ID NO: 2466478 - RNA, 19 nt, Artificial Sequence
  Description of Artificial Sequence: Synthetic oligonucleotide
  Sense strand starting at position 3438 of SEQ ID NO: 1887360
uuagcaugugauuacaagu

SEQ ID NO: 2466479 - RNA, 19 nt, Artificial Sequence
  Description of Artificial Sequence: Synthetic oligonucleotide
  Antisense strand to SEQ ID NO: 2466478
acuuguaaucacaugcuaa

SEQ ID NO: 2466480 - RNA, 19 nt, Artificial Sequence
  Description of Artificial Sequence: Synthetic oligonucleotide
  Sense strand starting at position 3502 of SEQ ID NO: 1887360
acacuagauguguaaucuu

SEQ ID NO: 2466481 - RNA, 19 nt, Artificial Sequence
  Description of Artificial Sequence: Synthetic oligonucleotide
  Antisense strand to SEQ ID NO: 2466480
aagauuacacaucuagugu

SEQ ID NO: 2466482 - RNA, 19 nt, Artificial Sequence
  Description of Artificial Sequence: Synthetic oligonucleotide
  Sense strand starting at position 3521 of SEQ ID NO: 1887360
agguaaccuccucaaaguu

SEQ ID NO: 2466483 - RNA, 19 nt, Artificial Sequence
  Description of Artificial Sequence: Synthetic oligonucleotide
  Antisense strand to SEQ ID NO: 2466482
aacuuugaggagguuaccu

SEQ ID NO: 2466484 - RNA, 19 nt, Artificial Sequence
  Description of Artificial Sequence: Synthetic oligonucleotide
  Sense strand starting at position 3638 of SEQ ID NO: 1887360
ggcuuagaccaguggaaug

SEQ ID NO: 2466485 - RNA, 19 nt, Artificial Sequence
  Description of Artificial Sequence: Synthetic oligonucleotide
  Antisense strand to SEQ ID NO: 2466484
cauuccacuggucuaagcc

SEQ ID NO: 2466486 - RNA, 19 nt, Artificial Sequence
  Description of Artificial Sequence: Synthetic oligonucleotide
  Sense strand starting at position 3659 of SEQ ID NO: 1887360
uuggacacccugugauaca

SEQ ID NO: 2466487 - RNA, 19 nt, Artificial Sequence
  Description of Artificial Sequence: Synthetic oligonucleotide
  Antisense strand to SEQ ID NO: 2466486
uguaucacaggguguccaa

SEQ ID NO: 2466488 - RNA, 19 nt, Artificial Sequence
  Description of Artificial Sequence: Synthetic oligonucleotide
  Sense strand starting at position 3834 of SEQ ID NO: 1887360
ugccuagucccacaugaga

SEQ ID NO: 2466489 - RNA, 19 nt, Artificial Sequence
  Description of Artificial Sequence: Synthetic oligonucleotide
  Antisense strand to SEQ ID NO: 2466488
ucucaugugggacuaggca

SEQ ID NO: 2466490 - RNA, 19 nt, Artificial Sequence
  Description of Artificial Sequence: Synthetic oligonucleotide
  Sense strand starting at position 239 of SEQ ID NO: 1887361
ccuccacuugagugauacu

SEQ ID NO: 2466491 - RNA, 19 nt, Artificial Sequence
  Description of Artificial Sequence: Synthetic oligonucleotide
  Antisense strand to SEQ ID NO: 2466490
aguaucacucaaguggagg

SEQ ID NO: 2466492 - RNA, 19 nt, Artificial Sequence
  Description of Artificial Sequence: Synthetic oligonucleotide
  Sense strand starting at position 252 of SEQ ID NO: 1887361
gauacuuggcccugggaua

SEQ ID NO: 2466493 - RNA, 19 nt, Artificial Sequence
  Description of Artificial Sequence: Synthetic oligonucleotide
  Antisense strand to SEQ ID NO: 2466492
uaucccagggccaaguauc

SEQ ID NO: 2466494 - RNA, 19 nt, Artificial Sequence
  Description of Artificial Sequence: Synthetic oligonucleotide
  Sense strand starting at position 253 of SEQ ID NO: 1887361
auacuuggcccugggauaa

SEQ ID NO: 2466495 - RNA, 19 nt, Artificial Sequence
  Description of Artificial Sequence: Synthetic oligonucleotide
  Antisense strand to SEQ ID NO: 2466494
uuaucccagggccaaguau

SEQ ID NO: 2466496 - RNA, 19 nt, Artificial Sequence
  Description of Artificial Sequence: Synthetic oligonucleotide
  Sense strand starting at position 409 of SEQ ID NO: 1887361
ggaggaguuucuccauggu

SEQ ID NO: 2466497 - RNA, 19 nt, Artificial Sequence
  Description of Artificial Sequence: Synthetic oligonucleotide
  Antisense strand to SEQ ID NO: 2466496
accauggagaaacuccucc

SEQ ID NO: 2466498 - RNA, 19 nt, Artificial Sequence
  Description of Artificial Sequence: Synthetic oligonucleotide
  Sense strand starting at position 500 of SEQ ID NO: 1887361
cugugaagaaucgaugcca

SEQ ID NO: 2466499 - RNA, 19 nt, Artificial Sequence
  Description of Artificial Sequence: Synthetic oligonucleotide
  Antisense strand to SEQ ID NO: 2466498
uggcaucgauucuucacag

SEQ ID NO: 2466500 - RNA, 19 nt, Artificial Sequence
  Description of Artificial Sequence: Synthetic oligonucleotide
  Sense strand starting at position 667 of SEQ ID NO: 1887361
gguuuaaugguguaggaga

SEQ ID NO: 2466501 - RNA, 19 nt, Artificial Sequence
  Description of Artificial Sequence: Synthetic oligonucleotide
  Antisense strand to SEQ ID NO: 2466500
ucuccuacaccauuaaacc

SEQ ID NO: 2466502 - RNA, 19 nt, Artificial Sequence
  Description of Artificial Sequence: Synthetic oligonucleotide
  Sense strand starting at position 669 of SEQ ID NO: 1887361
uuuaaugguguaggagaaa

SEQ ID NO: 2466503 - RNA, 19 nt, Artificial Sequence
  Description of Artificial Sequence: Synthetic oligonucleotide
  Antisense strand to SEQ ID NO: 2466502
uuucuccuacaccauuaaa

SEQ ID NO: 2466504 - RNA, 19 nt, Artificial Sequence
  Description of Artificial Sequence: Synthetic oligonucleotide
  Sense strand starting at position 696 of SEQ ID NO: 1887361
agcagauaagguugaauaa

SEQ ID NO: 2466505 - RNA, 19 nt, Artificial Sequence
  Description of Artificial Sequence: Synthetic oligonucleotide
  Antisense strand to SEQ ID NO: 2466504
uuauucaaccuuaucugcu

SEQ ID NO: 2466506 - RNA, 19 nt, Artificial Sequence
  Description of Artificial Sequence: Synthetic oligonucleotide
  Sense strand starting at position 976 of SEQ ID NO: 1887361
augaguauuuguguuugcu

SEQ ID NO: 2466507 - RNA, 19 nt, Artificial Sequence
  Description of Artificial Sequence: Synthetic oligonucleotide
  Antisense strand to SEQ ID NO: 2466506
agcaaacacaaauacucau

SEQ ID NO: 2466508 - RNA, 19 nt, Artificial Sequence
  Description of Artificial Sequence: Synthetic oligonucleotide
  Sense strand starting at position 1362 of SEQ ID NO: 1887361
gucacagaacuuuagucau

SEQ ID NO: 2466509 - RNA, 19 nt, Artificial Sequence
  Description of Artificial Sequence: Synthetic oligonucleotide
  Antisense strand to SEQ ID NO: 2466508
augacuaaaguucugugac

SEQ ID NO: 2466510 - RNA, 19 nt, Artificial Sequence
  Description of Artificial Sequence: Synthetic oligonucleotide
  Sense strand starting at position 1365 of SEQ ID NO: 1887361
acagaacuuuagucauuga

SEQ ID NO: 2466511 - RNA, 19 nt, Artificial Sequence
  Description of Artificial Sequence: Synthetic oligonucleotide
  Antisense strand to SEQ ID NO: 2466510
ucaaugacuaaaguucugu

SEQ ID NO: 2466512 - RNA, 19 nt, Artificial Sequence
  Description of Artificial Sequence: Synthetic oligonucleotide
  Sense strand starting at position 1368 of SEQ ID NO: 1887361
gaacuuuagucauugacug

SEQ ID NO: 2466513 - RNA, 19 nt, Artificial Sequence
  Description of Artificial Sequence: Synthetic oligonucleotide
  Antisense strand to SEQ ID NO: 2466512
cagucaaugacuaaaguuc

SEQ ID NO: 2466514 - RNA, 19 nt, Artificial Sequence
  Description of Artificial Sequence: Synthetic oligonucleotide
  Sense strand starting at position 1382 of SEQ ID NO: 1887361
gacugaggucuugaaaguc

SEQ ID NO: 2466515 - RNA, 19 nt, Artificial Sequence
  Description of Artificial Sequence: Synthetic oligonucleotide
  Antisense strand to SEQ ID NO: 2466514
gacuuucaagaccucaguc

SEQ ID NO: 2466516 - RNA, 19 nt, Artificial Sequence
  Description of Artificial Sequence: Synthetic oligonucleotide
  Sense strand starting at position 1757 of SEQ ID NO: 1887361
auguuaugacuuuaucuca

SEQ ID NO: 2466517 - RNA, 19 nt, Artificial Sequence
  Description of Artificial Sequence: Synthetic oligonucleotide
  Antisense strand to SEQ ID NO: 2466516
ugagauaaagucauaacau

SEQ ID NO: 2466518 - RNA, 19 nt, Artificial Sequence
  Description of Artificial Sequence: Synthetic oligonucleotide
  Sense strand starting at position 1784 of SEQ ID NO: 1887361
uuaggaaaguguucgagac

SEQ ID NO: 2466519 - RNA, 19 nt, Artificial Sequence
  Description of Artificial Sequence: Synthetic oligonucleotide
  Antisense strand to SEQ ID NO: 2466518
gucucgaacacuuuccuaa

SEQ ID NO: 2466520 - RNA, 19 nt, Artificial Sequence
  Description of Artificial Sequence: Synthetic oligonucleotide
  Sense strand starting at position 1785 of SEQ ID NO: 1887361
uaggaaaguguucgagaca

SEQ ID NO: 2466521 - RNA, 19 nt, Artificial Sequence
  Description of Artificial Sequence: Synthetic oligonucleotide
  Antisense strand to SEQ ID NO: 2466520
ugucucgaacacuuuccua

SEQ ID NO: 2466522 - RNA, 19 nt, Artificial Sequence
  Description of Artificial Sequence: Synthetic oligonucleotide
  Sense strand starting at position 1788 of SEQ ID NO: 1887361
gaaaguguucgagacauac

SEQ ID NO: 2466523 - RNA, 19 nt, Artificial Sequence
  Description of Artificial Sequence: Synthetic oligonucleotide
  Antisense strand to SEQ ID NO: 2466522
guaugucucgaacacuuuc

SEQ ID NO: 2466524 - RNA, 19 nt, Artificial Sequence
  Description of Artificial Sequence: Synthetic oligonucleotide
  Sense strand starting at position 1986 of SEQ ID NO: 1887361
cugauagaaccuugaucuu

SEQ ID NO: 2466525 - RNA, 19 nt, Artificial Sequence
  Description of Artificial Sequence: Synthetic oligonucleotide
  Antisense strand to SEQ ID NO: 2466524
aagaucaagguucuaucag

SEQ ID NO: 2466526 - RNA, 19 nt, Artificial Sequence
  Description of Artificial Sequence: Synthetic oligonucleotide
  Sense strand starting at position 2009 of SEQ ID NO: 1887361
agaguucuucuguacccaa

SEQ ID NO: 2466527 - RNA, 19 nt, Artificial Sequence
  Description of Artificial Sequence: Synthetic oligonucleotide
  Antisense strand to SEQ ID NO: 2466526
uuggguacagaagaacucu

SEQ ID NO: 2466528 - RNA, 19 nt, Artificial Sequence
  Description of Artificial Sequence: Synthetic oligonucleotide
  Sense strand starting at position 2064 of SEQ ID NO: 1887361
gccuguucucugucaggcu

SEQ ID NO: 2466529 - RNA, 19 nt, Artificial Sequence
  Description of Artificial Sequence: Synthetic oligonucleotide
  Antisense strand to SEQ ID NO: 2466528
agccugacagagaacaggc

SEQ ID NO: 2466530 - RNA, 19 nt, Artificial Sequence
  Description of Artificial Sequence: Synthetic oligonucleotide
  Sense strand starting at position 2106 of SEQ ID NO: 1887361
cugaguucuucugcauuug

SEQ ID NO: 2466531 - RNA, 19 nt, Artificial Sequence
  Description of Artificial Sequence: Synthetic oligonucleotide
  Antisense strand to SEQ ID NO: 2466530
caaaugcagaagaacucag

SEQ ID NO: 2466532 - RNA, 19 nt, Artificial Sequence
  Description of Artificial Sequence: Synthetic oligonucleotide
  Sense strand starting at position 2164 of SEQ ID NO: 1887361
cuuuccugguaauuaauga

SEQ ID NO: 2466533 - RNA, 19 nt, Artificial Sequence
  Description of Artificial Sequence: Synthetic oligonucleotide
  Antisense strand to SEQ ID NO: 2466532
ucauuaauuaccaggaaag

SEQ ID NO: 2466534 - RNA, 19 nt, Artificial Sequence
  Description of Artificial Sequence: Synthetic oligonucleotide
  Sense strand starting at position 2467 of SEQ ID NO: 1887361
gucuauauugggcaucuga

SEQ ID NO: 2466535 - RNA, 19 nt, Artificial Sequence
  Description of Artificial Sequence: Synthetic oligonucleotide
  Antisense strand to SEQ ID NO: 2466534
ucagaugcccaauauagac

SEQ ID NO: 2466536 - RNA, 19 nt, Artificial Sequence
  Description of Artificial Sequence: Synthetic oligonucleotide
  Sense strand starting at position 2569 of SEQ ID NO: 1887361
ugacucaaugcauggacaa

SEQ ID NO: 2466537 - RNA, 19 nt, Artificial Sequence
  Description of Artificial Sequence: Synthetic oligonucleotide
  Antisense strand to SEQ ID NO: 2466536
uuguccaugcauugaguca

SEQ ID NO: 2466538 - RNA, 19 nt, Artificial Sequence
  Description of Artificial Sequence: Synthetic oligonucleotide
  Sense strand starting at position 2622 of SEQ ID NO: 1887361
uuuguuauuacggacugga

SEQ ID NO: 2466539 - RNA, 19 nt, Artificial Sequence
  Description of Artificial Sequence: Synthetic oligonucleotide
  Antisense strand to SEQ ID NO: 2466538
uccaguccguaauaacaaa

SEQ ID NO: 2466540 - RNA, 19 nt, Artificial Sequence
  Description of Artificial Sequence: Synthetic oligonucleotide
  Sense strand starting at position 2625 of SEQ ID NO: 1887361
guuauuacggacuggagga

SEQ ID NO: 2466541 - RNA, 19 nt, Artificial Sequence
  Description of Artificial Sequence: Synthetic oligonucleotide
  Antisense strand to SEQ ID NO: 2466540
uccuccaguccguaauaac

SEQ ID NO: 2466542 - RNA, 19 nt, Artificial Sequence
  Description of Artificial Sequence: Synthetic oligonucleotide
  Sense strand starting at position 2677 of SEQ ID NO: 1887361
ucagauuauaauggguuga

SEQ ID NO: 2466543 - RNA, 19 nt, Artificial Sequence
  Description of Artificial Sequence: Synthetic oligonucleotide
  Antisense strand to SEQ ID NO: 2466542
ucaacccauuauaaucuga

SEQ ID NO: 2466544 - RNA, 19 nt, Artificial Sequence
  Description of Artificial Sequence: Synthetic oligonucleotide
  Sense strand starting at position 2720 of SEQ ID NO: 1887361
ggaaccaacguaugagcua

SEQ ID NO: 2466545 - RNA, 19 nt, Artificial Sequence
  Description of Artificial Sequence: Synthetic oligonucleotide
  Antisense strand to SEQ ID NO: 2466544
uagcucauacguugguucc

SEQ ID NO: 2466546 - RNA, 19 nt, Artificial Sequence
  Description of Artificial Sequence: Synthetic oligonucleotide
  Sense strand starting at position 2731 of SEQ ID NO: 1887361
augagcuauucccucaaga

SEQ ID NO: 2466547 - RNA, 19 nt, Artificial Sequence
  Description of Artificial Sequence: Synthetic oligonucleotide
  Antisense strand to SEQ ID NO: 2466546
ucuugagggaauagcucau

SEQ ID NO: 2466548 - RNA, 19 nt, Artificial Sequence
  Description of Artificial Sequence: Synthetic oligonucleotide
  Sense strand starting at position 2785 of SEQ ID NO: 1887361
aauugaggacuauguuauu

SEQ ID NO: 2466549 - RNA, 19 nt, Artificial Sequence
  Description of Artificial Sequence: Synthetic oligonucleotide
  Antisense strand to SEQ ID NO: 2466548
aauaacauaguccucaauu

SEQ ID NO: 2466550 - RNA, 19 nt, Artificial Sequence
  Description of Artificial Sequence: Synthetic oligonucleotide
  Sense strand starting at position 3062 of SEQ ID NO: 1887361
auaggugugcauuaccaaa

SEQ ID NO: 2466551 - RNA, 19 nt, Artificial Sequence
  Description of Artificial Sequence: Synthetic oligonucleotide
  Antisense strand to SEQ ID NO: 2466550
uuugguaaugcacaccuau

SEQ ID NO: 2466552 - RNA, 19 nt, Artificial Sequence
  Description of Artificial Sequence: Synthetic oligonucleotide
  Sense strand starting at position 3263 of SEQ ID NO: 1887361
auguucuaguucuugaaga

SEQ ID NO: 2466553 - RNA, 19 nt, Artificial Sequence
  Description of Artificial Sequence: Synthetic oligonucleotide
  Antisense strand to SEQ ID NO: 2466552
ucuucaagaacuagaacau

SEQ ID NO: 2466554 - RNA, 19 nt, Artificial Sequence
  Description of Artificial Sequence: Synthetic oligonucleotide
  Sense strand starting at position 3265 of SEQ ID NO: 1887361
guucuaguucuugaagacu

SEQ ID NO: 2466555 - RNA, 19 nt, Artificial Sequence
  Description of Artificial Sequence: Synthetic oligonucleotide
  Antisense strand to SEQ ID NO: 2466554
agucuucaagaacuagaac

SEQ ID NO: 2466556 - RNA, 19 nt, Artificial Sequence
  Description of Artificial Sequence: Synthetic oligonucleotide
  Sense strand starting at position 3273 of SEQ ID NO: 1887361
ucuugaagacucugccaau

SEQ ID NO: 2466557 - RNA, 19 nt, Artificial Sequence
  Description of Artificial Sequence: Synthetic oligonucleotide
  Antisense strand to SEQ ID NO: 2466556
auuggcagagucuucaaga

SEQ ID NO: 2466558 - RNA, 19 nt, Artificial Sequence
  Description of Artificial Sequence: Synthetic oligonucleotide
  Sense strand starting at position 3274 of SEQ ID NO: 1887361
cuugaagacucugccaaua

SEQ ID NO: 2466559 - RNA, 19 nt, Artificial Sequence
  Description of Artificial Sequence: Synthetic oligonucleotide
  Antisense strand to SEQ ID NO: 2466558
uauuggcagagucuucaag

SEQ ID NO: 2466560 - RNA, 19 nt, Artificial Sequence
  Description of Artificial Sequence: Synthetic oligonucleotide
  Sense strand starting at position 3864 of SEQ ID NO: 1887361
ugguauuagggcuauaaau

SEQ ID NO: 2466561 - RNA, 19 nt, Artificial Sequence
  Description of Artificial Sequence: Synthetic oligonucleotide
  Antisense strand to SEQ ID NO: 2466560
auuuauagcccuaauacca

SEQ ID NO: 2466562 - RNA, 19 nt, Artificial Sequence
  Description of Artificial Sequence: Synthetic oligonucleotide
  Sense strand starting at position 3866 of SEQ ID NO: 1887361
guauuagggcuauaaauau

SEQ ID NO: 2466563 - RNA, 19 nt, Artificial Sequence
  Description of Artificial Sequence: Synthetic oligonucleotide
  Antisense strand to SEQ ID NO: 2466562
auauuuauagcccuaauac

SEQ ID NO: 2466564 - RNA, 19 nt, Artificial Sequence
  Description of Artificial Sequence: Synthetic oligonucleotide
  Sense strand starting at position 3946 of SEQ ID NO: 1887361
auaggccuccauggaauua

SEQ ID NO: 2466565 - RNA, 19 nt, Artificial Sequence
  Description of Artificial Sequence: Synthetic oligonucleotide
  Antisense strand to SEQ ID NO: 2466564
uaauuccauggaggccuau

SEQ ID NO: 2466566 - RNA, 19 nt, Artificial Sequence
  Description of Artificial Sequence: Synthetic oligonucleotide
  Sense strand starting at position 3956 of SEQ ID NO: 1887361
auggaauuaucugcucaau

SEQ ID NO: 2466567 - RNA, 19 nt, Artificial Sequence
  Description of Artificial Sequence: Synthetic oligonucleotide
  Antisense strand to SEQ ID NO: 2466566
auugagcagauaauuccau

SEQ ID NO: 2466568 - RNA, 19 nt, Artificial Sequence
  Description of Artificial Sequence: Synthetic oligonucleotide
  Sense strand starting at position 3958 of SEQ ID NO: 1887361
ggaauuaucugcucaaucu

SEQ ID NO: 2466569 - RNA, 19 nt, Artificial Sequence
  Description of Artificial Sequence: Synthetic oligonucleotide
  Antisense strand to SEQ ID NO: 2466568
agauugagcagauaauucc

SEQ ID NO: 2466570 - RNA, 19 nt, Artificial Sequence
  Description of Artificial Sequence: Synthetic oligonucleotide
  Sense strand starting at position 3212 of SEQ ID NO: 1887362
gcguucuucucugcacaga

SEQ ID NO: 2466571 - RNA, 19 nt, Artificial Sequence
  Description of Artificial Sequence: Synthetic oligonucleotide
  Antisense strand to SEQ ID NO: 2466570
ucugugcagagaagaacgc

SEQ ID NO: 2466572 - RNA, 19 nt, Artificial Sequence
  Description of Artificial Sequence: Synthetic oligonucleotide
  Sense strand starting at position 3213 of SEQ ID NO: 1887362
cguucuucucugcacagau

SEQ ID NO: 2466573 - RNA, 19 nt, Artificial Sequence
  Description of Artificial Sequence: Synthetic oligonucleotide
  Antisense strand to SEQ ID NO: 2466572
aucugugcagagaagaacg

SEQ ID NO: 2466574 - RNA, 19 nt, Artificial Sequence
  Description of Artificial Sequence: Synthetic oligonucleotide
  Sense strand starting at position 3223 of SEQ ID NO: 1887362
ugcacagauguccggagua

SEQ ID NO: 2466575 - RNA, 19 nt, Artificial Sequence
  Description of Artificial Sequence: Synthetic oligonucleotide
  Antisense strand to SEQ ID NO: 2466574
uacuccggacaucugugca

SEQ ID NO: 2466576 - RNA, 19 nt, Artificial Sequence
  Description of Artificial Sequence: Synthetic oligonucleotide
  Sense strand starting at position 175 of SEQ ID NO: 1887363
uuaguagaaguauggacau

SEQ ID NO: 2466577 - RNA, 19 nt, Artificial Sequence
  Description of Artificial Sequence: Synthetic oligonucleotide
  Antisense strand to SEQ ID NO: 2466576
auguccauacuucuacuaa

SEQ ID NO: 2466578 - RNA, 19 nt, Artificial Sequence
  Description of Artificial Sequence: Synthetic oligonucleotide
  Sense strand starting at position 314 of SEQ ID NO: 1887363
auuuauaucuuagaaggca

SEQ ID NO: 2466579 - RNA, 19 nt, Artificial Sequence
  Description of Artificial Sequence: Synthetic oligonucleotide
  Antisense strand to SEQ ID NO: 2466578
ugccuucuaagauauaaau

SEQ ID NO: 2466580 - RNA, 19 nt, Artificial Sequence
  Description of Artificial Sequence: Synthetic oligonucleotide
  Sense strand starting at position 545 of SEQ ID NO: 1887363
uaucuaacaugaguuggau

SEQ ID NO: 2466581 - RNA, 19 nt, Artificial Sequence
  Description of Artificial Sequence: Synthetic oligonucleotide
  Antisense strand to SEQ ID NO: 2466580
auccaacucauguuagaua

SEQ ID NO: 2466582 - RNA, 19 nt, Artificial Sequence
  Description of Artificial Sequence: Synthetic oligonucleotide
  Sense strand starting at position 554 of SEQ ID NO: 1887363
ugaguuggauccuuacuau

SEQ ID NO: 2466583 - RNA, 19 nt, Artificial Sequence
  Description of Artificial Sequence: Synthetic oligonucleotide
  Antisense strand to SEQ ID NO: 2466582
auaguaaggauccaacuca

SEQ ID NO: 2466584 - RNA, 19 nt, Artificial Sequence
  Description of Artificial Sequence: Synthetic oligonucleotide
  Sense strand starting at position 557 of SEQ ID NO: 1887363
guuggauccuuacuauucu

SEQ ID NO: 2466585 - RNA, 19 nt, Artificial Sequence
  Description of Artificial Sequence: Synthetic oligonucleotide
  Antisense strand to SEQ ID NO: 2466584
agaauaguaaggauccaac

SEQ ID NO: 2466586 - RNA, 19 nt, Artificial Sequence
  Description of Artificial Sequence: Synthetic oligonucleotide
  Sense strand starting at position 581 of SEQ ID NO: 1887363
ccuuauuaugagggucuau

SEQ ID NO: 2466587 - RNA, 19 nt, Artificial Sequence
  Description of Artificial Sequence: Synthetic oligonucleotide
  Antisense strand to SEQ ID NO: 2466586
auagacccucauaauaagg

SEQ ID NO: 2466588 - RNA, 19 nt, Artificial Sequence
  Description of Artificial Sequence: Synthetic oligonucleotide
  Sense strand starting at position 611 of SEQ ID NO: 1887363
ucuuguuaugcaugaaagg

SEQ ID NO: 2466589 - RNA, 19 nt, Artificial Sequence
  Description of Artificial Sequence: Synthetic oligonucleotide
  Antisense strand to SEQ ID NO: 2466588
ccuuucaugcauaacaaga

SEQ ID NO: 2466590 - RNA, 19 nt, Artificial Sequence
  Description of Artificial Sequence: Synthetic oligonucleotide
  Sense strand starting at position 612 of SEQ ID NO: 1887363
cuuguuaugcaugaaaggu

SEQ ID NO: 2466591 - RNA, 19 nt, Artificial Sequence
  Description of Artificial Sequence: Synthetic oligonucleotide
  Antisense strand to SEQ ID NO: 2466590
accuuucaugcauaacaag

SEQ ID NO: 2466592 - RNA, 19 nt, Artificial Sequence
  Description of Artificial Sequence: Synthetic oligonucleotide
  Sense strand starting at position 633 of SEQ ID NO: 1887363
uauggagagcuauauguau

SEQ ID NO: 2466593 - RNA, 19 nt, Artificial Sequence
  Description of Artificial Sequence: Synthetic oligonucleotide
  Antisense strand to SEQ ID NO: 2466592
auacauauagcucuccaua

SEQ ID NO: 2466594 - RNA, 19 nt, Artificial Sequence
  Description of Artificial Sequence: Synthetic oligonucleotide
  Sense strand starting at position 660 of SEQ ID NO: 1887363
gcucaauaaucagcaugaa

SEQ ID NO: 2466595 - RNA, 19 nt, Artificial Sequence
  Description of Artificial Sequence: Synthetic oligonucleotide
  Antisense strand to SEQ ID NO: 2466594
uucaugcugauuauugagc

SEQ ID NO: 2466596 - RNA, 19 nt, Artificial Sequence
  Description of Artificial Sequence: Synthetic oligonucleotide
  Sense strand starting at position 815 of SEQ ID NO: 1887363
uuaugacuacccugaaaug

SEQ ID NO: 2466597 - RNA, 19 nt, Artificial Sequence
  Description of Artificial Sequence: Synthetic oligonucleotide
  Antisense strand to SEQ ID NO: 2466596
cauuucaggguagucauaa

SEQ ID NO: 2466598 - RNA, 19 nt, Artificial Sequence
  Description of Artificial Sequence: Synthetic oligonucleotide
  Sense strand starting at position 958 of SEQ ID NO: 1887363
auaugcaaauugcugaaua

SEQ ID NO: 2466599 - RNA, 19 nt, Artificial Sequence
  Description of Artificial Sequence: Synthetic oligonucleotide
  Antisense strand to SEQ ID NO: 2466598
uauucagcaauuugcauau

SEQ ID NO: 2466600 - RNA, 19 nt, Artificial Sequence
  Description of Artificial Sequence: Synthetic oligonucleotide
  Sense strand starting at position 981 of SEQ ID NO: 1887363
acauguuagccucaguuac

SEQ ID NO: 2466601 - RNA, 19 nt, Artificial Sequence
  Description of Artificial Sequence: Synthetic oligonucleotide
  Antisense strand to SEQ ID NO: 2466600
guaacugaggcuaacaugu

SEQ ID NO: 2466602 - RNA, 19 nt, Artificial Sequence
  Description of Artificial Sequence: Synthetic oligonucleotide
  Sense strand starting at position 1136 of SEQ ID NO: 1887363
auauaauucuaugccagag

SEQ ID NO: 2466603 - RNA, 19 nt, Artificial Sequence
  Description of Artificial Sequence: Synthetic oligonucleotide
  Antisense strand to SEQ ID NO: 2466602
cucuggcauagaauuauau

SEQ ID NO: 2466604 - RNA, 19 nt, Artificial Sequence
  Description of Artificial Sequence: Synthetic oligonucleotide
  Sense strand starting at position 1296 of SEQ ID NO: 1887363
ggaaaucacuugcuaaauu

SEQ ID NO: 2466605 - RNA, 19 nt, Artificial Sequence
  Description of Artificial Sequence: Synthetic oligonucleotide
  Antisense strand to SEQ ID NO: 2466604
aauuuagcaagugauuucc

SEQ ID NO: 2466606 - RNA, 19 nt, Artificial Sequence
  Description of Artificial Sequence: Synthetic oligonucleotide
  Sense strand starting at position 1582 of SEQ ID NO: 1887363
augcaucugauauggaagu

SEQ ID NO: 2466607 - RNA, 19 nt, Artificial Sequence
  Description of Artificial Sequence: Synthetic oligonucleotide
  Antisense strand to SEQ ID NO: 2466606
acuuccauaucagaugcau

SEQ ID NO: 2466608 - RNA, 19 nt, Artificial Sequence
  Description of Artificial Sequence: Synthetic oligonucleotide
  Sense strand starting at position 1610 of SEQ ID NO: 1887363
ggugucccaccagaauauu

SEQ ID NO: 2466609 - RNA, 19 nt, Artificial Sequence
  Description of Artificial Sequence: Synthetic oligonucleotide
  Antisense strand to SEQ ID NO: 2466608
aauauucuggugggacacc

SEQ ID NO: 2466610 - RNA, 19 nt, Artificial Sequence
  Description of Artificial Sequence: Synthetic oligonucleotide
  Sense strand starting at position 1712 of SEQ ID NO: 1887363
ggacuuaaauuaguuauga

SEQ ID NO: 2466611 - RNA, 19 nt, Artificial Sequence
  Description of Artificial Sequence: Synthetic oligonucleotide
  Antisense strand to SEQ ID NO: 2466610
ucauaacuaauuuaagucc

SEQ ID NO: 2466612 - RNA, 19 nt, Artificial Sequence
  Description of Artificial Sequence: Synthetic oligonucleotide
  Sense strand starting at position 1806 of SEQ ID NO: 1887363
acauaaugcuauuccagag

SEQ ID NO: 2466613 - RNA, 19 nt, Artificial Sequence
  Description of Artificial Sequence: Synthetic oligonucleotide
  Antisense strand to SEQ ID NO: 2466612
cucuggaauagcauuaugu

SEQ ID NO: 2466614 - RNA, 19 nt, Artificial Sequence
  Description of Artificial Sequence: Synthetic oligonucleotide
  Sense strand starting at position 1812 of SEQ ID NO: 1887363
ugcuauuccagaggcuaga

SEQ ID NO: 2466615 - RNA, 19 nt, Artificial Sequence
  Description of Artificial Sequence: Synthetic oligonucleotide
  Antisense strand to SEQ ID NO: 2466614
ucuagccucuggaauagca

SEQ ID NO: 2466616 - RNA, 19 nt, Artificial Sequence
  Description of Artificial Sequence: Synthetic oligonucleotide
  Sense strand starting at position 1867 of SEQ ID NO: 1887363
uuuggaguccuccaaauac

SEQ ID NO: 2466617 - RNA, 19 nt, Artificial Sequence
  Description of Artificial Sequence: Synthetic oligonucleotide
  Antisense strand to SEQ ID NO: 2466616
guauuuggaggacuccaaa

SEQ ID NO: 2466618 - RNA, 19 nt, Artificial Sequence
  Description of Artificial Sequence: Synthetic oligonucleotide
  Sense strand starting at position 1989 of SEQ ID NO: 1887363
uugcuugagagccauuaga

SEQ ID NO: 2466619 - RNA, 19 nt, Artificial Sequence
  Description of Artificial Sequence: Synthetic oligonucleotide
  Antisense strand to SEQ ID NO: 2466618
ucuaauggcucucaagcaa

SEQ ID NO: 2466620 - RNA, 19 nt, Artificial Sequence
  Description of Artificial Sequence: Synthetic oligonucleotide
  Sense strand starting at position 1997 of SEQ ID NO: 1887363
gagccauuagaacgcauuu

SEQ ID NO: 2466621 - RNA, 19 nt, Artificial Sequence
  Description of Artificial Sequence: Synthetic oligonucleotide
  Antisense strand to SEQ ID NO: 2466620
aaaugcguucuaauggcuc

SEQ ID NO: 2466622 - RNA, 19 nt, Artificial Sequence
  Description of Artificial Sequence: Synthetic oligonucleotide
  Sense strand starting at position 2015 of SEQ ID NO: 1887363
uuuggaacgguuuauuaug

SEQ ID NO: 2466623 - RNA, 19 nt, Artificial Sequence
  Description of Artificial Sequence: Synthetic oligonucleotide
  Antisense strand to SEQ ID NO: 2466622
cauaauaaaccguuccaaa

SEQ ID NO: 2466624 - RNA, 19 nt, Artificial Sequence
  Description of Artificial Sequence: Synthetic oligonucleotide
  Sense strand starting at position 2043 of SEQ ID NO: 1887363
ccauuacuggaaugcuaaa

SEQ ID NO: 2466625 - RNA, 19 nt, Artificial Sequence
  Description of Artificial Sequence: Synthetic oligonucleotide
  Antisense strand to SEQ ID NO: 2466624
uuuagcauuccaguaaugg

SEQ ID NO: 2466626 - RNA, 19 nt, Artificial Sequence
  Description of Artificial Sequence: Synthetic oligonucleotide
  Sense strand starting at position 2179 of SEQ ID NO: 1887363
ccgacuagccaacaucaua

SEQ ID NO: 2466627 - RNA, 19 nt, Artificial Sequence
  Description of Artificial Sequence: Synthetic oligonucleotide
  Antisense strand to SEQ ID NO: 2466626
uaugauguuggcuagucgg

SEQ ID NO: 2466628 - RNA, 19 nt, Artificial Sequence
  Description of Artificial Sequence: Synthetic oligonucleotide
  Sense strand starting at position 2281 of SEQ ID NO: 1887363
ucaugugaguuugccauuu

SEQ ID NO: 2466629 - RNA, 19 nt, Artificial Sequence
  Description of Artificial Sequence: Synthetic oligonucleotide
  Antisense strand to SEQ ID NO: 2466628
aaauggcaaacucacauga

SEQ ID NO: 2466630 - RNA, 19 nt, Artificial Sequence
  Description of Artificial Sequence: Synthetic oligonucleotide
  Sense strand starting at position 2874 of SEQ ID NO: 1887363
gcuguuugugguguuaugu

SEQ ID NO: 2466631 - RNA, 19 nt, Artificial Sequence
  Description of Artificial Sequence: Synthetic oligonucleotide
  Antisense strand to SEQ ID NO: 2466630
acauaacaccacaaacagc

SEQ ID NO: 2466632 - RNA, 19 nt, Artificial Sequence
  Description of Artificial Sequence: Synthetic oligonucleotide
  Sense strand starting at position 2875 of SEQ ID NO: 1887363
cuguuugugguguuauguu

SEQ ID NO: 2466633 - RNA, 19 nt, Artificial Sequence
  Description of Artificial Sequence: Synthetic oligonucleotide
  Antisense strand to SEQ ID NO: 2466632
aacauaacaccacaaacag

SEQ ID NO: 2466634 - RNA, 19 nt, Artificial Sequence
  Description of Artificial Sequence: Synthetic oligonucleotide
  Sense strand starting at position 2928 of SEQ ID NO: 1887363
ccggaugccacauagauau

SEQ ID NO: 2466635 - RNA, 19 nt, Artificial Sequence
  Description of Artificial Sequence: Synthetic oligonucleotide
  Antisense strand to SEQ ID NO: 2466634
auaucuauguggcauccgg

SEQ ID NO: 2466636 - RNA, 19 nt, Artificial Sequence
  Description of Artificial Sequence: Synthetic oligonucleotide
  Sense strand starting at position 2975 of SEQ ID NO: 1887363
cuggaugugcaauggauau

SEQ ID NO: 2466637 - RNA, 19 nt, Artificial Sequence
  Description of Artificial Sequence: Synthetic oligonucleotide
  Antisense strand to SEQ ID NO: 2466636
auauccauugcacauccag

SEQ ID NO: 2466638 - RNA, 19 nt, Artificial Sequence
  Description of Artificial Sequence: Synthetic oligonucleotide
  Sense strand starting at position 2986 of SEQ ID NO: 1887363
auggauaucuuugcaucaa

SEQ ID NO: 2466639 - RNA, 19 nt, Artificial Sequence
  Description of Artificial Sequence: Synthetic oligonucleotide
  Antisense strand to SEQ ID NO: 2466638
uugaugcaaagauauccau

SEQ ID NO: 2466640 - RNA, 19 nt, Artificial Sequence
  Description of Artificial Sequence: Synthetic oligonucleotide
  Sense strand starting at position 3446 of SEQ ID NO: 1887363
agcuuugaagucuggaauu

SEQ ID NO: 2466641 - RNA, 19 nt, Artificial Sequence
  Description of Artificial Sequence: Synthetic oligonucleotide
  Antisense strand to SEQ ID NO: 2466640
aauuccagacuucaaagcu

SEQ ID NO: 2466642 - RNA, 19 nt, Artificial Sequence
  Description of Artificial Sequence: Synthetic oligonucleotide
  Sense strand starting at position 3502 of SEQ ID NO: 1887363
ugugaagaaucccucauua

SEQ ID NO: 2466643 - RNA, 19 nt, Artificial Sequence
  Description of Artificial Sequence: Synthetic oligonucleotide
  Antisense strand to SEQ ID NO: 2466642
uaaugagggauucuucaca

SEQ ID NO: 2466644 - RNA, 19 nt, Artificial Sequence
  Description of Artificial Sequence: Synthetic oligonucleotide
  Sense strand starting at position 3531 of SEQ ID NO: 1887363
ccugcaauauuugaaagga

SEQ ID NO: 2466645 - RNA, 19 nt, Artificial Sequence
  Description of Artificial Sequence: Synthetic oligonucleotide
  Antisense strand to SEQ ID NO: 2466644
uccuuucaaauauugcagg

SEQ ID NO: 2466646 - RNA, 19 nt, Artificial Sequence
  Description of Artificial Sequence: Synthetic oligonucleotide
  Sense strand starting at position 3735 of SEQ ID NO: 1887363
augacuggucgugacuaua

SEQ ID NO: 2466647 - RNA, 19 nt, Artificial Sequence
  Description of Artificial Sequence: Synthetic oligonucleotide
  Antisense strand to SEQ ID NO: 2466646
uauagucacgaccagucau

SEQ ID NO: 2466648 - RNA, 19 nt, Artificial Sequence
  Description of Artificial Sequence: Synthetic oligonucleotide
  Sense strand starting at position 3738 of SEQ ID NO: 1887363
acuggucgugacuauagaa

SEQ ID NO: 2466649 - RNA, 19 nt, Artificial Sequence
  Description of Artificial Sequence: Synthetic oligonucleotide
  Antisense strand to SEQ ID NO: 2466648
uucuauagucacgaccagu

SEQ ID NO: 2466650 - RNA, 19 nt, Artificial Sequence
  Description of Artificial Sequence: Synthetic oligonucleotide
  Sense strand starting at position 3750 of SEQ ID NO: 1887363
uauagaaugccuggguaaa

SEQ ID NO: 2466651 - RNA, 19 nt, Artificial Sequence
  Description of Artificial Sequence: Synthetic oligonucleotide
  Antisense strand to SEQ ID NO: 2466650
uuuacccaggcauucuaua

SEQ ID NO: 2466652 - RNA, 19 nt, Artificial Sequence
  Description of Artificial Sequence: Synthetic oligonucleotide
  Sense strand starting at position 3751 of SEQ ID NO: 1887363
auagaaugccuggguaaac

SEQ ID NO: 2466653 - RNA, 19 nt, Artificial Sequence
  Description of Artificial Sequence: Synthetic oligonucleotide
  Antisense strand to SEQ ID NO: 2466652
guuuacccaggcauucuau

SEQ ID NO: 2466654 - RNA, 19 nt, Artificial Sequence
  Description of Artificial Sequence: Synthetic oligonucleotide
  Sense strand starting at position 3761 of SEQ ID NO: 1887363
uggguaaacccacgaucau

SEQ ID NO: 2466655 - RNA, 19 nt, Artificial Sequence
  Description of Artificial Sequence: Synthetic oligonucleotide
  Antisense strand to SEQ ID NO: 2466654
augaucguggguuuaccca

SEQ ID NO: 2466656 - RNA, 19 nt, Artificial Sequence
  Description of Artificial Sequence: Synthetic oligonucleotide
  Sense strand starting at position 135 of SEQ ID NO: 1887364
gaggguuugauccaugucu

SEQ ID NO: 2466657 - RNA, 19 nt, Artificial Sequence
  Description of Artificial Sequence: Synthetic oligonucleotide
  Antisense strand to SEQ ID NO: 2466656
agacauggaucaaacccuc

SEQ ID NO: 2466658 - RNA, 19 nt, Artificial Sequence
  Description of Artificial Sequence: Synthetic oligonucleotide
  Sense strand starting at position 165 of SEQ ID NO: 1887364
uuacauauuugugcuaggu

SEQ ID NO: 2466659 - RNA, 19 nt, Artificial Sequence
  Description of Artificial Sequence: Synthetic oligonucleotide
  Antisense strand to SEQ ID NO: 2466658
accuagcacaaauauguaa

SEQ ID NO: 2466660 - RNA, 19 nt, Artificial Sequence
  Description of Artificial Sequence: Synthetic oligonucleotide
  Sense strand starting at position 221 of SEQ ID NO: 1887364
guggucaaugcacaggauu

SEQ ID NO: 2466661 - RNA, 19 nt, Artificial Sequence
  Description of Artificial Sequence: Synthetic oligonucleotide
  Antisense strand to SEQ ID NO: 2466660
aauccugugcauugaccac

SEQ ID NO: 2466662 - RNA, 19 nt, Artificial Sequence
  Description of Artificial Sequence: Synthetic oligonucleotide
  Sense strand starting at position 223 of SEQ ID NO: 1887364
ggucaaugcacaggauuaa

SEQ ID NO: 2466663 - RNA, 19 nt, Artificial Sequence
  Description of Artificial Sequence: Synthetic oligonucleotide
  Antisense strand to SEQ ID NO: 2466662
uuaauccugugcauugacc

SEQ ID NO: 2466664 - RNA, 19 nt, Artificial Sequence
  Description of Artificial Sequence: Synthetic oligonucleotide
  Sense strand starting at position 260 of SEQ ID NO: 1887364
uguaauuauuugcugaggu

SEQ ID NO: 2466665 - RNA, 19 nt, Artificial Sequence
  Description of Artificial Sequence: Synthetic oligonucleotide
  Antisense strand to SEQ ID NO: 2466664
accucagcaaauaauuaca

SEQ ID NO: 2466666 - RNA, 19 nt, Artificial Sequence
  Description of Artificial Sequence: Synthetic oligonucleotide
  Sense strand starting at position 299 of SEQ ID NO: 1887364
gacauacacuggcuuauga

SEQ ID NO: 2466667 - RNA, 19 nt, Artificial Sequence
  Description of Artificial Sequence: Synthetic oligonucleotide
  Antisense strand to SEQ ID NO: 2466666
ucauaagccaguguauguc

SEQ ID NO: 2466668 - RNA, 19 nt, Artificial Sequence
  Description of Artificial Sequence: Synthetic oligonucleotide
  Sense strand starting at position 310 of SEQ ID NO: 1887364
gcuuaugaucaggguugaa

SEQ ID NO: 2466669 - RNA, 19 nt, Artificial Sequence
  Description of Artificial Sequence: Synthetic oligonucleotide
  Antisense strand to SEQ ID NO: 2466668
uucaacccugaucauaagc

SEQ ID NO: 2466670 - RNA, 19 nt, Artificial Sequence
  Description of Artificial Sequence: Synthetic oligonucleotide
  Sense strand starting at position 338 of SEQ ID NO: 1887364
cacuaaaugugguuuacag

SEQ ID NO: 2466671 - RNA, 19 nt, Artificial Sequence
  Description of Artificial Sequence: Synthetic oligonucleotide
  Antisense strand to SEQ ID NO: 2466670
cuguaaaccacauuuagug

SEQ ID NO: 2466672 - RNA, 19 nt, Artificial Sequence
  Description of Artificial Sequence: Synthetic oligonucleotide
  Sense strand starting at position 340 of SEQ ID NO: 1887364
cuaaaugugguuuacagua

SEQ ID NO: 2466673 - RNA, 19 nt, Artificial Sequence
  Description of Artificial Sequence: Synthetic oligonucleotide
  Antisense strand to SEQ ID NO: 2466672
uacuguaaaccacauuuag

SEQ ID NO: 2466674 - RNA, 19 nt, Artificial Sequence
  Description of Artificial Sequence: Synthetic oligonucleotide
  Sense strand starting at position 350 of SEQ ID NO: 1887364
uuuacaguauaguccagaa

SEQ ID NO: 2466675 - RNA, 19 nt, Artificial Sequence
  Description of Artificial Sequence: Synthetic oligonucleotide
  Antisense strand to SEQ ID NO: 2466674
uucuggacuauacuguaaa

SEQ ID NO: 2466676 - RNA, 19 nt, Artificial Sequence
  Description of Artificial Sequence: Synthetic oligonucleotide
  Sense strand starting at position 380 of SEQ ID NO: 1887364
acguaucugagauagaagu

SEQ ID NO: 2466677 - RNA, 19 nt, Artificial Sequence
  Description of Artificial Sequence: Synthetic oligonucleotide
  Antisense strand to SEQ ID NO: 2466676
acuucuaucucagauacgu

SEQ ID NO: 2466678 - RNA, 19 nt, Artificial Sequence
  Description of Artificial Sequence: Synthetic oligonucleotide
  Sense strand starting at position 974 of SEQ ID NO: 1887364
aaguauauauccgugaaua

SEQ ID NO: 2466679 - RNA, 19 nt, Artificial Sequence
  Description of Artificial Sequence: Synthetic oligonucleotide
  Antisense strand to SEQ ID NO: 2466678
uauucacggauauauacuu

SEQ ID NO: 2466680 - RNA, 19 nt, Artificial Sequence
  Description of Artificial Sequence: Synthetic oligonucleotide
  Sense strand starting at position 976 of SEQ ID NO: 1887364
guauauauccgugaauauu

SEQ ID NO: 2466681 - RNA, 19 nt, Artificial Sequence
  Description of Artificial Sequence: Synthetic oligonucleotide
  Antisense strand to SEQ ID NO: 2466680
aauauucacggauauauac

SEQ ID NO: 2466682 - RNA, 19 nt, Artificial Sequence
  Description of Artificial Sequence: Synthetic oligonucleotide
  Sense strand starting at position 1020 of SEQ ID NO: 1887364
acaagauuccuuuaagugu

SEQ ID NO: 2466683 - RNA, 19 nt, Artificial Sequence
  Description of Artificial Sequence: Synthetic oligonucleotide
  Antisense strand to SEQ ID NO: 2466682
acacuuaaaggaaucuugu

SEQ ID NO: 2466684 - RNA, 19 nt, Artificial Sequence
  Description of Artificial Sequence: Synthetic oligonucleotide
  Sense strand starting at position 1023 of SEQ ID NO: 1887364
agauuccuuuaaguguuaa

SEQ ID NO: 2466685 - RNA, 19 nt, Artificial Sequence
  Description of Artificial Sequence: Synthetic oligonucleotide
  Antisense strand to SEQ ID NO: 2466684
uuaacacuuaaaggaaucu

SEQ ID NO: 2466686 - RNA, 19 nt, Artificial Sequence
  Description of Artificial Sequence: Synthetic oligonucleotide
  Sense strand starting at position 1163 of SEQ ID NO: 1887364
ugguacauauaucuggaau

SEQ ID NO: 2466687 - RNA, 19 nt, Artificial Sequence
  Description of Artificial Sequence: Synthetic oligonucleotide
  Antisense strand to SEQ ID NO: 2466686
auuccagauauauguacca

SEQ ID NO: 2466688 - RNA, 19 nt, Artificial Sequence
  Description of Artificial Sequence: Synthetic oligonucleotide
  Sense strand starting at position 1304 of SEQ ID NO: 1887364
ggguaauauuuagggaaau

SEQ ID NO: 2466689 - RNA, 19 nt, Artificial Sequence
  Description of Artificial Sequence: Synthetic oligonucleotide
  Antisense strand to SEQ ID NO: 2466688
auuucccuaaauauuaccc

SEQ ID NO: 2466690 - RNA, 19 nt, Artificial Sequence
  Description of Artificial Sequence: Synthetic oligonucleotide
  Sense strand starting at position 1305 of SEQ ID NO: 1887364
gguaauauuuagggaaaua

SEQ ID NO: 2466691 - RNA, 19 nt, Artificial Sequence
  Description of Artificial Sequence: Synthetic oligonucleotide
  Antisense strand to SEQ ID NO: 2466690
uauuucccuaaauauuacc

SEQ ID NO: 2466692 - RNA, 19 nt, Artificial Sequence
  Description of Artificial Sequence: Synthetic oligonucleotide
  Sense strand starting at position 1720 of SEQ ID NO: 1887364
gcguccaguccuuucuuau

SEQ ID NO: 2466693 - RNA, 19 nt, Artificial Sequence
  Description of Artificial Sequence: Synthetic oligonucleotide
  Antisense strand to SEQ ID NO: 2466692
auaagaaaggacuggacgc

SEQ ID NO: 2466694 - RNA, 19 nt, Artificial Sequence
  Description of Artificial Sequence: Synthetic oligonucleotide
  Sense strand starting at position 1743 of SEQ ID NO: 1887364
gcagaaugauauucucucu

SEQ ID NO: 2466695 - RNA, 19 nt, Artificial Sequence
  Description of Artificial Sequence: Synthetic oligonucleotide
  Antisense strand to SEQ ID NO: 2466694
agagagaauaucauucugc

SEQ ID NO: 2466696 - RNA, 19 nt, Artificial Sequence
  Description of Artificial Sequence: Synthetic oligonucleotide
  Sense strand starting at position 1878 of SEQ ID NO: 1887364
guaagaaacugcuucuuga

SEQ ID NO: 2466697 - RNA, 19 nt, Artificial Sequence
  Description of Artificial Sequence: Synthetic oligonucleotide
  Antisense strand to SEQ ID NO: 2466696
ucaagaagcaguuucuuac

SEQ ID NO: 2466698 - RNA, 19 nt, Artificial Sequence
  Description of Artificial Sequence: Synthetic oligonucleotide
  Sense strand starting at position 2001 of SEQ ID NO: 1887364
ucagaaauguaguuuccca

SEQ ID NO: 2466699 - RNA, 19 nt, Artificial Sequence
  Description of Artificial Sequence: Synthetic oligonucleotide
  Antisense strand to SEQ ID NO: 2466698
ugggaaacuacauuucuga

SEQ ID NO: 2466700 - RNA, 19 nt, Artificial Sequence
  Description of Artificial Sequence: Synthetic oligonucleotide
  Sense strand starting at position 2189 of SEQ ID NO: 1887364
cccaguccugcagaguaga

SEQ ID NO: 2466701 - RNA, 19 nt, Artificial Sequence
  Description of Artificial Sequence: Synthetic oligonucleotide
  Antisense strand to SEQ ID NO: 2466700
ucuacucugcaggacuggg

SEQ ID NO: 2466702 - RNA, 19 nt, Artificial Sequence
  Description of Artificial Sequence: Synthetic oligonucleotide
  Sense strand starting at position 2240 of SEQ ID NO: 1887364
agacuuaacugaguauacu

SEQ ID NO: 2466703 - RNA, 19 nt, Artificial Sequence
  Description of Artificial Sequence: Synthetic oligonucleotide
  Antisense strand to SEQ ID NO: 2466702
aguauacucaguuaagucu

SEQ ID NO: 2466704 - RNA, 19 nt, Artificial Sequence
  Description of Artificial Sequence: Synthetic oligonucleotide
  Sense strand starting at position 2249 of SEQ ID NO: 1887364
ugaguauacugggcucaau

SEQ ID NO: 2466705 - RNA, 19 nt, Artificial Sequence
  Description of Artificial Sequence: Synthetic oligonucleotide
  Antisense strand to SEQ ID NO: 2466704
auugagcccaguauacuca

SEQ ID NO: 2466706 - RNA, 19 nt, Artificial Sequence
  Description of Artificial Sequence: Synthetic oligonucleotide
  Sense strand starting at position 2252 of SEQ ID NO: 1887364
guauacugggcucaaucua

SEQ ID NO: 2466707 - RNA, 19 nt, Artificial Sequence
  Description of Artificial Sequence: Synthetic oligonucleotide
  Antisense strand to SEQ ID NO: 2466706
uagauugagcccaguauac

SEQ ID NO: 2466708 - RNA, 19 nt, Artificial Sequence
  Description of Artificial Sequence: Synthetic oligonucleotide
  Sense strand starting at position 2316 of SEQ ID NO: 1887364
auagcuauugaugacuuau

SEQ ID NO: 2466709 - RNA, 19 nt, Artificial Sequence
  Description of Artificial Sequence: Synthetic oligonucleotide
  Antisense strand to SEQ ID NO: 2466708
auaagucaucaauagcuau

SEQ ID NO: 2466710 - RNA, 19 nt, Artificial Sequence
  Description of Artificial Sequence: Synthetic oligonucleotide
  Sense strand starting at position 2456 of SEQ ID NO: 1887364
guuaucacccacuauggua

SEQ ID NO: 2466711 - RNA, 19 nt, Artificial Sequence
  Description of Artificial Sequence: Synthetic oligonucleotide
  Antisense strand to SEQ ID NO: 2466710
uaccauagugggugauaac

SEQ ID NO: 2466712 - RNA, 19 nt, Artificial Sequence
  Description of Artificial Sequence: Synthetic oligonucleotide
  Sense strand starting at position 2711 of SEQ ID NO: 1887364
uagagauauugugcuuaua

SEQ ID NO: 2466713 - RNA, 19 nt, Artificial Sequence
  Description of Artificial Sequence: Synthetic oligonucleotide
  Antisense strand to SEQ ID NO: 2466712
uauaagcacaauaucucua

SEQ ID NO: 2466714 - RNA, 19 nt, Artificial Sequence
  Description of Artificial Sequence: Synthetic oligonucleotide
  Sense strand starting at position 2713 of SEQ ID NO: 1887364
gagauauugugcuuauaau

SEQ ID NO: 2466715 - RNA, 19 nt, Artificial Sequence
  Description of Artificial Sequence: Synthetic oligonucleotide
  Antisense strand to SEQ ID NO: 2466714
auuauaagcacaauaucuc

SEQ ID NO: 2466716 - RNA, 19 nt, Artificial Sequence
  Description of Artificial Sequence: Synthetic oligonucleotide
  Sense strand starting at position 3033 of SEQ ID NO: 1887364
aguagagaaucugcucaaa

SEQ ID NO: 2466717 - RNA, 19 nt, Artificial Sequence
  Description of Artificial Sequence: Synthetic oligonucleotide
  Antisense strand to SEQ ID NO: 2466716
uuugagcagauucucuacu

SEQ ID NO: 2466718 - RNA, 19 nt, Artificial Sequence
  Description of Artificial Sequence: Synthetic oligonucleotide
  Sense strand starting at position 3035 of SEQ ID NO: 1887364
uagagaaucugcucaaagu

SEQ ID NO: 2466719 - RNA, 19 nt, Artificial Sequence
  Description of Artificial Sequence: Synthetic oligonucleotide
  Antisense strand to SEQ ID NO: 2466718
acuuugagcagauucucua

SEQ ID NO: 2466720 - RNA, 19 nt, Artificial Sequence
  Description of Artificial Sequence: Synthetic oligonucleotide
  Sense strand starting at position 3036 of SEQ ID NO: 1887364
agagaaucugcucaaaguc

SEQ ID NO: 2466721 - RNA, 19 nt, Artificial Sequence
  Description of Artificial Sequence: Synthetic oligonucleotide
  Antisense strand to SEQ ID NO: 2466720
gacuuugagcagauucucu

SEQ ID NO: 2466722 - RNA, 19 nt, Artificial Sequence
  Description of Artificial Sequence: Synthetic oligonucleotide
  Sense strand starting at position 3045 of SEQ ID NO: 1887364
gcucaaagucuccauggau

SEQ ID NO: 2466723 - RNA, 19 nt, Artificial Sequence
  Description of Artificial Sequence: Synthetic oligonucleotide
  Antisense strand to SEQ ID NO: 2466722
auccauggagacuuugagc

SEQ ID NO: 2466724 - RNA, 19 nt, Artificial Sequence
  Description of Artificial Sequence: Synthetic oligonucleotide
  Sense strand starting at position 3059 of SEQ ID NO: 1887364
uggaucauuguugauguca

SEQ ID NO: 2466725 - RNA, 19 nt, Artificial Sequence
  Description of Artificial Sequence: Synthetic oligonucleotide
  Antisense strand to SEQ ID NO: 2466724
ugacaucaacaaugaucca

SEQ ID NO: 2466726 - RNA, 19 nt, Artificial Sequence
  Description of Artificial Sequence: Synthetic oligonucleotide
  Sense strand starting at position 3470 of SEQ ID NO: 1887364
uugaauggcccuuauauau

SEQ ID NO: 2466727 - RNA, 19 nt, Artificial Sequence
  Description of Artificial Sequence: Synthetic oligonucleotide
  Antisense strand to SEQ ID NO: 2466726
auauauaagggccauucaa

SEQ ID NO: 2466728 - RNA, 19 nt, Artificial Sequence
  Description of Artificial Sequence: Synthetic oligonucleotide
  Sense strand starting at position 3832 of SEQ ID NO: 1887364
acaguuugcuaacuaaaga

SEQ ID NO: 2466729 - RNA, 19 nt, Artificial Sequence
  Description of Artificial Sequence: Synthetic oligonucleotide
  Antisense strand to SEQ ID NO: 2466728
ucuuuaguuagcaaacugu

SEQ ID NO: 2466730 - RNA, 19 nt, Artificial Sequence
  Description of Artificial Sequence: Synthetic oligonucleotide
  Sense strand starting at position 3874 of SEQ ID NO: 1887364
augcucaaagucuagauua

SEQ ID NO: 2466731 - RNA, 19 nt, Artificial Sequence
  Description of Artificial Sequence: Synthetic oligonucleotide
  Antisense strand to SEQ ID NO: 2466730
uaaucuagacuuugagcau

SEQ ID NO: 2466732 - RNA, 19 nt, Artificial Sequence
  Description of Artificial Sequence: Synthetic oligonucleotide
  Sense strand starting at position 3876 of SEQ ID NO: 1887364
gcucaaagucuagauuaua

SEQ ID NO: 2466733 - RNA, 19 nt, Artificial Sequence
  Description of Artificial Sequence: Synthetic oligonucleotide
  Antisense strand to SEQ ID NO: 2466732
uauaaucuagacuuugagc

SEQ ID NO: 2466734 - RNA, 19 nt, Artificial Sequence
  Description of Artificial Sequence: Synthetic oligonucleotide
  Sense strand starting at position 3959 of SEQ ID NO: 1887364
cccguaugaauauggauaa

SEQ ID NO: 2466735 - RNA, 19 nt, Artificial Sequence
  Description of Artificial Sequence: Synthetic oligonucleotide
  Antisense strand to SEQ ID NO: 2466734
uuauccauauucauacggg

SEQ ID NO: 2466736 - RNA, 19 nt, Artificial Sequence
  Description of Artificial Sequence: Synthetic oligonucleotide
  Sense strand starting at position 16 of SEQ ID NO: 1887365
aaggcuaacucuguugaca

SEQ ID NO: 2466737 - RNA, 19 nt, Artificial Sequence
  Description of Artificial Sequence: Synthetic oligonucleotide
  Antisense strand to SEQ ID NO: 2466736
ugucaacagaguuagccuu

SEQ ID NO: 2466738 - RNA, 19 nt, Artificial Sequence
  Description of Artificial Sequence: Synthetic oligonucleotide
  Sense strand starting at position 19 of SEQ ID NO: 1887365
gcuaacucuguugacaaau

SEQ ID NO: 2466739 - RNA, 19 nt, Artificial Sequence
  Description of Artificial Sequence: Synthetic oligonucleotide
  Antisense strand to SEQ ID NO: 2466738
auuugucaacagaguuagc

SEQ ID NO: 2466740 - RNA, 19 nt, Artificial Sequence
  Description of Artificial Sequence: Synthetic oligonucleotide
  Sense strand starting at position 64 of SEQ ID NO: 1887365
gccagaaugucauuggaaa

SEQ ID NO: 2466741 - RNA, 19 nt, Artificial Sequence
  Description of Artificial Sequence: Synthetic oligonucleotide
  Antisense strand to SEQ ID NO: 2466740
uuuccaaugacauucuggc

SEQ ID NO: 2466742 - RNA, 19 nt, Artificial Sequence
  Description of Artificial Sequence: Synthetic oligonucleotide
  Sense strand starting at position 65 of SEQ ID NO: 1887365
ccagaaugucauuggaaac

SEQ ID NO: 2466743 - RNA, 19 nt, Artificial Sequence
  Description of Artificial Sequence: Synthetic oligonucleotide
  Antisense strand to SEQ ID NO: 2466742
guuuccaaugacauucugg

SEQ ID NO: 2466744 - RNA, 19 nt, Artificial Sequence
  Description of Artificial Sequence: Synthetic oligonucleotide
  Sense strand starting at position 230 of SEQ ID NO: 1887365
guaacugugaguuacugga

SEQ ID NO: 2466745 - RNA, 19 nt, Artificial Sequence
  Description of Artificial Sequence: Synthetic oligonucleotide
  Antisense strand to SEQ ID NO: 2466744
uccaguaacucacaguuac

SEQ ID NO: 2466746 - RNA, 19 nt, Artificial Sequence
  Description of Artificial Sequence: Synthetic oligonucleotide
  Sense strand starting at position 232 of SEQ ID NO: 1887365
aacugugaguuacuggaaa

SEQ ID NO: 2466747 - RNA, 19 nt, Artificial Sequence
  Description of Artificial Sequence: Synthetic oligonucleotide
  Antisense strand to SEQ ID NO: 2466746
uuuccaguaacucacaguu

SEQ ID NO: 2466748 - RNA, 19 nt, Artificial Sequence
  Description of Artificial Sequence: Synthetic oligonucleotide
  Sense strand starting at position 234 of SEQ ID NO: 1887365
cugugaguuacuggaaauu

SEQ ID NO: 2466749 - RNA, 19 nt, Artificial Sequence
  Description of Artificial Sequence: Synthetic oligonucleotide
  Antisense strand to SEQ ID NO: 2466748
aauuuccaguaacucacag

SEQ ID NO: 2466750 - RNA, 19 nt, Artificial Sequence
  Description of Artificial Sequence: Synthetic oligonucleotide
  Sense strand starting at position 279 of SEQ ID NO: 1887365
gguucucccugugucauuu

SEQ ID NO: 2466751 - RNA, 19 nt, Artificial Sequence
  Description of Artificial Sequence: Synthetic oligonucleotide
  Antisense strand to SEQ ID NO: 2466750
aaaugacacagggagaacc

SEQ ID NO: 2466752 - RNA, 19 nt, Artificial Sequence
  Description of Artificial Sequence: Synthetic oligonucleotide
  Sense strand starting at position 321 of SEQ ID NO: 1887365
auauuauuggaucaggugu

SEQ ID NO: 2466753 - RNA, 19 nt, Artificial Sequence
  Description of Artificial Sequence: Synthetic oligonucleotide
  Antisense strand to SEQ ID NO: 2466752
acaccugauccaauaauau

SEQ ID NO: 2466754 - RNA, 19 nt, Artificial Sequence
  Description of Artificial Sequence: Synthetic oligonucleotide
  Sense strand starting at position 436 of SEQ ID NO: 1887365
auaccauuaccauagugua

SEQ ID NO: 2466755 - RNA, 19 nt, Artificial Sequence
  Description of Artificial Sequence: Synthetic oligonucleotide
  Antisense strand to SEQ ID NO: 2466754
uacacuaugguaaugguau

SEQ ID NO: 2466756 - RNA, 19 nt, Artificial Sequence
  Description of Artificial Sequence: Synthetic oligonucleotide
  Sense strand starting at position 938 of SEQ ID NO: 1887365
gugauaccucagggaagcu

SEQ ID NO: 2466757 - RNA, 19 nt, Artificial Sequence
  Description of Artificial Sequence: Synthetic oligonucleotide
  Antisense strand to SEQ ID NO: 2466756
agcuucccugagguaucac

SEQ ID NO: 2466758 - RNA, 19 nt, Artificial Sequence
  Description of Artificial Sequence: Synthetic oligonucleotide
  Sense strand starting at position 1591 of SEQ ID NO: 1887365
aaugguaauugauuaaggu

SEQ ID NO: 2466759 - RNA, 19 nt, Artificial Sequence
  Description of Artificial Sequence: Synthetic oligonucleotide
  Antisense strand to SEQ ID NO: 2466758
accuuaaucaauuaccauu

SEQ ID NO: 2466760 - RNA, 19 nt, Artificial Sequence
  Description of Artificial Sequence: Synthetic oligonucleotide
  Sense strand starting at position 1629 of SEQ ID NO: 1887365
ggaggaaucuucuuucuau

SEQ ID NO: 2466761 - RNA, 19 nt, Artificial Sequence
  Description of Artificial Sequence: Synthetic oligonucleotide
  Antisense strand to SEQ ID NO: 2466760
auagaaagaagauuccucc

SEQ ID NO: 2466762 - RNA, 19 nt, Artificial Sequence
  Description of Artificial Sequence: Synthetic oligonucleotide
  Sense strand starting at position 1632 of SEQ ID NO: 1887365
ggaaucuucuuucuaugga

SEQ ID NO: 2466763 - RNA, 19 nt, Artificial Sequence
  Description of Artificial Sequence: Synthetic oligonucleotide
  Antisense strand to SEQ ID NO: 2466762
uccauagaaagaagauucc

SEQ ID NO: 2466764 - RNA, 19 nt, Artificial Sequence
  Description of Artificial Sequence: Synthetic oligonucleotide
  Sense strand starting at position 1831 of SEQ ID NO: 1887365
ggagacuccaagugguuau

SEQ ID NO: 2466765 - RNA, 19 nt, Artificial Sequence
  Description of Artificial Sequence: Synthetic oligonucleotide
  Antisense strand to SEQ ID NO: 2466764
auaaccacuuggagucucc

SEQ ID NO: 2466766 - RNA, 19 nt, Artificial Sequence
  Description of Artificial Sequence: Synthetic oligonucleotide
  Sense strand starting at position 1998 of SEQ ID NO: 1887365
auccauagguccuugcaaa

SEQ ID NO: 2466767 - RNA, 19 nt, Artificial Sequence
  Description of Artificial Sequence: Synthetic oligonucleotide
  Antisense strand to SEQ ID NO: 2466766
uuugcaaggaccuauggau

SEQ ID NO: 2466768 - RNA, 19 nt, Artificial Sequence
  Description of Artificial Sequence: Synthetic oligonucleotide
  Sense strand starting at position 2032 of SEQ ID NO: 1887365
aggauagaaucuuucuuuc

SEQ ID NO: 2466769 - RNA, 19 nt, Artificial Sequence
  Description of Artificial Sequence: Synthetic oligonucleotide
  Antisense strand to SEQ ID NO: 2466768
gaaagaaagauucuauccu

SEQ ID NO: 2466770 - RNA, 19 nt, Artificial Sequence
  Description of Artificial Sequence: Synthetic oligonucleotide
  Sense strand starting at position 2071 of SEQ ID NO: 1887365
accagauuccauugugaca

SEQ ID NO: 2466771 - RNA, 19 nt, Artificial Sequence
  Description of Artificial Sequence: Synthetic oligonucleotide
  Antisense strand to SEQ ID NO: 2466770
ugucacaauggaaucuggu

SEQ ID NO: 2466772 - RNA, 19 nt, Artificial Sequence
  Description of Artificial Sequence: Synthetic oligonucleotide
  Sense strand starting at position 2094 of SEQ ID NO: 1887365
caagucauggauugacaua

SEQ ID NO: 2466773 - RNA, 19 nt, Artificial Sequence
  Description of Artificial Sequence: Synthetic oligonucleotide
  Antisense strand to SEQ ID NO: 2466772
uaugucaauccaugacuug

SEQ ID NO: 2466774 - RNA, 19 nt, Artificial Sequence
  Description of Artificial Sequence: Synthetic oligonucleotide
  Sense strand starting at position 2175 of SEQ ID NO: 1887365
gugcuuucugugccuguaa

SEQ ID NO: 2466775 - RNA, 19 nt, Artificial Sequence
  Description of Artificial Sequence: Synthetic oligonucleotide
  Antisense strand to SEQ ID NO: 2466774
uuacaggcacagaaagcac

SEQ ID NO: 2466776 - RNA, 19 nt, Artificial Sequence
  Description of Artificial Sequence: Synthetic oligonucleotide
  Sense strand starting at position 2203 of SEQ ID NO: 1887365
uguccauguccacagauca

SEQ ID NO: 2466777 - RNA, 19 nt, Artificial Sequence
  Description of Artificial Sequence: Synthetic oligonucleotide
  Antisense strand to SEQ ID NO: 2466776
ugaucuguggacauggaca

SEQ ID NO: 2466778 - RNA, 19 nt, Artificial Sequence
  Description of Artificial Sequence: Synthetic oligonucleotide
  Sense strand starting at position 2210 of SEQ ID NO: 1887365
guccacagaucauucuaca

SEQ ID NO: 2466779 - RNA, 19 nt, Artificial Sequence
  Description of Artificial Sequence: Synthetic oligonucleotide
  Antisense strand to SEQ ID NO: 2466778
uguagaaugaucuguggac

SEQ ID NO: 2466780 - RNA, 19 nt, Artificial Sequence
  Description of Artificial Sequence: Synthetic oligonucleotide
  Sense strand starting at position 2348 of SEQ ID NO: 1887365
cuugguguaggguaaguau

SEQ ID NO: 2466781 - RNA, 19 nt, Artificial Sequence
  Description of Artificial Sequence: Synthetic oligonucleotide
  Antisense strand to SEQ ID NO: 2466780
auacuuacccuacaccaag

SEQ ID NO: 2466782 - RNA, 19 nt, Artificial Sequence
  Description of Artificial Sequence: Synthetic oligonucleotide
  Sense strand starting at position 2393 of SEQ ID NO: 1887365
uuaucagccauggagguua

SEQ ID NO: 2466783 - RNA, 19 nt, Artificial Sequence
  Description of Artificial Sequence: Synthetic oligonucleotide
  Antisense strand to SEQ ID NO: 2466782
uaaccuccauggcugauaa

SEQ ID NO: 2466784 - RNA, 19 nt, Artificial Sequence
  Description of Artificial Sequence: Synthetic oligonucleotide
  Sense strand starting at position 2436 of SEQ ID NO: 1887365
gcaggaguuccugagcuga

SEQ ID NO: 2466785 - RNA, 19 nt, Artificial Sequence
  Description of Artificial Sequence: Synthetic oligonucleotide
  Antisense strand to SEQ ID NO: 2466784
ucagcucaggaacuccugc

SEQ ID NO: 2466786 - RNA, 19 nt, Artificial Sequence
  Description of Artificial Sequence: Synthetic oligonucleotide
  Sense strand starting at position 2438 of SEQ ID NO: 1887365
aggaguuccugagcugaga

SEQ ID NO: 2466787 - RNA, 19 nt, Artificial Sequence
  Description of Artificial Sequence: Synthetic oligonucleotide
  Antisense strand to SEQ ID NO: 2466786
ucucagcucaggaacuccu

SEQ ID NO: 2466788 - RNA, 19 nt, Artificial Sequence
  Description of Artificial Sequence: Synthetic oligonucleotide
  Sense strand starting at position 2440 of SEQ ID NO: 1887365
gaguuccugagcugagaag

SEQ ID NO: 2466789 - RNA, 19 nt, Artificial Sequence
  Description of Artificial Sequence: Synthetic oligonucleotide
  Antisense strand to SEQ ID NO: 2466788
cuucucagcucaggaacuc

SEQ ID NO: 2466790 - RNA, 19 nt, Artificial Sequence
  Description of Artificial Sequence: Synthetic oligonucleotide
  Sense strand starting at position 2463 of SEQ ID NO: 1887365
aaaguaggguaaguauaau

SEQ ID NO: 2466791 - RNA, 19 nt, Artificial Sequence
  Description of Artificial Sequence: Synthetic oligonucleotide
  Antisense strand to SEQ ID NO: 2466790
auuauacuuacccuacuuu

SEQ ID NO: 2466792 - RNA, 19 nt, Artificial Sequence
  Description of Artificial Sequence: Synthetic oligonucleotide
  Sense strand starting at position 2803 of SEQ ID NO: 1887365
aaugaagacugagagacua

SEQ ID NO: 2466793 - RNA, 19 nt, Artificial Sequence
  Description of Artificial Sequence: Synthetic oligonucleotide
  Antisense strand to SEQ ID NO: 2466792
uagucucucagucuucauu

SEQ ID NO: 2466794 - RNA, 19 nt, Artificial Sequence
  Description of Artificial Sequence: Synthetic oligonucleotide
  Sense strand starting at position 2811 of SEQ ID NO: 1887365
cugagagacuacuauuuga

SEQ ID NO: 2466795 - RNA, 19 nt, Artificial Sequence
  Description of Artificial Sequence: Synthetic oligonucleotide
  Antisense strand to SEQ ID NO: 2466794
ucaaauaguagucucucag

SEQ ID NO: 2466796 - RNA, 19 nt, Artificial Sequence
  Description of Artificial Sequence: Synthetic oligonucleotide
  Sense strand starting at position 2818 of SEQ ID NO: 1887365
acuacuauuugagaaagac

SEQ ID NO: 2466797 - RNA, 19 nt, Artificial Sequence
  Description of Artificial Sequence: Synthetic oligonucleotide
  Antisense strand to SEQ ID NO: 2466796
gucuuucucaaauaguagu

SEQ ID NO: 2466798 - RNA, 19 nt, Artificial Sequence
  Description of Artificial Sequence: Synthetic oligonucleotide
  Sense strand starting at position 2982 of SEQ ID NO: 1887365
ccaagaagguaugucaaua

SEQ ID NO: 2466799 - RNA, 19 nt, Artificial Sequence
  Description of Artificial Sequence: Synthetic oligonucleotide
  Antisense strand to SEQ ID NO: 2466798
uauugacauaccuucuugg

SEQ ID NO: 2466800 - RNA, 19 nt, Artificial Sequence
  Description of Artificial Sequence: Synthetic oligonucleotide
  Sense strand starting at position 3107 of SEQ ID NO: 1887365
ugaucacuggcucacugau

SEQ ID NO: 2466801 - RNA, 19 nt, Artificial Sequence
  Description of Artificial Sequence: Synthetic oligonucleotide
  Antisense strand to SEQ ID NO: 2466800
aucagugagccagugauca

SEQ ID NO: 2466802 - RNA, 19 nt, Artificial Sequence
  Description of Artificial Sequence: Synthetic oligonucleotide
  Sense strand starting at position 3109 of SEQ ID NO: 1887365
aucacuggcucacugauau

SEQ ID NO: 2466803 - RNA, 19 nt, Artificial Sequence
  Description of Artificial Sequence: Synthetic oligonucleotide
  Antisense strand to SEQ ID NO: 2466802
auaucagugagccagugau

SEQ ID NO: 2466804 - RNA, 19 nt, Artificial Sequence
  Description of Artificial Sequence: Synthetic oligonucleotide
  Sense strand starting at position 3164 of SEQ ID NO: 1887365
agaugcaaucuccaauguu

SEQ ID NO: 2466805 - RNA, 19 nt, Artificial Sequence
  Description of Artificial Sequence: Synthetic oligonucleotide
  Antisense strand to SEQ ID NO: 2466804
aacauuggagauugcaucu

SEQ ID NO: 2466806 - RNA, 19 nt, Artificial Sequence
  Description of Artificial Sequence: Synthetic oligonucleotide
  Sense strand starting at position 3500 of SEQ ID NO: 1887365
ucuuuauggcaaugaaaga

SEQ ID NO: 2466807 - RNA, 19 nt, Artificial Sequence
  Description of Artificial Sequence: Synthetic oligonucleotide
  Antisense strand to SEQ ID NO: 2466806
ucuuucauugccauaaaga

SEQ ID NO: 2466808 - RNA, 19 nt, Artificial Sequence
  Description of Artificial Sequence: Synthetic oligonucleotide
  Sense strand starting at position 3794 of SEQ ID NO: 1887365
ugaguaucaguuuauaugu

SEQ ID NO: 2466809 - RNA, 19 nt, Artificial Sequence
  Description of Artificial Sequence: Synthetic oligonucleotide
  Antisense strand to SEQ ID NO: 2466808
acauauaaacugauacuca

SEQ ID NO: 2466810 - RNA, 19 nt, Artificial Sequence
  Description of Artificial Sequence: Synthetic oligonucleotide
  Sense strand starting at position 3811 of SEQ ID NO: 1887365
gucuuagcucacuagauca

SEQ ID NO: 2466811 - RNA, 19 nt, Artificial Sequence
  Description of Artificial Sequence: Synthetic oligonucleotide
  Antisense strand to SEQ ID NO: 2466810
ugaucuagugagcuaagac

SEQ ID NO: 2466812 - RNA, 19 nt, Artificial Sequence
  Description of Artificial Sequence: Synthetic oligonucleotide
  Sense strand starting at position 3841 of SEQ ID NO: 1887365
gcugaaugagcauagcaaa

SEQ ID NO: 2466813 - RNA, 19 nt, Artificial Sequence
  Description of Artificial Sequence: Synthetic oligonucleotide
  Antisense strand to SEQ ID NO: 2466812
uuugcuaugcucauucagc

SEQ ID NO: 2466814 - RNA, 19 nt, Artificial Sequence
  Description of Artificial Sequence: Synthetic oligonucleotide
  Sense strand starting at position 3884 of SEQ ID NO: 1887365
ggcuucucucaugaaagca

SEQ ID NO: 2466815 - RNA, 19 nt, Artificial Sequence
  Description of Artificial Sequence: Synthetic oligonucleotide
  Antisense strand to SEQ ID NO: 2466814
ugcuuucaugagagaagcc

SEQ ID NO: 2466816 - RNA, 19 nt, Artificial Sequence
  Description of Artificial Sequence: Synthetic oligonucleotide
  Sense strand starting at position 18 of SEQ ID NO: 1887366
uggauauaggugcaaguua

SEQ ID NO: 2466817 - RNA, 19 nt, Artificial Sequence
  Description of Artificial Sequence: Synthetic oligonucleotide
  Antisense strand to SEQ ID NO: 2466816
uaacuugcaccuauaucca

SEQ ID NO: 2466818 - RNA, 19 nt, Artificial Sequence
  Description of Artificial Sequence: Synthetic oligonucleotide
  Sense strand starting at position 146 of SEQ ID NO: 1887366
gacuuuaaagauuguuaag

SEQ ID NO: 2466819 - RNA, 19 nt, Artificial Sequence
  Description of Artificial Sequence: Synthetic oligonucleotide
  Antisense strand to SEQ ID NO: 2466818
cuuaacaaucuuuaaaguc

SEQ ID NO: 2466820 - RNA, 19 nt, Artificial Sequence
  Description of Artificial Sequence: Synthetic oligonucleotide
  Sense strand starting at position 148 of SEQ ID NO: 1887366
cuuuaaagauuguuaagag

SEQ ID NO: 2466821 - RNA, 19 nt, Artificial Sequence
  Description of Artificial Sequence: Synthetic oligonucleotide
  Antisense strand to SEQ ID NO: 2466820
cucuuaacaaucuuuaaag

SEQ ID NO: 2466822 - RNA, 19 nt, Artificial Sequence
  Description of Artificial Sequence: Synthetic oligonucleotide
  Sense strand starting at position 265 of SEQ ID NO: 1887366
augguuagaucaucuccuu

SEQ ID NO: 2466823 - RNA, 19 nt, Artificial Sequence
  Description of Artificial Sequence: Synthetic oligonucleotide
  Antisense strand to SEQ ID NO: 2466822
aaggagaugaucuaaccau

SEQ ID NO: 2466824 - RNA, 19 nt, Artificial Sequence
  Description of Artificial Sequence: Synthetic oligonucleotide
  Sense strand starting at position 268 of SEQ ID NO: 1887366
guuagaucaucuccuuaca

SEQ ID NO: 2466825 - RNA, 19 nt, Artificial Sequence
  Description of Artificial Sequence: Synthetic oligonucleotide
  Antisense strand to SEQ ID NO: 2466824
uguaaggagaugaucuaac

SEQ ID NO: 2466826 - RNA, 19 nt, Artificial Sequence
  Description of Artificial Sequence: Synthetic oligonucleotide
  Sense strand starting at position 384 of SEQ ID NO: 1887366
uucggauaugggugaacau

SEQ ID NO: 2466827 - RNA, 19 nt, Artificial Sequence
  Description of Artificial Sequence: Synthetic oligonucleotide
  Antisense strand to SEQ ID NO: 2466826
auguucacccauauccgaa

SEQ ID NO: 2466828 - RNA, 19 nt, Artificial Sequence
  Description of Artificial Sequence: Synthetic oligonucleotide
  Sense strand starting at position 385 of SEQ ID NO: 1887366
ucggauaugggugaacauu

SEQ ID NO: 2466829 - RNA, 19 nt, Artificial Sequence
  Description of Artificial Sequence: Synthetic oligonucleotide
  Antisense strand to SEQ ID NO: 2466828
aauguucacccauauccga

SEQ ID NO: 2466830 - RNA, 19 nt, Artificial Sequence
  Description of Artificial Sequence: Synthetic oligonucleotide
  Sense strand starting at position 485 of SEQ ID NO: 1887366
ugcuuuagggaauggaaga

SEQ ID NO: 2466831 - RNA, 19 nt, Artificial Sequence
  Description of Artificial Sequence: Synthetic oligonucleotide
  Antisense strand to SEQ ID NO: 2466830
ucuuccauucccuaaagca

SEQ ID NO: 2466832 - RNA, 19 nt, Artificial Sequence
  Description of Artificial Sequence: Synthetic oligonucleotide
  Sense strand starting at position 508 of SEQ ID NO: 1887366
auuuguugugguugaugau

SEQ ID NO: 2466833 - RNA, 19 nt, Artificial Sequence
  Description of Artificial Sequence: Synthetic oligonucleotide
  Antisense strand to SEQ ID NO: 2466832
aucaucaaccacaacaaau

SEQ ID NO: 2466834 - RNA, 19 nt, Artificial Sequence
  Description of Artificial Sequence: Synthetic oligonucleotide
  Sense strand starting at position 536 of SEQ ID NO: 1887366
caaggauuagcauguacga

SEQ ID NO: 2466835 - RNA, 19 nt, Artificial Sequence
  Description of Artificial Sequence: Synthetic oligonucleotide
  Antisense strand to SEQ ID NO: 2466834
ucguacaugcuaauccuug

SEQ ID NO: 2466836 - RNA, 19 nt, Artificial Sequence
  Description of Artificial Sequence: Synthetic oligonucleotide
  Sense strand starting at position 538 of SEQ ID NO: 1887366
aggauuagcauguacgaua

SEQ ID NO: 2466837 - RNA, 19 nt, Artificial Sequence
  Description of Artificial Sequence: Synthetic oligonucleotide
  Antisense strand to SEQ ID NO: 2466836
uaucguacaugcuaauccu

SEQ ID NO: 2466838 - RNA, 19 nt, Artificial Sequence
  Description of Artificial Sequence: Synthetic oligonucleotide
  Sense strand starting at position 831 of SEQ ID NO: 1887366
uuuauaucucaucauuggu

SEQ ID NO: 2466839 - RNA, 19 nt, Artificial Sequence
  Description of Artificial Sequence: Synthetic oligonucleotide
  Antisense strand to SEQ ID NO: 2466838
accaaugaugagauauaaa

SEQ ID NO: 2466840 - RNA, 19 nt, Artificial Sequence
  Description of Artificial Sequence: Synthetic oligonucleotide
  Sense strand starting at position 834 of SEQ ID NO: 1887366
auaucucaucauuggucau

SEQ ID NO: 2466841 - RNA, 19 nt, Artificial Sequence
  Description of Artificial Sequence: Synthetic oligonucleotide
  Antisense strand to SEQ ID NO: 2466840
augaccaaugaugagauau

SEQ ID NO: 2466842 - RNA, 19 nt, Artificial Sequence
  Description of Artificial Sequence: Synthetic oligonucleotide
  Sense strand starting at position 836 of SEQ ID NO: 1887366
aucucaucauuggucauau

SEQ ID NO: 2466843 - RNA, 19 nt, Artificial Sequence
  Description of Artificial Sequence: Synthetic oligonucleotide
  Antisense strand to SEQ ID NO: 2466842
auaugaccaaugaugagau

SEQ ID NO: 2466844 - RNA, 19 nt, Artificial Sequence
  Description of Artificial Sequence: Synthetic oligonucleotide
  Sense strand starting at position 838 of SEQ ID NO: 1887366
cucaucauuggucauauua

SEQ ID NO: 2466845 - RNA, 19 nt, Artificial Sequence
  Description of Artificial Sequence: Synthetic oligonucleotide
  Antisense strand to SEQ ID NO: 2466844
uaauaugaccaaugaugag

SEQ ID NO: 2466846 - RNA, 19 nt, Artificial Sequence
  Description of Artificial Sequence: Synthetic oligonucleotide
  Sense strand starting at position 926 of SEQ ID NO: 1887366
gcugauaaacaauguugga

SEQ ID NO: 2466847 - RNA, 19 nt, Artificial Sequence
  Description of Artificial Sequence: Synthetic oligonucleotide
  Antisense strand to SEQ ID NO: 2466846
uccaacauuguuuaucagc

SEQ ID NO: 2466848 - RNA, 19 nt, Artificial Sequence
  Description of Artificial Sequence: Synthetic oligonucleotide
  Sense strand starting at position 960 of SEQ ID NO: 1887366
uguugucaacagugauuuc

SEQ ID NO: 2466849 - RNA, 19 nt, Artificial Sequence
  Description of Artificial Sequence: Synthetic oligonucleotide
  Antisense strand to SEQ ID NO: 2466848
gaaaucacuguugacaaca

SEQ ID NO: 2466850 - RNA, 19 nt, Artificial Sequence
  Description of Artificial Sequence: Synthetic oligonucleotide
  Sense strand starting at position 972 of SEQ ID NO: 1887366
ugauuucucucuucucguu

SEQ ID NO: 2466851 - RNA, 19 nt, Artificial Sequence
  Description of Artificial Sequence: Synthetic oligonucleotide
  Antisense strand to SEQ ID NO: 2466850
aacgagaagagagaaauca

SEQ ID NO: 2466852 - RNA, 19 nt, Artificial Sequence
  Description of Artificial Sequence: Synthetic oligonucleotide
  Sense strand starting at position 1065 of SEQ ID NO: 1887366
ucaaguugaugaguuagga

SEQ ID NO: 2466853 - RNA, 19 nt, Artificial Sequence
  Description of Artificial Sequence: Synthetic oligonucleotide
  Antisense strand to SEQ ID NO: 2466852
uccuaacucaucaacuuga

SEQ ID NO: 2466854 - RNA, 19 nt, Artificial Sequence
  Description of Artificial Sequence: Synthetic oligonucleotide
  Sense strand starting at position 1984 of SEQ ID NO: 1887366
ugaauucuguucuuccaag

SEQ ID NO: 2466855 - RNA, 19 nt, Artificial Sequence
  Description of Artificial Sequence: Synthetic oligonucleotide
  Antisense strand to SEQ ID NO: 2466854
cuuggaagaacagaauuca

SEQ ID NO: 2466856 - RNA, 19 nt, Artificial Sequence
  Description of Artificial Sequence: Synthetic oligonucleotide
  Sense strand starting at position 2100 of SEQ ID NO: 1887366
ucgaguggacucuaacaca

SEQ ID NO: 2466857 - RNA, 19 nt, Artificial Sequence
  Description of Artificial Sequence: Synthetic oligonucleotide
  Antisense strand to SEQ ID NO: 2466856
uguguuagaguccacucga

SEQ ID NO: 2466858 - RNA, 19 nt, Artificial Sequence
  Description of Artificial Sequence: Synthetic oligonucleotide
  Sense strand starting at position 2123 of SEQ ID NO: 1887366
agcccauguccucaguaga

SEQ ID NO: 2466859 - RNA, 19 nt, Artificial Sequence
  Description of Artificial Sequence: Synthetic oligonucleotide
  Antisense strand to SEQ ID NO: 2466858
ucuacugaggacaugggcu

SEQ ID NO: 2466860 - RNA, 19 nt, Artificial Sequence
  Description of Artificial Sequence: Synthetic oligonucleotide
  Sense strand starting at position 2126 of SEQ ID NO: 1887366
ccauguccucaguagaaga

SEQ ID NO: 2466861 - RNA, 19 nt, Artificial Sequence
  Description of Artificial Sequence: Synthetic oligonucleotide
  Antisense strand to SEQ ID NO: 2466860
ucuucuacugaggacaugg

SEQ ID NO: 2466862 - RNA, 19 nt, Artificial Sequence
  Description of Artificial Sequence: Synthetic oligonucleotide
  Sense strand starting at position 2318 of SEQ ID NO: 1887366
ugccgaauccuugaucuca

SEQ ID NO: 2466863 - RNA, 19 nt, Artificial Sequence
  Description of Artificial Sequence: Synthetic oligonucleotide
  Antisense strand to SEQ ID NO: 2466862
ugagaucaaggauucggca

SEQ ID NO: 2466864 - RNA, 19 nt, Artificial Sequence
  Description of Artificial Sequence: Synthetic oligonucleotide
  Sense strand starting at position 2472 of SEQ ID NO: 1887366
uggugagaagcucaucuuu

SEQ ID NO: 2466865 - RNA, 19 nt, Artificial Sequence
  Description of Artificial Sequence: Synthetic oligonucleotide
  Antisense strand to SEQ ID NO: 2466864
aaagaugagcuucucacca

SEQ ID NO: 2466866 - RNA, 19 nt, Artificial Sequence
  Description of Artificial Sequence: Synthetic oligonucleotide
  Sense strand starting at position 2739 of SEQ ID NO: 1887366
cugggauucuccuucucua

SEQ ID NO: 2466867 - RNA, 19 nt, Artificial Sequence
  Description of Artificial Sequence: Synthetic oligonucleotide
  Antisense strand to SEQ ID NO: 2466866
uagagaaggagaaucccag

SEQ ID NO: 2466868 - RNA, 19 nt, Artificial Sequence
  Description of Artificial Sequence: Synthetic oligonucleotide
  Sense strand starting at position 2928 of SEQ ID NO: 1887366
accauagacucuuugaagu

SEQ ID NO: 2466869 - RNA, 19 nt, Artificial Sequence
  Description of Artificial Sequence: Synthetic oligonucleotide
  Antisense strand to SEQ ID NO: 2466868
acuucaaagagucuauggu

SEQ ID NO: 2466870 - RNA, 19 nt, Artificial Sequence
  Description of Artificial Sequence: Synthetic oligonucleotide
  Sense strand starting at position 2990 of SEQ ID NO: 1887366
ccuccaguucuuuaaagga

SEQ ID NO: 2466871 - RNA, 19 nt, Artificial Sequence
  Description of Artificial Sequence: Synthetic oligonucleotide
  Antisense strand to SEQ ID NO: 2466870
uccuuuaaagaacuggagg

SEQ ID NO: 2466872 - RNA, 19 nt, Artificial Sequence
  Description of Artificial Sequence: Synthetic oligonucleotide
  Sense strand starting at position 3134 of SEQ ID NO: 1887366
agauuuccugccuguacca

SEQ ID NO: 2466873 - RNA, 19 nt, Artificial Sequence
  Description of Artificial Sequence: Synthetic oligonucleotide
  Antisense strand to SEQ ID NO: 2466872
ugguacaggcaggaaaucu

SEQ ID NO: 2466874 - RNA, 19 nt, Artificial Sequence
  Description of Artificial Sequence: Synthetic oligonucleotide
  Sense strand starting at position 3184 of SEQ ID NO: 1887366
agagcaugccuuuagauga

SEQ ID NO: 2466875 - RNA, 19 nt, Artificial Sequence
  Description of Artificial Sequence: Synthetic oligonucleotide
  Antisense strand to SEQ ID NO: 2466874
ucaucuaaaggcaugcucu

SEQ ID NO: 2466876 - RNA, 19 nt, Artificial Sequence
  Description of Artificial Sequence: Synthetic oligonucleotide
  Sense strand starting at position 3254 of SEQ ID NO: 1887366
gguggugggccucaucuaa

SEQ ID NO: 2466877 - RNA, 19 nt, Artificial Sequence
  Description of Artificial Sequence: Synthetic oligonucleotide
  Antisense strand to SEQ ID NO: 2466876
uuagaugaggcccaccacc

SEQ ID NO: 2466878 - RNA, 19 nt, Artificial Sequence
  Description of Artificial Sequence: Synthetic oligonucleotide
  Sense strand starting at position 3467 of SEQ ID NO: 1887366
uauugauccuuguuaggau

SEQ ID NO: 2466879 - RNA, 19 nt, Artificial Sequence
  Description of Artificial Sequence: Synthetic oligonucleotide
  Antisense strand to SEQ ID NO: 2466878
auccuaacaaggaucaaua

SEQ ID NO: 2466880 - RNA, 19 nt, Artificial Sequence
  Description of Artificial Sequence: Synthetic oligonucleotide
  Sense strand starting at position 3474 of SEQ ID NO: 1887366
ccuuguuaggaucaaugua

SEQ ID NO: 2466881 - RNA, 19 nt, Artificial Sequence
  Description of Artificial Sequence: Synthetic oligonucleotide
  Antisense strand to SEQ ID NO: 2466880
uacauugauccuaacaagg

SEQ ID NO: 2466882 - RNA, 19 nt, Artificial Sequence
  Description of Artificial Sequence: Synthetic oligonucleotide
  Sense strand starting at position 3667 of SEQ ID NO: 1887366
caguaaucucugggugaca

SEQ ID NO: 2466883 - RNA, 19 nt, Artificial Sequence
  Description of Artificial Sequence: Synthetic oligonucleotide
  Antisense strand to SEQ ID NO: 2466882
ugucacccagagauuacug

SEQ ID NO: 2466884 - RNA, 19 nt, Artificial Sequence
  Description of Artificial Sequence: Synthetic oligonucleotide
  Sense strand starting at position 3668 of SEQ ID NO: 1887366
aguaaucucugggugacag

SEQ ID NO: 2466885 - RNA, 19 nt, Artificial Sequence
  Description of Artificial Sequence: Synthetic oligonucleotide
  Antisense strand to SEQ ID NO: 2466884
cugucacccagagauuacu

SEQ ID NO: 2466886 - RNA, 19 nt, Artificial Sequence
  Description of Artificial Sequence: Synthetic oligonucleotide
  Sense strand starting at position 3686 of SEQ ID NO: 1887366
ggcaaagaacuccaucagu

SEQ ID NO: 2466887 - RNA, 19 nt, Artificial Sequence
  Description of Artificial Sequence: Synthetic oligonucleotide
  Antisense strand to SEQ ID NO: 2466886
acugauggaguucuuugcc

SEQ ID NO: 2466888 - RNA, 19 nt, Artificial Sequence
  Description of Artificial Sequence: Synthetic oligonucleotide
  Sense strand starting at position 3870 of SEQ ID NO: 1887366
cucuuucuucgugaaggga

SEQ ID NO: 2466889 - RNA, 19 nt, Artificial Sequence
  Description of Artificial Sequence: Synthetic oligonucleotide
  Antisense strand to SEQ ID NO: 2466888
ucccuucacgaagaaagag

SEQ ID NO: 2466890 - RNA, 19 nt, Artificial Sequence
  Description of Artificial Sequence: Synthetic oligonucleotide
  Sense strand starting at position 3945 of SEQ ID NO: 1887366
gaugacacgugaguggaaa

SEQ ID NO: 2466891 - RNA, 19 nt, Artificial Sequence
  Description of Artificial Sequence: Synthetic oligonucleotide
  Antisense strand to SEQ ID NO: 2466890
uuuccacucacgugucauc

SEQ ID NO: 2466892 - RNA, 19 nt, Artificial Sequence
  Description of Artificial Sequence: Synthetic oligonucleotide
  Sense strand starting at position 3946 of SEQ ID NO: 1887366
augacacgugaguggaaau

SEQ ID NO: 2466893 - RNA, 19 nt, Artificial Sequence
  Description of Artificial Sequence: Synthetic oligonucleotide
  Antisense strand to SEQ ID NO: 2466892
auuuccacucacgugucau

SEQ ID NO: 2466894 - RNA, 19 nt, Artificial Sequence
  Description of Artificial Sequence: Synthetic oligonucleotide
  Sense strand starting at position 3957 of SEQ ID NO: 1887366
guggaaaugucacuuccag

SEQ ID NO: 2466895 - RNA, 19 nt, Artificial Sequence
  Description of Artificial Sequence: Synthetic oligonucleotide
  Antisense strand to SEQ ID NO: 2466894
cuggaagugacauuuccac

SEQ ID NO: 2466896 - RNA, 19 nt, Artificial Sequence
  Description of Artificial Sequence: Synthetic oligonucleotide
  Sense strand starting at position 154 of SEQ ID NO: 1887367
uaaagugguuacccuugaa

SEQ ID NO: 2466897 - RNA, 19 nt, Artificial Sequence
  Description of Artificial Sequence: Synthetic oligonucleotide
  Antisense strand to SEQ ID NO: 2466896
uucaaggguaaccacuuua

SEQ ID NO: 2466898 - RNA, 19 nt, Artificial Sequence
  Description of Artificial Sequence: Synthetic oligonucleotide
  Sense strand starting at position 193 of SEQ ID NO: 1887367
auuauugaaggcugaaauu

SEQ ID NO: 2466899 - RNA, 19 nt, Artificial Sequence
  Description of Artificial Sequence: Synthetic oligonucleotide
  Antisense strand to SEQ ID NO: 2466898
aauuucagccuucaauaau

SEQ ID NO: 2466900 - RNA, 19 nt, Artificial Sequence
  Description of Artificial Sequence: Synthetic oligonucleotide
  Sense strand starting at position 202 of SEQ ID NO: 1887367
ggcugaaauuaaucauuau

SEQ ID NO: 2466901 - RNA, 19 nt, Artificial Sequence
  Description of Artificial Sequence: Synthetic oligonucleotide
  Antisense strand to SEQ ID NO: 2466900
auaaugauuaauuucagcc

SEQ ID NO: 2466902 - RNA, 19 nt, Artificial Sequence
  Description of Artificial Sequence: Synthetic oligonucleotide
  Sense strand starting at position 351 of SEQ ID NO: 1887367
augcguauugcugucacua

SEQ ID NO: 2466903 - RNA, 19 nt, Artificial Sequence
  Description of Artificial Sequence: Synthetic oligonucleotide
  Antisense strand to SEQ ID NO: 2466902
uagugacagcaauacgcau

SEQ ID NO: 2466904 - RNA, 19 nt, Artificial Sequence
  Description of Artificial Sequence: Synthetic oligonucleotide
  Sense strand starting at position 352 of SEQ ID NO: 1887367
ugcguauugcugucacuac

SEQ ID NO: 2466905 - RNA, 19 nt, Artificial Sequence
  Description of Artificial Sequence: Synthetic oligonucleotide
  Antisense strand to SEQ ID NO: 2466904
guagugacagcaauacgca

SEQ ID NO: 2466906 - RNA, 19 nt, Artificial Sequence
  Description of Artificial Sequence: Synthetic oligonucleotide
  Sense strand starting at position 583 of SEQ ID NO: 1887367
aaguaagaguuucucagga

SEQ ID NO: 2466907 - RNA, 19 nt, Artificial Sequence
  Description of Artificial Sequence: Synthetic oligonucleotide
  Antisense strand to SEQ ID NO: 2466906
uccugagaaacucuuacuu

SEQ ID NO: 2466908 - RNA, 19 nt, Artificial Sequence
  Description of Artificial Sequence: Synthetic oligonucleotide
  Sense strand starting at position 620 of SEQ ID NO: 1887367
ucaagaguuugacuuacau

SEQ ID NO: 2466909 - RNA, 19 nt, Artificial Sequence
  Description of Artificial Sequence: Synthetic oligonucleotide
  Antisense strand to SEQ ID NO: 2466908
auguaagucaaacucuuga

SEQ ID NO: 2466910 - RNA, 19 nt, Artificial Sequence
  Description of Artificial Sequence: Synthetic oligonucleotide
  Sense strand starting at position 919 of SEQ ID NO: 1887367
ugauauauuacuggcugga

SEQ ID NO: 2466911 - RNA, 19 nt, Artificial Sequence
  Description of Artificial Sequence: Synthetic oligonucleotide
  Antisense strand to SEQ ID NO: 2466910
uccagccaguaauauauca

SEQ ID NO: 2466912 - RNA, 19 nt, Artificial Sequence
  Description of Artificial Sequence: Synthetic oligonucleotide
  Sense strand starting at position 921 of SEQ ID NO: 1887367
auauauuacuggcuggaaa

SEQ ID NO: 2466913 - RNA, 19 nt, Artificial Sequence
  Description of Artificial Sequence: Synthetic oligonucleotide
  Antisense strand to SEQ ID NO: 2466912
uuuccagccaguaauauau

SEQ ID NO: 2466914 - RNA, 19 nt, Artificial Sequence
  Description of Artificial Sequence: Synthetic oligonucleotide
  Sense strand starting at position 1007 of SEQ ID NO: 1887367
ggucucaauuuguucuauu

SEQ ID NO: 2466915 - RNA, 19 nt, Artificial Sequence
  Description of Artificial Sequence: Synthetic oligonucleotide
  Antisense strand to SEQ ID NO: 2466914
aauagaacaaauugagacc

SEQ ID NO: 2466916 - RNA, 19 nt, Artificial Sequence
  Description of Artificial Sequence: Synthetic oligonucleotide
  Sense strand starting at position 1093 of SEQ ID NO: 1887367
agggaaaguuucccugaau

SEQ ID NO: 2466917 - RNA, 19 nt, Artificial Sequence
  Description of Artificial Sequence: Synthetic oligonucleotide
  Antisense strand to SEQ ID NO: 2466916
auucagggaaacuuucccu

SEQ ID NO: 2466918 - RNA, 19 nt, Artificial Sequence
  Description of Artificial Sequence: Synthetic oligonucleotide
  Sense strand starting at position 1094 of SEQ ID NO: 1887367
gggaaaguuucccugaauc

SEQ ID NO: 2466919 - RNA, 19 nt, Artificial Sequence
  Description of Artificial Sequence: Synthetic oligonucleotide
  Antisense strand to SEQ ID NO: 2466918
gauucagggaaacuuuccc

SEQ ID NO: 2466920 - RNA, 19 nt, Artificial Sequence
  Description of Artificial Sequence: Synthetic oligonucleotide
  Sense strand starting at position 1161 of SEQ ID NO: 1887367
ggcaaaucccuuuaagcag

SEQ ID NO: 2466921 - RNA, 19 nt, Artificial Sequence
  Description of Artificial Sequence: Synthetic oligonucleotide
  Antisense strand to SEQ ID NO: 2466920
cugcuuaaagggauuugcc

SEQ ID NO: 2466922 - RNA, 19 nt, Artificial Sequence
  Description of Artificial Sequence: Synthetic oligonucleotide
  Sense strand starting at position 1175 of SEQ ID NO: 1887367
agcagaucccauuaauguu

SEQ ID NO: 2466923 - RNA, 19 nt, Artificial Sequence
  Description of Artificial Sequence: Synthetic oligonucleotide
  Antisense strand to SEQ ID NO: 2466922
aacauuaaugggaucugcu

SEQ ID NO: 2466924 - RNA, 19 nt, Artificial Sequence
  Description of Artificial Sequence: Synthetic oligonucleotide
  Sense strand starting at position 1425 of SEQ ID NO: 1887367
gcuuaaaugcaugaauauu

SEQ ID NO: 2466925 - RNA, 19 nt, Artificial Sequence
  Description of Artificial Sequence: Synthetic oligonucleotide
  Antisense strand to SEQ ID NO: 2466924
aauauucaugcauuuaagc

SEQ ID NO: 2466926 - RNA, 19 nt, Artificial Sequence
  Description of Artificial Sequence: Synthetic oligonucleotide
  Sense strand starting at position 1437 of SEQ ID NO: 1887367
gaauauugaugcguggaag

SEQ ID NO: 2466927 - RNA, 19 nt, Artificial Sequence
  Description of Artificial Sequence: Synthetic oligonucleotide
  Antisense strand to SEQ ID NO: 2466926
cuuccacgcaucaauauuc

SEQ ID NO: 2466928 - RNA, 19 nt, Artificial Sequence
  Description of Artificial Sequence: Synthetic oligonucleotide
  Sense strand starting at position 1440 of SEQ ID NO: 1887367
uauugaugcguggaaggga

SEQ ID NO: 2466929 - RNA, 19 nt, Artificial Sequence
  Description of Artificial Sequence: Synthetic oligonucleotide
  Antisense strand to SEQ ID NO: 2466928
ucccuuccacgcaucaaua

SEQ ID NO: 2466930 - RNA, 19 nt, Artificial Sequence
  Description of Artificial Sequence: Synthetic oligonucleotide
  Sense strand starting at position 1753 of SEQ ID NO: 1887367
guuggugaucaaggacacu

SEQ ID NO: 2466931 - RNA, 19 nt, Artificial Sequence
  Description of Artificial Sequence: Synthetic oligonucleotide
  Antisense strand to SEQ ID NO: 2466930
aguguccuugaucaccaac

SEQ ID NO: 2466932 - RNA, 19 nt, Artificial Sequence
  Description of Artificial Sequence: Synthetic oligonucleotide
  Sense strand starting at position 2178 of SEQ ID NO: 1887367
uugaaagacucacugucaa

SEQ ID NO: 2466933 - RNA, 19 nt, Artificial Sequence
  Description of Artificial Sequence: Synthetic oligonucleotide
  Antisense strand to SEQ ID NO: 2466932
uugacagugagucuuucaa

SEQ ID NO: 2466934 - RNA, 19 nt, Artificial Sequence
  Description of Artificial Sequence: Synthetic oligonucleotide
  Sense strand starting at position 2342 of SEQ ID NO: 1887367
agggaacaauugcuauguu

SEQ ID NO: 2466935 - RNA, 19 nt, Artificial Sequence
  Description of Artificial Sequence: Synthetic oligonucleotide
  Antisense strand to SEQ ID NO: 2466934
aacauagcaauuguucccu

SEQ ID NO: 2466936 - RNA, 19 nt, Artificial Sequence
  Description of Artificial Sequence: Synthetic oligonucleotide
  Sense strand starting at position 2442 of SEQ ID NO: 1887367
uuaauauauugggugauga

SEQ ID NO: 2466937 - RNA, 19 nt, Artificial Sequence
  Description of Artificial Sequence: Synthetic oligonucleotide
  Antisense strand to SEQ ID NO: 2466936
ucaucacccaauauauuaa

SEQ ID NO: 2466938 - RNA, 19 nt, Artificial Sequence
  Description of Artificial Sequence: Synthetic oligonucleotide
  Sense strand starting at position 2547 of SEQ ID NO: 1887367
auauguagugcaggaacaa

SEQ ID NO: 2466939 - RNA, 19 nt, Artificial Sequence
  Description of Artificial Sequence: Synthetic oligonucleotide
  Antisense strand to SEQ ID NO: 2466938
uuguuccugcacuacauau

SEQ ID NO: 2466940 - RNA, 19 nt, Artificial Sequence
  Description of Artificial Sequence: Synthetic oligonucleotide
  Sense strand starting at position 2711 of SEQ ID NO: 1887367
auugauacgaggugaagau

SEQ ID NO: 2466941 - RNA, 19 nt, Artificial Sequence
  Description of Artificial Sequence: Synthetic oligonucleotide
  Antisense strand to SEQ ID NO: 2466940
aucuucaccucguaucaau

SEQ ID NO: 2466942 - RNA, 19 nt, Artificial Sequence
  Description of Artificial Sequence: Synthetic oligonucleotide
  Sense strand starting at position 2800 of SEQ ID NO: 1887367
guauaugagguaugauaau

SEQ ID NO: 2466943 - RNA, 19 nt, Artificial Sequence
  Description of Artificial Sequence: Synthetic oligonucleotide
  Antisense strand to SEQ ID NO: 2466942
auuaucauaccucauauac

SEQ ID NO: 2466944 - RNA, 19 nt, Artificial Sequence
  Description of Artificial Sequence: Synthetic oligonucleotide
  Sense strand starting at position 3069 of SEQ ID NO: 1887367
uuugguuauagugaugaau

SEQ ID NO: 2466945 - RNA, 19 nt, Artificial Sequence
  Description of Artificial Sequence: Synthetic oligonucleotide
  Antisense strand to SEQ ID NO: 2466944
auucaucacuauaaccaaa

SEQ ID NO: 2466946 - RNA, 19 nt, Artificial Sequence
  Description of Artificial Sequence: Synthetic oligonucleotide
  Sense strand starting at position 3072 of SEQ ID NO: 1887367
gguuauagugaugaauguu

SEQ ID NO: 2466947 - RNA, 19 nt, Artificial Sequence
  Description of Artificial Sequence: Synthetic oligonucleotide
  Antisense strand to SEQ ID NO: 2466946
aacauucaucacuauaacc

SEQ ID NO: 2466948 - RNA, 19 nt, Artificial Sequence
  Description of Artificial Sequence: Synthetic oligonucleotide
  Sense strand starting at position 3110 of SEQ ID NO: 1887367
agaaacuauugcguaaaga

SEQ ID NO: 2466949 - RNA, 19 nt, Artificial Sequence
  Description of Artificial Sequence: Synthetic oligonucleotide
  Antisense strand to SEQ ID NO: 2466948
ucuuuacgcaauaguuucu

SEQ ID NO: 2466950 - RNA, 19 nt, Artificial Sequence
  Description of Artificial Sequence: Synthetic oligonucleotide
  Sense strand starting at position 3111 of SEQ ID NO: 1887367
gaaacuauugcguaaagac

SEQ ID NO: 2466951 - RNA, 19 nt, Artificial Sequence
  Description of Artificial Sequence: Synthetic oligonucleotide
  Antisense strand to SEQ ID NO: 2466950
gucuuuacgcaauaguuuc

SEQ ID NO: 2466952 - RNA, 19 nt, Artificial Sequence
  Description of Artificial Sequence: Synthetic oligonucleotide
  Sense strand starting at position 3267 of SEQ ID NO: 1887367
aagcauugaccuugugaag

SEQ ID NO: 2466953 - RNA, 19 nt, Artificial Sequence
  Description of Artificial Sequence: Synthetic oligonucleotide
  Antisense strand to SEQ ID NO: 2466952
cuucacaaggucaaugcuu

SEQ ID NO: 2466954 - RNA, 19 nt, Artificial Sequence
  Description of Artificial Sequence: Synthetic oligonucleotide
  Sense strand starting at position 3276 of SEQ ID NO: 1887367
ccuugugaagcucaaucaa

SEQ ID NO: 2466955 - RNA, 19 nt, Artificial Sequence
  Description of Artificial Sequence: Synthetic oligonucleotide
  Antisense strand to SEQ ID NO: 2466954
uugauugagcuucacaagg

SEQ ID NO: 2466956 - RNA, 19 nt, Artificial Sequence
  Description of Artificial Sequence: Synthetic oligonucleotide
  Sense strand starting at position 3571 of SEQ ID NO: 1887367
agauguaaccuuuaagcau

SEQ ID NO: 2466957 - RNA, 19 nt, Artificial Sequence
  Description of Artificial Sequence: Synthetic oligonucleotide
  Antisense strand to SEQ ID NO: 2466956
augcuuaaagguuacaucu

SEQ ID NO: 2466958 - RNA, 19 nt, Artificial Sequence
  Description of Artificial Sequence: Synthetic oligonucleotide
  Sense strand starting at position 3724 of SEQ ID NO: 1887367
gcauuuaccuguuugcuaa

SEQ ID NO: 2466959 - RNA, 19 nt, Artificial Sequence
  Description of Artificial Sequence: Synthetic oligonucleotide
  Antisense strand to SEQ ID NO: 2466958
uuagcaaacagguaaaugc

SEQ ID NO: 2466960 - RNA, 19 nt, Artificial Sequence
  Description of Artificial Sequence: Synthetic oligonucleotide
  Sense strand starting at position 3758 of SEQ ID NO: 1887367
guuucacuucguguagcua

SEQ ID NO: 2466961 - RNA, 19 nt, Artificial Sequence
  Description of Artificial Sequence: Synthetic oligonucleotide
  Antisense strand to SEQ ID NO: 2466960
uagcuacacgaagugaaac

SEQ ID NO: 2466962 - RNA, 19 nt, Artificial Sequence
  Description of Artificial Sequence: Synthetic oligonucleotide
  Sense strand starting at position 3775 of SEQ ID NO: 1887367
uaaugaacucaagggugua

SEQ ID NO: 2466963 - RNA, 19 nt, Artificial Sequence
  Description of Artificial Sequence: Synthetic oligonucleotide
  Antisense strand to SEQ ID NO: 2466962
uacacccuugaguucauua

SEQ ID NO: 2466964 - RNA, 19 nt, Artificial Sequence
  Description of Artificial Sequence: Synthetic oligonucleotide
  Sense strand starting at position 3780 of SEQ ID NO: 1887367
aacucaaggguguauguua

SEQ ID NO: 2466965 - RNA, 19 nt, Artificial Sequence
  Description of Artificial Sequence: Synthetic oligonucleotide
  Antisense strand to SEQ ID NO: 2466964
uaacauacacccuugaguu

SEQ ID NO: 2466966 - RNA, 19 nt, Artificial Sequence
  Description of Artificial Sequence: Synthetic oligonucleotide
  Sense strand starting at position 3794 of SEQ ID NO: 1887367
uguuauucuguacaagaau

SEQ ID NO: 2466967 - RNA, 19 nt, Artificial Sequence
  Description of Artificial Sequence: Synthetic oligonucleotide
  Antisense strand to SEQ ID NO: 2466966
auucuuguacagaauaaca

SEQ ID NO: 2466968 - RNA, 19 nt, Artificial Sequence
  Description of Artificial Sequence: Synthetic oligonucleotide
  Sense strand starting at position 3848 of SEQ ID NO: 1887367
acaaacauuugaggaucau

SEQ ID NO: 2466969 - RNA, 19 nt, Artificial Sequence
  Description of Artificial Sequence: Synthetic oligonucleotide
  Antisense strand to SEQ ID NO: 2466968
augauccucaaauguuugu

SEQ ID NO: 2466970 - RNA, 19 nt, Artificial Sequence
  Description of Artificial Sequence: Synthetic oligonucleotide
  Sense strand starting at position 3873 of SEQ ID NO: 1887367
aauguauuugcauggcaau

SEQ ID NO: 2466971 - RNA, 19 nt, Artificial Sequence
  Description of Artificial Sequence: Synthetic oligonucleotide
  Antisense strand to SEQ ID NO: 2466970
auugccaugcaaauacauu

SEQ ID NO: 2466972 - RNA, 19 nt, Artificial Sequence
  Description of Artificial Sequence: Synthetic oligonucleotide
  Sense strand starting at position 3874 of SEQ ID NO: 1887367
auguauuugcauggcaauu

SEQ ID NO: 2466973 - RNA, 19 nt, Artificial Sequence
  Description of Artificial Sequence: Synthetic oligonucleotide
  Antisense strand to SEQ ID NO: 2466972
aauugccaugcaaauacau

SEQ ID NO: 2466974 - RNA, 19 nt, Artificial Sequence
  Description of Artificial Sequence: Synthetic oligonucleotide
  Sense strand starting at position 3922 of SEQ ID NO: 1887367
guaucaggauaucuaauga

SEQ ID NO: 2466975 - RNA, 19 nt, Artificial Sequence
  Description of Artificial Sequence: Synthetic oligonucleotide
  Antisense strand to SEQ ID NO: 2466974
ucauuagauauccugauac

SEQ ID NO: 2466976 - RNA, 19 nt, Artificial Sequence
  Description of Artificial Sequence: Synthetic oligonucleotide
  Sense strand starting at position 1 of SEQ ID NO: 1887368
aaaucaccagugugugauu

SEQ ID NO: 2466977 - RNA, 19 nt, Artificial Sequence
  Description of Artificial Sequence: Synthetic oligonucleotide
  Antisense strand to SEQ ID NO: 2466976
aaucacacacuggugauuu

SEQ ID NO: 2466978 - RNA, 19 nt, Artificial Sequence
  Description of Artificial Sequence: Synthetic oligonucleotide
  Sense strand starting at position 6 of SEQ ID NO: 1887368
accagugugugauuuccuu

SEQ ID NO: 2466979 - RNA, 19 nt, Artificial Sequence
  Description of Artificial Sequence: Synthetic oligonucleotide
  Antisense strand to SEQ ID NO: 2466978
aaggaaaucacacacuggu

SEQ ID NO: 2466980 - RNA, 19 nt, Artificial Sequence
  Description of Artificial Sequence: Synthetic oligonucleotide
  Sense strand starting at position 10 of SEQ ID NO: 1887368
gugugugauuuccuuggaa

SEQ ID NO: 2466981 - RNA, 19 nt, Artificial Sequence
  Description of Artificial Sequence: Synthetic oligonucleotide
  Antisense strand to SEQ ID NO: 2466980
uuccaaggaaaucacacac

SEQ ID NO: 2466982 - RNA, 19 nt, Artificial Sequence
  Description of Artificial Sequence: Synthetic oligonucleotide
  Sense strand starting at position 14 of SEQ ID NO: 1887368
gugauuuccuuggaauaaa

SEQ ID NO: 2466983 - RNA, 19 nt, Artificial Sequence
  Description of Artificial Sequence: Synthetic oligonucleotide
  Antisense strand to SEQ ID NO: 2466982
uuuauuccaaggaaaucac

SEQ ID NO: 2466984 - RNA, 19 nt, Artificial Sequence
  Description of Artificial Sequence: Synthetic oligonucleotide
  Sense strand starting at position 35 of SEQ ID NO: 1887368
gcagauauauaagguuacu

SEQ ID NO: 2466985 - RNA, 19 nt, Artificial Sequence
  Description of Artificial Sequence: Synthetic oligonucleotide
  Antisense strand to SEQ ID NO: 2466984
aguaaccuuauauaucugc

SEQ ID NO: 2466986 - RNA, 19 nt, Artificial Sequence
  Description of Artificial Sequence: Synthetic oligonucleotide
  Sense strand starting at position 2002 of SEQ ID NO: 1887368
gcaguuaagucaucguuuc

SEQ ID NO: 2466987 - RNA, 19 nt, Artificial Sequence
  Description of Artificial Sequence: Synthetic oligonucleotide
  Antisense strand to SEQ ID NO: 2466986
gaaacgaugacuuaacugc

SEQ ID NO: 2466988 - RNA, 19 nt, Artificial Sequence
  Description of Artificial Sequence: Synthetic oligonucleotide
  Sense strand starting at position 2198 of SEQ ID NO: 1887368
uuugcauaaugacaggaua

SEQ ID NO: 2466989 - RNA, 19 nt, Artificial Sequence
  Description of Artificial Sequence: Synthetic oligonucleotide
  Antisense strand to SEQ ID NO: 2466988
uauccugucauuaugcaaa

SEQ ID NO: 2466990 - RNA, 19 nt, Artificial Sequence
  Description of Artificial Sequence: Synthetic oligonucleotide
  Sense strand starting at position 2218 of SEQ ID NO: 1887368
aaguaugacuucugcaaga

SEQ ID NO: 2466991 - RNA, 19 nt, Artificial Sequence
  Description of Artificial Sequence: Synthetic oligonucleotide
  Antisense strand to SEQ ID NO: 2466990
ucuugcagaagucauacuu

SEQ ID NO: 2466992 - RNA, 19 nt, Artificial Sequence
  Description of Artificial Sequence: Synthetic oligonucleotide
  Sense strand starting at position 2220 of SEQ ID NO: 1887368
guaugacuucugcaagaaa

SEQ ID NO: 2466993 - RNA, 19 nt, Artificial Sequence
  Description of Artificial Sequence: Synthetic oligonucleotide
  Antisense strand to SEQ ID NO: 2466992
uuucuugcagaagucauac

SEQ ID NO: 2466994 - RNA, 19 nt, Artificial Sequence
  Description of Artificial Sequence: Synthetic oligonucleotide
  Sense strand starting at position 2354 of SEQ ID NO: 1887368
uuuccugaauuagguauua

SEQ ID NO: 2466995 - RNA, 19 nt, Artificial Sequence
  Description of Artificial Sequence: Synthetic oligonucleotide
  Antisense strand to SEQ ID NO: 2466994
uaauaccuaauucaggaaa

SEQ ID NO: 2466996 - RNA, 19 nt, Artificial Sequence
  Description of Artificial Sequence: Synthetic oligonucleotide
  Sense strand starting at position 2359 of SEQ ID NO: 1887368
ugaauuagguauuagcaca

SEQ ID NO: 2466997 - RNA, 19 nt, Artificial Sequence
  Description of Artificial Sequence: Synthetic oligonucleotide
  Antisense strand to SEQ ID NO: 2466996
ugugcuaauaccuaauuca

SEQ ID NO: 2466998 - RNA, 19 nt, Artificial Sequence
  Description of Artificial Sequence: Synthetic oligonucleotide
  Sense strand starting at position 2367 of SEQ ID NO: 1887368
guauuagcacauugcuaga

SEQ ID NO: 2466999 - RNA, 19 nt, Artificial Sequence
  Description of Artificial Sequence: Synthetic oligonucleotide
  Antisense strand to SEQ ID NO: 2466998
ucuagcaaugugcuaauac

SEQ ID NO: 2467000 - RNA, 19 nt, Artificial Sequence
  Description of Artificial Sequence: Synthetic oligonucleotide
  Sense strand starting at position 2456 of SEQ ID NO: 1887368
augcguguuacugcgaagu

SEQ ID NO: 2467001 - RNA, 19 nt, Artificial Sequence
  Description of Artificial Sequence: Synthetic oligonucleotide
  Antisense strand to SEQ ID NO: 2467000
acuucgcaguaacacgcau

SEQ ID NO: 2467002 - RNA, 19 nt, Artificial Sequence
  Description of Artificial Sequence: Synthetic oligonucleotide
  Sense strand starting at position 2460 of SEQ ID NO: 1887368
guguuacugcgaagugugu

SEQ ID NO: 2467003 - RNA, 19 nt, Artificial Sequence
  Description of Artificial Sequence: Synthetic oligonucleotide
  Antisense strand to SEQ ID NO: 2467002
acacacuucgcaguaacac

SEQ ID NO: 2467004 - RNA, 19 nt, Artificial Sequence
  Description of Artificial Sequence: Synthetic oligonucleotide
  Sense strand starting at position 2473 of SEQ ID NO: 1887368
guguguucugguugagaua

SEQ ID NO: 2467005 - RNA, 19 nt, Artificial Sequence
  Description of Artificial Sequence: Synthetic oligonucleotide
  Antisense strand to SEQ ID NO: 2467004
uaucucaaccagaacacac

SEQ ID NO: 2467006 - RNA, 19 nt, Artificial Sequence
  Description of Artificial Sequence: Synthetic oligonucleotide
  Sense strand starting at position 2474 of SEQ ID NO: 1887368
uguguucugguugagauac

SEQ ID NO: 2467007 - RNA, 19 nt, Artificial Sequence
  Description of Artificial Sequence: Synthetic oligonucleotide
  Antisense strand to SEQ ID NO: 2467006
guaucucaaccagaacaca

SEQ ID NO: 2467008 - RNA, 19 nt, Artificial Sequence
  Description of Artificial Sequence: Synthetic oligonucleotide
  Sense strand starting at position 2476 of SEQ ID NO: 1887368
uguucugguugagauacau

SEQ ID NO: 2467009 - RNA, 19 nt, Artificial Sequence
  Description of Artificial Sequence: Synthetic oligonucleotide
  Antisense strand to SEQ ID NO: 2467008
auguaucucaaccagaaca

SEQ ID NO: 2467010 - RNA, 19 nt, Artificial Sequence
  Description of Artificial Sequence: Synthetic oligonucleotide
  Sense strand starting at position 2486 of SEQ ID NO: 1887368
gagauacauuuggaaugca

SEQ ID NO: 2467011 - RNA, 19 nt, Artificial Sequence
  Description of Artificial Sequence: Synthetic oligonucleotide
  Antisense strand to SEQ ID NO: 2467010
ugcauuccaaauguaucuc

SEQ ID NO: 2467012 - RNA, 19 nt, Artificial Sequence
  Description of Artificial Sequence: Synthetic oligonucleotide
  Sense strand starting at position 2546 of SEQ ID NO: 1887368
caacuaggucuuugugcaa

SEQ ID NO: 2467013 - RNA, 19 nt, Artificial Sequence
  Description of Artificial Sequence: Synthetic oligonucleotide
  Antisense strand to SEQ ID NO: 2467012
uugcacaaagaccuaguug

SEQ ID NO: 2467014 - RNA, 19 nt, Artificial Sequence
  Description of Artificial Sequence: Synthetic oligonucleotide
  Sense strand starting at position 2549 of SEQ ID NO: 1887368
cuaggucuuugugcaaugu

SEQ ID NO: 2467015 - RNA, 19 nt, Artificial Sequence
  Description of Artificial Sequence: Synthetic oligonucleotide
  Antisense strand to SEQ ID NO: 2467014
acauugcacaaagaccuag

SEQ ID NO: 2467016 - RNA, 19 nt, Artificial Sequence
  Description of Artificial Sequence: Synthetic oligonucleotide
  Sense strand starting at position 2555 of SEQ ID NO: 1887368
cuuugugcaaugugagcaa

SEQ ID NO: 2467017 - RNA, 19 nt, Artificial Sequence
  Description of Artificial Sequence: Synthetic oligonucleotide
  Antisense strand to SEQ ID NO: 2467016
uugcucacauugcacaaag

SEQ ID NO: 2467018 - RNA, 19 nt, Artificial Sequence
  Description of Artificial Sequence: Synthetic oligonucleotide
  Sense strand starting at position 2559 of SEQ ID NO: 1887368
gugcaaugugagcaaaugu

SEQ ID NO: 2467019 - RNA, 19 nt, Artificial Sequence
  Description of Artificial Sequence: Synthetic oligonucleotide
  Antisense strand to SEQ ID NO: 2467018
acauuugcucacauugcac

SEQ ID NO: 2467020 - RNA, 19 nt, Artificial Sequence
  Description of Artificial Sequence: Synthetic oligonucleotide
  Sense strand starting at position 2675 of SEQ ID NO: 1887368
ggcauuauucagcguguca

SEQ ID NO: 2467021 - RNA, 19 nt, Artificial Sequence
  Description of Artificial Sequence: Synthetic oligonucleotide
  Antisense strand to SEQ ID NO: 2467020
ugacacgcugaauaaugcc

SEQ ID NO: 2467022 - RNA, 19 nt, Artificial Sequence
  Description of Artificial Sequence: Synthetic oligonucleotide
  Sense strand starting at position 3006 of SEQ ID NO: 1887368
uuguauuccucccagacau

SEQ ID NO: 2467023 - RNA, 19 nt, Artificial Sequence
  Description of Artificial Sequence: Synthetic oligonucleotide
  Antisense strand to SEQ ID NO: 2467022
augucugggaggaauacaa

SEQ ID NO: 2467024 - RNA, 19 nt, Artificial Sequence
  Description of Artificial Sequence: Synthetic oligonucleotide
  Sense strand starting at position 3008 of SEQ ID NO: 1887368
guauuccucccagacauug

SEQ ID NO: 2467025 - RNA, 19 nt, Artificial Sequence
  Description of Artificial Sequence: Synthetic oligonucleotide
  Antisense strand to SEQ ID NO: 2467024
caaugucugggaggaauac

SEQ ID NO: 2467026 - RNA, 19 nt, Artificial Sequence
  Description of Artificial Sequence: Synthetic oligonucleotide
  Sense strand starting at position 3069 of SEQ ID NO: 1887368
cuugcugaaucuuuaugaa

SEQ ID NO: 2467027 - RNA, 19 nt, Artificial Sequence
  Description of Artificial Sequence: Synthetic oligonucleotide
  Antisense strand to SEQ ID NO: 2467026
uucauaaagauucagcaag

SEQ ID NO: 2467028 - RNA, 19 nt, Artificial Sequence
  Description of Artificial Sequence: Synthetic oligonucleotide
  Sense strand starting at position 3072 of SEQ ID NO: 1887368
gcugaaucuuuaugaaaug

SEQ ID NO: 2467029 - RNA, 19 nt, Artificial Sequence
  Description of Artificial Sequence: Synthetic oligonucleotide
  Antisense strand to SEQ ID NO: 2467028
cauuucauaaagauucagc

SEQ ID NO: 2467030 - RNA, 19 nt, Artificial Sequence
  Description of Artificial Sequence: Synthetic oligonucleotide
  Sense strand starting at position 3073 of SEQ ID NO: 1887368
cugaaucuuuaugaaaugu

SEQ ID NO: 2467031 - RNA, 19 nt, Artificial Sequence
  Description of Artificial Sequence: Synthetic oligonucleotide
  Antisense strand to SEQ ID NO: 2467030
acauuucauaaagauucag

SEQ ID NO: 2467032 - RNA, 19 nt, Artificial Sequence
  Description of Artificial Sequence: Synthetic oligonucleotide
  Sense strand starting at position 3268 of SEQ ID NO: 1887368
uucccugcucucugugaau

SEQ ID NO: 2467033 - RNA, 19 nt, Artificial Sequence
  Description of Artificial Sequence: Synthetic oligonucleotide
  Antisense strand to SEQ ID NO: 2467032
auucacagagagcagggaa

SEQ ID NO: 2467034 - RNA, 19 nt, Artificial Sequence
  Description of Artificial Sequence: Synthetic oligonucleotide
  Sense strand starting at position 3441 of SEQ ID NO: 1887368
ugggcugugccaugugagu

SEQ ID NO: 2467035 - RNA, 19 nt, Artificial Sequence
  Description of Artificial Sequence: Synthetic oligonucleotide
  Antisense strand to SEQ ID NO: 2467034
acucacauggcacagccca

SEQ ID NO: 2467036 - RNA, 19 nt, Artificial Sequence
  Description of Artificial Sequence: Synthetic oligonucleotide
  Sense strand starting at position 3450 of SEQ ID NO: 1887368
ccaugugagucuucccuga

SEQ ID NO: 2467037 - RNA, 19 nt, Artificial Sequence
  Description of Artificial Sequence: Synthetic oligonucleotide
  Antisense strand to SEQ ID NO: 2467036
ucagggaagacucacaugg

SEQ ID NO: 2467038 - RNA, 19 nt, Artificial Sequence
  Description of Artificial Sequence: Synthetic oligonucleotide
  Sense strand starting at position 3452 of SEQ ID NO: 1887368
augugagucuucccugaga

SEQ ID NO: 2467039 - RNA, 19 nt, Artificial Sequence
  Description of Artificial Sequence: Synthetic oligonucleotide
  Antisense strand to SEQ ID NO: 2467038
ucucagggaagacucacau

SEQ ID NO: 2467040 - RNA, 19 nt, Artificial Sequence
  Description of Artificial Sequence: Synthetic oligonucleotide
  Sense strand starting at position 3454 of SEQ ID NO: 1887368
gugagucuucccugagaaa

SEQ ID NO: 2467041 - RNA, 19 nt, Artificial Sequence
  Description of Artificial Sequence: Synthetic oligonucleotide
  Antisense strand to SEQ ID NO: 2467040
uuucucagggaagacucac

SEQ ID NO: 2467042 - RNA, 19 nt, Artificial Sequence
  Description of Artificial Sequence: Synthetic oligonucleotide
  Sense strand starting at position 3457 of SEQ ID NO: 1887368
agucuucccugagaaaugu

SEQ ID NO: 2467043 - RNA, 19 nt, Artificial Sequence
  Description of Artificial Sequence: Synthetic oligonucleotide
  Antisense strand to SEQ ID NO: 2467042
acauuucucagggaagacu

SEQ ID NO: 2467044 - RNA, 19 nt, Artificial Sequence
  Description of Artificial Sequence: Synthetic oligonucleotide
  Sense strand starting at position 3466 of SEQ ID NO: 1887368
ugagaaaugugcuggacag

SEQ ID NO: 2467045 - RNA, 19 nt, Artificial Sequence
  Description of Artificial Sequence: Synthetic oligonucleotide
  Antisense strand to SEQ ID NO: 2467044
cuguccagcacauuucuca

SEQ ID NO: 2467046 - RNA, 19 nt, Artificial Sequence
  Description of Artificial Sequence: Synthetic oligonucleotide
  Sense strand starting at position 3605 of SEQ ID NO: 1887368
ccaguucccuucuuaggua

SEQ ID NO: 2467047 - RNA, 19 nt, Artificial Sequence
  Description of Artificial Sequence: Synthetic oligonucleotide
  Antisense strand to SEQ ID NO: 2467046
uaccuaagaagggaacugg

SEQ ID NO: 2467048 - RNA, 19 nt, Artificial Sequence
  Description of Artificial Sequence: Synthetic oligonucleotide
  Sense strand starting at position 3665 of SEQ ID NO: 1887368
gaaagaguuuccggaccuu

SEQ ID NO: 2467049 - RNA, 19 nt, Artificial Sequence
  Description of Artificial Sequence: Synthetic oligonucleotide
  Antisense strand to SEQ ID NO: 2467048
aagguccggaaacucuuuc

SEQ ID NO: 2467050 - RNA, 19 nt, Artificial Sequence
  Description of Artificial Sequence: Synthetic oligonucleotide
  Sense strand starting at position 3723 of SEQ ID NO: 1887368
caggguacugcucaugaua

SEQ ID NO: 2467051 - RNA, 19 nt, Artificial Sequence
  Description of Artificial Sequence: Synthetic oligonucleotide
  Antisense strand to SEQ ID NO: 2467050
uaucaugagcaguacccug

SEQ ID NO: 2467052 - RNA, 19 nt, Artificial Sequence
  Description of Artificial Sequence: Synthetic oligonucleotide
  Sense strand starting at position 3725 of SEQ ID NO: 1887368
ggguacugcucaugauaaa

SEQ ID NO: 2467053 - RNA, 19 nt, Artificial Sequence
  Description of Artificial Sequence: Synthetic oligonucleotide
  Antisense strand to SEQ ID NO: 2467052
uuuaucaugagcaguaccc

SEQ ID NO: 2467054 - RNA, 19 nt, Artificial Sequence
  Description of Artificial Sequence: Synthetic oligonucleotide
  Sense strand starting at position 3726 of SEQ ID NO: 1887368
gguacugcucaugauaaau

SEQ ID NO: 2467055 - RNA, 19 nt, Artificial Sequence
  Description of Artificial Sequence: Synthetic oligonucleotide
  Antisense strand to SEQ ID NO: 2467054
auuuaucaugagcaguacc

SEQ ID NO: 2467056 - RNA, 19 nt, Artificial Sequence
  Description of Artificial Sequence: Synthetic oligonucleotide
  Sense strand starting at position 41 of SEQ ID NO: 1887369
acaggaaguugugucagaa

SEQ ID NO: 2467057 - RNA, 19 nt, Artificial Sequence
  Description of Artificial Sequence: Synthetic oligonucleotide
  Antisense strand to SEQ ID NO: 2467056
uucugacacaacuuccugu

SEQ ID NO: 2467058 - RNA, 19 nt, Artificial Sequence
  Description of Artificial Sequence: Synthetic oligonucleotide
  Sense strand starting at position 59 of SEQ ID NO: 1887369
agaggauccuuguuuggga

SEQ ID NO: 2467059 - RNA, 19 nt, Artificial Sequence
  Description of Artificial Sequence: Synthetic oligonucleotide
  Antisense strand to SEQ ID NO: 2467058
ucccaaacaaggauccucu

SEQ ID NO: 2467060 - RNA, 19 nt, Artificial Sequence
  Description of Artificial Sequence: Synthetic oligonucleotide
  Sense strand starting at position 60 of SEQ ID NO: 1887369
gaggauccuuguuugggaa

SEQ ID NO: 2467061 - RNA, 19 nt, Artificial Sequence
  Description of Artificial Sequence: Synthetic oligonucleotide
  Antisense strand to SEQ ID NO: 2467060
uucccaaacaaggauccuc

SEQ ID NO: 2467062 - RNA, 19 nt, Artificial Sequence
  Description of Artificial Sequence: Synthetic oligonucleotide
  Sense strand starting at position 61 of SEQ ID NO: 1887369
aggauccuuguuugggaau

SEQ ID NO: 2467063 - RNA, 19 nt, Artificial Sequence
  Description of Artificial Sequence: Synthetic oligonucleotide
  Antisense strand to SEQ ID NO: 2467062
auucccaaacaaggauccu

SEQ ID NO: 2467064 - RNA, 19 nt, Artificial Sequence
  Description of Artificial Sequence: Synthetic oligonucleotide
  Sense strand starting at position 175 of SEQ ID NO: 1887369
agugcuacucaugacuuga

SEQ ID NO: 2467065 - RNA, 19 nt, Artificial Sequence
  Description of Artificial Sequence: Synthetic oligonucleotide
  Antisense strand to SEQ ID NO: 2467064
ucaagucaugaguagcacu

SEQ ID NO: 2467066 - RNA, 19 nt, Artificial Sequence
  Description of Artificial Sequence: Synthetic oligonucleotide
  Sense strand starting at position 183 of SEQ ID NO: 1887369
ucaugacuugaaggaguuu

SEQ ID NO: 2467067 - RNA, 19 nt, Artificial Sequence
  Description of Artificial Sequence: Synthetic oligonucleotide
  Antisense strand to SEQ ID NO: 2467066
aaacuccuucaagucauga

SEQ ID NO: 2467068 - RNA, 19 nt, Artificial Sequence
  Description of Artificial Sequence: Synthetic oligonucleotide
  Sense strand starting at position 253 of SEQ ID NO: 1887369
accuaaacggccgaauaua

SEQ ID NO: 2467069 - RNA, 19 nt, Artificial Sequence
  Description of Artificial Sequence: Synthetic oligonucleotide
  Antisense strand to SEQ ID NO: 2467068
uauauucggccguuuaggu

SEQ ID NO: 2467070 - RNA, 19 nt, Artificial Sequence
  Description of Artificial Sequence: Synthetic oligonucleotide
  Sense strand starting at position 262 of SEQ ID NO: 1887369
gccgaauauagguacaaau

SEQ ID NO: 2467071 - RNA, 19 nt, Artificial Sequence
  Description of Artificial Sequence: Synthetic oligonucleotide
  Antisense strand to SEQ ID NO: 2467070
auuuguaccuauauucggc

SEQ ID NO: 2467072 - RNA, 19 nt, Artificial Sequence
  Description of Artificial Sequence: Synthetic oligonucleotide
  Sense strand starting at position 297 of SEQ ID NO: 1887369
aauacauucuggcuaggga

SEQ ID NO: 2467073 - RNA, 19 nt, Artificial Sequence
  Description of Artificial Sequence: Synthetic oligonucleotide
  Antisense strand to SEQ ID NO: 2467072
ucccuagccagaauguauu

SEQ ID NO: 2467074 - RNA, 19 nt, Artificial Sequence
  Description of Artificial Sequence: Synthetic oligonucleotide
  Sense strand starting at position 321 of SEQ ID NO: 1887369
aggaguuauuuacagaaga

SEQ ID NO: 2467075 - RNA, 19 nt, Artificial Sequence
  Description of Artificial Sequence: Synthetic oligonucleotide
  Antisense strand to SEQ ID NO: 2467074
ucuucuguaaauaacuccu

SEQ ID NO: 2467076 - RNA, 19 nt, Artificial Sequence
  Description of Artificial Sequence: Synthetic oligonucleotide
  Sense strand starting at position 449 of SEQ ID NO: 1887369
gaauaagcauaguuacuga

SEQ ID NO: 2467077 - RNA, 19 nt, Artificial Sequence
  Description of Artificial Sequence: Synthetic oligonucleotide
  Antisense strand to SEQ ID NO: 2467076
ucaguaacuaugcuuauuc

SEQ ID NO: 2467078 - RNA, 19 nt, Artificial Sequence
  Description of Artificial Sequence: Synthetic oligonucleotide
  Sense strand starting at position 712 of SEQ ID NO: 1887369
gagacugaauguguuacua

SEQ ID NO: 2467079 - RNA, 19 nt, Artificial Sequence
  Description of Artificial Sequence: Synthetic oligonucleotide
  Antisense strand to SEQ ID NO: 2467078
uaguaacacauucagucuc

SEQ ID NO: 2467080 - RNA, 19 nt, Artificial Sequence
  Description of Artificial Sequence: Synthetic oligonucleotide
  Sense strand starting at position 766 of SEQ ID NO: 1887369
gcuugauauuucccuguau

SEQ ID NO: 2467081 - RNA, 19 nt, Artificial Sequence
  Description of Artificial Sequence: Synthetic oligonucleotide
  Antisense strand to SEQ ID NO: 2467080
auacagggaaauaucaagc

SEQ ID NO: 2467082 - RNA, 19 nt, Artificial Sequence
  Description of Artificial Sequence: Synthetic oligonucleotide
  Sense strand starting at position 1063 of SEQ ID NO: 1887369
uuuauacugccugagaaau

SEQ ID NO: 2467083 - RNA, 19 nt, Artificial Sequence
  Description of Artificial Sequence: Synthetic oligonucleotide
  Antisense strand to SEQ ID NO: 2467082
auuucucaggcaguauaaa

SEQ ID NO: 2467084 - RNA, 19 nt, Artificial Sequence
  Description of Artificial Sequence: Synthetic oligonucleotide
  Sense strand starting at position 1090 of SEQ ID NO: 1887369
aucaguaaagcugauuagu

SEQ ID NO: 2467085 - RNA, 19 nt, Artificial Sequence
  Description of Artificial Sequence: Synthetic oligonucleotide
  Antisense strand to SEQ ID NO: 2467084
acuaaucagcuuuacugau

SEQ ID NO: 2467086 - RNA, 19 nt, Artificial Sequence
  Description of Artificial Sequence: Synthetic oligonucleotide
  Sense strand starting at position 1425 of SEQ ID NO: 1887369
gcgucuuuagacucucgca

SEQ ID NO: 2467087 - RNA, 19 nt, Artificial Sequence
  Description of Artificial Sequence: Synthetic oligonucleotide
  Antisense strand to SEQ ID NO: 2467086
ugcgagagucuaaagacgc

SEQ ID NO: 2467088 - RNA, 19 nt, Artificial Sequence
  Description of Artificial Sequence: Synthetic oligonucleotide
  Sense strand starting at position 2316 of SEQ ID NO: 1887369
ggaaacuccuagccugaau

SEQ ID NO: 2467089 - RNA, 19 nt, Artificial Sequence
  Description of Artificial Sequence: Synthetic oligonucleotide
  Antisense strand to SEQ ID NO: 2467088
auucaggcuaggaguuucc

SEQ ID NO: 2467090 - RNA, 19 nt, Artificial Sequence
  Description of Artificial Sequence: Synthetic oligonucleotide
  Sense strand starting at position 2553 of SEQ ID NO: 1887369
gugacugguccgaguaguu

SEQ ID NO: 2467091 - RNA, 19 nt, Artificial Sequence
  Description of Artificial Sequence: Synthetic oligonucleotide
  Antisense strand to SEQ ID NO: 2467090
aacuacucggaccagucac

SEQ ID NO: 2467092 - RNA, 19 nt, Artificial Sequence
  Description of Artificial Sequence: Synthetic oligonucleotide
  Sense strand starting at position 2769 of SEQ ID NO: 1887369
acguuaguggcguuaaacu

SEQ ID NO: 2467093 - RNA, 19 nt, Artificial Sequence
  Description of Artificial Sequence: Synthetic oligonucleotide
  Antisense strand to SEQ ID NO: 2467092
aguuuaacgccacuaacgu

SEQ ID NO: 2467094 - RNA, 19 nt, Artificial Sequence
  Description of Artificial Sequence: Synthetic oligonucleotide
  Sense strand starting at position 2777 of SEQ ID NO: 1887369
ggcguuaaacuauagauau

SEQ ID NO: 2467095 - RNA, 19 nt, Artificial Sequence
  Description of Artificial Sequence: Synthetic oligonucleotide
  Antisense strand to SEQ ID NO: 2467094
auaucuauaguuuaacgcc

SEQ ID NO: 2467096 - RNA, 19 nt, Artificial Sequence
  Description of Artificial Sequence: Synthetic oligonucleotide
  Sense strand starting at position 2788 of SEQ ID NO: 1887369
auagauauugucgggagag

SEQ ID NO: 2467097 - RNA, 19 nt, Artificial Sequence
  Description of Artificial Sequence: Synthetic oligonucleotide
  Antisense strand to SEQ ID NO: 2467096
cucucccgacaauaucuau

SEQ ID NO: 2467098 - RNA, 19 nt, Artificial Sequence
  Description of Artificial Sequence: Synthetic oligonucleotide
  Sense strand starting at position 2790 of SEQ ID NO: 1887369
agauauugucgggagaguu

SEQ ID NO: 2467099 - RNA, 19 nt, Artificial Sequence
  Description of Artificial Sequence: Synthetic oligonucleotide
  Antisense strand to SEQ ID NO: 2467098
aacucucccgacaauaucu

SEQ ID NO: 2467100 - RNA, 19 nt, Artificial Sequence
  Description of Artificial Sequence: Synthetic oligonucleotide
  Sense strand starting at position 2914 of SEQ ID NO: 1887369
uuagguugcagauaauaug

SEQ ID NO: 2467101 - RNA, 19 nt, Artificial Sequence
  Description of Artificial Sequence: Synthetic oligonucleotide
  Antisense strand to SEQ ID NO: 2467100
cauauuaucugcaaccuaa

SEQ ID NO: 2467102 - RNA, 19 nt, Artificial Sequence
  Description of Artificial Sequence: Synthetic oligonucleotide
  Sense strand starting at position 3135 of SEQ ID NO: 1887369
ucaugaucggacgagaagu

SEQ ID NO: 2467103 - RNA, 19 nt, Artificial Sequence
  Description of Artificial Sequence: Synthetic oligonucleotide
  Antisense strand to SEQ ID NO: 2467102
acuucucguccgaucauga

SEQ ID NO: 2467104 - RNA, 19 nt, Artificial Sequence
  Description of Artificial Sequence: Synthetic oligonucleotide
  Sense strand starting at position 3145 of SEQ ID NO: 1887369
acgagaaguaucuagguga

SEQ ID NO: 2467105 - RNA, 19 nt, Artificial Sequence
  Description of Artificial Sequence: Synthetic oligonucleotide
  Antisense strand to SEQ ID NO: 2467104
ucaccuagauacuucucgu

SEQ ID NO: 2467106 - RNA, 19 nt, Artificial Sequence
  Description of Artificial Sequence: Synthetic oligonucleotide
  Sense strand starting at position 3148 of SEQ ID NO: 1887369
agaaguaucuaggugacug

SEQ ID NO: 2467107 - RNA, 19 nt, Artificial Sequence
  Description of Artificial Sequence: Synthetic oligonucleotide
  Antisense strand to SEQ ID NO: 2467106
cagucaccuagauacuucu

SEQ ID NO: 2467108 - RNA, 19 nt, Artificial Sequence
  Description of Artificial Sequence: Synthetic oligonucleotide
  Sense strand starting at position 3149 of SEQ ID NO: 1887369
gaaguaucuaggugacuga

SEQ ID NO: 2467109 - RNA, 19 nt, Artificial Sequence
  Description of Artificial Sequence: Synthetic oligonucleotide
  Antisense strand to SEQ ID NO: 2467108
ucagucaccuagauacuuc

SEQ ID NO: 2467110 - RNA, 19 nt, Artificial Sequence
  Description of Artificial Sequence: Synthetic oligonucleotide
  Sense strand starting at position 3152 of SEQ ID NO: 1887369
guaucuaggugacugaaga

SEQ ID NO: 2467111 - RNA, 19 nt, Artificial Sequence
  Description of Artificial Sequence: Synthetic oligonucleotide
  Antisense strand to SEQ ID NO: 2467110
ucuucagucaccuagauac

SEQ ID NO: 2467112 - RNA, 19 nt, Artificial Sequence
  Description of Artificial Sequence: Synthetic oligonucleotide
  Sense strand starting at position 3153 of SEQ ID NO: 1887369
uaucuaggugacugaagau

SEQ ID NO: 2467113 - RNA, 19 nt, Artificial Sequence
  Description of Artificial Sequence: Synthetic oligonucleotide
  Antisense strand to SEQ ID NO: 2467112
aucuucagucaccuagaua

SEQ ID NO: 2467114 - RNA, 19 nt, Artificial Sequence
  Description of Artificial Sequence: Synthetic oligonucleotide
  Sense strand starting at position 3236 of SEQ ID NO: 1887369
ucauaauaggcugaugagu

SEQ ID NO: 2467115 - RNA, 19 nt, Artificial Sequence
  Description of Artificial Sequence: Synthetic oligonucleotide
  Antisense strand to SEQ ID NO: 2467114
acucaucagccuauuauga

SEQ ID NO: 2467116 - RNA, 19 nt, Artificial Sequence
  Description of Artificial Sequence: Synthetic oligonucleotide
  Sense strand starting at position 3242 of SEQ ID NO: 1887369
uaggcugaugaguaaguaa

SEQ ID NO: 2467117 - RNA, 19 nt, Artificial Sequence
  Description of Artificial Sequence: Synthetic oligonucleotide
  Antisense strand to SEQ ID NO: 2467116
uuacuuacucaucagccua

SEQ ID NO: 2467118 - RNA, 19 nt, Artificial Sequence
  Description of Artificial Sequence: Synthetic oligonucleotide
  Sense strand starting at position 3313 of SEQ ID NO: 1887369
cuaagacuuugaucacuug

SEQ ID NO: 2467119 - RNA, 19 nt, Artificial Sequence
  Description of Artificial Sequence: Synthetic oligonucleotide
  Antisense strand to SEQ ID NO: 2467118
caagugaucaaagucuuag

SEQ ID NO: 2467120 - RNA, 19 nt, Artificial Sequence
  Description of Artificial Sequence: Synthetic oligonucleotide
  Sense strand starting at position 3320 of SEQ ID NO: 1887369
uuugaucacuuguugagga

SEQ ID NO: 2467121 - RNA, 19 nt, Artificial Sequence
  Description of Artificial Sequence: Synthetic oligonucleotide
  Antisense strand to SEQ ID NO: 2467120
uccucaacaagugaucaaa

SEQ ID NO: 2467122 - RNA, 19 nt, Artificial Sequence
  Description of Artificial Sequence: Synthetic oligonucleotide
  Sense strand starting at position 3416 of SEQ ID NO: 1887369
guccacucacucgaagaau

SEQ ID NO: 2467123 - RNA, 19 nt, Artificial Sequence
  Description of Artificial Sequence: Synthetic oligonucleotide
  Antisense strand to SEQ ID NO: 2467122
auucuucgagugaguggac

SEQ ID NO: 2467124 - RNA, 19 nt, Artificial Sequence
  Description of Artificial Sequence: Synthetic oligonucleotide
  Sense strand starting at position 3449 of SEQ ID NO: 1887369
aucuucuuugggcaaacau

SEQ ID NO: 2467125 - RNA, 19 nt, Artificial Sequence
  Description of Artificial Sequence: Synthetic oligonucleotide
  Antisense strand to SEQ ID NO: 2467124
auguuugcccaaagaagau

SEQ ID NO: 2467126 - RNA, 19 nt, Artificial Sequence
  Description of Artificial Sequence: Synthetic oligonucleotide
  Sense strand starting at position 3493 of SEQ ID NO: 1887369
ugagcuuaucaccagugau

SEQ ID NO: 2467127 - RNA, 19 nt, Artificial Sequence
  Description of Artificial Sequence: Synthetic oligonucleotide
  Antisense strand to SEQ ID NO: 2467126
aucacuggugauaagcuca

SEQ ID NO: 2467128 - RNA, 19 nt, Artificial Sequence
  Description of Artificial Sequence: Synthetic oligonucleotide
  Sense strand starting at position 3525 of SEQ ID NO: 1887369
agaaaugacucuuaauuug

SEQ ID NO: 2467129 - RNA, 19 nt, Artificial Sequence
  Description of Artificial Sequence: Synthetic oligonucleotide
  Antisense strand to SEQ ID NO: 2467128
caaauuaagagucauuucu

SEQ ID NO: 2467130 - RNA, 19 nt, Artificial Sequence
  Description of Artificial Sequence: Synthetic oligonucleotide
  Sense strand starting at position 3822 of SEQ ID NO: 1887369
auuuacagucuuugucuua

SEQ ID NO: 2467131 - RNA, 19 nt, Artificial Sequence
  Description of Artificial Sequence: Synthetic oligonucleotide
  Antisense strand to SEQ ID NO: 2467130
uaagacaaagacuguaaau

SEQ ID NO: 2467132 - RNA, 19 nt, Artificial Sequence
  Description of Artificial Sequence: Synthetic oligonucleotide
  Sense strand starting at position 3876 of SEQ ID NO: 1887369
ugggaaacacauugagcau

SEQ ID NO: 2467133 - RNA, 19 nt, Artificial Sequence
  Description of Artificial Sequence: Synthetic oligonucleotide
  Antisense strand to SEQ ID NO: 2467132
augcucaauguguuuccca

SEQ ID NO: 2467134 - RNA, 19 nt, Artificial Sequence
  Description of Artificial Sequence: Synthetic oligonucleotide
  Sense strand starting at position 3888 of SEQ ID NO: 1887369
ugagcaucauaucugacau

SEQ ID NO: 2467135 - RNA, 19 nt, Artificial Sequence
  Description of Artificial Sequence: Synthetic oligonucleotide
  Antisense strand to SEQ ID NO: 2467134
augucagauaugaugcuca

SEQ ID NO: 2467136 - RNA, 19 nt, Artificial Sequence
  Description of Artificial Sequence: Synthetic oligonucleotide
  Sense strand starting at position 135 of SEQ ID NO: 1887370
gcacuccugcucuaaauga

SEQ ID NO: 2467137 - RNA, 19 nt, Artificial Sequence
  Description of Artificial Sequence: Synthetic oligonucleotide
  Antisense strand to SEQ ID NO: 2467136
ucauuuagagcaggagugc

SEQ ID NO: 2467138 - RNA, 19 nt, Artificial Sequence
  Description of Artificial Sequence: Synthetic oligonucleotide
  Sense strand starting at position 142 of SEQ ID NO: 1887370
ugcucuaaaugagucacua

SEQ ID NO: 2467139 - RNA, 19 nt, Artificial Sequence
  Description of Artificial Sequence: Synthetic oligonucleotide
  Antisense strand to SEQ ID NO: 2467138
uagugacucauuuagagca

SEQ ID NO: 2467140 - RNA, 19 nt, Artificial Sequence
  Description of Artificial Sequence: Synthetic oligonucleotide
  Sense strand starting at position 1239 of SEQ ID NO: 1887370
guuauacgggcucaagauu

SEQ ID NO: 2467141 - RNA, 19 nt, Artificial Sequence
  Description of Artificial Sequence: Synthetic oligonucleotide
  Antisense strand to SEQ ID NO: 2467140
aaucuugagcccguauaac

SEQ ID NO: 2467142 - RNA, 19 nt, Artificial Sequence
  Description of Artificial Sequence: Synthetic oligonucleotide
  Sense strand starting at position 2022 of SEQ ID NO: 1887370
cuuucuaucugccagaagu

SEQ ID NO: 2467143 - RNA, 19 nt, Artificial Sequence
  Description of Artificial Sequence: Synthetic oligonucleotide
  Antisense strand to SEQ ID NO: 2467142
acuucuggcagauagaaag

SEQ ID NO: 2467144 - RNA, 19 nt, Artificial Sequence
  Description of Artificial Sequence: Synthetic oligonucleotide
  Sense strand starting at position 2024 of SEQ ID NO: 1887370
uucuaucugccagaagugu

SEQ ID NO: 2467145 - RNA, 19 nt, Artificial Sequence
  Description of Artificial Sequence: Synthetic oligonucleotide
  Antisense strand to SEQ ID NO: 2467144
acacuucuggcagauagaa

SEQ ID NO: 2467146 - RNA, 19 nt, Artificial Sequence
  Description of Artificial Sequence: Synthetic oligonucleotide
  Sense strand starting at position 2447 of SEQ ID NO: 1887370
ucaugagaaucugugcaau

SEQ ID NO: 2467147 - RNA, 19 nt, Artificial Sequence
  Description of Artificial Sequence: Synthetic oligonucleotide
  Antisense strand to SEQ ID NO: 2467146
auugcacagauucucauga

SEQ ID NO: 2467148 - RNA, 19 nt, Artificial Sequence
  Description of Artificial Sequence: Synthetic oligonucleotide
  Sense strand starting at position 2449 of SEQ ID NO: 1887370
augagaaucugugcaaugu

SEQ ID NO: 2467149 - RNA, 19 nt, Artificial Sequence
  Description of Artificial Sequence: Synthetic oligonucleotide
  Antisense strand to SEQ ID NO: 2467148
acauugcacagauucucau

SEQ ID NO: 2467150 - RNA, 19 nt, Artificial Sequence
  Description of Artificial Sequence: Synthetic oligonucleotide
  Sense strand starting at position 2450 of SEQ ID NO: 1887370
ugagaaucugugcaaugua

SEQ ID NO: 2467151 - RNA, 19 nt, Artificial Sequence
  Description of Artificial Sequence: Synthetic oligonucleotide
  Antisense strand to SEQ ID NO: 2467150
uacauugcacagauucuca

SEQ ID NO: 2467152 - RNA, 19 nt, Artificial Sequence
  Description of Artificial Sequence: Synthetic oligonucleotide
  Sense strand starting at position 2453 of SEQ ID NO: 1887370
gaaucugugcaauguauuu

SEQ ID NO: 2467153 - RNA, 19 nt, Artificial Sequence
  Description of Artificial Sequence: Synthetic oligonucleotide
  Antisense strand to SEQ ID NO: 2467152
aaauacauugcacagauuc

SEQ ID NO: 2467154 - RNA, 19 nt, Artificial Sequence
  Description of Artificial Sequence: Synthetic oligonucleotide
  Sense strand starting at position 2458 of SEQ ID NO: 1887370
ugugcaauguauuucgaag

SEQ ID NO: 2467155 - RNA, 19 nt, Artificial Sequence
  Description of Artificial Sequence: Synthetic oligonucleotide
  Antisense strand to SEQ ID NO: 2467154
cuucgaaauacauugcaca

SEQ ID NO: 2467156 - RNA, 19 nt, Artificial Sequence
  Description of Artificial Sequence: Synthetic oligonucleotide
  Sense strand starting at position 2460 of SEQ ID NO: 1887370
ugcaauguauuucgaagaa

SEQ ID NO: 2467157 - RNA, 19 nt, Artificial Sequence
  Description of Artificial Sequence: Synthetic oligonucleotide
  Antisense strand to SEQ ID NO: 2467156
uucuucgaaauacauugca

SEQ ID NO: 2467158 - RNA, 19 nt, Artificial Sequence
  Description of Artificial Sequence: Synthetic oligonucleotide
  Sense strand starting at position 2498 of SEQ ID NO: 1887370
cucaguaauugauagauau

SEQ ID NO: 2467159 - RNA, 19 nt, Artificial Sequence
  Description of Artificial Sequence: Synthetic oligonucleotide
  Antisense strand to SEQ ID NO: 2467158
auaucuaucaauuacugag

SEQ ID NO: 2467160 - RNA, 19 nt, Artificial Sequence
  Description of Artificial Sequence: Synthetic oligonucleotide
  Sense strand starting at position 2679 of SEQ ID NO: 1887370
auaagucauucuuuguuac

SEQ ID NO: 2467161 - RNA, 19 nt, Artificial Sequence
  Description of Artificial Sequence: Synthetic oligonucleotide
  Antisense strand to SEQ ID NO: 2467160
guaacaaagaaugacuuau

SEQ ID NO: 2467162 - RNA, 19 nt, Artificial Sequence
  Description of Artificial Sequence: Synthetic oligonucleotide
  Sense strand starting at position 2682 of SEQ ID NO: 1887370
agucauucuuuguuacaag

SEQ ID NO: 2467163 - RNA, 19 nt, Artificial Sequence
  Description of Artificial Sequence: Synthetic oligonucleotide
  Antisense strand to SEQ ID NO: 2467162
cuuguaacaaagaaugacu

SEQ ID NO: 2467164 - RNA, 19 nt, Artificial Sequence
  Description of Artificial Sequence: Synthetic oligonucleotide
  Sense strand starting at position 2683 of SEQ ID NO: 1887370
gucauucuuuguuacaagu

SEQ ID NO: 2467165 - RNA, 19 nt, Artificial Sequence
  Description of Artificial Sequence: Synthetic oligonucleotide
  Antisense strand to SEQ ID NO: 2467164
acuuguaacaaagaaugac

SEQ ID NO: 2467166 - RNA, 19 nt, Artificial Sequence
  Description of Artificial Sequence: Synthetic oligonucleotide
  Sense strand starting at position 2811 of SEQ ID NO: 1887370
ggcaguuguagucauagga

SEQ ID NO: 2467167 - RNA, 19 nt, Artificial Sequence
  Description of Artificial Sequence: Synthetic oligonucleotide
  Antisense strand to SEQ ID NO: 2467166
uccuaugacuacaacugcc

SEQ ID NO: 2467168 - RNA, 19 nt, Artificial Sequence
  Description of Artificial Sequence: Synthetic oligonucleotide
  Sense strand starting at position 2815 of SEQ ID NO: 1887370
guuguagucauaggauuaa

SEQ ID NO: 2467169 - RNA, 19 nt, Artificial Sequence
  Description of Artificial Sequence: Synthetic oligonucleotide
  Antisense strand to SEQ ID NO: 2467168
uuaauccuaugacuacaac

SEQ ID NO: 2467170 - RNA, 19 nt, Artificial Sequence
  Description of Artificial Sequence: Synthetic oligonucleotide
  Sense strand starting at position 3230 of SEQ ID NO: 1887370
gcagguaaaugcgaaauuu

SEQ ID NO: 2467171 - RNA, 19 nt, Artificial Sequence
  Description of Artificial Sequence: Synthetic oligonucleotide
  Antisense strand to SEQ ID NO: 2467170
aaauuucgcauuuaccugc

SEQ ID NO: 2467172 - RNA, 19 nt, Artificial Sequence
  Description of Artificial Sequence: Synthetic oligonucleotide
  Sense strand starting at position 3477 of SEQ ID NO: 1887370
auaugugccuaauaagaug

SEQ ID NO: 2467173 - RNA, 19 nt, Artificial Sequence
  Description of Artificial Sequence: Synthetic oligonucleotide
  Antisense strand to SEQ ID NO: 2467172
caucuuauuaggcacauau

SEQ ID NO: 2467174 - RNA, 19 nt, Artificial Sequence
  Description of Artificial Sequence: Synthetic oligonucleotide
  Sense strand starting at position 3791 of SEQ ID NO: 1887370
cagauaacgcaagacugua

SEQ ID NO: 2467175 - RNA, 19 nt, Artificial Sequence
  Description of Artificial Sequence: Synthetic oligonucleotide
  Antisense strand to SEQ ID NO: 2467174
uacagucuugcguuaucug

SEQ ID NO: 2467176 - RNA, 19 nt, Artificial Sequence
  Description of Artificial Sequence: Synthetic oligonucleotide
  Sense strand starting at position 3799 of SEQ ID NO: 1887370
gcaagacuguagucugugu

SEQ ID NO: 2467177 - RNA, 19 nt, Artificial Sequence
  Description of Artificial Sequence: Synthetic oligonucleotide
  Antisense strand to SEQ ID NO: 2467176
acacagacuacagucuugc

SEQ ID NO: 2467178 - RNA, 19 nt, Artificial Sequence
  Description of Artificial Sequence: Synthetic oligonucleotide
  Sense strand starting at position 3816 of SEQ ID NO: 1887370
guguauguauaaucaaagu

SEQ ID NO: 2467179 - RNA, 19 nt, Artificial Sequence
  Description of Artificial Sequence: Synthetic oligonucleotide
  Antisense strand to SEQ ID NO: 2467178
acuuugauuauacauacac

SEQ ID NO: 2467180 - RNA, 19 nt, Artificial Sequence
  Description of Artificial Sequence: Synthetic oligonucleotide
  Sense strand starting at position 3902 of SEQ ID NO: 1887370
accuuuaguggucacauau

SEQ ID NO: 2467181 - RNA, 19 nt, Artificial Sequence
  Description of Artificial Sequence: Synthetic oligonucleotide
  Antisense strand to SEQ ID NO: 2467180
auaugugaccacuaaaggu

SEQ ID NO: 2467182 - RNA, 19 nt, Artificial Sequence
  Description of Artificial Sequence: Synthetic oligonucleotide
  Sense strand starting at position 123 of SEQ ID NO: 1887371
gggcuuagucuguaaauca

SEQ ID NO: 2467183 - RNA, 19 nt, Artificial Sequence
  Description of Artificial Sequence: Synthetic oligonucleotide
  Antisense strand to SEQ ID NO: 2467182
ugauuuacagacuaagccc

SEQ ID NO: 2467184 - RNA, 19 nt, Artificial Sequence
  Description of Artificial Sequence: Synthetic oligonucleotide
  Sense strand starting at position 130 of SEQ ID NO: 1887371
gucuguaaaucaguaacaa

SEQ ID NO: 2467185 - RNA, 19 nt, Artificial Sequence
  Description of Artificial Sequence: Synthetic oligonucleotide
  Antisense strand to SEQ ID NO: 2467184
uuguuacugauuuacagac

SEQ ID NO: 2467186 - RNA, 19 nt, Artificial Sequence
  Description of Artificial Sequence: Synthetic oligonucleotide
  Sense strand starting at position 1113 of SEQ ID NO: 1887371
auacaauaugcgcaucuaa

SEQ ID NO: 2467187 - RNA, 19 nt, Artificial Sequence
  Description of Artificial Sequence: Synthetic oligonucleotide
  Antisense strand to SEQ ID NO: 2467186
uuagaugcgcauauuguau

SEQ ID NO: 2467188 - RNA, 19 nt, Artificial Sequence
  Description of Artificial Sequence: Synthetic oligonucleotide
  Sense strand starting at position 1141 of SEQ ID NO: 1887371
auuugcuucuacucgacua

SEQ ID NO: 2467189 - RNA, 19 nt, Artificial Sequence
  Description of Artificial Sequence: Synthetic oligonucleotide
  Antisense strand to SEQ ID NO: 2467188
uagucgaguagaagcaaau

SEQ ID NO: 2467190 - RNA, 19 nt, Artificial Sequence
  Description of Artificial Sequence: Synthetic oligonucleotide
  Sense strand starting at position 1289 of SEQ ID NO: 1887371
gcccucuuggucuaagaau

SEQ ID NO: 2467191 - RNA, 19 nt, Artificial Sequence
  Description of Artificial Sequence: Synthetic oligonucleotide
  Antisense strand to SEQ ID NO: 2467190
auucuuagaccaagagggc

SEQ ID NO: 2467192 - RNA, 19 nt, Artificial Sequence
  Description of Artificial Sequence: Synthetic oligonucleotide
  Sense strand starting at position 1295 of SEQ ID NO: 1887371
uuggucuaagaauguauua

SEQ ID NO: 2467193 - RNA, 19 nt, Artificial Sequence
  Description of Artificial Sequence: Synthetic oligonucleotide
  Antisense strand to SEQ ID NO: 2467192
uaauacauucuuagaccaa

SEQ ID NO: 2467194 - RNA, 19 nt, Artificial Sequence
  Description of Artificial Sequence: Synthetic oligonucleotide
  Sense strand starting at position 1623 of SEQ ID NO: 1887371
uugaauguguuccugaaau

SEQ ID NO: 2467195 - RNA, 19 nt, Artificial Sequence
  Description of Artificial Sequence: Synthetic oligonucleotide
  Antisense strand to SEQ ID NO: 2467194
auuucaggaacacauucaa

SEQ ID NO: 2467196 - RNA, 19 nt, Artificial Sequence
  Description of Artificial Sequence: Synthetic oligonucleotide
  Sense strand starting at position 1654 of SEQ ID NO: 1887371
ucagauaguuccuucuccu

SEQ ID NO: 2467197 - RNA, 19 nt, Artificial Sequence
  Description of Artificial Sequence: Synthetic oligonucleotide
  Antisense strand to SEQ ID NO: 2467196
aggagaaggaacuaucuga

SEQ ID NO: 2467198 - RNA, 19 nt, Artificial Sequence
  Description of Artificial Sequence: Synthetic oligonucleotide
  Sense strand starting at position 1671 of SEQ ID NO: 1887371
cucaguagucuugaccuca

SEQ ID NO: 2467199 - RNA, 19 nt, Artificial Sequence
  Description of Artificial Sequence: Synthetic oligonucleotide
  Antisense strand to SEQ ID NO: 2467198
ugaggucaagacuacugag

SEQ ID NO: 2467200 - RNA, 19 nt, Artificial Sequence
  Description of Artificial Sequence: Synthetic oligonucleotide
  Sense strand starting at position 1831 of SEQ ID NO: 1887371
gggugauaugugcaagcau

SEQ ID NO: 2467201 - RNA, 19 nt, Artificial Sequence
  Description of Artificial Sequence: Synthetic oligonucleotide
  Antisense strand to SEQ ID NO: 2467200
augcuugcacauaucaccc

SEQ ID NO: 2467202 - RNA, 19 nt, Artificial Sequence
  Description of Artificial Sequence: Synthetic oligonucleotide
  Sense strand starting at position 1972 of SEQ ID NO: 1887371
agccaaucccguguugcua

SEQ ID NO: 2467203 - RNA, 19 nt, Artificial Sequence
  Description of Artificial Sequence: Synthetic oligonucleotide
  Antisense strand to SEQ ID NO: 2467202
uagcaacacgggauuggcu

SEQ ID NO: 2467204 - RNA, 19 nt, Artificial Sequence
  Description of Artificial Sequence: Synthetic oligonucleotide
  Sense strand starting at position 2074 of SEQ ID NO: 1887371
ggauaaauuauaggugcaa

SEQ ID NO: 2467205 - RNA, 19 nt, Artificial Sequence
  Description of Artificial Sequence: Synthetic oligonucleotide
  Antisense strand to SEQ ID NO: 2467204
uugcaccuauaauuuaucc

SEQ ID NO: 2467206 - RNA, 19 nt, Artificial Sequence
  Description of Artificial Sequence: Synthetic oligonucleotide
  Sense strand starting at position 2075 of SEQ ID NO: 1887371
gauaaauuauaggugcaac

SEQ ID NO: 2467207 - RNA, 19 nt, Artificial Sequence
  Description of Artificial Sequence: Synthetic oligonucleotide
  Antisense strand to SEQ ID NO: 2467206
guugcaccuauaauuuauc

SEQ ID NO: 2467208 - RNA, 19 nt, Artificial Sequence
  Description of Artificial Sequence: Synthetic oligonucleotide
  Sense strand starting at position 2201 of SEQ ID NO: 1887371
cacaguacgagucaacgaa

SEQ ID NO: 2467209 - RNA, 19 nt, Artificial Sequence
  Description of Artificial Sequence: Synthetic oligonucleotide
  Antisense strand to SEQ ID NO: 2467208
uucguugacucguacugug

SEQ ID NO: 2467210 - RNA, 19 nt, Artificial Sequence
  Description of Artificial Sequence: Synthetic oligonucleotide
  Sense strand starting at position 2216 of SEQ ID NO: 1887371
cgaauuucagcguggcuaa

SEQ ID NO: 2467211 - RNA, 19 nt, Artificial Sequence
  Description of Artificial Sequence: Synthetic oligonucleotide
  Antisense strand to SEQ ID NO: 2467210
uuagccacgcugaaauucg

SEQ ID NO: 2467212 - RNA, 19 nt, Artificial Sequence
  Description of Artificial Sequence: Synthetic oligonucleotide
  Sense strand starting at position 2338 of SEQ ID NO: 1887371
cagggagcaucuguaagau

SEQ ID NO: 2467213 - RNA, 19 nt, Artificial Sequence
  Description of Artificial Sequence: Synthetic oligonucleotide
  Antisense strand to SEQ ID NO: 2467212
aucuuacagaugcucccug

SEQ ID NO: 2467214 - RNA, 19 nt, Artificial Sequence
  Description of Artificial Sequence: Synthetic oligonucleotide
  Sense strand starting at position 2348 of SEQ ID NO: 1887371
cuguaagauccaugucacc

SEQ ID NO: 2467215 - RNA, 19 nt, Artificial Sequence
  Description of Artificial Sequence: Synthetic oligonucleotide
  Antisense strand to SEQ ID NO: 2467214
ggugacauggaucuuacag

SEQ ID NO: 2467216 - RNA, 19 nt, Artificial Sequence
  Description of Artificial Sequence: Synthetic oligonucleotide
  Sense strand starting at position 2395 of SEQ ID NO: 1887371
cauggaggguucucuagaa

SEQ ID NO: 2467217 - RNA, 19 nt, Artificial Sequence
  Description of Artificial Sequence: Synthetic oligonucleotide
  Antisense strand to SEQ ID NO: 2467216
uucuagagaacccuccaug

SEQ ID NO: 2467218 - RNA, 19 nt, Artificial Sequence
  Description of Artificial Sequence: Synthetic oligonucleotide
  Sense strand starting at position 2399 of SEQ ID NO: 1887371
gaggguucucuagaagcca

SEQ ID NO: 2467219 - RNA, 19 nt, Artificial Sequence
  Description of Artificial Sequence: Synthetic oligonucleotide
  Antisense strand to SEQ ID NO: 2467218
uggcuucuagagaacccuc

SEQ ID NO: 2467220 - RNA, 19 nt, Artificial Sequence
  Description of Artificial Sequence: Synthetic oligonucleotide
  Sense strand starting at position 2429 of SEQ ID NO: 1887371
ggagaugaaguaugcagau

SEQ ID NO: 2467221 - RNA, 19 nt, Artificial Sequence
  Description of Artificial Sequence: Synthetic oligonucleotide
  Antisense strand to SEQ ID NO: 2467220
aucugcauacuucaucucc

SEQ ID NO: 2467222 - RNA, 19 nt, Artificial Sequence
  Description of Artificial Sequence: Synthetic oligonucleotide
  Sense strand starting at position 2492 of SEQ ID NO: 1887371
ggauuuagcucccagauau

SEQ ID NO: 2467223 - RNA, 19 nt, Artificial Sequence
  Description of Artificial Sequence: Synthetic oligonucleotide
  Antisense strand to SEQ ID NO: 2467222
auaucugggagcuaaaucc

SEQ ID NO: 2467224 - RNA, 19 nt, Artificial Sequence
  Description of Artificial Sequence: Synthetic oligonucleotide
  Sense strand starting at position 2525 of SEQ ID NO: 1887371
ucugcuuuaguggauuaaa

SEQ ID NO: 2467225 - RNA, 19 nt, Artificial Sequence
  Description of Artificial Sequence: Synthetic oligonucleotide
  Antisense strand to SEQ ID NO: 2467224
uuuaauccacuaaagcaga

SEQ ID NO: 2467226 - RNA, 19 nt, Artificial Sequence
  Description of Artificial Sequence: Synthetic oligonucleotide
  Sense strand starting at position 2544 of SEQ ID NO: 1887371
aguugagacuccuuucuga

SEQ ID NO: 2467227 - RNA, 19 nt, Artificial Sequence
  Description of Artificial Sequence: Synthetic oligonucleotide
  Antisense strand to SEQ ID NO: 2467226
ucagaaaggagucucaacu

SEQ ID NO: 2467228 - RNA, 19 nt, Artificial Sequence
  Description of Artificial Sequence: Synthetic oligonucleotide
  Sense strand starting at position 2587 of SEQ ID NO: 1887371
uugcuauugcuggguauuu

SEQ ID NO: 2467229 - RNA, 19 nt, Artificial Sequence
  Description of Artificial Sequence: Synthetic oligonucleotide
  Antisense strand to SEQ ID NO: 2467228
aaauacccagcaauagcaa

SEQ ID NO: 2467230 - RNA, 19 nt, Artificial Sequence
  Description of Artificial Sequence: Synthetic oligonucleotide
  Sense strand starting at position 2640 of SEQ ID NO: 1887371
ugcacucaagauuaugcua

SEQ ID NO: 2467231 - RNA, 19 nt, Artificial Sequence
  Description of Artificial Sequence: Synthetic oligonucleotide
  Antisense strand to SEQ ID NO: 2467230
uagcauaaucuugagugca

SEQ ID NO: 2467232 - RNA, 19 nt, Artificial Sequence
  Description of Artificial Sequence: Synthetic oligonucleotide
  Sense strand starting at position 2643 of SEQ ID NO: 1887371
acucaagauuaugcuagaa

SEQ ID NO: 2467233 - RNA, 19 nt, Artificial Sequence
  Description of Artificial Sequence: Synthetic oligonucleotide
  Antisense strand to SEQ ID NO: 2467232
uucuagcauaaucuugagu

SEQ ID NO: 2467234 - RNA, 19 nt, Artificial Sequence
  Description of Artificial Sequence: Synthetic oligonucleotide
  Sense strand starting at position 2825 of SEQ ID NO: 1887371
gagacuuacuagguacagu

SEQ ID NO: 2467235 - RNA, 19 nt, Artificial Sequence
  Description of Artificial Sequence: Synthetic oligonucleotide
  Antisense strand to SEQ ID NO: 2467234
acuguaccuaguaagucuc

SEQ ID NO: 2467236 - RNA, 19 nt, Artificial Sequence
  Description of Artificial Sequence: Synthetic oligonucleotide
  Sense strand starting at position 2862 of SEQ ID NO: 1887371
guuuaaagcucuccgauuu

SEQ ID NO: 2467237 - RNA, 19 nt, Artificial Sequence
  Description of Artificial Sequence: Synthetic oligonucleotide
  Antisense strand to SEQ ID NO: 2467236
aaaucggagagcuuuaaac

SEQ ID NO: 2467238 - RNA, 19 nt, Artificial Sequence
  Description of Artificial Sequence: Synthetic oligonucleotide
  Sense strand starting at position 2909 of SEQ ID NO: 1887371
auagcaaucugcuuuaaag

SEQ ID NO: 2467239 - RNA, 19 nt, Artificial Sequence
  Description of Artificial Sequence: Synthetic oligonucleotide
  Antisense strand to SEQ ID NO: 2467238
cuuuaaagcagauugcuau

SEQ ID NO: 2467240 - RNA, 19 nt, Artificial Sequence
  Description of Artificial Sequence: Synthetic oligonucleotide
  Sense strand starting at position 2911 of SEQ ID NO: 1887371
agcaaucugcuuuaaagaa

SEQ ID NO: 2467241 - RNA, 19 nt, Artificial Sequence
  Description of Artificial Sequence: Synthetic oligonucleotide
  Antisense strand to SEQ ID NO: 2467240
uucuuuaaagcagauugcu

SEQ ID NO: 2467242 - RNA, 19 nt, Artificial Sequence
  Description of Artificial Sequence: Synthetic oligonucleotide
  Sense strand starting at position 3237 of SEQ ID NO: 1887371
uguuaaugaccguaaauag

SEQ ID NO: 2467243 - RNA, 19 nt, Artificial Sequence
  Description of Artificial Sequence: Synthetic oligonucleotide
  Antisense strand to SEQ ID NO: 2467242
cuauuuacggucauuaaca

SEQ ID NO: 2467244 - RNA, 19 nt, Artificial Sequence
  Description of Artificial Sequence: Synthetic oligonucleotide
  Sense strand starting at position 3365 of SEQ ID NO: 1887371
agaggcuacuguucuacaa

SEQ ID NO: 2467245 - RNA, 19 nt, Artificial Sequence
  Description of Artificial Sequence: Synthetic oligonucleotide
  Antisense strand to SEQ ID NO: 2467244
uuguagaacaguagccucu

SEQ ID NO: 2467246 - RNA, 19 nt, Artificial Sequence
  Description of Artificial Sequence: Synthetic oligonucleotide
  Sense strand starting at position 3487 of SEQ ID NO: 1887371
cuaauuucuguuggcuaua

SEQ ID NO: 2467247 - RNA, 19 nt, Artificial Sequence
  Description of Artificial Sequence: Synthetic oligonucleotide
  Antisense strand to SEQ ID NO: 2467246
uauagccaacagaaauuag

SEQ ID NO: 2467248 - RNA, 19 nt, Artificial Sequence
  Description of Artificial Sequence: Synthetic oligonucleotide
  Sense strand starting at position 3492 of SEQ ID NO: 1887371
uucuguuggcuauauuauu

SEQ ID NO: 2467249 - RNA, 19 nt, Artificial Sequence
  Description of Artificial Sequence: Synthetic oligonucleotide
  Antisense strand to SEQ ID NO: 2467248
aauaauauagccaacagaa

SEQ ID NO: 2467250 - RNA, 19 nt, Artificial Sequence
  Description of Artificial Sequence: Synthetic oligonucleotide
  Sense strand starting at position 3787 of SEQ ID NO: 1887371
cugcaauuggcuuacaaca

SEQ ID NO: 2467251 - RNA, 19 nt, Artificial Sequence
  Description of Artificial Sequence: Synthetic oligonucleotide
  Antisense strand to SEQ ID NO: 2467250
uguuguaagccaauugcag

SEQ ID NO: 2467252 - RNA, 19 nt, Artificial Sequence
  Description of Artificial Sequence: Synthetic oligonucleotide
  Sense strand starting at position 3809 of SEQ ID NO: 1887371
guuugcaaauuccuuuaga

SEQ ID NO: 2467253 - RNA, 19 nt, Artificial Sequence
  Description of Artificial Sequence: Synthetic oligonucleotide
  Antisense strand to SEQ ID NO: 2467252
ucuaaaggaauuugcaaac

SEQ ID NO: 2467254 - RNA, 19 nt, Artificial Sequence
  Description of Artificial Sequence: Synthetic oligonucleotide
  Sense strand starting at position 3839 of SEQ ID NO: 1887371
uguacaauuuaguagggaa

SEQ ID NO: 2467255 - RNA, 19 nt, Artificial Sequence
  Description of Artificial Sequence: Synthetic oligonucleotide
  Antisense strand to SEQ ID NO: 2467254
uucccuacuaaauuguaca

SEQ ID NO: 2467256 - RNA, 19 nt, Artificial Sequence
  Description of Artificial Sequence: Synthetic oligonucleotide
  Sense strand starting at position 3842 of SEQ ID NO: 1887371
acaauuuaguagggaacuu

SEQ ID NO: 2467257 - RNA, 19 nt, Artificial Sequence
  Description of Artificial Sequence: Synthetic oligonucleotide
  Antisense strand to SEQ ID NO: 2467256
aaguucccuacuaaauugu

SEQ ID NO: 2467258 - RNA, 19 nt, Artificial Sequence
  Description of Artificial Sequence: Synthetic oligonucleotide
  Sense strand starting at position 3853 of SEQ ID NO: 1887371
gggaacuuggcauauguuu

SEQ ID NO: 2467259 - RNA, 19 nt, Artificial Sequence
  Description of Artificial Sequence: Synthetic oligonucleotide
  Antisense strand to SEQ ID NO: 2467258
aaacauaugccaaguuccc

SEQ ID NO: 2467260 - RNA, 19 nt, Artificial Sequence
  Description of Artificial Sequence: Synthetic oligonucleotide
  Sense strand starting at position 3925 of SEQ ID NO: 1887371
gcucuauuaugucugacaa

SEQ ID NO: 2467261 - RNA, 19 nt, Artificial Sequence
  Description of Artificial Sequence: Synthetic oligonucleotide
  Antisense strand to SEQ ID NO: 2467260
uugucagacauaauagagc

SEQ ID NO: 2467262 - RNA, 19 nt, Artificial Sequence
  Description of Artificial Sequence: Synthetic oligonucleotide
  Sense strand starting at position 112 of SEQ ID NO: 1887372
gcgccaaugccagaaacaa

SEQ ID NO: 2467263 - RNA, 19 nt, Artificial Sequence
  Description of Artificial Sequence: Synthetic oligonucleotide
  Antisense strand to SEQ ID NO: 2467262
uuguuucuggcauuggcgc

SEQ ID NO: 2467264 - RNA, 19 nt, Artificial Sequence
  Description of Artificial Sequence: Synthetic oligonucleotide
  Sense strand starting at position 184 of SEQ ID NO: 1887372
ggaaguguggaaugaauuc

SEQ ID NO: 2467265 - RNA, 19 nt, Artificial Sequence
  Description of Artificial Sequence: Synthetic oligonucleotide
  Antisense strand to SEQ ID NO: 2467264
gaauucauuccacacuucc

SEQ ID NO: 2467266 - RNA, 19 nt, Artificial Sequence
  Description of Artificial Sequence: Synthetic oligonucleotide
  Sense strand starting at position 193 of SEQ ID NO: 1887372
gaaugaauucuuuggagcu

SEQ ID NO: 2467267 - RNA, 19 nt, Artificial Sequence
  Description of Artificial Sequence: Synthetic oligonucleotide
  Antisense strand to SEQ ID NO: 2467266
agcuccaaagaauucauuc

SEQ ID NO: 2467268 - RNA, 19 nt, Artificial Sequence
  Description of Artificial Sequence: Synthetic oligonucleotide
  Sense strand starting at position 268 of SEQ ID NO: 1887372
aguuguaucccaugaucug

SEQ ID NO: 2467269 - RNA, 19 nt, Artificial Sequence
  Description of Artificial Sequence: Synthetic oligonucleotide
  Antisense strand to SEQ ID NO: 2467268
cagaucaugggauacaacu

SEQ ID NO: 2467270 - RNA, 19 nt, Artificial Sequence
  Description of Artificial Sequence: Synthetic oligonucleotide
  Sense strand starting at position 384 of SEQ ID NO: 1887372
ugaaauacaucagugcaua

SEQ ID NO: 2467271 - RNA, 19 nt, Artificial Sequence
  Description of Artificial Sequence: Synthetic oligonucleotide
  Antisense strand to SEQ ID NO: 2467270
uaugcacugauguauuuca

SEQ ID NO: 2467272 - RNA, 19 nt, Artificial Sequence
  Description of Artificial Sequence: Synthetic oligonucleotide
  Sense strand starting at position 398 of SEQ ID NO: 1887372
gcauaaguggaugauguuu

SEQ ID NO: 2467273 - RNA, 19 nt, Artificial Sequence
  Description of Artificial Sequence: Synthetic oligonucleotide
  Antisense strand to SEQ ID NO: 2467272
aaacaucauccacuuaugc

SEQ ID NO: 2467274 - RNA, 19 nt, Artificial Sequence
  Description of Artificial Sequence: Synthetic oligonucleotide
  Sense strand starting at position 403 of SEQ ID NO: 1887372
aguggaugauguuuaaaua

SEQ ID NO: 2467275 - RNA, 19 nt, Artificial Sequence
  Description of Artificial Sequence: Synthetic oligonucleotide
  Antisense strand to SEQ ID NO: 2467274
uauuuaaacaucauccacu

SEQ ID NO: 2467276 - RNA, 19 nt, Artificial Sequence
  Description of Artificial Sequence: Synthetic oligonucleotide
  Sense strand starting at position 438 of SEQ ID NO: 1887372
cgaagaacaucucuuucca

SEQ ID NO: 2467277 - RNA, 19 nt, Artificial Sequence
  Description of Artificial Sequence: Synthetic oligonucleotide
  Antisense strand to SEQ ID NO: 2467276
uggaaagagauguucuucg

SEQ ID NO: 2467278 - RNA, 19 nt, Artificial Sequence
  Description of Artificial Sequence: Synthetic oligonucleotide
  Sense strand starting at position 602 of SEQ ID NO: 1887372
ugcaucagucauuauugua

SEQ ID NO: 2467279 - RNA, 19 nt, Artificial Sequence
  Description of Artificial Sequence: Synthetic oligonucleotide
  Antisense strand to SEQ ID NO: 2467278
uacaauaaugacugaugca

SEQ ID NO: 2467280 - RNA, 19 nt, Artificial Sequence
  Description of Artificial Sequence: Synthetic oligonucleotide
  Sense strand starting at position 972 of SEQ ID NO: 1887372
ccauaauugcuugauucga

SEQ ID NO: 2467281 - RNA, 19 nt, Artificial Sequence
  Description of Artificial Sequence: Synthetic oligonucleotide
  Antisense strand to SEQ ID NO: 2467280
ucgaaucaagcaauuaugg

SEQ ID NO: 2467282 - RNA, 19 nt, Artificial Sequence
  Description of Artificial Sequence: Synthetic oligonucleotide
  Sense strand starting at position 974 of SEQ ID NO: 1887372
auaauugcuugauucgaaa

SEQ ID NO: 2467283 - RNA, 19 nt, Artificial Sequence
  Description of Artificial Sequence: Synthetic oligonucleotide
  Antisense strand to SEQ ID NO: 2467282
uuucgaaucaagcaauuau

SEQ ID NO: 2467284 - RNA, 19 nt, Artificial Sequence
  Description of Artificial Sequence: Synthetic oligonucleotide
  Sense strand starting at position 1127 of SEQ ID NO: 1887372
cuucuaucguuuccuauuu

SEQ ID NO: 2467285 - RNA, 19 nt, Artificial Sequence
  Description of Artificial Sequence: Synthetic oligonucleotide
  Antisense strand to SEQ ID NO: 2467284
aaauaggaaacgauagaag

SEQ ID NO: 2467286 - RNA, 19 nt, Artificial Sequence
  Description of Artificial Sequence: Synthetic oligonucleotide
  Sense strand starting at position 1153 of SEQ ID NO: 1887372
ugacauuauuuguauacca

SEQ ID NO: 2467287 - RNA, 19 nt, Artificial Sequence
  Description of Artificial Sequence: Synthetic oligonucleotide
  Antisense strand to SEQ ID NO: 2467286
ugguauacaaauaauguca

SEQ ID NO: 2467288 - RNA, 19 nt, Artificial Sequence
  Description of Artificial Sequence: Synthetic oligonucleotide
  Sense strand starting at position 1477 of SEQ ID NO: 1887372
agugcccugcuugacaaau

SEQ ID NO: 2467289 - RNA, 19 nt, Artificial Sequence
  Description of Artificial Sequence: Synthetic oligonucleotide
  Antisense strand to SEQ ID NO: 2467288
auuugucaagcagggcacu

SEQ ID NO: 2467290 - RNA, 19 nt, Artificial Sequence
  Description of Artificial Sequence: Synthetic oligonucleotide
  Sense strand starting at position 1487 of SEQ ID NO: 1887372
uugacaaauguuuacuguu

SEQ ID NO: 2467291 - RNA, 19 nt, Artificial Sequence
  Description of Artificial Sequence: Synthetic oligonucleotide
  Antisense strand to SEQ ID NO: 2467290
aacaguaaacauuugucaa

SEQ ID NO: 2467292 - RNA, 19 nt, Artificial Sequence
  Description of Artificial Sequence: Synthetic oligonucleotide
  Sense strand starting at position 1553 of SEQ ID NO: 1887372
gcaaacuguaaauggagaa

SEQ ID NO: 2467293 - RNA, 19 nt, Artificial Sequence
  Description of Artificial Sequence: Synthetic oligonucleotide
  Antisense strand to SEQ ID NO: 2467292
uucuccauuuacaguuugc

SEQ ID NO: 2467294 - RNA, 19 nt, Artificial Sequence
  Description of Artificial Sequence: Synthetic oligonucleotide
  Sense strand starting at position 1684 of SEQ ID NO: 1887372
agauccauugugcaccaua

SEQ ID NO: 2467295 - RNA, 19 nt, Artificial Sequence
  Description of Artificial Sequence: Synthetic oligonucleotide
  Antisense strand to SEQ ID NO: 2467294
uauggugcacaauggaucu

SEQ ID NO: 2467296 - RNA, 19 nt, Artificial Sequence
  Description of Artificial Sequence: Synthetic oligonucleotide
  Sense strand starting at position 1988 of SEQ ID NO: 1887372
ggucauuagugauuaaagc

SEQ ID NO: 2467297 - RNA, 19 nt, Artificial Sequence
  Description of Artificial Sequence: Synthetic oligonucleotide
  Antisense strand to SEQ ID NO: 2467296
gcuuuaaucacuaaugacc

SEQ ID NO: 2467298 - RNA, 19 nt, Artificial Sequence
  Description of Artificial Sequence: Synthetic oligonucleotide
  Sense strand starting at position 1989 of SEQ ID NO: 1887372
gucauuagugauuaaagcu

SEQ ID NO: 2467299 - RNA, 19 nt, Artificial Sequence
  Description of Artificial Sequence: Synthetic oligonucleotide
  Antisense strand to SEQ ID NO: 2467298
agcuuuaaucacuaaugac

SEQ ID NO: 2467300 - RNA, 19 nt, Artificial Sequence
  Description of Artificial Sequence: Synthetic oligonucleotide
  Sense strand starting at position 2373 of SEQ ID NO: 1887372
acgggauggucauugaaca

SEQ ID NO: 2467301 - RNA, 19 nt, Artificial Sequence
  Description of Artificial Sequence: Synthetic oligonucleotide
  Antisense strand to SEQ ID NO: 2467300
uguucaaugaccaucccgu

SEQ ID NO: 2467302 - RNA, 19 nt, Artificial Sequence
  Description of Artificial Sequence: Synthetic oligonucleotide
  Sense strand starting at position 2374 of SEQ ID NO: 1887372
cgggauggucauugaacaa

SEQ ID NO: 2467303 - RNA, 19 nt, Artificial Sequence
  Description of Artificial Sequence: Synthetic oligonucleotide
  Antisense strand to SEQ ID NO: 2467302
uuguucaaugaccaucccg

SEQ ID NO: 2467304 - RNA, 19 nt, Artificial Sequence
  Description of Artificial Sequence: Synthetic oligonucleotide
  Sense strand starting at position 2441 of SEQ ID NO: 1887372
acuccaauccauugguaga

SEQ ID NO: 2467305 - RNA, 19 nt, Artificial Sequence
  Description of Artificial Sequence: Synthetic oligonucleotide
  Antisense strand to SEQ ID NO: 2467304
ucuaccaauggauuggagu

SEQ ID NO: 2467306 - RNA, 19 nt, Artificial Sequence
  Description of Artificial Sequence: Synthetic oligonucleotide
  Sense strand starting at position 2462 of SEQ ID NO: 1887372
cugcuugagcaucauaaug

SEQ ID NO: 2467307 - RNA, 19 nt, Artificial Sequence
  Description of Artificial Sequence: Synthetic oligonucleotide
  Antisense strand to SEQ ID NO: 2467306
cauuaugaugcucaagcag

SEQ ID NO: 2467308 - RNA, 19 nt, Artificial Sequence
  Description of Artificial Sequence: Synthetic oligonucleotide
  Sense strand starting at position 2493 of SEQ ID NO: 1887372
uguauuggaaccugucaga

SEQ ID NO: 2467309 - RNA, 19 nt, Artificial Sequence
  Description of Artificial Sequence: Synthetic oligonucleotide
  Antisense strand to SEQ ID NO: 2467308
ucugacagguuccaauaca

SEQ ID NO: 2467310 - RNA, 19 nt, Artificial Sequence
  Description of Artificial Sequence: Synthetic oligonucleotide
  Sense strand starting at position 2518 of SEQ ID NO: 1887372
guccuuaucagugagagcu

SEQ ID NO: 2467311 - RNA, 19 nt, Artificial Sequence
  Description of Artificial Sequence: Synthetic oligonucleotide
  Antisense strand to SEQ ID NO: 2467310
agcucucacugauaaggac

SEQ ID NO: 2467312 - RNA, 19 nt, Artificial Sequence
  Description of Artificial Sequence: Synthetic oligonucleotide
  Sense strand starting at position 2558 of SEQ ID NO: 1887372
ugugaaugacagcagcaua

SEQ ID NO: 2467313 - RNA, 19 nt, Artificial Sequence
  Description of Artificial Sequence: Synthetic oligonucleotide
  Antisense strand to SEQ ID NO: 2467312
uaugcugcugucauucaca

SEQ ID NO: 2467314 - RNA, 19 nt, Artificial Sequence
  Description of Artificial Sequence: Synthetic oligonucleotide
  Sense strand starting at position 2589 of SEQ ID NO: 1887372
auuauaaaggcuugauauc

SEQ ID NO: 2467315 - RNA, 19 nt, Artificial Sequence
  Description of Artificial Sequence: Synthetic oligonucleotide
  Antisense strand to SEQ ID NO: 2467314
gauaucaagccuuuauaau

SEQ ID NO: 2467316 - RNA, 19 nt, Artificial Sequence
  Description of Artificial Sequence: Synthetic oligonucleotide
  Sense strand starting at position 2865 of SEQ ID NO: 1887372
uugauaugccuauguauuu

SEQ ID NO: 2467317 - RNA, 19 nt, Artificial Sequence
  Description of Artificial Sequence: Synthetic oligonucleotide
  Antisense strand to SEQ ID NO: 2467316
aaauacauaggcauaucaa

SEQ ID NO: 2467318 - RNA, 19 nt, Artificial Sequence
  Description of Artificial Sequence: Synthetic oligonucleotide
  Sense strand starting at position 3101 of SEQ ID NO: 1887372
agagaacuacucugucuac

SEQ ID NO: 2467319 - RNA, 19 nt, Artificial Sequence
  Description of Artificial Sequence: Synthetic oligonucleotide
  Antisense strand to SEQ ID NO: 2467318
guagacagaguaguucucu

SEQ ID NO: 2467320 - RNA, 19 nt, Artificial Sequence
  Description of Artificial Sequence: Synthetic oligonucleotide
  Sense strand starting at position 3198 of SEQ ID NO: 1887372
aguuuauuacaaggguauu

SEQ ID NO: 2467321 - RNA, 19 nt, Artificial Sequence
  Description of Artificial Sequence: Synthetic oligonucleotide
  Antisense strand to SEQ ID NO: 2467320
aauacccuuguaauaaacu

SEQ ID NO: 2467322 - RNA, 19 nt, Artificial Sequence
  Description of Artificial Sequence: Synthetic oligonucleotide
  Sense strand starting at position 3287 of SEQ ID NO: 1887372
gucauuuacuggcuggcau

SEQ ID NO: 2467323 - RNA, 19 nt, Artificial Sequence
  Description of Artificial Sequence: Synthetic oligonucleotide
  Antisense strand to SEQ ID NO: 2467322
augccagccaguaaaugac

SEQ ID NO: 2467324 - RNA, 19 nt, Artificial Sequence
  Description of Artificial Sequence: Synthetic oligonucleotide
  Sense strand starting at position 3443 of SEQ ID NO: 1887372
aauagauguuagccaguaa

SEQ ID NO: 2467325 - RNA, 19 nt, Artificial Sequence
  Description of Artificial Sequence: Synthetic oligonucleotide
  Antisense strand to SEQ ID NO: 2467324
uuacuggcuaacaucuauu

SEQ ID NO: 2467326 - RNA, 19 nt, Artificial Sequence
  Description of Artificial Sequence: Synthetic oligonucleotide
  Sense strand starting at position 3478 of SEQ ID NO: 1887372
aauagagguagugguagaa

SEQ ID NO: 2467327 - RNA, 19 nt, Artificial Sequence
  Description of Artificial Sequence: Synthetic oligonucleotide
  Antisense strand to SEQ ID NO: 2467326
uucuaccacuaccucuauu

SEQ ID NO: 2467328 - RNA, 19 nt, Artificial Sequence
  Description of Artificial Sequence: Synthetic oligonucleotide
  Sense strand starting at position 3482 of SEQ ID NO: 1887372
gagguagugguagaagcau

SEQ ID NO: 2467329 - RNA, 19 nt, Artificial Sequence
  Description of Artificial Sequence: Synthetic oligonucleotide
  Antisense strand to SEQ ID NO: 2467328
augcuucuaccacuaccuc

SEQ ID NO: 2467330 - RNA, 19 nt, Artificial Sequence
  Description of Artificial Sequence: Synthetic oligonucleotide
  Sense strand starting at position 3515 of SEQ ID NO: 1887372
ggaacuaugugagcucaaa

SEQ ID NO: 2467331 - RNA, 19 nt, Artificial Sequence
  Description of Artificial Sequence: Synthetic oligonucleotide
  Antisense strand to SEQ ID NO: 2467330
uuugagcucacauaguucc

SEQ ID NO: 2467332 - RNA, 19 nt, Artificial Sequence
  Description of Artificial Sequence: Synthetic oligonucleotide
  Sense strand starting at position 3778 of SEQ ID NO: 1887372
caauauuugugagaaguau

SEQ ID NO: 2467333 - RNA, 19 nt, Artificial Sequence
  Description of Artificial Sequence: Synthetic oligonucleotide
  Antisense strand to SEQ ID NO: 2467332
auacuucucacaaauauug

SEQ ID NO: 2467334 - RNA, 19 nt, Artificial Sequence
  Description of Artificial Sequence: Synthetic oligonucleotide
  Sense strand starting at position 3787 of SEQ ID NO: 1887372
ugagaaguauggguuguca

SEQ ID NO: 2467335 - RNA, 19 nt, Artificial Sequence
  Description of Artificial Sequence: Synthetic oligonucleotide
  Antisense strand to SEQ ID NO: 2467334
ugacaacccauacuucuca

SEQ ID NO: 2467336 - RNA, 19 nt, Artificial Sequence
  Description of Artificial Sequence: Synthetic oligonucleotide
  Sense strand starting at position 3789 of SEQ ID NO: 1887372
agaaguauggguugucaug

SEQ ID NO: 2467337 - RNA, 19 nt, Artificial Sequence
  Description of Artificial Sequence: Synthetic oligonucleotide
  Antisense strand to SEQ ID NO: 2467336
caugacaacccauacuucu

SEQ ID NO: 2467338 - RNA, 19 nt, Artificial Sequence
  Description of Artificial Sequence: Synthetic oligonucleotide
  Sense strand starting at position 3910 of SEQ ID NO: 1887372
acuauaugauuggcucuaa

SEQ ID NO: 2467339 - RNA, 19 nt, Artificial Sequence
  Description of Artificial Sequence: Synthetic oligonucleotide
  Antisense strand to SEQ ID NO: 2467338
uuagagccaaucauauagu

SEQ ID NO: 2467340 - RNA, 19 nt, Artificial Sequence
  Description of Artificial Sequence: Synthetic oligonucleotide
  Sense strand starting at position 3911 of SEQ ID NO: 1887372
cuauaugauuggcucuaau

SEQ ID NO: 2467341 - RNA, 19 nt, Artificial Sequence
  Description of Artificial Sequence: Synthetic oligonucleotide
  Antisense strand to SEQ ID NO: 2467340
auuagagccaaucauauag

SEQ ID NO: 2467342 - RNA, 19 nt, Artificial Sequence
  Description of Artificial Sequence: Synthetic oligonucleotide
  Sense strand starting at position 105 of SEQ ID NO: 1887373
aaauaauagccuggguuga

SEQ ID NO: 2467343 - RNA, 19 nt, Artificial Sequence
  Description of Artificial Sequence: Synthetic oligonucleotide
  Antisense strand to SEQ ID NO: 2467342
ucaacccaggcuauuauuu

SEQ ID NO: 2467344 - RNA, 19 nt, Artificial Sequence
  Description of Artificial Sequence: Synthetic oligonucleotide
  Sense strand starting at position 106 of SEQ ID NO: 1887373
aauaauagccuggguugaa

SEQ ID NO: 2467345 - RNA, 19 nt, Artificial Sequence
  Description of Artificial Sequence: Synthetic oligonucleotide
  Antisense strand to SEQ ID NO: 2467344
uucaacccaggcuauuauu

SEQ ID NO: 2467346 - RNA, 19 nt, Artificial Sequence
  Description of Artificial Sequence: Synthetic oligonucleotide
  Sense strand starting at position 107 of SEQ ID NO: 1887373
auaauagccuggguugaau

SEQ ID NO: 2467347 - RNA, 19 nt, Artificial Sequence
  Description of Artificial Sequence: Synthetic oligonucleotide
  Antisense strand to SEQ ID NO: 2467346
auucaacccaggcuauuau

SEQ ID NO: 2467348 - RNA, 19 nt, Artificial Sequence
  Description of Artificial Sequence: Synthetic oligonucleotide
  Sense strand starting at position 109 of SEQ ID NO: 1887373
aauagccuggguugaauua

SEQ ID NO: 2467349 - RNA, 19 nt, Artificial Sequence
  Description of Artificial Sequence: Synthetic oligonucleotide
  Antisense strand to SEQ ID NO: 2467348
uaauucaacccaggcuauu

SEQ ID NO: 2467350 - RNA, 19 nt, Artificial Sequence
  Description of Artificial Sequence: Synthetic oligonucleotide
  Sense strand starting at position 222 of SEQ ID NO: 1887373
guuaguuuacaugaguaau

SEQ ID NO: 2467351 - RNA, 19 nt, Artificial Sequence
  Description of Artificial Sequence: Synthetic oligonucleotide
  Antisense strand to SEQ ID NO: 2467350
auuacucauguaaacuaac

SEQ ID NO: 2467352 - RNA, 19 nt, Artificial Sequence
  Description of Artificial Sequence: Synthetic oligonucleotide
  Sense strand starting at position 377 of SEQ ID NO: 1887373
ucaaacuagugagauuuaa

SEQ ID NO: 2467353 - RNA, 19 nt, Artificial Sequence
  Description of Artificial Sequence: Synthetic oligonucleotide
  Antisense strand to SEQ ID NO: 2467352
uuaaaucucacuaguuuga

SEQ ID NO: 2467354 - RNA, 19 nt, Artificial Sequence
  Description of Artificial Sequence: Synthetic oligonucleotide
  Sense strand starting at position 433 of SEQ ID NO: 1887373
aggcuuugggauggucaca

SEQ ID NO: 2467355 - RNA, 19 nt, Artificial Sequence
  Description of Artificial Sequence: Synthetic oligonucleotide
  Antisense strand to SEQ ID NO: 2467354
ugugaccaucccaaagccu

SEQ ID NO: 2467356 - RNA, 19 nt, Artificial Sequence
  Description of Artificial Sequence: Synthetic oligonucleotide
  Sense strand starting at position 504 of SEQ ID NO: 1887373
gggucucugaaaggauauc

SEQ ID NO: 2467357 - RNA, 19 nt, Artificial Sequence
  Description of Artificial Sequence: Synthetic oligonucleotide
  Antisense strand to SEQ ID NO: 2467356
gauauccuuucagagaccc

SEQ ID NO: 2467358 - RNA, 19 nt, Artificial Sequence
  Description of Artificial Sequence: Synthetic oligonucleotide
  Sense strand starting at position 582 of SEQ ID NO: 1887373
guaagaaugccauaucaac

SEQ ID NO: 2467359 - RNA, 19 nt, Artificial Sequence
  Description of Artificial Sequence: Synthetic oligonucleotide
  Antisense strand to SEQ ID NO: 2467358
guugauauggcauucuuac

SEQ ID NO: 2467360 - RNA, 19 nt, Artificial Sequence
  Description of Artificial Sequence: Synthetic oligonucleotide
  Sense strand starting at position 739 of SEQ ID NO: 1887373
acugcauuucuuuggccaa

SEQ ID NO: 2467361 - RNA, 19 nt, Artificial Sequence
  Description of Artificial Sequence: Synthetic oligonucleotide
  Antisense strand to SEQ ID NO: 2467360
uuggccaaagaaaugcagu

SEQ ID NO: 2467362 - RNA, 19 nt, Artificial Sequence
  Description of Artificial Sequence: Synthetic oligonucleotide
  Sense strand starting at position 836 of SEQ ID NO: 1887373
ccaucugaauguuuagaug

SEQ ID NO: 2467363 - RNA, 19 nt, Artificial Sequence
  Description of Artificial Sequence: Synthetic oligonucleotide
  Antisense strand to SEQ ID NO: 2467362
caucuaaacauucagaugg

SEQ ID NO: 2467364 - RNA, 19 nt, Artificial Sequence
  Description of Artificial Sequence: Synthetic oligonucleotide
  Sense strand starting at position 948 of SEQ ID NO: 1887373
agcauuguuagcguuuauc

SEQ ID NO: 2467365 - RNA, 19 nt, Artificial Sequence
  Description of Artificial Sequence: Synthetic oligonucleotide
  Antisense strand to SEQ ID NO: 2467364
gauaaacgcuaacaaugcu

SEQ ID NO: 2467366 - RNA, 19 nt, Artificial Sequence
  Description of Artificial Sequence: Synthetic oligonucleotide
  Sense strand starting at position 1012 of SEQ ID NO: 1887373
aggaaauaugaccgaagcu

SEQ ID NO: 2467367 - RNA, 19 nt, Artificial Sequence
  Description of Artificial Sequence: Synthetic oligonucleotide
  Antisense strand to SEQ ID NO: 2467366
agcuucggucauauuuccu

SEQ ID NO: 2467368 - RNA, 19 nt, Artificial Sequence
  Description of Artificial Sequence: Synthetic oligonucleotide
  Sense strand starting at position 1051 of SEQ ID NO: 1887373
ggccuugagcugcauaaga

SEQ ID NO: 2467369 - RNA, 19 nt, Artificial Sequence
  Description of Artificial Sequence: Synthetic oligonucleotide
  Antisense strand to SEQ ID NO: 2467368
ucuuaugcagcucaaggcc

SEQ ID NO: 2467370 - RNA, 19 nt, Artificial Sequence
  Description of Artificial Sequence: Synthetic oligonucleotide
  Sense strand starting at position 1053 of SEQ ID NO: 1887373
ccuugagcugcauaagacu

SEQ ID NO: 2467371 - RNA, 19 nt, Artificial Sequence
  Description of Artificial Sequence: Synthetic oligonucleotide
  Antisense strand to SEQ ID NO: 2467370
agucuuaugcagcucaagg

SEQ ID NO: 2467372 - RNA, 19 nt, Artificial Sequence
  Description of Artificial Sequence: Synthetic oligonucleotide
  Sense strand starting at position 1131 of SEQ ID NO: 1887373
gcuuaucuacuggaacaua

SEQ ID NO: 2467373 - RNA, 19 nt, Artificial Sequence
  Description of Artificial Sequence: Synthetic oligonucleotide
  Antisense strand to SEQ ID NO: 2467372
uauguuccaguagauaagc

SEQ ID NO: 2467374 - RNA, 19 nt, Artificial Sequence
  Description of Artificial Sequence: Synthetic oligonucleotide
  Sense strand starting at position 1141 of SEQ ID NO: 1887373
uggaacauauugccagaua

SEQ ID NO: 2467375 - RNA, 19 nt, Artificial Sequence
  Description of Artificial Sequence: Synthetic oligonucleotide
  Antisense strand to SEQ ID NO: 2467374
uaucuggcaauauguucca

SEQ ID NO: 2467376 - RNA, 19 nt, Artificial Sequence
  Description of Artificial Sequence: Synthetic oligonucleotide
  Sense strand starting at position 1470 of SEQ ID NO: 1887373
ccaaucagcgagcagaauu

SEQ ID NO: 2467377 - RNA, 19 nt, Artificial Sequence
  Description of Artificial Sequence: Synthetic oligonucleotide
  Antisense strand to SEQ ID NO: 2467376
aauucugcucgcugauugg

SEQ ID NO: 2467378 - RNA, 19 nt, Artificial Sequence
  Description of Artificial Sequence: Synthetic oligonucleotide
  Sense strand starting at position 1478 of SEQ ID NO: 1887373
cgagcagaauucuuacaaa

SEQ ID NO: 2467379 - RNA, 19 nt, Artificial Sequence
  Description of Artificial Sequence: Synthetic oligonucleotide
  Antisense strand to SEQ ID NO: 2467378
uuuguaagaauucugcucg

SEQ ID NO: 2467380 - RNA, 19 nt, Artificial Sequence
  Description of Artificial Sequence: Synthetic oligonucleotide
  Sense strand starting at position 1530 of SEQ ID NO: 1887373
ugcagcuuaaucuagagga

SEQ ID NO: 2467381 - RNA, 19 nt, Artificial Sequence
  Description of Artificial Sequence: Synthetic oligonucleotide
  Antisense strand to SEQ ID NO: 2467380
uccucuagauuaagcugca

SEQ ID NO: 2467382 - RNA, 19 nt, Artificial Sequence
  Description of Artificial Sequence: Synthetic oligonucleotide
  Sense strand starting at position 1840 of SEQ ID NO: 1887373
ggaaacagauaccaaauaa

SEQ ID NO: 2467383 - RNA, 19 nt, Artificial Sequence
  Description of Artificial Sequence: Synthetic oligonucleotide
  Antisense strand to SEQ ID NO: 2467382
uuauuugguaucuguuucc

SEQ ID NO: 2467384 - RNA, 19 nt, Artificial Sequence
  Description of Artificial Sequence: Synthetic oligonucleotide
  Sense strand starting at position 2628 of SEQ ID NO: 1887373
caauuaaacuuggucaggu

SEQ ID NO: 2467385 - RNA, 19 nt, Artificial Sequence
  Description of Artificial Sequence: Synthetic oligonucleotide
  Antisense strand to SEQ ID NO: 2467384
accugaccaaguuuaauug

SEQ ID NO: 2467386 - RNA, 19 nt, Artificial Sequence
  Description of Artificial Sequence: Synthetic oligonucleotide
  Sense strand starting at position 2629 of SEQ ID NO: 1887373
aauuaaacuuggucagguu

SEQ ID NO: 2467387 - RNA, 19 nt, Artificial Sequence
  Description of Artificial Sequence: Synthetic oligonucleotide
  Antisense strand to SEQ ID NO: 2467386
aaccugaccaaguuuaauu

SEQ ID NO: 2467388 - RNA, 19 nt, Artificial Sequence
  Description of Artificial Sequence: Synthetic oligonucleotide
  Sense strand starting at position 2630 of SEQ ID NO: 1887373
auuaaacuuggucagguuu

SEQ ID NO: 2467389 - RNA, 19 nt, Artificial Sequence
  Description of Artificial Sequence: Synthetic oligonucleotide
  Antisense strand to SEQ ID NO: 2467388
aaaccugaccaaguuuaau

SEQ ID NO: 2467390 - RNA, 19 nt, Artificial Sequence
  Description of Artificial Sequence: Synthetic oligonucleotide
  Sense strand starting at position 3021 of SEQ ID NO: 1887373
gugaucaccucacuuagua

SEQ ID NO: 2467391 - RNA, 19 nt, Artificial Sequence
  Description of Artificial Sequence: Synthetic oligonucleotide
  Antisense strand to SEQ ID NO: 2467390
uacuaagugaggugaucac

SEQ ID NO: 2467392 - RNA, 19 nt, Artificial Sequence
  Description of Artificial Sequence: Synthetic oligonucleotide
  Sense strand starting at position 3040 of SEQ ID NO: 1887373
uuugaaagugcuuaacauu

SEQ ID NO: 2467393 - RNA, 19 nt, Artificial Sequence
  Description of Artificial Sequence: Synthetic oligonucleotide
  Antisense strand to SEQ ID NO: 2467392
aauguuaagcacuuucaaa

SEQ ID NO: 2467394 - RNA, 19 nt, Artificial Sequence
  Description of Artificial Sequence: Synthetic oligonucleotide
  Sense strand starting at position 3092 of SEQ ID NO: 1887373
aaauauauuggcuauguga

SEQ ID NO: 2467395 - RNA, 19 nt, Artificial Sequence
  Description of Artificial Sequence: Synthetic oligonucleotide
  Antisense strand to SEQ ID NO: 2467394
ucacauagccaauauauuu

SEQ ID NO: 2467396 - RNA, 19 nt, Artificial Sequence
  Description of Artificial Sequence: Synthetic oligonucleotide
  Sense strand starting at position 3094 of SEQ ID NO: 1887373
auauauuggcuaugugaca

SEQ ID NO: 2467397 - RNA, 19 nt, Artificial Sequence
  Description of Artificial Sequence: Synthetic oligonucleotide
  Antisense strand to SEQ ID NO: 2467396
ugucacauagccaauauau

SEQ ID NO: 2467398 - RNA, 19 nt, Artificial Sequence
  Description of Artificial Sequence: Synthetic oligonucleotide
  Sense strand starting at position 3101 of SEQ ID NO: 1887373
ggcuaugugacagauacua

SEQ ID NO: 2467399 - RNA, 19 nt, Artificial Sequence
  Description of Artificial Sequence: Synthetic oligonucleotide
  Antisense strand to SEQ ID NO: 2467398
uaguaucugucacauagcc

SEQ ID NO: 2467400 - RNA, 19 nt, Artificial Sequence
  Description of Artificial Sequence: Synthetic oligonucleotide
  Sense strand starting at position 3159 of SEQ ID NO: 1887373
uaaguaaacugcuuaaggu

SEQ ID NO: 2467401 - RNA, 19 nt, Artificial Sequence
  Description of Artificial Sequence: Synthetic oligonucleotide
  Antisense strand to SEQ ID NO: 2467400
accuuaagcaguuuacuua

SEQ ID NO: 2467402 - RNA, 19 nt, Artificial Sequence
  Description of Artificial Sequence: Synthetic oligonucleotide
  Sense strand starting at position 3201 of SEQ ID NO: 1887373
ggagcuuccaagugacaug

SEQ ID NO: 2467403 - RNA, 19 nt, Artificial Sequence
  Description of Artificial Sequence: Synthetic oligonucleotide
  Antisense strand to SEQ ID NO: 2467402
caugucacuuggaagcucc

SEQ ID NO: 2467404 - RNA, 19 nt, Artificial Sequence
  Description of Artificial Sequence: Synthetic oligonucleotide
  Sense strand starting at position 3223 of SEQ ID NO: 1887373
uuaucaaugugacuggaca

SEQ ID NO: 2467405 - RNA, 19 nt, Artificial Sequence
  Description of Artificial Sequence: Synthetic oligonucleotide
  Antisense strand to SEQ ID NO: 2467404
uguccagucacauugauaa

SEQ ID NO: 2467406 - RNA, 19 nt, Artificial Sequence
  Description of Artificial Sequence: Synthetic oligonucleotide
  Sense strand starting at position 3240 of SEQ ID NO: 1887373
caguaaugaucuguaaugu

SEQ ID NO: 2467407 - RNA, 19 nt, Artificial Sequence
  Description of Artificial Sequence: Synthetic oligonucleotide
  Antisense strand to SEQ ID NO: 2467406
acauuacagaucauuacug

SEQ ID NO: 2467408 - RNA, 19 nt, Artificial Sequence
  Description of Artificial Sequence: Synthetic oligonucleotide
  Sense strand starting at position 3241 of SEQ ID NO: 1887373
aguaaugaucuguaaugug

SEQ ID NO: 2467409 - RNA, 19 nt, Artificial Sequence
  Description of Artificial Sequence: Synthetic oligonucleotide
  Antisense strand to SEQ ID NO: 2467408
cacauuacagaucauuacu

SEQ ID NO: 2467410 - RNA, 19 nt, Artificial Sequence
  Description of Artificial Sequence: Synthetic oligonucleotide
  Sense strand starting at position 3255 of SEQ ID NO: 1887373
augugagcucaauaaauau

SEQ ID NO: 2467411 - RNA, 19 nt, Artificial Sequence
  Description of Artificial Sequence: Synthetic oligonucleotide
  Antisense strand to SEQ ID NO: 2467410
auauuuauugagcucacau

SEQ ID NO: 2467412 - RNA, 19 nt, Artificial Sequence
  Description of Artificial Sequence: Synthetic oligonucleotide
  Sense strand starting at position 3354 of SEQ ID NO: 1887373
cagucuacggauuagauua

SEQ ID NO: 2467413 - RNA, 19 nt, Artificial Sequence
  Description of Artificial Sequence: Synthetic oligonucleotide
  Antisense strand to SEQ ID NO: 2467412
uaaucuaauccguagacug

SEQ ID NO: 2467414 - RNA, 19 nt, Artificial Sequence
  Description of Artificial Sequence: Synthetic oligonucleotide
  Sense strand starting at position 3834 of SEQ ID NO: 1887373
aguauuaagcuaugacuca

SEQ ID NO: 2467415 - RNA, 19 nt, Artificial Sequence
  Description of Artificial Sequence: Synthetic oligonucleotide
  Antisense strand to SEQ ID NO: 2467414
ugagucauagcuuaauacu

SEQ ID NO: 2467416 - RNA, 19 nt, Artificial Sequence
  Description of Artificial Sequence: Synthetic oligonucleotide
  Sense strand starting at position 3862 of SEQ ID NO: 1887373
aucacuguaugguuuauca

SEQ ID NO: 2467417 - RNA, 19 nt, Artificial Sequence
  Description of Artificial Sequence: Synthetic oligonucleotide
  Antisense strand to SEQ ID NO: 2467416
ugauaaaccauacagugau

SEQ ID NO: 2467418 - RNA, 19 nt, Artificial Sequence
  Description of Artificial Sequence: Synthetic oligonucleotide
  Sense strand starting at position 3873 of SEQ ID NO: 1887373
guuuaucagcuuuaucauu

SEQ ID NO: 2467419 - RNA, 19 nt, Artificial Sequence
  Description of Artificial Sequence: Synthetic oligonucleotide
  Antisense strand to SEQ ID NO: 2467418
aaugauaaagcugauaaac

SEQ ID NO: 2467420 - RNA, 19 nt, Artificial Sequence
  Description of Artificial Sequence: Synthetic oligonucleotide
  Sense strand starting at position 3977 of SEQ ID NO: 1887373
gguaucaaguuucuggaau

SEQ ID NO: 2467421 - RNA, 19 nt, Artificial Sequence
  Description of Artificial Sequence: Synthetic oligonucleotide
  Antisense strand to SEQ ID NO: 2467420
auuccagaaacuugauacc

SEQ ID NO: 2467422 - RNA, 19 nt, Artificial Sequence
  Description of Artificial Sequence: Synthetic oligonucleotide
  Sense strand starting at position 140 of SEQ ID NO: 1887374
agcugaucuaagugauaga

SEQ ID NO: 2467423 - RNA, 19 nt, Artificial Sequence
  Description of Artificial Sequence: Synthetic oligonucleotide
  Antisense strand to SEQ ID NO: 2467422
ucuaucacuuagaucagcu

SEQ ID NO: 2467424 - RNA, 19 nt, Artificial Sequence
  Description of Artificial Sequence: Synthetic oligonucleotide
  Sense strand starting at position 141 of SEQ ID NO: 1887374
gcugaucuaagugauagau

SEQ ID NO: 2467425 - RNA, 19 nt, Artificial Sequence
  Description of Artificial Sequence: Synthetic oligonucleotide
  Antisense strand to SEQ ID NO: 2467424
aucuaucacuuagaucagc

SEQ ID NO: 2467426 - RNA, 19 nt, Artificial Sequence
  Description of Artificial Sequence: Synthetic oligonucleotide
  Sense strand starting at position 147 of SEQ ID NO: 1887374
cuaagugauagaugugaca

SEQ ID NO: 2467427 - RNA, 19 nt, Artificial Sequence
  Description of Artificial Sequence: Synthetic oligonucleotide
  Antisense strand to SEQ ID NO: 2467426
ugucacaucuaucacuuag

SEQ ID NO: 2467428 - RNA, 19 nt, Artificial Sequence
  Description of Artificial Sequence: Synthetic oligonucleotide
  Sense strand starting at position 532 of SEQ ID NO: 1887374
ggaugaucagaagggcuau

SEQ ID NO: 2467429 - RNA, 19 nt, Artificial Sequence
  Description of Artificial Sequence: Synthetic oligonucleotide
  Antisense strand to SEQ ID NO: 2467428
auagcccuucugaucaucc

SEQ ID NO: 2467430 - RNA, 19 nt, Artificial Sequence
  Description of Artificial Sequence: Synthetic oligonucleotide
  Sense strand starting at position 840 of SEQ ID NO: 1887374
uuaguaagaaaugguuaga

SEQ ID NO: 2467431 - RNA, 19 nt, Artificial Sequence
  Description of Artificial Sequence: Synthetic oligonucleotide
  Antisense strand to SEQ ID NO: 2467430
ucuaaccauuucuuacuaa

SEQ ID NO: 2467432 - RNA, 19 nt, Artificial Sequence
  Description of Artificial Sequence: Synthetic oligonucleotide
  Sense strand starting at position 851 of SEQ ID NO: 1887374
ugguuagaauaugugaaua

SEQ ID NO: 2467433 - RNA, 19 nt, Artificial Sequence
  Description of Artificial Sequence: Synthetic oligonucleotide
  Antisense strand to SEQ ID NO: 2467432
uauucacauauucuaacca

SEQ ID NO: 2467434 - RNA, 19 nt, Artificial Sequence
  Description of Artificial Sequence: Synthetic oligonucleotide
  Sense strand starting at position 908 of SEQ ID NO: 1887374
acagguacugcuuauaaau

SEQ ID NO: 2467435 - RNA, 19 nt, Artificial Sequence
  Description of Artificial Sequence: Synthetic oligonucleotide
  Antisense strand to SEQ ID NO: 2467434
auuuauaagcaguaccugu

SEQ ID NO: 2467436 - RNA, 19 nt, Artificial Sequence
  Description of Artificial Sequence: Synthetic oligonucleotide
  Sense strand starting at position 934 of SEQ ID NO: 1887374
agagcauuauuuggaauuu

SEQ ID NO: 2467437 - RNA, 19 nt, Artificial Sequence
  Description of Artificial Sequence: Synthetic oligonucleotide
  Antisense strand to SEQ ID NO: 2467436
aaauuccaaauaaugcucu

SEQ ID NO: 2467438 - RNA, 19 nt, Artificial Sequence
  Description of Artificial Sequence: Synthetic oligonucleotide
  Sense strand starting at position 963 of SEQ ID NO: 1887374
auauacaaacugugugaaa

SEQ ID NO: 2467439 - RNA, 19 nt, Artificial Sequence
  Description of Artificial Sequence: Synthetic oligonucleotide
  Antisense strand to SEQ ID NO: 2467438
uuucacacaguuuguauau

SEQ ID NO: 2467440 - RNA, 19 nt, Artificial Sequence
  Description of Artificial Sequence: Synthetic oligonucleotide
  Sense strand starting at position 965 of SEQ ID NO: 1887374
auacaaacugugugaaaua

SEQ ID NO: 2467441 - RNA, 19 nt, Artificial Sequence
  Description of Artificial Sequence: Synthetic oligonucleotide
  Antisense strand to SEQ ID NO: 2467440
uauuucacacaguuuguau

SEQ ID NO: 2467442 - RNA, 19 nt, Artificial Sequence
  Description of Artificial Sequence: Synthetic oligonucleotide
  Sense strand starting at position 1067 of SEQ ID NO: 1887374
cuucgaucuguauaaauug

SEQ ID NO: 2467443 - RNA, 19 nt, Artificial Sequence
  Description of Artificial Sequence: Synthetic oligonucleotide
  Antisense strand to SEQ ID NO: 2467442
caauuuauacagaucgaag

SEQ ID NO: 2467444 - RNA, 19 nt, Artificial Sequence
  Description of Artificial Sequence: Synthetic oligonucleotide
  Sense strand starting at position 1078 of SEQ ID NO: 1887374
auaaauugguucuugacua

SEQ ID NO: 2467445 - RNA, 19 nt, Artificial Sequence
  Description of Artificial Sequence: Synthetic oligonucleotide
  Antisense strand to SEQ ID NO: 2467444
uagucaagaaccaauuuau

SEQ ID NO: 2467446 - RNA, 19 nt, Artificial Sequence
  Description of Artificial Sequence: Synthetic oligonucleotide
  Sense strand starting at position 1210 of SEQ ID NO: 1887374
acagcuguggaccagaauu

SEQ ID NO: 2467447 - RNA, 19 nt, Artificial Sequence
  Description of Artificial Sequence: Synthetic oligonucleotide
  Antisense strand to SEQ ID NO: 2467446
aauucugguccacagcugu

SEQ ID NO: 2467448 - RNA, 19 nt, Artificial Sequence
  Description of Artificial Sequence: Synthetic oligonucleotide
  Sense strand starting at position 1472 of SEQ ID NO: 1887374
agcucuuaguaucuuauuu

SEQ ID NO: 2467449 - RNA, 19 nt, Artificial Sequence
  Description of Artificial Sequence: Synthetic oligonucleotide
  Antisense strand to SEQ ID NO: 2467448
aaauaagauacuaagagcu

SEQ ID NO: 2467450 - RNA, 19 nt, Artificial Sequence
  Description of Artificial Sequence: Synthetic oligonucleotide
  Sense strand starting at position 1501 of SEQ ID NO: 1887374
aucagugagcccuacuaau

SEQ ID NO: 2467451 - RNA, 19 nt, Artificial Sequence
  Description of Artificial Sequence: Synthetic oligonucleotide
  Antisense strand to SEQ ID NO: 2467450
auuaguagggcucacugau

SEQ ID NO: 2467452 - RNA, 19 nt, Artificial Sequence
  Description of Artificial Sequence: Synthetic oligonucleotide
  Sense strand starting at position 1748 of SEQ ID NO: 1887374
uagggauaguuucuaucua

SEQ ID NO: 2467453 - RNA, 19 nt, Artificial Sequence
  Description of Artificial Sequence: Synthetic oligonucleotide
  Antisense strand to SEQ ID NO: 2467452
uagauagaaacuaucccua

SEQ ID NO: 2467454 - RNA, 19 nt, Artificial Sequence
  Description of Artificial Sequence: Synthetic oligonucleotide
  Sense strand starting at position 1759 of SEQ ID NO: 1887374
ucuaucuaucaguaguaga

SEQ ID NO: 2467455 - RNA, 19 nt, Artificial Sequence
  Description of Artificial Sequence: Synthetic oligonucleotide
  Antisense strand to SEQ ID NO: 2467454
ucuacuacugauagauaga

SEQ ID NO: 2467456 - RNA, 19 nt, Artificial Sequence
  Description of Artificial Sequence: Synthetic oligonucleotide
  Sense strand starting at position 2068 of SEQ ID NO: 1887374
cuuacuaauguagagcaau

SEQ ID NO: 2467457 - RNA, 19 nt, Artificial Sequence
  Description of Artificial Sequence: Synthetic oligonucleotide
  Antisense strand to SEQ ID NO: 2467456
auugcucuacauuaguaag

SEQ ID NO: 2467458 - RNA, 19 nt, Artificial Sequence
  Description of Artificial Sequence: Synthetic oligonucleotide
  Sense strand starting at position 2074 of SEQ ID NO: 1887374
aauguagagcaaugguaaa

SEQ ID NO: 2467459 - RNA, 19 nt, Artificial Sequence
  Description of Artificial Sequence: Synthetic oligonucleotide
  Antisense strand to SEQ ID NO: 2467458
uuuaccauugcucuacauu

SEQ ID NO: 2467460 - RNA, 19 nt, Artificial Sequence
  Description of Artificial Sequence: Synthetic oligonucleotide
  Sense strand starting at position 2133 of SEQ ID NO: 1887374
acaaguuuaccugaagcau

SEQ ID NO: 2467461 - RNA, 19 nt, Artificial Sequence
  Description of Artificial Sequence: Synthetic oligonucleotide
  Antisense strand to SEQ ID NO: 2467460
augcuucagguaaacuugu

SEQ ID NO: 2467462 - RNA, 19 nt, Artificial Sequence
  Description of Artificial Sequence: Synthetic oligonucleotide
  Sense strand starting at position 2145 of SEQ ID NO: 1887374
gaagcauggcauuaauggu

SEQ ID NO: 2467463 - RNA, 19 nt, Artificial Sequence
  Description of Artificial Sequence: Synthetic oligonucleotide
  Antisense strand to SEQ ID NO: 2467462
accauuaaugccaugcuuc

SEQ ID NO: 2467464 - RNA, 19 nt, Artificial Sequence
  Description of Artificial Sequence: Synthetic oligonucleotide
  Sense strand starting at position 2166 of SEQ ID NO: 1887374
cauauucuugguggacaua

SEQ ID NO: 2467465 - RNA, 19 nt, Artificial Sequence
  Description of Artificial Sequence: Synthetic oligonucleotide
  Antisense strand to SEQ ID NO: 2467464
uauguccaccaagaauaug

SEQ ID NO: 2467466 - RNA, 19 nt, Artificial Sequence
  Description of Artificial Sequence: Synthetic oligonucleotide
  Sense strand starting at position 2255 of SEQ ID NO: 1887374
aaagaaucaguguaguguu

SEQ ID NO: 2467467 - RNA, 19 nt, Artificial Sequence
  Description of Artificial Sequence: Synthetic oligonucleotide
  Antisense strand to SEQ ID NO: 2467466
aacacuacacugauucuuu

SEQ ID NO: 2467468 - RNA, 19 nt, Artificial Sequence
  Description of Artificial Sequence: Synthetic oligonucleotide
  Sense strand starting at position 2268 of SEQ ID NO: 1887374
aguguuacagaguguauuu

SEQ ID NO: 2467469 - RNA, 19 nt, Artificial Sequence
  Description of Artificial Sequence: Synthetic oligonucleotide
  Antisense strand to SEQ ID NO: 2467468
aaauacacucuguaacacu

SEQ ID NO: 2467470 - RNA, 19 nt, Artificial Sequence
  Description of Artificial Sequence: Synthetic oligonucleotide
  Sense strand starting at position 2454 of SEQ ID NO: 1887374
uucugauauugacucuaga

SEQ ID NO: 2467471 - RNA, 19 nt, Artificial Sequence
  Description of Artificial Sequence: Synthetic oligonucleotide
  Antisense strand to SEQ ID NO: 2467470
ucuagagucaauaucagaa

SEQ ID NO: 2467472 - RNA, 19 nt, Artificial Sequence
  Description of Artificial Sequence: Synthetic oligonucleotide
  Sense strand starting at position 2501 of SEQ ID NO: 1887374
augagugugggugaauuga

SEQ ID NO: 2467473 - RNA, 19 nt, Artificial Sequence
  Description of Artificial Sequence: Synthetic oligonucleotide
  Antisense strand to SEQ ID NO: 2467472
ucaauucacccacacucau

SEQ ID NO: 2467474 - RNA, 19 nt, Artificial Sequence
  Description of Artificial Sequence: Synthetic oligonucleotide
  Sense strand starting at position 2568 of SEQ ID NO: 1887374
auaagaacucgugaucauu

SEQ ID NO: 2467475 - RNA, 19 nt, Artificial Sequence
  Description of Artificial Sequence: Synthetic oligonucleotide
  Antisense strand to SEQ ID NO: 2467474
aaugaucacgaguucuuau

SEQ ID NO: 2467476 - RNA, 19 nt, Artificial Sequence
  Description of Artificial Sequence: Synthetic oligonucleotide
  Sense strand starting at position 2611 of SEQ ID NO: 1887374
uuauuaguuccuuaccuga

SEQ ID NO: 2467477 - RNA, 19 nt, Artificial Sequence
  Description of Artificial Sequence: Synthetic oligonucleotide
  Antisense strand to SEQ ID NO: 2467476
ucagguaaggaacuaauaa

SEQ ID NO: 2467478 - RNA, 19 nt, Artificial Sequence
  Description of Artificial Sequence: Synthetic oligonucleotide
  Sense strand starting at position 2647 of SEQ ID NO: 1887374
uucucuuuggguuaaauac

SEQ ID NO: 2467479 - RNA, 19 nt, Artificial Sequence
  Description of Artificial Sequence: Synthetic oligonucleotide
  Antisense strand to SEQ ID NO: 2467478
guauuuaacccaaagagaa

SEQ ID NO: 2467480 - RNA, 19 nt, Artificial Sequence
  Description of Artificial Sequence: Synthetic oligonucleotide
  Sense strand starting at position 2843 of SEQ ID NO: 1887374
uuaccuugauaguuuagaa

SEQ ID NO: 2467481 - RNA, 19 nt, Artificial Sequence
  Description of Artificial Sequence: Synthetic oligonucleotide
  Antisense strand to SEQ ID NO: 2467480
uucuaaacuaucaagguaa

SEQ ID NO: 2467482 - RNA, 19 nt, Artificial Sequence
  Description of Artificial Sequence: Synthetic oligonucleotide
  Sense strand starting at position 2867 of SEQ ID NO: 1887374
agaaauuauaguugguaag

SEQ ID NO: 2467483 - RNA, 19 nt, Artificial Sequence
  Description of Artificial Sequence: Synthetic oligonucleotide
  Antisense strand to SEQ ID NO: 2467482
cuuaccaacuauaauuucu

SEQ ID NO: 2467484 - RNA, 19 nt, Artificial Sequence
  Description of Artificial Sequence: Synthetic oligonucleotide
  Sense strand starting at position 2976 of SEQ ID NO: 1887374
aguagaauuucugcagcuu

SEQ ID NO: 2467485 - RNA, 19 nt, Artificial Sequence
  Description of Artificial Sequence: Synthetic oligonucleotide
  Antisense strand to SEQ ID NO: 2467484
aagcugcagaaauucuacu

SEQ ID NO: 2467486 - RNA, 19 nt, Artificial Sequence
  Description of Artificial Sequence: Synthetic oligonucleotide
  Sense strand starting at position 2982 of SEQ ID NO: 1887374
auuucugcagcuugugaua

SEQ ID NO: 2467487 - RNA, 19 nt, Artificial Sequence
  Description of Artificial Sequence: Synthetic oligonucleotide
  Antisense strand to SEQ ID NO: 2467486
uaucacaagcugcagaaau

SEQ ID NO: 2467488 - RNA, 19 nt, Artificial Sequence
  Description of Artificial Sequence: Synthetic oligonucleotide
  Sense strand starting at position 3011 of SEQ ID NO: 1887374
gcagcuuauagagagcaaa

SEQ ID NO: 2467489 - RNA, 19 nt, Artificial Sequence
  Description of Artificial Sequence: Synthetic oligonucleotide
  Antisense strand to SEQ ID NO: 2467488
uuugcucucuauaagcugc

SEQ ID NO: 2467490 - RNA, 19 nt, Artificial Sequence
  Description of Artificial Sequence: Synthetic oligonucleotide
  Sense strand starting at position 3014 of SEQ ID NO: 1887374
gcuuauagagagcaaauca

SEQ ID NO: 2467491 - RNA, 19 nt, Artificial Sequence
  Description of Artificial Sequence: Synthetic oligonucleotide
  Antisense strand to SEQ ID NO: 2467490
ugauuugcucucuauaagc

SEQ ID NO: 2467492 - RNA, 19 nt, Artificial Sequence
  Description of Artificial Sequence: Synthetic oligonucleotide
  Sense strand starting at position 3164 of SEQ ID NO: 1887374
aguuucuugguugacuaaa

SEQ ID NO: 2467493 - RNA, 19 nt, Artificial Sequence
  Description of Artificial Sequence: Synthetic oligonucleotide
  Antisense strand to SEQ ID NO: 2467492
uuuagucaaccaagaaacu

SEQ ID NO: 2467494 - RNA, 19 nt, Artificial Sequence
  Description of Artificial Sequence: Synthetic oligonucleotide
  Sense strand starting at position 3226 of SEQ ID NO: 1887374
ggaagcaggaugugacuua

SEQ ID NO: 2467495 - RNA, 19 nt, Artificial Sequence
  Description of Artificial Sequence: Synthetic oligonucleotide
  Antisense strand to SEQ ID NO: 2467494
uaagucacauccugcuucc

SEQ ID NO: 2467496 - RNA, 19 nt, Artificial Sequence
  Description of Artificial Sequence: Synthetic oligonucleotide
  Sense strand starting at position 3407 of SEQ ID NO: 1887374
gaaauuaggcuaugguuag

SEQ ID NO: 2467497 - RNA, 19 nt, Artificial Sequence
  Description of Artificial Sequence: Synthetic oligonucleotide
  Antisense strand to SEQ ID NO: 2467496
cuaaccauagccuaauuuc

SEQ ID NO: 2467498 - RNA, 19 nt, Artificial Sequence
  Description of Artificial Sequence: Synthetic oligonucleotide
  Sense strand starting at position 3836 of SEQ ID NO: 1887374
gaaucaguguuggccauuu

SEQ ID NO: 2467499 - RNA, 19 nt, Artificial Sequence
  Description of Artificial Sequence: Synthetic oligonucleotide
  Antisense strand to SEQ ID NO: 2467498
aaauggccaacacugauuc

SEQ ID NO: 2467500 - RNA, 19 nt, Artificial Sequence
  Description of Artificial Sequence: Synthetic oligonucleotide
  Sense strand starting at position 3893 of SEQ ID NO: 1887374
agggaaaguuaagcaauca

SEQ ID NO: 2467501 - RNA, 19 nt, Artificial Sequence
  Description of Artificial Sequence: Synthetic oligonucleotide
  Antisense strand to SEQ ID NO: 2467500
ugauugcuuaacuuucccu

SEQ ID NO: 2467502 - RNA, 19 nt, Artificial Sequence
  Description of Artificial Sequence: Synthetic oligonucleotide
  Sense strand starting at position 316 of SEQ ID NO: 1887375
aguagagcccucuauuaau

SEQ ID NO: 2467503 - RNA, 19 nt, Artificial Sequence
  Description of Artificial Sequence: Synthetic oligonucleotide
  Antisense strand to SEQ ID NO: 2467502
auuaauagagggcucuacu

SEQ ID NO: 2467504 - RNA, 19 nt, Artificial Sequence
  Description of Artificial Sequence: Synthetic oligonucleotide
  Sense strand starting at position 402 of SEQ ID NO: 1887375
cagggagucugauucucuu

SEQ ID NO: 2467505 - RNA, 19 nt, Artificial Sequence
  Description of Artificial Sequence: Synthetic oligonucleotide
  Antisense strand to SEQ ID NO: 2467504
aagagaaucagacucccug

SEQ ID NO: 2467506 - RNA, 19 nt, Artificial Sequence
  Description of Artificial Sequence: Synthetic oligonucleotide
  Sense strand starting at position 497 of SEQ ID NO: 1887375
cuucuuuggacagaggcau

SEQ ID NO: 2467507 - RNA, 19 nt, Artificial Sequence
  Description of Artificial Sequence: Synthetic oligonucleotide
  Antisense strand to SEQ ID NO: 2467506
augccucuguccaaagaag

SEQ ID NO: 2467508 - RNA, 19 nt, Artificial Sequence
  Description of Artificial Sequence: Synthetic oligonucleotide
  Sense strand starting at position 511 of SEQ ID NO: 1887375
ggcaucucaugaccuugaa

SEQ ID NO: 2467509 - RNA, 19 nt, Artificial Sequence
  Description of Artificial Sequence: Synthetic oligonucleotide
  Antisense strand to SEQ ID NO: 2467508
uucaaggucaugagaugcc

SEQ ID NO: 2467510 - RNA, 19 nt, Artificial Sequence
  Description of Artificial Sequence: Synthetic oligonucleotide
  Sense strand starting at position 571 of SEQ ID NO: 1887375
gaggcuuuccagcaaggga

SEQ ID NO: 2467511 - RNA, 19 nt, Artificial Sequence
  Description of Artificial Sequence: Synthetic oligonucleotide
  Antisense strand to SEQ ID NO: 2467510
ucccuugcuggaaagccuc

SEQ ID NO: 2467512 - RNA, 19 nt, Artificial Sequence
  Description of Artificial Sequence: Synthetic oligonucleotide
  Sense strand starting at position 775 of SEQ ID NO: 1887375
ucauaagugaaugguugaa

SEQ ID NO: 2467513 - RNA, 19 nt, Artificial Sequence
  Description of Artificial Sequence: Synthetic oligonucleotide
  Antisense strand to SEQ ID NO: 2467512
uucaaccauucacuuauga

SEQ ID NO: 2467514 - RNA, 19 nt, Artificial Sequence
  Description of Artificial Sequence: Synthetic oligonucleotide
  Sense strand starting at position 777 of SEQ ID NO: 1887375
auaagugaaugguugaaug

SEQ ID NO: 2467515 - RNA, 19 nt, Artificial Sequence
  Description of Artificial Sequence: Synthetic oligonucleotide
  Antisense strand to SEQ ID NO: 2467514
cauucaaccauucacuuau

SEQ ID NO: 2467516 - RNA, 19 nt, Artificial Sequence
  Description of Artificial Sequence: Synthetic oligonucleotide
  Sense strand starting at position 779 of SEQ ID NO: 1887375
aagugaaugguugaauggu

SEQ ID NO: 2467517 - RNA, 19 nt, Artificial Sequence
  Description of Artificial Sequence: Synthetic oligonucleotide
  Antisense strand to SEQ ID NO: 2467516
accauucaaccauucacuu

SEQ ID NO: 2467518 - RNA, 19 nt, Artificial Sequence
  Description of Artificial Sequence: Synthetic oligonucleotide
  Sense strand starting at position 785 of SEQ ID NO: 1887375
augguugaaugguugaauu

SEQ ID NO: 2467519 - RNA, 19 nt, Artificial Sequence
  Description of Artificial Sequence: Synthetic oligonucleotide
  Antisense strand to SEQ ID NO: 2467518
aauucaaccauucaaccau

SEQ ID NO: 2467520 - RNA, 19 nt, Artificial Sequence
  Description of Artificial Sequence: Synthetic oligonucleotide
  Sense strand starting at position 1065 of SEQ ID NO: 1887375
ggaagaaaggccuagugua

SEQ ID NO: 2467521 - RNA, 19 nt, Artificial Sequence
  Description of Artificial Sequence: Synthetic oligonucleotide
  Antisense strand to SEQ ID NO: 2467520
uacacuaggccuuucuucc

SEQ ID NO: 2467522 - RNA, 19 nt, Artificial Sequence
  Description of Artificial Sequence: Synthetic oligonucleotide
  Sense strand starting at position 1100 of SEQ ID NO: 1887375
ccuaguaauugauugaaau

SEQ ID NO: 2467523 - RNA, 19 nt, Artificial Sequence
  Description of Artificial Sequence: Synthetic oligonucleotide
  Antisense strand to SEQ ID NO: 2467522
auuucaaucaauuacuagg

SEQ ID NO: 2467524 - RNA, 19 nt, Artificial Sequence
  Description of Artificial Sequence: Synthetic oligonucleotide
  Sense strand starting at position 1101 of SEQ ID NO: 1887375
cuaguaauugauugaaauc

SEQ ID NO: 2467525 - RNA, 19 nt, Artificial Sequence
  Description of Artificial Sequence: Synthetic oligonucleotide
  Antisense strand to SEQ ID NO: 2467524
gauuucaaucaauuacuag

SEQ ID NO: 2467526 - RNA, 19 nt, Artificial Sequence
  Description of Artificial Sequence: Synthetic oligonucleotide
  Sense strand starting at position 1160 of SEQ ID NO: 1887375
ugaaaccauguguaaguuu

SEQ ID NO: 2467527 - RNA, 19 nt, Artificial Sequence
  Description of Artificial Sequence: Synthetic oligonucleotide
  Antisense strand to SEQ ID NO: 2467526
aaacuuacacaugguuuca

SEQ ID NO: 2467528 - RNA, 19 nt, Artificial Sequence
  Description of Artificial Sequence: Synthetic oligonucleotide
  Sense strand starting at position 1329 of SEQ ID NO: 1887375
cuauaagcauggguuaaau

SEQ ID NO: 2467529 - RNA, 19 nt, Artificial Sequence
  Description of Artificial Sequence: Synthetic oligonucleotide
  Antisense strand to SEQ ID NO: 2467528
auuuaacccaugcuuauag

SEQ ID NO: 2467530 - RNA, 19 nt, Artificial Sequence
  Description of Artificial Sequence: Synthetic oligonucleotide
  Sense strand starting at position 1382 of SEQ ID NO: 1887375
ugaggaacucugcaaucuu

SEQ ID NO: 2467531 - RNA, 19 nt, Artificial Sequence
  Description of Artificial Sequence: Synthetic oligonucleotide
  Antisense strand to SEQ ID NO: 2467530
aagauugcagaguuccuca

SEQ ID NO: 2467532 - RNA, 19 nt, Artificial Sequence
  Description of Artificial Sequence: Synthetic oligonucleotide
  Sense strand starting at position 1786 of SEQ ID NO: 1887375
uaaccauauugguuaugag

SEQ ID NO: 2467533 - RNA, 19 nt, Artificial Sequence
  Description of Artificial Sequence: Synthetic oligonucleotide
  Antisense strand to SEQ ID NO: 2467532
cucauaaccaauaugguua

SEQ ID NO: 2467534 - RNA, 19 nt, Artificial Sequence
  Description of Artificial Sequence: Synthetic oligonucleotide
  Sense strand starting at position 1787 of SEQ ID NO: 1887375
aaccauauugguuaugagu

SEQ ID NO: 2467535 - RNA, 19 nt, Artificial Sequence
  Description of Artificial Sequence: Synthetic oligonucleotide
  Antisense strand to SEQ ID NO: 2467534
acucauaaccaauaugguu

SEQ ID NO: 2467536 - RNA, 19 nt, Artificial Sequence
  Description of Artificial Sequence: Synthetic oligonucleotide
  Sense strand starting at position 1860 of SEQ ID NO: 1887375
agaugaaccuucuugcuca

SEQ ID NO: 2467537 - RNA, 19 nt, Artificial Sequence
  Description of Artificial Sequence: Synthetic oligonucleotide
  Antisense strand to SEQ ID NO: 2467536
ugagcaagaagguucaucu

SEQ ID NO: 2467538 - RNA, 19 nt, Artificial Sequence
  Description of Artificial Sequence: Synthetic oligonucleotide
  Sense strand starting at position 2108 of SEQ ID NO: 1887375
agaagcaucacggguacaa

SEQ ID NO: 2467539 - RNA, 19 nt, Artificial Sequence
  Description of Artificial Sequence: Synthetic oligonucleotide
  Antisense strand to SEQ ID NO: 2467538
uuguacccgugaugcuucu

SEQ ID NO: 2467540 - RNA, 19 nt, Artificial Sequence
  Description of Artificial Sequence: Synthetic oligonucleotide
  Sense strand starting at position 2174 of SEQ ID NO: 1887375
uguguucuggaacaguaga

SEQ ID NO: 2467541 - RNA, 19 nt, Artificial Sequence
  Description of Artificial Sequence: Synthetic oligonucleotide
  Antisense strand to SEQ ID NO: 2467540
ucuacuguuccagaacaca

SEQ ID NO: 2467542 - RNA, 19 nt, Artificial Sequence
  Description of Artificial Sequence: Synthetic oligonucleotide
  Sense strand starting at position 2328 of SEQ ID NO: 1887375
ggaauagauuucuggaaau

SEQ ID NO: 2467543 - RNA, 19 nt, Artificial Sequence
  Description of Artificial Sequence: Synthetic oligonucleotide
  Antisense strand to SEQ ID NO: 2467542
auuuccagaaaucuauucc

SEQ ID NO: 2467544 - RNA, 19 nt, Artificial Sequence
  Description of Artificial Sequence: Synthetic oligonucleotide
  Sense strand starting at position 2375 of SEQ ID NO: 1887375
augagaauaaucuggccga

SEQ ID NO: 2467545 - RNA, 19 nt, Artificial Sequence
  Description of Artificial Sequence: Synthetic oligonucleotide
  Antisense strand to SEQ ID NO: 2467544
ucggccagauuauucucau

SEQ ID NO: 2467546 - RNA, 19 nt, Artificial Sequence
  Description of Artificial Sequence: Synthetic oligonucleotide
  Sense strand starting at position 2378 of SEQ ID NO: 1887375
agaauaaucuggccgaaug

SEQ ID NO: 2467547 - RNA, 19 nt, Artificial Sequence
  Description of Artificial Sequence: Synthetic oligonucleotide
  Antisense strand to SEQ ID NO: 2467546
cauucggccagauuauucu

SEQ ID NO: 2467548 - RNA, 19 nt, Artificial Sequence
  Description of Artificial Sequence: Synthetic oligonucleotide
  Sense strand starting at position 2379 of SEQ ID NO: 1887375
gaauaaucuggccgaauga

SEQ ID NO: 2467549 - RNA, 19 nt, Artificial Sequence
  Description of Artificial Sequence: Synthetic oligonucleotide
  Antisense strand to SEQ ID NO: 2467548
ucauucggccagauuauuc

SEQ ID NO: 2467550 - RNA, 19 nt, Artificial Sequence
  Description of Artificial Sequence: Synthetic oligonucleotide
  Sense strand starting at position 2388 of SEQ ID NO: 1887375
ggccgaaugaauggauacu

SEQ ID NO: 2467551 - RNA, 19 nt, Artificial Sequence
  Description of Artificial Sequence: Synthetic oligonucleotide
  Antisense strand to SEQ ID NO: 2467550
aguauccauucauucggcc

SEQ ID NO: 2467552 - RNA, 19 nt, Artificial Sequence
  Description of Artificial Sequence: Synthetic oligonucleotide
  Sense strand starting at position 2438 of SEQ ID NO: 1887375
auccaucaucaguaaaugu

SEQ ID NO: 2467553 - RNA, 19 nt, Artificial Sequence
  Description of Artificial Sequence: Synthetic oligonucleotide
  Antisense strand to SEQ ID NO: 2467552
acauuuacugaugauggau

SEQ ID NO: 2467554 - RNA, 19 nt, Artificial Sequence
  Description of Artificial Sequence: Synthetic oligonucleotide
  Sense strand starting at position 2448 of SEQ ID NO: 1887375
aguaaaugugaucaauucu

SEQ ID NO: 2467555 - RNA, 19 nt, Artificial Sequence
  Description of Artificial Sequence: Synthetic oligonucleotide
  Antisense strand to SEQ ID NO: 2467554
agaauugaucacauuuacu

SEQ ID NO: 2467556 - RNA, 19 nt, Artificial Sequence
  Description of Artificial Sequence: Synthetic oligonucleotide
  Sense strand starting at position 2456 of SEQ ID NO: 1887375
ugaucaauucugcagucua

SEQ ID NO: 2467557 - RNA, 19 nt, Artificial Sequence
  Description of Artificial Sequence: Synthetic oligonucleotide
  Antisense strand to SEQ ID NO: 2467556
uagacugcagaauugauca

SEQ ID NO: 2467558 - RNA, 19 nt, Artificial Sequence
  Description of Artificial Sequence: Synthetic oligonucleotide
  Sense strand starting at position 2461 of SEQ ID NO: 1887375
aauucugcagucuaggaaa

SEQ ID NO: 2467559 - RNA, 19 nt, Artificial Sequence
  Description of Artificial Sequence: Synthetic oligonucleotide
  Antisense strand to SEQ ID NO: 2467558
uuuccuagacugcagaauu

SEQ ID NO: 2467560 - RNA, 19 nt, Artificial Sequence
  Description of Artificial Sequence: Synthetic oligonucleotide
  Sense strand starting at position 2500 of SEQ ID NO: 1887375
ggauacagcaguuagaugu

SEQ ID NO: 2467561 - RNA, 19 nt, Artificial Sequence
  Description of Artificial Sequence: Synthetic oligonucleotide
  Antisense strand to SEQ ID NO: 2467560
acaucuaacugcuguaucc

SEQ ID NO: 2467562 - RNA, 19 nt, Artificial Sequence
  Description of Artificial Sequence: Synthetic oligonucleotide
  Sense strand starting at position 2584 of SEQ ID NO: 1887375
ucuucuugaccacagucau

SEQ ID NO: 2467563 - RNA, 19 nt, Artificial Sequence
  Description of Artificial Sequence: Synthetic oligonucleotide
  Antisense strand to SEQ ID NO: 2467562
augacuguggucaagaaga

SEQ ID NO: 2467564 - RNA, 19 nt, Artificial Sequence
  Description of Artificial Sequence: Synthetic oligonucleotide
  Sense strand starting at position 2865 of SEQ ID NO: 1887375
aggguugggagccaguuau

SEQ ID NO: 2467565 - RNA, 19 nt, Artificial Sequence
  Description of Artificial Sequence: Synthetic oligonucleotide
  Antisense strand to SEQ ID NO: 2467564
auaacuggcucccaacccu

SEQ ID NO: 2467566 - RNA, 19 nt, Artificial Sequence
  Description of Artificial Sequence: Synthetic oligonucleotide
  Sense strand starting at position 2892 of SEQ ID NO: 1887375
caggauaacugaguuguua

SEQ ID NO: 2467567 - RNA, 19 nt, Artificial Sequence
  Description of Artificial Sequence: Synthetic oligonucleotide
  Antisense strand to SEQ ID NO: 2467566
uaacaacucaguuauccug

SEQ ID NO: 2467568 - RNA, 19 nt, Artificial Sequence
  Description of Artificial Sequence: Synthetic oligonucleotide
  Sense strand starting at position 2894 of SEQ ID NO: 1887375
ggauaacugaguuguuaac

SEQ ID NO: 2467569 - RNA, 19 nt, Artificial Sequence
  Description of Artificial Sequence: Synthetic oligonucleotide
  Antisense strand to SEQ ID NO: 2467568
guuaacaacucaguuaucc

SEQ ID NO: 2467570 - RNA, 19 nt, Artificial Sequence
  Description of Artificial Sequence: Synthetic oligonucleotide
  Sense strand starting at position 2896 of SEQ ID NO: 1887375
auaacugaguuguuaacau

SEQ ID NO: 2467571 - RNA, 19 nt, Artificial Sequence
  Description of Artificial Sequence: Synthetic oligonucleotide
  Antisense strand to SEQ ID NO: 2467570
auguuaacaacucaguuau

SEQ ID NO: 2467572 - RNA, 19 nt, Artificial Sequence
  Description of Artificial Sequence: Synthetic oligonucleotide
  Sense strand starting at position 2907 of SEQ ID NO: 1887375
guuaacaucugaccagagu

SEQ ID NO: 2467573 - RNA, 19 nt, Artificial Sequence
  Description of Artificial Sequence: Synthetic oligonucleotide
  Antisense strand to SEQ ID NO: 2467572
acucuggucagauguuaac

SEQ ID NO: 2467574 - RNA, 19 nt, Artificial Sequence
  Description of Artificial Sequence: Synthetic oligonucleotide
  Sense strand starting at position 3052 of SEQ ID NO: 1887375
uggacuugcagugauuauc

SEQ ID NO: 2467575 - RNA, 19 nt, Artificial Sequence
  Description of Artificial Sequence: Synthetic oligonucleotide
  Antisense strand to SEQ ID NO: 2467574
gauaaucacugcaagucca

SEQ ID NO: 2467576 - RNA, 19 nt, Artificial Sequence
  Description of Artificial Sequence: Synthetic oligonucleotide
  Sense strand starting at position 3470 of SEQ ID NO: 1887375
caggcuuguccugcuuagu

SEQ ID NO: 2467577 - RNA, 19 nt, Artificial Sequence
  Description of Artificial Sequence: Synthetic oligonucleotide
  Antisense strand to SEQ ID NO: 2467576
acuaagcaggacaagccug

SEQ ID NO: 2467578 - RNA, 19 nt, Artificial Sequence
  Description of Artificial Sequence: Synthetic oligonucleotide
  Sense strand starting at position 3819 of SEQ ID NO: 1887375
aaguuaaugcauuacaggu

SEQ ID NO: 2467579 - RNA, 19 nt, Artificial Sequence
  Description of Artificial Sequence: Synthetic oligonucleotide
  Antisense strand to SEQ ID NO: 2467578
accuguaaugcauuaacuu

SEQ ID NO: 2467580 - RNA, 19 nt, Artificial Sequence
  Description of Artificial Sequence: Synthetic oligonucleotide
  Sense strand starting at position 3920 of SEQ ID NO: 1887375
uucuauggcccagaaaucu

SEQ ID NO: 2467581 - RNA, 19 nt, Artificial Sequence
  Description of Artificial Sequence: Synthetic oligonucleotide
  Antisense strand to SEQ ID NO: 2467580
agauuucugggccauagaa

SEQ ID NO: 2467582 - RNA, 19 nt, Artificial Sequence
  Description of Artificial Sequence: Synthetic oligonucleotide
  Sense strand starting at position 6 of SEQ ID NO: 1887376
gcuguuugucuguucugau

SEQ ID NO: 2467583 - RNA, 19 nt, Artificial Sequence
  Description of Artificial Sequence: Synthetic oligonucleotide
  Antisense strand to SEQ ID NO: 2467582
aucagaacagacaaacagc

SEQ ID NO: 2467584 - RNA, 19 nt, Artificial Sequence
  Description of Artificial Sequence: Synthetic oligonucleotide
  Sense strand starting at position 184 of SEQ ID NO: 1887376
uagguacuuucuguaaaga

SEQ ID NO: 2467585 - RNA, 19 nt, Artificial Sequence
  Description of Artificial Sequence: Synthetic oligonucleotide
  Antisense strand to SEQ ID NO: 2467584
ucuuuacagaaaguaccua

SEQ ID NO: 2467586 - RNA, 19 nt, Artificial Sequence
  Description of Artificial Sequence: Synthetic oligonucleotide
  Sense strand starting at position 185 of SEQ ID NO: 1887376
agguacuuucuguaaagau

SEQ ID NO: 2467587 - RNA, 19 nt, Artificial Sequence
  Description of Artificial Sequence: Synthetic oligonucleotide
  Antisense strand to SEQ ID NO: 2467586
aucuuuacagaaaguaccu

SEQ ID NO: 2467588 - RNA, 19 nt, Artificial Sequence
  Description of Artificial Sequence: Synthetic oligonucleotide
  Sense strand starting at position 402 of SEQ ID NO: 1887376
gagugaaucaccugaugug

SEQ ID NO: 2467589 - RNA, 19 nt, Artificial Sequence
  Description of Artificial Sequence: Synthetic oligonucleotide
  Antisense strand to SEQ ID NO: 2467588
cacaucaggugauucacuc

SEQ ID NO: 2467590 - RNA, 19 nt, Artificial Sequence
  Description of Artificial Sequence: Synthetic oligonucleotide
  Sense strand starting at position 464 of SEQ ID NO: 1887376
guuucuuauuugcuuacua

SEQ ID NO: 2467591 - RNA, 19 nt, Artificial Sequence
  Description of Artificial Sequence: Synthetic oligonucleotide
  Antisense strand to SEQ ID NO: 2467590
uaguaagcaaauaagaaac

SEQ ID NO: 2467592 - RNA, 19 nt, Artificial Sequence
  Description of Artificial Sequence: Synthetic oligonucleotide
  Sense strand starting at position 515 of SEQ ID NO: 1887376
ugaauaugugagcaacuca

SEQ ID NO: 2467593 - RNA, 19 nt, Artificial Sequence
  Description of Artificial Sequence: Synthetic oligonucleotide
  Antisense strand to SEQ ID NO: 2467592
ugaguugcucacauauuca

SEQ ID NO: 2467594 - RNA, 19 nt, Artificial Sequence
  Description of Artificial Sequence: Synthetic oligonucleotide
  Sense strand starting at position 580 of SEQ ID NO: 1887376
ucugaaauauggucuguaa

SEQ ID NO: 2467595 - RNA, 19 nt, Artificial Sequence
  Description of Artificial Sequence: Synthetic oligonucleotide
  Antisense strand to SEQ ID NO: 2467594
uuacagaccauauuucaga

SEQ ID NO: 2467596 - RNA, 19 nt, Artificial Sequence
  Description of Artificial Sequence: Synthetic oligonucleotide
  Sense strand starting at position 582 of SEQ ID NO: 1887376
ugaaauauggucuguaaac

SEQ ID NO: 2467597 - RNA, 19 nt, Artificial Sequence
  Description of Artificial Sequence: Synthetic oligonucleotide
  Antisense strand to SEQ ID NO: 2467596
guuuacagaccauauuuca

SEQ ID NO: 2467598 - RNA, 19 nt, Artificial Sequence
  Description of Artificial Sequence: Synthetic oligonucleotide
  Sense strand starting at position 583 of SEQ ID NO: 1887376
gaaauauggucuguaaaca

SEQ ID NO: 2467599 - RNA, 19 nt, Artificial Sequence
  Description of Artificial Sequence: Synthetic oligonucleotide
  Antisense strand to SEQ ID NO: 2467598
uguuuacagaccauauuuc

SEQ ID NO: 2467600 - RNA, 19 nt, Artificial Sequence
  Description of Artificial Sequence: Synthetic oligonucleotide
  Sense strand starting at position 708 of SEQ ID NO: 1887376
gagucuauucgguaauagg

SEQ ID NO: 2467601 - RNA, 19 nt, Artificial Sequence
  Description of Artificial Sequence: Synthetic oligonucleotide
  Antisense strand to SEQ ID NO: 2467600
ccuauuaccgaauagacuc

SEQ ID NO: 2467602 - RNA, 19 nt, Artificial Sequence
  Description of Artificial Sequence: Synthetic oligonucleotide
  Sense strand starting at position 719 of SEQ ID NO: 1887376
guaauaggauacuuagagu

SEQ ID NO: 2467603 - RNA, 19 nt, Artificial Sequence
  Description of Artificial Sequence: Synthetic oligonucleotide
  Antisense strand to SEQ ID NO: 2467602
acucuaaguauccuauuac

SEQ ID NO: 2467604 - RNA, 19 nt, Artificial Sequence
  Description of Artificial Sequence: Synthetic oligonucleotide
  Sense strand starting at position 812 of SEQ ID NO: 1887376
gugacugagguguaauuaa

SEQ ID NO: 2467605 - RNA, 19 nt, Artificial Sequence
  Description of Artificial Sequence: Synthetic oligonucleotide
  Antisense strand to SEQ ID NO: 2467604
uuaauuacaccucagucac

SEQ ID NO: 2467606 - RNA, 19 nt, Artificial Sequence
  Description of Artificial Sequence: Synthetic oligonucleotide
  Sense strand starting at position 930 of SEQ ID NO: 1887376
aggaguggucaggaguuga

SEQ ID NO: 2467607 - RNA, 19 nt, Artificial Sequence
  Description of Artificial Sequence: Synthetic oligonucleotide
  Antisense strand to SEQ ID NO: 2467606
ucaacuccugaccacuccu

SEQ ID NO: 2467608 - RNA, 19 nt, Artificial Sequence
  Description of Artificial Sequence: Synthetic oligonucleotide
  Sense strand starting at position 940 of SEQ ID NO: 1887376
aggaguugagaauguguga

SEQ ID NO: 2467609 - RNA, 19 nt, Artificial Sequence
  Description of Artificial Sequence: Synthetic oligonucleotide
  Antisense strand to SEQ ID NO: 2467608
ucacacauucucaacuccu

SEQ ID NO: 2467610 - RNA, 19 nt, Artificial Sequence
  Description of Artificial Sequence: Synthetic oligonucleotide
  Sense strand starting at position 943 of SEQ ID NO: 1887376
aguugagaaugugugaaca

SEQ ID NO: 2467611 - RNA, 19 nt, Artificial Sequence
  Description of Artificial Sequence: Synthetic oligonucleotide
  Antisense strand to SEQ ID NO: 2467610
uguucacacauucucaacu

SEQ ID NO: 2467612 - RNA, 19 nt, Artificial Sequence
  Description of Artificial Sequence: Synthetic oligonucleotide
  Sense strand starting at position 959 of SEQ ID NO: 1887376
acaucugggucuuuaaacu

SEQ ID NO: 2467613 - RNA, 19 nt, Artificial Sequence
  Description of Artificial Sequence: Synthetic oligonucleotide
  Antisense strand to SEQ ID NO: 2467612
aguuuaaagacccagaugu

SEQ ID NO: 2467614 - RNA, 19 nt, Artificial Sequence
  Description of Artificial Sequence: Synthetic oligonucleotide
  Sense strand starting at position 998 of SEQ ID NO: 1887376
ucauuaauugcugaaaugu

SEQ ID NO: 2467615 - RNA, 19 nt, Artificial Sequence
  Description of Artificial Sequence: Synthetic oligonucleotide
  Antisense strand to SEQ ID NO: 2467614
acauuucagcaauuaauga

SEQ ID NO: 2467616 - RNA, 19 nt, Artificial Sequence
  Description of Artificial Sequence: Synthetic oligonucleotide
  Sense strand starting at position 1071 of SEQ ID NO: 1887376
aaauuauacggauguuaga

SEQ ID NO: 2467617 - RNA, 19 nt, Artificial Sequence
  Description of Artificial Sequence: Synthetic oligonucleotide
  Antisense strand to SEQ ID NO: 2467616
ucuaacauccguauaauuu

SEQ ID NO: 2467618 - RNA, 19 nt, Artificial Sequence
  Description of Artificial Sequence: Synthetic oligonucleotide
  Sense strand starting at position 1194 of SEQ ID NO: 1887376
uauuuauuguuagcagagu

SEQ ID NO: 2467619 - RNA, 19 nt, Artificial Sequence
  Description of Artificial Sequence: Synthetic oligonucleotide
  Antisense strand to SEQ ID NO: 2467618
acucugcuaacaauaaaua

SEQ ID NO: 2467620 - RNA, 19 nt, Artificial Sequence
  Description of Artificial Sequence: Synthetic oligonucleotide
  Sense strand starting at position 1858 of SEQ ID NO: 1887376
uuaguuggcaaguaauuga

SEQ ID NO: 2467621 - RNA, 19 nt, Artificial Sequence
  Description of Artificial Sequence: Synthetic oligonucleotide
  Antisense strand to SEQ ID NO: 2467620
ucaauuacuugccaacuaa

SEQ ID NO: 2467622 - RNA, 19 nt, Artificial Sequence
  Description of Artificial Sequence: Synthetic oligonucleotide
  Sense strand starting at position 1894 of SEQ ID NO: 1887376
guugguugucccguaguaa

SEQ ID NO: 2467623 - RNA, 19 nt, Artificial Sequence
  Description of Artificial Sequence: Synthetic oligonucleotide
  Antisense strand to SEQ ID NO: 2467622
uuacuacgggacaaccaac

SEQ ID NO: 2467624 - RNA, 19 nt, Artificial Sequence
  Description of Artificial Sequence: Synthetic oligonucleotide
  Sense strand starting at position 2197 of SEQ ID NO: 1887376
ugcauuaaggaaugaucaa

SEQ ID NO: 2467625 - RNA, 19 nt, Artificial Sequence
  Description of Artificial Sequence: Synthetic oligonucleotide
  Antisense strand to SEQ ID NO: 2467624
uugaucauuccuuaaugca

SEQ ID NO: 2467626 - RNA, 19 nt, Artificial Sequence
  Description of Artificial Sequence: Synthetic oligonucleotide
  Sense strand starting at position 2399 of SEQ ID NO: 1887376
ccagauaaauaguuaagcu

SEQ ID NO: 2467627 - RNA, 19 nt, Artificial Sequence
  Description of Artificial Sequence: Synthetic oligonucleotide
  Antisense strand to SEQ ID NO: 2467626
agcuuaacuauuuaucugg

SEQ ID NO: 2467628 - RNA, 19 nt, Artificial Sequence
  Description of Artificial Sequence: Synthetic oligonucleotide
  Sense strand starting at position 2503 of SEQ ID NO: 1887376
uguugauggguguaggaau

SEQ ID NO: 2467629 - RNA, 19 nt, Artificial Sequence
  Description of Artificial Sequence: Synthetic oligonucleotide
  Antisense strand to SEQ ID NO: 2467628
auuccuacacccaucaaca

SEQ ID NO: 2467630 - RNA, 19 nt, Artificial Sequence
  Description of Artificial Sequence: Synthetic oligonucleotide
  Sense strand starting at position 2518 of SEQ ID NO: 1887376
gaauaucaguggccuuaag

SEQ ID NO: 2467631 - RNA, 19 nt, Artificial Sequence
  Description of Artificial Sequence: Synthetic oligonucleotide
  Antisense strand to SEQ ID NO: 2467630
cuuaaggccacugauauuc

SEQ ID NO: 2467632 - RNA, 19 nt, Artificial Sequence
  Description of Artificial Sequence: Synthetic oligonucleotide
  Sense strand starting at position 2594 of SEQ ID NO: 1887376
uggacuugugucgaaagga

SEQ ID NO: 2467633 - RNA, 19 nt, Artificial Sequence
  Description of Artificial Sequence: Synthetic oligonucleotide
  Antisense strand to SEQ ID NO: 2467632
uccuuucgacacaagucca

SEQ ID NO: 2467634 - RNA, 19 nt, Artificial Sequence
  Description of Artificial Sequence: Synthetic oligonucleotide
  Sense strand starting at position 2644 of SEQ ID NO: 1887376
ugcuuacgugguguuacua

SEQ ID NO: 2467635 - RNA, 19 nt, Artificial Sequence
  Description of Artificial Sequence: Synthetic oligonucleotide
  Antisense strand to SEQ ID NO: 2467634
uaguaacaccacguaagca

SEQ ID NO: 2467636 - RNA, 19 nt, Artificial Sequence
  Description of Artificial Sequence: Synthetic oligonucleotide
  Sense strand starting at position 2782 of SEQ ID NO: 1887376
guuacaauccauggauaca

SEQ ID NO: 2467637 - RNA, 19 nt, Artificial Sequence
  Description of Artificial Sequence: Synthetic oligonucleotide
  Antisense strand to SEQ ID NO: 2467636
uguauccauggauuguaac

SEQ ID NO: 2467638 - RNA, 19 nt, Artificial Sequence
  Description of Artificial Sequence: Synthetic oligonucleotide
  Sense strand starting at position 2808 of SEQ ID NO: 1887376
aaaucuauuguguggauaa

SEQ ID NO: 2467639 - RNA, 19 nt, Artificial Sequence
  Description of Artificial Sequence: Synthetic oligonucleotide
  Antisense strand to SEQ ID NO: 2467638
uuauccacacaauagauuu

SEQ ID NO: 2467640 - RNA, 19 nt, Artificial Sequence
  Description of Artificial Sequence: Synthetic oligonucleotide
  Sense strand starting at position 3073 of SEQ ID NO: 1887376
uugguugguaaguaucaua

SEQ ID NO: 2467641 - RNA, 19 nt, Artificial Sequence
  Description of Artificial Sequence: Synthetic oligonucleotide
  Antisense strand to SEQ ID NO: 2467640
uaugauacuuaccaaccaa

SEQ ID NO: 2467642 - RNA, 19 nt, Artificial Sequence
  Description of Artificial Sequence: Synthetic oligonucleotide
  Sense strand starting at position 3088 of SEQ ID NO: 1887376
cauacugcuggugaaauua

SEQ ID NO: 2467643 - RNA, 19 nt, Artificial Sequence
  Description of Artificial Sequence: Synthetic oligonucleotide
  Antisense strand to SEQ ID NO: 2467642
uaauuucaccagcaguaug

SEQ ID NO: 2467644 - RNA, 19 nt, Artificial Sequence
  Description of Artificial Sequence: Synthetic oligonucleotide
  Sense strand starting at position 3138 of SEQ ID NO: 1887376
agaagugaaacagguguua

SEQ ID NO: 2467645 - RNA, 19 nt, Artificial Sequence
  Description of Artificial Sequence: Synthetic oligonucleotide
  Antisense strand to SEQ ID NO: 2467644
uaacaccuguuucacuucu

SEQ ID NO: 2467646 - RNA, 19 nt, Artificial Sequence
  Description of Artificial Sequence: Synthetic oligonucleotide
  Sense strand starting at position 3218 of SEQ ID NO: 1887376
augggagcuguuuagcaga

SEQ ID NO: 2467647 - RNA, 19 nt, Artificial Sequence
  Description of Artificial Sequence: Synthetic oligonucleotide
  Antisense strand to SEQ ID NO: 2467646
ucugcuaaacagcucccau

SEQ ID NO: 2467648 - RNA, 19 nt, Artificial Sequence
  Description of Artificial Sequence: Synthetic oligonucleotide
  Sense strand starting at position 3374 of SEQ ID NO: 1887376
ugaaauguuugaguuauac

SEQ ID NO: 2467649 - RNA, 19 nt, Artificial Sequence
  Description of Artificial Sequence: Synthetic oligonucleotide
  Antisense strand to SEQ ID NO: 2467648
guauaacucaaacauuuca

SEQ ID NO: 2467650 - RNA, 19 nt, Artificial Sequence
  Description of Artificial Sequence: Synthetic oligonucleotide
  Sense strand starting at position 3437 of SEQ ID NO: 1887376
augaacagcugaucuaagu

SEQ ID NO: 2467651 - RNA, 19 nt, Artificial Sequence
  Description of Artificial Sequence: Synthetic oligonucleotide
  Antisense strand to SEQ ID NO: 2467650
acuuagaucagcuguucau

SEQ ID NO: 2467652 - RNA, 19 nt, Artificial Sequence
  Description of Artificial Sequence: Synthetic oligonucleotide
  Sense strand starting at position 3443 of SEQ ID NO: 1887376
agcugaucuaagugauaga

SEQ ID NO: 2467653 - RNA, 19 nt, Artificial Sequence
  Description of Artificial Sequence: Synthetic oligonucleotide
  Antisense strand to SEQ ID NO: 2467652
ucuaucacuuagaucagcu

SEQ ID NO: 2467654 - RNA, 19 nt, Artificial Sequence
  Description of Artificial Sequence: Synthetic oligonucleotide
  Sense strand starting at position 3444 of SEQ ID NO: 1887376
gcugaucuaagugauagau

SEQ ID NO: 2467655 - RNA, 19 nt, Artificial Sequence
  Description of Artificial Sequence: Synthetic oligonucleotide
  Antisense strand to SEQ ID NO: 2467654
aucuaucacuuagaucagc

SEQ ID NO: 2467656 - RNA, 19 nt, Artificial Sequence
  Description of Artificial Sequence: Synthetic oligonucleotide
  Sense strand starting at position 3450 of SEQ ID NO: 1887376
cuaagugauagaugugaca

SEQ ID NO: 2467657 - RNA, 19 nt, Artificial Sequence
  Description of Artificial Sequence: Synthetic oligonucleotide
  Antisense strand to SEQ ID NO: 2467656
ugucacaucuaucacuuag

SEQ ID NO: 2467658 - RNA, 19 nt, Artificial Sequence
  Description of Artificial Sequence: Synthetic oligonucleotide
  Sense strand starting at position 3513 of SEQ ID NO: 1887376
gcaccagaaucagcauaua

SEQ ID NO: 2467659 - RNA, 19 nt, Artificial Sequence
  Description of Artificial Sequence: Synthetic oligonucleotide
  Antisense strand to SEQ ID NO: 2467658
uauaugcugauucuggugc

SEQ ID NO: 2467660 - RNA, 19 nt, Artificial Sequence
  Description of Artificial Sequence: Synthetic oligonucleotide
  Sense strand starting at position 3835 of SEQ ID NO: 1887376
ggaugaucagaagggcuau

SEQ ID NO: 2467661 - RNA, 19 nt, Artificial Sequence
  Description of Artificial Sequence: Synthetic oligonucleotide
  Antisense strand to SEQ ID NO: 2467660
auagcccuucugaucaucc

SEQ ID NO: 2467662 - RNA, 19 nt, Artificial Sequence
  Description of Artificial Sequence: Synthetic oligonucleotide
  Sense strand starting at position 136 of SEQ ID NO: 1887377
uucugauauugacucuaga

SEQ ID NO: 2467663 - RNA, 19 nt, Artificial Sequence
  Description of Artificial Sequence: Synthetic oligonucleotide
  Antisense strand to SEQ ID NO: 2467662
ucuagagucaauaucagaa

SEQ ID NO: 2467664 - RNA, 19 nt, Artificial Sequence
  Description of Artificial Sequence: Synthetic oligonucleotide
  Sense strand starting at position 180 of SEQ ID NO: 1887377
aggaugagugugggugaau

SEQ ID NO: 2467665 - RNA, 19 nt, Artificial Sequence
  Description of Artificial Sequence: Synthetic oligonucleotide
  Antisense strand to SEQ ID NO: 2467664
auucacccacacucauccu

SEQ ID NO: 2467666 - RNA, 19 nt, Artificial Sequence
  Description of Artificial Sequence: Synthetic oligonucleotide
  Sense strand starting at position 183 of SEQ ID NO: 1887377
augagugugggugaauuga

SEQ ID NO: 2467667 - RNA, 19 nt, Artificial Sequence
  Description of Artificial Sequence: Synthetic oligonucleotide
  Antisense strand to SEQ ID NO: 2467666
ucaauucacccacacucau

SEQ ID NO: 2467668 - RNA, 19 nt, Artificial Sequence
  Description of Artificial Sequence: Synthetic oligonucleotide
  Sense strand starting at position 250 of SEQ ID NO: 1887377
auaagaacucgugaucauu

SEQ ID NO: 2467669 - RNA, 19 nt, Artificial Sequence
  Description of Artificial Sequence: Synthetic oligonucleotide
  Antisense strand to SEQ ID NO: 2467668
aaugaucacgaguucuuau

SEQ ID NO: 2467670 - RNA, 19 nt, Artificial Sequence
  Description of Artificial Sequence: Synthetic oligonucleotide
  Sense strand starting at position 293 of SEQ ID NO: 1887377
uuauuaguuccuuaccuga

SEQ ID NO: 2467671 - RNA, 19 nt, Artificial Sequence
  Description of Artificial Sequence: Synthetic oligonucleotide
  Antisense strand to SEQ ID NO: 2467670
ucagguaaggaacuaauaa

SEQ ID NO: 2467672 - RNA, 19 nt, Artificial Sequence
  Description of Artificial Sequence: Synthetic oligonucleotide
  Sense strand starting at position 329 of SEQ ID NO: 1887377
uucucuuuggguuaaauac

SEQ ID NO: 2467673 - RNA, 19 nt, Artificial Sequence
  Description of Artificial Sequence: Synthetic oligonucleotide
  Antisense strand to SEQ ID NO: 2467672
guauuuaacccaaagagaa

SEQ ID NO: 2467674 - RNA, 19 nt, Artificial Sequence
  Description of Artificial Sequence: Synthetic oligonucleotide
  Sense strand starting at position 525 of SEQ ID NO: 1887377
uuaccuugauaguuuagaa

SEQ ID NO: 2467675 - RNA, 19 nt, Artificial Sequence
  Description of Artificial Sequence: Synthetic oligonucleotide
  Antisense strand to SEQ ID NO: 2467674
uucuaaacuaucaagguaa

SEQ ID NO: 2467676 - RNA, 19 nt, Artificial Sequence
  Description of Artificial Sequence: Synthetic oligonucleotide
  Sense strand starting at position 549 of SEQ ID NO: 1887377
agaaauuauaguugguaag

SEQ ID NO: 2467677 - RNA, 19 nt, Artificial Sequence
  Description of Artificial Sequence: Synthetic oligonucleotide
  Antisense strand to SEQ ID NO: 2467676
cuuaccaacuauaauuucu

SEQ ID NO: 2467678 - RNA, 19 nt, Artificial Sequence
  Description of Artificial Sequence: Synthetic oligonucleotide
  Sense strand starting at position 658 of SEQ ID NO: 1887377
aguagaauuucugcagcuu

SEQ ID NO: 2467679 - RNA, 19 nt, Artificial Sequence
  Description of Artificial Sequence: Synthetic oligonucleotide
  Antisense strand to SEQ ID NO: 2467678
aagcugcagaaauucuacu

SEQ ID NO: 2467680 - RNA, 19 nt, Artificial Sequence
  Description of Artificial Sequence: Synthetic oligonucleotide
  Sense strand starting at position 664 of SEQ ID NO: 1887377
auuucugcagcuugugaua

SEQ ID NO: 2467681 - RNA, 19 nt, Artificial Sequence
  Description of Artificial Sequence: Synthetic oligonucleotide
  Antisense strand to SEQ ID NO: 2467680
uaucacaagcugcagaaau

SEQ ID NO: 2467682 - RNA, 19 nt, Artificial Sequence
  Description of Artificial Sequence: Synthetic oligonucleotide
  Sense strand starting at position 693 of SEQ ID NO: 1887377
gcagcuuauagagagcaaa

SEQ ID NO: 2467683 - RNA, 19 nt, Artificial Sequence
  Description of Artificial Sequence: Synthetic oligonucleotide
  Antisense strand to SEQ ID NO: 2467682
uuugcucucuauaagcugc

SEQ ID NO: 2467684 - RNA, 19 nt, Artificial Sequence
  Description of Artificial Sequence: Synthetic oligonucleotide
  Sense strand starting at position 696 of SEQ ID NO: 1887377
gcuuauagagagcaaauca

SEQ ID NO: 2467685 - RNA, 19 nt, Artificial Sequence
  Description of Artificial Sequence: Synthetic oligonucleotide
  Antisense strand to SEQ ID NO: 2467684
ugauuugcucucuauaagc

SEQ ID NO: 2467686 - RNA, 19 nt, Artificial Sequence
  Description of Artificial Sequence: Synthetic oligonucleotide
  Sense strand starting at position 846 of SEQ ID NO: 1887377
aguuucuugguugacuaaa

SEQ ID NO: 2467687 - RNA, 19 nt, Artificial Sequence
  Description of Artificial Sequence: Synthetic oligonucleotide
  Antisense strand to SEQ ID NO: 2467686
uuuagucaaccaagaaacu

SEQ ID NO: 2467688 - RNA, 19 nt, Artificial Sequence
  Description of Artificial Sequence: Synthetic oligonucleotide
  Sense strand starting at position 908 of SEQ ID NO: 1887377
ggaagcaggaugugacuua

SEQ ID NO: 2467689 - RNA, 19 nt, Artificial Sequence
  Description of Artificial Sequence: Synthetic oligonucleotide
  Antisense strand to SEQ ID NO: 2467688
uaagucacauccugcuucc

SEQ ID NO: 2467690 - RNA, 19 nt, Artificial Sequence
  Description of Artificial Sequence: Synthetic oligonucleotide
  Sense strand starting at position 1070 of SEQ ID NO: 1887377
agcucuuaacuugaauugu

SEQ ID NO: 2467691 - RNA, 19 nt, Artificial Sequence
  Description of Artificial Sequence: Synthetic oligonucleotide
  Antisense strand to SEQ ID NO: 2467690
acaauucaaguuaagagcu

SEQ ID NO: 2467692 - RNA, 19 nt, Artificial Sequence
  Description of Artificial Sequence: Synthetic oligonucleotide
  Sense strand starting at position 1087 of SEQ ID NO: 1887377
gugaaauuaggcuaugguu

SEQ ID NO: 2467693 - RNA, 19 nt, Artificial Sequence
  Description of Artificial Sequence: Synthetic oligonucleotide
  Antisense strand to SEQ ID NO: 2467692
aaccauagccuaauuucac

SEQ ID NO: 2467694 - RNA, 19 nt, Artificial Sequence
  Description of Artificial Sequence: Synthetic oligonucleotide
  Sense strand starting at position 1089 of SEQ ID NO: 1887377
gaaauuaggcuaugguuag

SEQ ID NO: 2467695 - RNA, 19 nt, Artificial Sequence
  Description of Artificial Sequence: Synthetic oligonucleotide
  Antisense strand to SEQ ID NO: 2467694
cuaaccauagccuaauuuc

SEQ ID NO: 2467696 - RNA, 19 nt, Artificial Sequence
  Description of Artificial Sequence: Synthetic oligonucleotide
  Sense strand starting at position 1287 of SEQ ID NO: 1887377
ccaucucaucuugauuguu

SEQ ID NO: 2467697 - RNA, 19 nt, Artificial Sequence
  Description of Artificial Sequence: Synthetic oligonucleotide
  Antisense strand to SEQ ID NO: 2467696
aacaaucaagaugagaugg

SEQ ID NO: 2467698 - RNA, 19 nt, Artificial Sequence
  Description of Artificial Sequence: Synthetic oligonucleotide
  Sense strand starting at position 1518 of SEQ ID NO: 1887377
gaaucaguguuggccauuu

SEQ ID NO: 2467699 - RNA, 19 nt, Artificial Sequence
  Description of Artificial Sequence: Synthetic oligonucleotide
  Antisense strand to SEQ ID NO: 2467698
aaauggccaacacugauuc

SEQ ID NO: 2467700 - RNA, 19 nt, Artificial Sequence
  Description of Artificial Sequence: Synthetic oligonucleotide
  Sense strand starting at position 1575 of SEQ ID NO: 1887377
agggaaaguuaagcaauca

SEQ ID NO: 2467701 - RNA, 19 nt, Artificial Sequence
  Description of Artificial Sequence: Synthetic oligonucleotide
  Antisense strand to SEQ ID NO: 2467700
ugauugcuuaacuuucccu

SEQ ID NO: 2467702 - RNA, 19 nt, Artificial Sequence
  Description of Artificial Sequence: Synthetic oligonucleotide
  Sense strand starting at position 1804 of SEQ ID NO: 1887377
ucuucugacuucuuaggaa

SEQ ID NO: 2467703 - RNA, 19 nt, Artificial Sequence
  Description of Artificial Sequence: Synthetic oligonucleotide
  Antisense strand to SEQ ID NO: 2467702
uuccuaagaagucagaaga

SEQ ID NO: 2467704 - RNA, 19 nt, Artificial Sequence
  Description of Artificial Sequence: Synthetic oligonucleotide
  Sense strand starting at position 1819 of SEQ ID NO: 1887377
ggaaauagucugcaucuuu

SEQ ID NO: 2467705 - RNA, 19 nt, Artificial Sequence
  Description of Artificial Sequence: Synthetic oligonucleotide
  Antisense strand to SEQ ID NO: 2467704
aaagaugcagacuauuucc

SEQ ID NO: 2467706 - RNA, 19 nt, Artificial Sequence
  Description of Artificial Sequence: Synthetic oligonucleotide
  Sense strand starting at position 1892 of SEQ ID NO: 1887377
auaguagagcuguagugaa

SEQ ID NO: 2467707 - RNA, 19 nt, Artificial Sequence
  Description of Artificial Sequence: Synthetic oligonucleotide
  Antisense strand to SEQ ID NO: 2467706
uucacuacagcucuacuau

SEQ ID NO: 2467708 - RNA, 19 nt, Artificial Sequence
  Description of Artificial Sequence: Synthetic oligonucleotide
  Sense strand starting at position 1919 of SEQ ID NO: 1887377
gucacauccagaggucaag

SEQ ID NO: 2467709 - RNA, 19 nt, Artificial Sequence
  Description of Artificial Sequence: Synthetic oligonucleotide
  Antisense strand to SEQ ID NO: 2467708
cuugaccucuggaugugac

SEQ ID NO: 2467710 - RNA, 19 nt, Artificial Sequence
  Description of Artificial Sequence: Synthetic oligonucleotide
  Sense strand starting at position 2424 of SEQ ID NO: 1887377
gcaagacaaucuuuagaca

SEQ ID NO: 2467711 - RNA, 19 nt, Artificial Sequence
  Description of Artificial Sequence: Synthetic oligonucleotide
  Antisense strand to SEQ ID NO: 2467710
ugucuaaagauugucuugc

SEQ ID NO: 2467712 - RNA, 19 nt, Artificial Sequence
  Description of Artificial Sequence: Synthetic oligonucleotide
  Sense strand starting at position 2511 of SEQ ID NO: 1887377
aaauguuauggauggugau

SEQ ID NO: 2467713 - RNA, 19 nt, Artificial Sequence
  Description of Artificial Sequence: Synthetic oligonucleotide
  Antisense strand to SEQ ID NO: 2467712
aucaccauccauaacauuu

SEQ ID NO: 2467714 - RNA, 19 nt, Artificial Sequence
  Description of Artificial Sequence: Synthetic oligonucleotide
  Sense strand starting at position 2512 of SEQ ID NO: 1887377
aauguuauggauggugaua

SEQ ID NO: 2467715 - RNA, 19 nt, Artificial Sequence
  Description of Artificial Sequence: Synthetic oligonucleotide
  Antisense strand to SEQ ID NO: 2467714
uaucaccauccauaacauu

SEQ ID NO: 2467716 - RNA, 19 nt, Artificial Sequence
  Description of Artificial Sequence: Synthetic oligonucleotide
  Sense strand starting at position 2563 of SEQ ID NO: 1887377
uaggguuaucuuuagagcu

SEQ ID NO: 2467717 - RNA, 19 nt, Artificial Sequence
  Description of Artificial Sequence: Synthetic oligonucleotide
  Antisense strand to SEQ ID NO: 2467716
agcucuaaagauaacccua

SEQ ID NO: 2467718 - RNA, 19 nt, Artificial Sequence
  Description of Artificial Sequence: Synthetic oligonucleotide
  Sense strand starting at position 2642 of SEQ ID NO: 1887377
guaagaccuguauauuggu

SEQ ID NO: 2467719 - RNA, 19 nt, Artificial Sequence
  Description of Artificial Sequence: Synthetic oligonucleotide
  Antisense strand to SEQ ID NO: 2467718
accaauauacaggucuuac

SEQ ID NO: 2467720 - RNA, 19 nt, Artificial Sequence
  Description of Artificial Sequence: Synthetic oligonucleotide
  Sense strand starting at position 2652 of SEQ ID NO: 1887377
uauauuggugguggagaga

SEQ ID NO: 2467721 - RNA, 19 nt, Artificial Sequence
  Description of Artificial Sequence: Synthetic oligonucleotide
  Antisense strand to SEQ ID NO: 2467720
ucucuccaccaccaauaua

SEQ ID NO: 2467722 - RNA, 19 nt, Artificial Sequence
  Description of Artificial Sequence: Synthetic oligonucleotide
  Sense strand starting at position 2886 of SEQ ID NO: 1887377
ugucauguuucucuaauuu

SEQ ID NO: 2467723 - RNA, 19 nt, Artificial Sequence
  Description of Artificial Sequence: Synthetic oligonucleotide
  Antisense strand to SEQ ID NO: 2467722
aaauuagagaaacaugaca

SEQ ID NO: 2467724 - RNA, 19 nt, Artificial Sequence
  Description of Artificial Sequence: Synthetic oligonucleotide
  Sense strand starting at position 2986 of SEQ ID NO: 1887377
uaguaugugacucagaggu

SEQ ID NO: 2467725 - RNA, 19 nt, Artificial Sequence
  Description of Artificial Sequence: Synthetic oligonucleotide
  Antisense strand to SEQ ID NO: 2467724
accucugagucacauacua

SEQ ID NO: 2467726 - RNA, 19 nt, Artificial Sequence
  Description of Artificial Sequence: Synthetic oligonucleotide
  Sense strand starting at position 3102 of SEQ ID NO: 1887377
ccaguaaaccuguggagau

SEQ ID NO: 2467727 - RNA, 19 nt, Artificial Sequence
  Description of Artificial Sequence: Synthetic oligonucleotide
  Antisense strand to SEQ ID NO: 2467726
aucuccacagguuuacugg

SEQ ID NO: 2467728 - RNA, 19 nt, Artificial Sequence
  Description of Artificial Sequence: Synthetic oligonucleotide
  Sense strand starting at position 3368 of SEQ ID NO: 1887377
acagcuuuccuagauauug

SEQ ID NO: 2467729 - RNA, 19 nt, Artificial Sequence
  Description of Artificial Sequence: Synthetic oligonucleotide
  Antisense strand to SEQ ID NO: 2467728
caauaucuaggaaagcugu

SEQ ID NO: 2467730 - RNA, 19 nt, Artificial Sequence
  Description of Artificial Sequence: Synthetic oligonucleotide
  Sense strand starting at position 3420 of SEQ ID NO: 1887377
ugucucagaguauaaagua

SEQ ID NO: 2467731 - RNA, 19 nt, Artificial Sequence
  Description of Artificial Sequence: Synthetic oligonucleotide
  Antisense strand to SEQ ID NO: 2467730
uacuuuauacucugagaca

SEQ ID NO: 2467732 - RNA, 19 nt, Artificial Sequence
  Description of Artificial Sequence: Synthetic oligonucleotide
  Sense strand starting at position 3427 of SEQ ID NO: 1887377
gaguauaaaguagguuaau

SEQ ID NO: 2467733 - RNA, 19 nt, Artificial Sequence
  Description of Artificial Sequence: Synthetic oligonucleotide
  Antisense strand to SEQ ID NO: 2467732
auuaaccuacuuuauacuc

SEQ ID NO: 2467734 - RNA, 19 nt, Artificial Sequence
  Description of Artificial Sequence: Synthetic oligonucleotide
  Sense strand starting at position 3661 of SEQ ID NO: 1887377
aaguaaucugcugaaguca

SEQ ID NO: 2467735 - RNA, 19 nt, Artificial Sequence
  Description of Artificial Sequence: Synthetic oligonucleotide
  Antisense strand to SEQ ID NO: 2467734
ugacuucagcagauuacuu

SEQ ID NO: 2467736 - RNA, 19 nt, Artificial Sequence
  Description of Artificial Sequence: Synthetic oligonucleotide
  Sense strand starting at position 3766 of SEQ ID NO: 1887377
ucagauuugugauaaugaa

SEQ ID NO: 2467737 - RNA, 19 nt, Artificial Sequence
  Description of Artificial Sequence: Synthetic oligonucleotide
  Antisense strand to SEQ ID NO: 2467736
uucauuaucacaaaucuga

SEQ ID NO: 2467738 - RNA, 19 nt, Artificial Sequence
  Description of Artificial Sequence: Synthetic oligonucleotide
  Sense strand starting at position 3917 of SEQ ID NO: 1887377
cuuugaguucccuauacua

SEQ ID NO: 2467739 - RNA, 19 nt, Artificial Sequence
  Description of Artificial Sequence: Synthetic oligonucleotide
  Antisense strand to SEQ ID NO: 2467738
uaguauagggaacucaaag

SEQ ID NO: 2467740 - RNA, 19 nt, Artificial Sequence
  Description of Artificial Sequence: Synthetic oligonucleotide
  Sense strand starting at position 3925 of SEQ ID NO: 1887377
ucccuauacuagguauaca

SEQ ID NO: 2467741 - RNA, 19 nt, Artificial Sequence
  Description of Artificial Sequence: Synthetic oligonucleotide
  Antisense strand to SEQ ID NO: 2467740
uguauaccuaguauaggga

SEQ ID NO: 2467742 - RNA, 19 nt, Artificial Sequence
  Description of Artificial Sequence: Synthetic oligonucleotide
  Sense strand starting at position 54 of SEQ ID NO: 1887378
aaagauuugugguugcugu

SEQ ID NO: 2467743 - RNA, 19 nt, Artificial Sequence
  Description of Artificial Sequence: Synthetic oligonucleotide
  Antisense strand to SEQ ID NO: 2467742
acagcaaccacaaaucuuu

SEQ ID NO: 2467744 - RNA, 19 nt, Artificial Sequence
  Description of Artificial Sequence: Synthetic oligonucleotide
  Sense strand starting at position 67 of SEQ ID NO: 1887378
ugcugugaugacuaucuua

SEQ ID NO: 2467745 - RNA, 19 nt, Artificial Sequence
  Description of Artificial Sequence: Synthetic oligonucleotide
  Antisense strand to SEQ ID NO: 2467744
uaagauagucaucacagca

SEQ ID NO: 2467746 - RNA, 19 nt, Artificial Sequence
  Description of Artificial Sequence: Synthetic oligonucleotide
  Sense strand starting at position 70 of SEQ ID NO: 1887378
ugugaugacuaucuuagga

SEQ ID NO: 2467747 - RNA, 19 nt, Artificial Sequence
  Description of Artificial Sequence: Synthetic oligonucleotide
  Antisense strand to SEQ ID NO: 2467746
uccuaagauagucaucaca

SEQ ID NO: 2467748 - RNA, 19 nt, Artificial Sequence
  Description of Artificial Sequence: Synthetic oligonucleotide
  Sense strand starting at position 95 of SEQ ID NO: 1887378
uggaauaacuaugaaagaa

SEQ ID NO: 2467749 - RNA, 19 nt, Artificial Sequence
  Description of Artificial Sequence: Synthetic oligonucleotide
  Antisense strand to SEQ ID NO: 2467748
uucuuucauaguuauucca

SEQ ID NO: 2467750 - RNA, 19 nt, Artificial Sequence
  Description of Artificial Sequence: Synthetic oligonucleotide
  Sense strand starting at position 588 of SEQ ID NO: 1887378
aguaauugaucacauuuag

SEQ ID NO: 2467751 - RNA, 19 nt, Artificial Sequence
  Description of Artificial Sequence: Synthetic oligonucleotide
  Antisense strand to SEQ ID NO: 2467750
cuaaaugugaucaauuacu

SEQ ID NO: 2467752 - RNA, 19 nt, Artificial Sequence
  Description of Artificial Sequence: Synthetic oligonucleotide
  Sense strand starting at position 617 of SEQ ID NO: 1887378
ucaagaaccugagugauuc

SEQ ID NO: 2467753 - RNA, 19 nt, Artificial Sequence
  Description of Artificial Sequence: Synthetic oligonucleotide
  Antisense strand to SEQ ID NO: 2467752
gaaucacucagguucuuga

SEQ ID NO: 2467754 - RNA, 19 nt, Artificial Sequence
  Description of Artificial Sequence: Synthetic oligonucleotide
  Sense strand starting at position 618 of SEQ ID NO: 1887378
caagaaccugagugauucu

SEQ ID NO: 2467755 - RNA, 19 nt, Artificial Sequence
  Description of Artificial Sequence: Synthetic oligonucleotide
  Antisense strand to SEQ ID NO: 2467754
agaaucacucagguucuug

SEQ ID NO: 2467756 - RNA, 19 nt, Artificial Sequence
  Description of Artificial Sequence: Synthetic oligonucleotide
  Sense strand starting at position 621 of SEQ ID NO: 1887378
gaaccugagugauucugua

SEQ ID NO: 2467757 - RNA, 19 nt, Artificial Sequence
  Description of Artificial Sequence: Synthetic oligonucleotide
  Antisense strand to SEQ ID NO: 2467756
uacagaaucacucagguuc

SEQ ID NO: 2467758 - RNA, 19 nt, Artificial Sequence
  Description of Artificial Sequence: Synthetic oligonucleotide
  Sense strand starting at position 723 of SEQ ID NO: 1887378
guuuccugccuccagaaua

SEQ ID NO: 2467759 - RNA, 19 nt, Artificial Sequence
  Description of Artificial Sequence: Synthetic oligonucleotide
  Antisense strand to SEQ ID NO: 2467758
uauucuggaggcaggaaac

SEQ ID NO: 2467760 - RNA, 19 nt, Artificial Sequence
  Description of Artificial Sequence: Synthetic oligonucleotide
  Sense strand starting at position 1292 of SEQ ID NO: 1887378
acaauccaguaugugaaua

SEQ ID NO: 2467761 - RNA, 19 nt, Artificial Sequence
  Description of Artificial Sequence: Synthetic oligonucleotide
  Antisense strand to SEQ ID NO: 2467760
uauucacauacuggauugu

SEQ ID NO: 2467762 - RNA, 19 nt, Artificial Sequence
  Description of Artificial Sequence: Synthetic oligonucleotide
  Sense strand starting at position 1297 of SEQ ID NO: 1887378
ccaguaugugaauauacca

SEQ ID NO: 2467763 - RNA, 19 nt, Artificial Sequence
  Description of Artificial Sequence: Synthetic oligonucleotide
  Antisense strand to SEQ ID NO: 2467762
ugguauauucacauacugg

SEQ ID NO: 2467764 - RNA, 19 nt, Artificial Sequence
  Description of Artificial Sequence: Synthetic oligonucleotide
  Sense strand starting at position 1352 of SEQ ID NO: 1887378
auugccuuugaguaugaua

SEQ ID NO: 2467765 - RNA, 19 nt, Artificial Sequence
  Description of Artificial Sequence: Synthetic oligonucleotide
  Antisense strand to SEQ ID NO: 2467764
uaucauacucaaaggcaau

SEQ ID NO: 2467766 - RNA, 19 nt, Artificial Sequence
  Description of Artificial Sequence: Synthetic oligonucleotide
  Sense strand starting at position 1418 of SEQ ID NO: 1887378
cuguaucauuucgucaauu

SEQ ID NO: 2467767 - RNA, 19 nt, Artificial Sequence
  Description of Artificial Sequence: Synthetic oligonucleotide
  Antisense strand to SEQ ID NO: 2467766
aauugacgaaaugauacag

SEQ ID NO: 2467768 - RNA, 19 nt, Artificial Sequence
  Description of Artificial Sequence: Synthetic oligonucleotide
  Sense strand starting at position 1419 of SEQ ID NO: 1887378
uguaucauuucgucaauug

SEQ ID NO: 2467769 - RNA, 19 nt, Artificial Sequence
  Description of Artificial Sequence: Synthetic oligonucleotide
  Antisense strand to SEQ ID NO: 2467768
caauugacgaaaugauaca

SEQ ID NO: 2467770 - RNA, 19 nt, Artificial Sequence
  Description of Artificial Sequence: Synthetic oligonucleotide
  Sense strand starting at position 1457 of SEQ ID NO: 1887378
gcuauuaggaacgauggua

SEQ ID NO: 2467771 - RNA, 19 nt, Artificial Sequence
  Description of Artificial Sequence: Synthetic oligonucleotide
  Antisense strand to SEQ ID NO: 2467770
uaccaucguuccuaauagc

SEQ ID NO: 2467772 - RNA, 19 nt, Artificial Sequence
  Description of Artificial Sequence: Synthetic oligonucleotide
  Sense strand starting at position 1481 of SEQ ID NO: 1887378
aacguuugugugcagauuu

SEQ ID NO: 2467773 - RNA, 19 nt, Artificial Sequence
  Description of Artificial Sequence: Synthetic oligonucleotide
  Antisense strand to SEQ ID NO: 2467772
aaaucugcacacaaacguu

SEQ ID NO: 2467774 - RNA, 19 nt, Artificial Sequence
  Description of Artificial Sequence: Synthetic oligonucleotide
  Sense strand starting at position 1520 of SEQ ID NO: 1887378
uauauacuagaguggaauu

SEQ ID NO: 2467775 - RNA, 19 nt, Artificial Sequence
  Description of Artificial Sequence: Synthetic oligonucleotide
  Antisense strand to SEQ ID NO: 2467774
aauuccacucuaguauaua

SEQ ID NO: 2467776 - RNA, 19 nt, Artificial Sequence
  Description of Artificial Sequence: Synthetic oligonucleotide
  Sense strand starting at position 1549 of SEQ ID NO: 1887378
aagguuaccugaguaaaca

SEQ ID NO: 2467777 - RNA, 19 nt, Artificial Sequence
  Description of Artificial Sequence: Synthetic oligonucleotide
  Antisense strand to SEQ ID NO: 2467776
uguuuacucagguaaccuu

SEQ ID NO: 2467778 - RNA, 19 nt, Artificial Sequence
  Description of Artificial Sequence: Synthetic oligonucleotide
  Sense strand starting at position 1695 of SEQ ID NO: 1887378
cguuuauaaagugauguaa

SEQ ID NO: 2467779 - RNA, 19 nt, Artificial Sequence
  Description of Artificial Sequence: Synthetic oligonucleotide
  Antisense strand to SEQ ID NO: 2467778
uuacaucacuuuauaaacg

SEQ ID NO: 2467780 - RNA, 19 nt, Artificial Sequence
  Description of Artificial Sequence: Synthetic oligonucleotide
  Sense strand starting at position 1741 of SEQ ID NO: 1887378
uaaaguuggccuuaauguu

SEQ ID NO: 2467781 - RNA, 19 nt, Artificial Sequence
  Description of Artificial Sequence: Synthetic oligonucleotide
  Antisense strand to SEQ ID NO: 2467780
aacauuaaggccaacuuua

SEQ ID NO: 2467782 - RNA, 19 nt, Artificial Sequence
  Description of Artificial Sequence: Synthetic oligonucleotide
  Sense strand starting at position 1763 of SEQ ID NO: 1887378
uugcucugcccuugaauuu

SEQ ID NO: 2467783 - RNA, 19 nt, Artificial Sequence
  Description of Artificial Sequence: Synthetic oligonucleotide
  Antisense strand to SEQ ID NO: 2467782
aaauucaagggcagagcaa

SEQ ID NO: 2467784 - RNA, 19 nt, Artificial Sequence
  Description of Artificial Sequence: Synthetic oligonucleotide
  Sense strand starting at position 1922 of SEQ ID NO: 1887378
ggcuuucuucccgcagcga

SEQ ID NO: 2467785 - RNA, 19 nt, Artificial Sequence
  Description of Artificial Sequence: Synthetic oligonucleotide
  Antisense strand to SEQ ID NO: 2467784
ucgcugcgggaagaaagcc

SEQ ID NO: 2467786 - RNA, 19 nt, Artificial Sequence
  Description of Artificial Sequence: Synthetic oligonucleotide
  Sense strand starting at position 2575 of SEQ ID NO: 1887378
cucugucuccacuaagaug

SEQ ID NO: 2467787 - RNA, 19 nt, Artificial Sequence
  Description of Artificial Sequence: Synthetic oligonucleotide
  Antisense strand to SEQ ID NO: 2467786
caucuuaguggagacagag

SEQ ID NO: 2467788 - RNA, 19 nt, Artificial Sequence
  Description of Artificial Sequence: Synthetic oligonucleotide
  Sense strand starting at position 2634 of SEQ ID NO: 1887378
uguuaugccuucccuauuu

SEQ ID NO: 2467789 - RNA, 19 nt, Artificial Sequence
  Description of Artificial Sequence: Synthetic oligonucleotide
  Antisense strand to SEQ ID NO: 2467788
aaauagggaaggcauaaca

SEQ ID NO: 2467790 - RNA, 19 nt, Artificial Sequence
  Description of Artificial Sequence: Synthetic oligonucleotide
  Sense strand starting at position 2682 of SEQ ID NO: 1887378
cucuguugucuggacuuaa

SEQ ID NO: 2467791 - RNA, 19 nt, Artificial Sequence
  Description of Artificial Sequence: Synthetic oligonucleotide
  Antisense strand to SEQ ID NO: 2467790
uuaaguccagacaacagag

SEQ ID NO: 2467792 - RNA, 19 nt, Artificial Sequence
  Description of Artificial Sequence: Synthetic oligonucleotide
  Sense strand starting at position 2691 of SEQ ID NO: 1887378
cuggacuuaaguugaguga

SEQ ID NO: 2467793 - RNA, 19 nt, Artificial Sequence
  Description of Artificial Sequence: Synthetic oligonucleotide
  Antisense strand to SEQ ID NO: 2467792
ucacucaacuuaaguccag

SEQ ID NO: 2467794 - RNA, 19 nt, Artificial Sequence
  Description of Artificial Sequence: Synthetic oligonucleotide
  Sense strand starting at position 2694 of SEQ ID NO: 1887378
gacuuaaguugagugaaag

SEQ ID NO: 2467795 - RNA, 19 nt, Artificial Sequence
  Description of Artificial Sequence: Synthetic oligonucleotide
  Antisense strand to SEQ ID NO: 2467794
cuuucacucaacuuaaguc

SEQ ID NO: 2467796 - RNA, 19 nt, Artificial Sequence
  Description of Artificial Sequence: Synthetic oligonucleotide
  Sense strand starting at position 2695 of SEQ ID NO: 1887378
acuuaaguugagugaaaga

SEQ ID NO: 2467797 - RNA, 19 nt, Artificial Sequence
  Description of Artificial Sequence: Synthetic oligonucleotide
  Antisense strand to SEQ ID NO: 2467796
ucuuucacucaacuuaagu

SEQ ID NO: 2467798 - RNA, 19 nt, Artificial Sequence
  Description of Artificial Sequence: Synthetic oligonucleotide
  Sense strand starting at position 2711 of SEQ ID NO: 1887378
agaagauuccucugcaaca

SEQ ID NO: 2467799 - RNA, 19 nt, Artificial Sequence
  Description of Artificial Sequence: Synthetic oligonucleotide
  Antisense strand to SEQ ID NO: 2467798
uguugcagaggaaucuucu

SEQ ID NO: 2467800 - RNA, 19 nt, Artificial Sequence
  Description of Artificial Sequence: Synthetic oligonucleotide
  Sense strand starting at position 2755 of SEQ ID NO: 1887378
uuggcuuggagcgaauaau

SEQ ID NO: 2467801 - RNA, 19 nt, Artificial Sequence
  Description of Artificial Sequence: Synthetic oligonucleotide
  Antisense strand to SEQ ID NO: 2467800
auuauucgcuccaagccaa

SEQ ID NO: 2467802 - RNA, 19 nt, Artificial Sequence
  Description of Artificial Sequence: Synthetic oligonucleotide
  Sense strand starting at position 2849 of SEQ ID NO: 1887378
accgaaguauuauuaugaa

SEQ ID NO: 2467803 - RNA, 19 nt, Artificial Sequence
  Description of Artificial Sequence: Synthetic oligonucleotide
  Antisense strand to SEQ ID NO: 2467802
uucauaauaauacuucggu

SEQ ID NO: 2467804 - RNA, 19 nt, Artificial Sequence
  Description of Artificial Sequence: Synthetic oligonucleotide
  Sense strand starting at position 2928 of SEQ ID NO: 1887378
gccguaauuguggcguaag

SEQ ID NO: 2467805 - RNA, 19 nt, Artificial Sequence
  Description of Artificial Sequence: Synthetic oligonucleotide
  Antisense strand to SEQ ID NO: 2467804
cuuacgccacaauuacggc

SEQ ID NO: 2467806 - RNA, 19 nt, Artificial Sequence
  Description of Artificial Sequence: Synthetic oligonucleotide
  Sense strand starting at position 2955 of SEQ ID NO: 1887378
aguauuuguccucgagagu

SEQ ID NO: 2467807 - RNA, 19 nt, Artificial Sequence
  Description of Artificial Sequence: Synthetic oligonucleotide
  Antisense strand to SEQ ID NO: 2467806
acucucgaggacaaauacu

SEQ ID NO: 2467808 - RNA, 19 nt, Artificial Sequence
  Description of Artificial Sequence: Synthetic oligonucleotide
  Sense strand starting at position 2956 of SEQ ID NO: 1887378
guauuuguccucgagaguu

SEQ ID NO: 2467809 - RNA, 19 nt, Artificial Sequence
  Description of Artificial Sequence: Synthetic oligonucleotide
  Antisense strand to SEQ ID NO: 2467808
aacucucgaggacaaauac

SEQ ID NO: 2467810 - RNA, 19 nt, Artificial Sequence
  Description of Artificial Sequence: Synthetic oligonucleotide
  Sense strand starting at position 3047 of SEQ ID NO: 1887378
gggccugucagucacuaaa

SEQ ID NO: 2467811 - RNA, 19 nt, Artificial Sequence
  Description of Artificial Sequence: Synthetic oligonucleotide
  Antisense strand to SEQ ID NO: 2467810
uuuagugacugacaggccc

SEQ ID NO: 2467812 - RNA, 19 nt, Artificial Sequence
  Description of Artificial Sequence: Synthetic oligonucleotide
  Sense strand starting at position 3050 of SEQ ID NO: 1887378
ccugucagucacuaaacua

SEQ ID NO: 2467813 - RNA, 19 nt, Artificial Sequence
  Description of Artificial Sequence: Synthetic oligonucleotide
  Antisense strand to SEQ ID NO: 2467812
uaguuuagugacugacagg

SEQ ID NO: 2467814 - RNA, 19 nt, Artificial Sequence
  Description of Artificial Sequence: Synthetic oligonucleotide
  Sense strand starting at position 3171 of SEQ ID NO: 1887378
aggcaagagcauugaggaa

SEQ ID NO: 2467815 - RNA, 19 nt, Artificial Sequence
  Description of Artificial Sequence: Synthetic oligonucleotide
  Antisense strand to SEQ ID NO: 2467814
uuccucaaugcucuugccu

SEQ ID NO: 2467816 - RNA, 19 nt, Artificial Sequence
  Description of Artificial Sequence: Synthetic oligonucleotide
  Sense strand starting at position 3228 of SEQ ID NO: 1887378
accaguuaccucugugaga

SEQ ID NO: 2467817 - RNA, 19 nt, Artificial Sequence
  Description of Artificial Sequence: Synthetic oligonucleotide
  Antisense strand to SEQ ID NO: 2467816
ucucacagagguaacuggu

SEQ ID NO: 2467818 - RNA, 19 nt, Artificial Sequence
  Description of Artificial Sequence: Synthetic oligonucleotide
  Sense strand starting at position 3229 of SEQ ID NO: 1887378
ccaguuaccucugugagaa

SEQ ID NO: 2467819 - RNA, 19 nt, Artificial Sequence
  Description of Artificial Sequence: Synthetic oligonucleotide
  Antisense strand to SEQ ID NO: 2467818
uucucacagagguaacugg

SEQ ID NO: 2467820 - RNA, 19 nt, Artificial Sequence
  Description of Artificial Sequence: Synthetic oligonucleotide
  Sense strand starting at position 3326 of SEQ ID NO: 1887378
aguccagugggccaucaua

SEQ ID NO: 2467821 - RNA, 19 nt, Artificial Sequence
  Description of Artificial Sequence: Synthetic oligonucleotide
  Antisense strand to SEQ ID NO: 2467820
uaugauggcccacuggacu

SEQ ID NO: 2467822 - RNA, 19 nt, Artificial Sequence
  Description of Artificial Sequence: Synthetic oligonucleotide
  Sense strand starting at position 106 of SEQ ID NO: 1887379
uguaaacgagcuuaaccau

SEQ ID NO: 2467823 - RNA, 19 nt, Artificial Sequence
  Description of Artificial Sequence: Synthetic oligonucleotide
  Antisense strand to SEQ ID NO: 2467822
augguuaagcucguuuaca

SEQ ID NO: 2467824 - RNA, 19 nt, Artificial Sequence
  Description of Artificial Sequence: Synthetic oligonucleotide
  Sense strand starting at position 113 of SEQ ID NO: 1887379
gagcuuaaccauuguggaa

SEQ ID NO: 2467825 - RNA, 19 nt, Artificial Sequence
  Description of Artificial Sequence: Synthetic oligonucleotide
  Antisense strand to SEQ ID NO: 2467824
uuccacaaugguuaagcuc

SEQ ID NO: 2467826 - RNA, 19 nt, Artificial Sequence
  Description of Artificial Sequence: Synthetic oligonucleotide
  Sense strand starting at position 760 of SEQ ID NO: 1887379
ugaucuguucuguagugga

SEQ ID NO: 2467827 - RNA, 19 nt, Artificial Sequence
  Description of Artificial Sequence: Synthetic oligonucleotide
  Antisense strand to SEQ ID NO: 2467826
uccacuacagaacagauca

SEQ ID NO: 2467828 - RNA, 19 nt, Artificial Sequence
  Description of Artificial Sequence: Synthetic oligonucleotide
  Sense strand starting at position 796 of SEQ ID NO: 1887379
ggccaugauggugacacau

SEQ ID NO: 2467829 - RNA, 19 nt, Artificial Sequence
  Description of Artificial Sequence: Synthetic oligonucleotide
  Antisense strand to SEQ ID NO: 2467828
augugucaccaucauggcc

SEQ ID NO: 2467830 - RNA, 19 nt, Artificial Sequence
  Description of Artificial Sequence: Synthetic oligonucleotide
  Sense strand starting at position 916 of SEQ ID NO: 1887379
gcuaguucccuccagauca

SEQ ID NO: 2467831 - RNA, 19 nt, Artificial Sequence
  Description of Artificial Sequence: Synthetic oligonucleotide
  Antisense strand to SEQ ID NO: 2467830
ugaucuggagggaacuagc

SEQ ID NO: 2467832 - RNA, 19 nt, Artificial Sequence
  Description of Artificial Sequence: Synthetic oligonucleotide
  Sense strand starting at position 1012 of SEQ ID NO: 1887379
caccaugaggcuggugaaa

SEQ ID NO: 2467833 - RNA, 19 nt, Artificial Sequence
  Description of Artificial Sequence: Synthetic oligonucleotide
  Antisense strand to SEQ ID NO: 2467832
uuucaccagccucauggug

SEQ ID NO: 2467834 - RNA, 19 nt, Artificial Sequence
  Description of Artificial Sequence: Synthetic oligonucleotide
  Sense strand starting at position 1068 of SEQ ID NO: 1887379
aggguugguguggaaagua

SEQ ID NO: 2467835 - RNA, 19 nt, Artificial Sequence
  Description of Artificial Sequence: Synthetic oligonucleotide
  Antisense strand to SEQ ID NO: 2467834
uacuuuccacaccaacccu

SEQ ID NO: 2467836 - RNA, 19 nt, Artificial Sequence
  Description of Artificial Sequence: Synthetic oligonucleotide
  Sense strand starting at position 1164 of SEQ ID NO: 1887379
ggaaauucgagccauaguc

SEQ ID NO: 2467837 - RNA, 19 nt, Artificial Sequence
  Description of Artificial Sequence: Synthetic oligonucleotide
  Antisense strand to SEQ ID NO: 2467836
gacuauggcucgaauuucc

SEQ ID NO: 2467838 - RNA, 19 nt, Artificial Sequence
  Description of Artificial Sequence: Synthetic oligonucleotide
  Sense strand starting at position 1330 of SEQ ID NO: 1887379
gggaguucaugaucugauu

SEQ ID NO: 2467839 - RNA, 19 nt, Artificial Sequence
  Description of Artificial Sequence: Synthetic oligonucleotide
  Antisense strand to SEQ ID NO: 2467838
aaucagaucaugaacuccc

SEQ ID NO: 2467840 - RNA, 19 nt, Artificial Sequence
  Description of Artificial Sequence: Synthetic oligonucleotide
  Sense strand starting at position 1371 of SEQ ID NO: 1887379
ucauguuggcaguaauguc

SEQ ID NO: 2467841 - RNA, 19 nt, Artificial Sequence
  Description of Artificial Sequence: Synthetic oligonucleotide
  Antisense strand to SEQ ID NO: 2467840
gacauuacugccaacauga

SEQ ID NO: 2467842 - RNA, 19 nt, Artificial Sequence
  Description of Artificial Sequence: Synthetic oligonucleotide
  Sense strand starting at position 1513 of SEQ ID NO: 1887379
gcuucucaucaaugggaga

SEQ ID NO: 2467843 - RNA, 19 nt, Artificial Sequence
  Description of Artificial Sequence: Synthetic oligonucleotide
  Antisense strand to SEQ ID NO: 2467842
ucucccauugaugagaagc

SEQ ID NO: 2467844 - RNA, 19 nt, Artificial Sequence
  Description of Artificial Sequence: Synthetic oligonucleotide
  Sense strand starting at position 1516 of SEQ ID NO: 1887379
ucucaucaaugggagagau

SEQ ID NO: 2467845 - RNA, 19 nt, Artificial Sequence
  Description of Artificial Sequence: Synthetic oligonucleotide
  Antisense strand to SEQ ID NO: 2467844
aucucucccauugaugaga

SEQ ID NO: 2467846 - RNA, 19 nt, Artificial Sequence
  Description of Artificial Sequence: Synthetic oligonucleotide
  Sense strand starting at position 1540 of SEQ ID NO: 1887379
gggagaaacugccuuccuu

SEQ ID NO: 2467847 - RNA, 19 nt, Artificial Sequence
  Description of Artificial Sequence: Synthetic oligonucleotide
  Antisense strand to SEQ ID NO: 2467846
aaggaaggcaguuucuccc

SEQ ID NO: 2467848 - RNA, 19 nt, Artificial Sequence
  Description of Artificial Sequence: Synthetic oligonucleotide
  Sense strand starting at position 1856 of SEQ ID NO: 1887379
ugucgagucccucaggaca

SEQ ID NO: 2467849 - RNA, 19 nt, Artificial Sequence
  Description of Artificial Sequence: Synthetic oligonucleotide
  Antisense strand to SEQ ID NO: 2467848
uguccugagggacucgaca

SEQ ID NO: 2467850 - RNA, 19 nt, Artificial Sequence
  Description of Artificial Sequence: Synthetic oligonucleotide
  Sense strand starting at position 2068 of SEQ ID NO: 1887379
ugugcaucccgaugaggaa

SEQ ID NO: 2467851 - RNA, 19 nt, Artificial Sequence
  Description of Artificial Sequence: Synthetic oligonucleotide
  Antisense strand to SEQ ID NO: 2467850
uuccucaucgggaugcaca

SEQ ID NO: 2467852 - RNA, 19 nt, Artificial Sequence
  Description of Artificial Sequence: Synthetic oligonucleotide
  Sense strand starting at position 2100 of SEQ ID NO: 1887379
agaggucagcaucaguaga

SEQ ID NO: 2467853 - RNA, 19 nt, Artificial Sequence
  Description of Artificial Sequence: Synthetic oligonucleotide
  Antisense strand to SEQ ID NO: 2467852
ucuacugaugcugaccucu

SEQ ID NO: 2467854 - RNA, 19 nt, Artificial Sequence
  Description of Artificial Sequence: Synthetic oligonucleotide
  Sense strand starting at position 2144 of SEQ ID NO: 1887379
aggccuugaccugaggagu

SEQ ID NO: 2467855 - RNA, 19 nt, Artificial Sequence
  Description of Artificial Sequence: Synthetic oligonucleotide
  Antisense strand to SEQ ID NO: 2467854
acuccucaggucaaggccu

SEQ ID NO: 2467856 - RNA, 19 nt, Artificial Sequence
  Description of Artificial Sequence: Synthetic oligonucleotide
  Sense strand starting at position 2155 of SEQ ID NO: 1887379
ugaggagucuuggcuguga

SEQ ID NO: 2467857 - RNA, 19 nt, Artificial Sequence
  Description of Artificial Sequence: Synthetic oligonucleotide
  Antisense strand to SEQ ID NO: 2467856
ucacagccaagacuccuca

SEQ ID NO: 2467858 - RNA, 19 nt, Artificial Sequence
  Description of Artificial Sequence: Synthetic oligonucleotide
  Sense strand starting at position 2157 of SEQ ID NO: 1887379
aggagucuuggcugugaug

SEQ ID NO: 2467859 - RNA, 19 nt, Artificial Sequence
  Description of Artificial Sequence: Synthetic oligonucleotide
  Antisense strand to SEQ ID NO: 2467858
caucacagccaagacuccu

SEQ ID NO: 2467860 - RNA, 19 nt, Artificial Sequence
  Description of Artificial Sequence: Synthetic oligonucleotide
  Sense strand starting at position 2309 of SEQ ID NO: 1887379
aaugaauuauggcuguuua

SEQ ID NO: 2467861 - RNA, 19 nt, Artificial Sequence
  Description of Artificial Sequence: Synthetic oligonucleotide
  Antisense strand to SEQ ID NO: 2467860
uaaacagccauaauucauu

SEQ ID NO: 2467862 - RNA, 19 nt, Artificial Sequence
  Description of Artificial Sequence: Synthetic oligonucleotide
  Sense strand starting at position 2310 of SEQ ID NO: 1887379
augaauuauggcuguuuac

SEQ ID NO: 2467863 - RNA, 19 nt, Artificial Sequence
  Description of Artificial Sequence: Synthetic oligonucleotide
  Antisense strand to SEQ ID NO: 2467862
guaaacagccauaauucau

SEQ ID NO: 2467864 - RNA, 19 nt, Artificial Sequence
  Description of Artificial Sequence: Synthetic oligonucleotide
  Sense strand starting at position 2313 of SEQ ID NO: 1887379
aauuauggcuguuuacaag

SEQ ID NO: 2467865 - RNA, 19 nt, Artificial Sequence
  Description of Artificial Sequence: Synthetic oligonucleotide
  Antisense strand to SEQ ID NO: 2467864
cuuguaaacagccauaauu

SEQ ID NO: 2467866 - RNA, 19 nt, Artificial Sequence
  Description of Artificial Sequence: Synthetic oligonucleotide
  Sense strand starting at position 2367 of SEQ ID NO: 1887379
ggaaauggguuccuacucu

SEQ ID NO: 2467867 - RNA, 19 nt, Artificial Sequence
  Description of Artificial Sequence: Synthetic oligonucleotide
  Antisense strand to SEQ ID NO: 2467866
agaguaggaacccauuucc

SEQ ID NO: 2467868 - RNA, 19 nt, Artificial Sequence
  Description of Artificial Sequence: Synthetic oligonucleotide
  Sense strand starting at position 2371 of SEQ ID NO: 1887379
auggguuccuacucuaaua

SEQ ID NO: 2467869 - RNA, 19 nt, Artificial Sequence
  Description of Artificial Sequence: Synthetic oligonucleotide
  Antisense strand to SEQ ID NO: 2467868
uauuagaguaggaacccau

SEQ ID NO: 2467870 - RNA, 19 nt, Artificial Sequence
  Description of Artificial Sequence: Synthetic oligonucleotide
  Sense strand starting at position 2373 of SEQ ID NO: 1887379
ggguuccuacucuaauacu

SEQ ID NO: 2467871 - RNA, 19 nt, Artificial Sequence
  Description of Artificial Sequence: Synthetic oligonucleotide
  Antisense strand to SEQ ID NO: 2467870
aguauuagaguaggaaccc

SEQ ID NO: 2467872 - RNA, 19 nt, Artificial Sequence
  Description of Artificial Sequence: Synthetic oligonucleotide
  Sense strand starting at position 2425 of SEQ ID NO: 1887379
aaugaauugcccugaguua

SEQ ID NO: 2467873 - RNA, 19 nt, Artificial Sequence
  Description of Artificial Sequence: Synthetic oligonucleotide
  Antisense strand to SEQ ID NO: 2467872
uaacucagggcaauucauu

SEQ ID NO: 2467874 - RNA, 19 nt, Artificial Sequence
  Description of Artificial Sequence: Synthetic oligonucleotide
  Sense strand starting at position 2426 of SEQ ID NO: 1887379
augaauugcccugaguuau

SEQ ID NO: 2467875 - RNA, 19 nt, Artificial Sequence
  Description of Artificial Sequence: Synthetic oligonucleotide
  Antisense strand to SEQ ID NO: 2467874
auaacucagggcaauucau

SEQ ID NO: 2467876 - RNA, 19 nt, Artificial Sequence
  Description of Artificial Sequence: Synthetic oligonucleotide
  Sense strand starting at position 2456 of SEQ ID NO: 1887379
gcacuuugggaguaaggca

SEQ ID NO: 2467877 - RNA, 19 nt, Artificial Sequence
  Description of Artificial Sequence: Synthetic oligonucleotide
  Antisense strand to SEQ ID NO: 2467876
ugccuuacucccaaagugc

SEQ ID NO: 2467878 - RNA, 19 nt, Artificial Sequence
  Description of Artificial Sequence: Synthetic oligonucleotide
  Sense strand starting at position 2503 of SEQ ID NO: 1887379
ccuauaggccucugaagga

SEQ ID NO: 2467879 - RNA, 19 nt, Artificial Sequence
  Description of Artificial Sequence: Synthetic oligonucleotide
  Antisense strand to SEQ ID NO: 2467878
uccuucagaggccuauagg

SEQ ID NO: 2467880 - RNA, 19 nt, Artificial Sequence
  Description of Artificial Sequence: Synthetic oligonucleotide
  Sense strand starting at position 2672 of SEQ ID NO: 1887379
aaaggugacuuguugagau

SEQ ID NO: 2467881 - RNA, 19 nt, Artificial Sequence
  Description of Artificial Sequence: Synthetic oligonucleotide
  Antisense strand to SEQ ID NO: 2467880
aucucaacaagucaccuuu

SEQ ID NO: 2467882 - RNA, 19 nt, Artificial Sequence
  Description of Artificial Sequence: Synthetic oligonucleotide
  Sense strand starting at position 2674 of SEQ ID NO: 1887379
aggugacuuguugagauuc

SEQ ID NO: 2467883 - RNA, 19 nt, Artificial Sequence
  Description of Artificial Sequence: Synthetic oligonucleotide
  Antisense strand to SEQ ID NO: 2467882
gaaucucaacaagucaccu

SEQ ID NO: 2467884 - RNA, 19 nt, Artificial Sequence
  Description of Artificial Sequence: Synthetic oligonucleotide
  Sense strand starting at position 2715 of SEQ ID NO: 1887379
ggcugagcuccacagaauu

SEQ ID NO: 2467885 - RNA, 19 nt, Artificial Sequence
  Description of Artificial Sequence: Synthetic oligonucleotide
  Antisense strand to SEQ ID NO: 2467884
aauucuguggagcucagcc

SEQ ID NO: 2467886 - RNA, 19 nt, Artificial Sequence
  Description of Artificial Sequence: Synthetic oligonucleotide
  Sense strand starting at position 2725 of SEQ ID NO: 1887379
cacagaauuccugggcugu

SEQ ID NO: 2467887 - RNA, 19 nt, Artificial Sequence
  Description of Artificial Sequence: Synthetic oligonucleotide
  Antisense strand to SEQ ID NO: 2467886
acagcccaggaauucugug

SEQ ID NO: 2467888 - RNA, 19 nt, Artificial Sequence
  Description of Artificial Sequence: Synthetic oligonucleotide
  Sense strand starting at position 2761 of SEQ ID NO: 1887379
ggcgguguugcucuccuua

SEQ ID NO: 2467889 - RNA, 19 nt, Artificial Sequence
  Description of Artificial Sequence: Synthetic oligonucleotide
  Antisense strand to SEQ ID NO: 2467888
uaaggagagcaacaccgcc

SEQ ID NO: 2467890 - RNA, 19 nt, Artificial Sequence
  Description of Artificial Sequence: Synthetic oligonucleotide
  Sense strand starting at position 2876 of SEQ ID NO: 1887379
guagaaauuaggugucaca

SEQ ID NO: 2467891 - RNA, 19 nt, Artificial Sequence
  Description of Artificial Sequence: Synthetic oligonucleotide
  Antisense strand to SEQ ID NO: 2467890
ugugacaccuaauuucuac

SEQ ID NO: 2467892 - RNA, 19 nt, Artificial Sequence
  Description of Artificial Sequence: Synthetic oligonucleotide
  Sense strand starting at position 3071 of SEQ ID NO: 1887379
auaucugagucugugcaga

SEQ ID NO: 2467893 - RNA, 19 nt, Artificial Sequence
  Description of Artificial Sequence: Synthetic oligonucleotide
  Antisense strand to SEQ ID NO: 2467892
ucugcacagacucagauau

SEQ ID NO: 2467894 - RNA, 19 nt, Artificial Sequence
  Description of Artificial Sequence: Synthetic oligonucleotide
  Sense strand starting at position 3097 of SEQ ID NO: 1887379
aggcacauguucuccaaau

SEQ ID NO: 2467895 - RNA, 19 nt, Artificial Sequence
  Description of Artificial Sequence: Synthetic oligonucleotide
  Antisense strand to SEQ ID NO: 2467894
auuuggagaacaugugccu

SEQ ID NO: 2467896 - RNA, 19 nt, Artificial Sequence
  Description of Artificial Sequence: Synthetic oligonucleotide
  Sense strand starting at position 3098 of SEQ ID NO: 1887379
ggcacauguucuccaaaua

SEQ ID NO: 2467897 - RNA, 19 nt, Artificial Sequence
  Description of Artificial Sequence: Synthetic oligonucleotide
  Antisense strand to SEQ ID NO: 2467896
uauuuggagaacaugugcc

SEQ ID NO: 2467898 - RNA, 19 nt, Artificial Sequence
  Description of Artificial Sequence: Synthetic oligonucleotide
  Sense strand starting at position 3149 of SEQ ID NO: 1887379
cugggcacucaugaucuaa

SEQ ID NO: 2467899 - RNA, 19 nt, Artificial Sequence
  Description of Artificial Sequence: Synthetic oligonucleotide
  Antisense strand to SEQ ID NO: 2467898
uuagaucaugagugcccag

SEQ ID NO: 2467900 - RNA, 19 nt, Artificial Sequence
  Description of Artificial Sequence: Synthetic oligonucleotide
  Sense strand starting at position 3151 of SEQ ID NO: 1887379
gggcacucaugaucuaaga

SEQ ID NO: 2467901 - RNA, 19 nt, Artificial Sequence
  Description of Artificial Sequence: Synthetic oligonucleotide
  Antisense strand to SEQ ID NO: 2467900
ucuuagaucaugagugccc

SEQ ID NO: 2467902 - RNA, 19 nt, Artificial Sequence
  Description of Artificial Sequence: Synthetic oligonucleotide
  Sense strand starting at position 7 of SEQ ID NO: 1887380
uuugguacugucuaaggau

SEQ ID NO: 2467903 - RNA, 19 nt, Artificial Sequence
  Description of Artificial Sequence: Synthetic oligonucleotide
  Antisense strand to SEQ ID NO: 2467902
auccuuagacaguaccaaa

SEQ ID NO: 2467904 - RNA, 19 nt, Artificial Sequence
  Description of Artificial Sequence: Synthetic oligonucleotide
  Sense strand starting at position 14 of SEQ ID NO: 1887380
cugucuaaggauggaagua

SEQ ID NO: 2467905 - RNA, 19 nt, Artificial Sequence
  Description of Artificial Sequence: Synthetic oligonucleotide
  Antisense strand to SEQ ID NO: 2467904
uacuuccauccuuagacag

SEQ ID NO: 2467906 - RNA, 19 nt, Artificial Sequence
  Description of Artificial Sequence: Synthetic oligonucleotide
  Sense strand starting at position 27 of SEQ ID NO: 1887380
gaaguaagguaucuuauga

SEQ ID NO: 2467907 - RNA, 19 nt, Artificial Sequence
  Description of Artificial Sequence: Synthetic oligonucleotide
  Antisense strand to SEQ ID NO: 2467906
ucauaagauaccuuacuuc

SEQ ID NO: 2467908 - RNA, 19 nt, Artificial Sequence
  Description of Artificial Sequence: Synthetic oligonucleotide
  Sense strand starting at position 35 of SEQ ID NO: 1887380
guaucuuaugagcacaaga

SEQ ID NO: 2467909 - RNA, 19 nt, Artificial Sequence
  Description of Artificial Sequence: Synthetic oligonucleotide
  Antisense strand to SEQ ID NO: 2467908
ucuugugcucauaagauac

SEQ ID NO: 2467910 - RNA, 19 nt, Artificial Sequence
  Description of Artificial Sequence: Synthetic oligonucleotide
  Sense strand starting at position 142 of SEQ ID NO: 1887380
auggauugcugagcagaau

SEQ ID NO: 2467911 - RNA, 19 nt, Artificial Sequence
  Description of Artificial Sequence: Synthetic oligonucleotide
  Antisense strand to SEQ ID NO: 2467910
auucugcucagcaauccau

SEQ ID NO: 2467912 - RNA, 19 nt, Artificial Sequence
  Description of Artificial Sequence: Synthetic oligonucleotide
  Sense strand starting at position 143 of SEQ ID NO: 1887380
uggauugcugagcagaauu

SEQ ID NO: 2467913 - RNA, 19 nt, Artificial Sequence
  Description of Artificial Sequence: Synthetic oligonucleotide
  Antisense strand to SEQ ID NO: 2467912
aauucugcucagcaaucca

SEQ ID NO: 2467914 - RNA, 19 nt, Artificial Sequence
  Description of Artificial Sequence: Synthetic oligonucleotide
  Sense strand starting at position 188 of SEQ ID NO: 1887380
gauauuuaguggcaccaau

SEQ ID NO: 2467915 - RNA, 19 nt, Artificial Sequence
  Description of Artificial Sequence: Synthetic oligonucleotide
  Antisense strand to SEQ ID NO: 2467914
auuggugccacuaaauauc

SEQ ID NO: 2467916 - RNA, 19 nt, Artificial Sequence
  Description of Artificial Sequence: Synthetic oligonucleotide
  Sense strand starting at position 421 of SEQ ID NO: 1887380
gcuguuguuacagagaaca

SEQ ID NO: 2467917 - RNA, 19 nt, Artificial Sequence
  Description of Artificial Sequence: Synthetic oligonucleotide
  Antisense strand to SEQ ID NO: 2467916
uguucucuguaacaacagc

SEQ ID NO: 2467918 - RNA, 19 nt, Artificial Sequence
  Description of Artificial Sequence: Synthetic oligonucleotide
  Sense strand starting at position 461 of SEQ ID NO: 1887380
aagguucgagagcauugaa

SEQ ID NO: 2467919 - RNA, 19 nt, Artificial Sequence
  Description of Artificial Sequence: Synthetic oligonucleotide
  Antisense strand to SEQ ID NO: 2467918
uucaaugcucucgaaccuu

SEQ ID NO: 2467920 - RNA, 19 nt, Artificial Sequence
  Description of Artificial Sequence: Synthetic oligonucleotide
  Sense strand starting at position 477 of SEQ ID NO: 1887380
gaagguuaagguuguggaa

SEQ ID NO: 2467921 - RNA, 19 nt, Artificial Sequence
  Description of Artificial Sequence: Synthetic oligonucleotide
  Antisense strand to SEQ ID NO: 2467920
uuccacaaccuuaaccuuc

SEQ ID NO: 2467922 - RNA, 19 nt, Artificial Sequence
  Description of Artificial Sequence: Synthetic oligonucleotide
  Sense strand starting at position 541 of SEQ ID NO: 1887380
ggauuaauacacugucuua

SEQ ID NO: 2467923 - RNA, 19 nt, Artificial Sequence
  Description of Artificial Sequence: Synthetic oligonucleotide
  Antisense strand to SEQ ID NO: 2467922
uaagacaguguauuaaucc

SEQ ID NO: 2467924 - RNA, 19 nt, Artificial Sequence
  Description of Artificial Sequence: Synthetic oligonucleotide
  Sense strand starting at position 554 of SEQ ID NO: 1887380
gucuuauaucuugggcaga

SEQ ID NO: 2467925 - RNA, 19 nt, Artificial Sequence
  Description of Artificial Sequence: Synthetic oligonucleotide
  Antisense strand to SEQ ID NO: 2467924
ucugcccaagauauaagac

SEQ ID NO: 2467926 - RNA, 19 nt, Artificial Sequence
  Description of Artificial Sequence: Synthetic oligonucleotide
  Sense strand starting at position 556 of SEQ ID NO: 1887380
cuuauaucuugggcagaaa

SEQ ID NO: 2467927 - RNA, 19 nt, Artificial Sequence
  Description of Artificial Sequence: Synthetic oligonucleotide
  Antisense strand to SEQ ID NO: 2467926
uuucugcccaagauauaag

SEQ ID NO: 2467928 - RNA, 19 nt, Artificial Sequence
  Description of Artificial Sequence: Synthetic oligonucleotide
  Sense strand starting at position 608 of SEQ ID NO: 1887380
ucuauuccuccugguggau

SEQ ID NO: 2467929 - RNA, 19 nt, Artificial Sequence
  Description of Artificial Sequence: Synthetic oligonucleotide
  Antisense strand to SEQ ID NO: 2467928
auccaccaggaggaauaga

SEQ ID NO: 2467930 - RNA, 19 nt, Artificial Sequence
  Description of Artificial Sequence: Synthetic oligonucleotide
  Sense strand starting at position 617 of SEQ ID NO: 1887380
ccugguggaugaguguuua

SEQ ID NO: 2467931 - RNA, 19 nt, Artificial Sequence
  Description of Artificial Sequence: Synthetic oligonucleotide
  Antisense strand to SEQ ID NO: 2467930
uaaacacucauccaccagg

SEQ ID NO: 2467932 - RNA, 19 nt, Artificial Sequence
  Description of Artificial Sequence: Synthetic oligonucleotide
  Sense strand starting at position 747 of SEQ ID NO: 1887380
auguaugcucaagaaucau

SEQ ID NO: 2467933 - RNA, 19 nt, Artificial Sequence
  Description of Artificial Sequence: Synthetic oligonucleotide
  Antisense strand to SEQ ID NO: 2467932
augauucuugagcauacau

SEQ ID NO: 2467934 - RNA, 19 nt, Artificial Sequence
  Description of Artificial Sequence: Synthetic oligonucleotide
  Sense strand starting at position 753 of SEQ ID NO: 1887380
gcucaagaaucaucaguau

SEQ ID NO: 2467935 - RNA, 19 nt, Artificial Sequence
  Description of Artificial Sequence: Synthetic oligonucleotide
  Antisense strand to SEQ ID NO: 2467934
auacugaugauucuugagc

SEQ ID NO: 2467936 - RNA, 19 nt, Artificial Sequence
  Description of Artificial Sequence: Synthetic oligonucleotide
  Sense strand starting at position 803 of SEQ ID NO: 1887380
caggguauaucucugguua

SEQ ID NO: 2467937 - RNA, 19 nt, Artificial Sequence
  Description of Artificial Sequence: Synthetic oligonucleotide
  Antisense strand to SEQ ID NO: 2467936
uaaccagagauauacccug

SEQ ID NO: 2467938 - RNA, 19 nt, Artificial Sequence
  Description of Artificial Sequence: Synthetic oligonucleotide
  Sense strand starting at position 804 of SEQ ID NO: 1887380
aggguauaucucugguuaa

SEQ ID NO: 2467939 - RNA, 19 nt, Artificial Sequence
  Description of Artificial Sequence: Synthetic oligonucleotide
  Antisense strand to SEQ ID NO: 2467938
uuaaccagagauauacccu

SEQ ID NO: 2467940 - RNA, 19 nt, Artificial Sequence
  Description of Artificial Sequence: Synthetic oligonucleotide
  Sense strand starting at position 807 of SEQ ID NO: 1887380
guauaucucugguuaacga

SEQ ID NO: 2467941 - RNA, 19 nt, Artificial Sequence
  Description of Artificial Sequence: Synthetic oligonucleotide
  Antisense strand to SEQ ID NO: 2467940
ucguuaaccagagauauac

SEQ ID NO: 2467942 - RNA, 19 nt, Artificial Sequence
  Description of Artificial Sequence: Synthetic oligonucleotide
  Sense strand starting at position 808 of SEQ ID NO: 1887380
uauaucucugguuaacgaa

SEQ ID NO: 2467943 - RNA, 19 nt, Artificial Sequence
  Description of Artificial Sequence: Synthetic oligonucleotide
  Antisense strand to SEQ ID NO: 2467942
uucguuaaccagagauaua

SEQ ID NO: 2467944 - RNA, 19 nt, Artificial Sequence
  Description of Artificial Sequence: Synthetic oligonucleotide
  Sense strand starting at position 1173 of SEQ ID NO: 1887380
uuacuuauccuuugacugu

SEQ ID NO: 2467945 - RNA, 19 nt, Artificial Sequence
  Description of Artificial Sequence: Synthetic oligonucleotide
  Antisense strand to SEQ ID NO: 2467944
acagucaaaggauaaguaa

SEQ ID NO: 2467946 - RNA, 19 nt, Artificial Sequence
  Description of Artificial Sequence: Synthetic oligonucleotide
  Sense strand starting at position 1304 of SEQ ID NO: 1887380
gcauuaauacugugacacc

SEQ ID NO: 2467947 - RNA, 19 nt, Artificial Sequence
  Description of Artificial Sequence: Synthetic oligonucleotide
  Antisense strand to SEQ ID NO: 2467946
ggugucacaguauuaaugc

SEQ ID NO: 2467948 - RNA, 19 nt, Artificial Sequence
  Description of Artificial Sequence: Synthetic oligonucleotide
  Sense strand starting at position 1361 of SEQ ID NO: 1887380
uuaacuagguguuucugau

SEQ ID NO: 2467949 - RNA, 19 nt, Artificial Sequence
  Description of Artificial Sequence: Synthetic oligonucleotide
  Antisense strand to SEQ ID NO: 2467948
aucagaaacaccuaguuaa

SEQ ID NO: 2467950 - RNA, 19 nt, Artificial Sequence
  Description of Artificial Sequence: Synthetic oligonucleotide
  Sense strand starting at position 1504 of SEQ ID NO: 1887380
augauugguggccauguua

SEQ ID NO: 2467951 - RNA, 19 nt, Artificial Sequence
  Description of Artificial Sequence: Synthetic oligonucleotide
  Antisense strand to SEQ ID NO: 2467950
uaacauggccaccaaucau

SEQ ID NO: 2467952 - RNA, 19 nt, Artificial Sequence
  Description of Artificial Sequence: Synthetic oligonucleotide
  Sense strand starting at position 1573 of SEQ ID NO: 1887380
agaaaugaccuuugcaucu

SEQ ID NO: 2467953 - RNA, 19 nt, Artificial Sequence
  Description of Artificial Sequence: Synthetic oligonucleotide
  Antisense strand to SEQ ID NO: 2467952
agaugcaaaggucauuucu

SEQ ID NO: 2467954 - RNA, 19 nt, Artificial Sequence
  Description of Artificial Sequence: Synthetic oligonucleotide
  Sense strand starting at position 1582 of SEQ ID NO: 1887380
cuuugcaucugauuaaagu

SEQ ID NO: 2467955 - RNA, 19 nt, Artificial Sequence
  Description of Artificial Sequence: Synthetic oligonucleotide
  Antisense strand to SEQ ID NO: 2467954
acuuuaaucagaugcaaag

SEQ ID NO: 2467956 - RNA, 19 nt, Artificial Sequence
  Description of Artificial Sequence: Synthetic oligonucleotide
  Sense strand starting at position 1583 of SEQ ID NO: 1887380
uuugcaucugauuaaagua

SEQ ID NO: 2467957 - RNA, 19 nt, Artificial Sequence
  Description of Artificial Sequence: Synthetic oligonucleotide
  Antisense strand to SEQ ID NO: 2467956
uacuuuaaucagaugcaaa

SEQ ID NO: 2467958 - RNA, 19 nt, Artificial Sequence
  Description of Artificial Sequence: Synthetic oligonucleotide
  Sense strand starting at position 1650 of SEQ ID NO: 1887380
gcaaguugauuugagaaac

SEQ ID NO: 2467959 - RNA, 19 nt, Artificial Sequence
  Description of Artificial Sequence: Synthetic oligonucleotide
  Antisense strand to SEQ ID NO: 2467958
guuucucaaaucaacuugc

SEQ ID NO: 2467960 - RNA, 19 nt, Artificial Sequence
  Description of Artificial Sequence: Synthetic oligonucleotide
  Sense strand starting at position 1861 of SEQ ID NO: 1887380
gugauuauggcccaaggua

SEQ ID NO: 2467961 - RNA, 19 nt, Artificial Sequence
  Description of Artificial Sequence: Synthetic oligonucleotide
  Antisense strand to SEQ ID NO: 2467960
uaccuugggccauaaucac

SEQ ID NO: 2467962 - RNA, 19 nt, Artificial Sequence
  Description of Artificial Sequence: Synthetic oligonucleotide
  Sense strand starting at position 1909 of SEQ ID NO: 1887380
aggccuguuccacaguaga

SEQ ID NO: 2467963 - RNA, 19 nt, Artificial Sequence
  Description of Artificial Sequence: Synthetic oligonucleotide
  Antisense strand to SEQ ID NO: 2467962
ucuacuguggaacaggccu

SEQ ID NO: 2467964 - RNA, 19 nt, Artificial Sequence
  Description of Artificial Sequence: Synthetic oligonucleotide
  Sense strand starting at position 2031 of SEQ ID NO: 1887380
gagaauaacuagugauuua

SEQ ID NO: 2467965 - RNA, 19 nt, Artificial Sequence
  Description of Artificial Sequence: Synthetic oligonucleotide
  Antisense strand to SEQ ID NO: 2467964
uaaaucacuaguuauucuc

SEQ ID NO: 2467966 - RNA, 19 nt, Artificial Sequence
  Description of Artificial Sequence: Synthetic oligonucleotide
  Sense strand starting at position 2230 of SEQ ID NO: 1887380
aauacaugugaaugugauu

SEQ ID NO: 2467967 - RNA, 19 nt, Artificial Sequence
  Description of Artificial Sequence: Synthetic oligonucleotide
  Antisense strand to SEQ ID NO: 2467966
aaucacauucacauguauu

SEQ ID NO: 2467968 - RNA, 19 nt, Artificial Sequence
  Description of Artificial Sequence: Synthetic oligonucleotide
  Sense strand starting at position 2235 of SEQ ID NO: 1887380
augugaaugugauuaaucu

SEQ ID NO: 2467969 - RNA, 19 nt, Artificial Sequence
  Description of Artificial Sequence: Synthetic oligonucleotide
  Antisense strand to SEQ ID NO: 2467968
agauuaaucacauucacau

SEQ ID NO: 2467970 - RNA, 19 nt, Artificial Sequence
  Description of Artificial Sequence: Synthetic oligonucleotide
  Sense strand starting at position 2236 of SEQ ID NO: 1887380
ugugaaugugauuaaucuu

SEQ ID NO: 2467971 - RNA, 19 nt, Artificial Sequence
  Description of Artificial Sequence: Synthetic oligonucleotide
  Antisense strand to SEQ ID NO: 2467970
aagauuaaucacauucaca

SEQ ID NO: 2467972 - RNA, 19 nt, Artificial Sequence
  Description of Artificial Sequence: Synthetic oligonucleotide
  Sense strand starting at position 2260 of SEQ ID NO: 1887380
uagugaguuaagggagagu

SEQ ID NO: 2467973 - RNA, 19 nt, Artificial Sequence
  Description of Artificial Sequence: Synthetic oligonucleotide
  Antisense strand to SEQ ID NO: 2467972
acucucccuuaacucacua

SEQ ID NO: 2467974 - RNA, 19 nt, Artificial Sequence
  Description of Artificial Sequence: Synthetic oligonucleotide
  Sense strand starting at position 2628 of SEQ ID NO: 1887380
uuauguguucaggaaugug

SEQ ID NO: 2467975 - RNA, 19 nt, Artificial Sequence
  Description of Artificial Sequence: Synthetic oligonucleotide
  Antisense strand to SEQ ID NO: 2467974
cacauuccugaacacauaa

SEQ ID NO: 2467976 - RNA, 19 nt, Artificial Sequence
  Description of Artificial Sequence: Synthetic oligonucleotide
  Sense strand starting at position 3029 of SEQ ID NO: 1887380
uuuagaagccaguauuauc

SEQ ID NO: 2467977 - RNA, 19 nt, Artificial Sequence
  Description of Artificial Sequence: Synthetic oligonucleotide
  Antisense strand to SEQ ID NO: 2467976
gauaauacuggcuucuaaa

SEQ ID NO: 2467978 - RNA, 19 nt, Artificial Sequence
  Description of Artificial Sequence: Synthetic oligonucleotide
  Sense strand starting at position 3087 of SEQ ID NO: 1887380
augccaaugucccugauga

SEQ ID NO: 2467979 - RNA, 19 nt, Artificial Sequence
  Description of Artificial Sequence: Synthetic oligonucleotide
  Antisense strand to SEQ ID NO: 2467978
ucaucagggacauuggcau

SEQ ID NO: 2467980 - RNA, 19 nt, Artificial Sequence
  Description of Artificial Sequence: Synthetic oligonucleotide
  Sense strand starting at position 3088 of SEQ ID NO: 1887380
ugccaaugucccugaugaa

SEQ ID NO: 2467981 - RNA, 19 nt, Artificial Sequence
  Description of Artificial Sequence: Synthetic oligonucleotide
  Antisense strand to SEQ ID NO: 2467980
uucaucagggacauuggca

SEQ ID NO: 2467982 - RNA, 19 nt, Artificial Sequence
  Description of Artificial Sequence: Synthetic oligonucleotide
  Sense strand starting at position 233 of SEQ ID NO: 1887381
ugaaguuuaucagacagau

SEQ ID NO: 2467983 - RNA, 19 nt, Artificial Sequence
  Description of Artificial Sequence: Synthetic oligonucleotide
  Antisense strand to SEQ ID NO: 2467982
aucugucugauaaacuuca

SEQ ID NO: 2467984 - RNA, 19 nt, Artificial Sequence
  Description of Artificial Sequence: Synthetic oligonucleotide
  Sense strand starting at position 242 of SEQ ID NO: 1887381
ucagacagauuccuugauu

SEQ ID NO: 2467985 - RNA, 19 nt, Artificial Sequence
  Description of Artificial Sequence: Synthetic oligonucleotide
  Antisense strand to SEQ ID NO: 2467984
aaucaaggaaucugucuga

SEQ ID NO: 2467986 - RNA, 19 nt, Artificial Sequence
  Description of Artificial Sequence: Synthetic oligonucleotide
  Sense strand starting at position 248 of SEQ ID NO: 1887381
agauuccuugauuacugua

SEQ ID NO: 2467987 - RNA, 19 nt, Artificial Sequence
  Description of Artificial Sequence: Synthetic oligonucleotide
  Antisense strand to SEQ ID NO: 2467986
uacaguaaucaaggaaucu

SEQ ID NO: 2467988 - RNA, 19 nt, Artificial Sequence
  Description of Artificial Sequence: Synthetic oligonucleotide
  Sense strand starting at position 417 of SEQ ID NO: 1887381
auauaauguuccugucacu

SEQ ID NO: 2467989 - RNA, 19 nt, Artificial Sequence
  Description of Artificial Sequence: Synthetic oligonucleotide
  Antisense strand to SEQ ID NO: 2467988
agugacaggaacauuauau

SEQ ID NO: 2467990 - RNA, 19 nt, Artificial Sequence
  Description of Artificial Sequence: Synthetic oligonucleotide
  Sense strand starting at position 469 of SEQ ID NO: 1887381
cucacacccucagaguauu

SEQ ID NO: 2467991 - RNA, 19 nt, Artificial Sequence
  Description of Artificial Sequence: Synthetic oligonucleotide
  Antisense strand to SEQ ID NO: 2467990
aauacucugagggugugag

SEQ ID NO: 2467992 - RNA, 19 nt, Artificial Sequence
  Description of Artificial Sequence: Synthetic oligonucleotide
  Sense strand starting at position 663 of SEQ ID NO: 1887381
agaauuagauuccaacuga

SEQ ID NO: 2467993 - RNA, 19 nt, Artificial Sequence
  Description of Artificial Sequence: Synthetic oligonucleotide
  Antisense strand to SEQ ID NO: 2467992
ucaguuggaaucuaauucu

SEQ ID NO: 2467994 - RNA, 19 nt, Artificial Sequence
  Description of Artificial Sequence: Synthetic oligonucleotide
  Sense strand starting at position 708 of SEQ ID NO: 1887381
uuaccuugguaguaagauu

SEQ ID NO: 2467995 - RNA, 19 nt, Artificial Sequence
  Description of Artificial Sequence: Synthetic oligonucleotide
  Antisense strand to SEQ ID NO: 2467994
aaucuuacuaccaagguaa

SEQ ID NO: 2467996 - RNA, 19 nt, Artificial Sequence
  Description of Artificial Sequence: Synthetic oligonucleotide
  Sense strand starting at position 925 of SEQ ID NO: 1887381
ucauguuucuuggcauaau

SEQ ID NO: 2467997 - RNA, 19 nt, Artificial Sequence
  Description of Artificial Sequence: Synthetic oligonucleotide
  Antisense strand to SEQ ID NO: 2467996
auuaugccaagaaacauga

SEQ ID NO: 2467998 - RNA, 19 nt, Artificial Sequence
  Description of Artificial Sequence: Synthetic oligonucleotide
  Sense strand starting at position 928 of SEQ ID NO: 1887381
uguuucuuggcauaauuaa

SEQ ID NO: 2467999 - RNA, 19 nt, Artificial Sequence
  Description of Artificial Sequence: Synthetic oligonucleotide
  Antisense strand to SEQ ID NO: 2467998
uuaauuaugccaagaaaca

SEQ ID NO: 2468000 - RNA, 19 nt, Artificial Sequence
  Description of Artificial Sequence: Synthetic oligonucleotide
  Sense strand starting at position 1361 of SEQ ID NO: 1887381
aauagugaccgccaauaua

SEQ ID NO: 2468001 - RNA, 19 nt, Artificial Sequence
  Description of Artificial Sequence: Synthetic oligonucleotide
  Antisense strand to SEQ ID NO: 2468000
uauauuggcggucacuauu

SEQ ID NO: 2468002 - RNA, 19 nt, Artificial Sequence
  Description of Artificial Sequence: Synthetic oligonucleotide
  Sense strand starting at position 1364 of SEQ ID NO: 1887381
agugaccgccaauauaauu

SEQ ID NO: 2468003 - RNA, 19 nt, Artificial Sequence
  Description of Artificial Sequence: Synthetic oligonucleotide
  Antisense strand to SEQ ID NO: 2468002
aauuauauuggcggucacu

SEQ ID NO: 2468004 - RNA, 19 nt, Artificial Sequence
  Description of Artificial Sequence: Synthetic oligonucleotide
  Sense strand starting at position 1392 of SEQ ID NO: 1887381
ugaguauaauuaguccuca

SEQ ID NO: 2468005 - RNA, 19 nt, Artificial Sequence
  Description of Artificial Sequence: Synthetic oligonucleotide
  Antisense strand to SEQ ID NO: 2468004
ugaggacuaauuauacuca

SEQ ID NO: 2468006 - RNA, 19 nt, Artificial Sequence
  Description of Artificial Sequence: Synthetic oligonucleotide
  Sense strand starting at position 1411 of SEQ ID NO: 1887381
caagcuguccucuaugaug

SEQ ID NO: 2468007 - RNA, 19 nt, Artificial Sequence
  Description of Artificial Sequence: Synthetic oligonucleotide
  Antisense strand to SEQ ID NO: 2468006
caucauagaggacagcuug

SEQ ID NO: 2468008 - RNA, 19 nt, Artificial Sequence
  Description of Artificial Sequence: Synthetic oligonucleotide
  Sense strand starting at position 1413 of SEQ ID NO: 1887381
agcuguccucuaugaugaa

SEQ ID NO: 2468009 - RNA, 19 nt, Artificial Sequence
  Description of Artificial Sequence: Synthetic oligonucleotide
  Antisense strand to SEQ ID NO: 2468008
uucaucauagaggacagcu

SEQ ID NO: 2468010 - RNA, 19 nt, Artificial Sequence
  Description of Artificial Sequence: Synthetic oligonucleotide
  Sense strand starting at position 1439 of SEQ ID NO: 1887381
uguacuuaauggcugacau

SEQ ID NO: 2468011 - RNA, 19 nt, Artificial Sequence
  Description of Artificial Sequence: Synthetic oligonucleotide
  Antisense strand to SEQ ID NO: 2468010
augucagccauuaaguaca

SEQ ID NO: 2468012 - RNA, 19 nt, Artificial Sequence
  Description of Artificial Sequence: Synthetic oligonucleotide
  Sense strand starting at position 1440 of SEQ ID NO: 1887381
guacuuaauggcugacaua

SEQ ID NO: 2468013 - RNA, 19 nt, Artificial Sequence
  Description of Artificial Sequence: Synthetic oligonucleotide
  Antisense strand to SEQ ID NO: 2468012
uaugucagccauuaaguac

SEQ ID NO: 2468014 - RNA, 19 nt, Artificial Sequence
  Description of Artificial Sequence: Synthetic oligonucleotide
  Sense strand starting at position 1651 of SEQ ID NO: 1887381
acaagagagugcccugaaa

SEQ ID NO: 2468015 - RNA, 19 nt, Artificial Sequence
  Description of Artificial Sequence: Synthetic oligonucleotide
  Antisense strand to SEQ ID NO: 2468014
uuucagggcacucucuugu

SEQ ID NO: 2468016 - RNA, 19 nt, Artificial Sequence
  Description of Artificial Sequence: Synthetic oligonucleotide
  Sense strand starting at position 1653 of SEQ ID NO: 1887381
aagagagugcccugaaaua

SEQ ID NO: 2468017 - RNA, 19 nt, Artificial Sequence
  Description of Artificial Sequence: Synthetic oligonucleotide
  Antisense strand to SEQ ID NO: 2468016
uauuucagggcacucucuu

SEQ ID NO: 2468018 - RNA, 19 nt, Artificial Sequence
  Description of Artificial Sequence: Synthetic oligonucleotide
  Sense strand starting at position 1840 of SEQ ID NO: 1887381
aaaucuucguagguacuua

SEQ ID NO: 2468019 - RNA, 19 nt, Artificial Sequence
  Description of Artificial Sequence: Synthetic oligonucleotide
  Antisense strand to SEQ ID NO: 2468018
uaaguaccuacgaagauuu

SEQ ID NO: 2468020 - RNA, 19 nt, Artificial Sequence
  Description of Artificial Sequence: Synthetic oligonucleotide
  Sense strand starting at position 2122 of SEQ ID NO: 1887381
aacagagucucagucaugu

SEQ ID NO: 2468021 - RNA, 19 nt, Artificial Sequence
  Description of Artificial Sequence: Synthetic oligonucleotide
  Antisense strand to SEQ ID NO: 2468020
acaugacugagacucuguu

SEQ ID NO: 2468022 - RNA, 19 nt, Artificial Sequence
  Description of Artificial Sequence: Synthetic oligonucleotide
  Sense strand starting at position 2154 of SEQ ID NO: 1887381
acugaagcuccaugacuaa

SEQ ID NO: 2468023 - RNA, 19 nt, Artificial Sequence
  Description of Artificial Sequence: Synthetic oligonucleotide
  Antisense strand to SEQ ID NO: 2468022
uuagucauggagcuucagu

SEQ ID NO: 2468024 - RNA, 19 nt, Artificial Sequence
  Description of Artificial Sequence: Synthetic oligonucleotide
  Sense strand starting at position 2166 of SEQ ID NO: 1887381
ugacuaauuugacagccaa

SEQ ID NO: 2468025 - RNA, 19 nt, Artificial Sequence
  Description of Artificial Sequence: Synthetic oligonucleotide
  Antisense strand to SEQ ID NO: 2468024
uuggcugucaaauuaguca

SEQ ID NO: 2468026 - RNA, 19 nt, Artificial Sequence
  Description of Artificial Sequence: Synthetic oligonucleotide
  Sense strand starting at position 2363 of SEQ ID NO: 1887381
acauuucuauucugauugu

SEQ ID NO: 2468027 - RNA, 19 nt, Artificial Sequence
  Description of Artificial Sequence: Synthetic oligonucleotide
  Antisense strand to SEQ ID NO: 2468026
acaaucagaauagaaaugu

SEQ ID NO: 2468028 - RNA, 19 nt, Artificial Sequence
  Description of Artificial Sequence: Synthetic oligonucleotide
  Sense strand starting at position 2366 of SEQ ID NO: 1887381
uuucuauucugauugugga

SEQ ID NO: 2468029 - RNA, 19 nt, Artificial Sequence
  Description of Artificial Sequence: Synthetic oligonucleotide
  Antisense strand to SEQ ID NO: 2468028
uccacaaucagaauagaaa

SEQ ID NO: 2468030 - RNA, 19 nt, Artificial Sequence
  Description of Artificial Sequence: Synthetic oligonucleotide
  Sense strand starting at position 2874 of SEQ ID NO: 1887381
ucagauucuccaugugaac

SEQ ID NO: 2468031 - RNA, 19 nt, Artificial Sequence
  Description of Artificial Sequence: Synthetic oligonucleotide
  Antisense strand to SEQ ID NO: 2468030
guucacauggagaaucuga

SEQ ID NO: 2468032 - RNA, 19 nt, Artificial Sequence
  Description of Artificial Sequence: Synthetic oligonucleotide
  Sense strand starting at position 3284 of SEQ ID NO: 1887381
ggauuuaccugguauugca

SEQ ID NO: 2468033 - RNA, 19 nt, Artificial Sequence
  Description of Artificial Sequence: Synthetic oligonucleotide
  Antisense strand to SEQ ID NO: 2468032
ugcaauaccagguaaaucc

SEQ ID NO: 2468034 - RNA, 19 nt, Artificial Sequence
  Description of Artificial Sequence: Synthetic oligonucleotide
  Sense strand starting at position 3291 of SEQ ID NO: 1887381
ccugguauugcauaugaaa

SEQ ID NO: 2468035 - RNA, 19 nt, Artificial Sequence
  Description of Artificial Sequence: Synthetic oligonucleotide
  Antisense strand to SEQ ID NO: 2468034
uuucauaugcaauaccagg

SEQ ID NO: 2468036 - RNA, 19 nt, Artificial Sequence
  Description of Artificial Sequence: Synthetic oligonucleotide
  Sense strand starting at position 3294 of SEQ ID NO: 1887381
gguauugcauaugaaacaa

SEQ ID NO: 2468037 - RNA, 19 nt, Artificial Sequence
  Description of Artificial Sequence: Synthetic oligonucleotide
  Antisense strand to SEQ ID NO: 2468036
uuguuucauaugcaauacc

SEQ ID NO: 2468038 - RNA, 19 nt, Artificial Sequence
  Description of Artificial Sequence: Synthetic oligonucleotide
  Sense strand starting at position 3423 of SEQ ID NO: 1887381
uggauuaaucaauguucua

SEQ ID NO: 2468039 - RNA, 19 nt, Artificial Sequence
  Description of Artificial Sequence: Synthetic oligonucleotide
  Antisense strand to SEQ ID NO: 2468038
uagaacauugauuaaucca

SEQ ID NO: 2468040 - RNA, 19 nt, Artificial Sequence
  Description of Artificial Sequence: Synthetic oligonucleotide
  Sense strand starting at position 3428 of SEQ ID NO: 1887381
uaaucaauguucuauggga

SEQ ID NO: 2468041 - RNA, 19 nt, Artificial Sequence
  Description of Artificial Sequence: Synthetic oligonucleotide
  Antisense strand to SEQ ID NO: 2468040
ucccauagaacauugauua

SEQ ID NO: 2468042 - RNA, 19 nt, Artificial Sequence
  Description of Artificial Sequence: Synthetic oligonucleotide
  Sense strand starting at position 3430 of SEQ ID NO: 1887381
aucaauguucuaugggaaa

SEQ ID NO: 2468043 - RNA, 19 nt, Artificial Sequence
  Description of Artificial Sequence: Synthetic oligonucleotide
  Antisense strand to SEQ ID NO: 2468042
uuucccauagaacauugau

SEQ ID NO: 2468044 - RNA, 19 nt, Artificial Sequence
  Description of Artificial Sequence: Synthetic oligonucleotide
  Sense strand starting at position 3433 of SEQ ID NO: 1887381
aauguucuaugggaaaucu

SEQ ID NO: 2468045 - RNA, 19 nt, Artificial Sequence
  Description of Artificial Sequence: Synthetic oligonucleotide
  Antisense strand to SEQ ID NO: 2468044
agauuucccauagaacauu

SEQ ID NO: 2468046 - RNA, 19 nt, Artificial Sequence
  Description of Artificial Sequence: Synthetic oligonucleotide
  Sense strand starting at position 3510 of SEQ ID NO: 1887381
guaccuugauccuagugau

SEQ ID NO: 2468047 - RNA, 19 nt, Artificial Sequence
  Description of Artificial Sequence: Synthetic oligonucleotide
  Antisense strand to SEQ ID NO: 2468046
aucacuaggaucaagguac

SEQ ID NO: 2468048 - RNA, 19 nt, Artificial Sequence
  Description of Artificial Sequence: Synthetic oligonucleotide
  Sense strand starting at position 3513 of SEQ ID NO: 1887381
ccuugauccuagugaucca

SEQ ID NO: 2468049 - RNA, 19 nt, Artificial Sequence
  Description of Artificial Sequence: Synthetic oligonucleotide
  Antisense strand to SEQ ID NO: 2468048
uggaucacuaggaucaagg

SEQ ID NO: 2468050 - RNA, 19 nt, Artificial Sequence
  Description of Artificial Sequence: Synthetic oligonucleotide
  Sense strand starting at position 3520 of SEQ ID NO: 1887381
ccuagugauccacaggucu

SEQ ID NO: 2468051 - RNA, 19 nt, Artificial Sequence
  Description of Artificial Sequence: Synthetic oligonucleotide
  Antisense strand to SEQ ID NO: 2468050
agaccuguggaucacuagg

SEQ ID NO: 2468052 - RNA, 19 nt, Artificial Sequence
  Description of Artificial Sequence: Synthetic oligonucleotide
  Sense strand starting at position 3760 of SEQ ID NO: 1887381
cguugucuagcccagagua

SEQ ID NO: 2468053 - RNA, 19 nt, Artificial Sequence
  Description of Artificial Sequence: Synthetic oligonucleotide
  Antisense strand to SEQ ID NO: 2468052
uacucugggcuagacaacg

SEQ ID NO: 2468054 - RNA, 19 nt, Artificial Sequence
  Description of Artificial Sequence: Synthetic oligonucleotide
  Sense strand starting at position 373 of SEQ ID NO: 1887382
gugagaaccuguguagaca

SEQ ID NO: 2468055 - RNA, 19 nt, Artificial Sequence
  Description of Artificial Sequence: Synthetic oligonucleotide
  Antisense strand to SEQ ID NO: 2468054
ugucuacacagguucucac

SEQ ID NO: 2468056 - RNA, 19 nt, Artificial Sequence
  Description of Artificial Sequence: Synthetic oligonucleotide
  Sense strand starting at position 403 of SEQ ID NO: 1887382
uuugucuaaggaugguaaa

SEQ ID NO: 2468057 - RNA, 19 nt, Artificial Sequence
  Description of Artificial Sequence: Synthetic oligonucleotide
  Antisense strand to SEQ ID NO: 2468056
uuuaccauccuuagacaaa

SEQ ID NO: 2468058 - RNA, 19 nt, Artificial Sequence
  Description of Artificial Sequence: Synthetic oligonucleotide
  Sense strand starting at position 447 of SEQ ID NO: 1887382
cugaaaguuaaaugagagu

SEQ ID NO: 2468059 - RNA, 19 nt, Artificial Sequence
  Description of Artificial Sequence: Synthetic oligonucleotide
  Antisense strand to SEQ ID NO: 2468058
acucucauuuaacuuucag

SEQ ID NO: 2468060 - RNA, 19 nt, Artificial Sequence
  Description of Artificial Sequence: Synthetic oligonucleotide
  Sense strand starting at position 546 of SEQ ID NO: 1887382
gaguacuuacuugagccaa

SEQ ID NO: 2468061 - RNA, 19 nt, Artificial Sequence
  Description of Artificial Sequence: Synthetic oligonucleotide
  Antisense strand to SEQ ID NO: 2468060
uuggcucaaguaaguacuc

SEQ ID NO: 2468062 - RNA, 19 nt, Artificial Sequence
  Description of Artificial Sequence: Synthetic oligonucleotide
  Sense strand starting at position 737 of SEQ ID NO: 1887382
auguuuacaccucauguaa

SEQ ID NO: 2468063 - RNA, 19 nt, Artificial Sequence
  Description of Artificial Sequence: Synthetic oligonucleotide
  Antisense strand to SEQ ID NO: 2468062
uuacaugagguguaaacau

SEQ ID NO: 2468064 - RNA, 19 nt, Artificial Sequence
  Description of Artificial Sequence: Synthetic oligonucleotide
  Sense strand starting at position 772 of SEQ ID NO: 1887382
uuugcugagccuuaagaga

SEQ ID NO: 2468065 - RNA, 19 nt, Artificial Sequence
  Description of Artificial Sequence: Synthetic oligonucleotide
  Antisense strand to SEQ ID NO: 2468064
ucucuuaaggcucagcaaa

SEQ ID NO: 2468066 - RNA, 19 nt, Artificial Sequence
  Description of Artificial Sequence: Synthetic oligonucleotide
  Sense strand starting at position 815 of SEQ ID NO: 1887382
aauagauacguaugaaugu

SEQ ID NO: 2468067 - RNA, 19 nt, Artificial Sequence
  Description of Artificial Sequence: Synthetic oligonucleotide
  Antisense strand to SEQ ID NO: 2468066
acauucauacguaucuauu

SEQ ID NO: 2468068 - RNA, 19 nt, Artificial Sequence
  Description of Artificial Sequence: Synthetic oligonucleotide
  Sense strand starting at position 1261 of SEQ ID NO: 1887382
acguaugugcguaggaaga

SEQ ID NO: 2468069 - RNA, 19 nt, Artificial Sequence
  Description of Artificial Sequence: Synthetic oligonucleotide
  Antisense strand to SEQ ID NO: 2468068
ucuuccuacgcacauacgu

SEQ ID NO: 2468070 - RNA, 19 nt, Artificial Sequence
  Description of Artificial Sequence: Synthetic oligonucleotide
  Sense strand starting at position 1285 of SEQ ID NO: 1887382
gaaauagucuacucuuggu

SEQ ID NO: 2468071 - RNA, 19 nt, Artificial Sequence
  Description of Artificial Sequence: Synthetic oligonucleotide
  Antisense strand to SEQ ID NO: 2468070
accaagaguagacuauuuc

SEQ ID NO: 2468072 - RNA, 19 nt, Artificial Sequence
  Description of Artificial Sequence: Synthetic oligonucleotide
  Sense strand starting at position 1290 of SEQ ID NO: 1887382
agucuacucuugguaggaa

SEQ ID NO: 2468073 - RNA, 19 nt, Artificial Sequence
  Description of Artificial Sequence: Synthetic oligonucleotide
  Antisense strand to SEQ ID NO: 2468072
uuccuaccaagaguagacu

SEQ ID NO: 2468074 - RNA, 19 nt, Artificial Sequence
  Description of Artificial Sequence: Synthetic oligonucleotide
  Sense strand starting at position 1458 of SEQ ID NO: 1887382
aaaucagugucaguaagau

SEQ ID NO: 2468075 - RNA, 19 nt, Artificial Sequence
  Description of Artificial Sequence: Synthetic oligonucleotide
  Antisense strand to SEQ ID NO: 2468074
aucuuacugacacugauuu

SEQ ID NO: 2468076 - RNA, 19 nt, Artificial Sequence
  Description of Artificial Sequence: Synthetic oligonucleotide
  Sense strand starting at position 1467 of SEQ ID NO: 1887382
ucaguaagaugacuuuaau

SEQ ID NO: 2468077 - RNA, 19 nt, Artificial Sequence
  Description of Artificial Sequence: Synthetic oligonucleotide
  Antisense strand to SEQ ID NO: 2468076
auuaaagucaucuuacuga

SEQ ID NO: 2468078 - RNA, 19 nt, Artificial Sequence
  Description of Artificial Sequence: Synthetic oligonucleotide
  Sense strand starting at position 1579 of SEQ ID NO: 1887382
ggagaaucucuugguaagu

SEQ ID NO: 2468079 - RNA, 19 nt, Artificial Sequence
  Description of Artificial Sequence: Synthetic oligonucleotide
  Antisense strand to SEQ ID NO: 2468078
acuuaccaagagauucucc

SEQ ID NO: 2468080 - RNA, 19 nt, Artificial Sequence
  Description of Artificial Sequence: Synthetic oligonucleotide
  Sense strand starting at position 1580 of SEQ ID NO: 1887382
gagaaucucuugguaagua

SEQ ID NO: 2468081 - RNA, 19 nt, Artificial Sequence
  Description of Artificial Sequence: Synthetic oligonucleotide
  Antisense strand to SEQ ID NO: 2468080
uacuuaccaagagauucuc

SEQ ID NO: 2468082 - RNA, 19 nt, Artificial Sequence
  Description of Artificial Sequence: Synthetic oligonucleotide
  Sense strand starting at position 1584 of SEQ ID NO: 1887382
aucucuugguaaguaaauu

SEQ ID NO: 2468083 - RNA, 19 nt, Artificial Sequence
  Description of Artificial Sequence: Synthetic oligonucleotide
  Antisense strand to SEQ ID NO: 2468082
aauuuacuuaccaagagau

SEQ ID NO: 2468084 - RNA, 19 nt, Artificial Sequence
  Description of Artificial Sequence: Synthetic oligonucleotide
  Sense strand starting at position 1745 of SEQ ID NO: 1887382
uuacaagaccgauaauugu

SEQ ID NO: 2468085 - RNA, 19 nt, Artificial Sequence
  Description of Artificial Sequence: Synthetic oligonucleotide
  Antisense strand to SEQ ID NO: 2468084
acaauuaucggucuuguaa

SEQ ID NO: 2468086 - RNA, 19 nt, Artificial Sequence
  Description of Artificial Sequence: Synthetic oligonucleotide
  Sense strand starting at position 1748 of SEQ ID NO: 1887382
caagaccgauaauuguaua

SEQ ID NO: 2468087 - RNA, 19 nt, Artificial Sequence
  Description of Artificial Sequence: Synthetic oligonucleotide
  Antisense strand to SEQ ID NO: 2468086
uauacaauuaucggucuug

SEQ ID NO: 2468088 - RNA, 19 nt, Artificial Sequence
  Description of Artificial Sequence: Synthetic oligonucleotide
  Sense strand starting at position 2125 of SEQ ID NO: 1887382
ugaaguuuacaugguggga

SEQ ID NO: 2468089 - RNA, 19 nt, Artificial Sequence
  Description of Artificial Sequence: Synthetic oligonucleotide
  Antisense strand to SEQ ID NO: 2468088
ucccaccauguaaacuuca

SEQ ID NO: 2468090 - RNA, 19 nt, Artificial Sequence
  Description of Artificial Sequence: Synthetic oligonucleotide
  Sense strand starting at position 2138 of SEQ ID NO: 1887382
gugggaauguuauugaaac

SEQ ID NO: 2468091 - RNA, 19 nt, Artificial Sequence
  Description of Artificial Sequence: Synthetic oligonucleotide
  Antisense strand to SEQ ID NO: 2468090
guuucaauaacauucccac

SEQ ID NO: 2468092 - RNA, 19 nt, Artificial Sequence
  Description of Artificial Sequence: Synthetic oligonucleotide
  Sense strand starting at position 2254 of SEQ ID NO: 1887382
uuaaauccgugaguuggaa

SEQ ID NO: 2468093 - RNA, 19 nt, Artificial Sequence
  Description of Artificial Sequence: Synthetic oligonucleotide
  Antisense strand to SEQ ID NO: 2468092
uuccaacucacggauuuaa

SEQ ID NO: 2468094 - RNA, 19 nt, Artificial Sequence
  Description of Artificial Sequence: Synthetic oligonucleotide
  Sense strand starting at position 2408 of SEQ ID NO: 1887382
auaagucaugcuggaaaua

SEQ ID NO: 2468095 - RNA, 19 nt, Artificial Sequence
  Description of Artificial Sequence: Synthetic oligonucleotide
  Antisense strand to SEQ ID NO: 2468094
uauuuccagcaugacuuau

SEQ ID NO: 2468096 - RNA, 19 nt, Artificial Sequence
  Description of Artificial Sequence: Synthetic oligonucleotide
  Sense strand starting at position 2592 of SEQ ID NO: 1887382
aauaaauagcuugacguga

SEQ ID NO: 2468097 - RNA, 19 nt, Artificial Sequence
  Description of Artificial Sequence: Synthetic oligonucleotide
  Antisense strand to SEQ ID NO: 2468096
ucacgucaagcuauuuauu

SEQ ID NO: 2468098 - RNA, 19 nt, Artificial Sequence
  Description of Artificial Sequence: Synthetic oligonucleotide
  Sense strand starting at position 2744 of SEQ ID NO: 1887382
gcauucuuccaggacacaa

SEQ ID NO: 2468099 - RNA, 19 nt, Artificial Sequence
  Description of Artificial Sequence: Synthetic oligonucleotide
  Antisense strand to SEQ ID NO: 2468098
uuguguccuggaagaaugc

SEQ ID NO: 2468100 - RNA, 19 nt, Artificial Sequence
  Description of Artificial Sequence: Synthetic oligonucleotide
  Sense strand starting at position 2785 of SEQ ID NO: 1887382
ugaggcucucaaggaaaua

SEQ ID NO: 2468101 - RNA, 19 nt, Artificial Sequence
  Description of Artificial Sequence: Synthetic oligonucleotide
  Antisense strand to SEQ ID NO: 2468100
uauuuccuugagagccuca

SEQ ID NO: 2468102 - RNA, 19 nt, Artificial Sequence
  Description of Artificial Sequence: Synthetic oligonucleotide
  Sense strand starting at position 2796 of SEQ ID NO: 1887382
aggaaauaaugugcugcaa

SEQ ID NO: 2468103 - RNA, 19 nt, Artificial Sequence
  Description of Artificial Sequence: Synthetic oligonucleotide
  Antisense strand to SEQ ID NO: 2468102
uugcagcacauuauuuccu

SEQ ID NO: 2468104 - RNA, 19 nt, Artificial Sequence
  Description of Artificial Sequence: Synthetic oligonucleotide
  Sense strand starting at position 2830 of SEQ ID NO: 1887382
uucuuuaugaagugaggga

SEQ ID NO: 2468105 - RNA, 19 nt, Artificial Sequence
  Description of Artificial Sequence: Synthetic oligonucleotide
  Antisense strand to SEQ ID NO: 2468104
ucccucacuucauaaagaa

SEQ ID NO: 2468106 - RNA, 19 nt, Artificial Sequence
  Description of Artificial Sequence: Synthetic oligonucleotide
  Sense strand starting at position 2907 of SEQ ID NO: 1887382
aagccaauagggugaagau

SEQ ID NO: 2468107 - RNA, 19 nt, Artificial Sequence
  Description of Artificial Sequence: Synthetic oligonucleotide
  Antisense strand to SEQ ID NO: 2468106
aucuucacccuauuggcuu

SEQ ID NO: 2468108 - RNA, 19 nt, Artificial Sequence
  Description of Artificial Sequence: Synthetic oligonucleotide
  Sense strand starting at position 2953 of SEQ ID NO: 1887382
ucuuuaggagcucaaacuu

SEQ ID NO: 2468109 - RNA, 19 nt, Artificial Sequence
  Description of Artificial Sequence: Synthetic oligonucleotide
  Antisense strand to SEQ ID NO: 2468108
aaguuugagcuccuaaaga

SEQ ID NO: 2468110 - RNA, 19 nt, Artificial Sequence
  Description of Artificial Sequence: Synthetic oligonucleotide
  Sense strand starting at position 2964 of SEQ ID NO: 1887382
ucaaacuuuaguuguggga

SEQ ID NO: 2468111 - RNA, 19 nt, Artificial Sequence
  Description of Artificial Sequence: Synthetic oligonucleotide
  Antisense strand to SEQ ID NO: 2468110
ucccacaacuaaaguuuga

SEQ ID NO: 2468112 - RNA, 19 nt, Artificial Sequence
  Description of Artificial Sequence: Synthetic oligonucleotide
  Sense strand starting at position 2968 of SEQ ID NO: 1887382
acuuuaguugugggagaga

SEQ ID NO: 2468113 - RNA, 19 nt, Artificial Sequence
  Description of Artificial Sequence: Synthetic oligonucleotide
  Antisense strand to SEQ ID NO: 2468112
ucucucccacaacuaaagu

SEQ ID NO: 2468114 - RNA, 19 nt, Artificial Sequence
  Description of Artificial Sequence: Synthetic oligonucleotide
  Sense strand starting at position 3109 of SEQ ID NO: 1887382
gguagcguucugaguugga

SEQ ID NO: 2468115 - RNA, 19 nt, Artificial Sequence
  Description of Artificial Sequence: Synthetic oligonucleotide
  Antisense strand to SEQ ID NO: 2468114
uccaacucagaacgcuacc

SEQ ID NO: 2468116 - RNA, 19 nt, Artificial Sequence
  Description of Artificial Sequence: Synthetic oligonucleotide
  Sense strand starting at position 3180 of SEQ ID NO: 1887382
cgcaaagaccaagguauua

SEQ ID NO: 2468117 - RNA, 19 nt, Artificial Sequence
  Description of Artificial Sequence: Synthetic oligonucleotide
  Antisense strand to SEQ ID NO: 2468116
uaauaccuuggucuuugcg

SEQ ID NO: 2468118 - RNA, 19 nt, Artificial Sequence
  Description of Artificial Sequence: Synthetic oligonucleotide
  Sense strand starting at position 3221 of SEQ ID NO: 1887382
acuuacuauggcuggauga

SEQ ID NO: 2468119 - RNA, 19 nt, Artificial Sequence
  Description of Artificial Sequence: Synthetic oligonucleotide
  Antisense strand to SEQ ID NO: 2468118
ucauccagccauaguaagu

SEQ ID NO: 2468120 - RNA, 19 nt, Artificial Sequence
  Description of Artificial Sequence: Synthetic oligonucleotide
  Sense strand starting at position 3222 of SEQ ID NO: 1887382
cuuacuauggcuggaugau

SEQ ID NO: 2468121 - RNA, 19 nt, Artificial Sequence
  Description of Artificial Sequence: Synthetic oligonucleotide
  Antisense strand to SEQ ID NO: 2468120
aucauccagccauaguaag

SEQ ID NO: 2468122 - RNA, 19 nt, Artificial Sequence
  Description of Artificial Sequence: Synthetic oligonucleotide
  Sense strand starting at position 3223 of SEQ ID NO: 1887382
uuacuauggcuggaugaug

SEQ ID NO: 2468123 - RNA, 19 nt, Artificial Sequence
  Description of Artificial Sequence: Synthetic oligonucleotide
  Antisense strand to SEQ ID NO: 2468122
caucauccagccauaguaa

SEQ ID NO: 2468124 - RNA, 19 nt, Artificial Sequence
  Description of Artificial Sequence: Synthetic oligonucleotide
  Sense strand starting at position 3262 of SEQ ID NO: 1887382
uuauguaauccguagaaug

SEQ ID NO: 2468125 - RNA, 19 nt, Artificial Sequence
  Description of Artificial Sequence: Synthetic oligonucleotide
  Antisense strand to SEQ ID NO: 2468124
cauucuacggauuacauaa

SEQ ID NO: 2468126 - RNA, 19 nt, Artificial Sequence
  Description of Artificial Sequence: Synthetic oligonucleotide
  Sense strand starting at position 3264 of SEQ ID NO: 1887382
auguaauccguagaaugua

SEQ ID NO: 2468127 - RNA, 19 nt, Artificial Sequence
  Description of Artificial Sequence: Synthetic oligonucleotide
  Antisense strand to SEQ ID NO: 2468126
uacauucuacggauuacau

SEQ ID NO: 2468128 - RNA, 19 nt, Artificial Sequence
  Description of Artificial Sequence: Synthetic oligonucleotide
  Sense strand starting at position 3269 of SEQ ID NO: 1887382
auccguagaauguaucagu

SEQ ID NO: 2468129 - RNA, 19 nt, Artificial Sequence
  Description of Artificial Sequence: Synthetic oligonucleotide
  Antisense strand to SEQ ID NO: 2468128
acugauacauucuacggau

SEQ ID NO: 2468130 - RNA, 19 nt, Artificial Sequence
  Description of Artificial Sequence: Synthetic oligonucleotide
  Sense strand starting at position 3868 of SEQ ID NO: 1887382
gguauugaaucauugauau

SEQ ID NO: 2468131 - RNA, 19 nt, Artificial Sequence
  Description of Artificial Sequence: Synthetic oligonucleotide
  Antisense strand to SEQ ID NO: 2468130
auaucaaugauucaauacc

SEQ ID NO: 2468132 - RNA, 19 nt, Artificial Sequence
  Description of Artificial Sequence: Synthetic oligonucleotide
  Sense strand starting at position 3926 of SEQ ID NO: 1887382
gaaagagaaccauggcagu

SEQ ID NO: 2468133 - RNA, 19 nt, Artificial Sequence
  Description of Artificial Sequence: Synthetic oligonucleotide
  Antisense strand to SEQ ID NO: 2468132
acugccaugguucucuuuc

SEQ ID NO: 2468134 - RNA, 19 nt, Artificial Sequence
  Description of Artificial Sequence: Synthetic oligonucleotide
  Sense strand starting at position 569 of SEQ ID NO: 1887383
cuuugacauccuuaucugu

SEQ ID NO: 2468135 - RNA, 19 nt, Artificial Sequence
  Description of Artificial Sequence: Synthetic oligonucleotide
  Antisense strand to SEQ ID NO: 2468134
acagauaaggaugucaaag

SEQ ID NO: 2468136 - RNA, 19 nt, Artificial Sequence
  Description of Artificial Sequence: Synthetic oligonucleotide
  Sense strand starting at position 571 of SEQ ID NO: 1887383
uugacauccuuaucuguuu

SEQ ID NO: 2468137 - RNA, 19 nt, Artificial Sequence
  Description of Artificial Sequence: Synthetic oligonucleotide
  Antisense strand to SEQ ID NO: 2468136
aaacagauaaggaugucaa

SEQ ID NO: 2468138 - RNA, 19 nt, Artificial Sequence
  Description of Artificial Sequence: Synthetic oligonucleotide
  Sense strand starting at position 572 of SEQ ID NO: 1887383
ugacauccuuaucuguuua

SEQ ID NO: 2468139 - RNA, 19 nt, Artificial Sequence
  Description of Artificial Sequence: Synthetic oligonucleotide
  Antisense strand to SEQ ID NO: 2468138
uaaacagauaaggauguca

SEQ ID NO: 2468140 - RNA, 19 nt, Artificial Sequence
  Description of Artificial Sequence: Synthetic oligonucleotide
  Sense strand starting at position 582 of SEQ ID NO: 1887383
aucuguuuauucuuccaga

SEQ ID NO: 2468141 - RNA, 19 nt, Artificial Sequence
  Description of Artificial Sequence: Synthetic oligonucleotide
  Antisense strand to SEQ ID NO: 2468140
ucuggaagaauaaacagau

SEQ ID NO: 2468142 - RNA, 19 nt, Artificial Sequence
  Description of Artificial Sequence: Synthetic oligonucleotide
  Sense strand starting at position 587 of SEQ ID NO: 1887383
uuuauucuuccagaaggca

SEQ ID NO: 2468143 - RNA, 19 nt, Artificial Sequence
  Description of Artificial Sequence: Synthetic oligonucleotide
  Antisense strand to SEQ ID NO: 2468142
ugccuucuggaagaauaaa

SEQ ID NO: 2468144 - RNA, 19 nt, Artificial Sequence
  Description of Artificial Sequence: Synthetic oligonucleotide
  Sense strand starting at position 709 of SEQ ID NO: 1887383
agggacaaaucugugucau

SEQ ID NO: 2468145 - RNA, 19 nt, Artificial Sequence
  Description of Artificial Sequence: Synthetic oligonucleotide
  Antisense strand to SEQ ID NO: 2468144
augacacagauuugucccu

SEQ ID NO: 2468146 - RNA, 19 nt, Artificial Sequence
  Description of Artificial Sequence: Synthetic oligonucleotide
  Sense strand starting at position 710 of SEQ ID NO: 1887383
gggacaaaucugugucaug

SEQ ID NO: 2468147 - RNA, 19 nt, Artificial Sequence
  Description of Artificial Sequence: Synthetic oligonucleotide
  Antisense strand to SEQ ID NO: 2468146
caugacacagauuuguccc

SEQ ID NO: 2468148 - RNA, 19 nt, Artificial Sequence
  Description of Artificial Sequence: Synthetic oligonucleotide
  Sense strand starting at position 919 of SEQ ID NO: 1887383
ugaggucucucuucuggaa

SEQ ID NO: 2468149 - RNA, 19 nt, Artificial Sequence
  Description of Artificial Sequence: Synthetic oligonucleotide
  Antisense strand to SEQ ID NO: 2468148
uuccagaagagagaccuca

SEQ ID NO: 2468150 - RNA, 19 nt, Artificial Sequence
  Description of Artificial Sequence: Synthetic oligonucleotide
  Sense strand starting at position 948 of SEQ ID NO: 1887383
uuggcaggaguucagaauu

SEQ ID NO: 2468151 - RNA, 19 nt, Artificial Sequence
  Description of Artificial Sequence: Synthetic oligonucleotide
  Antisense strand to SEQ ID NO: 2468150
aauucugaacuccugccaa

SEQ ID NO: 2468152 - RNA, 19 nt, Artificial Sequence
  Description of Artificial Sequence: Synthetic oligonucleotide
  Sense strand starting at position 972 of SEQ ID NO: 1887383
uugguauuagggcagaauu

SEQ ID NO: 2468153 - RNA, 19 nt, Artificial Sequence
  Description of Artificial Sequence: Synthetic oligonucleotide
  Antisense strand to SEQ ID NO: 2468152
aauucugcccuaauaccaa

SEQ ID NO: 2468154 - RNA, 19 nt, Artificial Sequence
  Description of Artificial Sequence: Synthetic oligonucleotide
  Sense strand starting at position 974 of SEQ ID NO: 1887383
gguauuagggcagaauucu

SEQ ID NO: 2468155 - RNA, 19 nt, Artificial Sequence
  Description of Artificial Sequence: Synthetic oligonucleotide
  Antisense strand to SEQ ID NO: 2468154
agaauucugcccuaauacc

SEQ ID NO: 2468156 - RNA, 19 nt, Artificial Sequence
  Description of Artificial Sequence: Synthetic oligonucleotide
  Sense strand starting at position 1084 of SEQ ID NO: 1887383
ggcagaccucuauaaggca

SEQ ID NO: 2468157 - RNA, 19 nt, Artificial Sequence
  Description of Artificial Sequence: Synthetic oligonucleotide
  Antisense strand to SEQ ID NO: 2468156
ugccuuauagaggucugcc

SEQ ID NO: 2468158 - RNA, 19 nt, Artificial Sequence
  Description of Artificial Sequence: Synthetic oligonucleotide
  Sense strand starting at position 1106 of SEQ ID NO: 1887383
uccuaugugcuaggcagaa

SEQ ID NO: 2468159 - RNA, 19 nt, Artificial Sequence
  Description of Artificial Sequence: Synthetic oligonucleotide
  Antisense strand to SEQ ID NO: 2468158
uucugccuagcacauagga

SEQ ID NO: 2468160 - RNA, 19 nt, Artificial Sequence
  Description of Artificial Sequence: Synthetic oligonucleotide
  Sense strand starting at position 1713 of SEQ ID NO: 1887383
guuuacaagccauauugca

SEQ ID NO: 2468161 - RNA, 19 nt, Artificial Sequence
  Description of Artificial Sequence: Synthetic oligonucleotide
  Antisense strand to SEQ ID NO: 2468160
ugcaauauggcuuguaaac

SEQ ID NO: 2468162 - RNA, 19 nt, Artificial Sequence
  Description of Artificial Sequence: Synthetic oligonucleotide
  Sense strand starting at position 1870 of SEQ ID NO: 1887383
cucccugaauucuugugaa

SEQ ID NO: 2468163 - RNA, 19 nt, Artificial Sequence
  Description of Artificial Sequence: Synthetic oligonucleotide
  Antisense strand to SEQ ID NO: 2468162
uucacaagaauucagggag

SEQ ID NO: 2468164 - RNA, 19 nt, Artificial Sequence
  Description of Artificial Sequence: Synthetic oligonucleotide
  Sense strand starting at position 2054 of SEQ ID NO: 1887383
gggccacguccucauagaa

SEQ ID NO: 2468165 - RNA, 19 nt, Artificial Sequence
  Description of Artificial Sequence: Synthetic oligonucleotide
  Antisense strand to SEQ ID NO: 2468164
uucuaugaggacguggccc

SEQ ID NO: 2468166 - RNA, 19 nt, Artificial Sequence
  Description of Artificial Sequence: Synthetic oligonucleotide
  Sense strand starting at position 2169 of SEQ ID NO: 1887383
cuaggaauuugagacuaac

SEQ ID NO: 2468167 - RNA, 19 nt, Artificial Sequence
  Description of Artificial Sequence: Synthetic oligonucleotide
  Antisense strand to SEQ ID NO: 2468166
guuagucucaaauuccuag

SEQ ID NO: 2468168 - RNA, 19 nt, Artificial Sequence
  Description of Artificial Sequence: Synthetic oligonucleotide
  Sense strand starting at position 2177 of SEQ ID NO: 1887383
uugagacuaaccuggugaa

SEQ ID NO: 2468169 - RNA, 19 nt, Artificial Sequence
  Description of Artificial Sequence: Synthetic oligonucleotide
  Antisense strand to SEQ ID NO: 2468168
uucaccagguuagucucaa

SEQ ID NO: 2468170 - RNA, 19 nt, Artificial Sequence
  Description of Artificial Sequence: Synthetic oligonucleotide
  Sense strand starting at position 2365 of SEQ ID NO: 1887383
gaacaucuguaguccagua

SEQ ID NO: 2468171 - RNA, 19 nt, Artificial Sequence
  Description of Artificial Sequence: Synthetic oligonucleotide
  Antisense strand to SEQ ID NO: 2468170
uacuggacuacagauguuc

SEQ ID NO: 2468172 - RNA, 19 nt, Artificial Sequence
  Description of Artificial Sequence: Synthetic oligonucleotide
  Sense strand starting at position 2367 of SEQ ID NO: 1887383
acaucuguaguccaguaua

SEQ ID NO: 2468173 - RNA, 19 nt, Artificial Sequence
  Description of Artificial Sequence: Synthetic oligonucleotide
  Antisense strand to SEQ ID NO: 2468172
uauacuggacuacagaugu

SEQ ID NO: 2468174 - RNA, 19 nt, Artificial Sequence
  Description of Artificial Sequence: Synthetic oligonucleotide
  Sense strand starting at position 2370 of SEQ ID NO: 1887383
ucuguaguccaguauauua

SEQ ID NO: 2468175 - RNA, 19 nt, Artificial Sequence
  Description of Artificial Sequence: Synthetic oligonucleotide
  Antisense strand to SEQ ID NO: 2468174
uaauauacuggacuacaga

SEQ ID NO: 2468176 - RNA, 19 nt, Artificial Sequence
  Description of Artificial Sequence: Synthetic oligonucleotide
  Sense strand starting at position 2372 of SEQ ID NO: 1887383
uguaguccaguauauuagu

SEQ ID NO: 2468177 - RNA, 19 nt, Artificial Sequence
  Description of Artificial Sequence: Synthetic oligonucleotide
  Antisense strand to SEQ ID NO: 2468176
acuaauauacuggacuaca

SEQ ID NO: 2468178 - RNA, 19 nt, Artificial Sequence
  Description of Artificial Sequence: Synthetic oligonucleotide
  Sense strand starting at position 2464 of SEQ ID NO: 1887383
cauugaauuugugcaguuu

SEQ ID NO: 2468179 - RNA, 19 nt, Artificial Sequence
  Description of Artificial Sequence: Synthetic oligonucleotide
  Antisense strand to SEQ ID NO: 2468178
aaacugcacaaauucaaug

SEQ ID NO: 2468180 - RNA, 19 nt, Artificial Sequence
  Description of Artificial Sequence: Synthetic oligonucleotide
  Sense strand starting at position 2475 of SEQ ID NO: 1887383
ugcaguuuaagugaguaaa

SEQ ID NO: 2468181 - RNA, 19 nt, Artificial Sequence
  Description of Artificial Sequence: Synthetic oligonucleotide
  Antisense strand to SEQ ID NO: 2468180
uuuacucacuuaaacugca

SEQ ID NO: 2468182 - RNA, 19 nt, Artificial Sequence
  Description of Artificial Sequence: Synthetic oligonucleotide
  Sense strand starting at position 2477 of SEQ ID NO: 1887383
caguuuaagugaguaaauu

SEQ ID NO: 2468183 - RNA, 19 nt, Artificial Sequence
  Description of Artificial Sequence: Synthetic oligonucleotide
  Antisense strand to SEQ ID NO: 2468182
aauuuacucacuuaaacug

SEQ ID NO: 2468184 - RNA, 19 nt, Artificial Sequence
  Description of Artificial Sequence: Synthetic oligonucleotide
  Sense strand starting at position 2478 of SEQ ID NO: 1887383
aguuuaagugaguaaauug

SEQ ID NO: 2468185 - RNA, 19 nt, Artificial Sequence
  Description of Artificial Sequence: Synthetic oligonucleotide
  Antisense strand to SEQ ID NO: 2468184
caauuuacucacuuaaacu

SEQ ID NO: 2468186 - RNA, 19 nt, Artificial Sequence
  Description of Artificial Sequence: Synthetic oligonucleotide
  Sense strand starting at position 2932 of SEQ ID NO: 1887383
gcacccggccuauauuaua

SEQ ID NO: 2468187 - RNA, 19 nt, Artificial Sequence
  Description of Artificial Sequence: Synthetic oligonucleotide
  Antisense strand to SEQ ID NO: 2468186
uauaauauaggccgggugc

SEQ ID NO: 2468188 - RNA, 19 nt, Artificial Sequence
  Description of Artificial Sequence: Synthetic oligonucleotide
  Sense strand starting at position 2988 of SEQ ID NO: 1887383
agaucauguuacucuuacu

SEQ ID NO: 2468189 - RNA, 19 nt, Artificial Sequence
  Description of Artificial Sequence: Synthetic oligonucleotide
  Antisense strand to SEQ ID NO: 2468188
aguaagaguaacaugaucu

SEQ ID NO: 2468190 - RNA, 19 nt, Artificial Sequence
  Description of Artificial Sequence: Synthetic oligonucleotide
  Sense strand starting at position 3054 of SEQ ID NO: 1887383
uccuuaugcuggcuuacaa

SEQ ID NO: 2468191 - RNA, 19 nt, Artificial Sequence
  Description of Artificial Sequence: Synthetic oligonucleotide
  Antisense strand to SEQ ID NO: 2468190
uuguaagccagcauaagga

SEQ ID NO: 2468192 - RNA, 19 nt, Artificial Sequence
  Description of Artificial Sequence: Synthetic oligonucleotide
  Sense strand starting at position 3302 of SEQ ID NO: 1887383
cccaguuacucugucaaau

SEQ ID NO: 2468193 - RNA, 19 nt, Artificial Sequence
  Description of Artificial Sequence: Synthetic oligonucleotide
  Antisense strand to SEQ ID NO: 2468192
auuugacagaguaacuggg

SEQ ID NO: 2468194 - RNA, 19 nt, Artificial Sequence
  Description of Artificial Sequence: Synthetic oligonucleotide
  Sense strand starting at position 3339 of SEQ ID NO: 1887383
gggcguaccgugguucauu

SEQ ID NO: 2468195 - RNA, 19 nt, Artificial Sequence
  Description of Artificial Sequence: Synthetic oligonucleotide
  Antisense strand to SEQ ID NO: 2468194
aaugaaccacgguacgccc

SEQ ID NO: 2468196 - RNA, 19 nt, Artificial Sequence
  Description of Artificial Sequence: Synthetic oligonucleotide
  Sense strand starting at position 3451 of SEQ ID NO: 1887383
cugaauccucagugccuaa

SEQ ID NO: 2468197 - RNA, 19 nt, Artificial Sequence
  Description of Artificial Sequence: Synthetic oligonucleotide
  Antisense strand to SEQ ID NO: 2468196
uuaggcacugaggauucag

SEQ ID NO: 2468198 - RNA, 19 nt, Artificial Sequence
  Description of Artificial Sequence: Synthetic oligonucleotide
  Sense strand starting at position 3470 of SEQ ID NO: 1887383
aauaguaaucgguacauaa

SEQ ID NO: 2468199 - RNA, 19 nt, Artificial Sequence
  Description of Artificial Sequence: Synthetic oligonucleotide
  Antisense strand to SEQ ID NO: 2468198
uuauguaccgauuacuauu

SEQ ID NO: 2468200 - RNA, 19 nt, Artificial Sequence
  Description of Artificial Sequence: Synthetic oligonucleotide
  Sense strand starting at position 3472 of SEQ ID NO: 1887383
uaguaaucgguacauaaca

SEQ ID NO: 2468201 - RNA, 19 nt, Artificial Sequence
  Description of Artificial Sequence: Synthetic oligonucleotide
  Antisense strand to SEQ ID NO: 2468200
uguuauguaccgauuacua

SEQ ID NO: 2468202 - RNA, 19 nt, Artificial Sequence
  Description of Artificial Sequence: Synthetic oligonucleotide
  Sense strand starting at position 3474 of SEQ ID NO: 1887383
guaaucgguacauaacaga

SEQ ID NO: 2468203 - RNA, 19 nt, Artificial Sequence
  Description of Artificial Sequence: Synthetic oligonucleotide
  Antisense strand to SEQ ID NO: 2468202
ucuguuauguaccgauuac

SEQ ID NO: 2468204 - RNA, 19 nt, Artificial Sequence
  Description of Artificial Sequence: Synthetic oligonucleotide
  Sense strand starting at position 3532 of SEQ ID NO: 1887383
auaccagauguuugguauu

SEQ ID NO: 2468205 - RNA, 19 nt, Artificial Sequence
  Description of Artificial Sequence: Synthetic oligonucleotide
  Antisense strand to SEQ ID NO: 2468204
aauaccaaacaucugguau

SEQ ID NO: 2468206 - RNA, 19 nt, Artificial Sequence
  Description of Artificial Sequence: Synthetic oligonucleotide
  Sense strand starting at position 3535 of SEQ ID NO: 1887383
ccagauguuugguauuuau

SEQ ID NO: 2468207 - RNA, 19 nt, Artificial Sequence
  Description of Artificial Sequence: Synthetic oligonucleotide
  Antisense strand to SEQ ID NO: 2468206
auaaauaccaaacaucugg

SEQ ID NO: 2468208 - RNA, 19 nt, Artificial Sequence
  Description of Artificial Sequence: Synthetic oligonucleotide
  Sense strand starting at position 3868 of SEQ ID NO: 1887383
guuccagaguucucauuga

SEQ ID NO: 2468209 - RNA, 19 nt, Artificial Sequence
  Description of Artificial Sequence: Synthetic oligonucleotide
  Antisense strand to SEQ ID NO: 2468208
ucaaugagaacucuggaac

SEQ ID NO: 2468210 - RNA, 19 nt, Artificial Sequence
  Description of Artificial Sequence: Synthetic oligonucleotide
  Sense strand starting at position 3872 of SEQ ID NO: 1887383
cagaguucucauugauaug

SEQ ID NO: 2468211 - RNA, 19 nt, Artificial Sequence
  Description of Artificial Sequence: Synthetic oligonucleotide
  Antisense strand to SEQ ID NO: 2468210
cauaucaaugagaacucug

SEQ ID NO: 2468212 - RNA, 19 nt, Artificial Sequence
  Description of Artificial Sequence: Synthetic oligonucleotide
  Sense strand starting at position 3961 of SEQ ID NO: 1887383
aggagaugguuugauuuau

SEQ ID NO: 2468213 - RNA, 19 nt, Artificial Sequence
  Description of Artificial Sequence: Synthetic oligonucleotide
  Antisense strand to SEQ ID NO: 2468212
auaaaucaaaccaucuccu

SEQ ID NO: 2468214 - RNA, 19 nt, Artificial Sequence
  Description of Artificial Sequence: Synthetic oligonucleotide
  Sense strand starting at position 196 of SEQ ID NO: 1887384
aguggaggaugcucagaua

SEQ ID NO: 2468215 - RNA, 19 nt, Artificial Sequence
  Description of Artificial Sequence: Synthetic oligonucleotide
  Antisense strand to SEQ ID NO: 2468214
uaucugagcauccuccacu

SEQ ID NO: 2468216 - RNA, 19 nt, Artificial Sequence
  Description of Artificial Sequence: Synthetic oligonucleotide
  Sense strand starting at position 404 of SEQ ID NO: 1887384
ggcgauuucuguucuaggu

SEQ ID NO: 2468217 - RNA, 19 nt, Artificial Sequence
  Description of Artificial Sequence: Synthetic oligonucleotide
  Antisense strand to SEQ ID NO: 2468216
accuagaacagaaaucgcc

SEQ ID NO: 2468218 - RNA, 19 nt, Artificial Sequence
  Description of Artificial Sequence: Synthetic oligonucleotide
  Sense strand starting at position 631 of SEQ ID NO: 1887384
gcgagucccaccuaagaga

SEQ ID NO: 2468219 - RNA, 19 nt, Artificial Sequence
  Description of Artificial Sequence: Synthetic oligonucleotide
  Antisense strand to SEQ ID NO: 2468218
ucucuuaggugggacucgc

SEQ ID NO: 2468220 - RNA, 19 nt, Artificial Sequence
  Description of Artificial Sequence: Synthetic oligonucleotide
  Sense strand starting at position 900 of SEQ ID NO: 1887384
augagaauaaggcgcaauu

SEQ ID NO: 2468221 - RNA, 19 nt, Artificial Sequence
  Description of Artificial Sequence: Synthetic oligonucleotide
  Antisense strand to SEQ ID NO: 2468220
aauugcgccuuauucucau

SEQ ID NO: 2468222 - RNA, 19 nt, Artificial Sequence
  Description of Artificial Sequence: Synthetic oligonucleotide
  Sense strand starting at position 993 of SEQ ID NO: 1887384
gcaagacucuggucagaug

SEQ ID NO: 2468223 - RNA, 19 nt, Artificial Sequence
  Description of Artificial Sequence: Synthetic oligonucleotide
  Antisense strand to SEQ ID NO: 2468222
caucugaccagagucuugc

SEQ ID NO: 2468224 - RNA, 19 nt, Artificial Sequence
  Description of Artificial Sequence: Synthetic oligonucleotide
  Sense strand starting at position 1319 of SEQ ID NO: 1887384
aaaugacuguggucaagaa

SEQ ID NO: 2468225 - RNA, 19 nt, Artificial Sequence
  Description of Artificial Sequence: Synthetic oligonucleotide
  Antisense strand to SEQ ID NO: 2468224
uucuugaccacagucauuu

SEQ ID NO: 2468226 - RNA, 19 nt, Artificial Sequence
  Description of Artificial Sequence: Synthetic oligonucleotide
  Sense strand starting at position 1376 of SEQ ID NO: 1887384
aauagaugccacggagagu

SEQ ID NO: 2468227 - RNA, 19 nt, Artificial Sequence
  Description of Artificial Sequence: Synthetic oligonucleotide
  Antisense strand to SEQ ID NO: 2468226
acucuccguggcaucuauu

SEQ ID NO: 2468228 - RNA, 19 nt, Artificial Sequence
  Description of Artificial Sequence: Synthetic oligonucleotide
  Sense strand starting at position 1377 of SEQ ID NO: 1887384
auagaugccacggagagua

SEQ ID NO: 2468229 - RNA, 19 nt, Artificial Sequence
  Description of Artificial Sequence: Synthetic oligonucleotide
  Antisense strand to SEQ ID NO: 2468228
uacucuccguggcaucuau

SEQ ID NO: 2468230 - RNA, 19 nt, Artificial Sequence
  Description of Artificial Sequence: Synthetic oligonucleotide
  Sense strand starting at position 1444 of SEQ ID NO: 1887384
uuuccuagacugcagaauu

SEQ ID NO: 2468231 - RNA, 19 nt, Artificial Sequence
  Description of Artificial Sequence: Synthetic oligonucleotide
  Antisense strand to SEQ ID NO: 2468230
aauucugcagucuaggaaa

SEQ ID NO: 2468232 - RNA, 19 nt, Artificial Sequence
  Description of Artificial Sequence: Synthetic oligonucleotide
  Sense strand starting at position 1466 of SEQ ID NO: 1887384
cacauuuacugaugaugga

SEQ ID NO: 2468233 - RNA, 19 nt, Artificial Sequence
  Description of Artificial Sequence: Synthetic oligonucleotide
  Antisense strand to SEQ ID NO: 2468232
uccaucaucaguaaaugug

SEQ ID NO: 2468234 - RNA, 19 nt, Artificial Sequence
  Description of Artificial Sequence: Synthetic oligonucleotide
  Sense strand starting at position 1504 of SEQ ID NO: 1887384
gugagaguuggagaguauc

SEQ ID NO: 2468235 - RNA, 19 nt, Artificial Sequence
  Description of Artificial Sequence: Synthetic oligonucleotide
  Antisense strand to SEQ ID NO: 2468234
gauacucuccaacucucac

SEQ ID NO: 2468236 - RNA, 19 nt, Artificial Sequence
  Description of Artificial Sequence: Synthetic oligonucleotide
  Sense strand starting at position 1556 of SEQ ID NO: 1887384
guagucuuccaauaaguau

SEQ ID NO: 2468237 - RNA, 19 nt, Artificial Sequence
  Description of Artificial Sequence: Synthetic oligonucleotide
  Antisense strand to SEQ ID NO: 2468236
auacuuauuggaagacuac

SEQ ID NO: 2468238 - RNA, 19 nt, Artificial Sequence
  Description of Artificial Sequence: Synthetic oligonucleotide
  Sense strand starting at position 1819 of SEQ ID NO: 1887384
cucugcuuaggucacaaua

SEQ ID NO: 2468239 - RNA, 19 nt, Artificial Sequence
  Description of Artificial Sequence: Synthetic oligonucleotide
  Antisense strand to SEQ ID NO: 2468238
uauugugaccuaagcagag

SEQ ID NO: 2468240 - RNA, 19 nt, Artificial Sequence
  Description of Artificial Sequence: Synthetic oligonucleotide
  Sense strand starting at position 2009 of SEQ ID NO: 1887384
uccuucccucgauaaaugu

SEQ ID NO: 2468241 - RNA, 19 nt, Artificial Sequence
  Description of Artificial Sequence: Synthetic oligonucleotide
  Antisense strand to SEQ ID NO: 2468240
acauuuaucgagggaagga

SEQ ID NO: 2468242 - RNA, 19 nt, Artificial Sequence
  Description of Artificial Sequence: Synthetic oligonucleotide
  Sense strand starting at position 2037 of SEQ ID NO: 1887384
guuugcuuugagcaagaag

SEQ ID NO: 2468243 - RNA, 19 nt, Artificial Sequence
  Description of Artificial Sequence: Synthetic oligonucleotide
  Antisense strand to SEQ ID NO: 2468242
cuucuugcucaaagcaaac

SEQ ID NO: 2468244 - RNA, 19 nt, Artificial Sequence
  Description of Artificial Sequence: Synthetic oligonucleotide
  Sense strand starting at position 2040 of SEQ ID NO: 1887384
ugcuuugagcaagaagguu

SEQ ID NO: 2468245 - RNA, 19 nt, Artificial Sequence
  Description of Artificial Sequence: Synthetic oligonucleotide
  Antisense strand to SEQ ID NO: 2468244
aaccuucuugcucaaagca

SEQ ID NO: 2468246 - RNA, 19 nt, Artificial Sequence
  Description of Artificial Sequence: Synthetic oligonucleotide
  Sense strand starting at position 2124 of SEQ ID NO: 1887384
aaccaauaugguuagcuga

SEQ ID NO: 2468247 - RNA, 19 nt, Artificial Sequence
  Description of Artificial Sequence: Synthetic oligonucleotide
  Antisense strand to SEQ ID NO: 2468246
ucagcuaaccauauugguu

SEQ ID NO: 2468248 - RNA, 19 nt, Artificial Sequence
  Description of Artificial Sequence: Synthetic oligonucleotide
  Sense strand starting at position 2172 of SEQ ID NO: 1887384
accuuagcuggugauuaau

SEQ ID NO: 2468249 - RNA, 19 nt, Artificial Sequence
  Description of Artificial Sequence: Synthetic oligonucleotide
  Antisense strand to SEQ ID NO: 2468248
auuaaucaccagcuaaggu

SEQ ID NO: 2468250 - RNA, 19 nt, Artificial Sequence
  Description of Artificial Sequence: Synthetic oligonucleotide
  Sense strand starting at position 2607 of SEQ ID NO: 1887384
uaguuaggaaaguguuaga

SEQ ID NO: 2468251 - RNA, 19 nt, Artificial Sequence
  Description of Artificial Sequence: Synthetic oligonucleotide
  Antisense strand to SEQ ID NO: 2468250
ucuaacacuuuccuaacua

SEQ ID NO: 2468252 - RNA, 19 nt, Artificial Sequence
  Description of Artificial Sequence: Synthetic oligonucleotide
  Sense strand starting at position 2632 of SEQ ID NO: 1887384
aggcuaagacugggcuaaa

SEQ ID NO: 2468253 - RNA, 19 nt, Artificial Sequence
  Description of Artificial Sequence: Synthetic oligonucleotide
  Antisense strand to SEQ ID NO: 2468252
uuuagcccagucuuagccu

SEQ ID NO: 2468254 - RNA, 19 nt, Artificial Sequence
  Description of Artificial Sequence: Synthetic oligonucleotide
  Sense strand starting at position 2633 of SEQ ID NO: 1887384
ggcuaagacugggcuaaau

SEQ ID NO: 2468255 - RNA, 19 nt, Artificial Sequence
  Description of Artificial Sequence: Synthetic oligonucleotide
  Antisense strand to SEQ ID NO: 2468254
auuuagcccagucuuagcc

SEQ ID NO: 2468256 - RNA, 19 nt, Artificial Sequence
  Description of Artificial Sequence: Synthetic oligonucleotide
  Sense strand starting at position 2652 of SEQ ID NO: 1887384
cuauguuaugcagacagac

SEQ ID NO: 2468257 - RNA, 19 nt, Artificial Sequence
  Description of Artificial Sequence: Synthetic oligonucleotide
  Antisense strand to SEQ ID NO: 2468256
gucugucugcauaacauag

SEQ ID NO: 2468258 - RNA, 19 nt, Artificial Sequence
  Description of Artificial Sequence: Synthetic oligonucleotide
  Sense strand starting at position 2811 of SEQ ID NO: 1887384
aucaauuacuaggcugauu

SEQ ID NO: 2468259 - RNA, 19 nt, Artificial Sequence
  Description of Artificial Sequence: Synthetic oligonucleotide
  Antisense strand to SEQ ID NO: 2468258
aaucagccuaguaauugau

SEQ ID NO: 2468260 - RNA, 19 nt, Artificial Sequence
  Description of Artificial Sequence: Synthetic oligonucleotide
  Sense strand starting at position 2816 of SEQ ID NO: 1887384
uuacuaggcugauuacuga

SEQ ID NO: 2468261 - RNA, 19 nt, Artificial Sequence
  Description of Artificial Sequence: Synthetic oligonucleotide
  Antisense strand to SEQ ID NO: 2468260
ucaguaaucagccuaguaa

SEQ ID NO: 2468262 - RNA, 19 nt, Artificial Sequence
  Description of Artificial Sequence: Synthetic oligonucleotide
  Sense strand starting at position 2819 of SEQ ID NO: 1887384
cuaggcugauuacugaauu

SEQ ID NO: 2468263 - RNA, 19 nt, Artificial Sequence
  Description of Artificial Sequence: Synthetic oligonucleotide
  Antisense strand to SEQ ID NO: 2468262
aauucaguaaucagccuag

SEQ ID NO: 2468264 - RNA, 19 nt, Artificial Sequence
  Description of Artificial Sequence: Synthetic oligonucleotide
  Sense strand starting at position 2855 of SEQ ID NO: 1887384
uuccucuugcaucagugaa

SEQ ID NO: 2468265 - RNA, 19 nt, Artificial Sequence
  Description of Artificial Sequence: Synthetic oligonucleotide
  Antisense strand to SEQ ID NO: 2468264
uucacugaugcaagaggaa

SEQ ID NO: 2468266 - RNA, 19 nt, Artificial Sequence
  Description of Artificial Sequence: Synthetic oligonucleotide
  Sense strand starting at position 2992 of SEQ ID NO: 1887384
cugagaggugucuaaaguc

SEQ ID NO: 2468267 - RNA, 19 nt, Artificial Sequence
  Description of Artificial Sequence: Synthetic oligonucleotide
  Antisense strand to SEQ ID NO: 2468266
gacuuuagacaccucucag

SEQ ID NO: 2468268 - RNA, 19 nt, Artificial Sequence
  Description of Artificial Sequence: Synthetic oligonucleotide
  Sense strand starting at position 3004 of SEQ ID NO: 1887384
uaaagucaggaguagguuu

SEQ ID NO: 2468269 - RNA, 19 nt, Artificial Sequence
  Description of Artificial Sequence: Synthetic oligonucleotide
  Antisense strand to SEQ ID NO: 2468268
aaaccuacuccugacuuua

SEQ ID NO: 2468270 - RNA, 19 nt, Artificial Sequence
  Description of Artificial Sequence: Synthetic oligonucleotide
  Sense strand starting at position 3066 of SEQ ID NO: 1887384
ugaaguaggacauguuuaa

SEQ ID NO: 2468271 - RNA, 19 nt, Artificial Sequence
  Description of Artificial Sequence: Synthetic oligonucleotide
  Antisense strand to SEQ ID NO: 2468270
uuaaacauguccuacuuca

SEQ ID NO: 2468272 - RNA, 19 nt, Artificial Sequence
  Description of Artificial Sequence: Synthetic oligonucleotide
  Sense strand starting at position 3186 of SEQ ID NO: 1887384
guccuaggcauugaagaca

SEQ ID NO: 2468273 - RNA, 19 nt, Artificial Sequence
  Description of Artificial Sequence: Synthetic oligonucleotide
  Antisense strand to SEQ ID NO: 2468272
ugucuucaaugccuaggac

SEQ ID NO: 2468274 - RNA, 19 nt, Artificial Sequence
  Description of Artificial Sequence: Synthetic oligonucleotide
  Sense strand starting at position 3251 of SEQ ID NO: 1887384
acuggcucgcauuauauuu

SEQ ID NO: 2468275 - RNA, 19 nt, Artificial Sequence
  Description of Artificial Sequence: Synthetic oligonucleotide
  Antisense strand to SEQ ID NO: 2468274
aaauauaaugcgagccagu

SEQ ID NO: 2468276 - RNA, 19 nt, Artificial Sequence
  Description of Artificial Sequence: Synthetic oligonucleotide
  Sense strand starting at position 3342 of SEQ ID NO: 1887384
uggaaagccucaccugaau

SEQ ID NO: 2468277 - RNA, 19 nt, Artificial Sequence
  Description of Artificial Sequence: Synthetic oligonucleotide
  Antisense strand to SEQ ID NO: 2468276
auucaggugaggcuuucca

SEQ ID NO: 2468278 - RNA, 19 nt, Artificial Sequence
  Description of Artificial Sequence: Synthetic oligonucleotide
  Sense strand starting at position 3406 of SEQ ID NO: 1887384
agaugccucuguccaaaga

SEQ ID NO: 2468279 - RNA, 19 nt, Artificial Sequence
  Description of Artificial Sequence: Synthetic oligonucleotide
  Antisense strand to SEQ ID NO: 2468278
ucuuuggacagaggcaucu

SEQ ID NO: 2468280 - RNA, 19 nt, Artificial Sequence
  Description of Artificial Sequence: Synthetic oligonucleotide
  Sense strand starting at position 3407 of SEQ ID NO: 1887384
gaugccucuguccaaagaa

SEQ ID NO: 2468281 - RNA, 19 nt, Artificial Sequence
  Description of Artificial Sequence: Synthetic oligonucleotide
  Antisense strand to SEQ ID NO: 2468280
uucuuuggacagaggcauc

SEQ ID NO: 2468282 - RNA, 19 nt, Artificial Sequence
  Description of Artificial Sequence: Synthetic oligonucleotide
  Sense strand starting at position 3564 of SEQ ID NO: 1887384
uggcaaaggcucuaauuga

SEQ ID NO: 2468283 - RNA, 19 nt, Artificial Sequence
  Description of Artificial Sequence: Synthetic oligonucleotide
  Antisense strand to SEQ ID NO: 2468282
ucaauuagagccuuugcca

SEQ ID NO: 2468284 - RNA, 19 nt, Artificial Sequence
  Description of Artificial Sequence: Synthetic oligonucleotide
  Sense strand starting at position 3572 of SEQ ID NO: 1887384
gcucuaauugaacaggcau

SEQ ID NO: 2468285 - RNA, 19 nt, Artificial Sequence
  Description of Artificial Sequence: Synthetic oligonucleotide
  Antisense strand to SEQ ID NO: 2468284
augccuguucaauuagagc

SEQ ID NO: 2468286 - RNA, 19 nt, Artificial Sequence
  Description of Artificial Sequence: Synthetic oligonucleotide
  Sense strand starting at position 3587 of SEQ ID NO: 1887384
gcauuaauagagggcucua

SEQ ID NO: 2468287 - RNA, 19 nt, Artificial Sequence
  Description of Artificial Sequence: Synthetic oligonucleotide
  Antisense strand to SEQ ID NO: 2468286
uagagcccucuauuaaugc

SEQ ID NO: 2468288 - RNA, 19 nt, Artificial Sequence
  Description of Artificial Sequence: Synthetic oligonucleotide
  Sense strand starting at position 3592 of SEQ ID NO: 1887384
aauagagggcucuacuguu

SEQ ID NO: 2468289 - RNA, 19 nt, Artificial Sequence
  Description of Artificial Sequence: Synthetic oligonucleotide
  Antisense strand to SEQ ID NO: 2468288
aacaguagagcccucuauu

SEQ ID NO: 2468290 - RNA, 19 nt, Artificial Sequence
  Description of Artificial Sequence: Synthetic oligonucleotide
  Sense strand starting at position 3931 of SEQ ID NO: 1887384
aauucugugcgauacaauu

SEQ ID NO: 2468291 - RNA, 19 nt, Artificial Sequence
  Description of Artificial Sequence: Synthetic oligonucleotide
  Antisense strand to SEQ ID NO: 2468290
aauuguaucgcacagaauu

SEQ ID NO: 2468292 - RNA, 19 nt, Artificial Sequence
  Description of Artificial Sequence: Synthetic oligonucleotide
  Sense strand starting at position 3933 of SEQ ID NO: 1887384
uucugugcgauacaauuga

SEQ ID NO: 2468293 - RNA, 19 nt, Artificial Sequence
  Description of Artificial Sequence: Synthetic oligonucleotide
  Antisense strand to SEQ ID NO: 2468292
ucaauuguaucgcacagaa

SEQ ID NO: 2468294 - RNA, 19 nt, Artificial Sequence
  Description of Artificial Sequence: Synthetic oligonucleotide
  Sense strand starting at position 194 of SEQ ID NO: 1887385
gccuuauacuuaguaaaga

SEQ ID NO: 2468295 - RNA, 19 nt, Artificial Sequence
  Description of Artificial Sequence: Synthetic oligonucleotide
  Antisense strand to SEQ ID NO: 2468294
ucuuuacuaaguauaaggc

SEQ ID NO: 2468296 - RNA, 19 nt, Artificial Sequence
  Description of Artificial Sequence: Synthetic oligonucleotide
  Sense strand starting at position 255 of SEQ ID NO: 1887385
agacucagauaguuucuuu

SEQ ID NO: 2468297 - RNA, 19 nt, Artificial Sequence
  Description of Artificial Sequence: Synthetic oligonucleotide
  Antisense strand to SEQ ID NO: 2468296
aaagaaacuaucugagucu

SEQ ID NO: 2468298 - RNA, 19 nt, Artificial Sequence
  Description of Artificial Sequence: Synthetic oligonucleotide
  Sense strand starting at position 345 of SEQ ID NO: 1887385
agagaacacugucugaauc

SEQ ID NO: 2468299 - RNA, 19 nt, Artificial Sequence
  Description of Artificial Sequence: Synthetic oligonucleotide
  Antisense strand to SEQ ID NO: 2468298
gauucagacaguguucucu

SEQ ID NO: 2468300 - RNA, 19 nt, Artificial Sequence
  Description of Artificial Sequence: Synthetic oligonucleotide
  Sense strand starting at position 346 of SEQ ID NO: 1887385
gagaacacugucugaauca

SEQ ID NO: 2468301 - RNA, 19 nt, Artificial Sequence
  Description of Artificial Sequence: Synthetic oligonucleotide
  Antisense strand to SEQ ID NO: 2468300
ugauucagacaguguucuc

SEQ ID NO: 2468302 - RNA, 19 nt, Artificial Sequence
  Description of Artificial Sequence: Synthetic oligonucleotide
  Sense strand starting at position 507 of SEQ ID NO: 1887385
ugaagaaguagguguauca

SEQ ID NO: 2468303 - RNA, 19 nt, Artificial Sequence
  Description of Artificial Sequence: Synthetic oligonucleotide
  Antisense strand to SEQ ID NO: 2468302
ugauacaccuacuucuuca

SEQ ID NO: 2468304 - RNA, 19 nt, Artificial Sequence
  Description of Artificial Sequence: Synthetic oligonucleotide
  Sense strand starting at position 517 of SEQ ID NO: 1887385
gguguaucacaagagugca

SEQ ID NO: 2468305 - RNA, 19 nt, Artificial Sequence
  Description of Artificial Sequence: Synthetic oligonucleotide
  Antisense strand to SEQ ID NO: 2468304
ugcacucuugugauacacc

SEQ ID NO: 2468306 - RNA, 19 nt, Artificial Sequence
  Description of Artificial Sequence: Synthetic oligonucleotide
  Sense strand starting at position 525 of SEQ ID NO: 1887385
acaagagugcaauguugau

SEQ ID NO: 2468307 - RNA, 19 nt, Artificial Sequence
  Description of Artificial Sequence: Synthetic oligonucleotide
  Antisense strand to SEQ ID NO: 2468306
aucaacauugcacucuugu

SEQ ID NO: 2468308 - RNA, 19 nt, Artificial Sequence
  Description of Artificial Sequence: Synthetic oligonucleotide
  Sense strand starting at position 743 of SEQ ID NO: 1887385
ggagguccuaggcaguaaa

SEQ ID NO: 2468309 - RNA, 19 nt, Artificial Sequence
  Description of Artificial Sequence: Synthetic oligonucleotide
  Antisense strand to SEQ ID NO: 2468308
uuuacugccuaggaccucc

SEQ ID NO: 2468310 - RNA, 19 nt, Artificial Sequence
  Description of Artificial Sequence: Synthetic oligonucleotide
  Sense strand starting at position 812 of SEQ ID NO: 1887385
acucccuuuguguauaaau

SEQ ID NO: 2468311 - RNA, 19 nt, Artificial Sequence
  Description of Artificial Sequence: Synthetic oligonucleotide
  Antisense strand to SEQ ID NO: 2468310
auuuauacacaaagggagu

SEQ ID NO: 2468312 - RNA, 19 nt, Artificial Sequence
  Description of Artificial Sequence: Synthetic oligonucleotide
  Sense strand starting at position 814 of SEQ ID NO: 1887385
ucccuuuguguauaaauga

SEQ ID NO: 2468313 - RNA, 19 nt, Artificial Sequence
  Description of Artificial Sequence: Synthetic oligonucleotide
  Antisense strand to SEQ ID NO: 2468312
ucauuuauacacaaaggga

SEQ ID NO: 2468314 - RNA, 19 nt, Artificial Sequence
  Description of Artificial Sequence: Synthetic oligonucleotide
  Sense strand starting at position 831 of SEQ ID NO: 1887385
gacaucauuguuugcaaag

SEQ ID NO: 2468315 - RNA, 19 nt, Artificial Sequence
  Description of Artificial Sequence: Synthetic oligonucleotide
  Antisense strand to SEQ ID NO: 2468314
cuuugcaaacaaugauguc

SEQ ID NO: 2468316 - RNA, 19 nt, Artificial Sequence
  Description of Artificial Sequence: Synthetic oligonucleotide
  Sense strand starting at position 832 of SEQ ID NO: 1887385
acaucauuguuugcaaaga

SEQ ID NO: 2468317 - RNA, 19 nt, Artificial Sequence
  Description of Artificial Sequence: Synthetic oligonucleotide
  Antisense strand to SEQ ID NO: 2468316
ucuuugcaaacaaugaugu

SEQ ID NO: 2468318 - RNA, 19 nt, Artificial Sequence
  Description of Artificial Sequence: Synthetic oligonucleotide
  Sense strand starting at position 1124 of SEQ ID NO: 1887385
gucuccucagauugaucua

SEQ ID NO: 2468319 - RNA, 19 nt, Artificial Sequence
  Description of Artificial Sequence: Synthetic oligonucleotide
  Antisense strand to SEQ ID NO: 2468318
uagaucaaucugaggagac

SEQ ID NO: 2468320 - RNA, 19 nt, Artificial Sequence
  Description of Artificial Sequence: Synthetic oligonucleotide
  Sense strand starting at position 1151 of SEQ ID NO: 1887385
augcaaucugacugauaau

SEQ ID NO: 2468321 - RNA, 19 nt, Artificial Sequence
  Description of Artificial Sequence: Synthetic oligonucleotide
  Antisense strand to SEQ ID NO: 2468320
auuaucagucagauugcau

SEQ ID NO: 2468322 - RNA, 19 nt, Artificial Sequence
  Description of Artificial Sequence: Synthetic oligonucleotide
  Sense strand starting at position 1161 of SEQ ID NO: 1887385
acugauaauuaggucaagu

SEQ ID NO: 2468323 - RNA, 19 nt, Artificial Sequence
  Description of Artificial Sequence: Synthetic oligonucleotide
  Antisense strand to SEQ ID NO: 2468322
acuugaccuaauuaucagu

SEQ ID NO: 2468324 - RNA, 19 nt, Artificial Sequence
  Description of Artificial Sequence: Synthetic oligonucleotide
  Sense strand starting at position 1163 of SEQ ID NO: 1887385
ugauaauuaggucaaguuu

SEQ ID NO: 2468325 - RNA, 19 nt, Artificial Sequence
  Description of Artificial Sequence: Synthetic oligonucleotide
  Antisense strand to SEQ ID NO: 2468324
aaacuugaccuaauuauca

SEQ ID NO: 2468326 - RNA, 19 nt, Artificial Sequence
  Description of Artificial Sequence: Synthetic oligonucleotide
  Sense strand starting at position 1203 of SEQ ID NO: 1887385
uucugacauuuauauggaa

SEQ ID NO: 2468327 - RNA, 19 nt, Artificial Sequence
  Description of Artificial Sequence: Synthetic oligonucleotide
  Antisense strand to SEQ ID NO: 2468326
uuccauauaaaugucagaa

SEQ ID NO: 2468328 - RNA, 19 nt, Artificial Sequence
  Description of Artificial Sequence: Synthetic oligonucleotide
  Sense strand starting at position 1230 of SEQ ID NO: 1887385
guccuaggaucucuaaauu

SEQ ID NO: 2468329 - RNA, 19 nt, Artificial Sequence
  Description of Artificial Sequence: Synthetic oligonucleotide
  Antisense strand to SEQ ID NO: 2468328
aauuuagagauccuaggac

SEQ ID NO: 2468330 - RNA, 19 nt, Artificial Sequence
  Description of Artificial Sequence: Synthetic oligonucleotide
  Sense strand starting at position 1383 of SEQ ID NO: 1887385
ccuauaagguuacuuaaug

SEQ ID NO: 2468331 - RNA, 19 nt, Artificial Sequence
  Description of Artificial Sequence: Synthetic oligonucleotide
  Antisense strand to SEQ ID NO: 2468330
cauuaaguaaccuuauagg

SEQ ID NO: 2468332 - RNA, 19 nt, Artificial Sequence
  Description of Artificial Sequence: Synthetic oligonucleotide
  Sense strand starting at position 1384 of SEQ ID NO: 1887385
cuauaagguuacuuaauga

SEQ ID NO: 2468333 - RNA, 19 nt, Artificial Sequence
  Description of Artificial Sequence: Synthetic oligonucleotide
  Antisense strand to SEQ ID NO: 2468332
ucauuaaguaaccuuauag

SEQ ID NO: 2468334 - RNA, 19 nt, Artificial Sequence
  Description of Artificial Sequence: Synthetic oligonucleotide
  Sense strand starting at position 1391 of SEQ ID NO: 1887385
guuacuuaaugacugacaa

SEQ ID NO: 2468335 - RNA, 19 nt, Artificial Sequence
  Description of Artificial Sequence: Synthetic oligonucleotide
  Antisense strand to SEQ ID NO: 2468334
uugucagucauuaaguaac

SEQ ID NO: 2468336 - RNA, 19 nt, Artificial Sequence
  Description of Artificial Sequence: Synthetic oligonucleotide
  Sense strand starting at position 1638 of SEQ ID NO: 1887385
ggacauguggcucaucauc

SEQ ID NO: 2468337 - RNA, 19 nt, Artificial Sequence
  Description of Artificial Sequence: Synthetic oligonucleotide
  Antisense strand to SEQ ID NO: 2468336
gaugaugagccacaugucc

SEQ ID NO: 2468338 - RNA, 19 nt, Artificial Sequence
  Description of Artificial Sequence: Synthetic oligonucleotide
  Sense strand starting at position 2110 of SEQ ID NO: 1887385
guggaucuacacuguagau

SEQ ID NO: 2468339 - RNA, 19 nt, Artificial Sequence
  Description of Artificial Sequence: Synthetic oligonucleotide
  Antisense strand to SEQ ID NO: 2468338
aucuacaguguagauccac

SEQ ID NO: 2468340 - RNA, 19 nt, Artificial Sequence
  Description of Artificial Sequence: Synthetic oligonucleotide
  Sense strand starting at position 2136 of SEQ ID NO: 1887385
gccuaugggucauuuagua

SEQ ID NO: 2468341 - RNA, 19 nt, Artificial Sequence
  Description of Artificial Sequence: Synthetic oligonucleotide
  Antisense strand to SEQ ID NO: 2468340
uacuaaaugacccauaggc

SEQ ID NO: 2468342 - RNA, 19 nt, Artificial Sequence
  Description of Artificial Sequence: Synthetic oligonucleotide
  Sense strand starting at position 2482 of SEQ ID NO: 1887385
agcagauaagcaggguaua

SEQ ID NO: 2468343 - RNA, 19 nt, Artificial Sequence
  Description of Artificial Sequence: Synthetic oligonucleotide
  Antisense strand to SEQ ID NO: 2468342
uauacccugcuuaucugcu

SEQ ID NO: 2468344 - RNA, 19 nt, Artificial Sequence
  Description of Artificial Sequence: Synthetic oligonucleotide
  Sense strand starting at position 2573 of SEQ ID NO: 1887385
augauaugccagcaucacu

SEQ ID NO: 2468345 - RNA, 19 nt, Artificial Sequence
  Description of Artificial Sequence: Synthetic oligonucleotide
  Antisense strand to SEQ ID NO: 2468344
agugaugcuggcauaucau

SEQ ID NO: 2468346 - RNA, 19 nt, Artificial Sequence
  Description of Artificial Sequence: Synthetic oligonucleotide
  Sense strand starting at position 2584 of SEQ ID NO: 1887385
gcaucacuuguccaugaca

SEQ ID NO: 2468347 - RNA, 19 nt, Artificial Sequence
  Description of Artificial Sequence: Synthetic oligonucleotide
  Antisense strand to SEQ ID NO: 2468346
ugucauggacaagugaugc

SEQ ID NO: 2468348 - RNA, 19 nt, Artificial Sequence
  Description of Artificial Sequence: Synthetic oligonucleotide
  Sense strand starting at position 2586 of SEQ ID NO: 1887385
aucacuuguccaugacaag

SEQ ID NO: 2468349 - RNA, 19 nt, Artificial Sequence
  Description of Artificial Sequence: Synthetic oligonucleotide
  Antisense strand to SEQ ID NO: 2468348
cuugucauggacaagugau

SEQ ID NO: 2468350 - RNA, 19 nt, Artificial Sequence
  Description of Artificial Sequence: Synthetic oligonucleotide
  Sense strand starting at position 2828 of SEQ ID NO: 1887385
caguauaucacguagugag

SEQ ID NO: 2468351 - RNA, 19 nt, Artificial Sequence
  Description of Artificial Sequence: Synthetic oligonucleotide
  Antisense strand to SEQ ID NO: 2468350
cucacuacgugauauacug

SEQ ID NO: 2468352 - RNA, 19 nt, Artificial Sequence
  Description of Artificial Sequence: Synthetic oligonucleotide
  Sense strand starting at position 2891 of SEQ ID NO: 1887385
accagaucuugggcgaauu

SEQ ID NO: 2468353 - RNA, 19 nt, Artificial Sequence
  Description of Artificial Sequence: Synthetic oligonucleotide
  Antisense strand to SEQ ID NO: 2468352
aauucgcccaagaucuggu

SEQ ID NO: 2468354 - RNA, 19 nt, Artificial Sequence
  Description of Artificial Sequence: Synthetic oligonucleotide
  Sense strand starting at position 2902 of SEQ ID NO: 1887385
ggcgaauugguagagcaag

SEQ ID NO: 2468355 - RNA, 19 nt, Artificial Sequence
  Description of Artificial Sequence: Synthetic oligonucleotide
  Antisense strand to SEQ ID NO: 2468354
cuugcucuaccaauucgcc

SEQ ID NO: 2468356 - RNA, 19 nt, Artificial Sequence
  Description of Artificial Sequence: Synthetic oligonucleotide
  Sense strand starting at position 2925 of SEQ ID NO: 1887385
cccucauuacugcaaggau

SEQ ID NO: 2468357 - RNA, 19 nt, Artificial Sequence
  Description of Artificial Sequence: Synthetic oligonucleotide
  Antisense strand to SEQ ID NO: 2468356
auccuugcaguaaugaggg

SEQ ID NO: 2468358 - RNA, 19 nt, Artificial Sequence
  Description of Artificial Sequence: Synthetic oligonucleotide
  Sense strand starting at position 3131 of SEQ ID NO: 1887385
cuggcaguccucuauuaau

SEQ ID NO: 2468359 - RNA, 19 nt, Artificial Sequence
  Description of Artificial Sequence: Synthetic oligonucleotide
  Antisense strand to SEQ ID NO: 2468358
auuaauagaggacugccag

SEQ ID NO: 2468360 - RNA, 19 nt, Artificial Sequence
  Description of Artificial Sequence: Synthetic oligonucleotide
  Sense strand starting at position 3299 of SEQ ID NO: 1887385
guauaauugcuuuaagggu

SEQ ID NO: 2468361 - RNA, 19 nt, Artificial Sequence
  Description of Artificial Sequence: Synthetic oligonucleotide
  Antisense strand to SEQ ID NO: 2468360
acccuuaaagcaauuauac

SEQ ID NO: 2468362 - RNA, 19 nt, Artificial Sequence
  Description of Artificial Sequence: Synthetic oligonucleotide
  Sense strand starting at position 3487 of SEQ ID NO: 1887385
auguaauugcaggaagcuu

SEQ ID NO: 2468363 - RNA, 19 nt, Artificial Sequence
  Description of Artificial Sequence: Synthetic oligonucleotide
  Antisense strand to SEQ ID NO: 2468362
aagcuuccugcaauuacau

SEQ ID NO: 2468364 - RNA, 19 nt, Artificial Sequence
  Description of Artificial Sequence: Synthetic oligonucleotide
  Sense strand starting at position 3545 of SEQ ID NO: 1887385
ugucuaaaggcuuaccaga

SEQ ID NO: 2468365 - RNA, 19 nt, Artificial Sequence
  Description of Artificial Sequence: Synthetic oligonucleotide
  Antisense strand to SEQ ID NO: 2468364
ucugguaagccuuuagaca

SEQ ID NO: 2468366 - RNA, 19 nt, Artificial Sequence
  Description of Artificial Sequence: Synthetic oligonucleotide
  Sense strand starting at position 3547 of SEQ ID NO: 1887385
ucuaaaggcuuaccagaaa

SEQ ID NO: 2468367 - RNA, 19 nt, Artificial Sequence
  Description of Artificial Sequence: Synthetic oligonucleotide
  Antisense strand to SEQ ID NO: 2468366
uuucugguaagccuuuaga

SEQ ID NO: 2468368 - RNA, 19 nt, Artificial Sequence
  Description of Artificial Sequence: Synthetic oligonucleotide
  Sense strand starting at position 3630 of SEQ ID NO: 1887385
uaauuauaugugcagaguu

SEQ ID NO: 2468369 - RNA, 19 nt, Artificial Sequence
  Description of Artificial Sequence: Synthetic oligonucleotide
  Antisense strand to SEQ ID NO: 2468368
aacucugcacauauaauua

SEQ ID NO: 2468370 - RNA, 19 nt, Artificial Sequence
  Description of Artificial Sequence: Synthetic oligonucleotide
  Sense strand starting at position 3688 of SEQ ID NO: 1887385
uugucaauggagugagaau

SEQ ID NO: 2468371 - RNA, 19 nt, Artificial Sequence
  Description of Artificial Sequence: Synthetic oligonucleotide
  Antisense strand to SEQ ID NO: 2468370
auucucacuccauugacaa

SEQ ID NO: 2468372 - RNA, 19 nt, Artificial Sequence
  Description of Artificial Sequence: Synthetic oligonucleotide
  Sense strand starting at position 3976 of SEQ ID NO: 1887385
aagagaaguuaagacagaa

SEQ ID NO: 2468373 - RNA, 19 nt, Artificial Sequence
  Description of Artificial Sequence: Synthetic oligonucleotide
  Antisense strand to SEQ ID NO: 2468372
uucugucuuaacuucucuu

SEQ ID NO: 2468374 - RNA, 19 nt, Artificial Sequence
  Description of Artificial Sequence: Synthetic oligonucleotide
  Sense strand starting at position 98 of SEQ ID NO: 1887386
aaauccuaguaggugauua

SEQ ID NO: 2468375 - RNA, 19 nt, Artificial Sequence
  Description of Artificial Sequence: Synthetic oligonucleotide
  Antisense strand to SEQ ID NO: 2468374
uaaucaccuacuaggauuu

SEQ ID NO: 2468376 - RNA, 19 nt, Artificial Sequence
  Description of Artificial Sequence: Synthetic oligonucleotide
  Sense strand starting at position 502 of SEQ ID NO: 1887386
cucuauugguuuccugacu

SEQ ID NO: 2468377 - RNA, 19 nt, Artificial Sequence
  Description of Artificial Sequence: Synthetic oligonucleotide
  Antisense strand to SEQ ID NO: 2468376
agucaggaaaccaauagag

SEQ ID NO: 2468378 - RNA, 19 nt, Artificial Sequence
  Description of Artificial Sequence: Synthetic oligonucleotide
  Sense strand starting at position 554 of SEQ ID NO: 1887386
cguagaccucccuaugguu

SEQ ID NO: 2468379 - RNA, 19 nt, Artificial Sequence
  Description of Artificial Sequence: Synthetic oligonucleotide
  Antisense strand to SEQ ID NO: 2468378
aaccauagggaggucuacg

SEQ ID NO: 2468380 - RNA, 19 nt, Artificial Sequence
  Description of Artificial Sequence: Synthetic oligonucleotide
  Sense strand starting at position 591 of SEQ ID NO: 1887386
ccgugugccacauagauuu

SEQ ID NO: 2468381 - RNA, 19 nt, Artificial Sequence
  Description of Artificial Sequence: Synthetic oligonucleotide
  Antisense strand to SEQ ID NO: 2468380
aaaucuauguggcacacgg

SEQ ID NO: 2468382 - RNA, 19 nt, Artificial Sequence
  Description of Artificial Sequence: Synthetic oligonucleotide
  Sense strand starting at position 816 of SEQ ID NO: 1887386
agguccuuaucccuacaua

SEQ ID NO: 2468383 - RNA, 19 nt, Artificial Sequence
  Description of Artificial Sequence: Synthetic oligonucleotide
  Antisense strand to SEQ ID NO: 2468382
uauguagggauaaggaccu

SEQ ID NO: 2468384 - RNA, 19 nt, Artificial Sequence
  Description of Artificial Sequence: Synthetic oligonucleotide
  Sense strand starting at position 1162 of SEQ ID NO: 1887386
gaggucuugcaucagcuau

SEQ ID NO: 2468385 - RNA, 19 nt, Artificial Sequence
  Description of Artificial Sequence: Synthetic oligonucleotide
  Antisense strand to SEQ ID NO: 2468384
auagcugaugcaagaccuc

SEQ ID NO: 2468386 - RNA, 19 nt, Artificial Sequence
  Description of Artificial Sequence: Synthetic oligonucleotide
  Sense strand starting at position 1372 of SEQ ID NO: 1887386
cugggucucagcugaaaug

SEQ ID NO: 2468387 - RNA, 19 nt, Artificial Sequence
  Description of Artificial Sequence: Synthetic oligonucleotide
  Antisense strand to SEQ ID NO: 2468386
cauuucagcugagacccag

SEQ ID NO: 2468388 - RNA, 19 nt, Artificial Sequence
  Description of Artificial Sequence: Synthetic oligonucleotide
  Sense strand starting at position 1373 of SEQ ID NO: 1887386
ugggucucagcugaaaugu

SEQ ID NO: 2468389 - RNA, 19 nt, Artificial Sequence
  Description of Artificial Sequence: Synthetic oligonucleotide
  Antisense strand to SEQ ID NO: 2468388
acauuucagcugagaccca

SEQ ID NO: 2468390 - RNA, 19 nt, Artificial Sequence
  Description of Artificial Sequence: Synthetic oligonucleotide
  Sense strand starting at position 1462 of SEQ ID NO: 1887386
caggaucuaugucuguuua

SEQ ID NO: 2468391 - RNA, 19 nt, Artificial Sequence
  Description of Artificial Sequence: Synthetic oligonucleotide
  Antisense strand to SEQ ID NO: 2468390
uaaacagacauagauccug

SEQ ID NO: 2468392 - RNA, 19 nt, Artificial Sequence
  Description of Artificial Sequence: Synthetic oligonucleotide
  Sense strand starting at position 1527 of SEQ ID NO: 1887386
auaugugcccagugaggau

SEQ ID NO: 2468393 - RNA, 19 nt, Artificial Sequence
  Description of Artificial Sequence: Synthetic oligonucleotide
  Antisense strand to SEQ ID NO: 2468392
auccucacugggcacauau

SEQ ID NO: 2468394 - RNA, 19 nt, Artificial Sequence
  Description of Artificial Sequence: Synthetic oligonucleotide
  Sense strand starting at position 1690 of SEQ ID NO: 1887386
gaugcagugcuccaacuau

SEQ ID NO: 2468395 - RNA, 19 nt, Artificial Sequence
  Description of Artificial Sequence: Synthetic oligonucleotide
  Antisense strand to SEQ ID NO: 2468394
auaguuggagcacugcauc

SEQ ID NO: 2468396 - RNA, 19 nt, Artificial Sequence
  Description of Artificial Sequence: Synthetic oligonucleotide
  Sense strand starting at position 1731 of SEQ ID NO: 1887386
cuggaauccuucucugaca

SEQ ID NO: 2468397 - RNA, 19 nt, Artificial Sequence
  Description of Artificial Sequence: Synthetic oligonucleotide
  Antisense strand to SEQ ID NO: 2468396
ugucagagaaggauuccag

SEQ ID NO: 2468398 - RNA, 19 nt, Artificial Sequence
  Description of Artificial Sequence: Synthetic oligonucleotide
  Sense strand starting at position 2131 of SEQ ID NO: 1887386
aaacuauccgagcaaggua

SEQ ID NO: 2468399 - RNA, 19 nt, Artificial Sequence
  Description of Artificial Sequence: Synthetic oligonucleotide
  Antisense strand to SEQ ID NO: 2468398
uaccuugcucggauaguuu

SEQ ID NO: 2468400 - RNA, 19 nt, Artificial Sequence
  Description of Artificial Sequence: Synthetic oligonucleotide
  Sense strand starting at position 2144 of SEQ ID NO: 1887386
aagguagucuaguuaaaca

SEQ ID NO: 2468401 - RNA, 19 nt, Artificial Sequence
  Description of Artificial Sequence: Synthetic oligonucleotide
  Antisense strand to SEQ ID NO: 2468400
uguuuaacuagacuaccuu

SEQ ID NO: 2468402 - RNA, 19 nt, Artificial Sequence
  Description of Artificial Sequence: Synthetic oligonucleotide
  Sense strand starting at position 2309 of SEQ ID NO: 1887386
uagaauugugcuugguaua

SEQ ID NO: 2468403 - RNA, 19 nt, Artificial Sequence
  Description of Artificial Sequence: Synthetic oligonucleotide
  Antisense strand to SEQ ID NO: 2468402
uauaccaagcacaauucua

SEQ ID NO: 2468404 - RNA, 19 nt, Artificial Sequence
  Description of Artificial Sequence: Synthetic oligonucleotide
  Sense strand starting at position 2310 of SEQ ID NO: 1887386
agaauugugcuugguauau

SEQ ID NO: 2468405 - RNA, 19 nt, Artificial Sequence
  Description of Artificial Sequence: Synthetic oligonucleotide
  Antisense strand to SEQ ID NO: 2468404
auauaccaagcacaauucu

SEQ ID NO: 2468406 - RNA, 19 nt, Artificial Sequence
  Description of Artificial Sequence: Synthetic oligonucleotide
  Sense strand starting at position 2319 of SEQ ID NO: 1887386
cuugguauauggccagaga

SEQ ID NO: 2468407 - RNA, 19 nt, Artificial Sequence
  Description of Artificial Sequence: Synthetic oligonucleotide
  Antisense strand to SEQ ID NO: 2468406
ucucuggccauauaccaag

SEQ ID NO: 2468408 - RNA, 19 nt, Artificial Sequence
  Description of Artificial Sequence: Synthetic oligonucleotide
  Sense strand starting at position 2320 of SEQ ID NO: 1887386
uugguauauggccagagau

SEQ ID NO: 2468409 - RNA, 19 nt, Artificial Sequence
  Description of Artificial Sequence: Synthetic oligonucleotide
  Antisense strand to SEQ ID NO: 2468408
aucucuggccauauaccaa

SEQ ID NO: 2468410 - RNA, 19 nt, Artificial Sequence
  Description of Artificial Sequence: Synthetic oligonucleotide
  Sense strand starting at position 2334 of SEQ ID NO: 1887386
gagauauucuaaguuguga

SEQ ID NO: 2468411 - RNA, 19 nt, Artificial Sequence
  Description of Artificial Sequence: Synthetic oligonucleotide
  Antisense strand to SEQ ID NO: 2468410
ucacaacuuagaauaucuc

SEQ ID NO: 2468412 - RNA, 19 nt, Artificial Sequence
  Description of Artificial Sequence: Synthetic oligonucleotide
  Sense strand starting at position 2530 of SEQ ID NO: 1887386
guccuuucucuccaggagu

SEQ ID NO: 2468413 - RNA, 19 nt, Artificial Sequence
  Description of Artificial Sequence: Synthetic oligonucleotide
  Antisense strand to SEQ ID NO: 2468412
acuccuggagagaaaggac

SEQ ID NO: 2468414 - RNA, 19 nt, Artificial Sequence
  Description of Artificial Sequence: Synthetic oligonucleotide
  Sense strand starting at position 2532 of SEQ ID NO: 1887386
ccuuucucuccaggaguau

SEQ ID NO: 2468415 - RNA, 19 nt, Artificial Sequence
  Description of Artificial Sequence: Synthetic oligonucleotide
  Antisense strand to SEQ ID NO: 2468414
auacuccuggagagaaagg

SEQ ID NO: 2468416 - RNA, 19 nt, Artificial Sequence
  Description of Artificial Sequence: Synthetic oligonucleotide
  Sense strand starting at position 2576 of SEQ ID NO: 1887386
cccagagguugcucaucaa

SEQ ID NO: 2468417 - RNA, 19 nt, Artificial Sequence
  Description of Artificial Sequence: Synthetic oligonucleotide
  Antisense strand to SEQ ID NO: 2468416
uugaugagcaaccucuggg

SEQ ID NO: 2468418 - RNA, 19 nt, Artificial Sequence
  Description of Artificial Sequence: Synthetic oligonucleotide
  Sense strand starting at position 2579 of SEQ ID NO: 1887386
agagguugcucaucaaagg

SEQ ID NO: 2468419 - RNA, 19 nt, Artificial Sequence
  Description of Artificial Sequence: Synthetic oligonucleotide
  Antisense strand to SEQ ID NO: 2468418
ccuuugaugagcaaccucu

SEQ ID NO: 2468420 - RNA, 19 nt, Artificial Sequence
  Description of Artificial Sequence: Synthetic oligonucleotide
  Sense strand starting at position 2688 of SEQ ID NO: 1887386
agaccauguuacccuuauu

SEQ ID NO: 2468421 - RNA, 19 nt, Artificial Sequence
  Description of Artificial Sequence: Synthetic oligonucleotide
  Antisense strand to SEQ ID NO: 2468420
aauaaggguaacauggucu

SEQ ID NO: 2468422 - RNA, 19 nt, Artificial Sequence
  Description of Artificial Sequence: Synthetic oligonucleotide
  Sense strand starting at position 2794 of SEQ ID NO: 1887386
ucaguucuguuacuugaga

SEQ ID NO: 2468423 - RNA, 19 nt, Artificial Sequence
  Description of Artificial Sequence: Synthetic oligonucleotide
  Antisense strand to SEQ ID NO: 2468422
ucucaaguaacagaacuga

SEQ ID NO: 2468424 - RNA, 19 nt, Artificial Sequence
  Description of Artificial Sequence: Synthetic oligonucleotide
  Sense strand starting at position 2801 of SEQ ID NO: 1887386
uguuacuugagacaguguu

SEQ ID NO: 2468425 - RNA, 19 nt, Artificial Sequence
  Description of Artificial Sequence: Synthetic oligonucleotide
  Antisense strand to SEQ ID NO: 2468424
aacacugucucaaguaaca

SEQ ID NO: 2468426 - RNA, 19 nt, Artificial Sequence
  Description of Artificial Sequence: Synthetic oligonucleotide
  Sense strand starting at position 2807 of SEQ ID NO: 1887386
uugagacaguguucccuuu

SEQ ID NO: 2468427 - RNA, 19 nt, Artificial Sequence
  Description of Artificial Sequence: Synthetic oligonucleotide
  Antisense strand to SEQ ID NO: 2468426
aaagggaacacugucucaa

SEQ ID NO: 2468428 - RNA, 19 nt, Artificial Sequence
  Description of Artificial Sequence: Synthetic oligonucleotide
  Sense strand starting at position 2907 of SEQ ID NO: 1887386
aggccucuccacuaugaca

SEQ ID NO: 2468429 - RNA, 19 nt, Artificial Sequence
  Description of Artificial Sequence: Synthetic oligonucleotide
  Antisense strand to SEQ ID NO: 2468428
ugucauaguggagaggccu

SEQ ID NO: 2468430 - RNA, 19 nt, Artificial Sequence
  Description of Artificial Sequence: Synthetic oligonucleotide
  Sense strand starting at position 2968 of SEQ ID NO: 1887386
gggacuuguaaauguuagu

SEQ ID NO: 2468431 - RNA, 19 nt, Artificial Sequence
  Description of Artificial Sequence: Synthetic oligonucleotide
  Antisense strand to SEQ ID NO: 2468430
acuaacauuuacaaguccc

SEQ ID NO: 2468432 - RNA, 19 nt, Artificial Sequence
  Description of Artificial Sequence: Synthetic oligonucleotide
  Sense strand starting at position 2982 of SEQ ID NO: 1887386
uuaguaaaguguuuacuga

SEQ ID NO: 2468433 - RNA, 19 nt, Artificial Sequence
  Description of Artificial Sequence: Synthetic oligonucleotide
  Antisense strand to SEQ ID NO: 2468432
ucaguaaacacuuuacuaa

SEQ ID NO: 2468434 - RNA, 19 nt, Artificial Sequence
  Description of Artificial Sequence: Synthetic oligonucleotide
  Sense strand starting at position 2983 of SEQ ID NO: 1887386
uaguaaaguguuuacugau

SEQ ID NO: 2468435 - RNA, 19 nt, Artificial Sequence
  Description of Artificial Sequence: Synthetic oligonucleotide
  Antisense strand to SEQ ID NO: 2468434
aucaguaaacacuuuacua

SEQ ID NO: 2468436 - RNA, 19 nt, Artificial Sequence
  Description of Artificial Sequence: Synthetic oligonucleotide
  Sense strand starting at position 3098 of SEQ ID NO: 1887386
acauaauguguagauucca

SEQ ID NO: 2468437 - RNA, 19 nt, Artificial Sequence
  Description of Artificial Sequence: Synthetic oligonucleotide
  Antisense strand to SEQ ID NO: 2468436
uggaaucuacacauuaugu

SEQ ID NO: 2468438 - RNA, 19 nt, Artificial Sequence
  Description of Artificial Sequence: Synthetic oligonucleotide
  Sense strand starting at position 3280 of SEQ ID NO: 1887386
cccauagaaguuuguccua

SEQ ID NO: 2468439 - RNA, 19 nt, Artificial Sequence
  Description of Artificial Sequence: Synthetic oligonucleotide
  Antisense strand to SEQ ID NO: 2468438
uaggacaaacuucuauggg

SEQ ID NO: 2468440 - RNA, 19 nt, Artificial Sequence
  Description of Artificial Sequence: Synthetic oligonucleotide
  Sense strand starting at position 3283 of SEQ ID NO: 1887386
auagaaguuuguccuauac

SEQ ID NO: 2468441 - RNA, 19 nt, Artificial Sequence
  Description of Artificial Sequence: Synthetic oligonucleotide
  Antisense strand to SEQ ID NO: 2468440
guauaggacaaacuucuau

SEQ ID NO: 2468442 - RNA, 19 nt, Artificial Sequence
  Description of Artificial Sequence: Synthetic oligonucleotide
  Sense strand starting at position 3379 of SEQ ID NO: 1887386
guucucuaacauuagaagu

SEQ ID NO: 2468443 - RNA, 19 nt, Artificial Sequence
  Description of Artificial Sequence: Synthetic oligonucleotide
  Antisense strand to SEQ ID NO: 2468442
acuucuaauguuagagaac

SEQ ID NO: 2468444 - RNA, 19 nt, Artificial Sequence
  Description of Artificial Sequence: Synthetic oligonucleotide
  Sense strand starting at position 3605 of SEQ ID NO: 1887386
cauugaaggugucccuaca

SEQ ID NO: 2468445 - RNA, 19 nt, Artificial Sequence
  Description of Artificial Sequence: Synthetic oligonucleotide
  Antisense strand to SEQ ID NO: 2468444
uguagggacaccuucaaug

SEQ ID NO: 2468446 - RNA, 19 nt, Artificial Sequence
  Description of Artificial Sequence: Synthetic oligonucleotide
  Sense strand starting at position 3659 of SEQ ID NO: 1887386
auggcuaaucacuagucua

SEQ ID NO: 2468447 - RNA, 19 nt, Artificial Sequence
  Description of Artificial Sequence: Synthetic oligonucleotide
  Antisense strand to SEQ ID NO: 2468446
uagacuagugauuagccau

SEQ ID NO: 2468448 - RNA, 19 nt, Artificial Sequence
  Description of Artificial Sequence: Synthetic oligonucleotide
  Sense strand starting at position 3721 of SEQ ID NO: 1887386
gucaaagucuaguuccuag

SEQ ID NO: 2468449 - RNA, 19 nt, Artificial Sequence
  Description of Artificial Sequence: Synthetic oligonucleotide
  Antisense strand to SEQ ID NO: 2468448
cuaggaacuagacuuugac

SEQ ID NO: 2468450 - RNA, 19 nt, Artificial Sequence
  Description of Artificial Sequence: Synthetic oligonucleotide
  Sense strand starting at position 3756 of SEQ ID NO: 1887386
caccuaguccaugaggagu

SEQ ID NO: 2468451 - RNA, 19 nt, Artificial Sequence
  Description of Artificial Sequence: Synthetic oligonucleotide
  Antisense strand to SEQ ID NO: 2468450
acuccucauggacuaggug

SEQ ID NO: 2468452 - RNA, 19 nt, Artificial Sequence
  Description of Artificial Sequence: Synthetic oligonucleotide
  Sense strand starting at position 3812 of SEQ ID NO: 1887386
guagcaauuugacagauaa

SEQ ID NO: 2468453 - RNA, 19 nt, Artificial Sequence
  Description of Artificial Sequence: Synthetic oligonucleotide
  Antisense strand to SEQ ID NO: 2468452
uuaucugucaaauugcuac

SEQ ID NO: 2468454 - RNA, 19 nt, Artificial Sequence
  Description of Artificial Sequence: Synthetic oligonucleotide
  Sense strand starting at position 39 of SEQ ID NO: 1887387
gagucuaaguuucuagaau

SEQ ID NO: 2468455 - RNA, 19 nt, Artificial Sequence
  Description of Artificial Sequence: Synthetic oligonucleotide
  Antisense strand to SEQ ID NO: 2468454
auucuagaaacuuagacuc

SEQ ID NO: 2468456 - RNA, 19 nt, Artificial Sequence
  Description of Artificial Sequence: Synthetic oligonucleotide
  Sense strand starting at position 47 of SEQ ID NO: 1887387
guuucuagaauaggaguca

SEQ ID NO: 2468457 - RNA, 19 nt, Artificial Sequence
  Description of Artificial Sequence: Synthetic oligonucleotide
  Antisense strand to SEQ ID NO: 2468456
ugacuccuauucuagaaac

SEQ ID NO: 2468458 - RNA, 19 nt, Artificial Sequence
  Description of Artificial Sequence: Synthetic oligonucleotide
  Sense strand starting at position 228 of SEQ ID NO: 1887387
gccaguuggauucgauuua

SEQ ID NO: 2468459 - RNA, 19 nt, Artificial Sequence
  Description of Artificial Sequence: Synthetic oligonucleotide
  Antisense strand to SEQ ID NO: 2468458
uaaaucgaauccaacuggc

SEQ ID NO: 2468460 - RNA, 19 nt, Artificial Sequence
  Description of Artificial Sequence: Synthetic oligonucleotide
  Sense strand starting at position 240 of SEQ ID NO: 1887387
cgauuuacaggcugcaauu

SEQ ID NO: 2468461 - RNA, 19 nt, Artificial Sequence
  Description of Artificial Sequence: Synthetic oligonucleotide
  Antisense strand to SEQ ID NO: 2468460
aauugcagccuguaaaucg

SEQ ID NO: 2468462 - RNA, 19 nt, Artificial Sequence
  Description of Artificial Sequence: Synthetic oligonucleotide
  Sense strand starting at position 382 of SEQ ID NO: 1887387
acagucucuguauacuaau

SEQ ID NO: 2468463 - RNA, 19 nt, Artificial Sequence
  Description of Artificial Sequence: Synthetic oligonucleotide
  Antisense strand to SEQ ID NO: 2468462
auuaguauacagagacugu

SEQ ID NO: 2468464 - RNA, 19 nt, Artificial Sequence
  Description of Artificial Sequence: Synthetic oligonucleotide
  Sense strand starting at position 411 of SEQ ID NO: 1887387
ucaugagauugguuuacau

SEQ ID NO: 2468465 - RNA, 19 nt, Artificial Sequence
  Description of Artificial Sequence: Synthetic oligonucleotide
  Antisense strand to SEQ ID NO: 2468464
auguaaaccaaucucauga

SEQ ID NO: 2468466 - RNA, 19 nt, Artificial Sequence
  Description of Artificial Sequence: Synthetic oligonucleotide
  Sense strand starting at position 440 of SEQ ID NO: 1887387
cuuuguaauggacaucagu

SEQ ID NO: 2468467 - RNA, 19 nt, Artificial Sequence
  Description of Artificial Sequence: Synthetic oligonucleotide
  Antisense strand to SEQ ID NO: 2468466
acugauguccauuacaaag

SEQ ID NO: 2468468 - RNA, 19 nt, Artificial Sequence
  Description of Artificial Sequence: Synthetic oligonucleotide
  Sense strand starting at position 449 of SEQ ID NO: 1887387
ggacaucaguacucaucau

SEQ ID NO: 2468469 - RNA, 19 nt, Artificial Sequence
  Description of Artificial Sequence: Synthetic oligonucleotide
  Antisense strand to SEQ ID NO: 2468468
augaugaguacugaugucc

SEQ ID NO: 2468470 - RNA, 19 nt, Artificial Sequence
  Description of Artificial Sequence: Synthetic oligonucleotide
  Sense strand starting at position 500 of SEQ ID NO: 1887387
uguguuaaucaacagcaca

SEQ ID NO: 2468471 - RNA, 19 nt, Artificial Sequence
  Description of Artificial Sequence: Synthetic oligonucleotide
  Antisense strand to SEQ ID NO: 2468470
ugugcuguugauuaacaca

SEQ ID NO: 2468472 - RNA, 19 nt, Artificial Sequence
  Description of Artificial Sequence: Synthetic oligonucleotide
  Sense strand starting at position 665 of SEQ ID NO: 1887387
guuguagaaucaccagaaa

SEQ ID NO: 2468473 - RNA, 19 nt, Artificial Sequence
  Description of Artificial Sequence: Synthetic oligonucleotide
  Antisense strand to SEQ ID NO: 2468472
uuucuggugauucuacaac

SEQ ID NO: 2468474 - RNA, 19 nt, Artificial Sequence
  Description of Artificial Sequence: Synthetic oligonucleotide
  Sense strand starting at position 702 of SEQ ID NO: 1887387
gcagaaauucuuggaagac

SEQ ID NO: 2468475 - RNA, 19 nt, Artificial Sequence
  Description of Artificial Sequence: Synthetic oligonucleotide
  Antisense strand to SEQ ID NO: 2468474
gucuuccaagaauuucugc

SEQ ID NO: 2468476 - RNA, 19 nt, Artificial Sequence
  Description of Artificial Sequence: Synthetic oligonucleotide
  Sense strand starting at position 890 of SEQ ID NO: 1887387
gguauucuccguuugcauu

SEQ ID NO: 2468477 - RNA, 19 nt, Artificial Sequence
  Description of Artificial Sequence: Synthetic oligonucleotide
  Antisense strand to SEQ ID NO: 2468476
aaugcaaacggagaauacc

SEQ ID NO: 2468478 - RNA, 19 nt, Artificial Sequence
  Description of Artificial Sequence: Synthetic oligonucleotide
  Sense strand starting at position 1264 of SEQ ID NO: 1887387
ggcucucuaugauugaaua

SEQ ID NO: 2468479 - RNA, 19 nt, Artificial Sequence
  Description of Artificial Sequence: Synthetic oligonucleotide
  Antisense strand to SEQ ID NO: 2468478
uauucaaucauagagagcc

SEQ ID NO: 2468480 - RNA, 19 nt, Artificial Sequence
  Description of Artificial Sequence: Synthetic oligonucleotide
  Sense strand starting at position 1265 of SEQ ID NO: 1887387
gcucucuaugauugaauaa

SEQ ID NO: 2468481 - RNA, 19 nt, Artificial Sequence
  Description of Artificial Sequence: Synthetic oligonucleotide
  Antisense strand to SEQ ID NO: 2468480
uuauucaaucauagagagc

SEQ ID NO: 2468482 - RNA, 19 nt, Artificial Sequence
  Description of Artificial Sequence: Synthetic oligonucleotide
  Sense strand starting at position 1282 of SEQ ID NO: 1887387
aaagcugaguugcuaauuu

SEQ ID NO: 2468483 - RNA, 19 nt, Artificial Sequence
  Description of Artificial Sequence: Synthetic oligonucleotide
  Antisense strand to SEQ ID NO: 2468482
aaauuagcaacucagcuuu

SEQ ID NO: 2468484 - RNA, 19 nt, Artificial Sequence
  Description of Artificial Sequence: Synthetic oligonucleotide
  Sense strand starting at position 1368 of SEQ ID NO: 1887387
ugagucaauugaguuuaaa

SEQ ID NO: 2468485 - RNA, 19 nt, Artificial Sequence
  Description of Artificial Sequence: Synthetic oligonucleotide
  Antisense strand to SEQ ID NO: 2468484
uuuaaacucaauugacuca

SEQ ID NO: 2468486 - RNA, 19 nt, Artificial Sequence
  Description of Artificial Sequence: Synthetic oligonucleotide
  Sense strand starting at position 1480 of SEQ ID NO: 1887387
agcugacuguauuuagcua

SEQ ID NO: 2468487 - RNA, 19 nt, Artificial Sequence
  Description of Artificial Sequence: Synthetic oligonucleotide
  Antisense strand to SEQ ID NO: 2468486
uagcuaaauacagucagcu

SEQ ID NO: 2468488 - RNA, 19 nt, Artificial Sequence
  Description of Artificial Sequence: Synthetic oligonucleotide
  Sense strand starting at position 1488 of SEQ ID NO: 1887387
guauuuagcuaucugcaac

SEQ ID NO: 2468489 - RNA, 19 nt, Artificial Sequence
  Description of Artificial Sequence: Synthetic oligonucleotide
  Antisense strand to SEQ ID NO: 2468488
guugcagauagcuaaauac

SEQ ID NO: 2468490 - RNA, 19 nt, Artificial Sequence
  Description of Artificial Sequence: Synthetic oligonucleotide
  Sense strand starting at position 1576 of SEQ ID NO: 1887387
ucaccacuugcagauagua

SEQ ID NO: 2468491 - RNA, 19 nt, Artificial Sequence
  Description of Artificial Sequence: Synthetic oligonucleotide
  Antisense strand to SEQ ID NO: 2468490
uacuaucugcaagugguga

SEQ ID NO: 2468492 - RNA, 19 nt, Artificial Sequence
  Description of Artificial Sequence: Synthetic oligonucleotide
  Sense strand starting at position 1751 of SEQ ID NO: 1887387
cugaguuagauggauugca

SEQ ID NO: 2468493 - RNA, 19 nt, Artificial Sequence
  Description of Artificial Sequence: Synthetic oligonucleotide
  Antisense strand to SEQ ID NO: 2468492
ugcaauccaucuaacucag

SEQ ID NO: 2468494 - RNA, 19 nt, Artificial Sequence
  Description of Artificial Sequence: Synthetic oligonucleotide
  Sense strand starting at position 1834 of SEQ ID NO: 1887387
aucagagacuuguuucuua

SEQ ID NO: 2468495 - RNA, 19 nt, Artificial Sequence
  Description of Artificial Sequence: Synthetic oligonucleotide
  Antisense strand to SEQ ID NO: 2468494
uaagaaacaagucucugau

SEQ ID NO: 2468496 - RNA, 19 nt, Artificial Sequence
  Description of Artificial Sequence: Synthetic oligonucleotide
  Sense strand starting at position 2048 of SEQ ID NO: 1887387
cugguuggugccgcuuaua

SEQ ID NO: 2468497 - RNA, 19 nt, Artificial Sequence
  Description of Artificial Sequence: Synthetic oligonucleotide
  Antisense strand to SEQ ID NO: 2468496
uauaagcggcaccaaccag

SEQ ID NO: 2468498 - RNA, 19 nt, Artificial Sequence
  Description of Artificial Sequence: Synthetic oligonucleotide
  Sense strand starting at position 2082 of SEQ ID NO: 1887387
augggagggcacugauaua

SEQ ID NO: 2468499 - RNA, 19 nt, Artificial Sequence
  Description of Artificial Sequence: Synthetic oligonucleotide
  Antisense strand to SEQ ID NO: 2468498
uauaucagugcccucccau

SEQ ID NO: 2468500 - RNA, 19 nt, Artificial Sequence
  Description of Artificial Sequence: Synthetic oligonucleotide
  Sense strand starting at position 2146 of SEQ ID NO: 1887387
cuaggaaagcugcauuaua

SEQ ID NO: 2468501 - RNA, 19 nt, Artificial Sequence
  Description of Artificial Sequence: Synthetic oligonucleotide
  Antisense strand to SEQ ID NO: 2468500
uauaaugcagcuuuccuag

SEQ ID NO: 2468502 - RNA, 19 nt, Artificial Sequence
  Description of Artificial Sequence: Synthetic oligonucleotide
  Sense strand starting at position 2217 of SEQ ID NO: 1887387
gggauuccuggauguggga

SEQ ID NO: 2468503 - RNA, 19 nt, Artificial Sequence
  Description of Artificial Sequence: Synthetic oligonucleotide
  Antisense strand to SEQ ID NO: 2468502
ucccacauccaggaauccc

SEQ ID NO: 2468504 - RNA, 19 nt, Artificial Sequence
  Description of Artificial Sequence: Synthetic oligonucleotide
  Sense strand starting at position 2350 of SEQ ID NO: 1887387
acccuagucguauaagaaa

SEQ ID NO: 2468505 - RNA, 19 nt, Artificial Sequence
  Description of Artificial Sequence: Synthetic oligonucleotide
  Antisense strand to SEQ ID NO: 2468504
uuucuuauacgacuagggu

SEQ ID NO: 2468506 - RNA, 19 nt, Artificial Sequence
  Description of Artificial Sequence: Synthetic oligonucleotide
  Sense strand starting at position 2425 of SEQ ID NO: 1887387
gacaaaggucaggguuuaa

SEQ ID NO: 2468507 - RNA, 19 nt, Artificial Sequence
  Description of Artificial Sequence: Synthetic oligonucleotide
  Antisense strand to SEQ ID NO: 2468506
uuaaacccugaccuuuguc

SEQ ID NO: 2468508 - RNA, 19 nt, Artificial Sequence
  Description of Artificial Sequence: Synthetic oligonucleotide
  Sense strand starting at position 2560 of SEQ ID NO: 1887387
ggaacuaaauagcuacauu

SEQ ID NO: 2468509 - RNA, 19 nt, Artificial Sequence
  Description of Artificial Sequence: Synthetic oligonucleotide
  Antisense strand to SEQ ID NO: 2468508
aauguagcuauuuaguucc

SEQ ID NO: 2468510 - RNA, 19 nt, Artificial Sequence
  Description of Artificial Sequence: Synthetic oligonucleotide
  Sense strand starting at position 2730 of SEQ ID NO: 1887387
acuguucuucuccaugaag

SEQ ID NO: 2468511 - RNA, 19 nt, Artificial Sequence
  Description of Artificial Sequence: Synthetic oligonucleotide
  Antisense strand to SEQ ID NO: 2468510
cuucauggagaagaacagu

SEQ ID NO: 2468512 - RNA, 19 nt, Artificial Sequence
  Description of Artificial Sequence: Synthetic oligonucleotide
  Sense strand starting at position 2745 of SEQ ID NO: 1887387
gaagcugcucuggauaacu

SEQ ID NO: 2468513 - RNA, 19 nt, Artificial Sequence
  Description of Artificial Sequence: Synthetic oligonucleotide
  Antisense strand to SEQ ID NO: 2468512
aguuauccagagcagcuuc

SEQ ID NO: 2468514 - RNA, 19 nt, Artificial Sequence
  Description of Artificial Sequence: Synthetic oligonucleotide
  Sense strand starting at position 2844 of SEQ ID NO: 1887387
cugguaaacaagugaugaa

SEQ ID NO: 2468515 - RNA, 19 nt, Artificial Sequence
  Description of Artificial Sequence: Synthetic oligonucleotide
  Antisense strand to SEQ ID NO: 2468514
uucaucacuuguuuaccag

SEQ ID NO: 2468516 - RNA, 19 nt, Artificial Sequence
  Description of Artificial Sequence: Synthetic oligonucleotide
  Sense strand starting at position 2877 of SEQ ID NO: 1887387
ugggaugcaaguuauauca

SEQ ID NO: 2468517 - RNA, 19 nt, Artificial Sequence
  Description of Artificial Sequence: Synthetic oligonucleotide
  Antisense strand to SEQ ID NO: 2468516
ugauauaacuugcauccca

SEQ ID NO: 2468518 - RNA, 19 nt, Artificial Sequence
  Description of Artificial Sequence: Synthetic oligonucleotide
  Sense strand starting at position 2942 of SEQ ID NO: 1887387
aauugaauagccgaaguua

SEQ ID NO: 2468519 - RNA, 19 nt, Artificial Sequence
  Description of Artificial Sequence: Synthetic oligonucleotide
  Antisense strand to SEQ ID NO: 2468518
uaacuucggcuauucaauu

SEQ ID NO: 2468520 - RNA, 19 nt, Artificial Sequence
  Description of Artificial Sequence: Synthetic oligonucleotide
  Sense strand starting at position 2974 of SEQ ID NO: 1887387
uugguaauuguacacugaa

SEQ ID NO: 2468521 - RNA, 19 nt, Artificial Sequence
  Description of Artificial Sequence: Synthetic oligonucleotide
  Antisense strand to SEQ ID NO: 2468520
uucaguguacaauuaccaa

SEQ ID NO: 2468522 - RNA, 19 nt, Artificial Sequence
  Description of Artificial Sequence: Synthetic oligonucleotide
  Sense strand starting at position 3287 of SEQ ID NO: 1887387
ggagcaucucauuauucuu

SEQ ID NO: 2468523 - RNA, 19 nt, Artificial Sequence
  Description of Artificial Sequence: Synthetic oligonucleotide
  Antisense strand to SEQ ID NO: 2468522
aagaauaaugagaugcucc

SEQ ID NO: 2468524 - RNA, 19 nt, Artificial Sequence
  Description of Artificial Sequence: Synthetic oligonucleotide
  Sense strand starting at position 3656 of SEQ ID NO: 1887387
auauguuauccuggaaagg

SEQ ID NO: 2468525 - RNA, 19 nt, Artificial Sequence
  Description of Artificial Sequence: Synthetic oligonucleotide
  Antisense strand to SEQ ID NO: 2468524
ccuuuccaggauaacauau

SEQ ID NO: 2468526 - RNA, 19 nt, Artificial Sequence
  Description of Artificial Sequence: Synthetic oligonucleotide
  Sense strand starting at position 3657 of SEQ ID NO: 1887387
uauguuauccuggaaaggu

SEQ ID NO: 2468527 - RNA, 19 nt, Artificial Sequence
  Description of Artificial Sequence: Synthetic oligonucleotide
  Antisense strand to SEQ ID NO: 2468526
accuuuccaggauaacaua

SEQ ID NO: 2468528 - RNA, 19 nt, Artificial Sequence
  Description of Artificial Sequence: Synthetic oligonucleotide
  Sense strand starting at position 3748 of SEQ ID NO: 1887387
acuccaggucccuaugaau

SEQ ID NO: 2468529 - RNA, 19 nt, Artificial Sequence
  Description of Artificial Sequence: Synthetic oligonucleotide
  Antisense strand to SEQ ID NO: 2468528
auucauagggaccuggagu

SEQ ID NO: 2468530 - RNA, 19 nt, Artificial Sequence
  Description of Artificial Sequence: Synthetic oligonucleotide
  Sense strand starting at position 3816 of SEQ ID NO: 1887387
aaggguuacagguagucua

SEQ ID NO: 2468531 - RNA, 19 nt, Artificial Sequence
  Description of Artificial Sequence: Synthetic oligonucleotide
  Antisense strand to SEQ ID NO: 2468530
uagacuaccuguaacccuu

SEQ ID NO: 2468532 - RNA, 19 nt, Artificial Sequence
  Description of Artificial Sequence: Synthetic oligonucleotide
  Sense strand starting at position 3826 of SEQ ID NO: 1887387
gguagucuaccugauaauc

SEQ ID NO: 2468533 - RNA, 19 nt, Artificial Sequence
  Description of Artificial Sequence: Synthetic oligonucleotide
  Antisense strand to SEQ ID NO: 2468532
gauuaucagguagacuacc

SEQ ID NO: 2468534 - RNA, 19 nt, Artificial Sequence
  Description of Artificial Sequence: Synthetic oligonucleotide
  Sense strand starting at position 1 of SEQ ID NO: 1887388
cagagaagccuugagcuga

SEQ ID NO: 2468535 - RNA, 19 nt, Artificial Sequence
  Description of Artificial Sequence: Synthetic oligonucleotide
  Antisense strand to SEQ ID NO: 2468534
ucagcucaaggcuucucug

SEQ ID NO: 2468536 - RNA, 19 nt, Artificial Sequence
  Description of Artificial Sequence: Synthetic oligonucleotide
  Sense strand starting at position 84 of SEQ ID NO: 1887388
gugggaucaggguauaccu

SEQ ID NO: 2468537 - RNA, 19 nt, Artificial Sequence
  Description of Artificial Sequence: Synthetic oligonucleotide
  Antisense strand to SEQ ID NO: 2468536
agguauacccugaucccac

SEQ ID NO: 2468538 - RNA, 19 nt, Artificial Sequence
  Description of Artificial Sequence: Synthetic oligonucleotide
  Sense strand starting at position 291 of SEQ ID NO: 1887388
auggcaccacaguauuaau

SEQ ID NO: 2468539 - RNA, 19 nt, Artificial Sequence
  Description of Artificial Sequence: Synthetic oligonucleotide
  Antisense strand to SEQ ID NO: 2468538
auuaauacuguggugccau

SEQ ID NO: 2468540 - RNA, 19 nt, Artificial Sequence
  Description of Artificial Sequence: Synthetic oligonucleotide
  Sense strand starting at position 359 of SEQ ID NO: 1887388
ccuagauguggugaaucua

SEQ ID NO: 2468541 - RNA, 19 nt, Artificial Sequence
  Description of Artificial Sequence: Synthetic oligonucleotide
  Antisense strand to SEQ ID NO: 2468540
uagauucaccacaucuagg

SEQ ID NO: 2468542 - RNA, 19 nt, Artificial Sequence
  Description of Artificial Sequence: Synthetic oligonucleotide
  Sense strand starting at position 390 of SEQ ID NO: 1887388
gucaaugauucuguggaau

SEQ ID NO: 2468543 - RNA, 19 nt, Artificial Sequence
  Description of Artificial Sequence: Synthetic oligonucleotide
  Antisense strand to SEQ ID NO: 2468542
auuccacagaaucauugac

SEQ ID NO: 2468544 - RNA, 19 nt, Artificial Sequence
  Description of Artificial Sequence: Synthetic oligonucleotide
  Sense strand starting at position 583 of SEQ ID NO: 1887388
uucuguaaccuuugaugag

SEQ ID NO: 2468545 - RNA, 19 nt, Artificial Sequence
  Description of Artificial Sequence: Synthetic oligonucleotide
  Antisense strand to SEQ ID NO: 2468544
cucaucaaagguuacagaa

SEQ ID NO: 2468546 - RNA, 19 nt, Artificial Sequence
  Description of Artificial Sequence: Synthetic oligonucleotide
  Sense strand starting at position 668 of SEQ ID NO: 1887388
gagagaugggcacagcuau

SEQ ID NO: 2468547 - RNA, 19 nt, Artificial Sequence
  Description of Artificial Sequence: Synthetic oligonucleotide
  Antisense strand to SEQ ID NO: 2468546
auagcugugcccaucucuc

SEQ ID NO: 2468548 - RNA, 19 nt, Artificial Sequence
  Description of Artificial Sequence: Synthetic oligonucleotide
  Sense strand starting at position 865 of SEQ ID NO: 1887388
auuaucuguuggguuauaa

SEQ ID NO: 2468549 - RNA, 19 nt, Artificial Sequence
  Description of Artificial Sequence: Synthetic oligonucleotide
  Antisense strand to SEQ ID NO: 2468548
uuauaacccaacagauaau

SEQ ID NO: 2468550 - RNA, 19 nt, Artificial Sequence
  Description of Artificial Sequence: Synthetic oligonucleotide
  Sense strand starting at position 904 of SEQ ID NO: 1887388
aggugucggaaauaugacu

SEQ ID NO: 2468551 - RNA, 19 nt, Artificial Sequence
  Description of Artificial Sequence: Synthetic oligonucleotide
  Antisense strand to SEQ ID NO: 2468550
agucauauuuccgacaccu

SEQ ID NO: 2468552 - RNA, 19 nt, Artificial Sequence
  Description of Artificial Sequence: Synthetic oligonucleotide
  Sense strand starting at position 909 of SEQ ID NO: 1887388
ucggaaauaugacuuugau

SEQ ID NO: 2468553 - RNA, 19 nt, Artificial Sequence
  Description of Artificial Sequence: Synthetic oligonucleotide
  Antisense strand to SEQ ID NO: 2468552
aucaaagucauauuuccga

SEQ ID NO: 2468554 - RNA, 19 nt, Artificial Sequence
  Description of Artificial Sequence: Synthetic oligonucleotide
  Sense strand starting at position 1055 of SEQ ID NO: 1887388
guuacuuaguuaucuagga

SEQ ID NO: 2468555 - RNA, 19 nt, Artificial Sequence
  Description of Artificial Sequence: Synthetic oligonucleotide
  Antisense strand to SEQ ID NO: 2468554
uccuagauaacuaaguaac

SEQ ID NO: 2468556 - RNA, 19 nt, Artificial Sequence
  Description of Artificial Sequence: Synthetic oligonucleotide
  Sense strand starting at position 1056 of SEQ ID NO: 1887388
uuacuuaguuaucuaggau

SEQ ID NO: 2468557 - RNA, 19 nt, Artificial Sequence
  Description of Artificial Sequence: Synthetic oligonucleotide
  Antisense strand to SEQ ID NO: 2468556
auccuagauaacuaaguaa

SEQ ID NO: 2468558 - RNA, 19 nt, Artificial Sequence
  Description of Artificial Sequence: Synthetic oligonucleotide
  Sense strand starting at position 1059 of SEQ ID NO: 1887388
cuuaguuaucuaggaucua

SEQ ID NO: 2468559 - RNA, 19 nt, Artificial Sequence
  Description of Artificial Sequence: Synthetic oligonucleotide
  Antisense strand to SEQ ID NO: 2468558
uagauccuagauaacuaag

SEQ ID NO: 2468560 - RNA, 19 nt, Artificial Sequence
  Description of Artificial Sequence: Synthetic oligonucleotide
  Sense strand starting at position 1230 of SEQ ID NO: 1887388
ccauguuuagauggaauag

SEQ ID NO: 2468561 - RNA, 19 nt, Artificial Sequence
  Description of Artificial Sequence: Synthetic oligonucleotide
  Antisense strand to SEQ ID NO: 2468560
cuauuccaucuaaacaugg

SEQ ID NO: 2468562 - RNA, 19 nt, Artificial Sequence
  Description of Artificial Sequence: Synthetic oligonucleotide
  Sense strand starting at position 1248 of SEQ ID NO: 1887388
ggagcaaugguguauacuc

SEQ ID NO: 2468563 - RNA, 19 nt, Artificial Sequence
  Description of Artificial Sequence: Synthetic oligonucleotide
  Antisense strand to SEQ ID NO: 2468562
gaguauacaccauugcucc

SEQ ID NO: 2468564 - RNA, 19 nt, Artificial Sequence
  Description of Artificial Sequence: Synthetic oligonucleotide
  Sense strand starting at position 1479 of SEQ ID NO: 1887388
uuuccagaaggcuggauua

SEQ ID NO: 2468565 - RNA, 19 nt, Artificial Sequence
  Description of Artificial Sequence: Synthetic oligonucleotide
  Antisense strand to SEQ ID NO: 2468564
uaauccagccuucuggaaa

SEQ ID NO: 2468566 - RNA, 19 nt, Artificial Sequence
  Description of Artificial Sequence: Synthetic oligonucleotide
  Sense strand starting at position 1492 of SEQ ID NO: 1887388
ggauuauggaaguguuauu

SEQ ID NO: 2468567 - RNA, 19 nt, Artificial Sequence
  Description of Artificial Sequence: Synthetic oligonucleotide
  Antisense strand to SEQ ID NO: 2468566
aauaacacuuccauaaucc

SEQ ID NO: 2468568 - RNA, 19 nt, Artificial Sequence
  Description of Artificial Sequence: Synthetic oligonucleotide
  Sense strand starting at position 1497 of SEQ ID NO: 1887388
auggaaguguuauuauaga

SEQ ID NO: 2468569 - RNA, 19 nt, Artificial Sequence
  Description of Artificial Sequence: Synthetic oligonucleotide
  Antisense strand to SEQ ID NO: 2468568
ucuauaauaacacuuccau

SEQ ID NO: 2468570 - RNA, 19 nt, Artificial Sequence
  Description of Artificial Sequence: Synthetic oligonucleotide
  Sense strand starting at position 1530 of SEQ ID NO: 1887388
aguauugguggcgaaccaa

SEQ ID NO: 2468571 - RNA, 19 nt, Artificial Sequence
  Description of Artificial Sequence: Synthetic oligonucleotide
  Antisense strand to SEQ ID NO: 2468570
uugguucgccaccaauacu

SEQ ID NO: 2468572 - RNA, 19 nt, Artificial Sequence
  Description of Artificial Sequence: Synthetic oligonucleotide
  Sense strand starting at position 1811 of SEQ ID NO: 1887388
ugucauaggcuauaaccaa

SEQ ID NO: 2468573 - RNA, 19 nt, Artificial Sequence
  Description of Artificial Sequence: Synthetic oligonucleotide
  Antisense strand to SEQ ID NO: 2468572
uugguuauagccuaugaca

SEQ ID NO: 2468574 - RNA, 19 nt, Artificial Sequence
  Description of Artificial Sequence: Synthetic oligonucleotide
  Sense strand starting at position 1843 of SEQ ID NO: 1887388
gcuagaaucucaccugaag

SEQ ID NO: 2468575 - RNA, 19 nt, Artificial Sequence
  Description of Artificial Sequence: Synthetic oligonucleotide
  Antisense strand to SEQ ID NO: 2468574
cuucaggugagauucuagc

SEQ ID NO: 2468576 - RNA, 19 nt, Artificial Sequence
  Description of Artificial Sequence: Synthetic oligonucleotide
  Sense strand starting at position 1846 of SEQ ID NO: 1887388
agaaucucaccugaagcuu

SEQ ID NO: 2468577 - RNA, 19 nt, Artificial Sequence
  Description of Artificial Sequence: Synthetic oligonucleotide
  Antisense strand to SEQ ID NO: 2468576
aagcuucaggugagauucu

SEQ ID NO: 2468578 - RNA, 19 nt, Artificial Sequence
  Description of Artificial Sequence: Synthetic oligonucleotide
  Sense strand starting at position 2188 of SEQ ID NO: 1887388
aggauaaucagagggcugu

SEQ ID NO: 2468579 - RNA, 19 nt, Artificial Sequence
  Description of Artificial Sequence: Synthetic oligonucleotide
  Antisense strand to SEQ ID NO: 2468578
acagcccucugauuauccu

SEQ ID NO: 2468580 - RNA, 19 nt, Artificial Sequence
  Description of Artificial Sequence: Synthetic oligonucleotide
  Sense strand starting at position 2280 of SEQ ID NO: 1887388
aguuuaggucuacacauga

SEQ ID NO: 2468581 - RNA, 19 nt, Artificial Sequence
  Description of Artificial Sequence: Synthetic oligonucleotide
  Antisense strand to SEQ ID NO: 2468580
ucauguguagaccuaaacu

SEQ ID NO: 2468582 - RNA, 19 nt, Artificial Sequence
  Description of Artificial Sequence: Synthetic oligonucleotide
  Sense strand starting at position 2354 of SEQ ID NO: 1887388
aaggauauugguugcagga

SEQ ID NO: 2468583 - RNA, 19 nt, Artificial Sequence
  Description of Artificial Sequence: Synthetic oligonucleotide
  Antisense strand to SEQ ID NO: 2468582
uccugcaaccaauauccuu

SEQ ID NO: 2468584 - RNA, 19 nt, Artificial Sequence
  Description of Artificial Sequence: Synthetic oligonucleotide
  Sense strand starting at position 2621 of SEQ ID NO: 1887388
ugaguaucucugcaacuug

SEQ ID NO: 2468585 - RNA, 19 nt, Artificial Sequence
  Description of Artificial Sequence: Synthetic oligonucleotide
  Antisense strand to SEQ ID NO: 2468584
caaguugcagagauacuca

SEQ ID NO: 2468586 - RNA, 19 nt, Artificial Sequence
  Description of Artificial Sequence: Synthetic oligonucleotide
  Sense strand starting at position 2744 of SEQ ID NO: 1887388
gcaagcauuuauguugauu

SEQ ID NO: 2468587 - RNA, 19 nt, Artificial Sequence
  Description of Artificial Sequence: Synthetic oligonucleotide
  Antisense strand to SEQ ID NO: 2468586
aaucaacauaaaugcuugc

SEQ ID NO: 2468588 - RNA, 19 nt, Artificial Sequence
  Description of Artificial Sequence: Synthetic oligonucleotide
  Sense strand starting at position 3027 of SEQ ID NO: 1887388
ggaacacaaccgugacuau

SEQ ID NO: 2468589 - RNA, 19 nt, Artificial Sequence
  Description of Artificial Sequence: Synthetic oligonucleotide
  Antisense strand to SEQ ID NO: 2468588
auagucacgguuguguucc

SEQ ID NO: 2468590 - RNA, 19 nt, Artificial Sequence
  Description of Artificial Sequence: Synthetic oligonucleotide
  Sense strand starting at position 3038 of SEQ ID NO: 1887388
gugacuaucugauuccaua

SEQ ID NO: 2468591 - RNA, 19 nt, Artificial Sequence
  Description of Artificial Sequence: Synthetic oligonucleotide
  Antisense strand to SEQ ID NO: 2468590
uauggaaucagauagucac

SEQ ID NO: 2468592 - RNA, 19 nt, Artificial Sequence
  Description of Artificial Sequence: Synthetic oligonucleotide
  Sense strand starting at position 3302 of SEQ ID NO: 1887388
gugucuuuccuggacacaa

SEQ ID NO: 2468593 - RNA, 19 nt, Artificial Sequence
  Description of Artificial Sequence: Synthetic oligonucleotide
  Antisense strand to SEQ ID NO: 2468592
uuguguccaggaaagacac

SEQ ID NO: 2468594 - RNA, 19 nt, Artificial Sequence
  Description of Artificial Sequence: Synthetic oligonucleotide
  Sense strand starting at position 3313 of SEQ ID NO: 1887388
ggacacaaugguggugaau

SEQ ID NO: 2468595 - RNA, 19 nt, Artificial Sequence
  Description of Artificial Sequence: Synthetic oligonucleotide
  Antisense strand to SEQ ID NO: 2468594
auucaccaccauugugucc

SEQ ID NO: 2468596 - RNA, 19 nt, Artificial Sequence
  Description of Artificial Sequence: Synthetic oligonucleotide
  Sense strand starting at position 3374 of SEQ ID NO: 1887388
ggauauaaagcugguguaa

SEQ ID NO: 2468597 - RNA, 19 nt, Artificial Sequence
  Description of Artificial Sequence: Synthetic oligonucleotide
  Antisense strand to SEQ ID NO: 2468596
uuacaccagcuuuauaucc

SEQ ID NO: 2468598 - RNA, 19 nt, Artificial Sequence
  Description of Artificial Sequence: Synthetic oligonucleotide
  Sense strand starting at position 3434 of SEQ ID NO: 1887388
aaacauagguagcuagauu

SEQ ID NO: 2468599 - RNA, 19 nt, Artificial Sequence
  Description of Artificial Sequence: Synthetic oligonucleotide
  Antisense strand to SEQ ID NO: 2468598
aaucuagcuaccuauguuu

SEQ ID NO: 2468600 - RNA, 19 nt, Artificial Sequence
  Description of Artificial Sequence: Synthetic oligonucleotide
  Sense strand starting at position 3624 of SEQ ID NO: 1887388
aguuucugucaacagaauu

SEQ ID NO: 2468601 - RNA, 19 nt, Artificial Sequence
  Description of Artificial Sequence: Synthetic oligonucleotide
  Antisense strand to SEQ ID NO: 2468600
aauucuguugacagaaacu

SEQ ID NO: 2468602 - RNA, 19 nt, Artificial Sequence
  Description of Artificial Sequence: Synthetic oligonucleotide
  Sense strand starting at position 3645 of SEQ ID NO: 1887388
gcaaguggcagguagagau

SEQ ID NO: 2468603 - RNA, 19 nt, Artificial Sequence
  Description of Artificial Sequence: Synthetic oligonucleotide
  Antisense strand to SEQ ID NO: 2468602
aucucuaccugccacuugc

SEQ ID NO: 2468604 - RNA, 19 nt, Artificial Sequence
  Description of Artificial Sequence: Synthetic oligonucleotide
  Sense strand starting at position 3683 of SEQ ID NO: 1887388
caggguguuguacaaauau

SEQ ID NO: 2468605 - RNA, 19 nt, Artificial Sequence
  Description of Artificial Sequence: Synthetic oligonucleotide
  Antisense strand to SEQ ID NO: 2468604
auauuuguacaacacccug

SEQ ID NO: 2468606 - RNA, 19 nt, Artificial Sequence
  Description of Artificial Sequence: Synthetic oligonucleotide
  Sense strand starting at position 3742 of SEQ ID NO: 1887388
cacagauaagcugaguacu

SEQ ID NO: 2468607 - RNA, 19 nt, Artificial Sequence
  Description of Artificial Sequence: Synthetic oligonucleotide
  Antisense strand to SEQ ID NO: 2468606
aguacucagcuuaucugug

SEQ ID NO: 2468608 - RNA, 19 nt, Artificial Sequence
  Description of Artificial Sequence: Synthetic oligonucleotide
  Sense strand starting at position 3744 of SEQ ID NO: 1887388
cagauaagcugaguacuua

SEQ ID NO: 2468609 - RNA, 19 nt, Artificial Sequence
  Description of Artificial Sequence: Synthetic oligonucleotide
  Antisense strand to SEQ ID NO: 2468608
uaaguacucagcuuaucug

SEQ ID NO: 2468610 - RNA, 19 nt, Artificial Sequence
  Description of Artificial Sequence: Synthetic oligonucleotide
  Sense strand starting at position 3765 of SEQ ID NO: 1887388
cacguuagucaucaugaca

SEQ ID NO: 2468611 - RNA, 19 nt, Artificial Sequence
  Description of Artificial Sequence: Synthetic oligonucleotide
  Antisense strand to SEQ ID NO: 2468610
ugucaugaugacuaacgug

SEQ ID NO: 2468612 - RNA, 19 nt, Artificial Sequence
  Description of Artificial Sequence: Synthetic oligonucleotide
  Sense strand starting at position 3908 of SEQ ID NO: 1887388
uuuagcacuggaugaauau

SEQ ID NO: 2468613 - RNA, 19 nt, Artificial Sequence
  Description of Artificial Sequence: Synthetic oligonucleotide
  Antisense strand to SEQ ID NO: 2468612
auauucauccagugcuaaa

SEQ ID NO: 2468614 - RNA, 19 nt, Artificial Sequence
  Description of Artificial Sequence: Synthetic oligonucleotide
  Sense strand starting at position 25 of SEQ ID NO: 1887389
uuaguuugaaagcaaggua

SEQ ID NO: 2468615 - RNA, 19 nt, Artificial Sequence
  Description of Artificial Sequence: Synthetic oligonucleotide
  Antisense strand to SEQ ID NO: 2468614
uaccuugcuuucaaacuaa

SEQ ID NO: 2468616 - RNA, 19 nt, Artificial Sequence
  Description of Artificial Sequence: Synthetic oligonucleotide
  Sense strand starting at position 28 of SEQ ID NO: 1887389
guuugaaagcaagguaaga

SEQ ID NO: 2468617 - RNA, 19 nt, Artificial Sequence
  Description of Artificial Sequence: Synthetic oligonucleotide
  Antisense strand to SEQ ID NO: 2468616
ucuuaccuugcuuucaaac

SEQ ID NO: 2468618 - RNA, 19 nt, Artificial Sequence
  Description of Artificial Sequence: Synthetic oligonucleotide
  Sense strand starting at position 150 of SEQ ID NO: 1887389
uuaaacuaugaguggugaa

SEQ ID NO: 2468619 - RNA, 19 nt, Artificial Sequence
  Description of Artificial Sequence: Synthetic oligonucleotide
  Antisense strand to SEQ ID NO: 2468618
uucaccacucauaguuuaa

SEQ ID NO: 2468620 - RNA, 19 nt, Artificial Sequence
  Description of Artificial Sequence: Synthetic oligonucleotide
  Sense strand starting at position 258 of SEQ ID NO: 1887389
uguccucaccuguacauua

SEQ ID NO: 2468621 - RNA, 19 nt, Artificial Sequence
  Description of Artificial Sequence: Synthetic oligonucleotide
  Antisense strand to SEQ ID NO: 2468620
uaauguacaggugaggaca

SEQ ID NO: 2468622 - RNA, 19 nt, Artificial Sequence
  Description of Artificial Sequence: Synthetic oligonucleotide
  Sense strand starting at position 515 of SEQ ID NO: 1887389
gacaaucaaugguuguuaa

SEQ ID NO: 2468623 - RNA, 19 nt, Artificial Sequence
  Description of Artificial Sequence: Synthetic oligonucleotide
  Antisense strand to SEQ ID NO: 2468622
uuaacaaccauugauuguc

SEQ ID NO: 2468624 - RNA, 19 nt, Artificial Sequence
  Description of Artificial Sequence: Synthetic oligonucleotide
  Sense strand starting at position 727 of SEQ ID NO: 1887389
gcaccaugaagaugugacu

SEQ ID NO: 2468625 - RNA, 19 nt, Artificial Sequence
  Description of Artificial Sequence: Synthetic oligonucleotide
  Antisense strand to SEQ ID NO: 2468624
agucacaucuucauggugc

SEQ ID NO: 2468626 - RNA, 19 nt, Artificial Sequence
  Description of Artificial Sequence: Synthetic oligonucleotide
  Sense strand starting at position 736 of SEQ ID NO: 1887389
agaugugacucugcagauu

SEQ ID NO: 2468627 - RNA, 19 nt, Artificial Sequence
  Description of Artificial Sequence: Synthetic oligonucleotide
  Antisense strand to SEQ ID NO: 2468626
aaucugcagagucacaucu

SEQ ID NO: 2468628 - RNA, 19 nt, Artificial Sequence
  Description of Artificial Sequence: Synthetic oligonucleotide
  Sense strand starting at position 821 of SEQ ID NO: 1887389
uugucucuugcacaguaaa

SEQ ID NO: 2468629 - RNA, 19 nt, Artificial Sequence
  Description of Artificial Sequence: Synthetic oligonucleotide
  Antisense strand to SEQ ID NO: 2468628
uuuacugugcaagagacaa

SEQ ID NO: 2468630 - RNA, 19 nt, Artificial Sequence
  Description of Artificial Sequence: Synthetic oligonucleotide
  Sense strand starting at position 824 of SEQ ID NO: 1887389
ucucuugcacaguaaagaa

SEQ ID NO: 2468631 - RNA, 19 nt, Artificial Sequence
  Description of Artificial Sequence: Synthetic oligonucleotide
  Antisense strand to SEQ ID NO: 2468630
uucuuuacugugcaagaga

SEQ ID NO: 2468632 - RNA, 19 nt, Artificial Sequence
  Description of Artificial Sequence: Synthetic oligonucleotide
  Sense strand starting at position 931 of SEQ ID NO: 1887389
acagguuuaacaggaguaa

SEQ ID NO: 2468633 - RNA, 19 nt, Artificial Sequence
  Description of Artificial Sequence: Synthetic oligonucleotide
  Antisense strand to SEQ ID NO: 2468632
uuacuccuguuaaaccugu

SEQ ID NO: 2468634 - RNA, 19 nt, Artificial Sequence
  Description of Artificial Sequence: Synthetic oligonucleotide
  Sense strand starting at position 943 of SEQ ID NO: 1887389
ggaguaaagucccuuccau

SEQ ID NO: 2468635 - RNA, 19 nt, Artificial Sequence
  Description of Artificial Sequence: Synthetic oligonucleotide
  Antisense strand to SEQ ID NO: 2468634
auggaagggacuuuacucc

SEQ ID NO: 2468636 - RNA, 19 nt, Artificial Sequence
  Description of Artificial Sequence: Synthetic oligonucleotide
  Sense strand starting at position 995 of SEQ ID NO: 1887389
acuagacguccuugacauu

SEQ ID NO: 2468637 - RNA, 19 nt, Artificial Sequence
  Description of Artificial Sequence: Synthetic oligonucleotide
  Antisense strand to SEQ ID NO: 2468636
aaugucaaggacgucuagu

SEQ ID NO: 2468638 - RNA, 19 nt, Artificial Sequence
  Description of Artificial Sequence: Synthetic oligonucleotide
  Sense strand starting at position 1116 of SEQ ID NO: 1887389
aucuuagagcuuugacaaa

SEQ ID NO: 2468639 - RNA, 19 nt, Artificial Sequence
  Description of Artificial Sequence: Synthetic oligonucleotide
  Antisense strand to SEQ ID NO: 2468638
uuugucaaagcucuaagau

SEQ ID NO: 2468640 - RNA, 19 nt, Artificial Sequence
  Description of Artificial Sequence: Synthetic oligonucleotide
  Sense strand starting at position 1240 of SEQ ID NO: 1887389
uacaucuucgagugaauca

SEQ ID NO: 2468641 - RNA, 19 nt, Artificial Sequence
  Description of Artificial Sequence: Synthetic oligonucleotide
  Antisense strand to SEQ ID NO: 2468640
ugauucacucgaagaugua

SEQ ID NO: 2468642 - RNA, 19 nt, Artificial Sequence
  Description of Artificial Sequence: Synthetic oligonucleotide
  Sense strand starting at position 1245 of SEQ ID NO: 1887389
cuucgagugaaucacagua

SEQ ID NO: 2468643 - RNA, 19 nt, Artificial Sequence
  Description of Artificial Sequence: Synthetic oligonucleotide
  Antisense strand to SEQ ID NO: 2468642
uacugugauucacucgaag

SEQ ID NO: 2468644 - RNA, 19 nt, Artificial Sequence
  Description of Artificial Sequence: Synthetic oligonucleotide
  Sense strand starting at position 1322 of SEQ ID NO: 1887389
aucagaucugcccaaaugu

SEQ ID NO: 2468645 - RNA, 19 nt, Artificial Sequence
  Description of Artificial Sequence: Synthetic oligonucleotide
  Antisense strand to SEQ ID NO: 2468644
acauuugggcagaucugau

SEQ ID NO: 2468646 - RNA, 19 nt, Artificial Sequence
  Description of Artificial Sequence: Synthetic oligonucleotide
  Sense strand starting at position 1553 of SEQ ID NO: 1887389
ggguuuaagagaggacuuu

SEQ ID NO: 2468647 - RNA, 19 nt, Artificial Sequence
  Description of Artificial Sequence: Synthetic oligonucleotide
  Antisense strand to SEQ ID NO: 2468646
aaaguccucucuuaaaccc

SEQ ID NO: 2468648 - RNA, 19 nt, Artificial Sequence
  Description of Artificial Sequence: Synthetic oligonucleotide
  Sense strand starting at position 1606 of SEQ ID NO: 1887389
aucaguggucucugaagaa

SEQ ID NO: 2468649 - RNA, 19 nt, Artificial Sequence
  Description of Artificial Sequence: Synthetic oligonucleotide
  Antisense strand to SEQ ID NO: 2468648
uucuucagagaccacugau

SEQ ID NO: 2468650 - RNA, 19 nt, Artificial Sequence
  Description of Artificial Sequence: Synthetic oligonucleotide
  Sense strand starting at position 1790 of SEQ ID NO: 1887389
gugacuugggcgagucacu

SEQ ID NO: 2468651 - RNA, 19 nt, Artificial Sequence
  Description of Artificial Sequence: Synthetic oligonucleotide
  Antisense strand to SEQ ID NO: 2468650
agugacucgcccaagucac

SEQ ID NO: 2468652 - RNA, 19 nt, Artificial Sequence
  Description of Artificial Sequence: Synthetic oligonucleotide
  Sense strand starting at position 1869 of SEQ ID NO: 1887389
cagagcugucacgaggauu

SEQ ID NO: 2468653 - RNA, 19 nt, Artificial Sequence
  Description of Artificial Sequence: Synthetic oligonucleotide
  Antisense strand to SEQ ID NO: 2468652
aauccucgugacagcucug

SEQ ID NO: 2468654 - RNA, 19 nt, Artificial Sequence
  Description of Artificial Sequence: Synthetic oligonucleotide
  Sense strand starting at position 1872 of SEQ ID NO: 1887389
agcugucacgaggauuaca

SEQ ID NO: 2468655 - RNA, 19 nt, Artificial Sequence
  Description of Artificial Sequence: Synthetic oligonucleotide
  Antisense strand to SEQ ID NO: 2468654
uguaauccucgugacagcu

SEQ ID NO: 2468656 - RNA, 19 nt, Artificial Sequence
  Description of Artificial Sequence: Synthetic oligonucleotide
  Sense strand starting at position 1880 of SEQ ID NO: 1887389
cgaggauuacauggguuaa

SEQ ID NO: 2468657 - RNA, 19 nt, Artificial Sequence
  Description of Artificial Sequence: Synthetic oligonucleotide
  Antisense strand to SEQ ID NO: 2468656
uuaacccauguaauccucg

SEQ ID NO: 2468658 - RNA, 19 nt, Artificial Sequence
  Description of Artificial Sequence: Synthetic oligonucleotide
  Sense strand starting at position 1890 of SEQ ID NO: 1887389
auggguuaacaccggcaaa

SEQ ID NO: 2468659 - RNA, 19 nt, Artificial Sequence
  Description of Artificial Sequence: Synthetic oligonucleotide
  Antisense strand to SEQ ID NO: 2468658
uuugccgguguuaacccau

SEQ ID NO: 2468660 - RNA, 19 nt, Artificial Sequence
  Description of Artificial Sequence: Synthetic oligonucleotide
  Sense strand starting at position 2083 of SEQ ID NO: 1887389
ucaacaaauauucguggga

SEQ ID NO: 2468661 - RNA, 19 nt, Artificial Sequence
  Description of Artificial Sequence: Synthetic oligonucleotide
  Antisense strand to SEQ ID NO: 2468660
ucccacgaauauuuguuga

SEQ ID NO: 2468662 - RNA, 19 nt, Artificial Sequence
  Description of Artificial Sequence: Synthetic oligonucleotide
  Sense strand starting at position 2086 of SEQ ID NO: 1887389
acaaauauucgugggacag

SEQ ID NO: 2468663 - RNA, 19 nt, Artificial Sequence
  Description of Artificial Sequence: Synthetic oligonucleotide
  Antisense strand to SEQ ID NO: 2468662
cugucccacgaauauuugu

SEQ ID NO: 2468664 - RNA, 19 nt, Artificial Sequence
  Description of Artificial Sequence: Synthetic oligonucleotide
  Sense strand starting at position 2087 of SEQ ID NO: 1887389
caaauauucgugggacaga

SEQ ID NO: 2468665 - RNA, 19 nt, Artificial Sequence
  Description of Artificial Sequence: Synthetic oligonucleotide
  Antisense strand to SEQ ID NO: 2468664
ucugucccacgaauauuug

SEQ ID NO: 2468666 - RNA, 19 nt, Artificial Sequence
  Description of Artificial Sequence: Synthetic oligonucleotide
  Sense strand starting at position 2143 of SEQ ID NO: 1887389
ccucuuccaugauuacagu

SEQ ID NO: 2468667 - RNA, 19 nt, Artificial Sequence
  Description of Artificial Sequence: Synthetic oligonucleotide
  Antisense strand to SEQ ID NO: 2468666
acuguaaucauggaagagg

SEQ ID NO: 2468668 - RNA, 19 nt, Artificial Sequence
  Description of Artificial Sequence: Synthetic oligonucleotide
  Sense strand starting at position 2398 of SEQ ID NO: 1887389
aguuauugccaguacuaaa

SEQ ID NO: 2468669 - RNA, 19 nt, Artificial Sequence
  Description of Artificial Sequence: Synthetic oligonucleotide
  Antisense strand to SEQ ID NO: 2468668
uuuaguacuggcaauaacu

SEQ ID NO: 2468670 - RNA, 19 nt, Artificial Sequence
  Description of Artificial Sequence: Synthetic oligonucleotide
  Sense strand starting at position 2643 of SEQ ID NO: 1887389
cagucugaucugcagaauu

SEQ ID NO: 2468671 - RNA, 19 nt, Artificial Sequence
  Description of Artificial Sequence: Synthetic oligonucleotide
  Antisense strand to SEQ ID NO: 2468670
aauucugcagaucagacug

SEQ ID NO: 2468672 - RNA, 19 nt, Artificial Sequence
  Description of Artificial Sequence: Synthetic oligonucleotide
  Sense strand starting at position 2645 of SEQ ID NO: 1887389
gucugaucugcagaauuaa

SEQ ID NO: 2468673 - RNA, 19 nt, Artificial Sequence
  Description of Artificial Sequence: Synthetic oligonucleotide
  Antisense strand to SEQ ID NO: 2468672
uuaauucugcagaucagac

SEQ ID NO: 2468674 - RNA, 19 nt, Artificial Sequence
  Description of Artificial Sequence: Synthetic oligonucleotide
  Sense strand starting at position 2788 of SEQ ID NO: 1887389
uguccauauguggaccuaa

SEQ ID NO: 2468675 - RNA, 19 nt, Artificial Sequence
  Description of Artificial Sequence: Synthetic oligonucleotide
  Antisense strand to SEQ ID NO: 2468674
uuagguccacauauggaca

SEQ ID NO: 2468676 - RNA, 19 nt, Artificial Sequence
  Description of Artificial Sequence: Synthetic oligonucleotide
  Sense strand starting at position 3042 of SEQ ID NO: 1887389
guguaaaugucauuuccuu

SEQ ID NO: 2468677 - RNA, 19 nt, Artificial Sequence
  Description of Artificial Sequence: Synthetic oligonucleotide
  Antisense strand to SEQ ID NO: 2468676
aaggaaaugacauuuacac

SEQ ID NO: 2468678 - RNA, 19 nt, Artificial Sequence
  Description of Artificial Sequence: Synthetic oligonucleotide
  Sense strand starting at position 3235 of SEQ ID NO: 1887389
ggaggucgucaauaccaau

SEQ ID NO: 2468679 - RNA, 19 nt, Artificial Sequence
  Description of Artificial Sequence: Synthetic oligonucleotide
  Antisense strand to SEQ ID NO: 2468678
auugguauugacgaccucc

SEQ ID NO: 2468680 - RNA, 19 nt, Artificial Sequence
  Description of Artificial Sequence: Synthetic oligonucleotide
  Sense strand starting at position 3261 of SEQ ID NO: 1887389
augagaugacaauggcuua

SEQ ID NO: 2468681 - RNA, 19 nt, Artificial Sequence
  Description of Artificial Sequence: Synthetic oligonucleotide
  Antisense strand to SEQ ID NO: 2468680
uaagccauugucaucucau

SEQ ID NO: 2468682 - RNA, 19 nt, Artificial Sequence
  Description of Artificial Sequence: Synthetic oligonucleotide
  Sense strand starting at position 3468 of SEQ ID NO: 1887389
aggcgagggcacuaguuua

SEQ ID NO: 2468683 - RNA, 19 nt, Artificial Sequence
  Description of Artificial Sequence: Synthetic oligonucleotide
  Antisense strand to SEQ ID NO: 2468682
uaaacuagugcccucgccu

SEQ ID NO: 2468684 - RNA, 19 nt, Artificial Sequence
  Description of Artificial Sequence: Synthetic oligonucleotide
  Sense strand starting at position 3533 of SEQ ID NO: 1887389
caguguuguggcuaagaac

SEQ ID NO: 2468685 - RNA, 19 nt, Artificial Sequence
  Description of Artificial Sequence: Synthetic oligonucleotide
  Antisense strand to SEQ ID NO: 2468684
guucuuagccacaacacug

SEQ ID NO: 2468686 - RNA, 19 nt, Artificial Sequence
  Description of Artificial Sequence: Synthetic oligonucleotide
  Sense strand starting at position 3602 of SEQ ID NO: 1887389
acuccaaacucgucacuga

SEQ ID NO: 2468687 - RNA, 19 nt, Artificial Sequence
  Description of Artificial Sequence: Synthetic oligonucleotide
  Antisense strand to SEQ ID NO: 2468686
ucagugacgaguuuggagu

SEQ ID NO: 2468688 - RNA, 19 nt, Artificial Sequence
  Description of Artificial Sequence: Synthetic oligonucleotide
  Sense strand starting at position 3950 of SEQ ID NO: 1887389
augaaauuacacugucugu

SEQ ID NO: 2468689 - RNA, 19 nt, Artificial Sequence
  Description of Artificial Sequence: Synthetic oligonucleotide
  Antisense strand to SEQ ID NO: 2468688
acagacaguguaauuucau

SEQ ID NO: 2468690 - RNA, 19 nt, Artificial Sequence
  Description of Artificial Sequence: Synthetic oligonucleotide
  Sense strand starting at position 3981 of SEQ ID NO: 1887389
cauauuuguugucugucua

SEQ ID NO: 2468691 - RNA, 19 nt, Artificial Sequence
  Description of Artificial Sequence: Synthetic oligonucleotide
  Antisense strand to SEQ ID NO: 2468690
uagacagacaacaaauaug

SEQ ID NO: 2468692 - RNA, 19 nt, Artificial Sequence
  Description of Artificial Sequence: Synthetic oligonucleotide
  Sense strand starting at position 3982 of SEQ ID NO: 1887389
auauuuguugucugucuau

SEQ ID NO: 2468693 - RNA, 19 nt, Artificial Sequence
  Description of Artificial Sequence: Synthetic oligonucleotide
  Antisense strand to SEQ ID NO: 2468692
auagacagacaacaaauau

SEQ ID NO: 2468694 - RNA, 19 nt, Artificial Sequence
  Description of Artificial Sequence: Synthetic oligonucleotide
  Sense strand starting at position 8 of SEQ ID NO: 1887390
acauuucccuaagauggga

SEQ ID NO: 2468695 - RNA, 19 nt, Artificial Sequence
  Description of Artificial Sequence: Synthetic oligonucleotide
  Antisense strand to SEQ ID NO: 2468694
ucccaucuuagggaaaugu

SEQ ID NO: 2468696 - RNA, 19 nt, Artificial Sequence
  Description of Artificial Sequence: Synthetic oligonucleotide
  Sense strand starting at position 189 of SEQ ID NO: 1887390
ugaaauacucccuggcuga

SEQ ID NO: 2468697 - RNA, 19 nt, Artificial Sequence
  Description of Artificial Sequence: Synthetic oligonucleotide
  Antisense strand to SEQ ID NO: 2468696
ucagccagggaguauuuca

SEQ ID NO: 2468698 - RNA, 19 nt, Artificial Sequence
  Description of Artificial Sequence: Synthetic oligonucleotide
  Sense strand starting at position 190 of SEQ ID NO: 1887390
gaaauacucccuggcugag

SEQ ID NO: 2468699 - RNA, 19 nt, Artificial Sequence
  Description of Artificial Sequence: Synthetic oligonucleotide
  Antisense strand to SEQ ID NO: 2468698
cucagccagggaguauuuc

SEQ ID NO: 2468700 - RNA, 19 nt, Artificial Sequence
  Description of Artificial Sequence: Synthetic oligonucleotide
  Sense strand starting at position 204 of SEQ ID NO: 1887390
cugagacauccaggacucu

SEQ ID NO: 2468701 - RNA, 19 nt, Artificial Sequence
  Description of Artificial Sequence: Synthetic oligonucleotide
  Antisense strand to SEQ ID NO: 2468700
agaguccuggaugucucag

SEQ ID NO: 2468702 - RNA, 19 nt, Artificial Sequence
  Description of Artificial Sequence: Synthetic oligonucleotide
  Sense strand starting at position 263 of SEQ ID NO: 1887390
ugaucuuugaaguauggca

SEQ ID NO: 2468703 - RNA, 19 nt, Artificial Sequence
  Description of Artificial Sequence: Synthetic oligonucleotide
  Antisense strand to SEQ ID NO: 2468702
ugccauacuucaaagauca

SEQ ID NO: 2468704 - RNA, 19 nt, Artificial Sequence
  Description of Artificial Sequence: Synthetic oligonucleotide
  Sense strand starting at position 270 of SEQ ID NO: 1887390
ugaaguauggcagagcuga

SEQ ID NO: 2468705 - RNA, 19 nt, Artificial Sequence
  Description of Artificial Sequence: Synthetic oligonucleotide
  Antisense strand to SEQ ID NO: 2468704
ucagcucugccauacuuca

SEQ ID NO: 2468706 - RNA, 19 nt, Artificial Sequence
  Description of Artificial Sequence: Synthetic oligonucleotide
  Sense strand starting at position 677 of SEQ ID NO: 1887390
gggacucagcuaugaaaca

SEQ ID NO: 2468707 - RNA, 19 nt, Artificial Sequence
  Description of Artificial Sequence: Synthetic oligonucleotide
  Antisense strand to SEQ ID NO: 2468706
uguuucauagcugaguccc

SEQ ID NO: 2468708 - RNA, 19 nt, Artificial Sequence
  Description of Artificial Sequence: Synthetic oligonucleotide
  Sense strand starting at position 702 of SEQ ID NO: 1887390
cccuuuauggaucaguuaa

SEQ ID NO: 2468709 - RNA, 19 nt, Artificial Sequence
  Description of Artificial Sequence: Synthetic oligonucleotide
  Antisense strand to SEQ ID NO: 2468708
uuaacugauccauaaaggg

SEQ ID NO: 2468710 - RNA, 19 nt, Artificial Sequence
  Description of Artificial Sequence: Synthetic oligonucleotide
  Sense strand starting at position 704 of SEQ ID NO: 1887390
cuuuauggaucaguuaaua

SEQ ID NO: 2468711 - RNA, 19 nt, Artificial Sequence
  Description of Artificial Sequence: Synthetic oligonucleotide
  Antisense strand to SEQ ID NO: 2468710
uauuaacugauccauaaag

SEQ ID NO: 2468712 - RNA, 19 nt, Artificial Sequence
  Description of Artificial Sequence: Synthetic oligonucleotide
  Sense strand starting at position 805 of SEQ ID NO: 1887390
cagugcuagagaugggaua

SEQ ID NO: 2468713 - RNA, 19 nt, Artificial Sequence
  Description of Artificial Sequence: Synthetic oligonucleotide
  Antisense strand to SEQ ID NO: 2468712
uaucccaucucuagcacug

SEQ ID NO: 2468714 - RNA, 19 nt, Artificial Sequence
  Description of Artificial Sequence: Synthetic oligonucleotide
  Sense strand starting at position 1031 of SEQ ID NO: 1887390
aggucacacugucuggaau

SEQ ID NO: 2468715 - RNA, 19 nt, Artificial Sequence
  Description of Artificial Sequence: Synthetic oligonucleotide
  Antisense strand to SEQ ID NO: 2468714
auuccagacagugugaccu

SEQ ID NO: 2468716 - RNA, 19 nt, Artificial Sequence
  Description of Artificial Sequence: Synthetic oligonucleotide
  Sense strand starting at position 1160 of SEQ ID NO: 1887390
uaagaucucgaagaugcuu

SEQ ID NO: 2468717 - RNA, 19 nt, Artificial Sequence
  Description of Artificial Sequence: Synthetic oligonucleotide
  Antisense strand to SEQ ID NO: 2468716
aagcaucuucgagaucuua

SEQ ID NO: 2468718 - RNA, 19 nt, Artificial Sequence
  Description of Artificial Sequence: Synthetic oligonucleotide
  Sense strand starting at position 1297 of SEQ ID NO: 1887390
uguguucccagugaagaca

SEQ ID NO: 2468719 - RNA, 19 nt, Artificial Sequence
  Description of Artificial Sequence: Synthetic oligonucleotide
  Antisense strand to SEQ ID NO: 2468718
ugucuucacugggaacaca

SEQ ID NO: 2468720 - RNA, 19 nt, Artificial Sequence
  Description of Artificial Sequence: Synthetic oligonucleotide
  Sense strand starting at position 1476 of SEQ ID NO: 1887390
acacaugugcuggagaguu

SEQ ID NO: 2468721 - RNA, 19 nt, Artificial Sequence
  Description of Artificial Sequence: Synthetic oligonucleotide
  Antisense strand to SEQ ID NO: 2468720
aacucuccagcacaugugu

SEQ ID NO: 2468722 - RNA, 19 nt, Artificial Sequence
  Description of Artificial Sequence: Synthetic oligonucleotide
  Sense strand starting at position 1508 of SEQ ID NO: 1887390
ugcuuagagccaugcauuu

SEQ ID NO: 2468723 - RNA, 19 nt, Artificial Sequence
  Description of Artificial Sequence: Synthetic oligonucleotide
  Antisense strand to SEQ ID NO: 2468722
aaaugcauggcucuaagca

SEQ ID NO: 2468724 - RNA, 19 nt, Artificial Sequence
  Description of Artificial Sequence: Synthetic oligonucleotide
  Sense strand starting at position 1674 of SEQ ID NO: 1887390
aaaguaucagggcgauaaa

SEQ ID NO: 2468725 - RNA, 19 nt, Artificial Sequence
  Description of Artificial Sequence: Synthetic oligonucleotide
  Antisense strand to SEQ ID NO: 2468724
uuuaucgcccugauacuuu

SEQ ID NO: 2468726 - RNA, 19 nt, Artificial Sequence
  Description of Artificial Sequence: Synthetic oligonucleotide
  Sense strand starting at position 1675 of SEQ ID NO: 1887390
aaguaucagggcgauaaac

SEQ ID NO: 2468727 - RNA, 19 nt, Artificial Sequence
  Description of Artificial Sequence: Synthetic oligonucleotide
  Antisense strand to SEQ ID NO: 2468726
guuuaucgcccugauacuu

SEQ ID NO: 2468728 - RNA, 19 nt, Artificial Sequence
  Description of Artificial Sequence: Synthetic oligonucleotide
  Sense strand starting at position 1677 of SEQ ID NO: 1887390
guaucagggcgauaaacaa

SEQ ID NO: 2468729 - RNA, 19 nt, Artificial Sequence
  Description of Artificial Sequence: Synthetic oligonucleotide
  Antisense strand to SEQ ID NO: 2468728
uuguuuaucgcccugauac

SEQ ID NO: 2468730 - RNA, 19 nt, Artificial Sequence
  Description of Artificial Sequence: Synthetic oligonucleotide
  Sense strand starting at position 1855 of SEQ ID NO: 1887390
agaucuguuuccuuuggga

SEQ ID NO: 2468731 - RNA, 19 nt, Artificial Sequence
  Description of Artificial Sequence: Synthetic oligonucleotide
  Antisense strand to SEQ ID NO: 2468730
ucccaaaggaaacagaucu

SEQ ID NO: 2468732 - RNA, 19 nt, Artificial Sequence
  Description of Artificial Sequence: Synthetic oligonucleotide
  Sense strand starting at position 2029 of SEQ ID NO: 1887390
gguaauaacagaugguaca

SEQ ID NO: 2468733 - RNA, 19 nt, Artificial Sequence
  Description of Artificial Sequence: Synthetic oligonucleotide
  Antisense strand to SEQ ID NO: 2468732
uguaccaucuguuauuacc

SEQ ID NO: 2468734 - RNA, 19 nt, Artificial Sequence
  Description of Artificial Sequence: Synthetic oligonucleotide
  Sense strand starting at position 2112 of SEQ ID NO: 1887390
guguguaucaaagaaaguu

SEQ ID NO: 2468735 - RNA, 19 nt, Artificial Sequence
  Description of Artificial Sequence: Synthetic oligonucleotide
  Antisense strand to SEQ ID NO: 2468734
aacuuucuuugauacacac

SEQ ID NO: 2468736 - RNA, 19 nt, Artificial Sequence
  Description of Artificial Sequence: Synthetic oligonucleotide
  Sense strand starting at position 2225 of SEQ ID NO: 1887390
caggguauuggucauacag

SEQ ID NO: 2468737 - RNA, 19 nt, Artificial Sequence
  Description of Artificial Sequence: Synthetic oligonucleotide
  Antisense strand to SEQ ID NO: 2468736
cuguaugaccaauacccug

SEQ ID NO: 2468738 - RNA, 19 nt, Artificial Sequence
  Description of Artificial Sequence: Synthetic oligonucleotide
  Sense strand starting at position 2260 of SEQ ID NO: 1887390
uggaaauauuaagugucuu

SEQ ID NO: 2468739 - RNA, 19 nt, Artificial Sequence
  Description of Artificial Sequence: Synthetic oligonucleotide
  Antisense strand to SEQ ID NO: 2468738
aagacacuuaauauuucca

SEQ ID NO: 2468740 - RNA, 19 nt, Artificial Sequence
  Description of Artificial Sequence: Synthetic oligonucleotide
  Sense strand starting at position 2399 of SEQ ID NO: 1887390
agauaacuauggccuuaua

SEQ ID NO: 2468741 - RNA, 19 nt, Artificial Sequence
  Description of Artificial Sequence: Synthetic oligonucleotide
  Antisense strand to SEQ ID NO: 2468740
uauaaggccauaguuaucu

SEQ ID NO: 2468742 - RNA, 19 nt, Artificial Sequence
  Description of Artificial Sequence: Synthetic oligonucleotide
  Sense strand starting at position 2409 of SEQ ID NO: 1887390
ggccuuauacugcagauga

SEQ ID NO: 2468743 - RNA, 19 nt, Artificial Sequence
  Description of Artificial Sequence: Synthetic oligonucleotide
  Antisense strand to SEQ ID NO: 2468742
ucaucugcaguauaaggcc

SEQ ID NO: 2468744 - RNA, 19 nt, Artificial Sequence
  Description of Artificial Sequence: Synthetic oligonucleotide
  Sense strand starting at position 2411 of SEQ ID NO: 1887390
ccuuauacugcagaugauu

SEQ ID NO: 2468745 - RNA, 19 nt, Artificial Sequence
  Description of Artificial Sequence: Synthetic oligonucleotide
  Antisense strand to SEQ ID NO: 2468744
aaucaucugcaguauaagg

SEQ ID NO: 2468746 - RNA, 19 nt, Artificial Sequence
  Description of Artificial Sequence: Synthetic oligonucleotide
  Sense strand starting at position 2645 of SEQ ID NO: 1887390
aauuauguacugggaguca

SEQ ID NO: 2468747 - RNA, 19 nt, Artificial Sequence
  Description of Artificial Sequence: Synthetic oligonucleotide
  Antisense strand to SEQ ID NO: 2468746
ugacucccaguacauaauu

SEQ ID NO: 2468748 - RNA, 19 nt, Artificial Sequence
  Description of Artificial Sequence: Synthetic oligonucleotide
  Sense strand starting at position 2730 of SEQ ID NO: 1887390
ucaucuucugcagagauua

SEQ ID NO: 2468749 - RNA, 19 nt, Artificial Sequence
  Description of Artificial Sequence: Synthetic oligonucleotide
  Antisense strand to SEQ ID NO: 2468748
uaaucucugcagaagauga

SEQ ID NO: 2468750 - RNA, 19 nt, Artificial Sequence
  Description of Artificial Sequence: Synthetic oligonucleotide
  Sense strand starting at position 2750 of SEQ ID NO: 1887390
cugcucucugaggagaguu

SEQ ID NO: 2468751 - RNA, 19 nt, Artificial Sequence
  Description of Artificial Sequence: Synthetic oligonucleotide
  Antisense strand to SEQ ID NO: 2468750
aacucuccucagagagcag

SEQ ID NO: 2468752 - RNA, 19 nt, Artificial Sequence
  Description of Artificial Sequence: Synthetic oligonucleotide
  Sense strand starting at position 2833 of SEQ ID NO: 1887390
uguugauaggagugaagau

SEQ ID NO: 2468753 - RNA, 19 nt, Artificial Sequence
  Description of Artificial Sequence: Synthetic oligonucleotide
  Antisense strand to SEQ ID NO: 2468752
aucuucacuccuaucaaca

SEQ ID NO: 2468754 - RNA, 19 nt, Artificial Sequence
  Description of Artificial Sequence: Synthetic oligonucleotide
  Sense strand starting at position 2842 of SEQ ID NO: 1887390
gagugaagaucuccacccu

SEQ ID NO: 2468755 - RNA, 19 nt, Artificial Sequence
  Description of Artificial Sequence: Synthetic oligonucleotide
  Antisense strand to SEQ ID NO: 2468754
aggguggagaucuucacuc

SEQ ID NO: 2468756 - RNA, 19 nt, Artificial Sequence
  Description of Artificial Sequence: Synthetic oligonucleotide
  Sense strand starting at position 3039 of SEQ ID NO: 1887390
uccaaaggugaucaucagu

SEQ ID NO: 2468757 - RNA, 19 nt, Artificial Sequence
  Description of Artificial Sequence: Synthetic oligonucleotide
  Antisense strand to SEQ ID NO: 2468756
acugaugaucaccuuugga

SEQ ID NO: 2468758 - RNA, 19 nt, Artificial Sequence
  Description of Artificial Sequence: Synthetic oligonucleotide
  Sense strand starting at position 3298 of SEQ ID NO: 1887390
guugaauuagcccacagau

SEQ ID NO: 2468759 - RNA, 19 nt, Artificial Sequence
  Description of Artificial Sequence: Synthetic oligonucleotide
  Antisense strand to SEQ ID NO: 2468758
aucugugggcuaauucaac

SEQ ID NO: 2468760 - RNA, 19 nt, Artificial Sequence
  Description of Artificial Sequence: Synthetic oligonucleotide
  Sense strand starting at position 3310 of SEQ ID NO: 1887390
cacagaugcuuccugggaa

SEQ ID NO: 2468761 - RNA, 19 nt, Artificial Sequence
  Description of Artificial Sequence: Synthetic oligonucleotide
  Antisense strand to SEQ ID NO: 2468760
uucccaggaagcaucugug

SEQ ID NO: 2468762 - RNA, 19 nt, Artificial Sequence
  Description of Artificial Sequence: Synthetic oligonucleotide
  Sense strand starting at position 3324 of SEQ ID NO: 1887390
gggaaaguauuugaguaau

SEQ ID NO: 2468763 - RNA, 19 nt, Artificial Sequence
  Description of Artificial Sequence: Synthetic oligonucleotide
  Antisense strand to SEQ ID NO: 2468762
auuacucaaauacuuuccc

SEQ ID NO: 2468764 - RNA, 19 nt, Artificial Sequence
  Description of Artificial Sequence: Synthetic oligonucleotide
  Sense strand starting at position 3336 of SEQ ID NO: 1887390
gaguaaucccuggaggcag

SEQ ID NO: 2468765 - RNA, 19 nt, Artificial Sequence
  Description of Artificial Sequence: Synthetic oligonucleotide
  Antisense strand to SEQ ID NO: 2468764
cugccuccagggauuacuc

SEQ ID NO: 2468766 - RNA, 19 nt, Artificial Sequence
  Description of Artificial Sequence: Synthetic oligonucleotide
  Sense strand starting at position 3449 of SEQ ID NO: 1887390
aucagaaauuguccaguug

SEQ ID NO: 2468767 - RNA, 19 nt, Artificial Sequence
  Description of Artificial Sequence: Synthetic oligonucleotide
  Antisense strand to SEQ ID NO: 2468766
caacuggacaauuucugau

SEQ ID NO: 2468768 - RNA, 19 nt, Artificial Sequence
  Description of Artificial Sequence: Synthetic oligonucleotide
  Sense strand starting at position 3450 of SEQ ID NO: 1887390
ucagaaauuguccaguuga

SEQ ID NO: 2468769 - RNA, 19 nt, Artificial Sequence
  Description of Artificial Sequence: Synthetic oligonucleotide
  Antisense strand to SEQ ID NO: 2468768
ucaacuggacaauuucuga

SEQ ID NO: 2468770 - RNA, 19 nt, Artificial Sequence
  Description of Artificial Sequence: Synthetic oligonucleotide
  Sense strand starting at position 3509 of SEQ ID NO: 1887390
aauggagaaucagucaugu

SEQ ID NO: 2468771 - RNA, 19 nt, Artificial Sequence
  Description of Artificial Sequence: Synthetic oligonucleotide
  Antisense strand to SEQ ID NO: 2468770
acaugacugauucuccauu

SEQ ID NO: 2468772 - RNA, 19 nt, Artificial Sequence
  Description of Artificial Sequence: Synthetic oligonucleotide
  Sense strand starting at position 3870 of SEQ ID NO: 1887390
agugauggguuauuauuau

SEQ ID NO: 2468773 - RNA, 19 nt, Artificial Sequence
  Description of Artificial Sequence: Synthetic oligonucleotide
  Antisense strand to SEQ ID NO: 2468772
auaauaauaacccaucacu

SEQ ID NO: 2468774 - RNA, 19 nt, Artificial Sequence
  Description of Artificial Sequence: Synthetic oligonucleotide
  Sense strand starting at position 40 of SEQ ID NO: 1887391
uguauaguguucuuugaga

SEQ ID NO: 2468775 - RNA, 19 nt, Artificial Sequence
  Description of Artificial Sequence: Synthetic oligonucleotide
  Antisense strand to SEQ ID NO: 2468774
ucucaaagaacacuauaca

SEQ ID NO: 2468776 - RNA, 19 nt, Artificial Sequence
  Description of Artificial Sequence: Synthetic oligonucleotide
  Sense strand starting at position 42 of SEQ ID NO: 1887391
uauaguguucuuugagaaa

SEQ ID NO: 2468777 - RNA, 19 nt, Artificial Sequence
  Description of Artificial Sequence: Synthetic oligonucleotide
  Antisense strand to SEQ ID NO: 2468776
uuucucaaagaacacuaua

SEQ ID NO: 2468778 - RNA, 19 nt, Artificial Sequence
  Description of Artificial Sequence: Synthetic oligonucleotide
  Sense strand starting at position 142 of SEQ ID NO: 1887391
ggcuccuguacucauggau

SEQ ID NO: 2468779 - RNA, 19 nt, Artificial Sequence
  Description of Artificial Sequence: Synthetic oligonucleotide
  Antisense strand to SEQ ID NO: 2468778
auccaugaguacaggagcc

SEQ ID NO: 2468780 - RNA, 19 nt, Artificial Sequence
  Description of Artificial Sequence: Synthetic oligonucleotide
  Sense strand starting at position 166 of SEQ ID NO: 1887391
agucuauuaguagauguac

SEQ ID NO: 2468781 - RNA, 19 nt, Artificial Sequence
  Description of Artificial Sequence: Synthetic oligonucleotide
  Antisense strand to SEQ ID NO: 2468780
guacaucuacuaauagacu

SEQ ID NO: 2468782 - RNA, 19 nt, Artificial Sequence
  Description of Artificial Sequence: Synthetic oligonucleotide
  Sense strand starting at position 249 of SEQ ID NO: 1887391
gcuggauagugggcaugau

SEQ ID NO: 2468783 - RNA, 19 nt, Artificial Sequence
  Description of Artificial Sequence: Synthetic oligonucleotide
  Antisense strand to SEQ ID NO: 2468782
aucaugcccacuauccagc

SEQ ID NO: 2468784 - RNA, 19 nt, Artificial Sequence
  Description of Artificial Sequence: Synthetic oligonucleotide
  Sense strand starting at position 418 of SEQ ID NO: 1887391
auggcauagugaucacugu

SEQ ID NO: 2468785 - RNA, 19 nt, Artificial Sequence
  Description of Artificial Sequence: Synthetic oligonucleotide
  Antisense strand to SEQ ID NO: 2468784
acagugaucacuaugccau

SEQ ID NO: 2468786 - RNA, 19 nt, Artificial Sequence
  Description of Artificial Sequence: Synthetic oligonucleotide
  Sense strand starting at position 446 of SEQ ID NO: 1887391
ugauuaguauggccauacu

SEQ ID NO: 2468787 - RNA, 19 nt, Artificial Sequence
  Description of Artificial Sequence: Synthetic oligonucleotide
  Antisense strand to SEQ ID NO: 2468786
aguauggccauacuaauca

SEQ ID NO: 2468788 - RNA, 19 nt, Artificial Sequence
  Description of Artificial Sequence: Synthetic oligonucleotide
  Sense strand starting at position 449 of SEQ ID NO: 1887391
uuaguauggccauacuguu

SEQ ID NO: 2468789 - RNA, 19 nt, Artificial Sequence
  Description of Artificial Sequence: Synthetic oligonucleotide
  Antisense strand to SEQ ID NO: 2468788
aacaguauggccauacuaa

SEQ ID NO: 2468790 - RNA, 19 nt, Artificial Sequence
  Description of Artificial Sequence: Synthetic oligonucleotide
  Sense strand starting at position 465 of SEQ ID NO: 1887391
guuacuuaccuugaugguu

SEQ ID NO: 2468791 - RNA, 19 nt, Artificial Sequence
  Description of Artificial Sequence: Synthetic oligonucleotide
  Antisense strand to SEQ ID NO: 2468790
aaccaucaagguaaguaac

SEQ ID NO: 2468792 - RNA, 19 nt, Artificial Sequence
  Description of Artificial Sequence: Synthetic oligonucleotide
  Sense strand starting at position 470 of SEQ ID NO: 1887391
uuaccuugaugguuuaagu

SEQ ID NO: 2468793 - RNA, 19 nt, Artificial Sequence
  Description of Artificial Sequence: Synthetic oligonucleotide
  Antisense strand to SEQ ID NO: 2468792
acuuaaaccaucaagguaa

SEQ ID NO: 2468794 - RNA, 19 nt, Artificial Sequence
  Description of Artificial Sequence: Synthetic oligonucleotide
  Sense strand starting at position 479 of SEQ ID NO: 1887391
ugguuuaaguaguuccaga

SEQ ID NO: 2468795 - RNA, 19 nt, Artificial Sequence
  Description of Artificial Sequence: Synthetic oligonucleotide
  Antisense strand to SEQ ID NO: 2468794
ucuggaacuacuuaaacca

SEQ ID NO: 2468796 - RNA, 19 nt, Artificial Sequence
  Description of Artificial Sequence: Synthetic oligonucleotide
  Sense strand starting at position 582 of SEQ ID NO: 1887391
cugccugaaugauugaguu

SEQ ID NO: 2468797 - RNA, 19 nt, Artificial Sequence
  Description of Artificial Sequence: Synthetic oligonucleotide
  Antisense strand to SEQ ID NO: 2468796
aacucaaucauucaggcag

SEQ ID NO: 2468798 - RNA, 19 nt, Artificial Sequence
  Description of Artificial Sequence: Synthetic oligonucleotide
  Sense strand starting at position 586 of SEQ ID NO: 1887391
cugaaugauugaguugcaa

SEQ ID NO: 2468799 - RNA, 19 nt, Artificial Sequence
  Description of Artificial Sequence: Synthetic oligonucleotide
  Antisense strand to SEQ ID NO: 2468798
uugcaacucaaucauucag

SEQ ID NO: 2468800 - RNA, 19 nt, Artificial Sequence
  Description of Artificial Sequence: Synthetic oligonucleotide
  Sense strand starting at position 652 of SEQ ID NO: 1887391
accuguuugucauccagga

SEQ ID NO: 2468801 - RNA, 19 nt, Artificial Sequence
  Description of Artificial Sequence: Synthetic oligonucleotide
  Antisense strand to SEQ ID NO: 2468800
uccuggaugacaaacaggu

SEQ ID NO: 2468802 - RNA, 19 nt, Artificial Sequence
  Description of Artificial Sequence: Synthetic oligonucleotide
  Sense strand starting at position 656 of SEQ ID NO: 1887391
guuugucauccaggaauag

SEQ ID NO: 2468803 - RNA, 19 nt, Artificial Sequence
  Description of Artificial Sequence: Synthetic oligonucleotide
  Antisense strand to SEQ ID NO: 2468802
cuauuccuggaugacaaac

SEQ ID NO: 2468804 - RNA, 19 nt, Artificial Sequence
  Description of Artificial Sequence: Synthetic oligonucleotide
  Sense strand starting at position 667 of SEQ ID NO: 1887391
aggaauagccugcaugcua

SEQ ID NO: 2468805 - RNA, 19 nt, Artificial Sequence
  Description of Artificial Sequence: Synthetic oligonucleotide
  Antisense strand to SEQ ID NO: 2468804
uagcaugcaggcuauuccu

SEQ ID NO: 2468806 - RNA, 19 nt, Artificial Sequence
  Description of Artificial Sequence: Synthetic oligonucleotide
  Sense strand starting at position 694 of SEQ ID NO: 1887391
ugguuuggaacauguguaa

SEQ ID NO: 2468807 - RNA, 19 nt, Artificial Sequence
  Description of Artificial Sequence: Synthetic oligonucleotide
  Antisense strand to SEQ ID NO: 2468806
uuacacauguuccaaacca

SEQ ID NO: 2468808 - RNA, 19 nt, Artificial Sequence
  Description of Artificial Sequence: Synthetic oligonucleotide
  Sense strand starting at position 761 of SEQ ID NO: 1887391
uguucuauuccaugugaaa

SEQ ID NO: 2468809 - RNA, 19 nt, Artificial Sequence
  Description of Artificial Sequence: Synthetic oligonucleotide
  Antisense strand to SEQ ID NO: 2468808
uuucacauggaauagaaca

SEQ ID NO: 2468810 - RNA, 19 nt, Artificial Sequence
  Description of Artificial Sequence: Synthetic oligonucleotide
  Sense strand starting at position 799 of SEQ ID NO: 1887391
ucggauuucuugcugacau

SEQ ID NO: 2468811 - RNA, 19 nt, Artificial Sequence
  Description of Artificial Sequence: Synthetic oligonucleotide
  Antisense strand to SEQ ID NO: 2468810
augucagcaagaaauccga

SEQ ID NO: 2468812 - RNA, 19 nt, Artificial Sequence
  Description of Artificial Sequence: Synthetic oligonucleotide
  Sense strand starting at position 842 of SEQ ID NO: 1887391
gggaguucacucugaaugc

SEQ ID NO: 2468813 - RNA, 19 nt, Artificial Sequence
  Description of Artificial Sequence: Synthetic oligonucleotide
  Antisense strand to SEQ ID NO: 2468812
gcauucagagugaacuccc

SEQ ID NO: 2468814 - RNA, 19 nt, Artificial Sequence
  Description of Artificial Sequence: Synthetic oligonucleotide
  Sense strand starting at position 1011 of SEQ ID NO: 1887391
agcuaaacucgauaucuuu

SEQ ID NO: 2468815 - RNA, 19 nt, Artificial Sequence
  Description of Artificial Sequence: Synthetic oligonucleotide
  Antisense strand to SEQ ID NO: 2468814
aaagauaucgaguuuagcu

SEQ ID NO: 2468816 - RNA, 19 nt, Artificial Sequence
  Description of Artificial Sequence: Synthetic oligonucleotide
  Sense strand starting at position 1199 of SEQ ID NO: 1887391
cucaguuaugucuaaucuu

SEQ ID NO: 2468817 - RNA, 19 nt, Artificial Sequence
  Description of Artificial Sequence: Synthetic oligonucleotide
  Antisense strand to SEQ ID NO: 2468816
aagauuagacauaacugag

SEQ ID NO: 2468818 - RNA, 19 nt, Artificial Sequence
  Description of Artificial Sequence: Synthetic oligonucleotide
  Sense strand starting at position 1202 of SEQ ID NO: 1887391
aguuaugucuaaucuuuag

SEQ ID NO: 2468819 - RNA, 19 nt, Artificial Sequence
  Description of Artificial Sequence: Synthetic oligonucleotide
  Antisense strand to SEQ ID NO: 2468818
cuaaagauuagacauaacu

SEQ ID NO: 2468820 - RNA, 19 nt, Artificial Sequence
  Description of Artificial Sequence: Synthetic oligonucleotide
  Sense strand starting at position 1247 of SEQ ID NO: 1887391
aacuguuggcagcaucaua

SEQ ID NO: 2468821 - RNA, 19 nt, Artificial Sequence
  Description of Artificial Sequence: Synthetic oligonucleotide
  Antisense strand to SEQ ID NO: 2468820
uaugaugcugccaacaguu

SEQ ID NO: 2468822 - RNA, 19 nt, Artificial Sequence
  Description of Artificial Sequence: Synthetic oligonucleotide
  Sense strand starting at position 1516 of SEQ ID NO: 1887391
acuccaggaagcugugauu

SEQ ID NO: 2468823 - RNA, 19 nt, Artificial Sequence
  Description of Artificial Sequence: Synthetic oligonucleotide
  Antisense strand to SEQ ID NO: 2468822
aaucacagcuuccuggagu

SEQ ID NO: 2468824 - RNA, 19 nt, Artificial Sequence
  Description of Artificial Sequence: Synthetic oligonucleotide
  Sense strand starting at position 1590 of SEQ ID NO: 1887391
uuguuuggaaagugaaaug

SEQ ID NO: 2468825 - RNA, 19 nt, Artificial Sequence
  Description of Artificial Sequence: Synthetic oligonucleotide
  Antisense strand to SEQ ID NO: 2468824
cauuucacuuuccaaacaa

SEQ ID NO: 2468826 - RNA, 19 nt, Artificial Sequence
  Description of Artificial Sequence: Synthetic oligonucleotide
  Sense strand starting at position 1791 of SEQ ID NO: 1887391
agcagauguccugaaccua

SEQ ID NO: 2468827 - RNA, 19 nt, Artificial Sequence
  Description of Artificial Sequence: Synthetic oligonucleotide
  Antisense strand to SEQ ID NO: 2468826
uagguucaggacaucugcu

SEQ ID NO: 2468828 - RNA, 19 nt, Artificial Sequence
  Description of Artificial Sequence: Synthetic oligonucleotide
  Sense strand starting at position 1864 of SEQ ID NO: 1887391
cuccgugauagugacauau

SEQ ID NO: 2468829 - RNA, 19 nt, Artificial Sequence
  Description of Artificial Sequence: Synthetic oligonucleotide
  Antisense strand to SEQ ID NO: 2468828
auaugucacuaucacggag

SEQ ID NO: 2468830 - RNA, 19 nt, Artificial Sequence
  Description of Artificial Sequence: Synthetic oligonucleotide
  Sense strand starting at position 1946 of SEQ ID NO: 1887391
cauauaacguccucaggga

SEQ ID NO: 2468831 - RNA, 19 nt, Artificial Sequence
  Description of Artificial Sequence: Synthetic oligonucleotide
  Antisense strand to SEQ ID NO: 2468830
ucccugaggacguuauaug

SEQ ID NO: 2468832 - RNA, 19 nt, Artificial Sequence
  Description of Artificial Sequence: Synthetic oligonucleotide
  Sense strand starting at position 1976 of SEQ ID NO: 1887391
ggcuuugcucagggacuca

SEQ ID NO: 2468833 - RNA, 19 nt, Artificial Sequence
  Description of Artificial Sequence: Synthetic oligonucleotide
  Antisense strand to SEQ ID NO: 2468832
ugagucccugagcaaagcc

SEQ ID NO: 2468834 - RNA, 19 nt, Artificial Sequence
  Description of Artificial Sequence: Synthetic oligonucleotide
  Sense strand starting at position 2007 of SEQ ID NO: 1887391
gaugaugggcucugacuua

SEQ ID NO: 2468835 - RNA, 19 nt, Artificial Sequence
  Description of Artificial Sequence: Synthetic oligonucleotide
  Antisense strand to SEQ ID NO: 2468834
uaagucagagcccaucauc

SEQ ID NO: 2468836 - RNA, 19 nt, Artificial Sequence
  Description of Artificial Sequence: Synthetic oligonucleotide
  Sense strand starting at position 2012 of SEQ ID NO: 1887391
ugggcucugacuuaguaca

SEQ ID NO: 2468837 - RNA, 19 nt, Artificial Sequence
  Description of Artificial Sequence: Synthetic oligonucleotide
  Antisense strand to SEQ ID NO: 2468836
uguacuaagucagagccca

SEQ ID NO: 2468838 - RNA, 19 nt, Artificial Sequence
  Description of Artificial Sequence: Synthetic oligonucleotide
  Sense strand starting at position 2020 of SEQ ID NO: 1887391
gacuuaguacagugaguua

SEQ ID NO: 2468839 - RNA, 19 nt, Artificial Sequence
  Description of Artificial Sequence: Synthetic oligonucleotide
  Antisense strand to SEQ ID NO: 2468838
uaacucacuguacuaaguc

SEQ ID NO: 2468840 - RNA, 19 nt, Artificial Sequence
  Description of Artificial Sequence: Synthetic oligonucleotide
  Sense strand starting at position 2023 of SEQ ID NO: 1887391
uuaguacagugaguuauca

SEQ ID NO: 2468841 - RNA, 19 nt, Artificial Sequence
  Description of Artificial Sequence: Synthetic oligonucleotide
  Antisense strand to SEQ ID NO: 2468840
ugauaacucacuguacuaa

SEQ ID NO: 2468842 - RNA, 19 nt, Artificial Sequence
  Description of Artificial Sequence: Synthetic oligonucleotide
  Sense strand starting at position 2027 of SEQ ID NO: 1887391
uacagugaguuaucaccga

SEQ ID NO: 2468843 - RNA, 19 nt, Artificial Sequence
  Description of Artificial Sequence: Synthetic oligonucleotide
  Antisense strand to SEQ ID NO: 2468842
ucggugauaacucacugua

SEQ ID NO: 2468844 - RNA, 19 nt, Artificial Sequence
  Description of Artificial Sequence: Synthetic oligonucleotide
  Sense strand starting at position 2031 of SEQ ID NO: 1887391
gugaguuaucaccgaaagg

SEQ ID NO: 2468845 - RNA, 19 nt, Artificial Sequence
  Description of Artificial Sequence: Synthetic oligonucleotide
  Antisense strand to SEQ ID NO: 2468844
ccuuucggugauaacucac

SEQ ID NO: 2468846 - RNA, 19 nt, Artificial Sequence
  Description of Artificial Sequence: Synthetic oligonucleotide
  Sense strand starting at position 2216 of SEQ ID NO: 1887391
agcagaaugccugacucau

SEQ ID NO: 2468847 - RNA, 19 nt, Artificial Sequence
  Description of Artificial Sequence: Synthetic oligonucleotide
  Antisense strand to SEQ ID NO: 2468846
augagucaggcauucugcu

SEQ ID NO: 2468848 - RNA, 19 nt, Artificial Sequence
  Description of Artificial Sequence: Synthetic oligonucleotide
  Sense strand starting at position 2353 of SEQ ID NO: 1887391
agaauacaucacuguuggu

SEQ ID NO: 2468849 - RNA, 19 nt, Artificial Sequence
  Description of Artificial Sequence: Synthetic oligonucleotide
  Antisense strand to SEQ ID NO: 2468848
accaacagugauguauucu

SEQ ID NO: 2468850 - RNA, 19 nt, Artificial Sequence
  Description of Artificial Sequence: Synthetic oligonucleotide
  Sense strand starting at position 2358 of SEQ ID NO: 1887391
acaucacuguugguauaau

SEQ ID NO: 2468851 - RNA, 19 nt, Artificial Sequence
  Description of Artificial Sequence: Synthetic oligonucleotide
  Antisense strand to SEQ ID NO: 2468850
auuauaccaacagugaugu

SEQ ID NO: 2468852 - RNA, 19 nt, Artificial Sequence
  Description of Artificial Sequence: Synthetic oligonucleotide
  Sense strand starting at position 3148 of SEQ ID NO: 1887391
ugacuagugccacaguaaa

SEQ ID NO: 2468853 - RNA, 19 nt, Artificial Sequence
  Description of Artificial Sequence: Synthetic oligonucleotide
  Antisense strand to SEQ ID NO: 2468852
uuuacuguggcacuaguca

SEQ ID NO: 2468854 - RNA, 19 nt, Artificial Sequence
  Description of Artificial Sequence: Synthetic oligonucleotide
  Sense strand starting at position 54 of SEQ ID NO: 1887392
auguauagccugcauagaa

SEQ ID NO: 2468855 - RNA, 19 nt, Artificial Sequence
  Description of Artificial Sequence: Synthetic oligonucleotide
  Antisense strand to SEQ ID NO: 2468854
uucuaugcaggcuauacau

SEQ ID NO: 2468856 - RNA, 19 nt, Artificial Sequence
  Description of Artificial Sequence: Synthetic oligonucleotide
  Sense strand starting at position 67 of SEQ ID NO: 1887392
auagaaucccugugcaaau

SEQ ID NO: 2468857 - RNA, 19 nt, Artificial Sequence
  Description of Artificial Sequence: Synthetic oligonucleotide
  Antisense strand to SEQ ID NO: 2468856
auuugcacagggauucuau

SEQ ID NO: 2468858 - RNA, 19 nt, Artificial Sequence
  Description of Artificial Sequence: Synthetic oligonucleotide
  Sense strand starting at position 80 of SEQ ID NO: 1887392
gcaaaucccucaucuggaa

SEQ ID NO: 2468859 - RNA, 19 nt, Artificial Sequence
  Description of Artificial Sequence: Synthetic oligonucleotide
  Antisense strand to SEQ ID NO: 2468858
uuccagaugagggauuugc

SEQ ID NO: 2468860 - RNA, 19 nt, Artificial Sequence
  Description of Artificial Sequence: Synthetic oligonucleotide
  Sense strand starting at position 268 of SEQ ID NO: 1887392
uguacagucuuucuuaaua

SEQ ID NO: 2468861 - RNA, 19 nt, Artificial Sequence
  Description of Artificial Sequence: Synthetic oligonucleotide
  Antisense strand to SEQ ID NO: 2468860
uauuaagaaagacuguaca

SEQ ID NO: 2468862 - RNA, 19 nt, Artificial Sequence
  Description of Artificial Sequence: Synthetic oligonucleotide
  Sense strand starting at position 544 of SEQ ID NO: 1887392
ccauuugaaugguauugaa

SEQ ID NO: 2468863 - RNA, 19 nt, Artificial Sequence
  Description of Artificial Sequence: Synthetic oligonucleotide
  Antisense strand to SEQ ID NO: 2468862
uucaauaccauucaaaugg

SEQ ID NO: 2468864 - RNA, 19 nt, Artificial Sequence
  Description of Artificial Sequence: Synthetic oligonucleotide
  Sense strand starting at position 926 of SEQ ID NO: 1887392
guguacauguaaccuacaa

SEQ ID NO: 2468865 - RNA, 19 nt, Artificial Sequence
  Description of Artificial Sequence: Synthetic oligonucleotide
  Antisense strand to SEQ ID NO: 2468864
uuguagguuacauguacac

SEQ ID NO: 2468866 - RNA, 19 nt, Artificial Sequence
  Description of Artificial Sequence: Synthetic oligonucleotide
  Sense strand starting at position 1130 of SEQ ID NO: 1887392
ucaaacagauagcuguaua

SEQ ID NO: 2468867 - RNA, 19 nt, Artificial Sequence
  Description of Artificial Sequence: Synthetic oligonucleotide
  Antisense strand to SEQ ID NO: 2468866
uauacagcuaucuguuuga

SEQ ID NO: 2468868 - RNA, 19 nt, Artificial Sequence
  Description of Artificial Sequence: Synthetic oligonucleotide
  Sense strand starting at position 1307 of SEQ ID NO: 1887392
ucaggaugcuaugcuaaga

SEQ ID NO: 2468869 - RNA, 19 nt, Artificial Sequence
  Description of Artificial Sequence: Synthetic oligonucleotide
  Antisense strand to SEQ ID NO: 2468868
ucuuagcauagcauccuga

SEQ ID NO: 2468870 - RNA, 19 nt, Artificial Sequence
  Description of Artificial Sequence: Synthetic oligonucleotide
  Sense strand starting at position 1460 of SEQ ID NO: 1887392
cagagauucuguuuaggau

SEQ ID NO: 2468871 - RNA, 19 nt, Artificial Sequence
  Description of Artificial Sequence: Synthetic oligonucleotide
  Antisense strand to SEQ ID NO: 2468870
auccuaaacagaaucucug

SEQ ID NO: 2468872 - RNA, 19 nt, Artificial Sequence
  Description of Artificial Sequence: Synthetic oligonucleotide
  Sense strand starting at position 1688 of SEQ ID NO: 1887392
ggaaacagguccuuuacua

SEQ ID NO: 2468873 - RNA, 19 nt, Artificial Sequence
  Description of Artificial Sequence: Synthetic oligonucleotide
  Antisense strand to SEQ ID NO: 2468872
uaguaaaggaccuguuucc

SEQ ID NO: 2468874 - RNA, 19 nt, Artificial Sequence
  Description of Artificial Sequence: Synthetic oligonucleotide
  Sense strand starting at position 1936 of SEQ ID NO: 1887392
caaaguugccaggaagcua

SEQ ID NO: 2468875 - RNA, 19 nt, Artificial Sequence
  Description of Artificial Sequence: Synthetic oligonucleotide
  Antisense strand to SEQ ID NO: 2468874
uagcuuccuggcaacuuug

SEQ ID NO: 2468876 - RNA, 19 nt, Artificial Sequence
  Description of Artificial Sequence: Synthetic oligonucleotide
  Sense strand starting at position 1956 of SEQ ID NO: 1887392
agaaucccgaguuaucuga

SEQ ID NO: 2468877 - RNA, 19 nt, Artificial Sequence
  Description of Artificial Sequence: Synthetic oligonucleotide
  Antisense strand to SEQ ID NO: 2468876
ucagauaacucgggauucu

SEQ ID NO: 2468878 - RNA, 19 nt, Artificial Sequence
  Description of Artificial Sequence: Synthetic oligonucleotide
  Sense strand starting at position 1958 of SEQ ID NO: 1887392
aaucccgaguuaucugaaa

SEQ ID NO: 2468879 - RNA, 19 nt, Artificial Sequence
  Description of Artificial Sequence: Synthetic oligonucleotide
  Antisense strand to SEQ ID NO: 2468878
uuucagauaacucgggauu

SEQ ID NO: 2468880 - RNA, 19 nt, Artificial Sequence
  Description of Artificial Sequence: Synthetic oligonucleotide
  Sense strand starting at position 1960 of SEQ ID NO: 1887392
ucccgaguuaucugaaaug

SEQ ID NO: 2468881 - RNA, 19 nt, Artificial Sequence
  Description of Artificial Sequence: Synthetic oligonucleotide
  Antisense strand to SEQ ID NO: 2468880
cauuucagauaacucggga

SEQ ID NO: 2468882 - RNA, 19 nt, Artificial Sequence
  Description of Artificial Sequence: Synthetic oligonucleotide
  Sense strand starting at position 1969 of SEQ ID NO: 1887392
aucugaaaugucuacagca

SEQ ID NO: 2468883 - RNA, 19 nt, Artificial Sequence
  Description of Artificial Sequence: Synthetic oligonucleotide
  Antisense strand to SEQ ID NO: 2468882
ugcuguagacauuucagau

SEQ ID NO: 2468884 - RNA, 19 nt, Artificial Sequence
  Description of Artificial Sequence: Synthetic oligonucleotide
  Sense strand starting at position 1971 of SEQ ID NO: 1887392
cugaaaugucuacagcaaa

SEQ ID NO: 2468885 - RNA, 19 nt, Artificial Sequence
  Description of Artificial Sequence: Synthetic oligonucleotide
  Antisense strand to SEQ ID NO: 2468884
uuugcuguagacauuucag

SEQ ID NO: 2468886 - RNA, 19 nt, Artificial Sequence
  Description of Artificial Sequence: Synthetic oligonucleotide
  Sense strand starting at position 2009 of SEQ ID NO: 1887392
gagcaaaggccuugacaag

SEQ ID NO: 2468887 - RNA, 19 nt, Artificial Sequence
  Description of Artificial Sequence: Synthetic oligonucleotide
  Antisense strand to SEQ ID NO: 2468886
cuugucaaggccuuugcuc

SEQ ID NO: 2468888 - RNA, 19 nt, Artificial Sequence
  Description of Artificial Sequence: Synthetic oligonucleotide
  Sense strand starting at position 2108 of SEQ ID NO: 1887392
cgugaaucaucuccaggac

SEQ ID NO: 2468889 - RNA, 19 nt, Artificial Sequence
  Description of Artificial Sequence: Synthetic oligonucleotide
  Antisense strand to SEQ ID NO: 2468888
guccuggagaugauucacg

SEQ ID NO: 2468890 - RNA, 19 nt, Artificial Sequence
  Description of Artificial Sequence: Synthetic oligonucleotide
  Sense strand starting at position 2292 of SEQ ID NO: 1887392
guuacuagaucucugaauc

SEQ ID NO: 2468891 - RNA, 19 nt, Artificial Sequence
  Description of Artificial Sequence: Synthetic oligonucleotide
  Antisense strand to SEQ ID NO: 2468890
gauucagagaucuaguaac

SEQ ID NO: 2468892 - RNA, 19 nt, Artificial Sequence
  Description of Artificial Sequence: Synthetic oligonucleotide
  Sense strand starting at position 2334 of SEQ ID NO: 1887392
guuauuaaaugagcugaca

SEQ ID NO: 2468893 - RNA, 19 nt, Artificial Sequence
  Description of Artificial Sequence: Synthetic oligonucleotide
  Antisense strand to SEQ ID NO: 2468892
ugucagcucauuuaauaac

SEQ ID NO: 2468894 - RNA, 19 nt, Artificial Sequence
  Description of Artificial Sequence: Synthetic oligonucleotide
  Sense strand starting at position 2437 of SEQ ID NO: 1887392
cauagagaguuagcuguua

SEQ ID NO: 2468895 - RNA, 19 nt, Artificial Sequence
  Description of Artificial Sequence: Synthetic oligonucleotide
  Antisense strand to SEQ ID NO: 2468894
uaacagcuaacucucuaug

SEQ ID NO: 2468896 - RNA, 19 nt, Artificial Sequence
  Description of Artificial Sequence: Synthetic oligonucleotide
  Sense strand starting at position 2756 of SEQ ID NO: 1887392
ccaucaucuuggucuguaa

SEQ ID NO: 2468897 - RNA, 19 nt, Artificial Sequence
  Description of Artificial Sequence: Synthetic oligonucleotide
  Antisense strand to SEQ ID NO: 2468896
uuacagaccaagaugaugg

SEQ ID NO: 2468898 - RNA, 19 nt, Artificial Sequence
  Description of Artificial Sequence: Synthetic oligonucleotide
  Sense strand starting at position 2860 of SEQ ID NO: 1887392
gaugcagugcucuacauua

SEQ ID NO: 2468899 - RNA, 19 nt, Artificial Sequence
  Description of Artificial Sequence: Synthetic oligonucleotide
  Antisense strand to SEQ ID NO: 2468898
uaauguagagcacugcauc

SEQ ID NO: 2468900 - RNA, 19 nt, Artificial Sequence
  Description of Artificial Sequence: Synthetic oligonucleotide
  Sense strand starting at position 2862 of SEQ ID NO: 1887392
ugcagugcucuacauuaca

SEQ ID NO: 2468901 - RNA, 19 nt, Artificial Sequence
  Description of Artificial Sequence: Synthetic oligonucleotide
  Antisense strand to SEQ ID NO: 2468900
uguaauguagagcacugca

SEQ ID NO: 2468902 - RNA, 19 nt, Artificial Sequence
  Description of Artificial Sequence: Synthetic oligonucleotide
  Sense strand starting at position 2885 of SEQ ID NO: 1887392
agacaagaguggucaaacu

SEQ ID NO: 2468903 - RNA, 19 nt, Artificial Sequence
  Description of Artificial Sequence: Synthetic oligonucleotide
  Antisense strand to SEQ ID NO: 2468902
aguuugaccacucuugucu

SEQ ID NO: 2468904 - RNA, 19 nt, Artificial Sequence
  Description of Artificial Sequence: Synthetic oligonucleotide
  Sense strand starting at position 2892 of SEQ ID NO: 1887392
aguggucaaacucauggua

SEQ ID NO: 2468905 - RNA, 19 nt, Artificial Sequence
  Description of Artificial Sequence: Synthetic oligonucleotide
  Antisense strand to SEQ ID NO: 2468904
uaccaugaguuugaccacu

SEQ ID NO: 2468906 - RNA, 19 nt, Artificial Sequence
  Description of Artificial Sequence: Synthetic oligonucleotide
  Sense strand starting at position 2895 of SEQ ID NO: 1887392
ggucaaacucaugguaucu

SEQ ID NO: 2468907 - RNA, 19 nt, Artificial Sequence
  Description of Artificial Sequence: Synthetic oligonucleotide
  Antisense strand to SEQ ID NO: 2468906
agauaccaugaguuugacc

SEQ ID NO: 2468908 - RNA, 19 nt, Artificial Sequence
  Description of Artificial Sequence: Synthetic oligonucleotide
  Sense strand starting at position 3109 of SEQ ID NO: 1887392
gauugcuuacugggaugau

SEQ ID NO: 2468909 - RNA, 19 nt, Artificial Sequence
  Description of Artificial Sequence: Synthetic oligonucleotide
  Antisense strand to SEQ ID NO: 2468908
aucaucccaguaagcaauc

SEQ ID NO: 2468910 - RNA, 19 nt, Artificial Sequence
  Description of Artificial Sequence: Synthetic oligonucleotide
  Sense strand starting at position 3112 of SEQ ID NO: 1887392
ugcuuacugggaugaucaa

SEQ ID NO: 2468911 - RNA, 19 nt, Artificial Sequence
  Description of Artificial Sequence: Synthetic oligonucleotide
  Antisense strand to SEQ ID NO: 2468910
uugaucaucccaguaagca

SEQ ID NO: 2468912 - RNA, 19 nt, Artificial Sequence
  Description of Artificial Sequence: Synthetic oligonucleotide
  Sense strand starting at position 3206 of SEQ ID NO: 1887392
cuguuucuagaugagguua

SEQ ID NO: 2468913 - RNA, 19 nt, Artificial Sequence
  Description of Artificial Sequence: Synthetic oligonucleotide
  Antisense strand to SEQ ID NO: 2468912
uaaccucaucuagaaacag

SEQ ID NO: 2468914 - RNA, 19 nt, Artificial Sequence
  Description of Artificial Sequence: Synthetic oligonucleotide
  Sense strand starting at position 3231 of SEQ ID NO: 1887392
gagucagucgacugaguaa

SEQ ID NO: 2468915 - RNA, 19 nt, Artificial Sequence
  Description of Artificial Sequence: Synthetic oligonucleotide
  Antisense strand to SEQ ID NO: 2468914
uuacucagucgacugacuc

SEQ ID NO: 2468916 - RNA, 19 nt, Artificial Sequence
  Description of Artificial Sequence: Synthetic oligonucleotide
  Sense strand starting at position 3467 of SEQ ID NO: 1887392
uggacucagccuggaacua

SEQ ID NO: 2468917 - RNA, 19 nt, Artificial Sequence
  Description of Artificial Sequence: Synthetic oligonucleotide
  Antisense strand to SEQ ID NO: 2468916
uaguuccaggcugagucca

SEQ ID NO: 2468918 - RNA, 19 nt, Artificial Sequence
  Description of Artificial Sequence: Synthetic oligonucleotide
  Sense strand starting at position 3552 of SEQ ID NO: 1887392
uugugugaguaauuccaua

SEQ ID NO: 2468919 - RNA, 19 nt, Artificial Sequence
  Description of Artificial Sequence: Synthetic oligonucleotide
  Antisense strand to SEQ ID NO: 2468918
uauggaauuacucacacaa

SEQ ID NO: 2468920 - RNA, 19 nt, Artificial Sequence
  Description of Artificial Sequence: Synthetic oligonucleotide
  Sense strand starting at position 3594 of SEQ ID NO: 1887392
auaguuaucuuucucuaga

SEQ ID NO: 2468921 - RNA, 19 nt, Artificial Sequence
  Description of Artificial Sequence: Synthetic oligonucleotide
  Antisense strand to SEQ ID NO: 2468920
ucuagagaaagauaacuau

SEQ ID NO: 2468922 - RNA, 19 nt, Artificial Sequence
  Description of Artificial Sequence: Synthetic oligonucleotide
  Sense strand starting at position 3596 of SEQ ID NO: 1887392
aguuaucuuucucuagaga

SEQ ID NO: 2468923 - RNA, 19 nt, Artificial Sequence
  Description of Artificial Sequence: Synthetic oligonucleotide
  Antisense strand to SEQ ID NO: 2468922
ucucuagagaaagauaacu

SEQ ID NO: 2468924 - RNA, 19 nt, Artificial Sequence
  Description of Artificial Sequence: Synthetic oligonucleotide
  Sense strand starting at position 3626 of SEQ ID NO: 1887392
cuacuauugguuuggcaga

SEQ ID NO: 2468925 - RNA, 19 nt, Artificial Sequence
  Description of Artificial Sequence: Synthetic oligonucleotide
  Antisense strand to SEQ ID NO: 2468924
ucugccaaaccaauaguag

SEQ ID NO: 2468926 - RNA, 19 nt, Artificial Sequence
  Description of Artificial Sequence: Synthetic oligonucleotide
  Sense strand starting at position 3628 of SEQ ID NO: 1887392
acuauugguuuggcagaga

SEQ ID NO: 2468927 - RNA, 19 nt, Artificial Sequence
  Description of Artificial Sequence: Synthetic oligonucleotide
  Antisense strand to SEQ ID NO: 2468926
ucucugccaaaccaauagu

SEQ ID NO: 2468928 - RNA, 19 nt, Artificial Sequence
  Description of Artificial Sequence: Synthetic oligonucleotide
  Sense strand starting at position 3631 of SEQ ID NO: 1887392
auugguuuggcagagagua

SEQ ID NO: 2468929 - RNA, 19 nt, Artificial Sequence
  Description of Artificial Sequence: Synthetic oligonucleotide
  Antisense strand to SEQ ID NO: 2468928
uacucucugccaaaccaau

SEQ ID NO: 2468930 - RNA, 19 nt, Artificial Sequence
  Description of Artificial Sequence: Synthetic oligonucleotide
  Sense strand starting at position 3633 of SEQ ID NO: 1887392
ugguuuggcagagaguaaa

SEQ ID NO: 2468931 - RNA, 19 nt, Artificial Sequence
  Description of Artificial Sequence: Synthetic oligonucleotide
  Antisense strand to SEQ ID NO: 2468930
uuuacucucugccaaacca

SEQ ID NO: 2468932 - RNA, 19 nt, Artificial Sequence
  Description of Artificial Sequence: Synthetic oligonucleotide
  Sense strand starting at position 3851 of SEQ ID NO: 1887392
gccugugaucuugagaauc

SEQ ID NO: 2468933 - RNA, 19 nt, Artificial Sequence
  Description of Artificial Sequence: Synthetic oligonucleotide
  Antisense strand to SEQ ID NO: 2468932
gauucucaagaucacaggc

SEQ ID NO: 2468934 - RNA, 19 nt, Artificial Sequence
  Description of Artificial Sequence: Synthetic oligonucleotide
  Sense strand starting at position 25 of SEQ ID NO: 1887393
aggucucagccuuauauac

SEQ ID NO: 2468935 - RNA, 19 nt, Artificial Sequence
  Description of Artificial Sequence: Synthetic oligonucleotide
  Antisense strand to SEQ ID NO: 2468934
guauauaaggcugagaccu

SEQ ID NO: 2468936 - RNA, 19 nt, Artificial Sequence
  Description of Artificial Sequence: Synthetic oligonucleotide
  Sense strand starting at position 72 of SEQ ID NO: 1887393
gcaacaaacuguguacuca

SEQ ID NO: 2468937 - RNA, 19 nt, Artificial Sequence
  Description of Artificial Sequence: Synthetic oligonucleotide
  Antisense strand to SEQ ID NO: 2468936
ugaguacacaguuuguugc

SEQ ID NO: 2468938 - RNA, 19 nt, Artificial Sequence
  Description of Artificial Sequence: Synthetic oligonucleotide
  Sense strand starting at position 169 of SEQ ID NO: 1887393
gggagucccacccggaaau

SEQ ID NO: 2468939 - RNA, 19 nt, Artificial Sequence
  Description of Artificial Sequence: Synthetic oligonucleotide
  Antisense strand to SEQ ID NO: 2468938
auuuccgggugggacuccc

SEQ ID NO: 2468940 - RNA, 19 nt, Artificial Sequence
  Description of Artificial Sequence: Synthetic oligonucleotide
  Sense strand starting at position 221 of SEQ ID NO: 1887393
gaaacuucuugagaaagag

SEQ ID NO: 2468941 - RNA, 19 nt, Artificial Sequence
  Description of Artificial Sequence: Synthetic oligonucleotide
  Antisense strand to SEQ ID NO: 2468940
cucuuucucaagaaguuuc

SEQ ID NO: 2468942 - RNA, 19 nt, Artificial Sequence
  Description of Artificial Sequence: Synthetic oligonucleotide
  Sense strand starting at position 307 of SEQ ID NO: 1887393
augcaucauccauagcagu

SEQ ID NO: 2468943 - RNA, 19 nt, Artificial Sequence
  Description of Artificial Sequence: Synthetic oligonucleotide
  Antisense strand to SEQ ID NO: 2468942
acugcuauggaugaugcau

SEQ ID NO: 2468944 - RNA, 19 nt, Artificial Sequence
  Description of Artificial Sequence: Synthetic oligonucleotide
  Sense strand starting at position 318 of SEQ ID NO: 1887393
auagcaguucuugggaaau

SEQ ID NO: 2468945 - RNA, 19 nt, Artificial Sequence
  Description of Artificial Sequence: Synthetic oligonucleotide
  Antisense strand to SEQ ID NO: 2468944
auuucccaagaacugcuau

SEQ ID NO: 2468946 - RNA, 19 nt, Artificial Sequence
  Description of Artificial Sequence: Synthetic oligonucleotide
  Sense strand starting at position 1736 of SEQ ID NO: 1887393
augguaacgcugcaaauaa

SEQ ID NO: 2468947 - RNA, 19 nt, Artificial Sequence
  Description of Artificial Sequence: Synthetic oligonucleotide
  Antisense strand to SEQ ID NO: 2468946
uuauuugcagcguuaccau

SEQ ID NO: 2468948 - RNA, 19 nt, Artificial Sequence
  Description of Artificial Sequence: Synthetic oligonucleotide
  Sense strand starting at position 1798 of SEQ ID NO: 1887393
uuuccuuauuuaggguaaa

SEQ ID NO: 2468949 - RNA, 19 nt, Artificial Sequence
  Description of Artificial Sequence: Synthetic oligonucleotide
  Antisense strand to SEQ ID NO: 2468948
uuuacccuaaauaaggaaa

SEQ ID NO: 2468950 - RNA, 19 nt, Artificial Sequence
  Description of Artificial Sequence: Synthetic oligonucleotide
  Sense strand starting at position 1799 of SEQ ID NO: 1887393
uuccuuauuuaggguaaau

SEQ ID NO: 2468951 - RNA, 19 nt, Artificial Sequence
  Description of Artificial Sequence: Synthetic oligonucleotide
  Antisense strand to SEQ ID NO: 2468950
auuuacccuaaauaaggaa

SEQ ID NO: 2468952 - RNA, 19 nt, Artificial Sequence
  Description of Artificial Sequence: Synthetic oligonucleotide
  Sense strand starting at position 1820 of SEQ ID NO: 1887393
gaaugacaugugggccaua

SEQ ID NO: 2468953 - RNA, 19 nt, Artificial Sequence
  Description of Artificial Sequence: Synthetic oligonucleotide
  Antisense strand to SEQ ID NO: 2468952
uauggcccacaugucauuc

SEQ ID NO: 2468954 - RNA, 19 nt, Artificial Sequence
  Description of Artificial Sequence: Synthetic oligonucleotide
  Sense strand starting at position 1823 of SEQ ID NO: 1887393
ugacaugugggccauaaca

SEQ ID NO: 2468955 - RNA, 19 nt, Artificial Sequence
  Description of Artificial Sequence: Synthetic oligonucleotide
  Antisense strand to SEQ ID NO: 2468954
uguuauggcccacauguca

SEQ ID NO: 2468956 - RNA, 19 nt, Artificial Sequence
  Description of Artificial Sequence: Synthetic oligonucleotide
  Sense strand starting at position 1825 of SEQ ID NO: 1887393
acaugugggccauaacaau

SEQ ID NO: 2468957 - RNA, 19 nt, Artificial Sequence
  Description of Artificial Sequence: Synthetic oligonucleotide
  Antisense strand to SEQ ID NO: 2468956
auuguuauggcccacaugu

SEQ ID NO: 2468958 - RNA, 19 nt, Artificial Sequence
  Description of Artificial Sequence: Synthetic oligonucleotide
  Sense strand starting at position 1890 of SEQ ID NO: 1887393
gguuacuaccagcguuaga

SEQ ID NO: 2468959 - RNA, 19 nt, Artificial Sequence
  Description of Artificial Sequence: Synthetic oligonucleotide
  Antisense strand to SEQ ID NO: 2468958
ucuaacgcugguaguaacc

SEQ ID NO: 2468960 - RNA, 19 nt, Artificial Sequence
  Description of Artificial Sequence: Synthetic oligonucleotide
  Sense strand starting at position 2175 of SEQ ID NO: 1887393
gggaaauccggaugguaug

SEQ ID NO: 2468961 - RNA, 19 nt, Artificial Sequence
  Description of Artificial Sequence: Synthetic oligonucleotide
  Antisense strand to SEQ ID NO: 2468960
cauaccauccggauuuccc

SEQ ID NO: 2468962 - RNA, 19 nt, Artificial Sequence
  Description of Artificial Sequence: Synthetic oligonucleotide
  Sense strand starting at position 2176 of SEQ ID NO: 1887393
ggaaauccggaugguauga

SEQ ID NO: 2468963 - RNA, 19 nt, Artificial Sequence
  Description of Artificial Sequence: Synthetic oligonucleotide
  Antisense strand to SEQ ID NO: 2468962
ucauaccauccggauuucc

SEQ ID NO: 2468964 - RNA, 19 nt, Artificial Sequence
  Description of Artificial Sequence: Synthetic oligonucleotide
  Sense strand starting at position 2186 of SEQ ID NO: 1887393
augguaugauucuuccuga

SEQ ID NO: 2468965 - RNA, 19 nt, Artificial Sequence
  Description of Artificial Sequence: Synthetic oligonucleotide
  Antisense strand to SEQ ID NO: 2468964
ucaggaagaaucauaccau

SEQ ID NO: 2468966 - RNA, 19 nt, Artificial Sequence
  Description of Artificial Sequence: Synthetic oligonucleotide
  Sense strand starting at position 2187 of SEQ ID NO: 1887393
ugguaugauucuuccugag

SEQ ID NO: 2468967 - RNA, 19 nt, Artificial Sequence
  Description of Artificial Sequence: Synthetic oligonucleotide
  Antisense strand to SEQ ID NO: 2468966
cucaggaagaaucauacca

SEQ ID NO: 2468968 - RNA, 19 nt, Artificial Sequence
  Description of Artificial Sequence: Synthetic oligonucleotide
  Sense strand starting at position 2189 of SEQ ID NO: 1887393
guaugauucuuccugagca

SEQ ID NO: 2468969 - RNA, 19 nt, Artificial Sequence
  Description of Artificial Sequence: Synthetic oligonucleotide
  Antisense strand to SEQ ID NO: 2468968
ugcucaggaagaaucauac

SEQ ID NO: 2468970 - RNA, 19 nt, Artificial Sequence
  Description of Artificial Sequence: Synthetic oligonucleotide
  Sense strand starting at position 2191 of SEQ ID NO: 1887393
augauucuuccugagcaau

SEQ ID NO: 2468971 - RNA, 19 nt, Artificial Sequence
  Description of Artificial Sequence: Synthetic oligonucleotide
  Antisense strand to SEQ ID NO: 2468970
auugcucaggaagaaucau

SEQ ID NO: 2468972 - RNA, 19 nt, Artificial Sequence
  Description of Artificial Sequence: Synthetic oligonucleotide
  Sense strand starting at position 2201 of SEQ ID NO: 1887393
cugagcaauuuccgaauua

SEQ ID NO: 2468973 - RNA, 19 nt, Artificial Sequence
  Description of Artificial Sequence: Synthetic oligonucleotide
  Antisense strand to SEQ ID NO: 2468972
uaauucggaaauugcucag

SEQ ID NO: 2468974 - RNA, 19 nt, Artificial Sequence
  Description of Artificial Sequence: Synthetic oligonucleotide
  Sense strand starting at position 2202 of SEQ ID NO: 1887393
ugagcaauuuccgaauuaa

SEQ ID NO: 2468975 - RNA, 19 nt, Artificial Sequence
  Description of Artificial Sequence: Synthetic oligonucleotide
  Antisense strand to SEQ ID NO: 2468974
uuaauucggaaauugcuca

SEQ ID NO: 2468976 - RNA, 19 nt, Artificial Sequence
  Description of Artificial Sequence: Synthetic oligonucleotide
  Sense strand starting at position 2242 of SEQ ID NO: 1887393
gccagacuuucccugacuu

SEQ ID NO: 2468977 - RNA, 19 nt, Artificial Sequence
  Description of Artificial Sequence: Synthetic oligonucleotide
  Antisense strand to SEQ ID NO: 2468976
aagucagggaaagucuggc

SEQ ID NO: 2468978 - RNA, 19 nt, Artificial Sequence
  Description of Artificial Sequence: Synthetic oligonucleotide
  Sense strand starting at position 2250 of SEQ ID NO: 1887393
uucccugacuucucagagu

SEQ ID NO: 2468979 - RNA, 19 nt, Artificial Sequence
  Description of Artificial Sequence: Synthetic oligonucleotide
  Antisense strand to SEQ ID NO: 2468978
acucugagaagucagggaa

SEQ ID NO: 2468980 - RNA, 19 nt, Artificial Sequence
  Description of Artificial Sequence: Synthetic oligonucleotide
  Sense strand starting at position 2495 of SEQ ID NO: 1887393
guaccugucuguuucuuaa

SEQ ID NO: 2468981 - RNA, 19 nt, Artificial Sequence
  Description of Artificial Sequence: Synthetic oligonucleotide
  Antisense strand to SEQ ID NO: 2468980
uuaagaaacagacagguac

SEQ ID NO: 2468982 - RNA, 19 nt, Artificial Sequence
  Description of Artificial Sequence: Synthetic oligonucleotide
  Sense strand starting at position 2847 of SEQ ID NO: 1887393
aaauuagggcuuuggugaa

SEQ ID NO: 2468983 - RNA, 19 nt, Artificial Sequence
  Description of Artificial Sequence: Synthetic oligonucleotide
  Antisense strand to SEQ ID NO: 2468982
uucaccaaagcccuaauuu

SEQ ID NO: 2468984 - RNA, 19 nt, Artificial Sequence
  Description of Artificial Sequence: Synthetic oligonucleotide
  Sense strand starting at position 3051 of SEQ ID NO: 1887393
cacuuacuguguuuggcua

SEQ ID NO: 2468985 - RNA, 19 nt, Artificial Sequence
  Description of Artificial Sequence: Synthetic oligonucleotide
  Antisense strand to SEQ ID NO: 2468984
uagccaaacacaguaagug

SEQ ID NO: 2468986 - RNA, 19 nt, Artificial Sequence
  Description of Artificial Sequence: Synthetic oligonucleotide
  Sense strand starting at position 3173 of SEQ ID NO: 1887393
uggcgaaauuucugauuac

SEQ ID NO: 2468987 - RNA, 19 nt, Artificial Sequence
  Description of Artificial Sequence: Synthetic oligonucleotide
  Antisense strand to SEQ ID NO: 2468986
guaaucagaaauuucgcca

SEQ ID NO: 2468988 - RNA, 19 nt, Artificial Sequence
  Description of Artificial Sequence: Synthetic oligonucleotide
  Sense strand starting at position 3174 of SEQ ID NO: 1887393
ggcgaaauuucugauuacu

SEQ ID NO: 2468989 - RNA, 19 nt, Artificial Sequence
  Description of Artificial Sequence: Synthetic oligonucleotide
  Antisense strand to SEQ ID NO: 2468988
aguaaucagaaauuucgcc

SEQ ID NO: 2468990 - RNA, 19 nt, Artificial Sequence
  Description of Artificial Sequence: Synthetic oligonucleotide
  Sense strand starting at position 3429 of SEQ ID NO: 1887393
agccgaucuuaauuaagcu

SEQ ID NO: 2468991 - RNA, 19 nt, Artificial Sequence
  Description of Artificial Sequence: Synthetic oligonucleotide
  Antisense strand to SEQ ID NO: 2468990
agcuuaauuaagaucggcu

SEQ ID NO: 2468992 - RNA, 19 nt, Artificial Sequence
  Description of Artificial Sequence: Synthetic oligonucleotide
  Sense strand starting at position 3458 of SEQ ID NO: 1887393
ucaguuuaauguucucaca

SEQ ID NO: 2468993 - RNA, 19 nt, Artificial Sequence
  Description of Artificial Sequence: Synthetic oligonucleotide
  Antisense strand to SEQ ID NO: 2468992
ugugagaacauuaaacuga

SEQ ID NO: 2468994 - RNA, 19 nt, Artificial Sequence
  Description of Artificial Sequence: Synthetic oligonucleotide
  Sense strand starting at position 3460 of SEQ ID NO: 1887393
aguuuaauguucucacagu

SEQ ID NO: 2468995 - RNA, 19 nt, Artificial Sequence
  Description of Artificial Sequence: Synthetic oligonucleotide
  Antisense strand to SEQ ID NO: 2468994
acugugagaacauuaaacu

SEQ ID NO: 2468996 - RNA, 19 nt, Artificial Sequence
  Description of Artificial Sequence: Synthetic oligonucleotide
  Sense strand starting at position 3597 of SEQ ID NO: 1887393
gcauaaugagcgcuccugu

SEQ ID NO: 2468997 - RNA, 19 nt, Artificial Sequence
  Description of Artificial Sequence: Synthetic oligonucleotide
  Antisense strand to SEQ ID NO: 2468996
acaggagcgcucauuaugc

SEQ ID NO: 2468998 - RNA, 19 nt, Artificial Sequence
  Description of Artificial Sequence: Synthetic oligonucleotide
  Sense strand starting at position 3634 of SEQ ID NO: 1887393
uguagagucugucuuggga

SEQ ID NO: 2468999 - RNA, 19 nt, Artificial Sequence
  Description of Artificial Sequence: Synthetic oligonucleotide
  Antisense strand to SEQ ID NO: 2468998
ucccaagacagacucuaca

SEQ ID NO: 2469000 - RNA, 19 nt, Artificial Sequence
  Description of Artificial Sequence: Synthetic oligonucleotide
  Sense strand starting at position 3648 of SEQ ID NO: 1887393
ugggauguguggcuuaaac

SEQ ID NO: 2469001 - RNA, 19 nt, Artificial Sequence
  Description of Artificial Sequence: Synthetic oligonucleotide
  Antisense strand to SEQ ID NO: 2469000
guuuaagccacacauccca

SEQ ID NO: 2469002 - RNA, 19 nt, Artificial Sequence
  Description of Artificial Sequence: Synthetic oligonucleotide
  Sense strand starting at position 3650 of SEQ ID NO: 1887393
ggauguguggcuuaaacac

SEQ ID NO: 2469003 - RNA, 19 nt, Artificial Sequence
  Description of Artificial Sequence: Synthetic oligonucleotide
  Antisense strand to SEQ ID NO: 2469002
guguuuaagccacacaucc

SEQ ID NO: 2469004 - RNA, 19 nt, Artificial Sequence
  Description of Artificial Sequence: Synthetic oligonucleotide
  Sense strand starting at position 3712 of SEQ ID NO: 1887393
ggauguacuagauagugcu

SEQ ID NO: 2469005 - RNA, 19 nt, Artificial Sequence
  Description of Artificial Sequence: Synthetic oligonucleotide
  Antisense strand to SEQ ID NO: 2469004
agcacuaucuaguacaucc

SEQ ID NO: 2469006 - RNA, 19 nt, Artificial Sequence
  Description of Artificial Sequence: Synthetic oligonucleotide
  Sense strand starting at position 3718 of SEQ ID NO: 1887393
acuagauagugcucuugag

SEQ ID NO: 2469007 - RNA, 19 nt, Artificial Sequence
  Description of Artificial Sequence: Synthetic oligonucleotide
  Antisense strand to SEQ ID NO: 2469006
cucaagagcacuaucuagu

SEQ ID NO: 2469008 - RNA, 19 nt, Artificial Sequence
  Description of Artificial Sequence: Synthetic oligonucleotide
  Sense strand starting at position 3858 of SEQ ID NO: 1887393
acguccaucacugggaauu

SEQ ID NO: 2469009 - RNA, 19 nt, Artificial Sequence
  Description of Artificial Sequence: Synthetic oligonucleotide
  Antisense strand to SEQ ID NO: 2469008
aauucccagugauggacgu

SEQ ID NO: 2469010 - RNA, 19 nt, Artificial Sequence
  Description of Artificial Sequence: Synthetic oligonucleotide
  Sense strand starting at position 3877 of SEQ ID NO: 1887393
uuagcugagagcugccaau

SEQ ID NO: 2469011 - RNA, 19 nt, Artificial Sequence
  Description of Artificial Sequence: Synthetic oligonucleotide
  Antisense strand to SEQ ID NO: 2469010
auuggcagcucucagcuaa

SEQ ID NO: 2469012 - RNA, 19 nt, Artificial Sequence
  Description of Artificial Sequence: Synthetic oligonucleotide
  Sense strand starting at position 3953 of SEQ ID NO: 1887393
gagggaagucuguggaaca

SEQ ID NO: 2469013 - RNA, 19 nt, Artificial Sequence
  Description of Artificial Sequence: Synthetic oligonucleotide
  Antisense strand to SEQ ID NO: 2469012
uguuccacagacuucccuc

SEQ ID NO: 2469014 - RNA, 19 nt, Artificial Sequence
  Description of Artificial Sequence: Synthetic oligonucleotide
  Sense strand starting at position 428 of SEQ ID NO: 1887394
cagguucuccugcaucaga

SEQ ID NO: 2469015 - RNA, 19 nt, Artificial Sequence
  Description of Artificial Sequence: Synthetic oligonucleotide
  Antisense strand to SEQ ID NO: 2469014
ucugaugcaggagaaccug

SEQ ID NO: 2469016 - RNA, 19 nt, Artificial Sequence
  Description of Artificial Sequence: Synthetic oligonucleotide
  Sense strand starting at position 431 of SEQ ID NO: 1887394
guucuccugcaucagaaau

SEQ ID NO: 2469017 - RNA, 19 nt, Artificial Sequence
  Description of Artificial Sequence: Synthetic oligonucleotide
  Antisense strand to SEQ ID NO: 2469016
auuucugaugcaggagaac

SEQ ID NO: 2469018 - RNA, 19 nt, Artificial Sequence
  Description of Artificial Sequence: Synthetic oligonucleotide
  Sense strand starting at position 958 of SEQ ID NO: 1887394
gcucuaaauuuaucacguu

SEQ ID NO: 2469019 - RNA, 19 nt, Artificial Sequence
  Description of Artificial Sequence: Synthetic oligonucleotide
  Antisense strand to SEQ ID NO: 2469018
aacgugauaaauuuagagc

SEQ ID NO: 2469020 - RNA, 19 nt, Artificial Sequence
  Description of Artificial Sequence: Synthetic oligonucleotide
  Sense strand starting at position 1005 of SEQ ID NO: 1887394
gggugaacuccugggcaga

SEQ ID NO: 2469021 - RNA, 19 nt, Artificial Sequence
  Description of Artificial Sequence: Synthetic oligonucleotide
  Antisense strand to SEQ ID NO: 2469020
ucugcccaggaguucaccc

SEQ ID NO: 2469022 - RNA, 19 nt, Artificial Sequence
  Description of Artificial Sequence: Synthetic oligonucleotide
  Sense strand starting at position 1176 of SEQ ID NO: 1887394
agacuccuggcguaagaau

SEQ ID NO: 2469023 - RNA, 19 nt, Artificial Sequence
  Description of Artificial Sequence: Synthetic oligonucleotide
  Antisense strand to SEQ ID NO: 2469022
auucuuacgccaggagucu

SEQ ID NO: 2469024 - RNA, 19 nt, Artificial Sequence
  Description of Artificial Sequence: Synthetic oligonucleotide
  Sense strand starting at position 1183 of SEQ ID NO: 1887394
uggcguaagaaugggaaga

SEQ ID NO: 2469025 - RNA, 19 nt, Artificial Sequence
  Description of Artificial Sequence: Synthetic oligonucleotide
  Antisense strand to SEQ ID NO: 2469024
ucuucccauucuuacgcca

SEQ ID NO: 2469026 - RNA, 19 nt, Artificial Sequence
  Description of Artificial Sequence: Synthetic oligonucleotide
  Sense strand starting at position 1184 of SEQ ID NO: 1887394
ggcguaagaaugggaagaa

SEQ ID NO: 2469027 - RNA, 19 nt, Artificial Sequence
  Description of Artificial Sequence: Synthetic oligonucleotide
  Antisense strand to SEQ ID NO: 2469026
uucuucccauucuuacgcc

SEQ ID NO: 2469028 - RNA, 19 nt, Artificial Sequence
  Description of Artificial Sequence: Synthetic oligonucleotide
  Sense strand starting at position 1503 of SEQ ID NO: 1887394
gaaugaaggcuaugaccau

SEQ ID NO: 2469029 - RNA, 19 nt, Artificial Sequence
  Description of Artificial Sequence: Synthetic oligonucleotide
  Antisense strand to SEQ ID NO: 2469028
auggucauagccuucauuc

SEQ ID NO: 2469030 - RNA, 19 nt, Artificial Sequence
  Description of Artificial Sequence: Synthetic oligonucleotide
  Sense strand starting at position 1507 of SEQ ID NO: 1887394
gaaggcuaugaccaucgau

SEQ ID NO: 2469031 - RNA, 19 nt, Artificial Sequence
  Description of Artificial Sequence: Synthetic oligonucleotide
  Antisense strand to SEQ ID NO: 2469030
aucgauggucauagccuuc

SEQ ID NO: 2469032 - RNA, 19 nt, Artificial Sequence
  Description of Artificial Sequence: Synthetic oligonucleotide
  Sense strand starting at position 1596 of SEQ ID NO: 1887394
ugguuauacauauggacag

SEQ ID NO: 2469033 - RNA, 19 nt, Artificial Sequence
  Description of Artificial Sequence: Synthetic oligonucleotide
  Antisense strand to SEQ ID NO: 2469032
cuguccauauguauaacca

SEQ ID NO: 2469034 - RNA, 19 nt, Artificial Sequence
  Description of Artificial Sequence: Synthetic oligonucleotide
  Sense strand starting at position 1613 of SEQ ID NO: 1887394
agauguuuagaaugucaga

SEQ ID NO: 2469035 - RNA, 19 nt, Artificial Sequence
  Description of Artificial Sequence: Synthetic oligonucleotide
  Antisense strand to SEQ ID NO: 2469034
ucugacauucuaaacaucu

SEQ ID NO: 2469036 - RNA, 19 nt, Artificial Sequence
  Description of Artificial Sequence: Synthetic oligonucleotide
  Sense strand starting at position 1839 of SEQ ID NO: 1887394
ccuuaugauuaggcucaau

SEQ ID NO: 2469037 - RNA, 19 nt, Artificial Sequence
  Description of Artificial Sequence: Synthetic oligonucleotide
  Antisense strand to SEQ ID NO: 2469036
auugagccuaaucauaagg

SEQ ID NO: 2469038 - RNA, 19 nt, Artificial Sequence
  Description of Artificial Sequence: Synthetic oligonucleotide
  Sense strand starting at position 1884 of SEQ ID NO: 1887394
guggcuuaaacagaguagu

SEQ ID NO: 2469039 - RNA, 19 nt, Artificial Sequence
  Description of Artificial Sequence: Synthetic oligonucleotide
  Antisense strand to SEQ ID NO: 2469038
acuacucuguuuaagccac

SEQ ID NO: 2469040 - RNA, 19 nt, Artificial Sequence
  Description of Artificial Sequence: Synthetic oligonucleotide
  Sense strand starting at position 1916 of SEQ ID NO: 1887394
uuuguucccggagaaguca

SEQ ID NO: 2469041 - RNA, 19 nt, Artificial Sequence
  Description of Artificial Sequence: Synthetic oligonucleotide
  Antisense strand to SEQ ID NO: 2469040
ugacuucuccgggaacaaa

SEQ ID NO: 2469042 - RNA, 19 nt, Artificial Sequence
  Description of Artificial Sequence: Synthetic oligonucleotide
  Sense strand starting at position 2025 of SEQ ID NO: 1887394
ccaagauaguaggcuuaug

SEQ ID NO: 2469043 - RNA, 19 nt, Artificial Sequence
  Description of Artificial Sequence: Synthetic oligonucleotide
  Antisense strand to SEQ ID NO: 2469042
cauaagccuacuaucuugg

SEQ ID NO: 2469044 - RNA, 19 nt, Artificial Sequence
  Description of Artificial Sequence: Synthetic oligonucleotide
  Sense strand starting at position 2206 of SEQ ID NO: 1887394
agcuaagagcucuaugaca

SEQ ID NO: 2469045 - RNA, 19 nt, Artificial Sequence
  Description of Artificial Sequence: Synthetic oligonucleotide
  Antisense strand to SEQ ID NO: 2469044
ugucauagagcucuuagcu

SEQ ID NO: 2469046 - RNA, 19 nt, Artificial Sequence
  Description of Artificial Sequence: Synthetic oligonucleotide
  Sense strand starting at position 2208 of SEQ ID NO: 1887394
cuaagagcucuaugacaug

SEQ ID NO: 2469047 - RNA, 19 nt, Artificial Sequence
  Description of Artificial Sequence: Synthetic oligonucleotide
  Antisense strand to SEQ ID NO: 2469046
caugucauagagcucuuag

SEQ ID NO: 2469048 - RNA, 19 nt, Artificial Sequence
  Description of Artificial Sequence: Synthetic oligonucleotide
  Sense strand starting at position 2214 of SEQ ID NO: 1887394
gcucuaugacaugaaguag

SEQ ID NO: 2469049 - RNA, 19 nt, Artificial Sequence
  Description of Artificial Sequence: Synthetic oligonucleotide
  Antisense strand to SEQ ID NO: 2469048
cuacuucaugucauagagc

SEQ ID NO: 2469050 - RNA, 19 nt, Artificial Sequence
  Description of Artificial Sequence: Synthetic oligonucleotide
  Sense strand starting at position 2235 of SEQ ID NO: 1887394
ggagaacgacuaugaaguu

SEQ ID NO: 2469051 - RNA, 19 nt, Artificial Sequence
  Description of Artificial Sequence: Synthetic oligonucleotide
  Antisense strand to SEQ ID NO: 2469050
aacuucauagucguucucc

SEQ ID NO: 2469052 - RNA, 19 nt, Artificial Sequence
  Description of Artificial Sequence: Synthetic oligonucleotide
  Sense strand starting at position 2241 of SEQ ID NO: 1887394
cgacuaugaaguuaagcaa

SEQ ID NO: 2469053 - RNA, 19 nt, Artificial Sequence
  Description of Artificial Sequence: Synthetic oligonucleotide
  Antisense strand to SEQ ID NO: 2469052
uugcuuaacuucauagucg

SEQ ID NO: 2469054 - RNA, 19 nt, Artificial Sequence
  Description of Artificial Sequence: Synthetic oligonucleotide
  Sense strand starting at position 2253 of SEQ ID NO: 1887394
uaagcaauuggugauuacu

SEQ ID NO: 2469055 - RNA, 19 nt, Artificial Sequence
  Description of Artificial Sequence: Synthetic oligonucleotide
  Antisense strand to SEQ ID NO: 2469054
aguaaucaccaauugcuua

SEQ ID NO: 2469056 - RNA, 19 nt, Artificial Sequence
  Description of Artificial Sequence: Synthetic oligonucleotide
  Sense strand starting at position 2264 of SEQ ID NO: 1887394
ugauuacugcucuaucagu

SEQ ID NO: 2469057 - RNA, 19 nt, Artificial Sequence
  Description of Artificial Sequence: Synthetic oligonucleotide
  Antisense strand to SEQ ID NO: 2469056
acugauagagcaguaauca

SEQ ID NO: 2469058 - RNA, 19 nt, Artificial Sequence
  Description of Artificial Sequence: Synthetic oligonucleotide
  Sense strand starting at position 2316 of SEQ ID NO: 1887394
gugguaggaugauuauaau

SEQ ID NO: 2469059 - RNA, 19 nt, Artificial Sequence
  Description of Artificial Sequence: Synthetic oligonucleotide
  Antisense strand to SEQ ID NO: 2469058
auuauaaucauccuaccac

SEQ ID NO: 2469060 - RNA, 19 nt, Artificial Sequence
  Description of Artificial Sequence: Synthetic oligonucleotide
  Sense strand starting at position 2334 of SEQ ID NO: 1887394
uaagaucauugguuaaggu

SEQ ID NO: 2469061 - RNA, 19 nt, Artificial Sequence
  Description of Artificial Sequence: Synthetic oligonucleotide
  Antisense strand to SEQ ID NO: 2469060
accuuaaccaaugaucuua

SEQ ID NO: 2469062 - RNA, 19 nt, Artificial Sequence
  Description of Artificial Sequence: Synthetic oligonucleotide
  Sense strand starting at position 2350 of SEQ ID NO: 1887394
gguuguaaugcccaagaga

SEQ ID NO: 2469063 - RNA, 19 nt, Artificial Sequence
  Description of Artificial Sequence: Synthetic oligonucleotide
  Antisense strand to SEQ ID NO: 2469062
ucucuugggcauuacaacc

SEQ ID NO: 2469064 - RNA, 19 nt, Artificial Sequence
  Description of Artificial Sequence: Synthetic oligonucleotide
  Sense strand starting at position 2608 of SEQ ID NO: 1887394
gucuguugaguggacaaga

SEQ ID NO: 2469065 - RNA, 19 nt, Artificial Sequence
  Description of Artificial Sequence: Synthetic oligonucleotide
  Antisense strand to SEQ ID NO: 2469064
ucuuguccacucaacagac

SEQ ID NO: 2469066 - RNA, 19 nt, Artificial Sequence
  Description of Artificial Sequence: Synthetic oligonucleotide
  Sense strand starting at position 2632 of SEQ ID NO: 1887394
gaaagauaagucuggcaaa

SEQ ID NO: 2469067 - RNA, 19 nt, Artificial Sequence
  Description of Artificial Sequence: Synthetic oligonucleotide
  Antisense strand to SEQ ID NO: 2469066
uuugccagacuuaucuuuc

SEQ ID NO: 2469068 - RNA, 19 nt, Artificial Sequence
  Description of Artificial Sequence: Synthetic oligonucleotide
  Sense strand starting at position 2716 of SEQ ID NO: 1887394
gcaauauugccagaacaua

SEQ ID NO: 2469069 - RNA, 19 nt, Artificial Sequence
  Description of Artificial Sequence: Synthetic oligonucleotide
  Antisense strand to SEQ ID NO: 2469068
uauguucuggcaauauugc

SEQ ID NO: 2469070 - RNA, 19 nt, Artificial Sequence
  Description of Artificial Sequence: Synthetic oligonucleotide
  Sense strand starting at position 2813 of SEQ ID NO: 1887394
uugaacuuuggguaaagca

SEQ ID NO: 2469071 - RNA, 19 nt, Artificial Sequence
  Description of Artificial Sequence: Synthetic oligonucleotide
  Antisense strand to SEQ ID NO: 2469070
ugcuuuacccaaaguucaa

SEQ ID NO: 2469072 - RNA, 19 nt, Artificial Sequence
  Description of Artificial Sequence: Synthetic oligonucleotide
  Sense strand starting at position 2874 of SEQ ID NO: 1887394
ucuguuuaucuggagaagc

SEQ ID NO: 2469073 - RNA, 19 nt, Artificial Sequence
  Description of Artificial Sequence: Synthetic oligonucleotide
  Antisense strand to SEQ ID NO: 2469072
gcuucuccagauaaacaga

SEQ ID NO: 2469074 - RNA, 19 nt, Artificial Sequence
  Description of Artificial Sequence: Synthetic oligonucleotide
  Sense strand starting at position 2876 of SEQ ID NO: 1887394
uguuuaucuggagaagccu

SEQ ID NO: 2469075 - RNA, 19 nt, Artificial Sequence
  Description of Artificial Sequence: Synthetic oligonucleotide
  Antisense strand to SEQ ID NO: 2469074
aggcuucuccagauaaaca

SEQ ID NO: 2469076 - RNA, 19 nt, Artificial Sequence
  Description of Artificial Sequence: Synthetic oligonucleotide
  Sense strand starting at position 3005 of SEQ ID NO: 1887394
ggagacuucugagcaagau

SEQ ID NO: 2469077 - RNA, 19 nt, Artificial Sequence
  Description of Artificial Sequence: Synthetic oligonucleotide
  Antisense strand to SEQ ID NO: 2469076
aucuugcucagaagucucc

SEQ ID NO: 2469078 - RNA, 19 nt, Artificial Sequence
  Description of Artificial Sequence: Synthetic oligonucleotide
  Sense strand starting at position 3028 of SEQ ID NO: 1887394
gucagacuuggauguaaau

SEQ ID NO: 2469079 - RNA, 19 nt, Artificial Sequence
  Description of Artificial Sequence: Synthetic oligonucleotide
  Antisense strand to SEQ ID NO: 2469078
auuuacauccaagucugac

SEQ ID NO: 2469080 - RNA, 19 nt, Artificial Sequence
  Description of Artificial Sequence: Synthetic oligonucleotide
  Sense strand starting at position 3038 of SEQ ID NO: 1887394
gauguaaaucauggcuuag

SEQ ID NO: 2469081 - RNA, 19 nt, Artificial Sequence
  Description of Artificial Sequence: Synthetic oligonucleotide
  Antisense strand to SEQ ID NO: 2469080
cuaagccaugauuuacauc

SEQ ID NO: 2469082 - RNA, 19 nt, Artificial Sequence
  Description of Artificial Sequence: Synthetic oligonucleotide
  Sense strand starting at position 3125 of SEQ ID NO: 1887394
agaagcuuuagaggagagu

SEQ ID NO: 2469083 - RNA, 19 nt, Artificial Sequence
  Description of Artificial Sequence: Synthetic oligonucleotide
  Antisense strand to SEQ ID NO: 2469082
acucuccucuaaagcuucu

SEQ ID NO: 2469084 - RNA, 19 nt, Artificial Sequence
  Description of Artificial Sequence: Synthetic oligonucleotide
  Sense strand starting at position 3170 of SEQ ID NO: 1887394
aagauaacuggaugugcua

SEQ ID NO: 2469085 - RNA, 19 nt, Artificial Sequence
  Description of Artificial Sequence: Synthetic oligonucleotide
  Antisense strand to SEQ ID NO: 2469084
uagcacauccaguuaucuu

SEQ ID NO: 2469086 - RNA, 19 nt, Artificial Sequence
  Description of Artificial Sequence: Synthetic oligonucleotide
  Sense strand starting at position 3305 of SEQ ID NO: 1887394
ggacuaggccugcauaauu

SEQ ID NO: 2469087 - RNA, 19 nt, Artificial Sequence
  Description of Artificial Sequence: Synthetic oligonucleotide
  Antisense strand to SEQ ID NO: 2469086
aauuaugcaggccuagucc

SEQ ID NO: 2469088 - RNA, 19 nt, Artificial Sequence
  Description of Artificial Sequence: Synthetic oligonucleotide
  Sense strand starting at position 3600 of SEQ ID NO: 1887394
uccuuucuccacugaggga

SEQ ID NO: 2469089 - RNA, 19 nt, Artificial Sequence
  Description of Artificial Sequence: Synthetic oligonucleotide
  Antisense strand to SEQ ID NO: 2469088
ucccucaguggagaaagga

SEQ ID NO: 2469090 - RNA, 19 nt, Artificial Sequence
  Description of Artificial Sequence: Synthetic oligonucleotide
  Sense strand starting at position 3622 of SEQ ID NO: 1887394
augaaacuccacuguuuag

SEQ ID NO: 2469091 - RNA, 19 nt, Artificial Sequence
  Description of Artificial Sequence: Synthetic oligonucleotide
  Antisense strand to SEQ ID NO: 2469090
cuaaacaguggaguuucau

SEQ ID NO: 2469092 - RNA, 19 nt, Artificial Sequence
  Description of Artificial Sequence: Synthetic oligonucleotide
  Sense strand starting at position 3633 of SEQ ID NO: 1887394
cuguuuagagcuuaacauc

SEQ ID NO: 2469093 - RNA, 19 nt, Artificial Sequence
  Description of Artificial Sequence: Synthetic oligonucleotide
  Antisense strand to SEQ ID NO: 2469092
gauguuaagcucuaaacag

SEQ ID NO: 2469094 - RNA, 19 nt, Artificial Sequence
  Description of Artificial Sequence: Synthetic oligonucleotide
  Sense strand starting at position 21 of SEQ ID NO: 1887395
cauauaaugccggagagcu

SEQ ID NO: 2469095 - RNA, 19 nt, Artificial Sequence
  Description of Artificial Sequence: Synthetic oligonucleotide
  Antisense strand to SEQ ID NO: 2469094
agcucuccggcauuauaug

SEQ ID NO: 2469096 - RNA, 19 nt, Artificial Sequence
  Description of Artificial Sequence: Synthetic oligonucleotide
  Sense strand starting at position 472 of SEQ ID NO: 1887395
gauacuaggguuuguuuga

SEQ ID NO: 2469097 - RNA, 19 nt, Artificial Sequence
  Description of Artificial Sequence: Synthetic oligonucleotide
  Antisense strand to SEQ ID NO: 2469096
ucaaacaaacccuaguauc

SEQ ID NO: 2469098 - RNA, 19 nt, Artificial Sequence
  Description of Artificial Sequence: Synthetic oligonucleotide
  Sense strand starting at position 473 of SEQ ID NO: 1887395
auacuaggguuuguuugau

SEQ ID NO: 2469099 - RNA, 19 nt, Artificial Sequence
  Description of Artificial Sequence: Synthetic oligonucleotide
  Antisense strand to SEQ ID NO: 2469098
aucaaacaaacccuaguau

SEQ ID NO: 2469100 - RNA, 19 nt, Artificial Sequence
  Description of Artificial Sequence: Synthetic oligonucleotide
  Sense strand starting at position 494 of SEQ ID NO: 1887395
uagugacaucuguauuagg

SEQ ID NO: 2469101 - RNA, 19 nt, Artificial Sequence
  Description of Artificial Sequence: Synthetic oligonucleotide
  Antisense strand to SEQ ID NO: 2469100
ccuaauacagaugucacua

SEQ ID NO: 2469102 - RNA, 19 nt, Artificial Sequence
  Description of Artificial Sequence: Synthetic oligonucleotide
  Sense strand starting at position 503 of SEQ ID NO: 1887395
cuguauuaggguugacaca

SEQ ID NO: 2469103 - RNA, 19 nt, Artificial Sequence
  Description of Artificial Sequence: Synthetic oligonucleotide
  Antisense strand to SEQ ID NO: 2469102
ugugucaacccuaauacag

SEQ ID NO: 2469104 - RNA, 19 nt, Artificial Sequence
  Description of Artificial Sequence: Synthetic oligonucleotide
  Sense strand starting at position 604 of SEQ ID NO: 1887395
aguuuauucccuuagguua

SEQ ID NO: 2469105 - RNA, 19 nt, Artificial Sequence
  Description of Artificial Sequence: Synthetic oligonucleotide
  Antisense strand to SEQ ID NO: 2469104
uaaccuaagggaauaaacu

SEQ ID NO: 2469106 - RNA, 19 nt, Artificial Sequence
  Description of Artificial Sequence: Synthetic oligonucleotide
  Sense strand starting at position 612 of SEQ ID NO: 1887395
cccuuagguuaaucaugaa

SEQ ID NO: 2469107 - RNA, 19 nt, Artificial Sequence
  Description of Artificial Sequence: Synthetic oligonucleotide
  Antisense strand to SEQ ID NO: 2469106
uucaugauuaaccuaaggg

SEQ ID NO: 2469108 - RNA, 19 nt, Artificial Sequence
  Description of Artificial Sequence: Synthetic oligonucleotide
  Sense strand starting at position 868 of SEQ ID NO: 1887395
augcuaugaccauaacagu

SEQ ID NO: 2469109 - RNA, 19 nt, Artificial Sequence
  Description of Artificial Sequence: Synthetic oligonucleotide
  Antisense strand to SEQ ID NO: 2469108
acuguuauggucauagcau

SEQ ID NO: 2469110 - RNA, 19 nt, Artificial Sequence
  Description of Artificial Sequence: Synthetic oligonucleotide
  Sense strand starting at position 874 of SEQ ID NO: 1887395
ugaccauaacaguaagugu

SEQ ID NO: 2469111 - RNA, 19 nt, Artificial Sequence
  Description of Artificial Sequence: Synthetic oligonucleotide
  Antisense strand to SEQ ID NO: 2469110
acacuuacuguuaugguca

SEQ ID NO: 2469112 - RNA, 19 nt, Artificial Sequence
  Description of Artificial Sequence: Synthetic oligonucleotide
  Sense strand starting at position 877 of SEQ ID NO: 1887395
ccauaacaguaaguguaau

SEQ ID NO: 2469113 - RNA, 19 nt, Artificial Sequence
  Description of Artificial Sequence: Synthetic oligonucleotide
  Antisense strand to SEQ ID NO: 2469112
auuacacuuacuguuaugg

SEQ ID NO: 2469114 - RNA, 19 nt, Artificial Sequence
  Description of Artificial Sequence: Synthetic oligonucleotide
  Sense strand starting at position 985 of SEQ ID NO: 1887395
ccuuguuaucuguaaucau

SEQ ID NO: 2469115 - RNA, 19 nt, Artificial Sequence
  Description of Artificial Sequence: Synthetic oligonucleotide
  Antisense strand to SEQ ID NO: 2469114
augauuacagauaacaagg

SEQ ID NO: 2469116 - RNA, 19 nt, Artificial Sequence
  Description of Artificial Sequence: Synthetic oligonucleotide
  Sense strand starting at position 1008 of SEQ ID NO: 1887395
acaguacuggaggguaaau

SEQ ID NO: 2469117 - RNA, 19 nt, Artificial Sequence
  Description of Artificial Sequence: Synthetic oligonucleotide
  Antisense strand to SEQ ID NO: 2469116
auuuacccuccaguacugu

SEQ ID NO: 2469118 - RNA, 19 nt, Artificial Sequence
  Description of Artificial Sequence: Synthetic oligonucleotide
  Sense strand starting at position 1334 of SEQ ID NO: 1887395
uuugcuuuacuuggaagau

SEQ ID NO: 2469119 - RNA, 19 nt, Artificial Sequence
  Description of Artificial Sequence: Synthetic oligonucleotide
  Antisense strand to SEQ ID NO: 2469118
aucuuccaaguaaagcaaa

SEQ ID NO: 2469120 - RNA, 19 nt, Artificial Sequence
  Description of Artificial Sequence: Synthetic oligonucleotide
  Sense strand starting at position 1410 of SEQ ID NO: 1887395
augcuaauugcuggaacaa

SEQ ID NO: 2469121 - RNA, 19 nt, Artificial Sequence
  Description of Artificial Sequence: Synthetic oligonucleotide
  Antisense strand to SEQ ID NO: 2469120
uuguuccagcaauuagcau

SEQ ID NO: 2469122 - RNA, 19 nt, Artificial Sequence
  Description of Artificial Sequence: Synthetic oligonucleotide
  Sense strand starting at position 1411 of SEQ ID NO: 1887395
ugcuaauugcuggaacaaa

SEQ ID NO: 2469123 - RNA, 19 nt, Artificial Sequence
  Description of Artificial Sequence: Synthetic oligonucleotide
  Antisense strand to SEQ ID NO: 2469122
uuuguuccagcaauuagca

SEQ ID NO: 2469124 - RNA, 19 nt, Artificial Sequence
  Description of Artificial Sequence: Synthetic oligonucleotide
  Sense strand starting at position 1576 of SEQ ID NO: 1887395
uggcaucaggcugaucaaa

SEQ ID NO: 2469125 - RNA, 19 nt, Artificial Sequence
  Description of Artificial Sequence: Synthetic oligonucleotide
  Antisense strand to SEQ ID NO: 2469124
uuugaucagccugaugcca

SEQ ID NO: 2469126 - RNA, 19 nt, Artificial Sequence
  Description of Artificial Sequence: Synthetic oligonucleotide
  Sense strand starting at position 1578 of SEQ ID NO: 1887395
gcaucaggcugaucaaaga

SEQ ID NO: 2469127 - RNA, 19 nt, Artificial Sequence
  Description of Artificial Sequence: Synthetic oligonucleotide
  Antisense strand to SEQ ID NO: 2469126
ucuuugaucagccugaugc

SEQ ID NO: 2469128 - RNA, 19 nt, Artificial Sequence
  Description of Artificial Sequence: Synthetic oligonucleotide
  Sense strand starting at position 1604 of SEQ ID NO: 1887395
gagaguggugcauagacga

SEQ ID NO: 2469129 - RNA, 19 nt, Artificial Sequence
  Description of Artificial Sequence: Synthetic oligonucleotide
  Antisense strand to SEQ ID NO: 2469128
ucgucuaugcaccacucuc

SEQ ID NO: 2469130 - RNA, 19 nt, Artificial Sequence
  Description of Artificial Sequence: Synthetic oligonucleotide
  Sense strand starting at position 1619 of SEQ ID NO: 1887395
acgauuacaugggaaauuu

SEQ ID NO: 2469131 - RNA, 19 nt, Artificial Sequence
  Description of Artificial Sequence: Synthetic oligonucleotide
  Antisense strand to SEQ ID NO: 2469130
aaauuucccauguaaucgu

SEQ ID NO: 2469132 - RNA, 19 nt, Artificial Sequence
  Description of Artificial Sequence: Synthetic oligonucleotide
  Sense strand starting at position 1739 of SEQ ID NO: 1887395
ucagauuccuaggugguca

SEQ ID NO: 2469133 - RNA, 19 nt, Artificial Sequence
  Description of Artificial Sequence: Synthetic oligonucleotide
  Antisense strand to SEQ ID NO: 2469132
ugaccaccuaggaaucuga

SEQ ID NO: 2469134 - RNA, 19 nt, Artificial Sequence
  Description of Artificial Sequence: Synthetic oligonucleotide
  Sense strand starting at position 2048 of SEQ ID NO: 1887395
uucagagugguuugggaca

SEQ ID NO: 2469135 - RNA, 19 nt, Artificial Sequence
  Description of Artificial Sequence: Synthetic oligonucleotide
  Antisense strand to SEQ ID NO: 2469134
ugucccaaaccacucugaa

SEQ ID NO: 2469136 - RNA, 19 nt, Artificial Sequence
  Description of Artificial Sequence: Synthetic oligonucleotide
  Sense strand starting at position 2114 of SEQ ID NO: 1887395
auaaguauugguuacaggu

SEQ ID NO: 2469137 - RNA, 19 nt, Artificial Sequence
  Description of Artificial Sequence: Synthetic oligonucleotide
  Antisense strand to SEQ ID NO: 2469136
accuguaaccaauacuuau

SEQ ID NO: 2469138 - RNA, 19 nt, Artificial Sequence
  Description of Artificial Sequence: Synthetic oligonucleotide
  Sense strand starting at position 2139 of SEQ ID NO: 1887395
ugaaacuugcaauguuuga

SEQ ID NO: 2469139 - RNA, 19 nt, Artificial Sequence
  Description of Artificial Sequence: Synthetic oligonucleotide
  Antisense strand to SEQ ID NO: 2469138
ucaaacauugcaaguuuca

SEQ ID NO: 2469140 - RNA, 19 nt, Artificial Sequence
  Description of Artificial Sequence: Synthetic oligonucleotide
  Sense strand starting at position 2143 of SEQ ID NO: 1887395
acuugcaauguuugaggaa

SEQ ID NO: 2469141 - RNA, 19 nt, Artificial Sequence
  Description of Artificial Sequence: Synthetic oligonucleotide
  Antisense strand to SEQ ID NO: 2469140
uuccucaaacauugcaagu

SEQ ID NO: 2469142 - RNA, 19 nt, Artificial Sequence
  Description of Artificial Sequence: Synthetic oligonucleotide
  Sense strand starting at position 2235 of SEQ ID NO: 1887395
uuggaaacccauugccaua

SEQ ID NO: 2469143 - RNA, 19 nt, Artificial Sequence
  Description of Artificial Sequence: Synthetic oligonucleotide
  Antisense strand to SEQ ID NO: 2469142
uauggcaauggguuuccaa

SEQ ID NO: 2469144 - RNA, 19 nt, Artificial Sequence
  Description of Artificial Sequence: Synthetic oligonucleotide
  Sense strand starting at position 2237 of SEQ ID NO: 1887395
ggaaacccauugccauauu

SEQ ID NO: 2469145 - RNA, 19 nt, Artificial Sequence
  Description of Artificial Sequence: Synthetic oligonucleotide
  Antisense strand to SEQ ID NO: 2469144
aauauggcaauggguuucc

SEQ ID NO: 2469146 - RNA, 19 nt, Artificial Sequence
  Description of Artificial Sequence: Synthetic oligonucleotide
  Sense strand starting at position 2743 of SEQ ID NO: 1887395
ugaaauguggcucaacuug

SEQ ID NO: 2469147 - RNA, 19 nt, Artificial Sequence
  Description of Artificial Sequence: Synthetic oligonucleotide
  Antisense strand to SEQ ID NO: 2469146
caaguugagccacauuuca

SEQ ID NO: 2469148 - RNA, 19 nt, Artificial Sequence
  Description of Artificial Sequence: Synthetic oligonucleotide
  Sense strand starting at position 2749 of SEQ ID NO: 1887395
guggcucaacuugaguaaa

SEQ ID NO: 2469149 - RNA, 19 nt, Artificial Sequence
  Description of Artificial Sequence: Synthetic oligonucleotide
  Antisense strand to SEQ ID NO: 2469148
uuuacucaaguugagccac

SEQ ID NO: 2469150 - RNA, 19 nt, Artificial Sequence
  Description of Artificial Sequence: Synthetic oligonucleotide
  Sense strand starting at position 2752 of SEQ ID NO: 1887395
gcucaacuugaguaaagca

SEQ ID NO: 2469151 - RNA, 19 nt, Artificial Sequence
  Description of Artificial Sequence: Synthetic oligonucleotide
  Antisense strand to SEQ ID NO: 2469150
ugcuuuacucaaguugagc

SEQ ID NO: 2469152 - RNA, 19 nt, Artificial Sequence
  Description of Artificial Sequence: Synthetic oligonucleotide
  Sense strand starting at position 2839 of SEQ ID NO: 1887395
gguugaagcaaugauccau

SEQ ID NO: 2469153 - RNA, 19 nt, Artificial Sequence
  Description of Artificial Sequence: Synthetic oligonucleotide
  Antisense strand to SEQ ID NO: 2469152
auggaucauugcuucaacc

SEQ ID NO: 2469154 - RNA, 19 nt, Artificial Sequence
  Description of Artificial Sequence: Synthetic oligonucleotide
  Sense strand starting at position 3284 of SEQ ID NO: 1887395
cuuucugaccgguauucca

SEQ ID NO: 2469155 - RNA, 19 nt, Artificial Sequence
  Description of Artificial Sequence: Synthetic oligonucleotide
  Antisense strand to SEQ ID NO: 2469154
uggaauaccggucagaaag

SEQ ID NO: 2469156 - RNA, 19 nt, Artificial Sequence
  Description of Artificial Sequence: Synthetic oligonucleotide
  Sense strand starting at position 3298 of SEQ ID NO: 1887395
uuccacuaguuaucagaug

SEQ ID NO: 2469157 - RNA, 19 nt, Artificial Sequence
  Description of Artificial Sequence: Synthetic oligonucleotide
  Antisense strand to SEQ ID NO: 2469156
caucugauaacuaguggaa

SEQ ID NO: 2469158 - RNA, 19 nt, Artificial Sequence
  Description of Artificial Sequence: Synthetic oligonucleotide
  Sense strand starting at position 3303 of SEQ ID NO: 1887395
cuaguuaucagaugggcaa

SEQ ID NO: 2469159 - RNA, 19 nt, Artificial Sequence
  Description of Artificial Sequence: Synthetic oligonucleotide
  Antisense strand to SEQ ID NO: 2469158
uugcccaucugauaacuag

SEQ ID NO: 2469160 - RNA, 19 nt, Artificial Sequence
  Description of Artificial Sequence: Synthetic oligonucleotide
  Sense strand starting at position 3304 of SEQ ID NO: 1887395
uaguuaucagaugggcaaa

SEQ ID NO: 2469161 - RNA, 19 nt, Artificial Sequence
  Description of Artificial Sequence: Synthetic oligonucleotide
  Antisense strand to SEQ ID NO: 2469160
uuugcccaucugauaacua

SEQ ID NO: 2469162 - RNA, 19 nt, Artificial Sequence
  Description of Artificial Sequence: Synthetic oligonucleotide
  Sense strand starting at position 3377 of SEQ ID NO: 1887395
ggaauuugaugugauuaaa

SEQ ID NO: 2469163 - RNA, 19 nt, Artificial Sequence
  Description of Artificial Sequence: Synthetic oligonucleotide
  Antisense strand to SEQ ID NO: 2469162
uuuaaucacaucaaauucc

SEQ ID NO: 2469164 - RNA, 19 nt, Artificial Sequence
  Description of Artificial Sequence: Synthetic oligonucleotide
  Sense strand starting at position 3445 of SEQ ID NO: 1887395
uaaaguaaggcagauguau

SEQ ID NO: 2469165 - RNA, 19 nt, Artificial Sequence
  Description of Artificial Sequence: Synthetic oligonucleotide
  Antisense strand to SEQ ID NO: 2469164
auacaucugccuuacuuua

SEQ ID NO: 2469166 - RNA, 19 nt, Artificial Sequence
  Description of Artificial Sequence: Synthetic oligonucleotide
  Sense strand starting at position 3533 of SEQ ID NO: 1887395
agaggaaaccuugguccau

SEQ ID NO: 2469167 - RNA, 19 nt, Artificial Sequence
  Description of Artificial Sequence: Synthetic oligonucleotide
  Antisense strand to SEQ ID NO: 2469166
auggaccaagguuuccucu

SEQ ID NO: 2469168 - RNA, 19 nt, Artificial Sequence
  Description of Artificial Sequence: Synthetic oligonucleotide
  Sense strand starting at position 3534 of SEQ ID NO: 1887395
gaggaaaccuugguccauu

SEQ ID NO: 2469169 - RNA, 19 nt, Artificial Sequence
  Description of Artificial Sequence: Synthetic oligonucleotide
  Antisense strand to SEQ ID NO: 2469168
aauggaccaagguuuccuc

SEQ ID NO: 2469170 - RNA, 19 nt, Artificial Sequence
  Description of Artificial Sequence: Synthetic oligonucleotide
  Sense strand starting at position 3836 of SEQ ID NO: 1887395
uuaaacagguaaucguaau

SEQ ID NO: 2469171 - RNA, 19 nt, Artificial Sequence
  Description of Artificial Sequence: Synthetic oligonucleotide
  Antisense strand to SEQ ID NO: 2469170
auuacgauuaccuguuuaa

SEQ ID NO: 2469172 - RNA, 19 nt, Artificial Sequence
  Description of Artificial Sequence: Synthetic oligonucleotide
  Sense strand starting at position 3959 of SEQ ID NO: 1887395
uuuagucugcucguguuua

SEQ ID NO: 2469173 - RNA, 19 nt, Artificial Sequence
  Description of Artificial Sequence: Synthetic oligonucleotide
  Antisense strand to SEQ ID NO: 2469172
uaaacacgagcagacuaaa

SEQ ID NO: 2469174 - RNA, 19 nt, Artificial Sequence
  Description of Artificial Sequence: Synthetic oligonucleotide
  Sense strand starting at position 15 of SEQ ID NO: 1887396
agggauauacucugcgauu

SEQ ID NO: 2469175 - RNA, 19 nt, Artificial Sequence
  Description of Artificial Sequence: Synthetic oligonucleotide
  Antisense strand to SEQ ID NO: 2469174
aaucgcagaguauaucccu

SEQ ID NO: 2469176 - RNA, 19 nt, Artificial Sequence
  Description of Artificial Sequence: Synthetic oligonucleotide
  Sense strand starting at position 24 of SEQ ID NO: 1887396
cucugcgauuugcuugaaa

SEQ ID NO: 2469177 - RNA, 19 nt, Artificial Sequence
  Description of Artificial Sequence: Synthetic oligonucleotide
  Antisense strand to SEQ ID NO: 2469176
uuucaagcaaaucgcagag

SEQ ID NO: 2469178 - RNA, 19 nt, Artificial Sequence
  Description of Artificial Sequence: Synthetic oligonucleotide
  Sense strand starting at position 71 of SEQ ID NO: 1887396
aauggauguugggugaaga

SEQ ID NO: 2469179 - RNA, 19 nt, Artificial Sequence
  Description of Artificial Sequence: Synthetic oligonucleotide
  Antisense strand to SEQ ID NO: 2469178
ucuucacccaacauccauu

SEQ ID NO: 2469180 - RNA, 19 nt, Artificial Sequence
  Description of Artificial Sequence: Synthetic oligonucleotide
  Sense strand starting at position 159 of SEQ ID NO: 1887396
uccaguauuucucuugugu

SEQ ID NO: 2469181 - RNA, 19 nt, Artificial Sequence
  Description of Artificial Sequence: Synthetic oligonucleotide
  Antisense strand to SEQ ID NO: 2469180
acacaagagaaauacugga

SEQ ID NO: 2469182 - RNA, 19 nt, Artificial Sequence
  Description of Artificial Sequence: Synthetic oligonucleotide
  Sense strand starting at position 490 of SEQ ID NO: 1887396
ggcaguaaauguccaaggu

SEQ ID NO: 2469183 - RNA, 19 nt, Artificial Sequence
  Description of Artificial Sequence: Synthetic oligonucleotide
  Antisense strand to SEQ ID NO: 2469182
accuuggacauuuacugcc

SEQ ID NO: 2469184 - RNA, 19 nt, Artificial Sequence
  Description of Artificial Sequence: Synthetic oligonucleotide
  Sense strand starting at position 494 of SEQ ID NO: 1887396
guaaauguccaaggucaca

SEQ ID NO: 2469185 - RNA, 19 nt, Artificial Sequence
  Description of Artificial Sequence: Synthetic oligonucleotide
  Antisense strand to SEQ ID NO: 2469184
ugugaccuuggacauuuac

SEQ ID NO: 2469186 - RNA, 19 nt, Artificial Sequence
  Description of Artificial Sequence: Synthetic oligonucleotide
  Sense strand starting at position 524 of SEQ ID NO: 1887396
uggcuaugucagggaugga

SEQ ID NO: 2469187 - RNA, 19 nt, Artificial Sequence
  Description of Artificial Sequence: Synthetic oligonucleotide
  Antisense strand to SEQ ID NO: 2469186
uccaucccugacauagcca

SEQ ID NO: 2469188 - RNA, 19 nt, Artificial Sequence
  Description of Artificial Sequence: Synthetic oligonucleotide
  Sense strand starting at position 886 of SEQ ID NO: 1887396
cuauuaagucaacaguuua

SEQ ID NO: 2469189 - RNA, 19 nt, Artificial Sequence
  Description of Artificial Sequence: Synthetic oligonucleotide
  Antisense strand to SEQ ID NO: 2469188
uaaacuguugacuuaauag

SEQ ID NO: 2469190 - RNA, 19 nt, Artificial Sequence
  Description of Artificial Sequence: Synthetic oligonucleotide
  Sense strand starting at position 969 of SEQ ID NO: 1887396
auaagcauccuuuacguau

SEQ ID NO: 2469191 - RNA, 19 nt, Artificial Sequence
  Description of Artificial Sequence: Synthetic oligonucleotide
  Antisense strand to SEQ ID NO: 2469190
auacguaaaggaugcuuau

SEQ ID NO: 2469192 - RNA, 19 nt, Artificial Sequence
  Description of Artificial Sequence: Synthetic oligonucleotide
  Sense strand starting at position 2254 of SEQ ID NO: 1887396
gcccuugcgguucugugaa

SEQ ID NO: 2469193 - RNA, 19 nt, Artificial Sequence
  Description of Artificial Sequence: Synthetic oligonucleotide
  Antisense strand to SEQ ID NO: 2469192
uucacagaaccgcaagggc

SEQ ID NO: 2469194 - RNA, 19 nt, Artificial Sequence
  Description of Artificial Sequence: Synthetic oligonucleotide
  Sense strand starting at position 2264 of SEQ ID NO: 1887396
uucugugaaaguuaucugu

SEQ ID NO: 2469195 - RNA, 19 nt, Artificial Sequence
  Description of Artificial Sequence: Synthetic oligonucleotide
  Antisense strand to SEQ ID NO: 2469194
acagauaacuuucacagaa

SEQ ID NO: 2469196 - RNA, 19 nt, Artificial Sequence
  Description of Artificial Sequence: Synthetic oligonucleotide
  Sense strand starting at position 2266 of SEQ ID NO: 1887396
cugugaaaguuaucuguac

SEQ ID NO: 2469197 - RNA, 19 nt, Artificial Sequence
  Description of Artificial Sequence: Synthetic oligonucleotide
  Antisense strand to SEQ ID NO: 2469196
guacagauaacuuucacag

SEQ ID NO: 2469198 - RNA, 19 nt, Artificial Sequence
  Description of Artificial Sequence: Synthetic oligonucleotide
  Sense strand starting at position 2267 of SEQ ID NO: 1887396
ugugaaaguuaucuguaca

SEQ ID NO: 2469199 - RNA, 19 nt, Artificial Sequence
  Description of Artificial Sequence: Synthetic oligonucleotide
  Antisense strand to SEQ ID NO: 2469198
uguacagauaacuuucaca

SEQ ID NO: 2469200 - RNA, 19 nt, Artificial Sequence
  Description of Artificial Sequence: Synthetic oligonucleotide
  Sense strand starting at position 2268 of SEQ ID NO: 1887396
gugaaaguuaucuguacac

SEQ ID NO: 2469201 - RNA, 19 nt, Artificial Sequence
  Description of Artificial Sequence: Synthetic oligonucleotide
  Antisense strand to SEQ ID NO: 2469200
guguacagauaacuuucac

SEQ ID NO: 2469202 - RNA, 19 nt, Artificial Sequence
  Description of Artificial Sequence: Synthetic oligonucleotide
  Sense strand starting at position 2270 of SEQ ID NO: 1887396
gaaaguuaucuguacacug

SEQ ID NO: 2469203 - RNA, 19 nt, Artificial Sequence
  Description of Artificial Sequence: Synthetic oligonucleotide
  Antisense strand to SEQ ID NO: 2469202
caguguacagauaacuuuc

SEQ ID NO: 2469204 - RNA, 19 nt, Artificial Sequence
  Description of Artificial Sequence: Synthetic oligonucleotide
  Sense strand starting at position 2281 of SEQ ID NO: 1887396
guacacugugucuagcuua

SEQ ID NO: 2469205 - RNA, 19 nt, Artificial Sequence
  Description of Artificial Sequence: Synthetic oligonucleotide
  Antisense strand to SEQ ID NO: 2469204
uaagcuagacacaguguac

SEQ ID NO: 2469206 - RNA, 19 nt, Artificial Sequence
  Description of Artificial Sequence: Synthetic oligonucleotide
  Sense strand starting at position 2323 of SEQ ID NO: 1887396
uagagugaccuguaccgaa

SEQ ID NO: 2469207 - RNA, 19 nt, Artificial Sequence
  Description of Artificial Sequence: Synthetic oligonucleotide
  Antisense strand to SEQ ID NO: 2469206
uucgguacaggucacucua

SEQ ID NO: 2469208 - RNA, 19 nt, Artificial Sequence
  Description of Artificial Sequence: Synthetic oligonucleotide
  Sense strand starting at position 2327 of SEQ ID NO: 1887396
gugaccuguaccgaaugaa

SEQ ID NO: 2469209 - RNA, 19 nt, Artificial Sequence
  Description of Artificial Sequence: Synthetic oligonucleotide
  Antisense strand to SEQ ID NO: 2469208
uucauucgguacaggucac

SEQ ID NO: 2469210 - RNA, 19 nt, Artificial Sequence
  Description of Artificial Sequence: Synthetic oligonucleotide
  Sense strand starting at position 2401 of SEQ ID NO: 1887396
ggccuugucgcuguuaucu

SEQ ID NO: 2469211 - RNA, 19 nt, Artificial Sequence
  Description of Artificial Sequence: Synthetic oligonucleotide
  Antisense strand to SEQ ID NO: 2469210
agauaacagcgacaaggcc

SEQ ID NO: 2469212 - RNA, 19 nt, Artificial Sequence
  Description of Artificial Sequence: Synthetic oligonucleotide
  Sense strand starting at position 2414 of SEQ ID NO: 1887396
uuaucugcaguuuagugau

SEQ ID NO: 2469213 - RNA, 19 nt, Artificial Sequence
  Description of Artificial Sequence: Synthetic oligonucleotide
  Antisense strand to SEQ ID NO: 2469212
aucacuaaacugcagauaa

SEQ ID NO: 2469214 - RNA, 19 nt, Artificial Sequence
  Description of Artificial Sequence: Synthetic oligonucleotide
  Sense strand starting at position 2451 of SEQ ID NO: 1887396
gcgguaacgccauagauca

SEQ ID NO: 2469215 - RNA, 19 nt, Artificial Sequence
  Description of Artificial Sequence: Synthetic oligonucleotide
  Antisense strand to SEQ ID NO: 2469214
ugaucuauggcguuaccgc

SEQ ID NO: 2469216 - RNA, 19 nt, Artificial Sequence
  Description of Artificial Sequence: Synthetic oligonucleotide
  Sense strand starting at position 2453 of SEQ ID NO: 1887396
gguaacgccauagaucaaa

SEQ ID NO: 2469217 - RNA, 19 nt, Artificial Sequence
  Description of Artificial Sequence: Synthetic oligonucleotide
  Antisense strand to SEQ ID NO: 2469216
uuugaucuauggcguuacc

SEQ ID NO: 2469218 - RNA, 19 nt, Artificial Sequence
  Description of Artificial Sequence: Synthetic oligonucleotide
  Sense strand starting at position 2488 of SEQ ID NO: 1887396
ugagguuaaacgggaaguu

SEQ ID NO: 2469219 - RNA, 19 nt, Artificial Sequence
  Description of Artificial Sequence: Synthetic oligonucleotide
  Antisense strand to SEQ ID NO: 2469218
aacuucccguuuaaccuca

SEQ ID NO: 2469220 - RNA, 19 nt, Artificial Sequence
  Description of Artificial Sequence: Synthetic oligonucleotide
  Sense strand starting at position 2489 of SEQ ID NO: 1887396
gagguuaaacgggaaguuu

SEQ ID NO: 2469221 - RNA, 19 nt, Artificial Sequence
  Description of Artificial Sequence: Synthetic oligonucleotide
  Antisense strand to SEQ ID NO: 2469220
aaacuucccguuuaaccuc

SEQ ID NO: 2469222 - RNA, 19 nt, Artificial Sequence
  Description of Artificial Sequence: Synthetic oligonucleotide
  Sense strand starting at position 2500 of SEQ ID NO: 1887396
ggaaguuucuggcaaauuu

SEQ ID NO: 2469223 - RNA, 19 nt, Artificial Sequence
  Description of Artificial Sequence: Synthetic oligonucleotide
  Antisense strand to SEQ ID NO: 2469222
aaauuugccagaaacuucc

SEQ ID NO: 2469224 - RNA, 19 nt, Artificial Sequence
  Description of Artificial Sequence: Synthetic oligonucleotide
  Sense strand starting at position 2541 of SEQ ID NO: 1887396
agcauuauuuauugggaca

SEQ ID NO: 2469225 - RNA, 19 nt, Artificial Sequence
  Description of Artificial Sequence: Synthetic oligonucleotide
  Antisense strand to SEQ ID NO: 2469224
ugucccaauaaauaaugcu

SEQ ID NO: 2469226 - RNA, 19 nt, Artificial Sequence
  Description of Artificial Sequence: Synthetic oligonucleotide
  Sense strand starting at position 2544 of SEQ ID NO: 1887396
auuauuuauugggacaaca

SEQ ID NO: 2469227 - RNA, 19 nt, Artificial Sequence
  Description of Artificial Sequence: Synthetic oligonucleotide
  Antisense strand to SEQ ID NO: 2469226
uguugucccaauaaauaau

SEQ ID NO: 2469228 - RNA, 19 nt, Artificial Sequence
  Description of Artificial Sequence: Synthetic oligonucleotide
  Sense strand starting at position 2602 of SEQ ID NO: 1887396
guggcuguucguuugagau

SEQ ID NO: 2469229 - RNA, 19 nt, Artificial Sequence
  Description of Artificial Sequence: Synthetic oligonucleotide
  Antisense strand to SEQ ID NO: 2469228
aucucaaacgaacagccac

SEQ ID NO: 2469230 - RNA, 19 nt, Artificial Sequence
  Description of Artificial Sequence: Synthetic oligonucleotide
  Sense strand starting at position 2628 of SEQ ID NO: 1887396
gauaguagguauuccuauu

SEQ ID NO: 2469231 - RNA, 19 nt, Artificial Sequence
  Description of Artificial Sequence: Synthetic oligonucleotide
  Antisense strand to SEQ ID NO: 2469230
aauaggaauaccuacuauc

SEQ ID NO: 2469232 - RNA, 19 nt, Artificial Sequence
  Description of Artificial Sequence: Synthetic oligonucleotide
  Sense strand starting at position 2917 of SEQ ID NO: 1887396
cuucuauuagccuguuaca

SEQ ID NO: 2469233 - RNA, 19 nt, Artificial Sequence
  Description of Artificial Sequence: Synthetic oligonucleotide
  Antisense strand to SEQ ID NO: 2469232
uguaacaggcuaauagaag

SEQ ID NO: 2469234 - RNA, 19 nt, Artificial Sequence
  Description of Artificial Sequence: Synthetic oligonucleotide
  Sense strand starting at position 3092 of SEQ ID NO: 1887396
uuugucauuuaacagagua

SEQ ID NO: 2469235 - RNA, 19 nt, Artificial Sequence
  Description of Artificial Sequence: Synthetic oligonucleotide
  Antisense strand to SEQ ID NO: 2469234
uacucuguuaaaugacaaa

SEQ ID NO: 2469236 - RNA, 19 nt, Artificial Sequence
  Description of Artificial Sequence: Synthetic oligonucleotide
  Sense strand starting at position 3135 of SEQ ID NO: 1887396
ucuacugugguccaaagaa

SEQ ID NO: 2469237 - RNA, 19 nt, Artificial Sequence
  Description of Artificial Sequence: Synthetic oligonucleotide
  Antisense strand to SEQ ID NO: 2469236
uucuuuggaccacaguaga

SEQ ID NO: 2469238 - RNA, 19 nt, Artificial Sequence
  Description of Artificial Sequence: Synthetic oligonucleotide
  Sense strand starting at position 3233 of SEQ ID NO: 1887396
accaaagagucauccuuga

SEQ ID NO: 2469239 - RNA, 19 nt, Artificial Sequence
  Description of Artificial Sequence: Synthetic oligonucleotide
  Antisense strand to SEQ ID NO: 2469238
ucaaggaugacucuuuggu

SEQ ID NO: 2469240 - RNA, 19 nt, Artificial Sequence
  Description of Artificial Sequence: Synthetic oligonucleotide
  Sense strand starting at position 3363 of SEQ ID NO: 1887396
acuguuauuucuuaccuag

SEQ ID NO: 2469241 - RNA, 19 nt, Artificial Sequence
  Description of Artificial Sequence: Synthetic oligonucleotide
  Antisense strand to SEQ ID NO: 2469240
cuagguaagaaauaacagu

SEQ ID NO: 2469242 - RNA, 19 nt, Artificial Sequence
  Description of Artificial Sequence: Synthetic oligonucleotide
  Sense strand starting at position 3365 of SEQ ID NO: 1887396
uguuauuucuuaccuaguc

SEQ ID NO: 2469243 - RNA, 19 nt, Artificial Sequence
  Description of Artificial Sequence: Synthetic oligonucleotide
  Antisense strand to SEQ ID NO: 2469242
gacuagguaagaaauaaca

SEQ ID NO: 2469244 - RNA, 19 nt, Artificial Sequence
  Description of Artificial Sequence: Synthetic oligonucleotide
  Sense strand starting at position 3366 of SEQ ID NO: 1887396
guuauuucuuaccuagucu

SEQ ID NO: 2469245 - RNA, 19 nt, Artificial Sequence
  Description of Artificial Sequence: Synthetic oligonucleotide
  Antisense strand to SEQ ID NO: 2469244
agacuagguaagaaauaac

SEQ ID NO: 2469246 - RNA, 19 nt, Artificial Sequence
  Description of Artificial Sequence: Synthetic oligonucleotide
  Sense strand starting at position 3594 of SEQ ID NO: 1887396
uuccuuacugagugacuuu

SEQ ID NO: 2469247 - RNA, 19 nt, Artificial Sequence
  Description of Artificial Sequence: Synthetic oligonucleotide
  Antisense strand to SEQ ID NO: 2469246
aaagucacucaguaaggaa

SEQ ID NO: 2469248 - RNA, 19 nt, Artificial Sequence
  Description of Artificial Sequence: Synthetic oligonucleotide
  Sense strand starting at position 3856 of SEQ ID NO: 1887396
cuuaaauugugucuacuuu

SEQ ID NO: 2469249 - RNA, 19 nt, Artificial Sequence
  Description of Artificial Sequence: Synthetic oligonucleotide
  Antisense strand to SEQ ID NO: 2469248
aaaguagacacaauuuaag

SEQ ID NO: 2469250 - RNA, 19 nt, Artificial Sequence
  Description of Artificial Sequence: Synthetic oligonucleotide
  Sense strand starting at position 3860 of SEQ ID NO: 1887396
aauugugucuacuuugaga

SEQ ID NO: 2469251 - RNA, 19 nt, Artificial Sequence
  Description of Artificial Sequence: Synthetic oligonucleotide
  Antisense strand to SEQ ID NO: 2469250
ucucaaaguagacacaauu

SEQ ID NO: 2469252 - RNA, 19 nt, Artificial Sequence
  Description of Artificial Sequence: Synthetic oligonucleotide
  Sense strand starting at position 3895 of SEQ ID NO: 1887396
cagcuacugugaucuugaa

SEQ ID NO: 2469253 - RNA, 19 nt, Artificial Sequence
  Description of Artificial Sequence: Synthetic oligonucleotide
  Antisense strand to SEQ ID NO: 2469252
uucaagaucacaguagcug

SEQ ID NO: 2469254 - RNA, 19 nt, Artificial Sequence
  Description of Artificial Sequence: Synthetic oligonucleotide
  Sense strand starting at position 235 of SEQ ID NO: 1887397
auuggacacguccauacua

SEQ ID NO: 2469255 - RNA, 19 nt, Artificial Sequence
  Description of Artificial Sequence: Synthetic oligonucleotide
  Antisense strand to SEQ ID NO: 2469254
uaguauggacguguccaau

SEQ ID NO: 2469256 - RNA, 19 nt, Artificial Sequence
  Description of Artificial Sequence: Synthetic oligonucleotide
  Sense strand starting at position 237 of SEQ ID NO: 1887397
uggacacguccauacuauu

SEQ ID NO: 2469257 - RNA, 19 nt, Artificial Sequence
  Description of Artificial Sequence: Synthetic oligonucleotide
  Antisense strand to SEQ ID NO: 2469256
aauaguauggacgugucca

SEQ ID NO: 2469258 - RNA, 19 nt, Artificial Sequence
  Description of Artificial Sequence: Synthetic oligonucleotide
  Sense strand starting at position 385 of SEQ ID NO: 1887397
aucccauugugcucucaca

SEQ ID NO: 2469259 - RNA, 19 nt, Artificial Sequence
  Description of Artificial Sequence: Synthetic oligonucleotide
  Antisense strand to SEQ ID NO: 2469258
ugugagagcacaaugggau

SEQ ID NO: 2469260 - RNA, 19 nt, Artificial Sequence
  Description of Artificial Sequence: Synthetic oligonucleotide
  Sense strand starting at position 444 of SEQ ID NO: 1887397
gaucaagaagccugucuac

SEQ ID NO: 2469261 - RNA, 19 nt, Artificial Sequence
  Description of Artificial Sequence: Synthetic oligonucleotide
  Antisense strand to SEQ ID NO: 2469260
guagacaggcuucuugauc

SEQ ID NO: 2469262 - RNA, 19 nt, Artificial Sequence
  Description of Artificial Sequence: Synthetic oligonucleotide
  Sense strand starting at position 472 of SEQ ID NO: 1887397
aggguacccaugugaauug

SEQ ID NO: 2469263 - RNA, 19 nt, Artificial Sequence
  Description of Artificial Sequence: Synthetic oligonucleotide
  Antisense strand to SEQ ID NO: 2469262
caauucacauggguacccu

SEQ ID NO: 2469264 - RNA, 19 nt, Artificial Sequence
  Description of Artificial Sequence: Synthetic oligonucleotide
  Sense strand starting at position 481 of SEQ ID NO: 1887397
augugaauuguagauacuc

SEQ ID NO: 2469265 - RNA, 19 nt, Artificial Sequence
  Description of Artificial Sequence: Synthetic oligonucleotide
  Antisense strand to SEQ ID NO: 2469264
gaguaucuacaauucacau

SEQ ID NO: 2469266 - RNA, 19 nt, Artificial Sequence
  Description of Artificial Sequence: Synthetic oligonucleotide
  Sense strand starting at position 518 of SEQ ID NO: 1887397
ggagcauuaucagccagga

SEQ ID NO: 2469267 - RNA, 19 nt, Artificial Sequence
  Description of Artificial Sequence: Synthetic oligonucleotide
  Antisense strand to SEQ ID NO: 2469266
uccuggcugauaaugcucc

SEQ ID NO: 2469268 - RNA, 19 nt, Artificial Sequence
  Description of Artificial Sequence: Synthetic oligonucleotide
  Sense strand starting at position 528 of SEQ ID NO: 1887397
cagccaggacuuuaaguuu

SEQ ID NO: 2469269 - RNA, 19 nt, Artificial Sequence
  Description of Artificial Sequence: Synthetic oligonucleotide
  Antisense strand to SEQ ID NO: 2469268
aaacuuaaaguccuggcug

SEQ ID NO: 2469270 - RNA, 19 nt, Artificial Sequence
  Description of Artificial Sequence: Synthetic oligonucleotide
  Sense strand starting at position 552 of SEQ ID NO: 1887397
ucuugcugauaaucagaau

SEQ ID NO: 2469271 - RNA, 19 nt, Artificial Sequence
  Description of Artificial Sequence: Synthetic oligonucleotide
  Antisense strand to SEQ ID NO: 2469270
auucugauuaucagcaaga

SEQ ID NO: 2469272 - RNA, 19 nt, Artificial Sequence
  Description of Artificial Sequence: Synthetic oligonucleotide
  Sense strand starting at position 555 of SEQ ID NO: 1887397
ugcugauaaucagaauuuc

SEQ ID NO: 2469273 - RNA, 19 nt, Artificial Sequence
  Description of Artificial Sequence: Synthetic oligonucleotide
  Antisense strand to SEQ ID NO: 2469272
gaaauucugauuaucagca

SEQ ID NO: 2469274 - RNA, 19 nt, Artificial Sequence
  Description of Artificial Sequence: Synthetic oligonucleotide
  Sense strand starting at position 591 of SEQ ID NO: 1887397
ugcagauucuagcuggaca

SEQ ID NO: 2469275 - RNA, 19 nt, Artificial Sequence
  Description of Artificial Sequence: Synthetic oligonucleotide
  Antisense strand to SEQ ID NO: 2469274
uguccagcuagaaucugca

SEQ ID NO: 2469276 - RNA, 19 nt, Artificial Sequence
  Description of Artificial Sequence: Synthetic oligonucleotide
  Sense strand starting at position 593 of SEQ ID NO: 1887397
cagauucuagcuggacaca

SEQ ID NO: 2469277 - RNA, 19 nt, Artificial Sequence
  Description of Artificial Sequence: Synthetic oligonucleotide
  Antisense strand to SEQ ID NO: 2469276
uguguccagcuagaaucug

SEQ ID NO: 2469278 - RNA, 19 nt, Artificial Sequence
  Description of Artificial Sequence: Synthetic oligonucleotide
  Sense strand starting at position 606 of SEQ ID NO: 1887397
gacacaguggcuuauuaaa

SEQ ID NO: 2469279 - RNA, 19 nt, Artificial Sequence
  Description of Artificial Sequence: Synthetic oligonucleotide
  Antisense strand to SEQ ID NO: 2469278
uuuaauaagccacuguguc

SEQ ID NO: 2469280 - RNA, 19 nt, Artificial Sequence
  Description of Artificial Sequence: Synthetic oligonucleotide
  Sense strand starting at position 631 of SEQ ID NO: 1887397
cacaaugaccuucgagaga

SEQ ID NO: 2469281 - RNA, 19 nt, Artificial Sequence
  Description of Artificial Sequence: Synthetic oligonucleotide
  Antisense strand to SEQ ID NO: 2469280
ucucucgaaggucauugug

SEQ ID NO: 2469282 - RNA, 19 nt, Artificial Sequence
  Description of Artificial Sequence: Synthetic oligonucleotide
  Sense strand starting at position 1044 of SEQ ID NO: 1887397
cauugauaggcccaaggca

SEQ ID NO: 2469283 - RNA, 19 nt, Artificial Sequence
  Description of Artificial Sequence: Synthetic oligonucleotide
  Antisense strand to SEQ ID NO: 2469282
ugccuugggccuaucaaug

SEQ ID NO: 2469284 - RNA, 19 nt, Artificial Sequence
  Description of Artificial Sequence: Synthetic oligonucleotide
  Sense strand starting at position 1129 of SEQ ID NO: 1887397
ggagaagaaucaggagaga

SEQ ID NO: 2469285 - RNA, 19 nt, Artificial Sequence
  Description of Artificial Sequence: Synthetic oligonucleotide
  Antisense strand to SEQ ID NO: 2469284
ucucuccugauucuucucc

SEQ ID NO: 2469286 - RNA, 19 nt, Artificial Sequence
  Description of Artificial Sequence: Synthetic oligonucleotide
  Sense strand starting at position 1299 of SEQ ID NO: 1887397
aguccagcacuauaaguau

SEQ ID NO: 2469287 - RNA, 19 nt, Artificial Sequence
  Description of Artificial Sequence: Synthetic oligonucleotide
  Antisense strand to SEQ ID NO: 2469286
auacuuauagugcuggacu

SEQ ID NO: 2469288 - RNA, 19 nt, Artificial Sequence
  Description of Artificial Sequence: Synthetic oligonucleotide
  Sense strand starting at position 1335 of SEQ ID NO: 1887397
cugagugaauccucuuugu

SEQ ID NO: 2469289 - RNA, 19 nt, Artificial Sequence
  Description of Artificial Sequence: Synthetic oligonucleotide
  Antisense strand to SEQ ID NO: 2469288
acaaagaggauucacucag

SEQ ID NO: 2469290 - RNA, 19 nt, Artificial Sequence
  Description of Artificial Sequence: Synthetic oligonucleotide
  Sense strand starting at position 1766 of SEQ ID NO: 1887397
gaaggagugcuuugguuag

SEQ ID NO: 2469291 - RNA, 19 nt, Artificial Sequence
  Description of Artificial Sequence: Synthetic oligonucleotide
  Antisense strand to SEQ ID NO: 2469290
cuaaccaaagcacuccuuc

SEQ ID NO: 2469292 - RNA, 19 nt, Artificial Sequence
  Description of Artificial Sequence: Synthetic oligonucleotide
  Sense strand starting at position 2009 of SEQ ID NO: 1887397
gagggacagucagcagaua

SEQ ID NO: 2469293 - RNA, 19 nt, Artificial Sequence
  Description of Artificial Sequence: Synthetic oligonucleotide
  Antisense strand to SEQ ID NO: 2469292
uaucugcugacugucccuc

SEQ ID NO: 2469294 - RNA, 19 nt, Artificial Sequence
  Description of Artificial Sequence: Synthetic oligonucleotide
  Sense strand starting at position 2176 of SEQ ID NO: 1887397
gcuccuuccaggcagagaa

SEQ ID NO: 2469295 - RNA, 19 nt, Artificial Sequence
  Description of Artificial Sequence: Synthetic oligonucleotide
  Antisense strand to SEQ ID NO: 2469294
uucucugccuggaaggagc

SEQ ID NO: 2469296 - RNA, 19 nt, Artificial Sequence
  Description of Artificial Sequence: Synthetic oligonucleotide
  Sense strand starting at position 2464 of SEQ ID NO: 1887397
uggccagaggucugaaucu

SEQ ID NO: 2469297 - RNA, 19 nt, Artificial Sequence
  Description of Artificial Sequence: Synthetic oligonucleotide
  Antisense strand to SEQ ID NO: 2469296
agauucagaccucuggcca

SEQ ID NO: 2469298 - RNA, 19 nt, Artificial Sequence
  Description of Artificial Sequence: Synthetic oligonucleotide
  Sense strand starting at position 2471 of SEQ ID NO: 1887397
aggucugaaucuuuggcau

SEQ ID NO: 2469299 - RNA, 19 nt, Artificial Sequence
  Description of Artificial Sequence: Synthetic oligonucleotide
  Antisense strand to SEQ ID NO: 2469298
augccaaagauucagaccu

SEQ ID NO: 2469300 - RNA, 19 nt, Artificial Sequence
  Description of Artificial Sequence: Synthetic oligonucleotide
  Sense strand starting at position 2565 of SEQ ID NO: 1887397
uguacaaguuguuuaaccu

SEQ ID NO: 2469301 - RNA, 19 nt, Artificial Sequence
  Description of Artificial Sequence: Synthetic oligonucleotide
  Antisense strand to SEQ ID NO: 2469300
agguuaaacaacuuguaca

SEQ ID NO: 2469302 - RNA, 19 nt, Artificial Sequence
  Description of Artificial Sequence: Synthetic oligonucleotide
  Sense strand starting at position 2574 of SEQ ID NO: 1887397
uguuuaaccucucuguacu

SEQ ID NO: 2469303 - RNA, 19 nt, Artificial Sequence
  Description of Artificial Sequence: Synthetic oligonucleotide
  Antisense strand to SEQ ID NO: 2469302
aguacagagagguuaaaca

SEQ ID NO: 2469304 - RNA, 19 nt, Artificial Sequence
  Description of Artificial Sequence: Synthetic oligonucleotide
  Sense strand starting at position 2629 of SEQ ID NO: 1887397
ggauaauagugucuaacau

SEQ ID NO: 2469305 - RNA, 19 nt, Artificial Sequence
  Description of Artificial Sequence: Synthetic oligonucleotide
  Antisense strand to SEQ ID NO: 2469304
auguuagacacuauuaucc

SEQ ID NO: 2469306 - RNA, 19 nt, Artificial Sequence
  Description of Artificial Sequence: Synthetic oligonucleotide
  Sense strand starting at position 2672 of SEQ ID NO: 1887397
uaaugaauguaucuggagu

SEQ ID NO: 2469307 - RNA, 19 nt, Artificial Sequence
  Description of Artificial Sequence: Synthetic oligonucleotide
  Antisense strand to SEQ ID NO: 2469306
acuccagauacauucauua

SEQ ID NO: 2469308 - RNA, 19 nt, Artificial Sequence
  Description of Artificial Sequence: Synthetic oligonucleotide
  Sense strand starting at position 2689 of SEQ ID NO: 1887397
gugcuuagaugcuuagaac

SEQ ID NO: 2469309 - RNA, 19 nt, Artificial Sequence
  Description of Artificial Sequence: Synthetic oligonucleotide
  Antisense strand to SEQ ID NO: 2469308
guucuaagcaucuaagcac

SEQ ID NO: 2469310 - RNA, 19 nt, Artificial Sequence
  Description of Artificial Sequence: Synthetic oligonucleotide
  Sense strand starting at position 2690 of SEQ ID NO: 1887397
ugcuuagaugcuuagaacu

SEQ ID NO: 2469311 - RNA, 19 nt, Artificial Sequence
  Description of Artificial Sequence: Synthetic oligonucleotide
  Antisense strand to SEQ ID NO: 2469310
aguucuaagcaucuaagca

SEQ ID NO: 2469312 - RNA, 19 nt, Artificial Sequence
  Description of Artificial Sequence: Synthetic oligonucleotide
  Sense strand starting at position 2718 of SEQ ID NO: 1887397
cacaguaaacgguacauau

SEQ ID NO: 2469313 - RNA, 19 nt, Artificial Sequence
  Description of Artificial Sequence: Synthetic oligonucleotide
  Antisense strand to SEQ ID NO: 2469312
auauguaccguuuacugug

SEQ ID NO: 2469314 - RNA, 19 nt, Artificial Sequence
  Description of Artificial Sequence: Synthetic oligonucleotide
  Sense strand starting at position 2720 of SEQ ID NO: 1887397
caguaaacgguacauauau

SEQ ID NO: 2469315 - RNA, 19 nt, Artificial Sequence
  Description of Artificial Sequence: Synthetic oligonucleotide
  Antisense strand to SEQ ID NO: 2469314
auauauguaccguuuacug

SEQ ID NO: 2469316 - RNA, 19 nt, Artificial Sequence
  Description of Artificial Sequence: Synthetic oligonucleotide
  Sense strand starting at position 2743 of SEQ ID NO: 1887397
acauauauagucuagcuua

SEQ ID NO: 2469317 - RNA, 19 nt, Artificial Sequence
  Description of Artificial Sequence: Synthetic oligonucleotide
  Antisense strand to SEQ ID NO: 2469316
uaagcuagacuauauaugu

SEQ ID NO: 2469318 - RNA, 19 nt, Artificial Sequence
  Description of Artificial Sequence: Synthetic oligonucleotide
  Sense strand starting at position 2838 of SEQ ID NO: 1887397
guguguauauuucuugugu

SEQ ID NO: 2469319 - RNA, 19 nt, Artificial Sequence
  Description of Artificial Sequence: Synthetic oligonucleotide
  Antisense strand to SEQ ID NO: 2469318
acacaagaaauauacacac

SEQ ID NO: 2469320 - RNA, 19 nt, Artificial Sequence
  Description of Artificial Sequence: Synthetic oligonucleotide
  Sense strand starting at position 2839 of SEQ ID NO: 1887397
uguguauauuucuugugua

SEQ ID NO: 2469321 - RNA, 19 nt, Artificial Sequence
  Description of Artificial Sequence: Synthetic oligonucleotide
  Antisense strand to SEQ ID NO: 2469320
uacacaagaaauauacaca

SEQ ID NO: 2469322 - RNA, 19 nt, Artificial Sequence
  Description of Artificial Sequence: Synthetic oligonucleotide
  Sense strand starting at position 3030 of SEQ ID NO: 1887397
gcaggagggugauuaauua

SEQ ID NO: 2469323 - RNA, 19 nt, Artificial Sequence
  Description of Artificial Sequence: Synthetic oligonucleotide
  Antisense strand to SEQ ID NO: 2469322
uaauuaaucacccuccugc

SEQ ID NO: 2469324 - RNA, 19 nt, Artificial Sequence
  Description of Artificial Sequence: Synthetic oligonucleotide
  Sense strand starting at position 3275 of SEQ ID NO: 1887397
agagaugucccaugaguug

SEQ ID NO: 2469325 - RNA, 19 nt, Artificial Sequence
  Description of Artificial Sequence: Synthetic oligonucleotide
  Antisense strand to SEQ ID NO: 2469324
caacucaugggacaucucu

SEQ ID NO: 2469326 - RNA, 19 nt, Artificial Sequence
  Description of Artificial Sequence: Synthetic oligonucleotide
  Sense strand starting at position 3281 of SEQ ID NO: 1887397
gucccaugaguugggucau

SEQ ID NO: 2469327 - RNA, 19 nt, Artificial Sequence
  Description of Artificial Sequence: Synthetic oligonucleotide
  Antisense strand to SEQ ID NO: 2469326
augacccaacucaugggac

SEQ ID NO: 2469328 - RNA, 19 nt, Artificial Sequence
  Description of Artificial Sequence: Synthetic oligonucleotide
  Sense strand starting at position 3436 of SEQ ID NO: 1887397
guggauggcccuuagaaca

SEQ ID NO: 2469329 - RNA, 19 nt, Artificial Sequence
  Description of Artificial Sequence: Synthetic oligonucleotide
  Antisense strand to SEQ ID NO: 2469328
uguucuaagggccauccac

SEQ ID NO: 2469330 - RNA, 19 nt, Artificial Sequence
  Description of Artificial Sequence: Synthetic oligonucleotide
  Sense strand starting at position 3912 of SEQ ID NO: 1887397
caggcaaaggccuagaguu

SEQ ID NO: 2469331 - RNA, 19 nt, Artificial Sequence
  Description of Artificial Sequence: Synthetic oligonucleotide
  Antisense strand to SEQ ID NO: 2469330
aacucuaggccuuugccug

SEQ ID NO: 2469332 - RNA, 19 nt, Artificial Sequence
  Description of Artificial Sequence: Synthetic oligonucleotide
  Sense strand starting at position 3935 of SEQ ID NO: 1887397
gcauguguggugccaguuu

SEQ ID NO: 2469333 - RNA, 19 nt, Artificial Sequence
  Description of Artificial Sequence: Synthetic oligonucleotide
  Antisense strand to SEQ ID NO: 2469332
aaacuggcaccacacaugc

SEQ ID NO: 2469334 - RNA, 19 nt, Artificial Sequence
  Description of Artificial Sequence: Synthetic oligonucleotide
  Sense strand starting at position 139 of SEQ ID NO: 1887398
cuggucagucaccaaaugu

SEQ ID NO: 2469335 - RNA, 19 nt, Artificial Sequence
  Description of Artificial Sequence: Synthetic oligonucleotide
  Antisense strand to SEQ ID NO: 2469334
acauuuggugacugaccag

SEQ ID NO: 2469336 - RNA, 19 nt, Artificial Sequence
  Description of Artificial Sequence: Synthetic oligonucleotide
  Sense strand starting at position 311 of SEQ ID NO: 1887398
cagaguucuggccacccua

SEQ ID NO: 2469337 - RNA, 19 nt, Artificial Sequence
  Description of Artificial Sequence: Synthetic oligonucleotide
  Antisense strand to SEQ ID NO: 2469336
uaggguggccagaacucug

SEQ ID NO: 2469338 - RNA, 19 nt, Artificial Sequence
  Description of Artificial Sequence: Synthetic oligonucleotide
  Sense strand starting at position 352 of SEQ ID NO: 1887398
ucucuuaggcuccacgaaa

SEQ ID NO: 2469339 - RNA, 19 nt, Artificial Sequence
  Description of Artificial Sequence: Synthetic oligonucleotide
  Antisense strand to SEQ ID NO: 2469338
uuucguggagccuaagaga

SEQ ID NO: 2469340 - RNA, 19 nt, Artificial Sequence
  Description of Artificial Sequence: Synthetic oligonucleotide
  Sense strand starting at position 628 of SEQ ID NO: 1887398
cuuacauuucgauguggua

SEQ ID NO: 2469341 - RNA, 19 nt, Artificial Sequence
  Description of Artificial Sequence: Synthetic oligonucleotide
  Antisense strand to SEQ ID NO: 2469340
uaccacaucgaaauguaag

SEQ ID NO: 2469342 - RNA, 19 nt, Artificial Sequence
  Description of Artificial Sequence: Synthetic oligonucleotide
  Sense strand starting at position 640 of SEQ ID NO: 1887398
ugugguaaugucgcuguua

SEQ ID NO: 2469343 - RNA, 19 nt, Artificial Sequence
  Description of Artificial Sequence: Synthetic oligonucleotide
  Antisense strand to SEQ ID NO: 2469342
uaacagcgacauuaccaca

SEQ ID NO: 2469344 - RNA, 19 nt, Artificial Sequence
  Description of Artificial Sequence: Synthetic oligonucleotide
  Sense strand starting at position 955 of SEQ ID NO: 1887398
gaugacuauuccgcuagaa

SEQ ID NO: 2469345 - RNA, 19 nt, Artificial Sequence
  Description of Artificial Sequence: Synthetic oligonucleotide
  Antisense strand to SEQ ID NO: 2469344
uucuagcggaauagucauc

SEQ ID NO: 2469346 - RNA, 19 nt, Artificial Sequence
  Description of Artificial Sequence: Synthetic oligonucleotide
  Sense strand starting at position 957 of SEQ ID NO: 1887398
ugacuauuccgcuagaagg

SEQ ID NO: 2469347 - RNA, 19 nt, Artificial Sequence
  Description of Artificial Sequence: Synthetic oligonucleotide
  Antisense strand to SEQ ID NO: 2469346
ccuucuagcggaauaguca

SEQ ID NO: 2469348 - RNA, 19 nt, Artificial Sequence
  Description of Artificial Sequence: Synthetic oligonucleotide
  Sense strand starting at position 984 of SEQ ID NO: 1887398
gucaaagacugcccuuaaa

SEQ ID NO: 2469349 - RNA, 19 nt, Artificial Sequence
  Description of Artificial Sequence: Synthetic oligonucleotide
  Antisense strand to SEQ ID NO: 2469348
uuuaagggcagucuuugac

SEQ ID NO: 2469350 - RNA, 19 nt, Artificial Sequence
  Description of Artificial Sequence: Synthetic oligonucleotide
  Sense strand starting at position 1138 of SEQ ID NO: 1887398
ggacaucucucagcaacag

SEQ ID NO: 2469351 - RNA, 19 nt, Artificial Sequence
  Description of Artificial Sequence: Synthetic oligonucleotide
  Antisense strand to SEQ ID NO: 2469350
cuguugcugagagaugucc

SEQ ID NO: 2469352 - RNA, 19 nt, Artificial Sequence
  Description of Artificial Sequence: Synthetic oligonucleotide
  Sense strand starting at position 1160 of SEQ ID NO: 1887398
ucuuuccucuaaucggaaa

SEQ ID NO: 2469353 - RNA, 19 nt, Artificial Sequence
  Description of Artificial Sequence: Synthetic oligonucleotide
  Antisense strand to SEQ ID NO: 2469352
uuuccgauuagaggaaaga

SEQ ID NO: 2469354 - RNA, 19 nt, Artificial Sequence
  Description of Artificial Sequence: Synthetic oligonucleotide
  Sense strand starting at position 1285 of SEQ ID NO: 1887398
guauaaacuuuaucuguca

SEQ ID NO: 2469355 - RNA, 19 nt, Artificial Sequence
  Description of Artificial Sequence: Synthetic oligonucleotide
  Antisense strand to SEQ ID NO: 2469354
ugacagauaaaguuuauac

SEQ ID NO: 2469356 - RNA, 19 nt, Artificial Sequence
  Description of Artificial Sequence: Synthetic oligonucleotide
  Sense strand starting at position 1389 of SEQ ID NO: 1887398
cugagauuauaccuagcau

SEQ ID NO: 2469357 - RNA, 19 nt, Artificial Sequence
  Description of Artificial Sequence: Synthetic oligonucleotide
  Antisense strand to SEQ ID NO: 2469356
augcuagguauaaucucag

SEQ ID NO: 2469358 - RNA, 19 nt, Artificial Sequence
  Description of Artificial Sequence: Synthetic oligonucleotide
  Sense strand starting at position 1717 of SEQ ID NO: 1887398
gcucuuaagguuuacuaua

SEQ ID NO: 2469359 - RNA, 19 nt, Artificial Sequence
  Description of Artificial Sequence: Synthetic oligonucleotide
  Antisense strand to SEQ ID NO: 2469358
uauaguaaaccuuaagagc

SEQ ID NO: 2469360 - RNA, 19 nt, Artificial Sequence
  Description of Artificial Sequence: Synthetic oligonucleotide
  Sense strand starting at position 1795 of SEQ ID NO: 1887398
ugagauaagccacgugaag

SEQ ID NO: 2469361 - RNA, 19 nt, Artificial Sequence
  Description of Artificial Sequence: Synthetic oligonucleotide
  Antisense strand to SEQ ID NO: 2469360
cuucacguggcuuaucuca

SEQ ID NO: 2469362 - RNA, 19 nt, Artificial Sequence
  Description of Artificial Sequence: Synthetic oligonucleotide
  Sense strand starting at position 1835 of SEQ ID NO: 1887398
cagaguaaguacuuaauga

SEQ ID NO: 2469363 - RNA, 19 nt, Artificial Sequence
  Description of Artificial Sequence: Synthetic oligonucleotide
  Antisense strand to SEQ ID NO: 2469362
ucauuaaguacuuacucug

SEQ ID NO: 2469364 - RNA, 19 nt, Artificial Sequence
  Description of Artificial Sequence: Synthetic oligonucleotide
  Sense strand starting at position 1858 of SEQ ID NO: 1887398
uggcuauuauuacugacau

SEQ ID NO: 2469365 - RNA, 19 nt, Artificial Sequence
  Description of Artificial Sequence: Synthetic oligonucleotide
  Antisense strand to SEQ ID NO: 2469364
augucaguaauaauagcca

SEQ ID NO: 2469366 - RNA, 19 nt, Artificial Sequence
  Description of Artificial Sequence: Synthetic oligonucleotide
  Sense strand starting at position 1890 of SEQ ID NO: 1887398
aaguauaagggaugcucuu

SEQ ID NO: 2469367 - RNA, 19 nt, Artificial Sequence
  Description of Artificial Sequence: Synthetic oligonucleotide
  Antisense strand to SEQ ID NO: 2469366
aagagcaucccuuauacuu

SEQ ID NO: 2469368 - RNA, 19 nt, Artificial Sequence
  Description of Artificial Sequence: Synthetic oligonucleotide
  Sense strand starting at position 1936 of SEQ ID NO: 1887398
cuagacauacuaugauguu

SEQ ID NO: 2469369 - RNA, 19 nt, Artificial Sequence
  Description of Artificial Sequence: Synthetic oligonucleotide
  Antisense strand to SEQ ID NO: 2469368
aacaucauaguaugucuag

SEQ ID NO: 2469370 - RNA, 19 nt, Artificial Sequence
  Description of Artificial Sequence: Synthetic oligonucleotide
  Sense strand starting at position 1975 of SEQ ID NO: 1887398
gaagucuagucuuuagaug

SEQ ID NO: 2469371 - RNA, 19 nt, Artificial Sequence
  Description of Artificial Sequence: Synthetic oligonucleotide
  Antisense strand to SEQ ID NO: 2469370
caucuaaagacuagacuuc

SEQ ID NO: 2469372 - RNA, 19 nt, Artificial Sequence
  Description of Artificial Sequence: Synthetic oligonucleotide
  Sense strand starting at position 1976 of SEQ ID NO: 1887398
aagucuagucuuuagaugu

SEQ ID NO: 2469373 - RNA, 19 nt, Artificial Sequence
  Description of Artificial Sequence: Synthetic oligonucleotide
  Antisense strand to SEQ ID NO: 2469372
acaucuaaagacuagacuu

SEQ ID NO: 2469374 - RNA, 19 nt, Artificial Sequence
  Description of Artificial Sequence: Synthetic oligonucleotide
  Sense strand starting at position 2046 of SEQ ID NO: 1887398
ggauacuucucacuuggca

SEQ ID NO: 2469375 - RNA, 19 nt, Artificial Sequence
  Description of Artificial Sequence: Synthetic oligonucleotide
  Antisense strand to SEQ ID NO: 2469374
ugccaagugagaaguaucc

SEQ ID NO: 2469376 - RNA, 19 nt, Artificial Sequence
  Description of Artificial Sequence: Synthetic oligonucleotide
  Sense strand starting at position 2254 of SEQ ID NO: 1887398
gaagauuggcccuggagug

SEQ ID NO: 2469377 - RNA, 19 nt, Artificial Sequence
  Description of Artificial Sequence: Synthetic oligonucleotide
  Antisense strand to SEQ ID NO: 2469376
cacuccagggccaaucuuc

SEQ ID NO: 2469378 - RNA, 19 nt, Artificial Sequence
  Description of Artificial Sequence: Synthetic oligonucleotide
  Sense strand starting at position 2271 of SEQ ID NO: 1887398
uggguuuaugguuaugaua

SEQ ID NO: 2469379 - RNA, 19 nt, Artificial Sequence
  Description of Artificial Sequence: Synthetic oligonucleotide
  Antisense strand to SEQ ID NO: 2469378
uaucauaaccauaaaccca

SEQ ID NO: 2469380 - RNA, 19 nt, Artificial Sequence
  Description of Artificial Sequence: Synthetic oligonucleotide
  Sense strand starting at position 2628 of SEQ ID NO: 1887398
ggguaacuucuacagugua

SEQ ID NO: 2469381 - RNA, 19 nt, Artificial Sequence
  Description of Artificial Sequence: Synthetic oligonucleotide
  Antisense strand to SEQ ID NO: 2469380
uacacuguagaaguuaccc

SEQ ID NO: 2469382 - RNA, 19 nt, Artificial Sequence
  Description of Artificial Sequence: Synthetic oligonucleotide
  Sense strand starting at position 2676 of SEQ ID NO: 1887398
gguaacuaagaaggguuua

SEQ ID NO: 2469383 - RNA, 19 nt, Artificial Sequence
  Description of Artificial Sequence: Synthetic oligonucleotide
  Antisense strand to SEQ ID NO: 2469382
uaaacccuucuuaguuacc

SEQ ID NO: 2469384 - RNA, 19 nt, Artificial Sequence
  Description of Artificial Sequence: Synthetic oligonucleotide
  Sense strand starting at position 2707 of SEQ ID NO: 1887398
ggguaacuucugcaaugua

SEQ ID NO: 2469385 - RNA, 19 nt, Artificial Sequence
  Description of Artificial Sequence: Synthetic oligonucleotide
  Antisense strand to SEQ ID NO: 2469384
uacauugcagaaguuaccc

SEQ ID NO: 2469386 - RNA, 19 nt, Artificial Sequence
  Description of Artificial Sequence: Synthetic oligonucleotide
  Sense strand starting at position 2827 of SEQ ID NO: 1887398
ugugguugaccaggaauga

SEQ ID NO: 2469387 - RNA, 19 nt, Artificial Sequence
  Description of Artificial Sequence: Synthetic oligonucleotide
  Antisense strand to SEQ ID NO: 2469386
ucauuccuggucaaccaca

SEQ ID NO: 2469388 - RNA, 19 nt, Artificial Sequence
  Description of Artificial Sequence: Synthetic oligonucleotide
  Sense strand starting at position 2877 of SEQ ID NO: 1887398
guaggaagcucaguggaaa

SEQ ID NO: 2469389 - RNA, 19 nt, Artificial Sequence
  Description of Artificial Sequence: Synthetic oligonucleotide
  Antisense strand to SEQ ID NO: 2469388
uuuccacugagcuuccuac

SEQ ID NO: 2469390 - RNA, 19 nt, Artificial Sequence
  Description of Artificial Sequence: Synthetic oligonucleotide
  Sense strand starting at position 2878 of SEQ ID NO: 1887398
uaggaagcucaguggaaau

SEQ ID NO: 2469391 - RNA, 19 nt, Artificial Sequence
  Description of Artificial Sequence: Synthetic oligonucleotide
  Antisense strand to SEQ ID NO: 2469390
auuuccacugagcuuccua

SEQ ID NO: 2469392 - RNA, 19 nt, Artificial Sequence
  Description of Artificial Sequence: Synthetic oligonucleotide
  Sense strand starting at position 3016 of SEQ ID NO: 1887398
auuggugcuucucuuauuu

SEQ ID NO: 2469393 - RNA, 19 nt, Artificial Sequence
  Description of Artificial Sequence: Synthetic oligonucleotide
  Antisense strand to SEQ ID NO: 2469392
aaauaagagaagcaccaau

SEQ ID NO: 2469394 - RNA, 19 nt, Artificial Sequence
  Description of Artificial Sequence: Synthetic oligonucleotide
  Sense strand starting at position 3687 of SEQ ID NO: 1887398
uuauguuuagaccaguaag

SEQ ID NO: 2469395 - RNA, 19 nt, Artificial Sequence
  Description of Artificial Sequence: Synthetic oligonucleotide
  Antisense strand to SEQ ID NO: 2469394
cuuacuggucuaaacauaa

SEQ ID NO: 2469396 - RNA, 19 nt, Artificial Sequence
  Description of Artificial Sequence: Synthetic oligonucleotide
  Sense strand starting at position 3690 of SEQ ID NO: 1887398
uguuuagaccaguaagguc

SEQ ID NO: 2469397 - RNA, 19 nt, Artificial Sequence
  Description of Artificial Sequence: Synthetic oligonucleotide
  Antisense strand to SEQ ID NO: 2469396
gaccuuacuggucuaaaca

SEQ ID NO: 2469398 - RNA, 19 nt, Artificial Sequence
  Description of Artificial Sequence: Synthetic oligonucleotide
  Sense strand starting at position 3697 of SEQ ID NO: 1887398
accaguaaggucuaaaggu

SEQ ID NO: 2469399 - RNA, 19 nt, Artificial Sequence
  Description of Artificial Sequence: Synthetic oligonucleotide
  Antisense strand to SEQ ID NO: 2469398
accuuuagaccuuacuggu

SEQ ID NO: 2469400 - RNA, 19 nt, Artificial Sequence
  Description of Artificial Sequence: Synthetic oligonucleotide
  Sense strand starting at position 3789 of SEQ ID NO: 1887398
agcugcaacccugaaguua

SEQ ID NO: 2469401 - RNA, 19 nt, Artificial Sequence
  Description of Artificial Sequence: Synthetic oligonucleotide
  Antisense strand to SEQ ID NO: 2469400
uaacuucaggguugcagcu

SEQ ID NO: 2469402 - RNA, 19 nt, Artificial Sequence
  Description of Artificial Sequence: Synthetic oligonucleotide
  Sense strand starting at position 3803 of SEQ ID NO: 1887398
aguuaagcauuuguugauu

SEQ ID NO: 2469403 - RNA, 19 nt, Artificial Sequence
  Description of Artificial Sequence: Synthetic oligonucleotide
  Antisense strand to SEQ ID NO: 2469402
aaucaacaaaugcuuaacu

SEQ ID NO: 2469404 - RNA, 19 nt, Artificial Sequence
  Description of Artificial Sequence: Synthetic oligonucleotide
  Sense strand starting at position 3832 of SEQ ID NO: 1887398
cagacuuugcauuggagau

SEQ ID NO: 2469405 - RNA, 19 nt, Artificial Sequence
  Description of Artificial Sequence: Synthetic oligonucleotide
  Antisense strand to SEQ ID NO: 2469404
aucuccaaugcaaagucug

SEQ ID NO: 2469406 - RNA, 19 nt, Artificial Sequence
  Description of Artificial Sequence: Synthetic oligonucleotide
  Sense strand starting at position 3833 of SEQ ID NO: 1887398
agacuuugcauuggagaug

SEQ ID NO: 2469407 - RNA, 19 nt, Artificial Sequence
  Description of Artificial Sequence: Synthetic oligonucleotide
  Antisense strand to SEQ ID NO: 2469406
caucuccaaugcaaagucu

SEQ ID NO: 2469408 - RNA, 19 nt, Artificial Sequence
  Description of Artificial Sequence: Synthetic oligonucleotide
  Sense strand starting at position 3836 of SEQ ID NO: 1887398
cuuugcauuggagauggua

SEQ ID NO: 2469409 - RNA, 19 nt, Artificial Sequence
  Description of Artificial Sequence: Synthetic oligonucleotide
  Antisense strand to SEQ ID NO: 2469408
uaccaucuccaaugcaaag

SEQ ID NO: 2469410 - RNA, 19 nt, Artificial Sequence
  Description of Artificial Sequence: Synthetic oligonucleotide
  Sense strand starting at position 3845 of SEQ ID NO: 1887398
ggagaugguaucugaaugu

SEQ ID NO: 2469411 - RNA, 19 nt, Artificial Sequence
  Description of Artificial Sequence: Synthetic oligonucleotide
  Antisense strand to SEQ ID NO: 2469410
acauucagauaccaucucc

SEQ ID NO: 2469412 - RNA, 19 nt, Artificial Sequence
  Description of Artificial Sequence: Synthetic oligonucleotide
  Sense strand starting at position 3861 of SEQ ID NO: 1887398
uguccuggagguugacaau

SEQ ID NO: 2469413 - RNA, 19 nt, Artificial Sequence
  Description of Artificial Sequence: Synthetic oligonucleotide
  Antisense strand to SEQ ID NO: 2469412
auugucaaccuccaggaca

SEQ ID NO: 2469414 - RNA, 19 nt, Artificial Sequence
  Description of Artificial Sequence: Synthetic oligonucleotide
  Sense strand starting at position 495 of SEQ ID NO: 1887399
gaauuaugguaaucacagu

SEQ ID NO: 2469415 - RNA, 19 nt, Artificial Sequence
  Description of Artificial Sequence: Synthetic oligonucleotide
  Antisense strand to SEQ ID NO: 2469414
acugugauuaccauaauuc

SEQ ID NO: 2469416 - RNA, 19 nt, Artificial Sequence
  Description of Artificial Sequence: Synthetic oligonucleotide
  Sense strand starting at position 503 of SEQ ID NO: 1887399
guaaucacaguuugauaau

SEQ ID NO: 2469417 - RNA, 19 nt, Artificial Sequence
  Description of Artificial Sequence: Synthetic oligonucleotide
  Antisense strand to SEQ ID NO: 2469416
auuaucaaacugugauuac

SEQ ID NO: 2469418 - RNA, 19 nt, Artificial Sequence
  Description of Artificial Sequence: Synthetic oligonucleotide
  Sense strand starting at position 609 of SEQ ID NO: 1887399
ggguaagcauaguuaauaa

SEQ ID NO: 2469419 - RNA, 19 nt, Artificial Sequence
  Description of Artificial Sequence: Synthetic oligonucleotide
  Antisense strand to SEQ ID NO: 2469418
uuauuaacuaugcuuaccc

SEQ ID NO: 2469420 - RNA, 19 nt, Artificial Sequence
  Description of Artificial Sequence: Synthetic oligonucleotide
  Sense strand starting at position 700 of SEQ ID NO: 1887399
ugaggugauguuuauccua

SEQ ID NO: 2469421 - RNA, 19 nt, Artificial Sequence
  Description of Artificial Sequence: Synthetic oligonucleotide
  Antisense strand to SEQ ID NO: 2469420
uaggauaaacaucaccuca

SEQ ID NO: 2469422 - RNA, 19 nt, Artificial Sequence
  Description of Artificial Sequence: Synthetic oligonucleotide
  Sense strand starting at position 702 of SEQ ID NO: 1887399
aggugauguuuauccuaau

SEQ ID NO: 2469423 - RNA, 19 nt, Artificial Sequence
  Description of Artificial Sequence: Synthetic oligonucleotide
  Antisense strand to SEQ ID NO: 2469422
auuaggauaaacaucaccu

SEQ ID NO: 2469424 - RNA, 19 nt, Artificial Sequence
  Description of Artificial Sequence: Synthetic oligonucleotide
  Sense strand starting at position 880 of SEQ ID NO: 1887399
ugaaguuuaccucaaguaa

SEQ ID NO: 2469425 - RNA, 19 nt, Artificial Sequence
  Description of Artificial Sequence: Synthetic oligonucleotide
  Antisense strand to SEQ ID NO: 2469424
uuacuugagguaaacuuca

SEQ ID NO: 2469426 - RNA, 19 nt, Artificial Sequence
  Description of Artificial Sequence: Synthetic oligonucleotide
  Sense strand starting at position 941 of SEQ ID NO: 1887399
agaguuacuuagcuuaaug

SEQ ID NO: 2469427 - RNA, 19 nt, Artificial Sequence
  Description of Artificial Sequence: Synthetic oligonucleotide
  Antisense strand to SEQ ID NO: 2469426
cauuaagcuaaguaacucu

SEQ ID NO: 2469428 - RNA, 19 nt, Artificial Sequence
  Description of Artificial Sequence: Synthetic oligonucleotide
  Sense strand starting at position 1022 of SEQ ID NO: 1887399
ccuaauugcucauugaaug

SEQ ID NO: 2469429 - RNA, 19 nt, Artificial Sequence
  Description of Artificial Sequence: Synthetic oligonucleotide
  Antisense strand to SEQ ID NO: 2469428
cauucaaugagcaauuagg

SEQ ID NO: 2469430 - RNA, 19 nt, Artificial Sequence
  Description of Artificial Sequence: Synthetic oligonucleotide
  Sense strand starting at position 1034 of SEQ ID NO: 1887399
uugaauggugacugauagu

SEQ ID NO: 2469431 - RNA, 19 nt, Artificial Sequence
  Description of Artificial Sequence: Synthetic oligonucleotide
  Antisense strand to SEQ ID NO: 2469430
acuaucagucaccauucaa

SEQ ID NO: 2469432 - RNA, 19 nt, Artificial Sequence
  Description of Artificial Sequence: Synthetic oligonucleotide
  Sense strand starting at position 1106 of SEQ ID NO: 1887399
auauaaaugugguccaaua

SEQ ID NO: 2469433 - RNA, 19 nt, Artificial Sequence
  Description of Artificial Sequence: Synthetic oligonucleotide
  Antisense strand to SEQ ID NO: 2469432
uauuggaccacauuuauau

SEQ ID NO: 2469434 - RNA, 19 nt, Artificial Sequence
  Description of Artificial Sequence: Synthetic oligonucleotide
  Sense strand starting at position 1169 of SEQ ID NO: 1887399
uauguuuagauguacggau

SEQ ID NO: 2469435 - RNA, 19 nt, Artificial Sequence
  Description of Artificial Sequence: Synthetic oligonucleotide
  Antisense strand to SEQ ID NO: 2469434
auccguacaucuaaacaua

SEQ ID NO: 2469436 - RNA, 19 nt, Artificial Sequence
  Description of Artificial Sequence: Synthetic oligonucleotide
  Sense strand starting at position 1173 of SEQ ID NO: 1887399
uuuagauguacggaugcua

SEQ ID NO: 2469437 - RNA, 19 nt, Artificial Sequence
  Description of Artificial Sequence: Synthetic oligonucleotide
  Antisense strand to SEQ ID NO: 2469436
uagcauccguacaucuaaa

SEQ ID NO: 2469438 - RNA, 19 nt, Artificial Sequence
  Description of Artificial Sequence: Synthetic oligonucleotide
  Sense strand starting at position 1238 of SEQ ID NO: 1887399
agaguuguagccuaggaga

SEQ ID NO: 2469439 - RNA, 19 nt, Artificial Sequence
  Description of Artificial Sequence: Synthetic oligonucleotide
  Antisense strand to SEQ ID NO: 2469438
ucuccuaggcuacaacucu

SEQ ID NO: 2469440 - RNA, 19 nt, Artificial Sequence
  Description of Artificial Sequence: Synthetic oligonucleotide
  Sense strand starting at position 1254 of SEQ ID NO: 1887399
agauacagucuaugucaua

SEQ ID NO: 2469441 - RNA, 19 nt, Artificial Sequence
  Description of Artificial Sequence: Synthetic oligonucleotide
  Antisense strand to SEQ ID NO: 2469440
uaugacauagacuguaucu

SEQ ID NO: 2469442 - RNA, 19 nt, Artificial Sequence
  Description of Artificial Sequence: Synthetic oligonucleotide
  Sense strand starting at position 1281 of SEQ ID NO: 1887399
guguguaguacguuacacu

SEQ ID NO: 2469443 - RNA, 19 nt, Artificial Sequence
  Description of Artificial Sequence: Synthetic oligonucleotide
  Antisense strand to SEQ ID NO: 2469442
aguguaacguacuacacac

SEQ ID NO: 2469444 - RNA, 19 nt, Artificial Sequence
  Description of Artificial Sequence: Synthetic oligonucleotide
  Sense strand starting at position 1328 of SEQ ID NO: 1887399
gggcuuagccagggaggau

SEQ ID NO: 2469445 - RNA, 19 nt, Artificial Sequence
  Description of Artificial Sequence: Synthetic oligonucleotide
  Antisense strand to SEQ ID NO: 2469444
auccucccuggcuaagccc

SEQ ID NO: 2469446 - RNA, 19 nt, Artificial Sequence
  Description of Artificial Sequence: Synthetic oligonucleotide
  Sense strand starting at position 1329 of SEQ ID NO: 1887399
ggcuuagccagggaggauu

SEQ ID NO: 2469447 - RNA, 19 nt, Artificial Sequence
  Description of Artificial Sequence: Synthetic oligonucleotide
  Antisense strand to SEQ ID NO: 2469446
aauccucccuggcuaagcc

SEQ ID NO: 2469448 - RNA, 19 nt, Artificial Sequence
  Description of Artificial Sequence: Synthetic oligonucleotide
  Sense strand starting at position 1391 of SEQ ID NO: 1887399
uuagcaaucguuuauugaa

SEQ ID NO: 2469449 - RNA, 19 nt, Artificial Sequence
  Description of Artificial Sequence: Synthetic oligonucleotide
  Antisense strand to SEQ ID NO: 2469448
uucaauaaacgauugcuaa

SEQ ID NO: 2469450 - RNA, 19 nt, Artificial Sequence
  Description of Artificial Sequence: Synthetic oligonucleotide
  Sense strand starting at position 1486 of SEQ ID NO: 1887399
cgguauuuauacucagcga

SEQ ID NO: 2469451 - RNA, 19 nt, Artificial Sequence
  Description of Artificial Sequence: Synthetic oligonucleotide
  Antisense strand to SEQ ID NO: 2469450
ucgcugaguauaaauaccg

SEQ ID NO: 2469452 - RNA, 19 nt, Artificial Sequence
  Description of Artificial Sequence: Synthetic oligonucleotide
  Sense strand starting at position 1573 of SEQ ID NO: 1887399
cuuucuaaggcaggucaaa

SEQ ID NO: 2469453 - RNA, 19 nt, Artificial Sequence
  Description of Artificial Sequence: Synthetic oligonucleotide
  Antisense strand to SEQ ID NO: 2469452
uuugaccugccuuagaaag

SEQ ID NO: 2469454 - RNA, 19 nt, Artificial Sequence
  Description of Artificial Sequence: Synthetic oligonucleotide
  Sense strand starting at position 1771 of SEQ ID NO: 1887399
auuaaauugcaaugaguag

SEQ ID NO: 2469455 - RNA, 19 nt, Artificial Sequence
  Description of Artificial Sequence: Synthetic oligonucleotide
  Antisense strand to SEQ ID NO: 2469454
cuacucauugcaauuuaau

SEQ ID NO: 2469456 - RNA, 19 nt, Artificial Sequence
  Description of Artificial Sequence: Synthetic oligonucleotide
  Sense strand starting at position 1778 of SEQ ID NO: 1887399
ugcaaugaguaguuagaga

SEQ ID NO: 2469457 - RNA, 19 nt, Artificial Sequence
  Description of Artificial Sequence: Synthetic oligonucleotide
  Antisense strand to SEQ ID NO: 2469456
ucucuaacuacucauugca

SEQ ID NO: 2469458 - RNA, 19 nt, Artificial Sequence
  Description of Artificial Sequence: Synthetic oligonucleotide
  Sense strand starting at position 1783 of SEQ ID NO: 1887399
ugaguaguuagagauugcu

SEQ ID NO: 2469459 - RNA, 19 nt, Artificial Sequence
  Description of Artificial Sequence: Synthetic oligonucleotide
  Antisense strand to SEQ ID NO: 2469458
agcaaucucuaacuacuca

SEQ ID NO: 2469460 - RNA, 19 nt, Artificial Sequence
  Description of Artificial Sequence: Synthetic oligonucleotide
  Sense strand starting at position 2192 of SEQ ID NO: 1887399
ggugaauagccaugagagu

SEQ ID NO: 2469461 - RNA, 19 nt, Artificial Sequence
  Description of Artificial Sequence: Synthetic oligonucleotide
  Antisense strand to SEQ ID NO: 2469460
acucucauggcuauucacc

SEQ ID NO: 2469462 - RNA, 19 nt, Artificial Sequence
  Description of Artificial Sequence: Synthetic oligonucleotide
  Sense strand starting at position 2193 of SEQ ID NO: 1887399
gugaauagccaugagagug

SEQ ID NO: 2469463 - RNA, 19 nt, Artificial Sequence
  Description of Artificial Sequence: Synthetic oligonucleotide
  Antisense strand to SEQ ID NO: 2469462
cacucucauggcuauucac

SEQ ID NO: 2469464 - RNA, 19 nt, Artificial Sequence
  Description of Artificial Sequence: Synthetic oligonucleotide
  Sense strand starting at position 2322 of SEQ ID NO: 1887399
uuggcuuuacuauacaagu

SEQ ID NO: 2469465 - RNA, 19 nt, Artificial Sequence
  Description of Artificial Sequence: Synthetic oligonucleotide
  Antisense strand to SEQ ID NO: 2469464
acuuguauaguaaagccaa

SEQ ID NO: 2469466 - RNA, 19 nt, Artificial Sequence
  Description of Artificial Sequence: Synthetic oligonucleotide
  Sense strand starting at position 2412 of SEQ ID NO: 1887399
agagcaauacugugcaaga

SEQ ID NO: 2469467 - RNA, 19 nt, Artificial Sequence
  Description of Artificial Sequence: Synthetic oligonucleotide
  Antisense strand to SEQ ID NO: 2469466
ucuugcacaguauugcucu

SEQ ID NO: 2469468 - RNA, 19 nt, Artificial Sequence
  Description of Artificial Sequence: Synthetic oligonucleotide
  Sense strand starting at position 2413 of SEQ ID NO: 1887399
gagcaauacugugcaagag

SEQ ID NO: 2469469 - RNA, 19 nt, Artificial Sequence
  Description of Artificial Sequence: Synthetic oligonucleotide
  Antisense strand to SEQ ID NO: 2469468
cucuugcacaguauugcuc

SEQ ID NO: 2469470 - RNA, 19 nt, Artificial Sequence
  Description of Artificial Sequence: Synthetic oligonucleotide
  Sense strand starting at position 2414 of SEQ ID NO: 1887399
agcaauacugugcaagaga

SEQ ID NO: 2469471 - RNA, 19 nt, Artificial Sequence
  Description of Artificial Sequence: Synthetic oligonucleotide
  Antisense strand to SEQ ID NO: 2469470
ucucuugcacaguauugcu

SEQ ID NO: 2469472 - RNA, 19 nt, Artificial Sequence
  Description of Artificial Sequence: Synthetic oligonucleotide
  Sense strand starting at position 2428 of SEQ ID NO: 1887399
agagaccauugugugauaa

SEQ ID NO: 2469473 - RNA, 19 nt, Artificial Sequence
  Description of Artificial Sequence: Synthetic oligonucleotide
  Antisense strand to SEQ ID NO: 2469472
uuaucacacaauggucucu

SEQ ID NO: 2469474 - RNA, 19 nt, Artificial Sequence
  Description of Artificial Sequence: Synthetic oligonucleotide
  Sense strand starting at position 2429 of SEQ ID NO: 1887399
gagaccauugugugauaac

SEQ ID NO: 2469475 - RNA, 19 nt, Artificial Sequence
  Description of Artificial Sequence: Synthetic oligonucleotide
  Antisense strand to SEQ ID NO: 2469474
guuaucacacaauggucuc

SEQ ID NO: 2469476 - RNA, 19 nt, Artificial Sequence
  Description of Artificial Sequence: Synthetic oligonucleotide
  Sense strand starting at position 2462 of SEQ ID NO: 1887399
ugcauaguccaauauagua

SEQ ID NO: 2469477 - RNA, 19 nt, Artificial Sequence
  Description of Artificial Sequence: Synthetic oligonucleotide
  Antisense strand to SEQ ID NO: 2469476
uacuauauuggacuaugca

SEQ ID NO: 2469478 - RNA, 19 nt, Artificial Sequence
  Description of Artificial Sequence: Synthetic oligonucleotide
  Sense strand starting at position 3171 of SEQ ID NO: 1887399
gggaaaguguuccuaaaca

SEQ ID NO: 2469479 - RNA, 19 nt, Artificial Sequence
  Description of Artificial Sequence: Synthetic oligonucleotide
  Antisense strand to SEQ ID NO: 2469478
uguuuaggaacacuuuccc

SEQ ID NO: 2469480 - RNA, 19 nt, Artificial Sequence
  Description of Artificial Sequence: Synthetic oligonucleotide
  Sense strand starting at position 3218 of SEQ ID NO: 1887399
uggugacagauaugaguau

SEQ ID NO: 2469481 - RNA, 19 nt, Artificial Sequence
  Description of Artificial Sequence: Synthetic oligonucleotide
  Antisense strand to SEQ ID NO: 2469480
auacucauaucugucacca

SEQ ID NO: 2469482 - RNA, 19 nt, Artificial Sequence
  Description of Artificial Sequence: Synthetic oligonucleotide
  Sense strand starting at position 3555 of SEQ ID NO: 1887399
auuagacauggauguguga

SEQ ID NO: 2469483 - RNA, 19 nt, Artificial Sequence
  Description of Artificial Sequence: Synthetic oligonucleotide
  Antisense strand to SEQ ID NO: 2469482
ucacacauccaugucuaau

SEQ ID NO: 2469484 - RNA, 19 nt, Artificial Sequence
  Description of Artificial Sequence: Synthetic oligonucleotide
  Sense strand starting at position 3557 of SEQ ID NO: 1887399
uagacauggaugugugaag

SEQ ID NO: 2469485 - RNA, 19 nt, Artificial Sequence
  Description of Artificial Sequence: Synthetic oligonucleotide
  Antisense strand to SEQ ID NO: 2469484
cuucacacauccaugucua

SEQ ID NO: 2469486 - RNA, 19 nt, Artificial Sequence
  Description of Artificial Sequence: Synthetic oligonucleotide
  Sense strand starting at position 3623 of SEQ ID NO: 1887399
gucucaagaaugugugaca

SEQ ID NO: 2469487 - RNA, 19 nt, Artificial Sequence
  Description of Artificial Sequence: Synthetic oligonucleotide
  Antisense strand to SEQ ID NO: 2469486
ugucacacauucuugagac

SEQ ID NO: 2469488 - RNA, 19 nt, Artificial Sequence
  Description of Artificial Sequence: Synthetic oligonucleotide
  Sense strand starting at position 3624 of SEQ ID NO: 1887399
ucucaagaaugugugacaa

SEQ ID NO: 2469489 - RNA, 19 nt, Artificial Sequence
  Description of Artificial Sequence: Synthetic oligonucleotide
  Antisense strand to SEQ ID NO: 2469488
uugucacacauucuugaga

SEQ ID NO: 2469490 - RNA, 19 nt, Artificial Sequence
  Description of Artificial Sequence: Synthetic oligonucleotide
  Sense strand starting at position 3749 of SEQ ID NO: 1887399
gauggcuuacuguacaauu

SEQ ID NO: 2469491 - RNA, 19 nt, Artificial Sequence
  Description of Artificial Sequence: Synthetic oligonucleotide
  Antisense strand to SEQ ID NO: 2469490
aauuguacaguaagccauc

SEQ ID NO: 2469492 - RNA, 19 nt, Artificial Sequence
  Description of Artificial Sequence: Synthetic oligonucleotide
  Sense strand starting at position 3926 of SEQ ID NO: 1887399
uguaucuacuggcuagaaa

SEQ ID NO: 2469493 - RNA, 19 nt, Artificial Sequence
  Description of Artificial Sequence: Synthetic oligonucleotide
  Antisense strand to SEQ ID NO: 2469492
uuucuagccaguagauaca

SEQ ID NO: 2469494 - RNA, 19 nt, Artificial Sequence
  Description of Artificial Sequence: Synthetic oligonucleotide
  Sense strand starting at position 59 of SEQ ID NO: 1887400
gaaaguaccucugacugga

SEQ ID NO: 2469495 - RNA, 19 nt, Artificial Sequence
  Description of Artificial Sequence: Synthetic oligonucleotide
  Antisense strand to SEQ ID NO: 2469494
uccagucagagguacuuuc

SEQ ID NO: 2469496 - RNA, 19 nt, Artificial Sequence
  Description of Artificial Sequence: Synthetic oligonucleotide
  Sense strand starting at position 110 of SEQ ID NO: 1887400
ccaagucuugcauaggagu

SEQ ID NO: 2469497 - RNA, 19 nt, Artificial Sequence
  Description of Artificial Sequence: Synthetic oligonucleotide
  Antisense strand to SEQ ID NO: 2469496
acuccuaugcaagacuugg

SEQ ID NO: 2469498 - RNA, 19 nt, Artificial Sequence
  Description of Artificial Sequence: Synthetic oligonucleotide
  Sense strand starting at position 116 of SEQ ID NO: 1887400
cuugcauaggaguauaacu

SEQ ID NO: 2469499 - RNA, 19 nt, Artificial Sequence
  Description of Artificial Sequence: Synthetic oligonucleotide
  Antisense strand to SEQ ID NO: 2469498
aguuauacuccuaugcaag

SEQ ID NO: 2469500 - RNA, 19 nt, Artificial Sequence
  Description of Artificial Sequence: Synthetic oligonucleotide
  Sense strand starting at position 315 of SEQ ID NO: 1887400
gcuagagagucuuuaaagc

SEQ ID NO: 2469501 - RNA, 19 nt, Artificial Sequence
  Description of Artificial Sequence: Synthetic oligonucleotide
  Antisense strand to SEQ ID NO: 2469500
gcuuuaaagacucucuagc

SEQ ID NO: 2469502 - RNA, 19 nt, Artificial Sequence
  Description of Artificial Sequence: Synthetic oligonucleotide
  Sense strand starting at position 321 of SEQ ID NO: 1887400
gagucuuuaaagcggagaa

SEQ ID NO: 2469503 - RNA, 19 nt, Artificial Sequence
  Description of Artificial Sequence: Synthetic oligonucleotide
  Antisense strand to SEQ ID NO: 2469502
uucuccgcuuuaaagacuc

SEQ ID NO: 2469504 - RNA, 19 nt, Artificial Sequence
  Description of Artificial Sequence: Synthetic oligonucleotide
  Sense strand starting at position 322 of SEQ ID NO: 1887400
agucuuuaaagcggagaaa

SEQ ID NO: 2469505 - RNA, 19 nt, Artificial Sequence
  Description of Artificial Sequence: Synthetic oligonucleotide
  Antisense strand to SEQ ID NO: 2469504
uuucuccgcuuuaaagacu

SEQ ID NO: 2469506 - RNA, 19 nt, Artificial Sequence
  Description of Artificial Sequence: Synthetic oligonucleotide
  Sense strand starting at position 536 of SEQ ID NO: 1887400
ugacguuuguguuccuaga

SEQ ID NO: 2469507 - RNA, 19 nt, Artificial Sequence
  Description of Artificial Sequence: Synthetic oligonucleotide
  Antisense strand to SEQ ID NO: 2469506
ucuaggaacacaaacguca

SEQ ID NO: 2469508 - RNA, 19 nt, Artificial Sequence
  Description of Artificial Sequence: Synthetic oligonucleotide
  Sense strand starting at position 538 of SEQ ID NO: 1887400
acguuuguguuccuagaau

SEQ ID NO: 2469509 - RNA, 19 nt, Artificial Sequence
  Description of Artificial Sequence: Synthetic oligonucleotide
  Antisense strand to SEQ ID NO: 2469508
auucuaggaacacaaacgu

SEQ ID NO: 2469510 - RNA, 19 nt, Artificial Sequence
  Description of Artificial Sequence: Synthetic oligonucleotide
  Sense strand starting at position 608 of SEQ ID NO: 1887400
ucuugaccuuuguuuacua

SEQ ID NO: 2469511 - RNA, 19 nt, Artificial Sequence
  Description of Artificial Sequence: Synthetic oligonucleotide
  Antisense strand to SEQ ID NO: 2469510
uaguaaacaaaggucaaga

SEQ ID NO: 2469512 - RNA, 19 nt, Artificial Sequence
  Description of Artificial Sequence: Synthetic oligonucleotide
  Sense strand starting at position 1024 of SEQ ID NO: 1887400
ggcagagcugccuacuaca

SEQ ID NO: 2469513 - RNA, 19 nt, Artificial Sequence
  Description of Artificial Sequence: Synthetic oligonucleotide
  Antisense strand to SEQ ID NO: 2469512
uguaguaggcagcucugcc

SEQ ID NO: 2469514 - RNA, 19 nt, Artificial Sequence
  Description of Artificial Sequence: Synthetic oligonucleotide
  Sense strand starting at position 1054 of SEQ ID NO: 1887400
ugauucauuugguguugga

SEQ ID NO: 2469515 - RNA, 19 nt, Artificial Sequence
  Description of Artificial Sequence: Synthetic oligonucleotide
  Antisense strand to SEQ ID NO: 2469514
uccaacaccaaaugaauca

SEQ ID NO: 2469516 - RNA, 19 nt, Artificial Sequence
  Description of Artificial Sequence: Synthetic oligonucleotide
  Sense strand starting at position 1256 of SEQ ID NO: 1887400
guaugaacugucugccuua

SEQ ID NO: 2469517 - RNA, 19 nt, Artificial Sequence
  Description of Artificial Sequence: Synthetic oligonucleotide
  Antisense strand to SEQ ID NO: 2469516
uaaggcagacaguucauac

SEQ ID NO: 2469518 - RNA, 19 nt, Artificial Sequence
  Description of Artificial Sequence: Synthetic oligonucleotide
  Sense strand starting at position 1259 of SEQ ID NO: 1887400
ugaacugucugccuuaaau

SEQ ID NO: 2469519 - RNA, 19 nt, Artificial Sequence
  Description of Artificial Sequence: Synthetic oligonucleotide
  Antisense strand to SEQ ID NO: 2469518
auuuaaggcagacaguuca

SEQ ID NO: 2469520 - RNA, 19 nt, Artificial Sequence
  Description of Artificial Sequence: Synthetic oligonucleotide
  Sense strand starting at position 1328 of SEQ ID NO: 1887400
cucaucagauaugaagaau

SEQ ID NO: 2469521 - RNA, 19 nt, Artificial Sequence
  Description of Artificial Sequence: Synthetic oligonucleotide
  Antisense strand to SEQ ID NO: 2469520
auucuucauaucugaugag

SEQ ID NO: 2469522 - RNA, 19 nt, Artificial Sequence
  Description of Artificial Sequence: Synthetic oligonucleotide
  Sense strand starting at position 1394 of SEQ ID NO: 1887400
gacacauggcuucgucaga

SEQ ID NO: 2469523 - RNA, 19 nt, Artificial Sequence
  Description of Artificial Sequence: Synthetic oligonucleotide
  Antisense strand to SEQ ID NO: 2469522
ucugacgaagccauguguc

SEQ ID NO: 2469524 - RNA, 19 nt, Artificial Sequence
  Description of Artificial Sequence: Synthetic oligonucleotide
  Sense strand starting at position 1395 of SEQ ID NO: 1887400
acacauggcuucgucagau

SEQ ID NO: 2469525 - RNA, 19 nt, Artificial Sequence
  Description of Artificial Sequence: Synthetic oligonucleotide
  Antisense strand to SEQ ID NO: 2469524
aucugacgaagccaugugu

SEQ ID NO: 2469526 - RNA, 19 nt, Artificial Sequence
  Description of Artificial Sequence: Synthetic oligonucleotide
  Sense strand starting at position 1401 of SEQ ID NO: 1887400
ggcuucgucagaugacaug

SEQ ID NO: 2469527 - RNA, 19 nt, Artificial Sequence
  Description of Artificial Sequence: Synthetic oligonucleotide
  Antisense strand to SEQ ID NO: 2469526
caugucaucugacgaagcc

SEQ ID NO: 2469528 - RNA, 19 nt, Artificial Sequence
  Description of Artificial Sequence: Synthetic oligonucleotide
  Sense strand starting at position 1674 of SEQ ID NO: 1887400
gaugcagugaauugugaua

SEQ ID NO: 2469529 - RNA, 19 nt, Artificial Sequence
  Description of Artificial Sequence: Synthetic oligonucleotide
  Antisense strand to SEQ ID NO: 2469528
uaucacaauucacugcauc

SEQ ID NO: 2469530 - RNA, 19 nt, Artificial Sequence
  Description of Artificial Sequence: Synthetic oligonucleotide
  Sense strand starting at position 1994 of SEQ ID NO: 1887400
guaugaccuugagcggaaa

SEQ ID NO: 2469531 - RNA, 19 nt, Artificial Sequence
  Description of Artificial Sequence: Synthetic oligonucleotide
  Antisense strand to SEQ ID NO: 2469530
uuuccgcucaaggucauac

SEQ ID NO: 2469532 - RNA, 19 nt, Artificial Sequence
  Description of Artificial Sequence: Synthetic oligonucleotide
  Sense strand starting at position 1997 of SEQ ID NO: 1887400
ugaccuugagcggaaacuu

SEQ ID NO: 2469533 - RNA, 19 nt, Artificial Sequence
  Description of Artificial Sequence: Synthetic oligonucleotide
  Antisense strand to SEQ ID NO: 2469532
aaguuuccgcucaagguca

SEQ ID NO: 2469534 - RNA, 19 nt, Artificial Sequence
  Description of Artificial Sequence: Synthetic oligonucleotide
  Sense strand starting at position 2008 of SEQ ID NO: 1887400
ggaaacuuaggguaugcuu

SEQ ID NO: 2469535 - RNA, 19 nt, Artificial Sequence
  Description of Artificial Sequence: Synthetic oligonucleotide
  Antisense strand to SEQ ID NO: 2469534
aagcauacccuaaguuucc

SEQ ID NO: 2469536 - RNA, 19 nt, Artificial Sequence
  Description of Artificial Sequence: Synthetic oligonucleotide
  Sense strand starting at position 2017 of SEQ ID NO: 1887400
ggguaugcuuaccuugagu

SEQ ID NO: 2469537 - RNA, 19 nt, Artificial Sequence
  Description of Artificial Sequence: Synthetic oligonucleotide
  Antisense strand to SEQ ID NO: 2469536
acucaagguaagcauaccc

SEQ ID NO: 2469538 - RNA, 19 nt, Artificial Sequence
  Description of Artificial Sequence: Synthetic oligonucleotide
  Sense strand starting at position 2019 of SEQ ID NO: 1887400
guaugcuuaccuugaguuu

SEQ ID NO: 2469539 - RNA, 19 nt, Artificial Sequence
  Description of Artificial Sequence: Synthetic oligonucleotide
  Antisense strand to SEQ ID NO: 2469538
aaacucaagguaagcauac

SEQ ID NO: 2469540 - RNA, 19 nt, Artificial Sequence
  Description of Artificial Sequence: Synthetic oligonucleotide
  Sense strand starting at position 2052 of SEQ ID NO: 1887400
augagacuaggcuacgauu

SEQ ID NO: 2469541 - RNA, 19 nt, Artificial Sequence
  Description of Artificial Sequence: Synthetic oligonucleotide
  Antisense strand to SEQ ID NO: 2469540
aaucguagccuagucucau

SEQ ID NO: 2469542 - RNA, 19 nt, Artificial Sequence
  Description of Artificial Sequence: Synthetic oligonucleotide
  Sense strand starting at position 2074 of SEQ ID NO: 1887400
auacuugcugcugauguaa

SEQ ID NO: 2469543 - RNA, 19 nt, Artificial Sequence
  Description of Artificial Sequence: Synthetic oligonucleotide
  Antisense strand to SEQ ID NO: 2469542
uuacaucagcagcaaguau

SEQ ID NO: 2469544 - RNA, 19 nt, Artificial Sequence
  Description of Artificial Sequence: Synthetic oligonucleotide
  Sense strand starting at position 2118 of SEQ ID NO: 1887400
gcaagcacugccugagaaa

SEQ ID NO: 2469545 - RNA, 19 nt, Artificial Sequence
  Description of Artificial Sequence: Synthetic oligonucleotide
  Antisense strand to SEQ ID NO: 2469544
uuucucaggcagugcuugc

SEQ ID NO: 2469546 - RNA, 19 nt, Artificial Sequence
  Description of Artificial Sequence: Synthetic oligonucleotide
  Sense strand starting at position 2614 of SEQ ID NO: 1887400
gacuaagucucagucuguu

SEQ ID NO: 2469547 - RNA, 19 nt, Artificial Sequence
  Description of Artificial Sequence: Synthetic oligonucleotide
  Antisense strand to SEQ ID NO: 2469546
aacagacugagacuuaguc

SEQ ID NO: 2469548 - RNA, 19 nt, Artificial Sequence
  Description of Artificial Sequence: Synthetic oligonucleotide
  Sense strand starting at position 2942 of SEQ ID NO: 1887400
aguucuacagguugggaau

SEQ ID NO: 2469549 - RNA, 19 nt, Artificial Sequence
  Description of Artificial Sequence: Synthetic oligonucleotide
  Antisense strand to SEQ ID NO: 2469548
auucccaaccuguagaacu

SEQ ID NO: 2469550 - RNA, 19 nt, Artificial Sequence
  Description of Artificial Sequence: Synthetic oligonucleotide
  Sense strand starting at position 3031 of SEQ ID NO: 1887400
agaauauuuguuugccuuu

SEQ ID NO: 2469551 - RNA, 19 nt, Artificial Sequence
  Description of Artificial Sequence: Synthetic oligonucleotide
  Antisense strand to SEQ ID NO: 2469550
aaaggcaaacaaauauucu

SEQ ID NO: 2469552 - RNA, 19 nt, Artificial Sequence
  Description of Artificial Sequence: Synthetic oligonucleotide
  Sense strand starting at position 3268 of SEQ ID NO: 1887400
gguccuuagccuuagucau

SEQ ID NO: 2469553 - RNA, 19 nt, Artificial Sequence
  Description of Artificial Sequence: Synthetic oligonucleotide
  Antisense strand to SEQ ID NO: 2469552
augacuaaggcuaaggacc

SEQ ID NO: 2469554 - RNA, 19 nt, Artificial Sequence
  Description of Artificial Sequence: Synthetic oligonucleotide
  Sense strand starting at position 3270 of SEQ ID NO: 1887400
uccuuagccuuagucauau

SEQ ID NO: 2469555 - RNA, 19 nt, Artificial Sequence
  Description of Artificial Sequence: Synthetic oligonucleotide
  Antisense strand to SEQ ID NO: 2469554
auaugacuaaggcuaagga

SEQ ID NO: 2469556 - RNA, 19 nt, Artificial Sequence
  Description of Artificial Sequence: Synthetic oligonucleotide
  Sense strand starting at position 3442 of SEQ ID NO: 1887400
ggcgcagaguugcucacau

SEQ ID NO: 2469557 - RNA, 19 nt, Artificial Sequence
  Description of Artificial Sequence: Synthetic oligonucleotide
  Antisense strand to SEQ ID NO: 2469556
augugagcaacucugcgcc

SEQ ID NO: 2469558 - RNA, 19 nt, Artificial Sequence
  Description of Artificial Sequence: Synthetic oligonucleotide
  Sense strand starting at position 3444 of SEQ ID NO: 1887400
cgcagaguugcucacauga

SEQ ID NO: 2469559 - RNA, 19 nt, Artificial Sequence
  Description of Artificial Sequence: Synthetic oligonucleotide
  Antisense strand to SEQ ID NO: 2469558
ucaugugagcaacucugcg

SEQ ID NO: 2469560 - RNA, 19 nt, Artificial Sequence
  Description of Artificial Sequence: Synthetic oligonucleotide
  Sense strand starting at position 3449 of SEQ ID NO: 1887400
aguugcucacaugaauaaa

SEQ ID NO: 2469561 - RNA, 19 nt, Artificial Sequence
  Description of Artificial Sequence: Synthetic oligonucleotide
  Antisense strand to SEQ ID NO: 2469560
uuuauucaugugagcaacu

SEQ ID NO: 2469562 - RNA, 19 nt, Artificial Sequence
  Description of Artificial Sequence: Synthetic oligonucleotide
  Sense strand starting at position 3540 of SEQ ID NO: 1887400
caggauggugcuuguggaa

SEQ ID NO: 2469563 - RNA, 19 nt, Artificial Sequence
  Description of Artificial Sequence: Synthetic oligonucleotide
  Antisense strand to SEQ ID NO: 2469562
uuccacaagcaccauccug

SEQ ID NO: 2469564 - RNA, 19 nt, Artificial Sequence
  Description of Artificial Sequence: Synthetic oligonucleotide
  Sense strand starting at position 3703 of SEQ ID NO: 1887400
uuugaauccucaucacgca

SEQ ID NO: 2469565 - RNA, 19 nt, Artificial Sequence
  Description of Artificial Sequence: Synthetic oligonucleotide
  Antisense strand to SEQ ID NO: 2469564
ugcgugaugaggauucaaa

SEQ ID NO: 2469566 - RNA, 19 nt, Artificial Sequence
  Description of Artificial Sequence: Synthetic oligonucleotide
  Sense strand starting at position 3824 of SEQ ID NO: 1887400
gcuguagucuugguccagu

SEQ ID NO: 2469567 - RNA, 19 nt, Artificial Sequence
  Description of Artificial Sequence: Synthetic oligonucleotide
  Antisense strand to SEQ ID NO: 2469566
acuggaccaagacuacagc

SEQ ID NO: 2469568 - RNA, 19 nt, Artificial Sequence
  Description of Artificial Sequence: Synthetic oligonucleotide
  Sense strand starting at position 3878 of SEQ ID NO: 1887400
aaugaauuggccuaccgaa

SEQ ID NO: 2469569 - RNA, 19 nt, Artificial Sequence
  Description of Artificial Sequence: Synthetic oligonucleotide
  Antisense strand to SEQ ID NO: 2469568
uucgguaggccaauucauu

SEQ ID NO: 2469570 - RNA, 19 nt, Artificial Sequence
  Description of Artificial Sequence: Synthetic oligonucleotide
  Sense strand starting at position 3919 of SEQ ID NO: 1887400
aagucaugagaacacguau

SEQ ID NO: 2469571 - RNA, 19 nt, Artificial Sequence
  Description of Artificial Sequence: Synthetic oligonucleotide
  Antisense strand to SEQ ID NO: 2469570
auacguguucucaugacuu

SEQ ID NO: 2469572 - RNA, 19 nt, Artificial Sequence
  Description of Artificial Sequence: Synthetic oligonucleotide
  Sense strand starting at position 3925 of SEQ ID NO: 1887400
ugagaacacguaugaauga

SEQ ID NO: 2469573 - RNA, 19 nt, Artificial Sequence
  Description of Artificial Sequence: Synthetic oligonucleotide
  Antisense strand to SEQ ID NO: 2469572
ucauucauacguguucuca

SEQ ID NO: 2469574 - RNA, 19 nt, Artificial Sequence
  Description of Artificial Sequence: Synthetic oligonucleotide
  Sense strand starting at position 105 of SEQ ID NO: 1887401
uugaguauuuaacauguga

SEQ ID NO: 2469575 - RNA, 19 nt, Artificial Sequence
  Description of Artificial Sequence: Synthetic oligonucleotide
  Antisense strand to SEQ ID NO: 2469574
ucacauguuaaauacucaa

SEQ ID NO: 2469576 - RNA, 19 nt, Artificial Sequence
  Description of Artificial Sequence: Synthetic oligonucleotide
  Sense strand starting at position 116 of SEQ ID NO: 1887401
acaugugagccacaaguuu

SEQ ID NO: 2469577 - RNA, 19 nt, Artificial Sequence
  Description of Artificial Sequence: Synthetic oligonucleotide
  Antisense strand to SEQ ID NO: 2469576
aaacuuguggcucacaugu

SEQ ID NO: 2469578 - RNA, 19 nt, Artificial Sequence
  Description of Artificial Sequence: Synthetic oligonucleotide
  Sense strand starting at position 157 of SEQ ID NO: 1887401
cacagaagacuaugucagu

SEQ ID NO: 2469579 - RNA, 19 nt, Artificial Sequence
  Description of Artificial Sequence: Synthetic oligonucleotide
  Antisense strand to SEQ ID NO: 2469578
acugacauagucuucugug

SEQ ID NO: 2469580 - RNA, 19 nt, Artificial Sequence
  Description of Artificial Sequence: Synthetic oligonucleotide
  Sense strand starting at position 158 of SEQ ID NO: 1887401
acagaagacuaugucagua

SEQ ID NO: 2469581 - RNA, 19 nt, Artificial Sequence
  Description of Artificial Sequence: Synthetic oligonucleotide
  Antisense strand to SEQ ID NO: 2469580
uacugacauagucuucugu

SEQ ID NO: 2469582 - RNA, 19 nt, Artificial Sequence
  Description of Artificial Sequence: Synthetic oligonucleotide
  Sense strand starting at position 180 of SEQ ID NO: 1887401
auagguauuugagaagaac

SEQ ID NO: 2469583 - RNA, 19 nt, Artificial Sequence
  Description of Artificial Sequence: Synthetic oligonucleotide
  Antisense strand to SEQ ID NO: 2469582
guucuucucaaauaccuau

SEQ ID NO: 2469584 - RNA, 19 nt, Artificial Sequence
  Description of Artificial Sequence: Synthetic oligonucleotide
  Sense strand starting at position 348 of SEQ ID NO: 1887401
ucauguaucaguuaauggu

SEQ ID NO: 2469585 - RNA, 19 nt, Artificial Sequence
  Description of Artificial Sequence: Synthetic oligonucleotide
  Antisense strand to SEQ ID NO: 2469584
accauuaacugauacauga

SEQ ID NO: 2469586 - RNA, 19 nt, Artificial Sequence
  Description of Artificial Sequence: Synthetic oligonucleotide
  Sense strand starting at position 352 of SEQ ID NO: 1887401
guaucaguuaauggugaaa

SEQ ID NO: 2469587 - RNA, 19 nt, Artificial Sequence
  Description of Artificial Sequence: Synthetic oligonucleotide
  Antisense strand to SEQ ID NO: 2469586
uuucaccauuaacugauac

SEQ ID NO: 2469588 - RNA, 19 nt, Artificial Sequence
  Description of Artificial Sequence: Synthetic oligonucleotide
  Sense strand starting at position 471 of SEQ ID NO: 1887401
cacuuuguagaagguguau

SEQ ID NO: 2469589 - RNA, 19 nt, Artificial Sequence
  Description of Artificial Sequence: Synthetic oligonucleotide
  Antisense strand to SEQ ID NO: 2469588
auacaccuucuacaaagug

SEQ ID NO: 2469590 - RNA, 19 nt, Artificial Sequence
  Description of Artificial Sequence: Synthetic oligonucleotide
  Sense strand starting at position 473 of SEQ ID NO: 1887401
cuuuguagaagguguauca

SEQ ID NO: 2469591 - RNA, 19 nt, Artificial Sequence
  Description of Artificial Sequence: Synthetic oligonucleotide
  Antisense strand to SEQ ID NO: 2469590
ugauacaccuucuacaaag

SEQ ID NO: 2469592 - RNA, 19 nt, Artificial Sequence
  Description of Artificial Sequence: Synthetic oligonucleotide
  Sense strand starting at position 497 of SEQ ID NO: 1887401
gugcuuauauaacugauac

SEQ ID NO: 2469593 - RNA, 19 nt, Artificial Sequence
  Description of Artificial Sequence: Synthetic oligonucleotide
  Antisense strand to SEQ ID NO: 2469592
guaucaguuauauaagcac

SEQ ID NO: 2469594 - RNA, 19 nt, Artificial Sequence
  Description of Artificial Sequence: Synthetic oligonucleotide
  Sense strand starting at position 726 of SEQ ID NO: 1887401
gcgauuagccgauaaauaa

SEQ ID NO: 2469595 - RNA, 19 nt, Artificial Sequence
  Description of Artificial Sequence: Synthetic oligonucleotide
  Antisense strand to SEQ ID NO: 2469594
uuauuuaucggcuaaucgc

SEQ ID NO: 2469596 - RNA, 19 nt, Artificial Sequence
  Description of Artificial Sequence: Synthetic oligonucleotide
  Sense strand starting at position 1133 of SEQ ID NO: 1887401
ggaagacacucuuucuuua

SEQ ID NO: 2469597 - RNA, 19 nt, Artificial Sequence
  Description of Artificial Sequence: Synthetic oligonucleotide
  Antisense strand to SEQ ID NO: 2469596
uaaagaaagagugucuucc

SEQ ID NO: 2469598 - RNA, 19 nt, Artificial Sequence
  Description of Artificial Sequence: Synthetic oligonucleotide
  Sense strand starting at position 1216 of SEQ ID NO: 1887401
ggagcuaauccuggaaauu

SEQ ID NO: 2469599 - RNA, 19 nt, Artificial Sequence
  Description of Artificial Sequence: Synthetic oligonucleotide
  Antisense strand to SEQ ID NO: 2469598
aauuuccaggauuagcucc

SEQ ID NO: 2469600 - RNA, 19 nt, Artificial Sequence
  Description of Artificial Sequence: Synthetic oligonucleotide
  Sense strand starting at position 1747 of SEQ ID NO: 1887401
cuugucacacauugguaau

SEQ ID NO: 2469601 - RNA, 19 nt, Artificial Sequence
  Description of Artificial Sequence: Synthetic oligonucleotide
  Antisense strand to SEQ ID NO: 2469600
auuaccaaugugugacaag

SEQ ID NO: 2469602 - RNA, 19 nt, Artificial Sequence
  Description of Artificial Sequence: Synthetic oligonucleotide
  Sense strand starting at position 1834 of SEQ ID NO: 1887401
gaauaaaugugauuaugcu

SEQ ID NO: 2469603 - RNA, 19 nt, Artificial Sequence
  Description of Artificial Sequence: Synthetic oligonucleotide
  Antisense strand to SEQ ID NO: 2469602
agcauaaucacauuuauuc

SEQ ID NO: 2469604 - RNA, 19 nt, Artificial Sequence
  Description of Artificial Sequence: Synthetic oligonucleotide
  Sense strand starting at position 1840 of SEQ ID NO: 1887401
augugauuaugcuccuuac

SEQ ID NO: 2469605 - RNA, 19 nt, Artificial Sequence
  Description of Artificial Sequence: Synthetic oligonucleotide
  Antisense strand to SEQ ID NO: 2469604
guaaggagcauaaucacau

SEQ ID NO: 2469606 - RNA, 19 nt, Artificial Sequence
  Description of Artificial Sequence: Synthetic oligonucleotide
  Sense strand starting at position 1877 of SEQ ID NO: 1887401
ucugcuagggcugaaauga

SEQ ID NO: 2469607 - RNA, 19 nt, Artificial Sequence
  Description of Artificial Sequence: Synthetic oligonucleotide
  Antisense strand to SEQ ID NO: 2469606
ucauuucagcccuagcaga

SEQ ID NO: 2469608 - RNA, 19 nt, Artificial Sequence
  Description of Artificial Sequence: Synthetic oligonucleotide
  Sense strand starting at position 1968 of SEQ ID NO: 1887401
gguaaaggugauggcaaau

SEQ ID NO: 2469609 - RNA, 19 nt, Artificial Sequence
  Description of Artificial Sequence: Synthetic oligonucleotide
  Antisense strand to SEQ ID NO: 2469608
auuugccaucaccuuuacc

SEQ ID NO: 2469610 - RNA, 19 nt, Artificial Sequence
  Description of Artificial Sequence: Synthetic oligonucleotide
  Sense strand starting at position 2453 of SEQ ID NO: 1887401
augaaacuuuaguuguuga

SEQ ID NO: 2469611 - RNA, 19 nt, Artificial Sequence
  Description of Artificial Sequence: Synthetic oligonucleotide
  Antisense strand to SEQ ID NO: 2469610
ucaacaacuaaaguuucau

SEQ ID NO: 2469612 - RNA, 19 nt, Artificial Sequence
  Description of Artificial Sequence: Synthetic oligonucleotide
  Sense strand starting at position 2553 of SEQ ID NO: 1887401
uuucgaaaugguuaauaca

SEQ ID NO: 2469613 - RNA, 19 nt, Artificial Sequence
  Description of Artificial Sequence: Synthetic oligonucleotide
  Antisense strand to SEQ ID NO: 2469612
uguauuaaccauuucgaaa

SEQ ID NO: 2469614 - RNA, 19 nt, Artificial Sequence
  Description of Artificial Sequence: Synthetic oligonucleotide
  Sense strand starting at position 2579 of SEQ ID NO: 1887401
ucacguuucugauccaaag

SEQ ID NO: 2469615 - RNA, 19 nt, Artificial Sequence
  Description of Artificial Sequence: Synthetic oligonucleotide
  Antisense strand to SEQ ID NO: 2469614
cuuuggaucagaaacguga

SEQ ID NO: 2469616 - RNA, 19 nt, Artificial Sequence
  Description of Artificial Sequence: Synthetic oligonucleotide
  Sense strand starting at position 2581 of SEQ ID NO: 1887401
acguuucugauccaaagag

SEQ ID NO: 2469617 - RNA, 19 nt, Artificial Sequence
  Description of Artificial Sequence: Synthetic oligonucleotide
  Antisense strand to SEQ ID NO: 2469616
cucuuuggaucagaaacgu

SEQ ID NO: 2469618 - RNA, 19 nt, Artificial Sequence
  Description of Artificial Sequence: Synthetic oligonucleotide
  Sense strand starting at position 2742 of SEQ ID NO: 1887401
gccuuugaaguccaucaaa

SEQ ID NO: 2469619 - RNA, 19 nt, Artificial Sequence
  Description of Artificial Sequence: Synthetic oligonucleotide
  Antisense strand to SEQ ID NO: 2469618
uuugauggacuucaaaggc

SEQ ID NO: 2469620 - RNA, 19 nt, Artificial Sequence
  Description of Artificial Sequence: Synthetic oligonucleotide
  Sense strand starting at position 2822 of SEQ ID NO: 1887401
ccagaugaaaggugcuauu

SEQ ID NO: 2469621 - RNA, 19 nt, Artificial Sequence
  Description of Artificial Sequence: Synthetic oligonucleotide
  Antisense strand to SEQ ID NO: 2469620
aauagcaccuuucaucugg

SEQ ID NO: 2469622 - RNA, 19 nt, Artificial Sequence
  Description of Artificial Sequence: Synthetic oligonucleotide
  Sense strand starting at position 2934 of SEQ ID NO: 1887401
ugaggucuauuccuuaauu

SEQ ID NO: 2469623 - RNA, 19 nt, Artificial Sequence
  Description of Artificial Sequence: Synthetic oligonucleotide
  Antisense strand to SEQ ID NO: 2469622
aauuaaggaauagaccuca

SEQ ID NO: 2469624 - RNA, 19 nt, Artificial Sequence
  Description of Artificial Sequence: Synthetic oligonucleotide
  Sense strand starting at position 2965 of SEQ ID NO: 1887401
gugggauguguguaacuuu

SEQ ID NO: 2469625 - RNA, 19 nt, Artificial Sequence
  Description of Artificial Sequence: Synthetic oligonucleotide
  Antisense strand to SEQ ID NO: 2469624
aaaguuacacacaucccac

SEQ ID NO: 2469626 - RNA, 19 nt, Artificial Sequence
  Description of Artificial Sequence: Synthetic oligonucleotide
  Sense strand starting at position 3040 of SEQ ID NO: 1887401
cccauucuaugucuguaaa

SEQ ID NO: 2469627 - RNA, 19 nt, Artificial Sequence
  Description of Artificial Sequence: Synthetic oligonucleotide
  Antisense strand to SEQ ID NO: 2469626
uuuacagacauagaauggg

SEQ ID NO: 2469628 - RNA, 19 nt, Artificial Sequence
  Description of Artificial Sequence: Synthetic oligonucleotide
  Sense strand starting at position 3041 of SEQ ID NO: 1887401
ccauucuaugucuguaaau

SEQ ID NO: 2469629 - RNA, 19 nt, Artificial Sequence
  Description of Artificial Sequence: Synthetic oligonucleotide
  Antisense strand to SEQ ID NO: 2469628
auuuacagacauagaaugg

SEQ ID NO: 2469630 - RNA, 19 nt, Artificial Sequence
  Description of Artificial Sequence: Synthetic oligonucleotide
  Sense strand starting at position 3043 of SEQ ID NO: 1887401
auucuaugucuguaaauga

SEQ ID NO: 2469631 - RNA, 19 nt, Artificial Sequence
  Description of Artificial Sequence: Synthetic oligonucleotide
  Antisense strand to SEQ ID NO: 2469630
ucauuuacagacauagaau

SEQ ID NO: 2469632 - RNA, 19 nt, Artificial Sequence
  Description of Artificial Sequence: Synthetic oligonucleotide
  Sense strand starting at position 3157 of SEQ ID NO: 1887401
aucugaaugaucuggguca

SEQ ID NO: 2469633 - RNA, 19 nt, Artificial Sequence
  Description of Artificial Sequence: Synthetic oligonucleotide
  Antisense strand to SEQ ID NO: 2469632
ugacccagaucauucagau

SEQ ID NO: 2469634 - RNA, 19 nt, Artificial Sequence
  Description of Artificial Sequence: Synthetic oligonucleotide
  Sense strand starting at position 3159 of SEQ ID NO: 1887401
cugaaugaucugggucaug

SEQ ID NO: 2469635 - RNA, 19 nt, Artificial Sequence
  Description of Artificial Sequence: Synthetic oligonucleotide
  Antisense strand to SEQ ID NO: 2469634
caugacccagaucauucag

SEQ ID NO: 2469636 - RNA, 19 nt, Artificial Sequence
  Description of Artificial Sequence: Synthetic oligonucleotide
  Sense strand starting at position 3170 of SEQ ID NO: 1887401
gggucaugccaguggaaug

SEQ ID NO: 2469637 - RNA, 19 nt, Artificial Sequence
  Description of Artificial Sequence: Synthetic oligonucleotide
  Antisense strand to SEQ ID NO: 2469636
cauuccacuggcaugaccc

SEQ ID NO: 2469638 - RNA, 19 nt, Artificial Sequence
  Description of Artificial Sequence: Synthetic oligonucleotide
  Sense strand starting at position 3171 of SEQ ID NO: 1887401
ggucaugccaguggaauga

SEQ ID NO: 2469639 - RNA, 19 nt, Artificial Sequence
  Description of Artificial Sequence: Synthetic oligonucleotide
  Antisense strand to SEQ ID NO: 2469638
ucauuccacuggcaugacc

SEQ ID NO: 2469640 - RNA, 19 nt, Artificial Sequence
  Description of Artificial Sequence: Synthetic oligonucleotide
  Sense strand starting at position 3197 of SEQ ID NO: 1887401
aguagauacuguuacauuu

SEQ ID NO: 2469641 - RNA, 19 nt, Artificial Sequence
  Description of Artificial Sequence: Synthetic oligonucleotide
  Antisense strand to SEQ ID NO: 2469640
aaauguaacaguaucuacu

SEQ ID NO: 2469642 - RNA, 19 nt, Artificial Sequence
  Description of Artificial Sequence: Synthetic oligonucleotide
  Sense strand starting at position 3318 of SEQ ID NO: 1887401
gucugugaaauauggaaag

SEQ ID NO: 2469643 - RNA, 19 nt, Artificial Sequence
  Description of Artificial Sequence: Synthetic oligonucleotide
  Antisense strand to SEQ ID NO: 2469642
cuuuccauauuucacagac

SEQ ID NO: 2469644 - RNA, 19 nt, Artificial Sequence
  Description of Artificial Sequence: Synthetic oligonucleotide
  Sense strand starting at position 3544 of SEQ ID NO: 1887401
aucugagguaaccguuauu

SEQ ID NO: 2469645 - RNA, 19 nt, Artificial Sequence
  Description of Artificial Sequence: Synthetic oligonucleotide
  Antisense strand to SEQ ID NO: 2469644
aauaacgguuaccucagau

SEQ ID NO: 2469646 - RNA, 19 nt, Artificial Sequence
  Description of Artificial Sequence: Synthetic oligonucleotide
  Sense strand starting at position 3547 of SEQ ID NO: 1887401
ugagguaaccguuauuguu

SEQ ID NO: 2469647 - RNA, 19 nt, Artificial Sequence
  Description of Artificial Sequence: Synthetic oligonucleotide
  Antisense strand to SEQ ID NO: 2469646
aacaauaacgguuaccuca

SEQ ID NO: 2469648 - RNA, 19 nt, Artificial Sequence
  Description of Artificial Sequence: Synthetic oligonucleotide
  Sense strand starting at position 3731 of SEQ ID NO: 1887401
caaauauuccauggcguaa

SEQ ID NO: 2469649 - RNA, 19 nt, Artificial Sequence
  Description of Artificial Sequence: Synthetic oligonucleotide
  Antisense strand to SEQ ID NO: 2469648
uuacgccauggaauauuug

SEQ ID NO: 2469650 - RNA, 19 nt, Artificial Sequence
  Description of Artificial Sequence: Synthetic oligonucleotide
  Sense strand starting at position 3752 of SEQ ID NO: 1887401
uuuaacauucuuggugauu

SEQ ID NO: 2469651 - RNA, 19 nt, Artificial Sequence
  Description of Artificial Sequence: Synthetic oligonucleotide
  Antisense strand to SEQ ID NO: 2469650
aaucaccaagaauguuaaa

SEQ ID NO: 2469652 - RNA, 19 nt, Artificial Sequence
  Description of Artificial Sequence: Synthetic oligonucleotide
  Sense strand starting at position 3753 of SEQ ID NO: 1887401
uuaacauucuuggugauuc

SEQ ID NO: 2469653 - RNA, 19 nt, Artificial Sequence
  Description of Artificial Sequence: Synthetic oligonucleotide
  Antisense strand to SEQ ID NO: 2469652
gaaucaccaagaauguuaa

SEQ ID NO: 2469654 - RNA, 19 nt, Artificial Sequence
  Description of Artificial Sequence: Synthetic oligonucleotide
  Sense strand starting at position 173 of SEQ ID NO: 1887402
acagaaauuugugaaguau

SEQ ID NO: 2469655 - RNA, 19 nt, Artificial Sequence
  Description of Artificial Sequence: Synthetic oligonucleotide
  Antisense strand to SEQ ID NO: 2469654
auacuucacaaauuucugu

SEQ ID NO: 2469656 - RNA, 19 nt, Artificial Sequence
  Description of Artificial Sequence: Synthetic oligonucleotide
  Sense strand starting at position 318 of SEQ ID NO: 1887402
cagcaauauggaugagcau

SEQ ID NO: 2469657 - RNA, 19 nt, Artificial Sequence
  Description of Artificial Sequence: Synthetic oligonucleotide
  Antisense strand to SEQ ID NO: 2469656
augcucauccauauugcug

SEQ ID NO: 2469658 - RNA, 19 nt, Artificial Sequence
  Description of Artificial Sequence: Synthetic oligonucleotide
  Sense strand starting at position 765 of SEQ ID NO: 1887402
cuagaaugaugguuauuaa

SEQ ID NO: 2469659 - RNA, 19 nt, Artificial Sequence
  Description of Artificial Sequence: Synthetic oligonucleotide
  Antisense strand to SEQ ID NO: 2469658
uuaauaaccaucauucuag

SEQ ID NO: 2469660 - RNA, 19 nt, Artificial Sequence
  Description of Artificial Sequence: Synthetic oligonucleotide
  Sense strand starting at position 884 of SEQ ID NO: 1887402
uagggugacuaacaauuua

SEQ ID NO: 2469661 - RNA, 19 nt, Artificial Sequence
  Description of Artificial Sequence: Synthetic oligonucleotide
  Antisense strand to SEQ ID NO: 2469660
uaaauuguuagucacccua

SEQ ID NO: 2469662 - RNA, 19 nt, Artificial Sequence
  Description of Artificial Sequence: Synthetic oligonucleotide
  Sense strand starting at position 1150 of SEQ ID NO: 1887402
gaguguucccaacaccaag

SEQ ID NO: 2469663 - RNA, 19 nt, Artificial Sequence
  Description of Artificial Sequence: Synthetic oligonucleotide
  Antisense strand to SEQ ID NO: 2469662
cuugguguugggaacacuc

SEQ ID NO: 2469664 - RNA, 19 nt, Artificial Sequence
  Description of Artificial Sequence: Synthetic oligonucleotide
  Sense strand starting at position 1191 of SEQ ID NO: 1887402
gggauaggcuaauuacucu

SEQ ID NO: 2469665 - RNA, 19 nt, Artificial Sequence
  Description of Artificial Sequence: Synthetic oligonucleotide
  Antisense strand to SEQ ID NO: 2469664
agaguaauuagccuauccc

SEQ ID NO: 2469666 - RNA, 19 nt, Artificial Sequence
  Description of Artificial Sequence: Synthetic oligonucleotide
  Sense strand starting at position 1353 of SEQ ID NO: 1887402
ucauauggccuagagauuc

SEQ ID NO: 2469667 - RNA, 19 nt, Artificial Sequence
  Description of Artificial Sequence: Synthetic oligonucleotide
  Antisense strand to SEQ ID NO: 2469666
gaaucucuaggccauauga

SEQ ID NO: 2469668 - RNA, 19 nt, Artificial Sequence
  Description of Artificial Sequence: Synthetic oligonucleotide
  Sense strand starting at position 1684 of SEQ ID NO: 1887402
aguugccucagagauggua

SEQ ID NO: 2469669 - RNA, 19 nt, Artificial Sequence
  Description of Artificial Sequence: Synthetic oligonucleotide
  Antisense strand to SEQ ID NO: 2469668
uaccaucucugaggcaacu

SEQ ID NO: 2469670 - RNA, 19 nt, Artificial Sequence
  Description of Artificial Sequence: Synthetic oligonucleotide
  Sense strand starting at position 1696 of SEQ ID NO: 1887402
gaugguauggagugggaua

SEQ ID NO: 2469671 - RNA, 19 nt, Artificial Sequence
  Description of Artificial Sequence: Synthetic oligonucleotide
  Antisense strand to SEQ ID NO: 2469670
uaucccacuccauaccauc

SEQ ID NO: 2469672 - RNA, 19 nt, Artificial Sequence
  Description of Artificial Sequence: Synthetic oligonucleotide
  Sense strand starting at position 1697 of SEQ ID NO: 1887402
augguauggagugggauau

SEQ ID NO: 2469673 - RNA, 19 nt, Artificial Sequence
  Description of Artificial Sequence: Synthetic oligonucleotide
  Antisense strand to SEQ ID NO: 2469672
auaucccacuccauaccau

SEQ ID NO: 2469674 - RNA, 19 nt, Artificial Sequence
  Description of Artificial Sequence: Synthetic oligonucleotide
  Sense strand starting at position 1698 of SEQ ID NO: 1887402
ugguauggagugggauaua

SEQ ID NO: 2469675 - RNA, 19 nt, Artificial Sequence
  Description of Artificial Sequence: Synthetic oligonucleotide
  Antisense strand to SEQ ID NO: 2469674
uauaucccacuccauacca

SEQ ID NO: 2469676 - RNA, 19 nt, Artificial Sequence
  Description of Artificial Sequence: Synthetic oligonucleotide
  Sense strand starting at position 1707 of SEQ ID NO: 1887402
gugggauauagugguaaag

SEQ ID NO: 2469677 - RNA, 19 nt, Artificial Sequence
  Description of Artificial Sequence: Synthetic oligonucleotide
  Antisense strand to SEQ ID NO: 2469676
cuuuaccacuauaucccac

SEQ ID NO: 2469678 - RNA, 19 nt, Artificial Sequence
  Description of Artificial Sequence: Synthetic oligonucleotide
  Sense strand starting at position 1734 of SEQ ID NO: 1887402
gggaaugcucuagggugau

SEQ ID NO: 2469679 - RNA, 19 nt, Artificial Sequence
  Description of Artificial Sequence: Synthetic oligonucleotide
  Antisense strand to SEQ ID NO: 2469678
aucacccuagagcauuccc

SEQ ID NO: 2469680 - RNA, 19 nt, Artificial Sequence
  Description of Artificial Sequence: Synthetic oligonucleotide
  Sense strand starting at position 1737 of SEQ ID NO: 1887402
aaugcucuagggugaugaa

SEQ ID NO: 2469681 - RNA, 19 nt, Artificial Sequence
  Description of Artificial Sequence: Synthetic oligonucleotide
  Antisense strand to SEQ ID NO: 2469680
uucaucacccuagagcauu

SEQ ID NO: 2469682 - RNA, 19 nt, Artificial Sequence
  Description of Artificial Sequence: Synthetic oligonucleotide
  Sense strand starting at position 1738 of SEQ ID NO: 1887402
augcucuagggugaugaau

SEQ ID NO: 2469683 - RNA, 19 nt, Artificial Sequence
  Description of Artificial Sequence: Synthetic oligonucleotide
  Antisense strand to SEQ ID NO: 2469682
auucaucacccuagagcau

SEQ ID NO: 2469684 - RNA, 19 nt, Artificial Sequence
  Description of Artificial Sequence: Synthetic oligonucleotide
  Sense strand starting at position 2056 of SEQ ID NO: 1887402
agggucucauguuuaauga

SEQ ID NO: 2469685 - RNA, 19 nt, Artificial Sequence
  Description of Artificial Sequence: Synthetic oligonucleotide
  Antisense strand to SEQ ID NO: 2469684
ucauuaaacaugagacccu

SEQ ID NO: 2469686 - RNA, 19 nt, Artificial Sequence
  Description of Artificial Sequence: Synthetic oligonucleotide
  Sense strand starting at position 2057 of SEQ ID NO: 1887402
gggucucauguuuaaugau

SEQ ID NO: 2469687 - RNA, 19 nt, Artificial Sequence
  Description of Artificial Sequence: Synthetic oligonucleotide
  Antisense strand to SEQ ID NO: 2469686
aucauuaaacaugagaccc

SEQ ID NO: 2469688 - RNA, 19 nt, Artificial Sequence
  Description of Artificial Sequence: Synthetic oligonucleotide
  Sense strand starting at position 2095 of SEQ ID NO: 1887402
gggugcauaaucuauagau

SEQ ID NO: 2469689 - RNA, 19 nt, Artificial Sequence
  Description of Artificial Sequence: Synthetic oligonucleotide
  Antisense strand to SEQ ID NO: 2469688
aucuauagauuaugcaccc

SEQ ID NO: 2469690 - RNA, 19 nt, Artificial Sequence
  Description of Artificial Sequence: Synthetic oligonucleotide
  Sense strand starting at position 2097 of SEQ ID NO: 1887402
gugcauaaucuauagauau

SEQ ID NO: 2469691 - RNA, 19 nt, Artificial Sequence
  Description of Artificial Sequence: Synthetic oligonucleotide
  Antisense strand to SEQ ID NO: 2469690
auaucuauagauuaugcac

SEQ ID NO: 2469692 - RNA, 19 nt, Artificial Sequence
  Description of Artificial Sequence: Synthetic oligonucleotide
  Sense strand starting at position 2109 of SEQ ID NO: 1887402
uagauaucucuaugguagg

SEQ ID NO: 2469693 - RNA, 19 nt, Artificial Sequence
  Description of Artificial Sequence: Synthetic oligonucleotide
  Antisense strand to SEQ ID NO: 2469692
ccuaccauagagauaucua

SEQ ID NO: 2469694 - RNA, 19 nt, Artificial Sequence
  Description of Artificial Sequence: Synthetic oligonucleotide
  Sense strand starting at position 2169 of SEQ ID NO: 1887402
ucuaauuaaccauguagua

SEQ ID NO: 2469695 - RNA, 19 nt, Artificial Sequence
  Description of Artificial Sequence: Synthetic oligonucleotide
  Antisense strand to SEQ ID NO: 2469694
uacuacaugguuaauuaga

SEQ ID NO: 2469696 - RNA, 19 nt, Artificial Sequence
  Description of Artificial Sequence: Synthetic oligonucleotide
  Sense strand starting at position 2390 of SEQ ID NO: 1887402
uuuagauggucccugaaag

SEQ ID NO: 2469697 - RNA, 19 nt, Artificial Sequence
  Description of Artificial Sequence: Synthetic oligonucleotide
  Antisense strand to SEQ ID NO: 2469696
cuuucagggaccaucuaaa

SEQ ID NO: 2469698 - RNA, 19 nt, Artificial Sequence
  Description of Artificial Sequence: Synthetic oligonucleotide
  Sense strand starting at position 2411 of SEQ ID NO: 1887402
gaugccucugucuguauuu

SEQ ID NO: 2469699 - RNA, 19 nt, Artificial Sequence
  Description of Artificial Sequence: Synthetic oligonucleotide
  Antisense strand to SEQ ID NO: 2469698
aaauacagacagaggcauc

SEQ ID NO: 2469700 - RNA, 19 nt, Artificial Sequence
  Description of Artificial Sequence: Synthetic oligonucleotide
  Sense strand starting at position 2470 of SEQ ID NO: 1887402
cacuguacccuggaagcau

SEQ ID NO: 2469701 - RNA, 19 nt, Artificial Sequence
  Description of Artificial Sequence: Synthetic oligonucleotide
  Antisense strand to SEQ ID NO: 2469700
augcuuccaggguacagug

SEQ ID NO: 2469702 - RNA, 19 nt, Artificial Sequence
  Description of Artificial Sequence: Synthetic oligonucleotide
  Sense strand starting at position 2487 of SEQ ID NO: 1887402
auaaauuagcuucggaaua

SEQ ID NO: 2469703 - RNA, 19 nt, Artificial Sequence
  Description of Artificial Sequence: Synthetic oligonucleotide
  Antisense strand to SEQ ID NO: 2469702
uauuccgaagcuaauuuau

SEQ ID NO: 2469704 - RNA, 19 nt, Artificial Sequence
  Description of Artificial Sequence: Synthetic oligonucleotide
  Sense strand starting at position 2505 of SEQ ID NO: 1887402
agggauagggcucaguuau

SEQ ID NO: 2469705 - RNA, 19 nt, Artificial Sequence
  Description of Artificial Sequence: Synthetic oligonucleotide
  Antisense strand to SEQ ID NO: 2469704
auaacugagcccuaucccu

SEQ ID NO: 2469706 - RNA, 19 nt, Artificial Sequence
  Description of Artificial Sequence: Synthetic oligonucleotide
  Sense strand starting at position 2567 of SEQ ID NO: 1887402
gaauucuuugaaugguaag

SEQ ID NO: 2469707 - RNA, 19 nt, Artificial Sequence
  Description of Artificial Sequence: Synthetic oligonucleotide
  Antisense strand to SEQ ID NO: 2469706
cuuaccauucaaagaauuc

SEQ ID NO: 2469708 - RNA, 19 nt, Artificial Sequence
  Description of Artificial Sequence: Synthetic oligonucleotide
  Sense strand starting at position 2710 of SEQ ID NO: 1887402
gguuguuacuuucuaauuu

SEQ ID NO: 2469709 - RNA, 19 nt, Artificial Sequence
  Description of Artificial Sequence: Synthetic oligonucleotide
  Antisense strand to SEQ ID NO: 2469708
aaauuagaaaguaacaacc

SEQ ID NO: 2469710 - RNA, 19 nt, Artificial Sequence
  Description of Artificial Sequence: Synthetic oligonucleotide
  Sense strand starting at position 2822 of SEQ ID NO: 1887402
guuagcugauaauuacaua

SEQ ID NO: 2469711 - RNA, 19 nt, Artificial Sequence
  Description of Artificial Sequence: Synthetic oligonucleotide
  Antisense strand to SEQ ID NO: 2469710
uauguaauuaucagcuaac

SEQ ID NO: 2469712 - RNA, 19 nt, Artificial Sequence
  Description of Artificial Sequence: Synthetic oligonucleotide
  Sense strand starting at position 2886 of SEQ ID NO: 1887402
uuaugaaagucccucaagu

SEQ ID NO: 2469713 - RNA, 19 nt, Artificial Sequence
  Description of Artificial Sequence: Synthetic oligonucleotide
  Antisense strand to SEQ ID NO: 2469712
acuugagggacuuucauaa

SEQ ID NO: 2469714 - RNA, 19 nt, Artificial Sequence
  Description of Artificial Sequence: Synthetic oligonucleotide
  Sense strand starting at position 3060 of SEQ ID NO: 1887402
gacagaagucaaggcugau

SEQ ID NO: 2469715 - RNA, 19 nt, Artificial Sequence
  Description of Artificial Sequence: Synthetic oligonucleotide
  Antisense strand to SEQ ID NO: 2469714
aucagccuugacuucuguc

SEQ ID NO: 2469716 - RNA, 19 nt, Artificial Sequence
  Description of Artificial Sequence: Synthetic oligonucleotide
  Sense strand starting at position 3073 of SEQ ID NO: 1887402
gcugauuucuguuucccuu

SEQ ID NO: 2469717 - RNA, 19 nt, Artificial Sequence
  Description of Artificial Sequence: Synthetic oligonucleotide
  Antisense strand to SEQ ID NO: 2469716
aagggaaacagaaaucagc

SEQ ID NO: 2469718 - RNA, 19 nt, Artificial Sequence
  Description of Artificial Sequence: Synthetic oligonucleotide
  Sense strand starting at position 3373 of SEQ ID NO: 1887402
ugacauucguauuuaguac

SEQ ID NO: 2469719 - RNA, 19 nt, Artificial Sequence
  Description of Artificial Sequence: Synthetic oligonucleotide
  Antisense strand to SEQ ID NO: 2469718
guacuaaauacgaauguca

SEQ ID NO: 2469720 - RNA, 19 nt, Artificial Sequence
  Description of Artificial Sequence: Synthetic oligonucleotide
  Sense strand starting at position 3432 of SEQ ID NO: 1887402
ucuauaaugcccugagaca

SEQ ID NO: 2469721 - RNA, 19 nt, Artificial Sequence
  Description of Artificial Sequence: Synthetic oligonucleotide
  Antisense strand to SEQ ID NO: 2469720
ugucucagggcauuauaga

SEQ ID NO: 2469722 - RNA, 19 nt, Artificial Sequence
  Description of Artificial Sequence: Synthetic oligonucleotide
  Sense strand starting at position 3469 of SEQ ID NO: 1887402
cggcuccugacagaucuua

SEQ ID NO: 2469723 - RNA, 19 nt, Artificial Sequence
  Description of Artificial Sequence: Synthetic oligonucleotide
  Antisense strand to SEQ ID NO: 2469722
uaagaucugucaggagccg

SEQ ID NO: 2469724 - RNA, 19 nt, Artificial Sequence
  Description of Artificial Sequence: Synthetic oligonucleotide
  Sense strand starting at position 3497 of SEQ ID NO: 1887402
guaaauuacuaucuguuga

SEQ ID NO: 2469725 - RNA, 19 nt, Artificial Sequence
  Description of Artificial Sequence: Synthetic oligonucleotide
  Antisense strand to SEQ ID NO: 2469724
ucaacagauaguaauuuac

SEQ ID NO: 2469726 - RNA, 19 nt, Artificial Sequence
  Description of Artificial Sequence: Synthetic oligonucleotide
  Sense strand starting at position 3590 of SEQ ID NO: 1887402
gucaaacagcuuuaauagu

SEQ ID NO: 2469727 - RNA, 19 nt, Artificial Sequence
  Description of Artificial Sequence: Synthetic oligonucleotide
  Antisense strand to SEQ ID NO: 2469726
acuauuaaagcuguuugac

SEQ ID NO: 2469728 - RNA, 19 nt, Artificial Sequence
  Description of Artificial Sequence: Synthetic oligonucleotide
  Sense strand starting at position 3655 of SEQ ID NO: 1887402
cugaaaguaguguaauacu

SEQ ID NO: 2469729 - RNA, 19 nt, Artificial Sequence
  Description of Artificial Sequence: Synthetic oligonucleotide
  Antisense strand to SEQ ID NO: 2469728
aguauuacacuacuuucag

SEQ ID NO: 2469730 - RNA, 19 nt, Artificial Sequence
  Description of Artificial Sequence: Synthetic oligonucleotide
  Sense strand starting at position 3707 of SEQ ID NO: 1887402
ugggcuuugguugaaagga

SEQ ID NO: 2469731 - RNA, 19 nt, Artificial Sequence
  Description of Artificial Sequence: Synthetic oligonucleotide
  Antisense strand to SEQ ID NO: 2469730
uccuuucaaccaaagccca

SEQ ID NO: 2469732 - RNA, 19 nt, Artificial Sequence
  Description of Artificial Sequence: Synthetic oligonucleotide
  Sense strand starting at position 3818 of SEQ ID NO: 1887402
gaaauuuaaugucaugaga

SEQ ID NO: 2469733 - RNA, 19 nt, Artificial Sequence
  Description of Artificial Sequence: Synthetic oligonucleotide
  Antisense strand to SEQ ID NO: 2469732
ucucaugacauuaaauuuc

SEQ ID NO: 2469734 - RNA, 19 nt, Artificial Sequence
  Description of Artificial Sequence: Synthetic oligonucleotide
  Sense strand starting at position 188 of SEQ ID NO: 1887403
auguaagugcauuagcuaa

SEQ ID NO: 2469735 - RNA, 19 nt, Artificial Sequence
  Description of Artificial Sequence: Synthetic oligonucleotide
  Antisense strand to SEQ ID NO: 2469734
uuagcuaaugcacuuacau

SEQ ID NO: 2469736 - RNA, 19 nt, Artificial Sequence
  Description of Artificial Sequence: Synthetic oligonucleotide
  Sense strand starting at position 261 of SEQ ID NO: 1887403
cuugaagugugaguauuac

SEQ ID NO: 2469737 - RNA, 19 nt, Artificial Sequence
  Description of Artificial Sequence: Synthetic oligonucleotide
  Antisense strand to SEQ ID NO: 2469736
guaauacucacacuucaag

SEQ ID NO: 2469738 - RNA, 19 nt, Artificial Sequence
  Description of Artificial Sequence: Synthetic oligonucleotide
  Sense strand starting at position 270 of SEQ ID NO: 1887403
ugaguauuacacuacuuuc

SEQ ID NO: 2469739 - RNA, 19 nt, Artificial Sequence
  Description of Artificial Sequence: Synthetic oligonucleotide
  Antisense strand to SEQ ID NO: 2469738
gaaaguaguguaauacuca

SEQ ID NO: 2469740 - RNA, 19 nt, Artificial Sequence
  Description of Artificial Sequence: Synthetic oligonucleotide
  Sense strand starting at position 308 of SEQ ID NO: 1887403
ggauaaauagucugcuucu

SEQ ID NO: 2469741 - RNA, 19 nt, Artificial Sequence
  Description of Artificial Sequence: Synthetic oligonucleotide
  Antisense strand to SEQ ID NO: 2469740
agaagcagacuauuuaucc

SEQ ID NO: 2469742 - RNA, 19 nt, Artificial Sequence
  Description of Artificial Sequence: Synthetic oligonucleotide
  Sense strand starting at position 309 of SEQ ID NO: 1887403
gauaaauagucugcuucug

SEQ ID NO: 2469743 - RNA, 19 nt, Artificial Sequence
  Description of Artificial Sequence: Synthetic oligonucleotide
  Antisense strand to SEQ ID NO: 2469742
cagaagcagacuauuuauc

SEQ ID NO: 2469744 - RNA, 19 nt, Artificial Sequence
  Description of Artificial Sequence: Synthetic oligonucleotide
  Sense strand starting at position 340 of SEQ ID NO: 1887403
auuaaagcuguuugacuga

SEQ ID NO: 2469745 - RNA, 19 nt, Artificial Sequence
  Description of Artificial Sequence: Synthetic oligonucleotide
  Antisense strand to SEQ ID NO: 2469744
ucagucaaacagcuuuaau

SEQ ID NO: 2469746 - RNA, 19 nt, Artificial Sequence
  Description of Artificial Sequence: Synthetic oligonucleotide
  Sense strand starting at position 343 of SEQ ID NO: 1887403
aaagcuguuugacugauca

SEQ ID NO: 2469747 - RNA, 19 nt, Artificial Sequence
  Description of Artificial Sequence: Synthetic oligonucleotide
  Antisense strand to SEQ ID NO: 2469746
ugaucagucaaacagcuuu

SEQ ID NO: 2469748 - RNA, 19 nt, Artificial Sequence
  Description of Artificial Sequence: Synthetic oligonucleotide
  Sense strand starting at position 347 of SEQ ID NO: 1887403
cuguuugacugaucauauc

SEQ ID NO: 2469749 - RNA, 19 nt, Artificial Sequence
  Description of Artificial Sequence: Synthetic oligonucleotide
  Antisense strand to SEQ ID NO: 2469748
gauaugaucagucaaacag

SEQ ID NO: 2469750 - RNA, 19 nt, Artificial Sequence
  Description of Artificial Sequence: Synthetic oligonucleotide
  Sense strand starting at position 355 of SEQ ID NO: 1887403
cugaucauaucuuuggguu

SEQ ID NO: 2469751 - RNA, 19 nt, Artificial Sequence
  Description of Artificial Sequence: Synthetic oligonucleotide
  Antisense strand to SEQ ID NO: 2469750
aacccaaagauaugaucag

SEQ ID NO: 2469752 - RNA, 19 nt, Artificial Sequence
  Description of Artificial Sequence: Synthetic oligonucleotide
  Sense strand starting at position 363 of SEQ ID NO: 1887403
aucuuuggguuccugaaau

SEQ ID NO: 2469753 - RNA, 19 nt, Artificial Sequence
  Description of Artificial Sequence: Synthetic oligonucleotide
  Antisense strand to SEQ ID NO: 2469752
auuucaggaacccaaagau

SEQ ID NO: 2469754 - RNA, 19 nt, Artificial Sequence
  Description of Artificial Sequence: Synthetic oligonucleotide
  Sense strand starting at position 393 of SEQ ID NO: 1887403
aggugugcguuaauggaau

SEQ ID NO: 2469755 - RNA, 19 nt, Artificial Sequence
  Description of Artificial Sequence: Synthetic oligonucleotide
  Antisense strand to SEQ ID NO: 2469754
auuccauuaacgcacaccu

SEQ ID NO: 2469756 - RNA, 19 nt, Artificial Sequence
  Description of Artificial Sequence: Synthetic oligonucleotide
  Sense strand starting at position 454 of SEQ ID NO: 1887403
uuuauaagaucugucagga

SEQ ID NO: 2469757 - RNA, 19 nt, Artificial Sequence
  Description of Artificial Sequence: Synthetic oligonucleotide
  Antisense strand to SEQ ID NO: 2469756
uccugacagaucuuauaaa

SEQ ID NO: 2469758 - RNA, 19 nt, Artificial Sequence
  Description of Artificial Sequence: Synthetic oligonucleotide
  Sense strand starting at position 493 of SEQ ID NO: 1887403
acugucucagggcauuaua

SEQ ID NO: 2469759 - RNA, 19 nt, Artificial Sequence
  Description of Artificial Sequence: Synthetic oligonucleotide
  Antisense strand to SEQ ID NO: 2469758
uauaaugcccugagacagu

SEQ ID NO: 2469760 - RNA, 19 nt, Artificial Sequence
  Description of Artificial Sequence: Synthetic oligonucleotide
  Sense strand starting at position 522 of SEQ ID NO: 1887403
ggcucccucccucagaaau

SEQ ID NO: 2469761 - RNA, 19 nt, Artificial Sequence
  Description of Artificial Sequence: Synthetic oligonucleotide
  Antisense strand to SEQ ID NO: 2469760
auuucugagggagggagcc

SEQ ID NO: 2469762 - RNA, 19 nt, Artificial Sequence
  Description of Artificial Sequence: Synthetic oligonucleotide
  Sense strand starting at position 543 of SEQ ID NO: 1887403
cucgccuuugaguacuaaa

SEQ ID NO: 2469763 - RNA, 19 nt, Artificial Sequence
  Description of Artificial Sequence: Synthetic oligonucleotide
  Antisense strand to SEQ ID NO: 2469762
uuuaguacucaaaggcgag

SEQ ID NO: 2469764 - RNA, 19 nt, Artificial Sequence
  Description of Artificial Sequence: Synthetic oligonucleotide
  Sense strand starting at position 556 of SEQ ID NO: 1887403
acuaaauacgaaugucagu

SEQ ID NO: 2469765 - RNA, 19 nt, Artificial Sequence
  Description of Artificial Sequence: Synthetic oligonucleotide
  Antisense strand to SEQ ID NO: 2469764
acugacauucguauuuagu

SEQ ID NO: 2469766 - RNA, 19 nt, Artificial Sequence
  Description of Artificial Sequence: Synthetic oligonucleotide
  Sense strand starting at position 740 of SEQ ID NO: 1887403
aggagaacuugggaacaga

SEQ ID NO: 2469767 - RNA, 19 nt, Artificial Sequence
  Description of Artificial Sequence: Synthetic oligonucleotide
  Antisense strand to SEQ ID NO: 2469766
ucuguucccaaguucuccu

SEQ ID NO: 2469768 - RNA, 19 nt, Artificial Sequence
  Description of Artificial Sequence: Synthetic oligonucleotide
  Sense strand starting at position 863 of SEQ ID NO: 1887403
agaaaucagccuugacuuc

SEQ ID NO: 2469769 - RNA, 19 nt, Artificial Sequence
  Description of Artificial Sequence: Synthetic oligonucleotide
  Antisense strand to SEQ ID NO: 2469768
gaagucaaggcugauuucu

SEQ ID NO: 2469770 - RNA, 19 nt, Artificial Sequence
  Description of Artificial Sequence: Synthetic oligonucleotide
  Sense strand starting at position 1032 of SEQ ID NO: 1887403
ugaaaugcuacuugaggga

SEQ ID NO: 2469771 - RNA, 19 nt, Artificial Sequence
  Description of Artificial Sequence: Synthetic oligonucleotide
  Antisense strand to SEQ ID NO: 2469770
ucccucaaguagcauuuca

SEQ ID NO: 2469772 - RNA, 19 nt, Artificial Sequence
  Description of Artificial Sequence: Synthetic oligonucleotide
  Sense strand starting at position 1100 of SEQ ID NO: 1887403
gguauuauguaauuaucag

SEQ ID NO: 2469773 - RNA, 19 nt, Artificial Sequence
  Description of Artificial Sequence: Synthetic oligonucleotide
  Antisense strand to SEQ ID NO: 2469772
cugauaauuacauaauacc

SEQ ID NO: 2469774 - RNA, 19 nt, Artificial Sequence
  Description of Artificial Sequence: Synthetic oligonucleotide
  Sense strand starting at position 1133 of SEQ ID NO: 1887403
gaugguuagaggugaauga

SEQ ID NO: 2469775 - RNA, 19 nt, Artificial Sequence
  Description of Artificial Sequence: Synthetic oligonucleotide
  Antisense strand to SEQ ID NO: 2469774
ucauucaccucuaaccauc

SEQ ID NO: 2469776 - RNA, 19 nt, Artificial Sequence
  Description of Artificial Sequence: Synthetic oligonucleotide
  Sense strand starting at position 1168 of SEQ ID NO: 1887403
ggaaguuguccugagccac

SEQ ID NO: 2469777 - RNA, 19 nt, Artificial Sequence
  Description of Artificial Sequence: Synthetic oligonucleotide
  Antisense strand to SEQ ID NO: 2469776
guggcucaggacaacuucc

SEQ ID NO: 2469778 - RNA, 19 nt, Artificial Sequence
  Description of Artificial Sequence: Synthetic oligonucleotide
  Sense strand starting at position 1312 of SEQ ID NO: 1887403
ugaggucaaagccgauauu

SEQ ID NO: 2469779 - RNA, 19 nt, Artificial Sequence
  Description of Artificial Sequence: Synthetic oligonucleotide
  Antisense strand to SEQ ID NO: 2469778
aauaucggcuuugaccuca

SEQ ID NO: 2469780 - RNA, 19 nt, Artificial Sequence
  Description of Artificial Sequence: Synthetic oligonucleotide
  Sense strand starting at position 1315 of SEQ ID NO: 1887403
ggucaaagccgauauugca

SEQ ID NO: 2469781 - RNA, 19 nt, Artificial Sequence
  Description of Artificial Sequence: Synthetic oligonucleotide
  Antisense strand to SEQ ID NO: 2469780
ugcaauaucggcuuugacc

SEQ ID NO: 2469782 - RNA, 19 nt, Artificial Sequence
  Description of Artificial Sequence: Synthetic oligonucleotide
  Sense strand starting at position 1418 of SEQ ID NO: 1887403
ggagauaacugagcccuau

SEQ ID NO: 2469783 - RNA, 19 nt, Artificial Sequence
  Description of Artificial Sequence: Synthetic oligonucleotide
  Antisense strand to SEQ ID NO: 2469782
auagggcucaguuaucucc

SEQ ID NO: 2469784 - RNA, 19 nt, Artificial Sequence
  Description of Artificial Sequence: Synthetic oligonucleotide
  Sense strand starting at position 1683 of SEQ ID NO: 1887403
uguauuauaugggcauaua

SEQ ID NO: 2469785 - RNA, 19 nt, Artificial Sequence
  Description of Artificial Sequence: Synthetic oligonucleotide
  Antisense strand to SEQ ID NO: 2469784
uauaugcccauauaauaca

SEQ ID NO: 2469786 - RNA, 19 nt, Artificial Sequence
  Description of Artificial Sequence: Synthetic oligonucleotide
  Sense strand starting at position 1684 of SEQ ID NO: 1887403
guauuauaugggcauauau

SEQ ID NO: 2469787 - RNA, 19 nt, Artificial Sequence
  Description of Artificial Sequence: Synthetic oligonucleotide
  Antisense strand to SEQ ID NO: 2469786
auauaugcccauauaauac

SEQ ID NO: 2469788 - RNA, 19 nt, Artificial Sequence
  Description of Artificial Sequence: Synthetic oligonucleotide
  Sense strand starting at position 1760 of SEQ ID NO: 1887403
cuacaugguuaauuagaga

SEQ ID NO: 2469789 - RNA, 19 nt, Artificial Sequence
  Description of Artificial Sequence: Synthetic oligonucleotide
  Antisense strand to SEQ ID NO: 2469788
ucucuaauuaaccauguag

SEQ ID NO: 2469790 - RNA, 19 nt, Artificial Sequence
  Description of Artificial Sequence: Synthetic oligonucleotide
  Sense strand starting at position 1916 of SEQ ID NO: 1887403
ggaauagaucuaugacgug

SEQ ID NO: 2469791 - RNA, 19 nt, Artificial Sequence
  Description of Artificial Sequence: Synthetic oligonucleotide
  Antisense strand to SEQ ID NO: 2469790
cacgucauagaucuauucc

SEQ ID NO: 2469792 - RNA, 19 nt, Artificial Sequence
  Description of Artificial Sequence: Synthetic oligonucleotide
  Sense strand starting at position 1998 of SEQ ID NO: 1887403
uuugguuagcucuacauug

SEQ ID NO: 2469793 - RNA, 19 nt, Artificial Sequence
  Description of Artificial Sequence: Synthetic oligonucleotide
  Antisense strand to SEQ ID NO: 2469792
caauguagagcuaaccaaa

SEQ ID NO: 2469794 - RNA, 19 nt, Artificial Sequence
  Description of Artificial Sequence: Synthetic oligonucleotide
  Sense strand starting at position 2000 of SEQ ID NO: 1887403
ugguuagcucuacauugua

SEQ ID NO: 2469795 - RNA, 19 nt, Artificial Sequence
  Description of Artificial Sequence: Synthetic oligonucleotide
  Antisense strand to SEQ ID NO: 2469794
uacaauguagagcuaacca

SEQ ID NO: 2469796 - RNA, 19 nt, Artificial Sequence
  Description of Artificial Sequence: Synthetic oligonucleotide
  Sense strand starting at position 2007 of SEQ ID NO: 1887403
cucuacauuguagaucuau

SEQ ID NO: 2469797 - RNA, 19 nt, Artificial Sequence
  Description of Artificial Sequence: Synthetic oligonucleotide
  Antisense strand to SEQ ID NO: 2469796
auagaucuacaauguagag

SEQ ID NO: 2469798 - RNA, 19 nt, Artificial Sequence
  Description of Artificial Sequence: Synthetic oligonucleotide
  Sense strand starting at position 2025 of SEQ ID NO: 1887403
uuccauagauccuucuguu

SEQ ID NO: 2469799 - RNA, 19 nt, Artificial Sequence
  Description of Artificial Sequence: Synthetic oligonucleotide
  Antisense strand to SEQ ID NO: 2469798
aacagaaggaucuauggaa

SEQ ID NO: 2469800 - RNA, 19 nt, Artificial Sequence
  Description of Artificial Sequence: Synthetic oligonucleotide
  Sense strand starting at position 2304 of SEQ ID NO: 1887403
guauguucuguguucucuu

SEQ ID NO: 2469801 - RNA, 19 nt, Artificial Sequence
  Description of Artificial Sequence: Synthetic oligonucleotide
  Antisense strand to SEQ ID NO: 2469800
aagagaacacagaacauac

SEQ ID NO: 2469802 - RNA, 19 nt, Artificial Sequence
  Description of Artificial Sequence: Synthetic oligonucleotide
  Sense strand starting at position 2572 of SEQ ID NO: 1887403
aggaaucucuaggccauau

SEQ ID NO: 2469803 - RNA, 19 nt, Artificial Sequence
  Description of Artificial Sequence: Synthetic oligonucleotide
  Antisense strand to SEQ ID NO: 2469802
auauggccuagagauuccu

SEQ ID NO: 2469804 - RNA, 19 nt, Artificial Sequence
  Description of Artificial Sequence: Synthetic oligonucleotide
  Sense strand starting at position 2576 of SEQ ID NO: 1887403
aucucuaggccauaugaua

SEQ ID NO: 2469805 - RNA, 19 nt, Artificial Sequence
  Description of Artificial Sequence: Synthetic oligonucleotide
  Antisense strand to SEQ ID NO: 2469804
uaucauauggccuagagau

SEQ ID NO: 2469806 - RNA, 19 nt, Artificial Sequence
  Description of Artificial Sequence: Synthetic oligonucleotide
  Sense strand starting at position 2623 of SEQ ID NO: 1887403
ccaaauuauuguccaaagu

SEQ ID NO: 2469807 - RNA, 19 nt, Artificial Sequence
  Description of Artificial Sequence: Synthetic oligonucleotide
  Antisense strand to SEQ ID NO: 2469806
acuuuggacaauaauuugg

SEQ ID NO: 2469808 - RNA, 19 nt, Artificial Sequence
  Description of Artificial Sequence: Synthetic oligonucleotide
  Sense strand starting at position 2673 of SEQ ID NO: 1887403
guuauauauguuuauggug

SEQ ID NO: 2469809 - RNA, 19 nt, Artificial Sequence
  Description of Artificial Sequence: Synthetic oligonucleotide
  Antisense strand to SEQ ID NO: 2469808
caccauaaacauauauaac

SEQ ID NO: 2469810 - RNA, 19 nt, Artificial Sequence
  Description of Artificial Sequence: Synthetic oligonucleotide
  Sense strand starting at position 2779 of SEQ ID NO: 1887403
ugguguugggaacacucaa

SEQ ID NO: 2469811 - RNA, 19 nt, Artificial Sequence
  Description of Artificial Sequence: Synthetic oligonucleotide
  Antisense strand to SEQ ID NO: 2469810
uugaguguucccaacacca

SEQ ID NO: 2469812 - RNA, 19 nt, Artificial Sequence
  Description of Artificial Sequence: Synthetic oligonucleotide
  Sense strand starting at position 3825 of SEQ ID NO: 1887403
uugagauggugucuuacac

SEQ ID NO: 2469813 - RNA, 19 nt, Artificial Sequence
  Description of Artificial Sequence: Synthetic oligonucleotide
  Antisense strand to SEQ ID NO: 2469812
guguaagacaccaucucaa

SEQ ID NO: 2469814 - RNA, 19 nt, Artificial Sequence
  Description of Artificial Sequence: Synthetic oligonucleotide
  Sense strand starting at position 69 of SEQ ID NO: 1887404
cuaccugucucacuuagga

SEQ ID NO: 2469815 - RNA, 19 nt, Artificial Sequence
  Description of Artificial Sequence: Synthetic oligonucleotide
  Antisense strand to SEQ ID NO: 2469814
uccuaagugagacagguag

SEQ ID NO: 2469816 - RNA, 19 nt, Artificial Sequence
  Description of Artificial Sequence: Synthetic oligonucleotide
  Sense strand starting at position 822 of SEQ ID NO: 1887404
gcaaguccgaaugaaugau

SEQ ID NO: 2469817 - RNA, 19 nt, Artificial Sequence
  Description of Artificial Sequence: Synthetic oligonucleotide
  Antisense strand to SEQ ID NO: 2469816
aucauucauucggacuugc

SEQ ID NO: 2469818 - RNA, 19 nt, Artificial Sequence
  Description of Artificial Sequence: Synthetic oligonucleotide
  Sense strand starting at position 947 of SEQ ID NO: 1887404
ggauaaauauuugacguga

SEQ ID NO: 2469819 - RNA, 19 nt, Artificial Sequence
  Description of Artificial Sequence: Synthetic oligonucleotide
  Antisense strand to SEQ ID NO: 2469818
ucacgucaaauauuuaucc

SEQ ID NO: 2469820 - RNA, 19 nt, Artificial Sequence
  Description of Artificial Sequence: Synthetic oligonucleotide
  Sense strand starting at position 958 of SEQ ID NO: 1887404
ugacgugauggauauucca

SEQ ID NO: 2469821 - RNA, 19 nt, Artificial Sequence
  Description of Artificial Sequence: Synthetic oligonucleotide
  Antisense strand to SEQ ID NO: 2469820
uggaauauccaucacguca

SEQ ID NO: 2469822 - RNA, 19 nt, Artificial Sequence
  Description of Artificial Sequence: Synthetic oligonucleotide
  Sense strand starting at position 1262 of SEQ ID NO: 1887404
gcucuuauuucugcaugua

SEQ ID NO: 2469823 - RNA, 19 nt, Artificial Sequence
  Description of Artificial Sequence: Synthetic oligonucleotide
  Antisense strand to SEQ ID NO: 2469822
uacaugcagaaauaagagc

SEQ ID NO: 2469824 - RNA, 19 nt, Artificial Sequence
  Description of Artificial Sequence: Synthetic oligonucleotide
  Sense strand starting at position 1348 of SEQ ID NO: 1887404
ccagcuuugcaagacuauu

SEQ ID NO: 2469825 - RNA, 19 nt, Artificial Sequence
  Description of Artificial Sequence: Synthetic oligonucleotide
  Antisense strand to SEQ ID NO: 2469824
aauagucuugcaaagcugg

SEQ ID NO: 2469826 - RNA, 19 nt, Artificial Sequence
  Description of Artificial Sequence: Synthetic oligonucleotide
  Sense strand starting at position 1408 of SEQ ID NO: 1887404
uuuccuugggucuaauaaa

SEQ ID NO: 2469827 - RNA, 19 nt, Artificial Sequence
  Description of Artificial Sequence: Synthetic oligonucleotide
  Antisense strand to SEQ ID NO: 2469826
uuuauuagacccaaggaaa

SEQ ID NO: 2469828 - RNA, 19 nt, Artificial Sequence
  Description of Artificial Sequence: Synthetic oligonucleotide
  Sense strand starting at position 1448 of SEQ ID NO: 1887404
uuuacagugcuggauuauu

SEQ ID NO: 2469829 - RNA, 19 nt, Artificial Sequence
  Description of Artificial Sequence: Synthetic oligonucleotide
  Antisense strand to SEQ ID NO: 2469828
aauaauccagcacuguaaa

SEQ ID NO: 2469830 - RNA, 19 nt, Artificial Sequence
  Description of Artificial Sequence: Synthetic oligonucleotide
  Sense strand starting at position 1480 of SEQ ID NO: 1887404
ucaucuggacagugauaau

SEQ ID NO: 2469831 - RNA, 19 nt, Artificial Sequence
  Description of Artificial Sequence: Synthetic oligonucleotide
  Antisense strand to SEQ ID NO: 2469830
auuaucacuguccagauga

SEQ ID NO: 2469832 - RNA, 19 nt, Artificial Sequence
  Description of Artificial Sequence: Synthetic oligonucleotide
  Sense strand starting at position 1549 of SEQ ID NO: 1887404
gcuugucucauggcugcaa

SEQ ID NO: 2469833 - RNA, 19 nt, Artificial Sequence
  Description of Artificial Sequence: Synthetic oligonucleotide
  Antisense strand to SEQ ID NO: 2469832
uugcagccaugagacaagc

SEQ ID NO: 2469834 - RNA, 19 nt, Artificial Sequence
  Description of Artificial Sequence: Synthetic oligonucleotide
  Sense strand starting at position 1689 of SEQ ID NO: 1887404
aaucacugguagucacaga

SEQ ID NO: 2469835 - RNA, 19 nt, Artificial Sequence
  Description of Artificial Sequence: Synthetic oligonucleotide
  Antisense strand to SEQ ID NO: 2469834
ucugugacuaccagugauu

SEQ ID NO: 2469836 - RNA, 19 nt, Artificial Sequence
  Description of Artificial Sequence: Synthetic oligonucleotide
  Sense strand starting at position 1905 of SEQ ID NO: 1887404
ggucaugaagugcauacau

SEQ ID NO: 2469837 - RNA, 19 nt, Artificial Sequence
  Description of Artificial Sequence: Synthetic oligonucleotide
  Antisense strand to SEQ ID NO: 2469836
auguaugcacuucaugacc

SEQ ID NO: 2469838 - RNA, 19 nt, Artificial Sequence
  Description of Artificial Sequence: Synthetic oligonucleotide
  Sense strand starting at position 1991 of SEQ ID NO: 1887404
agggauucacuguaggcau

SEQ ID NO: 2469839 - RNA, 19 nt, Artificial Sequence
  Description of Artificial Sequence: Synthetic oligonucleotide
  Antisense strand to SEQ ID NO: 2469838
augccuacagugaaucccu

SEQ ID NO: 2469840 - RNA, 19 nt, Artificial Sequence
  Description of Artificial Sequence: Synthetic oligonucleotide
  Sense strand starting at position 2078 of SEQ ID NO: 1887404
gcaagugguacccauggau

SEQ ID NO: 2469841 - RNA, 19 nt, Artificial Sequence
  Description of Artificial Sequence: Synthetic oligonucleotide
  Antisense strand to SEQ ID NO: 2469840
auccauggguaccacuugc

SEQ ID NO: 2469842 - RNA, 19 nt, Artificial Sequence
  Description of Artificial Sequence: Synthetic oligonucleotide
  Sense strand starting at position 2143 of SEQ ID NO: 1887404
agagauaaaugugcuggaa

SEQ ID NO: 2469843 - RNA, 19 nt, Artificial Sequence
  Description of Artificial Sequence: Synthetic oligonucleotide
  Antisense strand to SEQ ID NO: 2469842
uuccagcacauuuaucucu

SEQ ID NO: 2469844 - RNA, 19 nt, Artificial Sequence
  Description of Artificial Sequence: Synthetic oligonucleotide
  Sense strand starting at position 2146 of SEQ ID NO: 1887404
gauaaaugugcuggaaagg

SEQ ID NO: 2469845 - RNA, 19 nt, Artificial Sequence
  Description of Artificial Sequence: Synthetic oligonucleotide
  Antisense strand to SEQ ID NO: 2469844
ccuuuccagcacauuuauc

SEQ ID NO: 2469846 - RNA, 19 nt, Artificial Sequence
  Description of Artificial Sequence: Synthetic oligonucleotide
  Sense strand starting at position 2164 of SEQ ID NO: 1887404
ggaguuuaagaguaaggca

SEQ ID NO: 2469847 - RNA, 19 nt, Artificial Sequence
  Description of Artificial Sequence: Synthetic oligonucleotide
  Antisense strand to SEQ ID NO: 2469846
ugccuuacucuuaaacucc

SEQ ID NO: 2469848 - RNA, 19 nt, Artificial Sequence
  Description of Artificial Sequence: Synthetic oligonucleotide
  Sense strand starting at position 2256 of SEQ ID NO: 1887404
ugccaauggccuuaggauu

SEQ ID NO: 2469849 - RNA, 19 nt, Artificial Sequence
  Description of Artificial Sequence: Synthetic oligonucleotide
  Antisense strand to SEQ ID NO: 2469848
aauccuaaggccauuggca

SEQ ID NO: 2469850 - RNA, 19 nt, Artificial Sequence
  Description of Artificial Sequence: Synthetic oligonucleotide
  Sense strand starting at position 2382 of SEQ ID NO: 1887404
uaagauuuguuacagaaag

SEQ ID NO: 2469851 - RNA, 19 nt, Artificial Sequence
  Description of Artificial Sequence: Synthetic oligonucleotide
  Antisense strand to SEQ ID NO: 2469850
cuuucuguaacaaaucuua

SEQ ID NO: 2469852 - RNA, 19 nt, Artificial Sequence
  Description of Artificial Sequence: Synthetic oligonucleotide
  Sense strand starting at position 2394 of SEQ ID NO: 1887404
cagaaagggccaugguauu

SEQ ID NO: 2469853 - RNA, 19 nt, Artificial Sequence
  Description of Artificial Sequence: Synthetic oligonucleotide
  Antisense strand to SEQ ID NO: 2469852
aauaccauggcccuuucug

SEQ ID NO: 2469854 - RNA, 19 nt, Artificial Sequence
  Description of Artificial Sequence: Synthetic oligonucleotide
  Sense strand starting at position 2555 of SEQ ID NO: 1887404
ggaggaauguuagcuuauu

SEQ ID NO: 2469855 - RNA, 19 nt, Artificial Sequence
  Description of Artificial Sequence: Synthetic oligonucleotide
  Antisense strand to SEQ ID NO: 2469854
aauaagcuaacauuccucc

SEQ ID NO: 2469856 - RNA, 19 nt, Artificial Sequence
  Description of Artificial Sequence: Synthetic oligonucleotide
  Sense strand starting at position 2659 of SEQ ID NO: 1887404
acacacuguguaugauuaa

SEQ ID NO: 2469857 - RNA, 19 nt, Artificial Sequence
  Description of Artificial Sequence: Synthetic oligonucleotide
  Antisense strand to SEQ ID NO: 2469856
uuaaucauacacagugugu

SEQ ID NO: 2469858 - RNA, 19 nt, Artificial Sequence
  Description of Artificial Sequence: Synthetic oligonucleotide
  Sense strand starting at position 2683 of SEQ ID NO: 1887404
agaaauuaucauugguuac

SEQ ID NO: 2469859 - RNA, 19 nt, Artificial Sequence
  Description of Artificial Sequence: Synthetic oligonucleotide
  Antisense strand to SEQ ID NO: 2469858
guaaccaaugauaauuucu

SEQ ID NO: 2469860 - RNA, 19 nt, Artificial Sequence
  Description of Artificial Sequence: Synthetic oligonucleotide
  Sense strand starting at position 2782 of SEQ ID NO: 1887404
auggaauguugcucacaua

SEQ ID NO: 2469861 - RNA, 19 nt, Artificial Sequence
  Description of Artificial Sequence: Synthetic oligonucleotide
  Antisense strand to SEQ ID NO: 2469860
uaugugagcaacauuccau

SEQ ID NO: 2469862 - RNA, 19 nt, Artificial Sequence
  Description of Artificial Sequence: Synthetic oligonucleotide
  Sense strand starting at position 2783 of SEQ ID NO: 1887404
uggaauguugcucacauau

SEQ ID NO: 2469863 - RNA, 19 nt, Artificial Sequence
  Description of Artificial Sequence: Synthetic oligonucleotide
  Antisense strand to SEQ ID NO: 2469862
auaugugagcaacauucca

SEQ ID NO: 2469864 - RNA, 19 nt, Artificial Sequence
  Description of Artificial Sequence: Synthetic oligonucleotide
  Sense strand starting at position 2988 of SEQ ID NO: 1887404
auucuacuauaugugauca

SEQ ID NO: 2469865 - RNA, 19 nt, Artificial Sequence
  Description of Artificial Sequence: Synthetic oligonucleotide
  Antisense strand to SEQ ID NO: 2469864
ugaucacauauaguagaau

SEQ ID NO: 2469866 - RNA, 19 nt, Artificial Sequence
  Description of Artificial Sequence: Synthetic oligonucleotide
  Sense strand starting at position 3013 of SEQ ID NO: 1887404
uuaguaugugucuauaauc

SEQ ID NO: 2469867 - RNA, 19 nt, Artificial Sequence
  Description of Artificial Sequence: Synthetic oligonucleotide
  Antisense strand to SEQ ID NO: 2469866
gauuauagacacauacuaa

SEQ ID NO: 2469868 - RNA, 19 nt, Artificial Sequence
  Description of Artificial Sequence: Synthetic oligonucleotide
  Sense strand starting at position 3018 of SEQ ID NO: 1887404
augugucuauaauccuaau

SEQ ID NO: 2469869 - RNA, 19 nt, Artificial Sequence
  Description of Artificial Sequence: Synthetic oligonucleotide
  Antisense strand to SEQ ID NO: 2469868
auuaggauuauagacacau

SEQ ID NO: 2469870 - RNA, 19 nt, Artificial Sequence
  Description of Artificial Sequence: Synthetic oligonucleotide
  Sense strand starting at position 3095 of SEQ ID NO: 1887404
gaaccugauuuguagagag

SEQ ID NO: 2469871 - RNA, 19 nt, Artificial Sequence
  Description of Artificial Sequence: Synthetic oligonucleotide
  Antisense strand to SEQ ID NO: 2469870
cucucuacaaaucagguuc

SEQ ID NO: 2469872 - RNA, 19 nt, Artificial Sequence
  Description of Artificial Sequence: Synthetic oligonucleotide
  Sense strand starting at position 3307 of SEQ ID NO: 1887404
cuuccuuauccacagguau

SEQ ID NO: 2469873 - RNA, 19 nt, Artificial Sequence
  Description of Artificial Sequence: Synthetic oligonucleotide
  Antisense strand to SEQ ID NO: 2469872
auaccuguggauaaggaag

SEQ ID NO: 2469874 - RNA, 19 nt, Artificial Sequence
  Description of Artificial Sequence: Synthetic oligonucleotide
  Sense strand starting at position 3384 of SEQ ID NO: 1887404
gcggauugcccucugucua

SEQ ID NO: 2469875 - RNA, 19 nt, Artificial Sequence
  Description of Artificial Sequence: Synthetic oligonucleotide
  Antisense strand to SEQ ID NO: 2469874
uagacagagggcaauccgc

SEQ ID NO: 2469876 - RNA, 19 nt, Artificial Sequence
  Description of Artificial Sequence: Synthetic oligonucleotide
  Sense strand starting at position 3440 of SEQ ID NO: 1887404
acuuuacuuccagacaggu

SEQ ID NO: 2469877 - RNA, 19 nt, Artificial Sequence
  Description of Artificial Sequence: Synthetic oligonucleotide
  Antisense strand to SEQ ID NO: 2469876
accugucuggaaguaaagu

SEQ ID NO: 2469878 - RNA, 19 nt, Artificial Sequence
  Description of Artificial Sequence: Synthetic oligonucleotide
  Sense strand starting at position 3562 of SEQ ID NO: 1887404
gaagacuggucuuuggaau

SEQ ID NO: 2469879 - RNA, 19 nt, Artificial Sequence
  Description of Artificial Sequence: Synthetic oligonucleotide
  Antisense strand to SEQ ID NO: 2469878
auuccaaagaccagucuuc

SEQ ID NO: 2469880 - RNA, 19 nt, Artificial Sequence
  Description of Artificial Sequence: Synthetic oligonucleotide
  Sense strand starting at position 3563 of SEQ ID NO: 1887404
aagacuggucuuuggaaug

SEQ ID NO: 2469881 - RNA, 19 nt, Artificial Sequence
  Description of Artificial Sequence: Synthetic oligonucleotide
  Antisense strand to SEQ ID NO: 2469880
cauuccaaagaccagucuu

SEQ ID NO: 2469882 - RNA, 19 nt, Artificial Sequence
  Description of Artificial Sequence: Synthetic oligonucleotide
  Sense strand starting at position 3574 of SEQ ID NO: 1887404
uuggaauggucacccugau

SEQ ID NO: 2469883 - RNA, 19 nt, Artificial Sequence
  Description of Artificial Sequence: Synthetic oligonucleotide
  Antisense strand to SEQ ID NO: 2469882
aucagggugaccauuccaa

SEQ ID NO: 2469884 - RNA, 19 nt, Artificial Sequence
  Description of Artificial Sequence: Synthetic oligonucleotide
  Sense strand starting at position 3719 of SEQ ID NO: 1887404
gcauuaaugcauuaaguaa

SEQ ID NO: 2469885 - RNA, 19 nt, Artificial Sequence
  Description of Artificial Sequence: Synthetic oligonucleotide
  Antisense strand to SEQ ID NO: 2469884
uuacuuaaugcauuaaugc

SEQ ID NO: 2469886 - RNA, 19 nt, Artificial Sequence
  Description of Artificial Sequence: Synthetic oligonucleotide
  Sense strand starting at position 3778 of SEQ ID NO: 1887404
aggauagcacuuugccaaa

SEQ ID NO: 2469887 - RNA, 19 nt, Artificial Sequence
  Description of Artificial Sequence: Synthetic oligonucleotide
  Antisense strand to SEQ ID NO: 2469886
uuuggcaaagugcuauccu

SEQ ID NO: 2469888 - RNA, 19 nt, Artificial Sequence
  Description of Artificial Sequence: Synthetic oligonucleotide
  Sense strand starting at position 3825 of SEQ ID NO: 1887404
ccuuaaggacgucacaauu

SEQ ID NO: 2469889 - RNA, 19 nt, Artificial Sequence
  Description of Artificial Sequence: Synthetic oligonucleotide
  Antisense strand to SEQ ID NO: 2469888
aauugugacguccuuaagg

SEQ ID NO: 2469890 - RNA, 19 nt, Artificial Sequence
  Description of Artificial Sequence: Synthetic oligonucleotide
  Sense strand starting at position 3890 of SEQ ID NO: 1887404
aucauuauuccugaauggu

SEQ ID NO: 2469891 - RNA, 19 nt, Artificial Sequence
  Description of Artificial Sequence: Synthetic oligonucleotide
  Antisense strand to SEQ ID NO: 2469890
accauucaggaauaaugau

SEQ ID NO: 2469892 - RNA, 19 nt, Artificial Sequence
  Description of Artificial Sequence: Synthetic oligonucleotide
  Sense strand starting at position 3893 of SEQ ID NO: 1887404
auuauuccugaauggucaa

SEQ ID NO: 2469893 - RNA, 19 nt, Artificial Sequence
  Description of Artificial Sequence: Synthetic oligonucleotide
  Antisense strand to SEQ ID NO: 2469892
uugaccauucaggaauaau

SEQ ID NO: 2469894 - RNA, 19 nt, Artificial Sequence
  Description of Artificial Sequence: Synthetic oligonucleotide
  Sense strand starting at position 49 of SEQ ID NO: 1887405
guauuacuggcacaaguca

SEQ ID NO: 2469895 - RNA, 19 nt, Artificial Sequence
  Description of Artificial Sequence: Synthetic oligonucleotide
  Antisense strand to SEQ ID NO: 2469894
ugacuugugccaguaauac

SEQ ID NO: 2469896 - RNA, 19 nt, Artificial Sequence
  Description of Artificial Sequence: Synthetic oligonucleotide
  Sense strand starting at position 311 of SEQ ID NO: 1887405
ucuuguuaccugcagugaa

SEQ ID NO: 2469897 - RNA, 19 nt, Artificial Sequence
  Description of Artificial Sequence: Synthetic oligonucleotide
  Antisense strand to SEQ ID NO: 2469896
uucacugcagguaacaaga

SEQ ID NO: 2469898 - RNA, 19 nt, Artificial Sequence
  Description of Artificial Sequence: Synthetic oligonucleotide
  Sense strand starting at position 343 of SEQ ID NO: 1887405
aggguuauguuggcugaag

SEQ ID NO: 2469899 - RNA, 19 nt, Artificial Sequence
  Description of Artificial Sequence: Synthetic oligonucleotide
  Antisense strand to SEQ ID NO: 2469898
cuucagccaacauaacccu

SEQ ID NO: 2469900 - RNA, 19 nt, Artificial Sequence
  Description of Artificial Sequence: Synthetic oligonucleotide
  Sense strand starting at position 345 of SEQ ID NO: 1887405
gguuauguuggcugaagga

SEQ ID NO: 2469901 - RNA, 19 nt, Artificial Sequence
  Description of Artificial Sequence: Synthetic oligonucleotide
  Antisense strand to SEQ ID NO: 2469900
uccuucagccaacauaacc

SEQ ID NO: 2469902 - RNA, 19 nt, Artificial Sequence
  Description of Artificial Sequence: Synthetic oligonucleotide
  Sense strand starting at position 777 of SEQ ID NO: 1887405
agucucuuagaggguaaca

SEQ ID NO: 2469903 - RNA, 19 nt, Artificial Sequence
  Description of Artificial Sequence: Synthetic oligonucleotide
  Antisense strand to SEQ ID NO: 2469902
uguuacccucuaagagacu

SEQ ID NO: 2469904 - RNA, 19 nt, Artificial Sequence
  Description of Artificial Sequence: Synthetic oligonucleotide
  Sense strand starting at position 1347 of SEQ ID NO: 1887405
ugcucugaccuuuggauca

SEQ ID NO: 2469905 - RNA, 19 nt, Artificial Sequence
  Description of Artificial Sequence: Synthetic oligonucleotide
  Antisense strand to SEQ ID NO: 2469904
ugauccaaaggucagagca

SEQ ID NO: 2469906 - RNA, 19 nt, Artificial Sequence
  Description of Artificial Sequence: Synthetic oligonucleotide
  Sense strand starting at position 1459 of SEQ ID NO: 1887405
ggguuuauuuaucugcacu

SEQ ID NO: 2469907 - RNA, 19 nt, Artificial Sequence
  Description of Artificial Sequence: Synthetic oligonucleotide
  Antisense strand to SEQ ID NO: 2469906
agugcagauaaauaaaccc

SEQ ID NO: 2469908 - RNA, 19 nt, Artificial Sequence
  Description of Artificial Sequence: Synthetic oligonucleotide
  Sense strand starting at position 1601 of SEQ ID NO: 1887405
agugaaauuaugcaaguga

SEQ ID NO: 2469909 - RNA, 19 nt, Artificial Sequence
  Description of Artificial Sequence: Synthetic oligonucleotide
  Antisense strand to SEQ ID NO: 2469908
ucacuugcauaauuucacu

SEQ ID NO: 2469910 - RNA, 19 nt, Artificial Sequence
  Description of Artificial Sequence: Synthetic oligonucleotide
  Sense strand starting at position 1656 of SEQ ID NO: 1887405
aauguaauagggugaguag

SEQ ID NO: 2469911 - RNA, 19 nt, Artificial Sequence
  Description of Artificial Sequence: Synthetic oligonucleotide
  Antisense strand to SEQ ID NO: 2469910
cuacucacccuauuacauu

SEQ ID NO: 2469912 - RNA, 19 nt, Artificial Sequence
  Description of Artificial Sequence: Synthetic oligonucleotide
  Sense strand starting at position 1667 of SEQ ID NO: 1887405
gugaguagaagccauuaau

SEQ ID NO: 2469913 - RNA, 19 nt, Artificial Sequence
  Description of Artificial Sequence: Synthetic oligonucleotide
  Antisense strand to SEQ ID NO: 2469912
auuaauggcuucuacucac

SEQ ID NO: 2469914 - RNA, 19 nt, Artificial Sequence
  Description of Artificial Sequence: Synthetic oligonucleotide
  Sense strand starting at position 1676 of SEQ ID NO: 1887405
agccauuaaugacuuguga

SEQ ID NO: 2469915 - RNA, 19 nt, Artificial Sequence
  Description of Artificial Sequence: Synthetic oligonucleotide
  Antisense strand to SEQ ID NO: 2469914
ucacaagucauuaauggcu

SEQ ID NO: 2469916 - RNA, 19 nt, Artificial Sequence
  Description of Artificial Sequence: Synthetic oligonucleotide
  Sense strand starting at position 1713 of SEQ ID NO: 1887405
gccuuuacaugauuacgaa

SEQ ID NO: 2469917 - RNA, 19 nt, Artificial Sequence
  Description of Artificial Sequence: Synthetic oligonucleotide
  Antisense strand to SEQ ID NO: 2469916
uucguaaucauguaaaggc

SEQ ID NO: 2469918 - RNA, 19 nt, Artificial Sequence
  Description of Artificial Sequence: Synthetic oligonucleotide
  Sense strand starting at position 1728 of SEQ ID NO: 1887405
cgaagucuaguggaagaca

SEQ ID NO: 2469919 - RNA, 19 nt, Artificial Sequence
  Description of Artificial Sequence: Synthetic oligonucleotide
  Antisense strand to SEQ ID NO: 2469918
ugucuuccacuagacuucg

SEQ ID NO: 2469920 - RNA, 19 nt, Artificial Sequence
  Description of Artificial Sequence: Synthetic oligonucleotide
  Sense strand starting at position 1758 of SEQ ID NO: 1887405
ugcauagcacgugaacaau

SEQ ID NO: 2469921 - RNA, 19 nt, Artificial Sequence
  Description of Artificial Sequence: Synthetic oligonucleotide
  Antisense strand to SEQ ID NO: 2469920
auuguucacgugcuaugca

SEQ ID NO: 2469922 - RNA, 19 nt, Artificial Sequence
  Description of Artificial Sequence: Synthetic oligonucleotide
  Sense strand starting at position 1764 of SEQ ID NO: 1887405
gcacgugaacaaugauuaa

SEQ ID NO: 2469923 - RNA, 19 nt, Artificial Sequence
  Description of Artificial Sequence: Synthetic oligonucleotide
  Antisense strand to SEQ ID NO: 2469922
uuaaucauuguucacgugc

SEQ ID NO: 2469924 - RNA, 19 nt, Artificial Sequence
  Description of Artificial Sequence: Synthetic oligonucleotide
  Sense strand starting at position 1915 of SEQ ID NO: 1887405
cuugaaucuccacggguaa

SEQ ID NO: 2469925 - RNA, 19 nt, Artificial Sequence
  Description of Artificial Sequence: Synthetic oligonucleotide
  Antisense strand to SEQ ID NO: 2469924
uuacccguggagauucaag

SEQ ID NO: 2469926 - RNA, 19 nt, Artificial Sequence
  Description of Artificial Sequence: Synthetic oligonucleotide
  Sense strand starting at position 1916 of SEQ ID NO: 1887405
uugaaucuccacggguaau

SEQ ID NO: 2469927 - RNA, 19 nt, Artificial Sequence
  Description of Artificial Sequence: Synthetic oligonucleotide
  Antisense strand to SEQ ID NO: 2469926
auuacccguggagauucaa

SEQ ID NO: 2469928 - RNA, 19 nt, Artificial Sequence
  Description of Artificial Sequence: Synthetic oligonucleotide
  Sense strand starting at position 1917 of SEQ ID NO: 1887405
ugaaucuccacggguaauc

SEQ ID NO: 2469929 - RNA, 19 nt, Artificial Sequence
  Description of Artificial Sequence: Synthetic oligonucleotide
  Antisense strand to SEQ ID NO: 2469928
gauuacccguggagauuca

SEQ ID NO: 2469930 - RNA, 19 nt, Artificial Sequence
  Description of Artificial Sequence: Synthetic oligonucleotide
  Sense strand starting at position 2006 of SEQ ID NO: 1887405
aguaauggcuucuucuaaa

SEQ ID NO: 2469931 - RNA, 19 nt, Artificial Sequence
  Description of Artificial Sequence: Synthetic oligonucleotide
  Antisense strand to SEQ ID NO: 2469930
uuuagaagaagccauuacu

SEQ ID NO: 2469932 - RNA, 19 nt, Artificial Sequence
  Description of Artificial Sequence: Synthetic oligonucleotide
  Sense strand starting at position 2167 of SEQ ID NO: 1887405
gucuauauaagacagcgau

SEQ ID NO: 2469933 - RNA, 19 nt, Artificial Sequence
  Description of Artificial Sequence: Synthetic oligonucleotide
  Antisense strand to SEQ ID NO: 2469932
aucgcugucuuauauagac

SEQ ID NO: 2469934 - RNA, 19 nt, Artificial Sequence
  Description of Artificial Sequence: Synthetic oligonucleotide
  Sense strand starting at position 2227 of SEQ ID NO: 1887405
ggccaaugacguuaacuga

SEQ ID NO: 2469935 - RNA, 19 nt, Artificial Sequence
  Description of Artificial Sequence: Synthetic oligonucleotide
  Antisense strand to SEQ ID NO: 2469934
ucaguuaacgucauuggcc

SEQ ID NO: 2469936 - RNA, 19 nt, Artificial Sequence
  Description of Artificial Sequence: Synthetic oligonucleotide
  Sense strand starting at position 2250 of SEQ ID NO: 1887405
aggaaacaggucuguguaa

SEQ ID NO: 2469937 - RNA, 19 nt, Artificial Sequence
  Description of Artificial Sequence: Synthetic oligonucleotide
  Antisense strand to SEQ ID NO: 2469936
uuacacagaccuguuuccu

SEQ ID NO: 2469938 - RNA, 19 nt, Artificial Sequence
  Description of Artificial Sequence: Synthetic oligonucleotide
  Sense strand starting at position 2251 of SEQ ID NO: 1887405
ggaaacaggucuguguaaa

SEQ ID NO: 2469939 - RNA, 19 nt, Artificial Sequence
  Description of Artificial Sequence: Synthetic oligonucleotide
  Antisense strand to SEQ ID NO: 2469938
uuuacacagaccuguuucc

SEQ ID NO: 2469940 - RNA, 19 nt, Artificial Sequence
  Description of Artificial Sequence: Synthetic oligonucleotide
  Sense strand starting at position 2252 of SEQ ID NO: 1887405
gaaacaggucuguguaaag

SEQ ID NO: 2469941 - RNA, 19 nt, Artificial Sequence
  Description of Artificial Sequence: Synthetic oligonucleotide
  Antisense strand to SEQ ID NO: 2469940
cuuuacacagaccuguuuc

SEQ ID NO: 2469942 - RNA, 19 nt, Artificial Sequence
  Description of Artificial Sequence: Synthetic oligonucleotide
  Sense strand starting at position 2369 of SEQ ID NO: 1887405
caagucugucugcacagau

SEQ ID NO: 2469943 - RNA, 19 nt, Artificial Sequence
  Description of Artificial Sequence: Synthetic oligonucleotide
  Antisense strand to SEQ ID NO: 2469942
aucugugcagacagacuug

SEQ ID NO: 2469944 - RNA, 19 nt, Artificial Sequence
  Description of Artificial Sequence: Synthetic oligonucleotide
  Sense strand starting at position 3017 of SEQ ID NO: 1887405
uuuagauggcucuggagau

SEQ ID NO: 2469945 - RNA, 19 nt, Artificial Sequence
  Description of Artificial Sequence: Synthetic oligonucleotide
  Antisense strand to SEQ ID NO: 2469944
aucuccagagccaucuaaa

SEQ ID NO: 2469946 - RNA, 19 nt, Artificial Sequence
  Description of Artificial Sequence: Synthetic oligonucleotide
  Sense strand starting at position 3105 of SEQ ID NO: 1887405
ccaguuaaccaucaguaca

SEQ ID NO: 2469947 - RNA, 19 nt, Artificial Sequence
  Description of Artificial Sequence: Synthetic oligonucleotide
  Antisense strand to SEQ ID NO: 2469946
uguacugaugguuaacugg

SEQ ID NO: 2469948 - RNA, 19 nt, Artificial Sequence
  Description of Artificial Sequence: Synthetic oligonucleotide
  Sense strand starting at position 3107 of SEQ ID NO: 1887405
aguuaaccaucaguacaaa

SEQ ID NO: 2469949 - RNA, 19 nt, Artificial Sequence
  Description of Artificial Sequence: Synthetic oligonucleotide
  Antisense strand to SEQ ID NO: 2469948
uuuguacugaugguuaacu

SEQ ID NO: 2469950 - RNA, 19 nt, Artificial Sequence
  Description of Artificial Sequence: Synthetic oligonucleotide
  Sense strand starting at position 3294 of SEQ ID NO: 1887405
ugaaauauuuggcacaauu

SEQ ID NO: 2469951 - RNA, 19 nt, Artificial Sequence
  Description of Artificial Sequence: Synthetic oligonucleotide
  Antisense strand to SEQ ID NO: 2469950
aauugugccaaauauuuca

SEQ ID NO: 2469952 - RNA, 19 nt, Artificial Sequence
  Description of Artificial Sequence: Synthetic oligonucleotide
  Sense strand starting at position 3318 of SEQ ID NO: 1887405
guccaucaucuagauguag

SEQ ID NO: 2469953 - RNA, 19 nt, Artificial Sequence
  Description of Artificial Sequence: Synthetic oligonucleotide
  Antisense strand to SEQ ID NO: 2469952
cuacaucuagaugauggac

SEQ ID NO: 2469954 - RNA, 19 nt, Artificial Sequence
  Description of Artificial Sequence: Synthetic oligonucleotide
  Sense strand starting at position 3383 of SEQ ID NO: 1887405
uuauuucgaccucgauagu

SEQ ID NO: 2469955 - RNA, 19 nt, Artificial Sequence
  Description of Artificial Sequence: Synthetic oligonucleotide
  Antisense strand to SEQ ID NO: 2469954
acuaucgaggucgaaauaa

SEQ ID NO: 2469956 - RNA, 19 nt, Artificial Sequence
  Description of Artificial Sequence: Synthetic oligonucleotide
  Sense strand starting at position 3386 of SEQ ID NO: 1887405
uuucgaccucgauaguauu

SEQ ID NO: 2469957 - RNA, 19 nt, Artificial Sequence
  Description of Artificial Sequence: Synthetic oligonucleotide
  Antisense strand to SEQ ID NO: 2469956
aauacuaucgaggucgaaa

SEQ ID NO: 2469958 - RNA, 19 nt, Artificial Sequence
  Description of Artificial Sequence: Synthetic oligonucleotide
  Sense strand starting at position 3412 of SEQ ID NO: 1887405
gcgguaaauggugacuuca

SEQ ID NO: 2469959 - RNA, 19 nt, Artificial Sequence
  Description of Artificial Sequence: Synthetic oligonucleotide
  Antisense strand to SEQ ID NO: 2469958
ugaagucaccauuuaccgc

SEQ ID NO: 2469960 - RNA, 19 nt, Artificial Sequence
  Description of Artificial Sequence: Synthetic oligonucleotide
  Sense strand starting at position 3444 of SEQ ID NO: 1887405
ccagcaucaggagguuauu

SEQ ID NO: 2469961 - RNA, 19 nt, Artificial Sequence
  Description of Artificial Sequence: Synthetic oligonucleotide
  Antisense strand to SEQ ID NO: 2469960
aauaaccuccugaugcugg

SEQ ID NO: 2469962 - RNA, 19 nt, Artificial Sequence
  Description of Artificial Sequence: Synthetic oligonucleotide
  Sense strand starting at position 3447 of SEQ ID NO: 1887405
gcaucaggagguuauucua

SEQ ID NO: 2469963 - RNA, 19 nt, Artificial Sequence
  Description of Artificial Sequence: Synthetic oligonucleotide
  Antisense strand to SEQ ID NO: 2469962
uagaauaaccuccugaugc

SEQ ID NO: 2469964 - RNA, 19 nt, Artificial Sequence
  Description of Artificial Sequence: Synthetic oligonucleotide
  Sense strand starting at position 3450 of SEQ ID NO: 1887405
ucaggagguuauucuacaa

SEQ ID NO: 2469965 - RNA, 19 nt, Artificial Sequence
  Description of Artificial Sequence: Synthetic oligonucleotide
  Antisense strand to SEQ ID NO: 2469964
uuguagaauaaccuccuga

SEQ ID NO: 2469966 - RNA, 19 nt, Artificial Sequence
  Description of Artificial Sequence: Synthetic oligonucleotide
  Sense strand starting at position 3454 of SEQ ID NO: 1887405
gagguuauucuacaaagca

SEQ ID NO: 2469967 - RNA, 19 nt, Artificial Sequence
  Description of Artificial Sequence: Synthetic oligonucleotide
  Antisense strand to SEQ ID NO: 2469966
ugcuuuguagaauaaccuc

SEQ ID NO: 2469968 - RNA, 19 nt, Artificial Sequence
  Description of Artificial Sequence: Synthetic oligonucleotide
  Sense strand starting at position 3626 of SEQ ID NO: 1887405
uggcauuaucuauauuaga

SEQ ID NO: 2469969 - RNA, 19 nt, Artificial Sequence
  Description of Artificial Sequence: Synthetic oligonucleotide
  Antisense strand to SEQ ID NO: 2469968
ucuaauauagauaaugcca

SEQ ID NO: 2469970 - RNA, 19 nt, Artificial Sequence
  Description of Artificial Sequence: Synthetic oligonucleotide
  Sense strand starting at position 3879 of SEQ ID NO: 1887405
ccugaaaucuggcuacaga

SEQ ID NO: 2469971 - RNA, 19 nt, Artificial Sequence
  Description of Artificial Sequence: Synthetic oligonucleotide
  Antisense strand to SEQ ID NO: 2469970
ucuguagccagauuucagg

SEQ ID NO: 2469972 - RNA, 19 nt, Artificial Sequence
  Description of Artificial Sequence: Synthetic oligonucleotide
  Sense strand starting at position 3915 of SEQ ID NO: 1887405
gcaugcugacaacaguaaa

SEQ ID NO: 2469973 - RNA, 19 nt, Artificial Sequence
  Description of Artificial Sequence: Synthetic oligonucleotide
  Antisense strand to SEQ ID NO: 2469972
uuuacuguugucagcaugc

SEQ ID NO: 2469974 - RNA, 19 nt, Artificial Sequence
  Description of Artificial Sequence: Synthetic oligonucleotide
  Sense strand starting at position 113 of SEQ ID NO: 1887406
cuccuaccacagugauagu

SEQ ID NO: 2469975 - RNA, 19 nt, Artificial Sequence
  Description of Artificial Sequence: Synthetic oligonucleotide
  Antisense strand to SEQ ID NO: 2469974
acuaucacugugguaggag

SEQ ID NO: 2469976 - RNA, 19 nt, Artificial Sequence
  Description of Artificial Sequence: Synthetic oligonucleotide
  Sense strand starting at position 225 of SEQ ID NO: 1887406
cgcuuaaugguacaucuua

SEQ ID NO: 2469977 - RNA, 19 nt, Artificial Sequence
  Description of Artificial Sequence: Synthetic oligonucleotide
  Antisense strand to SEQ ID NO: 2469976
uaagauguaccauuaagcg

SEQ ID NO: 2469978 - RNA, 19 nt, Artificial Sequence
  Description of Artificial Sequence: Synthetic oligonucleotide
  Sense strand starting at position 232 of SEQ ID NO: 1887406
ugguacaucuuacagauuu

SEQ ID NO: 2469979 - RNA, 19 nt, Artificial Sequence
  Description of Artificial Sequence: Synthetic oligonucleotide
  Antisense strand to SEQ ID NO: 2469978
aaaucuguaagauguacca

SEQ ID NO: 2469980 - RNA, 19 nt, Artificial Sequence
  Description of Artificial Sequence: Synthetic oligonucleotide
  Sense strand starting at position 266 of SEQ ID NO: 1887406
agacuuuacguguaucauu

SEQ ID NO: 2469981 - RNA, 19 nt, Artificial Sequence
  Description of Artificial Sequence: Synthetic oligonucleotide
  Antisense strand to SEQ ID NO: 2469980
aaugauacacguaaagucu

SEQ ID NO: 2469982 - RNA, 19 nt, Artificial Sequence
  Description of Artificial Sequence: Synthetic oligonucleotide
  Sense strand starting at position 274 of SEQ ID NO: 1887406
cguguaucauuauuacaga

SEQ ID NO: 2469983 - RNA, 19 nt, Artificial Sequence
  Description of Artificial Sequence: Synthetic oligonucleotide
  Antisense strand to SEQ ID NO: 2469982
ucuguaauaaugauacacg

SEQ ID NO: 2469984 - RNA, 19 nt, Artificial Sequence
  Description of Artificial Sequence: Synthetic oligonucleotide
  Sense strand starting at position 285 of SEQ ID NO: 1887406
auuacagauguaugacagu

SEQ ID NO: 2469985 - RNA, 19 nt, Artificial Sequence
  Description of Artificial Sequence: Synthetic oligonucleotide
  Antisense strand to SEQ ID NO: 2469984
acugucauacaucuguaau

SEQ ID NO: 2469986 - RNA, 19 nt, Artificial Sequence
  Description of Artificial Sequence: Synthetic oligonucleotide
  Sense strand starting at position 344 of SEQ ID NO: 1887406
cagccagaugugcaaagaa

SEQ ID NO: 2469987 - RNA, 19 nt, Artificial Sequence
  Description of Artificial Sequence: Synthetic oligonucleotide
  Antisense strand to SEQ ID NO: 2469986
uucuuugcacaucuggcug

SEQ ID NO: 2469988 - RNA, 19 nt, Artificial Sequence
  Description of Artificial Sequence: Synthetic oligonucleotide
  Sense strand starting at position 394 of SEQ ID NO: 1887406
ggauauucucaugagccca

SEQ ID NO: 2469989 - RNA, 19 nt, Artificial Sequence
  Description of Artificial Sequence: Synthetic oligonucleotide
  Antisense strand to SEQ ID NO: 2469988
ugggcucaugagaauaucc

SEQ ID NO: 2469990 - RNA, 19 nt, Artificial Sequence
  Description of Artificial Sequence: Synthetic oligonucleotide
  Sense strand starting at position 502 of SEQ ID NO: 1887406
gacuucugaggcggguaaa

SEQ ID NO: 2469991 - RNA, 19 nt, Artificial Sequence
  Description of Artificial Sequence: Synthetic oligonucleotide
  Antisense strand to SEQ ID NO: 2469990
uuuacccgccucagaaguc

SEQ ID NO: 2469992 - RNA, 19 nt, Artificial Sequence
  Description of Artificial Sequence: Synthetic oligonucleotide
  Sense strand starting at position 503 of SEQ ID NO: 1887406
acuucugaggcggguaaau

SEQ ID NO: 2469993 - RNA, 19 nt, Artificial Sequence
  Description of Artificial Sequence: Synthetic oligonucleotide
  Antisense strand to SEQ ID NO: 2469992
auuuacccgccucagaagu

SEQ ID NO: 2469994 - RNA, 19 nt, Artificial Sequence
  Description of Artificial Sequence: Synthetic oligonucleotide
  Sense strand starting at position 505 of SEQ ID NO: 1887406
uucugaggcggguaaauaa

SEQ ID NO: 2469995 - RNA, 19 nt, Artificial Sequence
  Description of Artificial Sequence: Synthetic oligonucleotide
  Antisense strand to SEQ ID NO: 2469994
uuauuuacccgccucagaa

SEQ ID NO: 2469996 - RNA, 19 nt, Artificial Sequence
  Description of Artificial Sequence: Synthetic oligonucleotide
  Sense strand starting at position 549 of SEQ ID NO: 1887406
gcucuucuccaagaggaug

SEQ ID NO: 2469997 - RNA, 19 nt, Artificial Sequence
  Description of Artificial Sequence: Synthetic oligonucleotide
  Antisense strand to SEQ ID NO: 2469996
cauccucuuggagaagagc

SEQ ID NO: 2469998 - RNA, 19 nt, Artificial Sequence
  Description of Artificial Sequence: Synthetic oligonucleotide
  Sense strand starting at position 661 of SEQ ID NO: 1887406
gcugguuccacuuaaguga

SEQ ID NO: 2469999 - RNA, 19 nt, Artificial Sequence
  Description of Artificial Sequence: Synthetic oligonucleotide
  Antisense strand to SEQ ID NO: 2469998
ucacuuaaguggaaccagc

SEQ ID NO: 2470000 - RNA, 19 nt, Artificial Sequence
  Description of Artificial Sequence: Synthetic oligonucleotide
  Sense strand starting at position 665 of SEQ ID NO: 1887406
guuccacuuaagugagagu

SEQ ID NO: 2470001 - RNA, 19 nt, Artificial Sequence
  Description of Artificial Sequence: Synthetic oligonucleotide
  Antisense strand to SEQ ID NO: 2470000
acucucacuuaaguggaac

SEQ ID NO: 2470002 - RNA, 19 nt, Artificial Sequence
  Description of Artificial Sequence: Synthetic oligonucleotide
  Sense strand starting at position 696 of SEQ ID NO: 1887406
agcugagaaaugugacuuu

SEQ ID NO: 2470003 - RNA, 19 nt, Artificial Sequence
  Description of Artificial Sequence: Synthetic oligonucleotide
  Antisense strand to SEQ ID NO: 2470002
aaagucacauuucucagcu

SEQ ID NO: 2470004 - RNA, 19 nt, Artificial Sequence
  Description of Artificial Sequence: Synthetic oligonucleotide
  Sense strand starting at position 1306 of SEQ ID NO: 1887406
ggagcauugaucgagagca

SEQ ID NO: 2470005 - RNA, 19 nt, Artificial Sequence
  Description of Artificial Sequence: Synthetic oligonucleotide
  Antisense strand to SEQ ID NO: 2470004
ugcucucgaucaaugcucc

SEQ ID NO: 2470006 - RNA, 19 nt, Artificial Sequence
  Description of Artificial Sequence: Synthetic oligonucleotide
  Sense strand starting at position 1308 of SEQ ID NO: 1887406
agcauugaucgagagcaug

SEQ ID NO: 2470007 - RNA, 19 nt, Artificial Sequence
  Description of Artificial Sequence: Synthetic oligonucleotide
  Antisense strand to SEQ ID NO: 2470006
caugcucucgaucaaugcu

SEQ ID NO: 2470008 - RNA, 19 nt, Artificial Sequence
  Description of Artificial Sequence: Synthetic oligonucleotide
  Sense strand starting at position 1517 of SEQ ID NO: 1887406
aaauuugacugugaaggga

SEQ ID NO: 2470009 - RNA, 19 nt, Artificial Sequence
  Description of Artificial Sequence: Synthetic oligonucleotide
  Antisense strand to SEQ ID NO: 2470008
ucccuucacagucaaauuu

SEQ ID NO: 2470010 - RNA, 19 nt, Artificial Sequence
  Description of Artificial Sequence: Synthetic oligonucleotide
  Sense strand starting at position 1535 of SEQ ID NO: 1887406
aaggaaagauaugagauau

SEQ ID NO: 2470011 - RNA, 19 nt, Artificial Sequence
  Description of Artificial Sequence: Synthetic oligonucleotide
  Antisense strand to SEQ ID NO: 2470010
auaucucauaucuuuccuu

SEQ ID NO: 2470012 - RNA, 19 nt, Artificial Sequence
  Description of Artificial Sequence: Synthetic oligonucleotide
  Sense strand starting at position 1931 of SEQ ID NO: 1887406
cggucacagaagugguaaa

SEQ ID NO: 2470013 - RNA, 19 nt, Artificial Sequence
  Description of Artificial Sequence: Synthetic oligonucleotide
  Antisense strand to SEQ ID NO: 2470012
uuuaccacuucugugaccg

SEQ ID NO: 2470014 - RNA, 19 nt, Artificial Sequence
  Description of Artificial Sequence: Synthetic oligonucleotide
  Sense strand starting at position 2087 of SEQ ID NO: 1887406
gcugaaggguccuuagaaa

SEQ ID NO: 2470015 - RNA, 19 nt, Artificial Sequence
  Description of Artificial Sequence: Synthetic oligonucleotide
  Antisense strand to SEQ ID NO: 2470014
uuucuaaggacccuucagc

SEQ ID NO: 2470016 - RNA, 19 nt, Artificial Sequence
  Description of Artificial Sequence: Synthetic oligonucleotide
  Sense strand starting at position 2271 of SEQ ID NO: 1887406
gcgugaauucccgaaggac

SEQ ID NO: 2470017 - RNA, 19 nt, Artificial Sequence
  Description of Artificial Sequence: Synthetic oligonucleotide
  Antisense strand to SEQ ID NO: 2470016
guccuucgggaauucacgc

SEQ ID NO: 2470018 - RNA, 19 nt, Artificial Sequence
  Description of Artificial Sequence: Synthetic oligonucleotide
  Sense strand starting at position 2441 of SEQ ID NO: 1887406
gguuuccacgaagauacau

SEQ ID NO: 2470019 - RNA, 19 nt, Artificial Sequence
  Description of Artificial Sequence: Synthetic oligonucleotide
  Antisense strand to SEQ ID NO: 2470018
auguaucuucguggaaacc

SEQ ID NO: 2470020 - RNA, 19 nt, Artificial Sequence
  Description of Artificial Sequence: Synthetic oligonucleotide
  Sense strand starting at position 2590 of SEQ ID NO: 1887406
uguuguuuggaaggaaauu

SEQ ID NO: 2470021 - RNA, 19 nt, Artificial Sequence
  Description of Artificial Sequence: Synthetic oligonucleotide
  Antisense strand to SEQ ID NO: 2470020
aauuuccuuccaaacaaca

SEQ ID NO: 2470022 - RNA, 19 nt, Artificial Sequence
  Description of Artificial Sequence: Synthetic oligonucleotide
  Sense strand starting at position 2882 of SEQ ID NO: 1887406
ugaacaucucgacagcaaa

SEQ ID NO: 2470023 - RNA, 19 nt, Artificial Sequence
  Description of Artificial Sequence: Synthetic oligonucleotide
  Antisense strand to SEQ ID NO: 2470022
uuugcugucgagauguuca

SEQ ID NO: 2470024 - RNA, 19 nt, Artificial Sequence
  Description of Artificial Sequence: Synthetic oligonucleotide
  Sense strand starting at position 2914 of SEQ ID NO: 1887406
cuuuauuauugagcaaguu

SEQ ID NO: 2470025 - RNA, 19 nt, Artificial Sequence
  Description of Artificial Sequence: Synthetic oligonucleotide
  Antisense strand to SEQ ID NO: 2470024
aacuugcucaauaauaaag

SEQ ID NO: 2470026 - RNA, 19 nt, Artificial Sequence
  Description of Artificial Sequence: Synthetic oligonucleotide
  Sense strand starting at position 3011 of SEQ ID NO: 1887406
uccuccugucuuugaggaa

SEQ ID NO: 2470027 - RNA, 19 nt, Artificial Sequence
  Description of Artificial Sequence: Synthetic oligonucleotide
  Antisense strand to SEQ ID NO: 2470026
uuccucaaagacaggagga

SEQ ID NO: 2470028 - RNA, 19 nt, Artificial Sequence
  Description of Artificial Sequence: Synthetic oligonucleotide
  Sense strand starting at position 3052 of SEQ ID NO: 1887406
auacuaucucaggagugcu

SEQ ID NO: 2470029 - RNA, 19 nt, Artificial Sequence
  Description of Artificial Sequence: Synthetic oligonucleotide
  Antisense strand to SEQ ID NO: 2470028
agcacuccugagauaguau

SEQ ID NO: 2470030 - RNA, 19 nt, Artificial Sequence
  Description of Artificial Sequence: Synthetic oligonucleotide
  Sense strand starting at position 3065 of SEQ ID NO: 1887406
agugcucugagcgugguua

SEQ ID NO: 2470031 - RNA, 19 nt, Artificial Sequence
  Description of Artificial Sequence: Synthetic oligonucleotide
  Antisense strand to SEQ ID NO: 2470030
uaaccacgcucagagcacu

SEQ ID NO: 2470032 - RNA, 19 nt, Artificial Sequence
  Description of Artificial Sequence: Synthetic oligonucleotide
  Sense strand starting at position 3079 of SEQ ID NO: 1887406
gguuaagggcgugauucau

SEQ ID NO: 2470033 - RNA, 19 nt, Artificial Sequence
  Description of Artificial Sequence: Synthetic oligonucleotide
  Antisense strand to SEQ ID NO: 2470032
augaaucacgcccuuaacc

SEQ ID NO: 2470034 - RNA, 19 nt, Artificial Sequence
  Description of Artificial Sequence: Synthetic oligonucleotide
  Sense strand starting at position 3121 of SEQ ID NO: 1887406
ggaagaagauuccaacuaa

SEQ ID NO: 2470035 - RNA, 19 nt, Artificial Sequence
  Description of Artificial Sequence: Synthetic oligonucleotide
  Antisense strand to SEQ ID NO: 2470034
uuaguuggaaucuucuucc

SEQ ID NO: 2470036 - RNA, 19 nt, Artificial Sequence
  Description of Artificial Sequence: Synthetic oligonucleotide
  Sense strand starting at position 3242 of SEQ ID NO: 1887406
acguaaucagggugcaaag

SEQ ID NO: 2470037 - RNA, 19 nt, Artificial Sequence
  Description of Artificial Sequence: Synthetic oligonucleotide
  Antisense strand to SEQ ID NO: 2470036
cuuugcacccugauuacgu

SEQ ID NO: 2470038 - RNA, 19 nt, Artificial Sequence
  Description of Artificial Sequence: Synthetic oligonucleotide
  Sense strand starting at position 3382 of SEQ ID NO: 1887406
gguaacucagcaggacaua

SEQ ID NO: 2470039 - RNA, 19 nt, Artificial Sequence
  Description of Artificial Sequence: Synthetic oligonucleotide
  Antisense strand to SEQ ID NO: 2470038
uauguccugcugaguuacc

SEQ ID NO: 2470040 - RNA, 19 nt, Artificial Sequence
  Description of Artificial Sequence: Synthetic oligonucleotide
  Sense strand starting at position 3424 of SEQ ID NO: 1887406
cgugcuuuggaacggauuu

SEQ ID NO: 2470041 - RNA, 19 nt, Artificial Sequence
  Description of Artificial Sequence: Synthetic oligonucleotide
  Antisense strand to SEQ ID NO: 2470040
aaauccguuccaaagcacg

SEQ ID NO: 2470042 - RNA, 19 nt, Artificial Sequence
  Description of Artificial Sequence: Synthetic oligonucleotide
  Sense strand starting at position 3487 of SEQ ID NO: 1887406
gaaggaugguguccuuuau

SEQ ID NO: 2470043 - RNA, 19 nt, Artificial Sequence
  Description of Artificial Sequence: Synthetic oligonucleotide
  Antisense strand to SEQ ID NO: 2470042
auaaaggacaccauccuuc

SEQ ID NO: 2470044 - RNA, 19 nt, Artificial Sequence
  Description of Artificial Sequence: Synthetic oligonucleotide
  Sense strand starting at position 3491 of SEQ ID NO: 1887406
gaugguguccuuuauauag

SEQ ID NO: 2470045 - RNA, 19 nt, Artificial Sequence
  Description of Artificial Sequence: Synthetic oligonucleotide
  Antisense strand to SEQ ID NO: 2470044
cuauauaaaggacaccauc

SEQ ID NO: 2470046 - RNA, 19 nt, Artificial Sequence
  Description of Artificial Sequence: Synthetic oligonucleotide
  Sense strand starting at position 3523 of SEQ ID NO: 1887406
gugucugauuugucuggau

SEQ ID NO: 2470047 - RNA, 19 nt, Artificial Sequence
  Description of Artificial Sequence: Synthetic oligonucleotide
  Antisense strand to SEQ ID NO: 2470046
auccagacaaaucagacac

SEQ ID NO: 2470048 - RNA, 19 nt, Artificial Sequence
  Description of Artificial Sequence: Synthetic oligonucleotide
  Sense strand starting at position 3525 of SEQ ID NO: 1887406
gucugauuugucuggaugu

SEQ ID NO: 2470049 - RNA, 19 nt, Artificial Sequence
  Description of Artificial Sequence: Synthetic oligonucleotide
  Antisense strand to SEQ ID NO: 2470048
acauccagacaaaucagac

SEQ ID NO: 2470050 - RNA, 19 nt, Artificial Sequence
  Description of Artificial Sequence: Synthetic oligonucleotide
  Sense strand starting at position 3799 of SEQ ID NO: 1887406
gcaggaguuggaggcuaaa

SEQ ID NO: 2470051 - RNA, 19 nt, Artificial Sequence
  Description of Artificial Sequence: Synthetic oligonucleotide
  Antisense strand to SEQ ID NO: 2470050
uuuagccuccaacuccugc

SEQ ID NO: 2470052 - RNA, 19 nt, Artificial Sequence
  Description of Artificial Sequence: Synthetic oligonucleotide
  Sense strand starting at position 3944 of SEQ ID NO: 1887406
ggauauaggcuuugucacu

SEQ ID NO: 2470053 - RNA, 19 nt, Artificial Sequence
  Description of Artificial Sequence: Synthetic oligonucleotide
  Antisense strand to SEQ ID NO: 2470052
agugacaaagccuauaucc

SEQ ID NO: 2470054 - RNA, 19 nt, Artificial Sequence
  Description of Artificial Sequence: Synthetic oligonucleotide
  Sense strand starting at position 69 of SEQ ID NO: 1887407
aguuacuaucaauggccua

SEQ ID NO: 2470055 - RNA, 19 nt, Artificial Sequence
  Description of Artificial Sequence: Synthetic oligonucleotide
  Antisense strand to SEQ ID NO: 2470054
uaggccauugauaguaacu

SEQ ID NO: 2470056 - RNA, 19 nt, Artificial Sequence
  Description of Artificial Sequence: Synthetic oligonucleotide
  Sense strand starting at position 195 of SEQ ID NO: 1887407
ggucaaccuugacugguau

SEQ ID NO: 2470057 - RNA, 19 nt, Artificial Sequence
  Description of Artificial Sequence: Synthetic oligonucleotide
  Antisense strand to SEQ ID NO: 2470056
auaccagucaagguugacc

SEQ ID NO: 2470058 - RNA, 19 nt, Artificial Sequence
  Description of Artificial Sequence: Synthetic oligonucleotide
  Sense strand starting at position 196 of SEQ ID NO: 1887407
gucaaccuugacugguaua

SEQ ID NO: 2470059 - RNA, 19 nt, Artificial Sequence
  Description of Artificial Sequence: Synthetic oligonucleotide
  Antisense strand to SEQ ID NO: 2470058
uauaccagucaagguugac

SEQ ID NO: 2470060 - RNA, 19 nt, Artificial Sequence
  Description of Artificial Sequence: Synthetic oligonucleotide
  Sense strand starting at position 263 of SEQ ID NO: 1887407
aauucuggccagugagaga

SEQ ID NO: 2470061 - RNA, 19 nt, Artificial Sequence
  Description of Artificial Sequence: Synthetic oligonucleotide
  Antisense strand to SEQ ID NO: 2470060
ucucucacuggccagaauu

SEQ ID NO: 2470062 - RNA, 19 nt, Artificial Sequence
  Description of Artificial Sequence: Synthetic oligonucleotide
  Sense strand starting at position 321 of SEQ ID NO: 1887407
ugcugauaaagggaugcau

SEQ ID NO: 2470063 - RNA, 19 nt, Artificial Sequence
  Description of Artificial Sequence: Synthetic oligonucleotide
  Antisense strand to SEQ ID NO: 2470062
augcaucccuuuaucagca

SEQ ID NO: 2470064 - RNA, 19 nt, Artificial Sequence
  Description of Artificial Sequence: Synthetic oligonucleotide
  Sense strand starting at position 524 of SEQ ID NO: 1887407
auaagugaaugcguuauuu

SEQ ID NO: 2470065 - RNA, 19 nt, Artificial Sequence
  Description of Artificial Sequence: Synthetic oligonucleotide
  Antisense strand to SEQ ID NO: 2470064
aaauaacgcauucacuuau

SEQ ID NO: 2470066 - RNA, 19 nt, Artificial Sequence
  Description of Artificial Sequence: Synthetic oligonucleotide
  Sense strand starting at position 910 of SEQ ID NO: 1887407
uuauuaguggcccaaagca

SEQ ID NO: 2470067 - RNA, 19 nt, Artificial Sequence
  Description of Artificial Sequence: Synthetic oligonucleotide
  Antisense strand to SEQ ID NO: 2470066
ugcuuugggccacuaauaa

SEQ ID NO: 2470068 - RNA, 19 nt, Artificial Sequence
  Description of Artificial Sequence: Synthetic oligonucleotide
  Sense strand starting at position 934 of SEQ ID NO: 1887407
agcaaauugugacuuauau

SEQ ID NO: 2470069 - RNA, 19 nt, Artificial Sequence
  Description of Artificial Sequence: Synthetic oligonucleotide
  Antisense strand to SEQ ID NO: 2470068
auauaagucacaauuugcu

SEQ ID NO: 2470070 - RNA, 19 nt, Artificial Sequence
  Description of Artificial Sequence: Synthetic oligonucleotide
  Sense strand starting at position 956 of SEQ ID NO: 1887407
ccuaucuauuuagaaaggu

SEQ ID NO: 2470071 - RNA, 19 nt, Artificial Sequence
  Description of Artificial Sequence: Synthetic oligonucleotide
  Antisense strand to SEQ ID NO: 2470070
accuuucuaaauagauagg

SEQ ID NO: 2470072 - RNA, 19 nt, Artificial Sequence
  Description of Artificial Sequence: Synthetic oligonucleotide
  Sense strand starting at position 966 of SEQ ID NO: 1887407
uagaaaggucgcugaucaa

SEQ ID NO: 2470073 - RNA, 19 nt, Artificial Sequence
  Description of Artificial Sequence: Synthetic oligonucleotide
  Antisense strand to SEQ ID NO: 2470072
uugaucagcgaccuuucua

SEQ ID NO: 2470074 - RNA, 19 nt, Artificial Sequence
  Description of Artificial Sequence: Synthetic oligonucleotide
  Sense strand starting at position 977 of SEQ ID NO: 1887407
cugaucaagcgauaccuua

SEQ ID NO: 2470075 - RNA, 19 nt, Artificial Sequence
  Description of Artificial Sequence: Synthetic oligonucleotide
  Antisense strand to SEQ ID NO: 2470074
uaagguaucgcuugaucag

SEQ ID NO: 2470076 - RNA, 19 nt, Artificial Sequence
  Description of Artificial Sequence: Synthetic oligonucleotide
  Sense strand starting at position 1176 of SEQ ID NO: 1887407
cguuccauuauggaugaaa

SEQ ID NO: 2470077 - RNA, 19 nt, Artificial Sequence
  Description of Artificial Sequence: Synthetic oligonucleotide
  Antisense strand to SEQ ID NO: 2470076
uuucauccauaauggaacg

SEQ ID NO: 2470078 - RNA, 19 nt, Artificial Sequence
  Description of Artificial Sequence: Synthetic oligonucleotide
  Sense strand starting at position 1228 of SEQ ID NO: 1887407
cagaaaucuggauguauua

SEQ ID NO: 2470079 - RNA, 19 nt, Artificial Sequence
  Description of Artificial Sequence: Synthetic oligonucleotide
  Antisense strand to SEQ ID NO: 2470078
uaauacauccagauuucug

SEQ ID NO: 2470080 - RNA, 19 nt, Artificial Sequence
  Description of Artificial Sequence: Synthetic oligonucleotide
  Sense strand starting at position 1280 of SEQ ID NO: 1887407
aagagauucuggcuagguc

SEQ ID NO: 2470081 - RNA, 19 nt, Artificial Sequence
  Description of Artificial Sequence: Synthetic oligonucleotide
  Antisense strand to SEQ ID NO: 2470080
gaccuagccagaaucucuu

SEQ ID NO: 2470082 - RNA, 19 nt, Artificial Sequence
  Description of Artificial Sequence: Synthetic oligonucleotide
  Sense strand starting at position 2041 of SEQ ID NO: 1887407
gccaccuuccugcagaaau

SEQ ID NO: 2470083 - RNA, 19 nt, Artificial Sequence
  Description of Artificial Sequence: Synthetic oligonucleotide
  Antisense strand to SEQ ID NO: 2470082
auuucugcaggaagguggc

SEQ ID NO: 2470084 - RNA, 19 nt, Artificial Sequence
  Description of Artificial Sequence: Synthetic oligonucleotide
  Sense strand starting at position 2053 of SEQ ID NO: 1887407
cagaaauugcaauacguac

SEQ ID NO: 2470085 - RNA, 19 nt, Artificial Sequence
  Description of Artificial Sequence: Synthetic oligonucleotide
  Antisense strand to SEQ ID NO: 2470084
guacguauugcaauuucug

SEQ ID NO: 2470086 - RNA, 19 nt, Artificial Sequence
  Description of Artificial Sequence: Synthetic oligonucleotide
  Sense strand starting at position 2137 of SEQ ID NO: 1887407
cagaguaagcuguacaaau

SEQ ID NO: 2470087 - RNA, 19 nt, Artificial Sequence
  Description of Artificial Sequence: Synthetic oligonucleotide
  Antisense strand to SEQ ID NO: 2470086
auuuguacagcuuacucug

SEQ ID NO: 2470088 - RNA, 19 nt, Artificial Sequence
  Description of Artificial Sequence: Synthetic oligonucleotide
  Sense strand starting at position 2245 of SEQ ID NO: 1887407
uuccucuugguguauauaa

SEQ ID NO: 2470089 - RNA, 19 nt, Artificial Sequence
  Description of Artificial Sequence: Synthetic oligonucleotide
  Antisense strand to SEQ ID NO: 2470088
uuauauacaccaagaggaa

SEQ ID NO: 2470090 - RNA, 19 nt, Artificial Sequence
  Description of Artificial Sequence: Synthetic oligonucleotide
  Sense strand starting at position 2247 of SEQ ID NO: 1887407
ccucuugguguauauaaua

SEQ ID NO: 2470091 - RNA, 19 nt, Artificial Sequence
  Description of Artificial Sequence: Synthetic oligonucleotide
  Antisense strand to SEQ ID NO: 2470090
uauuauauacaccaagagg

SEQ ID NO: 2470092 - RNA, 19 nt, Artificial Sequence
  Description of Artificial Sequence: Synthetic oligonucleotide
  Sense strand starting at position 2317 of SEQ ID NO: 1887407
uaccaucaggacuguuaga

SEQ ID NO: 2470093 - RNA, 19 nt, Artificial Sequence
  Description of Artificial Sequence: Synthetic oligonucleotide
  Antisense strand to SEQ ID NO: 2470092
ucuaacaguccugauggua

SEQ ID NO: 2470094 - RNA, 19 nt, Artificial Sequence
  Description of Artificial Sequence: Synthetic oligonucleotide
  Sense strand starting at position 2327 of SEQ ID NO: 1887407
acuguuagacauggaagca

SEQ ID NO: 2470095 - RNA, 19 nt, Artificial Sequence
  Description of Artificial Sequence: Synthetic oligonucleotide
  Antisense strand to SEQ ID NO: 2470094
ugcuuccaugucuaacagu

SEQ ID NO: 2470096 - RNA, 19 nt, Artificial Sequence
  Description of Artificial Sequence: Synthetic oligonucleotide
  Sense strand starting at position 2328 of SEQ ID NO: 1887407
cuguuagacauggaagcau

SEQ ID NO: 2470097 - RNA, 19 nt, Artificial Sequence
  Description of Artificial Sequence: Synthetic oligonucleotide
  Antisense strand to SEQ ID NO: 2470096
augcuuccaugucuaacag

SEQ ID NO: 2470098 - RNA, 19 nt, Artificial Sequence
  Description of Artificial Sequence: Synthetic oligonucleotide
  Sense strand starting at position 2472 of SEQ ID NO: 1887407
cuaguuacuguguaaguaa

SEQ ID NO: 2470099 - RNA, 19 nt, Artificial Sequence
  Description of Artificial Sequence: Synthetic oligonucleotide
  Antisense strand to SEQ ID NO: 2470098
uuacuuacacaguaacuag

SEQ ID NO: 2470100 - RNA, 19 nt, Artificial Sequence
  Description of Artificial Sequence: Synthetic oligonucleotide
  Sense strand starting at position 2556 of SEQ ID NO: 1887407
ucuuuaccauguguaauaa

SEQ ID NO: 2470101 - RNA, 19 nt, Artificial Sequence
  Description of Artificial Sequence: Synthetic oligonucleotide
  Antisense strand to SEQ ID NO: 2470100
uuauuacacaugguaaaga

SEQ ID NO: 2470102 - RNA, 19 nt, Artificial Sequence
  Description of Artificial Sequence: Synthetic oligonucleotide
  Sense strand starting at position 2557 of SEQ ID NO: 1887407
cuuuaccauguguaauaaa

SEQ ID NO: 2470103 - RNA, 19 nt, Artificial Sequence
  Description of Artificial Sequence: Synthetic oligonucleotide
  Antisense strand to SEQ ID NO: 2470102
uuuauuacacaugguaaag

SEQ ID NO: 2470104 - RNA, 19 nt, Artificial Sequence
  Description of Artificial Sequence: Synthetic oligonucleotide
  Sense strand starting at position 2586 of SEQ ID NO: 1887407
gagcuucgucacuacaaau

SEQ ID NO: 2470105 - RNA, 19 nt, Artificial Sequence
  Description of Artificial Sequence: Synthetic oligonucleotide
  Antisense strand to SEQ ID NO: 2470104
auuuguagugacgaagcuc

SEQ ID NO: 2470106 - RNA, 19 nt, Artificial Sequence
  Description of Artificial Sequence: Synthetic oligonucleotide
  Sense strand starting at position 2632 of SEQ ID NO: 1887407
cucuuaagaguagaauugu

SEQ ID NO: 2470107 - RNA, 19 nt, Artificial Sequence
  Description of Artificial Sequence: Synthetic oligonucleotide
  Antisense strand to SEQ ID NO: 2470106
acaauucuacucuuaagag

SEQ ID NO: 2470108 - RNA, 19 nt, Artificial Sequence
  Description of Artificial Sequence: Synthetic oligonucleotide
  Sense strand starting at position 2638 of SEQ ID NO: 1887407
agaguagaauugucuaauu

SEQ ID NO: 2470109 - RNA, 19 nt, Artificial Sequence
  Description of Artificial Sequence: Synthetic oligonucleotide
  Antisense strand to SEQ ID NO: 2470108
aauuagacaauucuacucu

SEQ ID NO: 2470110 - RNA, 19 nt, Artificial Sequence
  Description of Artificial Sequence: Synthetic oligonucleotide
  Sense strand starting at position 2640 of SEQ ID NO: 1887407
aguagaauugucuaauucu

SEQ ID NO: 2470111 - RNA, 19 nt, Artificial Sequence
  Description of Artificial Sequence: Synthetic oligonucleotide
  Antisense strand to SEQ ID NO: 2470110
agaauuagacaauucuacu

SEQ ID NO: 2470112 - RNA, 19 nt, Artificial Sequence
  Description of Artificial Sequence: Synthetic oligonucleotide
  Sense strand starting at position 2877 of SEQ ID NO: 1887407
acaauaguuccauggcuac

SEQ ID NO: 2470113 - RNA, 19 nt, Artificial Sequence
  Description of Artificial Sequence: Synthetic oligonucleotide
  Antisense strand to SEQ ID NO: 2470112
guagccauggaacuauugu

SEQ ID NO: 2470114 - RNA, 19 nt, Artificial Sequence
  Description of Artificial Sequence: Synthetic oligonucleotide
  Sense strand starting at position 3053 of SEQ ID NO: 1887407
acaugagcccuauauguuc

SEQ ID NO: 2470115 - RNA, 19 nt, Artificial Sequence
  Description of Artificial Sequence: Synthetic oligonucleotide
  Antisense strand to SEQ ID NO: 2470114
gaacauauagggcucaugu

SEQ ID NO: 2470116 - RNA, 19 nt, Artificial Sequence
  Description of Artificial Sequence: Synthetic oligonucleotide
  Sense strand starting at position 3144 of SEQ ID NO: 1887407
cuuugucuucagugggaag

SEQ ID NO: 2470117 - RNA, 19 nt, Artificial Sequence
  Description of Artificial Sequence: Synthetic oligonucleotide
  Antisense strand to SEQ ID NO: 2470116
cuucccacugaagacaaag

SEQ ID NO: 2470118 - RNA, 19 nt, Artificial Sequence
  Description of Artificial Sequence: Synthetic oligonucleotide
  Sense strand starting at position 3227 of SEQ ID NO: 1887407
uuucuuaugucccuggaag

SEQ ID NO: 2470119 - RNA, 19 nt, Artificial Sequence
  Description of Artificial Sequence: Synthetic oligonucleotide
  Antisense strand to SEQ ID NO: 2470118
cuuccagggacauaagaaa

SEQ ID NO: 2470120 - RNA, 19 nt, Artificial Sequence
  Description of Artificial Sequence: Synthetic oligonucleotide
  Sense strand starting at position 3281 of SEQ ID NO: 1887407
gaagcagagaucuggguuu

SEQ ID NO: 2470121 - RNA, 19 nt, Artificial Sequence
  Description of Artificial Sequence: Synthetic oligonucleotide
  Antisense strand to SEQ ID NO: 2470120
aaacccagaucucugcuuc

SEQ ID NO: 2470122 - RNA, 19 nt, Artificial Sequence
  Description of Artificial Sequence: Synthetic oligonucleotide
  Sense strand starting at position 3283 of SEQ ID NO: 1887407
agcagagaucuggguuuaa

SEQ ID NO: 2470123 - RNA, 19 nt, Artificial Sequence
  Description of Artificial Sequence: Synthetic oligonucleotide
  Antisense strand to SEQ ID NO: 2470122
uuaaacccagaucucugcu

SEQ ID NO: 2470124 - RNA, 19 nt, Artificial Sequence
  Description of Artificial Sequence: Synthetic oligonucleotide
  Sense strand starting at position 3368 of SEQ ID NO: 1887407
uugucugugacauaguauu

SEQ ID NO: 2470125 - RNA, 19 nt, Artificial Sequence
  Description of Artificial Sequence: Synthetic oligonucleotide
  Antisense strand to SEQ ID NO: 2470124
aauacuaugucacagacaa

SEQ ID NO: 2470126 - RNA, 19 nt, Artificial Sequence
  Description of Artificial Sequence: Synthetic oligonucleotide
  Sense strand starting at position 3435 of SEQ ID NO: 1887407
acagcugaugcucagugaa

SEQ ID NO: 2470127 - RNA, 19 nt, Artificial Sequence
  Description of Artificial Sequence: Synthetic oligonucleotide
  Antisense strand to SEQ ID NO: 2470126
uucacugagcaucagcugu

SEQ ID NO: 2470128 - RNA, 19 nt, Artificial Sequence
  Description of Artificial Sequence: Synthetic oligonucleotide
  Sense strand starting at position 3655 of SEQ ID NO: 1887407
uuggacugcccagaacauu

SEQ ID NO: 2470129 - RNA, 19 nt, Artificial Sequence
  Description of Artificial Sequence: Synthetic oligonucleotide
  Antisense strand to SEQ ID NO: 2470128
aauguucugggcaguccaa

SEQ ID NO: 2470130 - RNA, 19 nt, Artificial Sequence
  Description of Artificial Sequence: Synthetic oligonucleotide
  Sense strand starting at position 3695 of SEQ ID NO: 1887407
gcacauuucuguuucugaa

SEQ ID NO: 2470131 - RNA, 19 nt, Artificial Sequence
  Description of Artificial Sequence: Synthetic oligonucleotide
  Antisense strand to SEQ ID NO: 2470130
uucagaaacagaaaugugc

SEQ ID NO: 2470132 - RNA, 19 nt, Artificial Sequence
  Description of Artificial Sequence: Synthetic oligonucleotide
  Sense strand starting at position 3707 of SEQ ID NO: 1887407
uucugaagcuucucauaag

SEQ ID NO: 2470133 - RNA, 19 nt, Artificial Sequence
  Description of Artificial Sequence: Synthetic oligonucleotide
  Antisense strand to SEQ ID NO: 2470132
cuuaugagaagcuucagaa

SEQ ID NO: 2470134 - RNA, 19 nt, Artificial Sequence
  Description of Artificial Sequence: Synthetic oligonucleotide
  Sense strand starting at position 157 of SEQ ID NO: 1887408
augggcuuugccuacagaa

SEQ ID NO: 2470135 - RNA, 19 nt, Artificial Sequence
  Description of Artificial Sequence: Synthetic oligonucleotide
  Antisense strand to SEQ ID NO: 2470134
uucuguaggcaaagcccau

SEQ ID NO: 2470136 - RNA, 19 nt, Artificial Sequence
  Description of Artificial Sequence: Synthetic oligonucleotide
  Sense strand starting at position 281 of SEQ ID NO: 1887408
gauggacccuugucuuaga

SEQ ID NO: 2470137 - RNA, 19 nt, Artificial Sequence
  Description of Artificial Sequence: Synthetic oligonucleotide
  Antisense strand to SEQ ID NO: 2470136
ucuaagacaaggguccauc

SEQ ID NO: 2470138 - RNA, 19 nt, Artificial Sequence
  Description of Artificial Sequence: Synthetic oligonucleotide
  Sense strand starting at position 291 of SEQ ID NO: 1887408
ugucuuagaucugccuaca

SEQ ID NO: 2470139 - RNA, 19 nt, Artificial Sequence
  Description of Artificial Sequence: Synthetic oligonucleotide
  Antisense strand to SEQ ID NO: 2470138
uguaggcagaucuaagaca

SEQ ID NO: 2470140 - RNA, 19 nt, Artificial Sequence
  Description of Artificial Sequence: Synthetic oligonucleotide
  Sense strand starting at position 516 of SEQ ID NO: 1887408
aggcuuuaugacuaauacu

SEQ ID NO: 2470141 - RNA, 19 nt, Artificial Sequence
  Description of Artificial Sequence: Synthetic oligonucleotide
  Antisense strand to SEQ ID NO: 2470140
aguauuagucauaaagccu

SEQ ID NO: 2470142 - RNA, 19 nt, Artificial Sequence
  Description of Artificial Sequence: Synthetic oligonucleotide
  Sense strand starting at position 794 of SEQ ID NO: 1887408
ugugacagaucucuccaau

SEQ ID NO: 2470143 - RNA, 19 nt, Artificial Sequence
  Description of Artificial Sequence: Synthetic oligonucleotide
  Antisense strand to SEQ ID NO: 2470142
auuggagagaucugucaca

SEQ ID NO: 2470144 - RNA, 19 nt, Artificial Sequence
  Description of Artificial Sequence: Synthetic oligonucleotide
  Sense strand starting at position 813 of SEQ ID NO: 1887408
gcucacucaggagauguaa

SEQ ID NO: 2470145 - RNA, 19 nt, Artificial Sequence
  Description of Artificial Sequence: Synthetic oligonucleotide
  Antisense strand to SEQ ID NO: 2470144
uuacaucuccugagugagc

SEQ ID NO: 2470146 - RNA, 19 nt, Artificial Sequence
  Description of Artificial Sequence: Synthetic oligonucleotide
  Sense strand starting at position 881 of SEQ ID NO: 1887408
ugaucaaacaggugaugua

SEQ ID NO: 2470147 - RNA, 19 nt, Artificial Sequence
  Description of Artificial Sequence: Synthetic oligonucleotide
  Antisense strand to SEQ ID NO: 2470146
uacaucaccuguuugauca

SEQ ID NO: 2470148 - RNA, 19 nt, Artificial Sequence
  Description of Artificial Sequence: Synthetic oligonucleotide
  Sense strand starting at position 893 of SEQ ID NO: 1887408
ugauguaacccuugucaag

SEQ ID NO: 2470149 - RNA, 19 nt, Artificial Sequence
  Description of Artificial Sequence: Synthetic oligonucleotide
  Antisense strand to SEQ ID NO: 2470148
cuugacaaggguuacauca

SEQ ID NO: 2470150 - RNA, 19 nt, Artificial Sequence
  Description of Artificial Sequence: Synthetic oligonucleotide
  Sense strand starting at position 905 of SEQ ID NO: 1887408
ugucaagguucugcuuaaa

SEQ ID NO: 2470151 - RNA, 19 nt, Artificial Sequence
  Description of Artificial Sequence: Synthetic oligonucleotide
  Antisense strand to SEQ ID NO: 2470150
uuuaagcagaaccuugaca

SEQ ID NO: 2470152 - RNA, 19 nt, Artificial Sequence
  Description of Artificial Sequence: Synthetic oligonucleotide
  Sense strand starting at position 917 of SEQ ID NO: 1887408
gcuuaaagcggcuuuguga

SEQ ID NO: 2470153 - RNA, 19 nt, Artificial Sequence
  Description of Artificial Sequence: Synthetic oligonucleotide
  Antisense strand to SEQ ID NO: 2470152
ucacaaagccgcuuuaagc

SEQ ID NO: 2470154 - RNA, 19 nt, Artificial Sequence
  Description of Artificial Sequence: Synthetic oligonucleotide
  Sense strand starting at position 926 of SEQ ID NO: 1887408
ggcuuugugagauaucucu

SEQ ID NO: 2470155 - RNA, 19 nt, Artificial Sequence
  Description of Artificial Sequence: Synthetic oligonucleotide
  Antisense strand to SEQ ID NO: 2470154
agagauaucucacaaagcc

SEQ ID NO: 2470156 - RNA, 19 nt, Artificial Sequence
  Description of Artificial Sequence: Synthetic oligonucleotide
  Sense strand starting at position 964 of SEQ ID NO: 1887408
gggaacacuugucuacacu

SEQ ID NO: 2470157 - RNA, 19 nt, Artificial Sequence
  Description of Artificial Sequence: Synthetic oligonucleotide
  Antisense strand to SEQ ID NO: 2470156
aguguagacaaguguuccc

SEQ ID NO: 2470158 - RNA, 19 nt, Artificial Sequence
  Description of Artificial Sequence: Synthetic oligonucleotide
  Sense strand starting at position 1001 of SEQ ID NO: 1887408
augacuuaucccugcacug

SEQ ID NO: 2470159 - RNA, 19 nt, Artificial Sequence
  Description of Artificial Sequence: Synthetic oligonucleotide
  Antisense strand to SEQ ID NO: 2470158
cagugcagggauaagucau

SEQ ID NO: 2470160 - RNA, 19 nt, Artificial Sequence
  Description of Artificial Sequence: Synthetic oligonucleotide
  Sense strand starting at position 1236 of SEQ ID NO: 1887408
gugcaaaucuucucuagga

SEQ ID NO: 2470161 - RNA, 19 nt, Artificial Sequence
  Description of Artificial Sequence: Synthetic oligonucleotide
  Antisense strand to SEQ ID NO: 2470160
uccuagagaagauuugcac

SEQ ID NO: 2470162 - RNA, 19 nt, Artificial Sequence
  Description of Artificial Sequence: Synthetic oligonucleotide
  Sense strand starting at position 1238 of SEQ ID NO: 1887408
gcaaaucuucucuaggauc

SEQ ID NO: 2470163 - RNA, 19 nt, Artificial Sequence
  Description of Artificial Sequence: Synthetic oligonucleotide
  Antisense strand to SEQ ID NO: 2470162
gauccuagagaagauuugc

SEQ ID NO: 2470164 - RNA, 19 nt, Artificial Sequence
  Description of Artificial Sequence: Synthetic oligonucleotide
  Sense strand starting at position 1887 of SEQ ID NO: 1887408
ccgggaugcccaggaaaga

SEQ ID NO: 2470165 - RNA, 19 nt, Artificial Sequence
  Description of Artificial Sequence: Synthetic oligonucleotide
  Antisense strand to SEQ ID NO: 2470164
ucuuuccugggcaucccgg

SEQ ID NO: 2470166 - RNA, 19 nt, Artificial Sequence
  Description of Artificial Sequence: Synthetic oligonucleotide
  Sense strand starting at position 2212 of SEQ ID NO: 1887408
cagaguaaguugccuuuga

SEQ ID NO: 2470167 - RNA, 19 nt, Artificial Sequence
  Description of Artificial Sequence: Synthetic oligonucleotide
  Antisense strand to SEQ ID NO: 2470166
ucaaaggcaacuuacucug

SEQ ID NO: 2470168 - RNA, 19 nt, Artificial Sequence
  Description of Artificial Sequence: Synthetic oligonucleotide
  Sense strand starting at position 2213 of SEQ ID NO: 1887408
agaguaaguugccuuugau

SEQ ID NO: 2470169 - RNA, 19 nt, Artificial Sequence
  Description of Artificial Sequence: Synthetic oligonucleotide
  Antisense strand to SEQ ID NO: 2470168
aucaaaggcaacuuacucu

SEQ ID NO: 2470170 - RNA, 19 nt, Artificial Sequence
  Description of Artificial Sequence: Synthetic oligonucleotide
  Sense strand starting at position 2216 of SEQ ID NO: 1887408
guaaguugccuuugauuga

SEQ ID NO: 2470171 - RNA, 19 nt, Artificial Sequence
  Description of Artificial Sequence: Synthetic oligonucleotide
  Antisense strand to SEQ ID NO: 2470170
ucaaucaaaggcaacuuac

SEQ ID NO: 2470172 - RNA, 19 nt, Artificial Sequence
  Description of Artificial Sequence: Synthetic oligonucleotide
  Sense strand starting at position 2219 of SEQ ID NO: 1887408
aguugccuuugauugaauu

SEQ ID NO: 2470173 - RNA, 19 nt, Artificial Sequence
  Description of Artificial Sequence: Synthetic oligonucleotide
  Antisense strand to SEQ ID NO: 2470172
aauucaaucaaaggcaacu

SEQ ID NO: 2470174 - RNA, 19 nt, Artificial Sequence
  Description of Artificial Sequence: Synthetic oligonucleotide
  Sense strand starting at position 2220 of SEQ ID NO: 1887408
guugccuuugauugaauuu

SEQ ID NO: 2470175 - RNA, 19 nt, Artificial Sequence
  Description of Artificial Sequence: Synthetic oligonucleotide
  Antisense strand to SEQ ID NO: 2470174
aaauucaaucaaaggcaac

SEQ ID NO: 2470176 - RNA, 19 nt, Artificial Sequence
  Description of Artificial Sequence: Synthetic oligonucleotide
  Sense strand starting at position 2435 of SEQ ID NO: 1887408
aguucaaguguuuaguagu

SEQ ID NO: 2470177 - RNA, 19 nt, Artificial Sequence
  Description of Artificial Sequence: Synthetic oligonucleotide
  Antisense strand to SEQ ID NO: 2470176
acuacuaaacacuugaacu

SEQ ID NO: 2470178 - RNA, 19 nt, Artificial Sequence
  Description of Artificial Sequence: Synthetic oligonucleotide
  Sense strand starting at position 2449 of SEQ ID NO: 1887408
guaguuugaguucagagag

SEQ ID NO: 2470179 - RNA, 19 nt, Artificial Sequence
  Description of Artificial Sequence: Synthetic oligonucleotide
  Antisense strand to SEQ ID NO: 2470178
cucucugaacucaaacuac

SEQ ID NO: 2470180 - RNA, 19 nt, Artificial Sequence
  Description of Artificial Sequence: Synthetic oligonucleotide
  Sense strand starting at position 2503 of SEQ ID NO: 1887408
guuccauauccacaacugu

SEQ ID NO: 2470181 - RNA, 19 nt, Artificial Sequence
  Description of Artificial Sequence: Synthetic oligonucleotide
  Antisense strand to SEQ ID NO: 2470180
acaguuguggauauggaac

SEQ ID NO: 2470182 - RNA, 19 nt, Artificial Sequence
  Description of Artificial Sequence: Synthetic oligonucleotide
  Sense strand starting at position 2943 of SEQ ID NO: 1887408
acuguauuaugucuuauga

SEQ ID NO: 2470183 - RNA, 19 nt, Artificial Sequence
  Description of Artificial Sequence: Synthetic oligonucleotide
  Antisense strand to SEQ ID NO: 2470182
ucauaagacauaauacagu

SEQ ID NO: 2470184 - RNA, 19 nt, Artificial Sequence
  Description of Artificial Sequence: Synthetic oligonucleotide
  Sense strand starting at position 2951 of SEQ ID NO: 1887408
augucuuaugaguaauaca

SEQ ID NO: 2470185 - RNA, 19 nt, Artificial Sequence
  Description of Artificial Sequence: Synthetic oligonucleotide
  Antisense strand to SEQ ID NO: 2470184
uguauuacucauaagacau

SEQ ID NO: 2470186 - RNA, 19 nt, Artificial Sequence
  Description of Artificial Sequence: Synthetic oligonucleotide
  Sense strand starting at position 3032 of SEQ ID NO: 1887408
auauaagagccuugagcau

SEQ ID NO: 2470187 - RNA, 19 nt, Artificial Sequence
  Description of Artificial Sequence: Synthetic oligonucleotide
  Antisense strand to SEQ ID NO: 2470186
augcucaaggcucuuauau

SEQ ID NO: 2470188 - RNA, 19 nt, Artificial Sequence
  Description of Artificial Sequence: Synthetic oligonucleotide
  Sense strand starting at position 3083 of SEQ ID NO: 1887408
aucaauucccuguggauau

SEQ ID NO: 2470189 - RNA, 19 nt, Artificial Sequence
  Description of Artificial Sequence: Synthetic oligonucleotide
  Antisense strand to SEQ ID NO: 2470188
auauccacagggaauugau

SEQ ID NO: 2470190 - RNA, 19 nt, Artificial Sequence
  Description of Artificial Sequence: Synthetic oligonucleotide
  Sense strand starting at position 3117 of SEQ ID NO: 1887408
uaggauucuuuggucauua

SEQ ID NO: 2470191 - RNA, 19 nt, Artificial Sequence
  Description of Artificial Sequence: Synthetic oligonucleotide
  Antisense strand to SEQ ID NO: 2470190
uaaugaccaaagaauccua

SEQ ID NO: 2470192 - RNA, 19 nt, Artificial Sequence
  Description of Artificial Sequence: Synthetic oligonucleotide
  Sense strand starting at position 3118 of SEQ ID NO: 1887408
aggauucuuuggucauuau

SEQ ID NO: 2470193 - RNA, 19 nt, Artificial Sequence
  Description of Artificial Sequence: Synthetic oligonucleotide
  Antisense strand to SEQ ID NO: 2470192
auaaugaccaaagaauccu

SEQ ID NO: 2470194 - RNA, 19 nt, Artificial Sequence
  Description of Artificial Sequence: Synthetic oligonucleotide
  Sense strand starting at position 3119 of SEQ ID NO: 1887408
ggauucuuuggucauuauu

SEQ ID NO: 2470195 - RNA, 19 nt, Artificial Sequence
  Description of Artificial Sequence: Synthetic oligonucleotide
  Antisense strand to SEQ ID NO: 2470194
aauaaugaccaaagaaucc

SEQ ID NO: 2470196 - RNA, 19 nt, Artificial Sequence
  Description of Artificial Sequence: Synthetic oligonucleotide
  Sense strand starting at position 3122 of SEQ ID NO: 1887408
uucuuuggucauuauuaag

SEQ ID NO: 2470197 - RNA, 19 nt, Artificial Sequence
  Description of Artificial Sequence: Synthetic oligonucleotide
  Antisense strand to SEQ ID NO: 2470196
cuuaauaaugaccaaagaa

SEQ ID NO: 2470198 - RNA, 19 nt, Artificial Sequence
  Description of Artificial Sequence: Synthetic oligonucleotide
  Sense strand starting at position 3166 of SEQ ID NO: 1887408
uuguaaugauaggucaaag

SEQ ID NO: 2470199 - RNA, 19 nt, Artificial Sequence
  Description of Artificial Sequence: Synthetic oligonucleotide
  Antisense strand to SEQ ID NO: 2470198
cuuugaccuaucauuacaa

SEQ ID NO: 2470200 - RNA, 19 nt, Artificial Sequence
  Description of Artificial Sequence: Synthetic oligonucleotide
  Sense strand starting at position 3236 of SEQ ID NO: 1887408
aguauugcugcuuauauua

SEQ ID NO: 2470201 - RNA, 19 nt, Artificial Sequence
  Description of Artificial Sequence: Synthetic oligonucleotide
  Antisense strand to SEQ ID NO: 2470200
uaauauaagcagcaauacu

SEQ ID NO: 2470202 - RNA, 19 nt, Artificial Sequence
  Description of Artificial Sequence: Synthetic oligonucleotide
  Sense strand starting at position 3308 of SEQ ID NO: 1887408
uaccgacuaguaggagaaa

SEQ ID NO: 2470203 - RNA, 19 nt, Artificial Sequence
  Description of Artificial Sequence: Synthetic oligonucleotide
  Antisense strand to SEQ ID NO: 2470202
uuucuccuacuagucggua

SEQ ID NO: 2470204 - RNA, 19 nt, Artificial Sequence
  Description of Artificial Sequence: Synthetic oligonucleotide
  Sense strand starting at position 3435 of SEQ ID NO: 1887408
auuuguggagcugguuaua

SEQ ID NO: 2470205 - RNA, 19 nt, Artificial Sequence
  Description of Artificial Sequence: Synthetic oligonucleotide
  Antisense strand to SEQ ID NO: 2470204
uauaaccagcuccacaaau

SEQ ID NO: 2470206 - RNA, 19 nt, Artificial Sequence
  Description of Artificial Sequence: Synthetic oligonucleotide
  Sense strand starting at position 3438 of SEQ ID NO: 1887408
uguggagcugguuauaguu

SEQ ID NO: 2470207 - RNA, 19 nt, Artificial Sequence
  Description of Artificial Sequence: Synthetic oligonucleotide
  Antisense strand to SEQ ID NO: 2470206
aacuauaaccagcuccaca

SEQ ID NO: 2470208 - RNA, 19 nt, Artificial Sequence
  Description of Artificial Sequence: Synthetic oligonucleotide
  Sense strand starting at position 3444 of SEQ ID NO: 1887408
gcugguuauaguuagaaug

SEQ ID NO: 2470209 - RNA, 19 nt, Artificial Sequence
  Description of Artificial Sequence: Synthetic oligonucleotide
  Antisense strand to SEQ ID NO: 2470208
cauucuaacuauaaccagc

SEQ ID NO: 2470210 - RNA, 19 nt, Artificial Sequence
  Description of Artificial Sequence: Synthetic oligonucleotide
  Sense strand starting at position 3548 of SEQ ID NO: 1887408
uuaucagcuuaagugaaau

SEQ ID NO: 2470211 - RNA, 19 nt, Artificial Sequence
  Description of Artificial Sequence: Synthetic oligonucleotide
  Antisense strand to SEQ ID NO: 2470210
auuucacuuaagcugauaa

SEQ ID NO: 2470212 - RNA, 19 nt, Artificial Sequence
  Description of Artificial Sequence: Synthetic oligonucleotide
  Sense strand starting at position 3621 of SEQ ID NO: 1887408
uuagauugaugagagauuu

SEQ ID NO: 2470213 - RNA, 19 nt, Artificial Sequence
  Description of Artificial Sequence: Synthetic oligonucleotide
  Antisense strand to SEQ ID NO: 2470212
aaaucucucaucaaucuaa

SEQ ID NO: 2470214 - RNA, 19 nt, Artificial Sequence
  Description of Artificial Sequence: Synthetic oligonucleotide
  Sense strand starting at position 18 of SEQ ID NO: 1887409
agaggaaaguccucuccca

SEQ ID NO: 2470215 - RNA, 19 nt, Artificial Sequence
  Description of Artificial Sequence: Synthetic oligonucleotide
  Antisense strand to SEQ ID NO: 2470214
ugggagaggacuuuccucu

SEQ ID NO: 2470216 - RNA, 19 nt, Artificial Sequence
  Description of Artificial Sequence: Synthetic oligonucleotide
  Sense strand starting at position 412 of SEQ ID NO: 1887409
cauuaagauguagguuuga

SEQ ID NO: 2470217 - RNA, 19 nt, Artificial Sequence
  Description of Artificial Sequence: Synthetic oligonucleotide
  Antisense strand to SEQ ID NO: 2470216
ucaaaccuacaucuuaaug

SEQ ID NO: 2470218 - RNA, 19 nt, Artificial Sequence
  Description of Artificial Sequence: Synthetic oligonucleotide
  Sense strand starting at position 526 of SEQ ID NO: 1887409
aaagaaacugcgugacaga

SEQ ID NO: 2470219 - RNA, 19 nt, Artificial Sequence
  Description of Artificial Sequence: Synthetic oligonucleotide
  Antisense strand to SEQ ID NO: 2470218
ucugucacgcaguuucuuu

SEQ ID NO: 2470220 - RNA, 19 nt, Artificial Sequence
  Description of Artificial Sequence: Synthetic oligonucleotide
  Sense strand starting at position 542 of SEQ ID NO: 1887409
agaggagaucauuguucuc

SEQ ID NO: 2470221 - RNA, 19 nt, Artificial Sequence
  Description of Artificial Sequence: Synthetic oligonucleotide
  Antisense strand to SEQ ID NO: 2470220
gagaacaaugaucuccucu

SEQ ID NO: 2470222 - RNA, 19 nt, Artificial Sequence
  Description of Artificial Sequence: Synthetic oligonucleotide
  Sense strand starting at position 582 of SEQ ID NO: 1887409
aggcccuugaagugaaaua

SEQ ID NO: 2470223 - RNA, 19 nt, Artificial Sequence
  Description of Artificial Sequence: Synthetic oligonucleotide
  Antisense strand to SEQ ID NO: 2470222
uauuucacuucaagggccu

SEQ ID NO: 2470224 - RNA, 19 nt, Artificial Sequence
  Description of Artificial Sequence: Synthetic oligonucleotide
  Sense strand starting at position 752 of SEQ ID NO: 1887409
agagguauucugugaaauu

SEQ ID NO: 2470225 - RNA, 19 nt, Artificial Sequence
  Description of Artificial Sequence: Synthetic oligonucleotide
  Antisense strand to SEQ ID NO: 2470224
aauuucacagaauaccucu

SEQ ID NO: 2470226 - RNA, 19 nt, Artificial Sequence
  Description of Artificial Sequence: Synthetic oligonucleotide
  Sense strand starting at position 832 of SEQ ID NO: 1887409
gcuugaauaccagacaugu

SEQ ID NO: 2470227 - RNA, 19 nt, Artificial Sequence
  Description of Artificial Sequence: Synthetic oligonucleotide
  Antisense strand to SEQ ID NO: 2470226
acaugucugguauucaagc

SEQ ID NO: 2470228 - RNA, 19 nt, Artificial Sequence
  Description of Artificial Sequence: Synthetic oligonucleotide
  Sense strand starting at position 915 of SEQ ID NO: 1887409
cuaauauggucuuuagacc

SEQ ID NO: 2470229 - RNA, 19 nt, Artificial Sequence
  Description of Artificial Sequence: Synthetic oligonucleotide
  Antisense strand to SEQ ID NO: 2470228
ggucuaaagaccauauuag

SEQ ID NO: 2470230 - RNA, 19 nt, Artificial Sequence
  Description of Artificial Sequence: Synthetic oligonucleotide
  Sense strand starting at position 958 of SEQ ID NO: 1887409
acaagucuucuguaauauu

SEQ ID NO: 2470231 - RNA, 19 nt, Artificial Sequence
  Description of Artificial Sequence: Synthetic oligonucleotide
  Antisense strand to SEQ ID NO: 2470230
aauauuacagaagacuugu

SEQ ID NO: 2470232 - RNA, 19 nt, Artificial Sequence
  Description of Artificial Sequence: Synthetic oligonucleotide
  Sense strand starting at position 1064 of SEQ ID NO: 1887409
ggcuucuuugcuuugugua

SEQ ID NO: 2470233 - RNA, 19 nt, Artificial Sequence
  Description of Artificial Sequence: Synthetic oligonucleotide
  Antisense strand to SEQ ID NO: 2470232
uacacaaagcaaagaagcc

SEQ ID NO: 2470234 - RNA, 19 nt, Artificial Sequence
  Description of Artificial Sequence: Synthetic oligonucleotide
  Sense strand starting at position 1096 of SEQ ID NO: 1887409
uuggaauaacucugguuga

SEQ ID NO: 2470235 - RNA, 19 nt, Artificial Sequence
  Description of Artificial Sequence: Synthetic oligonucleotide
  Antisense strand to SEQ ID NO: 2470234
ucaaccagaguuauuccaa

SEQ ID NO: 2470236 - RNA, 19 nt, Artificial Sequence
  Description of Artificial Sequence: Synthetic oligonucleotide
  Sense strand starting at position 1099 of SEQ ID NO: 1887409
gaauaacucugguugaagu

SEQ ID NO: 2470237 - RNA, 19 nt, Artificial Sequence
  Description of Artificial Sequence: Synthetic oligonucleotide
  Antisense strand to SEQ ID NO: 2470236
acuucaaccagaguuauuc

SEQ ID NO: 2470238 - RNA, 19 nt, Artificial Sequence
  Description of Artificial Sequence: Synthetic oligonucleotide
  Sense strand starting at position 1106 of SEQ ID NO: 1887409
ucugguugaagugauauag

SEQ ID NO: 2470239 - RNA, 19 nt, Artificial Sequence
  Description of Artificial Sequence: Synthetic oligonucleotide
  Antisense strand to SEQ ID NO: 2470238
cuauaucacuucaaccaga

SEQ ID NO: 2470240 - RNA, 19 nt, Artificial Sequence
  Description of Artificial Sequence: Synthetic oligonucleotide
  Sense strand starting at position 1110 of SEQ ID NO: 1887409
guugaagugauauagcuug

SEQ ID NO: 2470241 - RNA, 19 nt, Artificial Sequence
  Description of Artificial Sequence: Synthetic oligonucleotide
  Antisense strand to SEQ ID NO: 2470240
caagcuauaucacuucaac

SEQ ID NO: 2470242 - RNA, 19 nt, Artificial Sequence
  Description of Artificial Sequence: Synthetic oligonucleotide
  Sense strand starting at position 1147 of SEQ ID NO: 1887409
gagaguauauaccuaugau

SEQ ID NO: 2470243 - RNA, 19 nt, Artificial Sequence
  Description of Artificial Sequence: Synthetic oligonucleotide
  Antisense strand to SEQ ID NO: 2470242
aucauagguauauacucuc

SEQ ID NO: 2470244 - RNA, 19 nt, Artificial Sequence
  Description of Artificial Sequence: Synthetic oligonucleotide
  Sense strand starting at position 1150 of SEQ ID NO: 1887409
aguauauaccuaugauuag

SEQ ID NO: 2470245 - RNA, 19 nt, Artificial Sequence
  Description of Artificial Sequence: Synthetic oligonucleotide
  Antisense strand to SEQ ID NO: 2470244
cuaaucauagguauauacu

SEQ ID NO: 2470246 - RNA, 19 nt, Artificial Sequence
  Description of Artificial Sequence: Synthetic oligonucleotide
  Sense strand starting at position 1476 of SEQ ID NO: 1887409
uuauuugaauuccaaagag

SEQ ID NO: 2470247 - RNA, 19 nt, Artificial Sequence
  Description of Artificial Sequence: Synthetic oligonucleotide
  Antisense strand to SEQ ID NO: 2470246
cucuuuggaauucaaauaa

SEQ ID NO: 2470248 - RNA, 19 nt, Artificial Sequence
  Description of Artificial Sequence: Synthetic oligonucleotide
  Sense strand starting at position 1590 of SEQ ID NO: 1887409
uucuccugagaagguuaua

SEQ ID NO: 2470249 - RNA, 19 nt, Artificial Sequence
  Description of Artificial Sequence: Synthetic oligonucleotide
  Antisense strand to SEQ ID NO: 2470248
uauaaccuucucaggagaa

SEQ ID NO: 2470250 - RNA, 19 nt, Artificial Sequence
  Description of Artificial Sequence: Synthetic oligonucleotide
  Sense strand starting at position 1628 of SEQ ID NO: 1887409
gaguuauugggccaucauu

SEQ ID NO: 2470251 - RNA, 19 nt, Artificial Sequence
  Description of Artificial Sequence: Synthetic oligonucleotide
  Antisense strand to SEQ ID NO: 2470250
aaugauggcccaauaacuc

SEQ ID NO: 2470252 - RNA, 19 nt, Artificial Sequence
  Description of Artificial Sequence: Synthetic oligonucleotide
  Sense strand starting at position 1942 of SEQ ID NO: 1887409
gaaucaguuguagacucua

SEQ ID NO: 2470253 - RNA, 19 nt, Artificial Sequence
  Description of Artificial Sequence: Synthetic oligonucleotide
  Antisense strand to SEQ ID NO: 2470252
uagagucuacaacugauuc

SEQ ID NO: 2470254 - RNA, 19 nt, Artificial Sequence
  Description of Artificial Sequence: Synthetic oligonucleotide
  Sense strand starting at position 1963 of SEQ ID NO: 1887409
uuggauggcccuuaagcaa

SEQ ID NO: 2470255 - RNA, 19 nt, Artificial Sequence
  Description of Artificial Sequence: Synthetic oligonucleotide
  Antisense strand to SEQ ID NO: 2470254
uugcuuaagggccauccaa

SEQ ID NO: 2470256 - RNA, 19 nt, Artificial Sequence
  Description of Artificial Sequence: Synthetic oligonucleotide
  Sense strand starting at position 1970 of SEQ ID NO: 1887409
gcccuuaagcaagacauca

SEQ ID NO: 2470257 - RNA, 19 nt, Artificial Sequence
  Description of Artificial Sequence: Synthetic oligonucleotide
  Antisense strand to SEQ ID NO: 2470256
ugaugucuugcuuaagggc

SEQ ID NO: 2470258 - RNA, 19 nt, Artificial Sequence
  Description of Artificial Sequence: Synthetic oligonucleotide
  Sense strand starting at position 2021 of SEQ ID NO: 1887409
ggguggucaguugaggaau

SEQ ID NO: 2470259 - RNA, 19 nt, Artificial Sequence
  Description of Artificial Sequence: Synthetic oligonucleotide
  Antisense strand to SEQ ID NO: 2470258
auuccucaacugaccaccc

SEQ ID NO: 2470260 - RNA, 19 nt, Artificial Sequence
  Description of Artificial Sequence: Synthetic oligonucleotide
  Sense strand starting at position 2045 of SEQ ID NO: 1887409
ccagcaaucuaucuuagga

SEQ ID NO: 2470261 - RNA, 19 nt, Artificial Sequence
  Description of Artificial Sequence: Synthetic oligonucleotide
  Antisense strand to SEQ ID NO: 2470260
uccuaagauagauugcugg

SEQ ID NO: 2470262 - RNA, 19 nt, Artificial Sequence
  Description of Artificial Sequence: Synthetic oligonucleotide
  Sense strand starting at position 2069 of SEQ ID NO: 1887409
aacagaaacugguuuaguu

SEQ ID NO: 2470263 - RNA, 19 nt, Artificial Sequence
  Description of Artificial Sequence: Synthetic oligonucleotide
  Antisense strand to SEQ ID NO: 2470262
aacuaaaccaguuucuguu

SEQ ID NO: 2470264 - RNA, 19 nt, Artificial Sequence
  Description of Artificial Sequence: Synthetic oligonucleotide
  Sense strand starting at position 2203 of SEQ ID NO: 1887409
ucaguuagccaagagaagu

SEQ ID NO: 2470265 - RNA, 19 nt, Artificial Sequence
  Description of Artificial Sequence: Synthetic oligonucleotide
  Antisense strand to SEQ ID NO: 2470264
acuucucuuggcuaacuga

SEQ ID NO: 2470266 - RNA, 19 nt, Artificial Sequence
  Description of Artificial Sequence: Synthetic oligonucleotide
  Sense strand starting at position 2389 of SEQ ID NO: 1887409
cucaaaguagucugaggaa

SEQ ID NO: 2470267 - RNA, 19 nt, Artificial Sequence
  Description of Artificial Sequence: Synthetic oligonucleotide
  Antisense strand to SEQ ID NO: 2470266
uuccucagacuacuuugag

SEQ ID NO: 2470268 - RNA, 19 nt, Artificial Sequence
  Description of Artificial Sequence: Synthetic oligonucleotide
  Sense strand starting at position 2405 of SEQ ID NO: 1887409
gaaugugagguauguaaca

SEQ ID NO: 2470269 - RNA, 19 nt, Artificial Sequence
  Description of Artificial Sequence: Synthetic oligonucleotide
  Antisense strand to SEQ ID NO: 2470268
uguuacauaccucacauuc

SEQ ID NO: 2470270 - RNA, 19 nt, Artificial Sequence
  Description of Artificial Sequence: Synthetic oligonucleotide
  Sense strand starting at position 2407 of SEQ ID NO: 1887409
augugagguauguaacauu

SEQ ID NO: 2470271 - RNA, 19 nt, Artificial Sequence
  Description of Artificial Sequence: Synthetic oligonucleotide
  Antisense strand to SEQ ID NO: 2470270
aauguuacauaccucacau

SEQ ID NO: 2470272 - RNA, 19 nt, Artificial Sequence
  Description of Artificial Sequence: Synthetic oligonucleotide
  Sense strand starting at position 2439 of SEQ ID NO: 1887409
gaaccaugagcaugagacu

SEQ ID NO: 2470273 - RNA, 19 nt, Artificial Sequence
  Description of Artificial Sequence: Synthetic oligonucleotide
  Antisense strand to SEQ ID NO: 2470272
agucucaugcucaugguuc

SEQ ID NO: 2470274 - RNA, 19 nt, Artificial Sequence
  Description of Artificial Sequence: Synthetic oligonucleotide
  Sense strand starting at position 2492 of SEQ ID NO: 1887409
gaggguaauuguuuaaagg

SEQ ID NO: 2470275 - RNA, 19 nt, Artificial Sequence
  Description of Artificial Sequence: Synthetic oligonucleotide
  Antisense strand to SEQ ID NO: 2470274
ccuuuaaacaauuacccuc

SEQ ID NO: 2470276 - RNA, 19 nt, Artificial Sequence
  Description of Artificial Sequence: Synthetic oligonucleotide
  Sense strand starting at position 2525 of SEQ ID NO: 1887409
cuuuccuuccguguaguuu

SEQ ID NO: 2470277 - RNA, 19 nt, Artificial Sequence
  Description of Artificial Sequence: Synthetic oligonucleotide
  Antisense strand to SEQ ID NO: 2470276
aaacuacacggaaggaaag

SEQ ID NO: 2470278 - RNA, 19 nt, Artificial Sequence
  Description of Artificial Sequence: Synthetic oligonucleotide
  Sense strand starting at position 3434 of SEQ ID NO: 1887409
cuaggcuuacuaugacuga

SEQ ID NO: 2470279 - RNA, 19 nt, Artificial Sequence
  Description of Artificial Sequence: Synthetic oligonucleotide
  Antisense strand to SEQ ID NO: 2470278
ucagucauaguaagccuag

SEQ ID NO: 2470280 - RNA, 19 nt, Artificial Sequence
  Description of Artificial Sequence: Synthetic oligonucleotide
  Sense strand starting at position 3437 of SEQ ID NO: 1887409
ggcuuacuaugacugauca

SEQ ID NO: 2470281 - RNA, 19 nt, Artificial Sequence
  Description of Artificial Sequence: Synthetic oligonucleotide
  Antisense strand to SEQ ID NO: 2470280
ugaucagucauaguaagcc

SEQ ID NO: 2470282 - RNA, 19 nt, Artificial Sequence
  Description of Artificial Sequence: Synthetic oligonucleotide
  Sense strand starting at position 3438 of SEQ ID NO: 1887409
gcuuacuaugacugaucaa

SEQ ID NO: 2470283 - RNA, 19 nt, Artificial Sequence
  Description of Artificial Sequence: Synthetic oligonucleotide
  Antisense strand to SEQ ID NO: 2470282
uugaucagucauaguaagc

SEQ ID NO: 2470284 - RNA, 19 nt, Artificial Sequence
  Description of Artificial Sequence: Synthetic oligonucleotide
  Sense strand starting at position 3478 of SEQ ID NO: 1887409
ucauaagauuuagaugggu

SEQ ID NO: 2470285 - RNA, 19 nt, Artificial Sequence
  Description of Artificial Sequence: Synthetic oligonucleotide
  Antisense strand to SEQ ID NO: 2470284
acccaucuaaaucuuauga

SEQ ID NO: 2470286 - RNA, 19 nt, Artificial Sequence
  Description of Artificial Sequence: Synthetic oligonucleotide
  Sense strand starting at position 3654 of SEQ ID NO: 1887409
gguguuaggaaguagaauu

SEQ ID NO: 2470287 - RNA, 19 nt, Artificial Sequence
  Description of Artificial Sequence: Synthetic oligonucleotide
  Antisense strand to SEQ ID NO: 2470286
aauucuacuuccuaacacc

SEQ ID NO: 2470288 - RNA, 19 nt, Artificial Sequence
  Description of Artificial Sequence: Synthetic oligonucleotide
  Sense strand starting at position 3693 of SEQ ID NO: 1887409
aggucaauaugaccuauua

SEQ ID NO: 2470289 - RNA, 19 nt, Artificial Sequence
  Description of Artificial Sequence: Synthetic oligonucleotide
  Antisense strand to SEQ ID NO: 2470288
uaauaggucauauugaccu

SEQ ID NO: 2470290 - RNA, 19 nt, Artificial Sequence
  Description of Artificial Sequence: Synthetic oligonucleotide
  Sense strand starting at position 3839 of SEQ ID NO: 1887409
guacuugaaucccugauag

SEQ ID NO: 2470291 - RNA, 19 nt, Artificial Sequence
  Description of Artificial Sequence: Synthetic oligonucleotide
  Antisense strand to SEQ ID NO: 2470290
cuaucagggauucaaguac

SEQ ID NO: 2470292 - RNA, 19 nt, Artificial Sequence
  Description of Artificial Sequence: Synthetic oligonucleotide
  Sense strand starting at position 3968 of SEQ ID NO: 1887409
acaacaauucuagggugua

SEQ ID NO: 2470293 - RNA, 19 nt, Artificial Sequence
  Description of Artificial Sequence: Synthetic oligonucleotide
  Antisense strand to SEQ ID NO: 2470292
uacacccuagaauuguugu

SEQ ID NO: 2470294 - RNA, 19 nt, Artificial Sequence
  Description of Artificial Sequence: Synthetic oligonucleotide
  Sense strand starting at position 278 of SEQ ID NO: 1887410
gguggaacuugacacauuu

SEQ ID NO: 2470295 - RNA, 19 nt, Artificial Sequence
  Description of Artificial Sequence: Synthetic oligonucleotide
  Antisense strand to SEQ ID NO: 2470294
aaaugugucaaguuccacc

SEQ ID NO: 2470296 - RNA, 19 nt, Artificial Sequence
  Description of Artificial Sequence: Synthetic oligonucleotide
  Sense strand starting at position 524 of SEQ ID NO: 1887410
cugucauaccuuuauggac

SEQ ID NO: 2470297 - RNA, 19 nt, Artificial Sequence
  Description of Artificial Sequence: Synthetic oligonucleotide
  Antisense strand to SEQ ID NO: 2470296
guccauaaagguaugacag

SEQ ID NO: 2470298 - RNA, 19 nt, Artificial Sequence
  Description of Artificial Sequence: Synthetic oligonucleotide
  Sense strand starting at position 933 of SEQ ID NO: 1887410
cucgcaucucugggaucaa

SEQ ID NO: 2470299 - RNA, 19 nt, Artificial Sequence
  Description of Artificial Sequence: Synthetic oligonucleotide
  Antisense strand to SEQ ID NO: 2470298
uugaucccagagaugcgag

SEQ ID NO: 2470300 - RNA, 19 nt, Artificial Sequence
  Description of Artificial Sequence: Synthetic oligonucleotide
  Sense strand starting at position 1155 of SEQ ID NO: 1887410
gcgacuugcauuugaaauu

SEQ ID NO: 2470301 - RNA, 19 nt, Artificial Sequence
  Description of Artificial Sequence: Synthetic oligonucleotide
  Antisense strand to SEQ ID NO: 2470300
aauuucaaaugcaagucgc

SEQ ID NO: 2470302 - RNA, 19 nt, Artificial Sequence
  Description of Artificial Sequence: Synthetic oligonucleotide
  Sense strand starting at position 1156 of SEQ ID NO: 1887410
cgacuugcauuugaaauuu

SEQ ID NO: 2470303 - RNA, 19 nt, Artificial Sequence
  Description of Artificial Sequence: Synthetic oligonucleotide
  Antisense strand to SEQ ID NO: 2470302
aaauuucaaaugcaagucg

SEQ ID NO: 2470304 - RNA, 19 nt, Artificial Sequence
  Description of Artificial Sequence: Synthetic oligonucleotide
  Sense strand starting at position 1256 of SEQ ID NO: 1887410
aguaauacaugggccuuaa

SEQ ID NO: 2470305 - RNA, 19 nt, Artificial Sequence
  Description of Artificial Sequence: Synthetic oligonucleotide
  Antisense strand to SEQ ID NO: 2470304
uuaaggcccauguauuacu

SEQ ID NO: 2470306 - RNA, 19 nt, Artificial Sequence
  Description of Artificial Sequence: Synthetic oligonucleotide
  Sense strand starting at position 1267 of SEQ ID NO: 1887410
ggccuuaagucaccgagau

SEQ ID NO: 2470307 - RNA, 19 nt, Artificial Sequence
  Description of Artificial Sequence: Synthetic oligonucleotide
  Antisense strand to SEQ ID NO: 2470306
aucucggugacuuaaggcc

SEQ ID NO: 2470308 - RNA, 19 nt, Artificial Sequence
  Description of Artificial Sequence: Synthetic oligonucleotide
  Sense strand starting at position 1292 of SEQ ID NO: 1887410
gcaaauaauuugcagaaug

SEQ ID NO: 2470309 - RNA, 19 nt, Artificial Sequence
  Description of Artificial Sequence: Synthetic oligonucleotide
  Antisense strand to SEQ ID NO: 2470308
cauucugcaaauuauuugc

SEQ ID NO: 2470310 - RNA, 19 nt, Artificial Sequence
  Description of Artificial Sequence: Synthetic oligonucleotide
  Sense strand starting at position 1863 of SEQ ID NO: 1887410
cugagugucgcguuacaga

SEQ ID NO: 2470311 - RNA, 19 nt, Artificial Sequence
  Description of Artificial Sequence: Synthetic oligonucleotide
  Antisense strand to SEQ ID NO: 2470310
ucuguaacgcgacacucag

SEQ ID NO: 2470312 - RNA, 19 nt, Artificial Sequence
  Description of Artificial Sequence: Synthetic oligonucleotide
  Sense strand starting at position 1974 of SEQ ID NO: 1887410
gucguuagggcccaggaaa

SEQ ID NO: 2470313 - RNA, 19 nt, Artificial Sequence
  Description of Artificial Sequence: Synthetic oligonucleotide
  Antisense strand to SEQ ID NO: 2470312
uuuccugggcccuaacgac

SEQ ID NO: 2470314 - RNA, 19 nt, Artificial Sequence
  Description of Artificial Sequence: Synthetic oligonucleotide
  Sense strand starting at position 2338 of SEQ ID NO: 1887410
gaaagugcccuccagagau

SEQ ID NO: 2470315 - RNA, 19 nt, Artificial Sequence
  Description of Artificial Sequence: Synthetic oligonucleotide
  Antisense strand to SEQ ID NO: 2470314
aucucuggagggcacuuuc

SEQ ID NO: 2470316 - RNA, 19 nt, Artificial Sequence
  Description of Artificial Sequence: Synthetic oligonucleotide
  Sense strand starting at position 2361 of SEQ ID NO: 1887410
uuaggaagugugugaugaa

SEQ ID NO: 2470317 - RNA, 19 nt, Artificial Sequence
  Description of Artificial Sequence: Synthetic oligonucleotide
  Antisense strand to SEQ ID NO: 2470316
uucaucacacacuuccuaa

SEQ ID NO: 2470318 - RNA, 19 nt, Artificial Sequence
  Description of Artificial Sequence: Synthetic oligonucleotide
  Sense strand starting at position 2563 of SEQ ID NO: 1887410
aaguaaacaugcucagagu

SEQ ID NO: 2470319 - RNA, 19 nt, Artificial Sequence
  Description of Artificial Sequence: Synthetic oligonucleotide
  Antisense strand to SEQ ID NO: 2470318
acucugagcauguuuacuu

SEQ ID NO: 2470320 - RNA, 19 nt, Artificial Sequence
  Description of Artificial Sequence: Synthetic oligonucleotide
  Sense strand starting at position 2564 of SEQ ID NO: 1887410
aguaaacaugcucagagua

SEQ ID NO: 2470321 - RNA, 19 nt, Artificial Sequence
  Description of Artificial Sequence: Synthetic oligonucleotide
  Antisense strand to SEQ ID NO: 2470320
uacucugagcauguuuacu

SEQ ID NO: 2470322 - RNA, 19 nt, Artificial Sequence
  Description of Artificial Sequence: Synthetic oligonucleotide
  Sense strand starting at position 2569 of SEQ ID NO: 1887410
acaugcucagaguaauaau

SEQ ID NO: 2470323 - RNA, 19 nt, Artificial Sequence
  Description of Artificial Sequence: Synthetic oligonucleotide
  Antisense strand to SEQ ID NO: 2470322
auuauuacucugagcaugu

SEQ ID NO: 2470324 - RNA, 19 nt, Artificial Sequence
  Description of Artificial Sequence: Synthetic oligonucleotide
  Sense strand starting at position 2630 of SEQ ID NO: 1887410
caaaucuaugagugugguu

SEQ ID NO: 2470325 - RNA, 19 nt, Artificial Sequence
  Description of Artificial Sequence: Synthetic oligonucleotide
  Antisense strand to SEQ ID NO: 2470324
aaccacacucauagauuug

SEQ ID NO: 2470326 - RNA, 19 nt, Artificial Sequence
  Description of Artificial Sequence: Synthetic oligonucleotide
  Sense strand starting at position 2632 of SEQ ID NO: 1887410
aaucuaugagugugguuaa

SEQ ID NO: 2470327 - RNA, 19 nt, Artificial Sequence
  Description of Artificial Sequence: Synthetic oligonucleotide
  Antisense strand to SEQ ID NO: 2470326
uuaaccacacucauagauu

SEQ ID NO: 2470328 - RNA, 19 nt, Artificial Sequence
  Description of Artificial Sequence: Synthetic oligonucleotide
  Sense strand starting at position 2635 of SEQ ID NO: 1887410
cuaugagugugguuaauac

SEQ ID NO: 2470329 - RNA, 19 nt, Artificial Sequence
  Description of Artificial Sequence: Synthetic oligonucleotide
  Antisense strand to SEQ ID NO: 2470328
guauuaaccacacucauag

SEQ ID NO: 2470330 - RNA, 19 nt, Artificial Sequence
  Description of Artificial Sequence: Synthetic oligonucleotide
  Sense strand starting at position 2643 of SEQ ID NO: 1887410
gugguuaauacacggagau

SEQ ID NO: 2470331 - RNA, 19 nt, Artificial Sequence
  Description of Artificial Sequence: Synthetic oligonucleotide
  Antisense strand to SEQ ID NO: 2470330
aucuccguguauuaaccac

SEQ ID NO: 2470332 - RNA, 19 nt, Artificial Sequence
  Description of Artificial Sequence: Synthetic oligonucleotide
  Sense strand starting at position 2644 of SEQ ID NO: 1887410
ugguuaauacacggagaug

SEQ ID NO: 2470333 - RNA, 19 nt, Artificial Sequence
  Description of Artificial Sequence: Synthetic oligonucleotide
  Antisense strand to SEQ ID NO: 2470332
caucuccguguauuaacca

SEQ ID NO: 2470334 - RNA, 19 nt, Artificial Sequence
  Description of Artificial Sequence: Synthetic oligonucleotide
  Sense strand starting at position 2645 of SEQ ID NO: 1887410
gguuaauacacggagaugu

SEQ ID NO: 2470335 - RNA, 19 nt, Artificial Sequence
  Description of Artificial Sequence: Synthetic oligonucleotide
  Antisense strand to SEQ ID NO: 2470334
acaucuccguguauuaacc

SEQ ID NO: 2470336 - RNA, 19 nt, Artificial Sequence
  Description of Artificial Sequence: Synthetic oligonucleotide
  Sense strand starting at position 2656 of SEQ ID NO: 1887410
ggagaugugguuugaggaa

SEQ ID NO: 2470337 - RNA, 19 nt, Artificial Sequence
  Description of Artificial Sequence: Synthetic oligonucleotide
  Antisense strand to SEQ ID NO: 2470336
uuccucaaaccacaucucc

SEQ ID NO: 2470338 - RNA, 19 nt, Artificial Sequence
  Description of Artificial Sequence: Synthetic oligonucleotide
  Sense strand starting at position 2701 of SEQ ID NO: 1887410
ccugguauacaauaaguau

SEQ ID NO: 2470339 - RNA, 19 nt, Artificial Sequence
  Description of Artificial Sequence: Synthetic oligonucleotide
  Antisense strand to SEQ ID NO: 2470338
auacuuauuguauaccagg

SEQ ID NO: 2470340 - RNA, 19 nt, Artificial Sequence
  Description of Artificial Sequence: Synthetic oligonucleotide
  Sense strand starting at position 2709 of SEQ ID NO: 1887410
acaauaaguaugcgguaaa

SEQ ID NO: 2470341 - RNA, 19 nt, Artificial Sequence
  Description of Artificial Sequence: Synthetic oligonucleotide
  Antisense strand to SEQ ID NO: 2470340
uuuaccgcauacuuauugu

SEQ ID NO: 2470342 - RNA, 19 nt, Artificial Sequence
  Description of Artificial Sequence: Synthetic oligonucleotide
  Sense strand starting at position 2720 of SEQ ID NO: 1887410
gcgguaaaugguuauuauu

SEQ ID NO: 2470343 - RNA, 19 nt, Artificial Sequence
  Description of Artificial Sequence: Synthetic oligonucleotide
  Antisense strand to SEQ ID NO: 2470342
aauaauaaccauuuaccgc

SEQ ID NO: 2470344 - RNA, 19 nt, Artificial Sequence
  Description of Artificial Sequence: Synthetic oligonucleotide
  Sense strand starting at position 2773 of SEQ ID NO: 1887410
ggugaacaacuuugacaua

SEQ ID NO: 2470345 - RNA, 19 nt, Artificial Sequence
  Description of Artificial Sequence: Synthetic oligonucleotide
  Antisense strand to SEQ ID NO: 2470344
uaugucaaaguuguucacc

SEQ ID NO: 2470346 - RNA, 19 nt, Artificial Sequence
  Description of Artificial Sequence: Synthetic oligonucleotide
  Sense strand starting at position 2801 of SEQ ID NO: 1887410
gggacagccugauuccaua

SEQ ID NO: 2470347 - RNA, 19 nt, Artificial Sequence
  Description of Artificial Sequence: Synthetic oligonucleotide
  Antisense strand to SEQ ID NO: 2470346
uauggaaucaggcuguccc

SEQ ID NO: 2470348 - RNA, 19 nt, Artificial Sequence
  Description of Artificial Sequence: Synthetic oligonucleotide
  Sense strand starting at position 2826 of SEQ ID NO: 1887410
cuaauauggcaccguggau

SEQ ID NO: 2470349 - RNA, 19 nt, Artificial Sequence
  Description of Artificial Sequence: Synthetic oligonucleotide
  Antisense strand to SEQ ID NO: 2470348
auccacggugccauauuag

SEQ ID NO: 2470350 - RNA, 19 nt, Artificial Sequence
  Description of Artificial Sequence: Synthetic oligonucleotide
  Sense strand starting at position 3115 of SEQ ID NO: 1887410
ugaucacagcugugaauag

SEQ ID NO: 2470351 - RNA, 19 nt, Artificial Sequence
  Description of Artificial Sequence: Synthetic oligonucleotide
  Antisense strand to SEQ ID NO: 2470350
cuauucacagcugugauca

SEQ ID NO: 2470352 - RNA, 19 nt, Artificial Sequence
  Description of Artificial Sequence: Synthetic oligonucleotide
  Sense strand starting at position 3236 of SEQ ID NO: 1887410
gaccuuguuugggucauga

SEQ ID NO: 2470353 - RNA, 19 nt, Artificial Sequence
  Description of Artificial Sequence: Synthetic oligonucleotide
  Antisense strand to SEQ ID NO: 2470352
ucaugacccaaacaagguc

SEQ ID NO: 2470354 - RNA, 19 nt, Artificial Sequence
  Description of Artificial Sequence: Synthetic oligonucleotide
  Sense strand starting at position 3238 of SEQ ID NO: 1887410
ccuuguuugggucaugauu

SEQ ID NO: 2470355 - RNA, 19 nt, Artificial Sequence
  Description of Artificial Sequence: Synthetic oligonucleotide
  Antisense strand to SEQ ID NO: 2470354
aaucaugacccaaacaagg

SEQ ID NO: 2470356 - RNA, 19 nt, Artificial Sequence
  Description of Artificial Sequence: Synthetic oligonucleotide
  Sense strand starting at position 3635 of SEQ ID NO: 1887410
acugaauguuaggugacau

SEQ ID NO: 2470357 - RNA, 19 nt, Artificial Sequence
  Description of Artificial Sequence: Synthetic oligonucleotide
  Antisense strand to SEQ ID NO: 2470356
augucaccuaacauucagu

SEQ ID NO: 2470358 - RNA, 19 nt, Artificial Sequence
  Description of Artificial Sequence: Synthetic oligonucleotide
  Sense strand starting at position 3684 of SEQ ID NO: 1887410
auaccauaguggcuaugau

SEQ ID NO: 2470359 - RNA, 19 nt, Artificial Sequence
  Description of Artificial Sequence: Synthetic oligonucleotide
  Antisense strand to SEQ ID NO: 2470358
aucauagccacuaugguau

SEQ ID NO: 2470360 - RNA, 19 nt, Artificial Sequence
  Description of Artificial Sequence: Synthetic oligonucleotide
  Sense strand starting at position 3685 of SEQ ID NO: 1887410
uaccauaguggcuaugauu

SEQ ID NO: 2470361 - RNA, 19 nt, Artificial Sequence
  Description of Artificial Sequence: Synthetic oligonucleotide
  Antisense strand to SEQ ID NO: 2470360
aaucauagccacuauggua

SEQ ID NO: 2470362 - RNA, 19 nt, Artificial Sequence
  Description of Artificial Sequence: Synthetic oligonucleotide
  Sense strand starting at position 3839 of SEQ ID NO: 1887410
uggcaaaguguuuaauguu

SEQ ID NO: 2470363 - RNA, 19 nt, Artificial Sequence
  Description of Artificial Sequence: Synthetic oligonucleotide
  Antisense strand to SEQ ID NO: 2470362
aacauuaaacacuuugcca

SEQ ID NO: 2470364 - RNA, 19 nt, Artificial Sequence
  Description of Artificial Sequence: Synthetic oligonucleotide
  Sense strand starting at position 3846 of SEQ ID NO: 1887410
guguuuaauguuuaagcaa

SEQ ID NO: 2470365 - RNA, 19 nt, Artificial Sequence
  Description of Artificial Sequence: Synthetic oligonucleotide
  Antisense strand to SEQ ID NO: 2470364
uugcuuaaacauuaaacac

SEQ ID NO: 2470366 - RNA, 19 nt, Artificial Sequence
  Description of Artificial Sequence: Synthetic oligonucleotide
  Sense strand starting at position 3849 of SEQ ID NO: 1887410
uuuaauguuuaagcaagga

SEQ ID NO: 2470367 - RNA, 19 nt, Artificial Sequence
  Description of Artificial Sequence: Synthetic oligonucleotide
  Antisense strand to SEQ ID NO: 2470366
uccuugcuuaaacauuaaa

SEQ ID NO: 2470368 - RNA, 19 nt, Artificial Sequence
  Description of Artificial Sequence: Synthetic oligonucleotide
  Sense strand starting at position 3884 of SEQ ID NO: 1887410
uugugcuaggccuaauuau

SEQ ID NO: 2470369 - RNA, 19 nt, Artificial Sequence
  Description of Artificial Sequence: Synthetic oligonucleotide
  Antisense strand to SEQ ID NO: 2470368
auaauuaggccuagcacaa

SEQ ID NO: 2470370 - RNA, 19 nt, Artificial Sequence
  Description of Artificial Sequence: Synthetic oligonucleotide
  Sense strand starting at position 3975 of SEQ ID NO: 1887410
gcaaguaugcgaugaagaa

SEQ ID NO: 2470371 - RNA, 19 nt, Artificial Sequence
  Description of Artificial Sequence: Synthetic oligonucleotide
  Antisense strand to SEQ ID NO: 2470370
uucuucaucgcauacuugc

SEQ ID NO: 2470372 - RNA, 19 nt, Artificial Sequence
  Description of Artificial Sequence: Synthetic oligonucleotide
  Sense strand starting at position 3976 of SEQ ID NO: 1887410
caaguaugcgaugaagaac

SEQ ID NO: 2470373 - RNA, 19 nt, Artificial Sequence
  Description of Artificial Sequence: Synthetic oligonucleotide
  Antisense strand to SEQ ID NO: 2470372
guucuucaucgcauacuug

SEQ ID NO: 2470374 - RNA, 19 nt, Artificial Sequence
  Description of Artificial Sequence: Synthetic oligonucleotide
  Sense strand starting at position 12 of SEQ ID NO: 1887411
uaugguaguugucucuaga

SEQ ID NO: 2470375 - RNA, 19 nt, Artificial Sequence
  Description of Artificial Sequence: Synthetic oligonucleotide
  Antisense strand to SEQ ID NO: 2470374
ucuagagacaacuaccaua

SEQ ID NO: 2470376 - RNA, 19 nt, Artificial Sequence
  Description of Artificial Sequence: Synthetic oligonucleotide
  Sense strand starting at position 15 of SEQ ID NO: 1887411
gguaguugucucuagaagc

SEQ ID NO: 2470377 - RNA, 19 nt, Artificial Sequence
  Description of Artificial Sequence: Synthetic oligonucleotide
  Antisense strand to SEQ ID NO: 2470376
gcuucuagagacaacuacc

SEQ ID NO: 2470378 - RNA, 19 nt, Artificial Sequence
  Description of Artificial Sequence: Synthetic oligonucleotide
  Sense strand starting at position 145 of SEQ ID NO: 1887411
cggcuuaagcauuaccauu

SEQ ID NO: 2470379 - RNA, 19 nt, Artificial Sequence
  Description of Artificial Sequence: Synthetic oligonucleotide
  Antisense strand to SEQ ID NO: 2470378
aaugguaaugcuuaagccg

SEQ ID NO: 2470380 - RNA, 19 nt, Artificial Sequence
  Description of Artificial Sequence: Synthetic oligonucleotide
  Sense strand starting at position 239 of SEQ ID NO: 1887411
gggugaagggauuggaagu

SEQ ID NO: 2470381 - RNA, 19 nt, Artificial Sequence
  Description of Artificial Sequence: Synthetic oligonucleotide
  Antisense strand to SEQ ID NO: 2470380
acuuccaaucccuucaccc

SEQ ID NO: 2470382 - RNA, 19 nt, Artificial Sequence
  Description of Artificial Sequence: Synthetic oligonucleotide
  Sense strand starting at position 250 of SEQ ID NO: 1887411
uuggaaguaugauuaugua

SEQ ID NO: 2470383 - RNA, 19 nt, Artificial Sequence
  Description of Artificial Sequence: Synthetic oligonucleotide
  Antisense strand to SEQ ID NO: 2470382
uacauaaucauacuuccaa

SEQ ID NO: 2470384 - RNA, 19 nt, Artificial Sequence
  Description of Artificial Sequence: Synthetic oligonucleotide
  Sense strand starting at position 270 of SEQ ID NO: 1887411
ucugcagugguauggauau

SEQ ID NO: 2470385 - RNA, 19 nt, Artificial Sequence
  Description of Artificial Sequence: Synthetic oligonucleotide
  Antisense strand to SEQ ID NO: 2470384
auauccauaccacugcaga

SEQ ID NO: 2470386 - RNA, 19 nt, Artificial Sequence
  Description of Artificial Sequence: Synthetic oligonucleotide
  Sense strand starting at position 272 of SEQ ID NO: 1887411
ugcagugguauggauauua

SEQ ID NO: 2470387 - RNA, 19 nt, Artificial Sequence
  Description of Artificial Sequence: Synthetic oligonucleotide
  Antisense strand to SEQ ID NO: 2470386
uaauauccauaccacugca

SEQ ID NO: 2470388 - RNA, 19 nt, Artificial Sequence
  Description of Artificial Sequence: Synthetic oligonucleotide
  Sense strand starting at position 325 of SEQ ID NO: 1887411
uuaagaaauuagcuguagu

SEQ ID NO: 2470389 - RNA, 19 nt, Artificial Sequence
  Description of Artificial Sequence: Synthetic oligonucleotide
  Antisense strand to SEQ ID NO: 2470388
acuacagcuaauuucuuaa

SEQ ID NO: 2470390 - RNA, 19 nt, Artificial Sequence
  Description of Artificial Sequence: Synthetic oligonucleotide
  Sense strand starting at position 328 of SEQ ID NO: 1887411
agaaauuagcuguaguaca

SEQ ID NO: 2470391 - RNA, 19 nt, Artificial Sequence
  Description of Artificial Sequence: Synthetic oligonucleotide
  Antisense strand to SEQ ID NO: 2470390
uguacuacagcuaauuucu

SEQ ID NO: 2470392 - RNA, 19 nt, Artificial Sequence
  Description of Artificial Sequence: Synthetic oligonucleotide
  Sense strand starting at position 364 of SEQ ID NO: 1887411
agcuuuaaugcaugaauaa

SEQ ID NO: 2470393 - RNA, 19 nt, Artificial Sequence
  Description of Artificial Sequence: Synthetic oligonucleotide
  Antisense strand to SEQ ID NO: 2470392
uuauucaugcauuaaagcu

SEQ ID NO: 2470394 - RNA, 19 nt, Artificial Sequence
  Description of Artificial Sequence: Synthetic oligonucleotide
  Sense strand starting at position 365 of SEQ ID NO: 1887411
gcuuuaaugcaugaauaau

SEQ ID NO: 2470395 - RNA, 19 nt, Artificial Sequence
  Description of Artificial Sequence: Synthetic oligonucleotide
  Antisense strand to SEQ ID NO: 2470394
auuauucaugcauuaaagc

SEQ ID NO: 2470396 - RNA, 19 nt, Artificial Sequence
  Description of Artificial Sequence: Synthetic oligonucleotide
  Sense strand starting at position 945 of SEQ ID NO: 1887411
ucuuguugacccuaaagau

SEQ ID NO: 2470397 - RNA, 19 nt, Artificial Sequence
  Description of Artificial Sequence: Synthetic oligonucleotide
  Antisense strand to SEQ ID NO: 2470396
aucuuuagggucaacaaga

SEQ ID NO: 2470398 - RNA, 19 nt, Artificial Sequence
  Description of Artificial Sequence: Synthetic oligonucleotide
  Sense strand starting at position 1009 of SEQ ID NO: 1887411
aucuuuaaugcagguuuau

SEQ ID NO: 2470399 - RNA, 19 nt, Artificial Sequence
  Description of Artificial Sequence: Synthetic oligonucleotide
  Antisense strand to SEQ ID NO: 2470398
auaaaccugcauuaaagau

SEQ ID NO: 2470400 - RNA, 19 nt, Artificial Sequence
  Description of Artificial Sequence: Synthetic oligonucleotide
  Sense strand starting at position 1018 of SEQ ID NO: 1887411
gcagguuuaugcuuuacau

SEQ ID NO: 2470401 - RNA, 19 nt, Artificial Sequence
  Description of Artificial Sequence: Synthetic oligonucleotide
  Antisense strand to SEQ ID NO: 2470400
auguaaagcauaaaccugc

SEQ ID NO: 2470402 - RNA, 19 nt, Artificial Sequence
  Description of Artificial Sequence: Synthetic oligonucleotide
  Sense strand starting at position 1020 of SEQ ID NO: 1887411
agguuuaugcuuuacauag

SEQ ID NO: 2470403 - RNA, 19 nt, Artificial Sequence
  Description of Artificial Sequence: Synthetic oligonucleotide
  Antisense strand to SEQ ID NO: 2470402
cuauguaaagcauaaaccu

SEQ ID NO: 2470404 - RNA, 19 nt, Artificial Sequence
  Description of Artificial Sequence: Synthetic oligonucleotide
  Sense strand starting at position 1061 of SEQ ID NO: 1887411
cccugucaggucugaaugu

SEQ ID NO: 2470405 - RNA, 19 nt, Artificial Sequence
  Description of Artificial Sequence: Synthetic oligonucleotide
  Antisense strand to SEQ ID NO: 2470404
acauucagaccugacaggg

SEQ ID NO: 2470406 - RNA, 19 nt, Artificial Sequence
  Description of Artificial Sequence: Synthetic oligonucleotide
  Sense strand starting at position 1182 of SEQ ID NO: 1887411
gcuguuguugcagauuaac

SEQ ID NO: 2470407 - RNA, 19 nt, Artificial Sequence
  Description of Artificial Sequence: Synthetic oligonucleotide
  Antisense strand to SEQ ID NO: 2470406
guuaaucugcaacaacagc

SEQ ID NO: 2470408 - RNA, 19 nt, Artificial Sequence
  Description of Artificial Sequence: Synthetic oligonucleotide
  Sense strand starting at position 1665 of SEQ ID NO: 1887411
ccgccauuuccagaagcuu

SEQ ID NO: 2470409 - RNA, 19 nt, Artificial Sequence
  Description of Artificial Sequence: Synthetic oligonucleotide
  Antisense strand to SEQ ID NO: 2470408
aagcuucuggaaauggcgg

SEQ ID NO: 2470410 - RNA, 19 nt, Artificial Sequence
  Description of Artificial Sequence: Synthetic oligonucleotide
  Sense strand starting at position 3193 of SEQ ID NO: 1887411
guaagacgcugucugggau

SEQ ID NO: 2470411 - RNA, 19 nt, Artificial Sequence
  Description of Artificial Sequence: Synthetic oligonucleotide
  Antisense strand to SEQ ID NO: 2470410
aucccagacagcgucuuac

SEQ ID NO: 2470412 - RNA, 19 nt, Artificial Sequence
  Description of Artificial Sequence: Synthetic oligonucleotide
  Sense strand starting at position 3233 of SEQ ID NO: 1887411
uugaaaccuuaggaaacau

SEQ ID NO: 2470413 - RNA, 19 nt, Artificial Sequence
  Description of Artificial Sequence: Synthetic oligonucleotide
  Antisense strand to SEQ ID NO: 2470412
auguuuccuaagguuucaa

SEQ ID NO: 2470414 - RNA, 19 nt, Artificial Sequence
  Description of Artificial Sequence: Synthetic oligonucleotide
  Sense strand starting at position 3258 of SEQ ID NO: 1887411
caguguagucaccgggauu

SEQ ID NO: 2470415 - RNA, 19 nt, Artificial Sequence
  Description of Artificial Sequence: Synthetic oligonucleotide
  Antisense strand to SEQ ID NO: 2470414
aaucccggugacuacacug

SEQ ID NO: 2470416 - RNA, 19 nt, Artificial Sequence
  Description of Artificial Sequence: Synthetic oligonucleotide
  Sense strand starting at position 3259 of SEQ ID NO: 1887411
aguguagucaccgggauug

SEQ ID NO: 2470417 - RNA, 19 nt, Artificial Sequence
  Description of Artificial Sequence: Synthetic oligonucleotide
  Antisense strand to SEQ ID NO: 2470416
caaucccggugacuacacu

SEQ ID NO: 2470418 - RNA, 19 nt, Artificial Sequence
  Description of Artificial Sequence: Synthetic oligonucleotide
  Sense strand starting at position 3261 of SEQ ID NO: 1887411
uguagucaccgggauugua

SEQ ID NO: 2470419 - RNA, 19 nt, Artificial Sequence
  Description of Artificial Sequence: Synthetic oligonucleotide
  Antisense strand to SEQ ID NO: 2470418
uacaaucccggugacuaca

SEQ ID NO: 2470420 - RNA, 19 nt, Artificial Sequence
  Description of Artificial Sequence: Synthetic oligonucleotide
  Sense strand starting at position 3264 of SEQ ID NO: 1887411
agucaccgggauuguaauu

SEQ ID NO: 2470421 - RNA, 19 nt, Artificial Sequence
  Description of Artificial Sequence: Synthetic oligonucleotide
  Antisense strand to SEQ ID NO: 2470420
aauuacaaucccggugacu

SEQ ID NO: 2470422 - RNA, 19 nt, Artificial Sequence
  Description of Artificial Sequence: Synthetic oligonucleotide
  Sense strand starting at position 3273 of SEQ ID NO: 1887411
gauuguaauuuccacugga

SEQ ID NO: 2470423 - RNA, 19 nt, Artificial Sequence
  Description of Artificial Sequence: Synthetic oligonucleotide
  Antisense strand to SEQ ID NO: 2470422
uccaguggaaauuacaauc

SEQ ID NO: 2470424 - RNA, 19 nt, Artificial Sequence
  Description of Artificial Sequence: Synthetic oligonucleotide
  Sense strand starting at position 3286 of SEQ ID NO: 1887411
acuggacacccgugguuaa

SEQ ID NO: 2470425 - RNA, 19 nt, Artificial Sequence
  Description of Artificial Sequence: Synthetic oligonucleotide
  Antisense strand to SEQ ID NO: 2470424
uuaaccacggguguccagu

SEQ ID NO: 2470426 - RNA, 19 nt, Artificial Sequence
  Description of Artificial Sequence: Synthetic oligonucleotide
  Sense strand starting at position 3287 of SEQ ID NO: 1887411
cuggacacccgugguuaaa

SEQ ID NO: 2470427 - RNA, 19 nt, Artificial Sequence
  Description of Artificial Sequence: Synthetic oligonucleotide
  Antisense strand to SEQ ID NO: 2470426
uuuaaccacggguguccag

SEQ ID NO: 2470428 - RNA, 19 nt, Artificial Sequence
  Description of Artificial Sequence: Synthetic oligonucleotide
  Sense strand starting at position 3297 of SEQ ID NO: 1887411
gugguuaaacugcgaacua

SEQ ID NO: 2470429 - RNA, 19 nt, Artificial Sequence
  Description of Artificial Sequence: Synthetic oligonucleotide
  Antisense strand to SEQ ID NO: 2470428
uaguucgcaguuuaaccac

SEQ ID NO: 2470430 - RNA, 19 nt, Artificial Sequence
  Description of Artificial Sequence: Synthetic oligonucleotide
  Sense strand starting at position 3347 of SEQ ID NO: 1887411
uauguaaugguucggaauu

SEQ ID NO: 2470431 - RNA, 19 nt, Artificial Sequence
  Description of Artificial Sequence: Synthetic oligonucleotide
  Antisense strand to SEQ ID NO: 2470430
aauuccgaaccauuacaua

SEQ ID NO: 2470432 - RNA, 19 nt, Artificial Sequence
  Description of Artificial Sequence: Synthetic oligonucleotide
  Sense strand starting at position 3359 of SEQ ID NO: 1887411
cggaauuaccucuaauccu

SEQ ID NO: 2470433 - RNA, 19 nt, Artificial Sequence
  Description of Artificial Sequence: Synthetic oligonucleotide
  Antisense strand to SEQ ID NO: 2470432
aggauuagagguaauuccg

SEQ ID NO: 2470434 - RNA, 19 nt, Artificial Sequence
  Description of Artificial Sequence: Synthetic oligonucleotide
  Sense strand starting at position 3382 of SEQ ID NO: 1887411
uugaaaugagccugcaucu

SEQ ID NO: 2470435 - RNA, 19 nt, Artificial Sequence
  Description of Artificial Sequence: Synthetic oligonucleotide
  Antisense strand to SEQ ID NO: 2470434
agaugcaggcucauuucaa

SEQ ID NO: 2470436 - RNA, 19 nt, Artificial Sequence
  Description of Artificial Sequence: Synthetic oligonucleotide
  Sense strand starting at position 3401 of SEQ ID NO: 1887411
gcagucauguauuucguuu

SEQ ID NO: 2470437 - RNA, 19 nt, Artificial Sequence
  Description of Artificial Sequence: Synthetic oligonucleotide
  Antisense strand to SEQ ID NO: 2470436
aaacgaaauacaugacugc

SEQ ID NO: 2470438 - RNA, 19 nt, Artificial Sequence
  Description of Artificial Sequence: Synthetic oligonucleotide
  Sense strand starting at position 3454 of SEQ ID NO: 1887411
aggcuagugaaauagcuau

SEQ ID NO: 2470439 - RNA, 19 nt, Artificial Sequence
  Description of Artificial Sequence: Synthetic oligonucleotide
  Antisense strand to SEQ ID NO: 2470438
auagcuauuucacuagccu

SEQ ID NO: 2470440 - RNA, 19 nt, Artificial Sequence
  Description of Artificial Sequence: Synthetic oligonucleotide
  Sense strand starting at position 3476 of SEQ ID NO: 1887411
aucguaaauuaacugugua

SEQ ID NO: 2470441 - RNA, 19 nt, Artificial Sequence
  Description of Artificial Sequence: Synthetic oligonucleotide
  Antisense strand to SEQ ID NO: 2470440
uacacaguuaauuuacgau

SEQ ID NO: 2470442 - RNA, 19 nt, Artificial Sequence
  Description of Artificial Sequence: Synthetic oligonucleotide
  Sense strand starting at position 3862 of SEQ ID NO: 1887411
ugggcacugaucugaguuu

SEQ ID NO: 2470443 - RNA, 19 nt, Artificial Sequence
  Description of Artificial Sequence: Synthetic oligonucleotide
  Antisense strand to SEQ ID NO: 2470442
aaacucagaucagugccca

SEQ ID NO: 2470444 - RNA, 19 nt, Artificial Sequence
  Description of Artificial Sequence: Synthetic oligonucleotide
  Sense strand starting at position 3869 of SEQ ID NO: 1887411
ugaucugaguuucuuuaau

SEQ ID NO: 2470445 - RNA, 19 nt, Artificial Sequence
  Description of Artificial Sequence: Synthetic oligonucleotide
  Antisense strand to SEQ ID NO: 2470444
auuaaagaaacucagauca

SEQ ID NO: 2470446 - RNA, 19 nt, Artificial Sequence
  Description of Artificial Sequence: Synthetic oligonucleotide
  Sense strand starting at position 3875 of SEQ ID NO: 1887411
gaguuucuuuaaucguuau

SEQ ID NO: 2470447 - RNA, 19 nt, Artificial Sequence
  Description of Artificial Sequence: Synthetic oligonucleotide
  Antisense strand to SEQ ID NO: 2470446
auaacgauuaaagaaacuc

SEQ ID NO: 2470448 - RNA, 19 nt, Artificial Sequence
  Description of Artificial Sequence: Synthetic oligonucleotide
  Sense strand starting at position 3905 of SEQ ID NO: 1887411
ccuggagauuagcucagaa

SEQ ID NO: 2470449 - RNA, 19 nt, Artificial Sequence
  Description of Artificial Sequence: Synthetic oligonucleotide
  Antisense strand to SEQ ID NO: 2470448
uucugagcuaaucuccagg

SEQ ID NO: 2470450 - RNA, 19 nt, Artificial Sequence
  Description of Artificial Sequence: Synthetic oligonucleotide
  Sense strand starting at position 3926 of SEQ ID NO: 1887411
ggcagaacauaugcucuau

SEQ ID NO: 2470451 - RNA, 19 nt, Artificial Sequence
  Description of Artificial Sequence: Synthetic oligonucleotide
  Antisense strand to SEQ ID NO: 2470450
auagagcauauguucugcc

SEQ ID NO: 2470452 - RNA, 19 nt, Artificial Sequence
  Description of Artificial Sequence: Synthetic oligonucleotide
  Sense strand starting at position 3930 of SEQ ID NO: 1887411
gaacauaugcucuauuggu

SEQ ID NO: 2470453 - RNA, 19 nt, Artificial Sequence
  Description of Artificial Sequence: Synthetic oligonucleotide
  Antisense strand to SEQ ID NO: 2470452
accaauagagcauauguuc

SEQ ID NO: 2470454 - RNA, 19 nt, Artificial Sequence
  Description of Artificial Sequence: Synthetic oligonucleotide
  Sense strand starting at position 125 of SEQ ID NO: 1887412
uguauuaaaugcccugaau

SEQ ID NO: 2470455 - RNA, 19 nt, Artificial Sequence
  Description of Artificial Sequence: Synthetic oligonucleotide
  Antisense strand to SEQ ID NO: 2470454
auucagggcauuuaauaca

SEQ ID NO: 2470456 - RNA, 19 nt, Artificial Sequence
  Description of Artificial Sequence: Synthetic oligonucleotide
  Sense strand starting at position 368 of SEQ ID NO: 1887412
uagugagaagucggaacuu

SEQ ID NO: 2470457 - RNA, 19 nt, Artificial Sequence
  Description of Artificial Sequence: Synthetic oligonucleotide
  Antisense strand to SEQ ID NO: 2470456
aaguuccgacuucucacua

SEQ ID NO: 2470458 - RNA, 19 nt, Artificial Sequence
  Description of Artificial Sequence: Synthetic oligonucleotide
  Sense strand starting at position 403 of SEQ ID NO: 1887412
cacucugugggccagaauu

SEQ ID NO: 2470459 - RNA, 19 nt, Artificial Sequence
  Description of Artificial Sequence: Synthetic oligonucleotide
  Antisense strand to SEQ ID NO: 2470458
aauucuggcccacagagug

SEQ ID NO: 2470460 - RNA, 19 nt, Artificial Sequence
  Description of Artificial Sequence: Synthetic oligonucleotide
  Sense strand starting at position 498 of SEQ ID NO: 1887412
ucauguaauaaacggaaga

SEQ ID NO: 2470461 - RNA, 19 nt, Artificial Sequence
  Description of Artificial Sequence: Synthetic oligonucleotide
  Antisense strand to SEQ ID NO: 2470460
ucuuccguuuauuacauga

SEQ ID NO: 2470462 - RNA, 19 nt, Artificial Sequence
  Description of Artificial Sequence: Synthetic oligonucleotide
  Sense strand starting at position 524 of SEQ ID NO: 1887412
gagagucuccugugacaac

SEQ ID NO: 2470463 - RNA, 19 nt, Artificial Sequence
  Description of Artificial Sequence: Synthetic oligonucleotide
  Antisense strand to SEQ ID NO: 2470462
guugucacaggagacucuc

SEQ ID NO: 2470464 - RNA, 19 nt, Artificial Sequence
  Description of Artificial Sequence: Synthetic oligonucleotide
  Sense strand starting at position 574 of SEQ ID NO: 1887412
ugaauaaaugugggucauu

SEQ ID NO: 2470465 - RNA, 19 nt, Artificial Sequence
  Description of Artificial Sequence: Synthetic oligonucleotide
  Antisense strand to SEQ ID NO: 2470464
aaugacccacauuuauuca

SEQ ID NO: 2470466 - RNA, 19 nt, Artificial Sequence
  Description of Artificial Sequence: Synthetic oligonucleotide
  Sense strand starting at position 575 of SEQ ID NO: 1887412
gaauaaaugugggucauuc

SEQ ID NO: 2470467 - RNA, 19 nt, Artificial Sequence
  Description of Artificial Sequence: Synthetic oligonucleotide
  Antisense strand to SEQ ID NO: 2470466
gaaugacccacauuuauuc

SEQ ID NO: 2470468 - RNA, 19 nt, Artificial Sequence
  Description of Artificial Sequence: Synthetic oligonucleotide
  Sense strand starting at position 599 of SEQ ID NO: 1887412
uucucauuagagugagaau

SEQ ID NO: 2470469 - RNA, 19 nt, Artificial Sequence
  Description of Artificial Sequence: Synthetic oligonucleotide
  Antisense strand to SEQ ID NO: 2470468
auucucacucuaaugagaa

SEQ ID NO: 2470470 - RNA, 19 nt, Artificial Sequence
  Description of Artificial Sequence: Synthetic oligonucleotide
  Sense strand starting at position 879 of SEQ ID NO: 1887412
gaggaacaccuucgacuuu

SEQ ID NO: 2470471 - RNA, 19 nt, Artificial Sequence
  Description of Artificial Sequence: Synthetic oligonucleotide
  Antisense strand to SEQ ID NO: 2470470
aaagucgaagguguuccuc

SEQ ID NO: 2470472 - RNA, 19 nt, Artificial Sequence
  Description of Artificial Sequence: Synthetic oligonucleotide
  Sense strand starting at position 906 of SEQ ID NO: 1887412
cugggcaggcuuuaagaau

SEQ ID NO: 2470473 - RNA, 19 nt, Artificial Sequence
  Description of Artificial Sequence: Synthetic oligonucleotide
  Antisense strand to SEQ ID NO: 2470472
auucuuaaagccugcccag

SEQ ID NO: 2470474 - RNA, 19 nt, Artificial Sequence
  Description of Artificial Sequence: Synthetic oligonucleotide
  Sense strand starting at position 1250 of SEQ ID NO: 1887412
guaauucaugucgaaggag

SEQ ID NO: 2470475 - RNA, 19 nt, Artificial Sequence
  Description of Artificial Sequence: Synthetic oligonucleotide
  Antisense strand to SEQ ID NO: 2470474
cuccuucgacaugaauuac

SEQ ID NO: 2470476 - RNA, 19 nt, Artificial Sequence
  Description of Artificial Sequence: Synthetic oligonucleotide
  Sense strand starting at position 1435 of SEQ ID NO: 1887412
uguguuuacucccuauuua

SEQ ID NO: 2470477 - RNA, 19 nt, Artificial Sequence
  Description of Artificial Sequence: Synthetic oligonucleotide
  Antisense strand to SEQ ID NO: 2470476
uaaauagggaguaaacaca

SEQ ID NO: 2470478 - RNA, 19 nt, Artificial Sequence
  Description of Artificial Sequence: Synthetic oligonucleotide
  Sense strand starting at position 1442 of SEQ ID NO: 1887412
acucccuauuuagagagua

SEQ ID NO: 2470479 - RNA, 19 nt, Artificial Sequence
  Description of Artificial Sequence: Synthetic oligonucleotide
  Antisense strand to SEQ ID NO: 2470478
uacucucuaaauagggagu

SEQ ID NO: 2470480 - RNA, 19 nt, Artificial Sequence
  Description of Artificial Sequence: Synthetic oligonucleotide
  Sense strand starting at position 1520 of SEQ ID NO: 1887412
cugauuugauauuagugga

SEQ ID NO: 2470481 - RNA, 19 nt, Artificial Sequence
  Description of Artificial Sequence: Synthetic oligonucleotide
  Antisense strand to SEQ ID NO: 2470480
uccacuaauaucaaaucag

SEQ ID NO: 2470482 - RNA, 19 nt, Artificial Sequence
  Description of Artificial Sequence: Synthetic oligonucleotide
  Sense strand starting at position 1530 of SEQ ID NO: 1887412
auuaguggaccauguuuau

SEQ ID NO: 2470483 - RNA, 19 nt, Artificial Sequence
  Description of Artificial Sequence: Synthetic oligonucleotide
  Antisense strand to SEQ ID NO: 2470482
auaaacaugguccacuaau

SEQ ID NO: 2470484 - RNA, 19 nt, Artificial Sequence
  Description of Artificial Sequence: Synthetic oligonucleotide
  Sense strand starting at position 1612 of SEQ ID NO: 1887412
gaauucggcucuuuggaua

SEQ ID NO: 2470485 - RNA, 19 nt, Artificial Sequence
  Description of Artificial Sequence: Synthetic oligonucleotide
  Antisense strand to SEQ ID NO: 2470484
uauccaaagagccgaauuc

SEQ ID NO: 2470486 - RNA, 19 nt, Artificial Sequence
  Description of Artificial Sequence: Synthetic oligonucleotide
  Sense strand starting at position 1617 of SEQ ID NO: 1887412
cggcucuuuggauaacgaa

SEQ ID NO: 2470487 - RNA, 19 nt, Artificial Sequence
  Description of Artificial Sequence: Synthetic oligonucleotide
  Antisense strand to SEQ ID NO: 2470486
uucguuauccaaagagccg

SEQ ID NO: 2470488 - RNA, 19 nt, Artificial Sequence
  Description of Artificial Sequence: Synthetic oligonucleotide
  Sense strand starting at position 1730 of SEQ ID NO: 1887412
agcuuacugaugggagguu

SEQ ID NO: 2470489 - RNA, 19 nt, Artificial Sequence
  Description of Artificial Sequence: Synthetic oligonucleotide
  Antisense strand to SEQ ID NO: 2470488
aaccucccaucaguaagcu

SEQ ID NO: 2470490 - RNA, 19 nt, Artificial Sequence
  Description of Artificial Sequence: Synthetic oligonucleotide
  Sense strand starting at position 2321 of SEQ ID NO: 1887412
acaugcuuugcacagaaua

SEQ ID NO: 2470491 - RNA, 19 nt, Artificial Sequence
  Description of Artificial Sequence: Synthetic oligonucleotide
  Antisense strand to SEQ ID NO: 2470490
uauucugugcaaagcaugu

SEQ ID NO: 2470492 - RNA, 19 nt, Artificial Sequence
  Description of Artificial Sequence: Synthetic oligonucleotide
  Sense strand starting at position 2387 of SEQ ID NO: 1887412
cugcuugacgaagaguuga

SEQ ID NO: 2470493 - RNA, 19 nt, Artificial Sequence
  Description of Artificial Sequence: Synthetic oligonucleotide
  Antisense strand to SEQ ID NO: 2470492
ucaacucuucgucaagcag

SEQ ID NO: 2470494 - RNA, 19 nt, Artificial Sequence
  Description of Artificial Sequence: Synthetic oligonucleotide
  Sense strand starting at position 2417 of SEQ ID NO: 1887412
cgcagacaucaguaagaau

SEQ ID NO: 2470495 - RNA, 19 nt, Artificial Sequence
  Description of Artificial Sequence: Synthetic oligonucleotide
  Antisense strand to SEQ ID NO: 2470494
auucuuacugaugucugcg

SEQ ID NO: 2470496 - RNA, 19 nt, Artificial Sequence
  Description of Artificial Sequence: Synthetic oligonucleotide
  Sense strand starting at position 2425 of SEQ ID NO: 1887412
ucaguaagaaucgauguga

SEQ ID NO: 2470497 - RNA, 19 nt, Artificial Sequence
  Description of Artificial Sequence: Synthetic oligonucleotide
  Antisense strand to SEQ ID NO: 2470496
ucacaucgauucuuacuga

SEQ ID NO: 2470498 - RNA, 19 nt, Artificial Sequence
  Description of Artificial Sequence: Synthetic oligonucleotide
  Sense strand starting at position 2436 of SEQ ID NO: 1887412
cgaugugauacacaaagca

SEQ ID NO: 2470499 - RNA, 19 nt, Artificial Sequence
  Description of Artificial Sequence: Synthetic oligonucleotide
  Antisense strand to SEQ ID NO: 2470498
ugcuuuguguaucacaucg

SEQ ID NO: 2470500 - RNA, 19 nt, Artificial Sequence
  Description of Artificial Sequence: Synthetic oligonucleotide
  Sense strand starting at position 2477 of SEQ ID NO: 1887412
cccugcaauccugaggacu

SEQ ID NO: 2470501 - RNA, 19 nt, Artificial Sequence
  Description of Artificial Sequence: Synthetic oligonucleotide
  Antisense strand to SEQ ID NO: 2470500
aguccucaggauugcaggg

SEQ ID NO: 2470502 - RNA, 19 nt, Artificial Sequence
  Description of Artificial Sequence: Synthetic oligonucleotide
  Sense strand starting at position 2489 of SEQ ID NO: 1887412
gaggacuaguuacuuauga

SEQ ID NO: 2470503 - RNA, 19 nt, Artificial Sequence
  Description of Artificial Sequence: Synthetic oligonucleotide
  Antisense strand to SEQ ID NO: 2470502
ucauaaguaacuaguccuc

SEQ ID NO: 2470504 - RNA, 19 nt, Artificial Sequence
  Description of Artificial Sequence: Synthetic oligonucleotide
  Sense strand starting at position 2490 of SEQ ID NO: 1887412
aggacuaguuacuuaugaa

SEQ ID NO: 2470505 - RNA, 19 nt, Artificial Sequence
  Description of Artificial Sequence: Synthetic oligonucleotide
  Antisense strand to SEQ ID NO: 2470504
uucauaaguaacuaguccu

SEQ ID NO: 2470506 - RNA, 19 nt, Artificial Sequence
  Description of Artificial Sequence: Synthetic oligonucleotide
  Sense strand starting at position 2852 of SEQ ID NO: 1887412
gucaaaguauaggcaugaa

SEQ ID NO: 2470507 - RNA, 19 nt, Artificial Sequence
  Description of Artificial Sequence: Synthetic oligonucleotide
  Antisense strand to SEQ ID NO: 2470506
uucaugccuauacuuugac

SEQ ID NO: 2470508 - RNA, 19 nt, Artificial Sequence
  Description of Artificial Sequence: Synthetic oligonucleotide
  Sense strand starting at position 2929 of SEQ ID NO: 1887412
ggcucugauucugucauuu

SEQ ID NO: 2470509 - RNA, 19 nt, Artificial Sequence
  Description of Artificial Sequence: Synthetic oligonucleotide
  Antisense strand to SEQ ID NO: 2470508
aaaugacagaaucagagcc

SEQ ID NO: 2470510 - RNA, 19 nt, Artificial Sequence
  Description of Artificial Sequence: Synthetic oligonucleotide
  Sense strand starting at position 3094 of SEQ ID NO: 1887412
guauguacucgugagaaca

SEQ ID NO: 2470511 - RNA, 19 nt, Artificial Sequence
  Description of Artificial Sequence: Synthetic oligonucleotide
  Antisense strand to SEQ ID NO: 2470510
uguucucacgaguacauac

SEQ ID NO: 2470512 - RNA, 19 nt, Artificial Sequence
  Description of Artificial Sequence: Synthetic oligonucleotide
  Sense strand starting at position 3143 of SEQ ID NO: 1887412
ucacuuuaagaaugguuaa

SEQ ID NO: 2470513 - RNA, 19 nt, Artificial Sequence
  Description of Artificial Sequence: Synthetic oligonucleotide
  Antisense strand to SEQ ID NO: 2470512
uuaaccauucuuaaaguga

SEQ ID NO: 2470514 - RNA, 19 nt, Artificial Sequence
  Description of Artificial Sequence: Synthetic oligonucleotide
  Sense strand starting at position 3146 of SEQ ID NO: 1887412
cuuuaagaaugguuaauac

SEQ ID NO: 2470515 - RNA, 19 nt, Artificial Sequence
  Description of Artificial Sequence: Synthetic oligonucleotide
  Antisense strand to SEQ ID NO: 2470514
guauuaaccauucuuaaag

SEQ ID NO: 2470516 - RNA, 19 nt, Artificial Sequence
  Description of Artificial Sequence: Synthetic oligonucleotide
  Sense strand starting at position 3201 of SEQ ID NO: 1887412
auguuuaccuaucugagaa

SEQ ID NO: 2470517 - RNA, 19 nt, Artificial Sequence
  Description of Artificial Sequence: Synthetic oligonucleotide
  Antisense strand to SEQ ID NO: 2470516
uucucagauagguaaacau

SEQ ID NO: 2470518 - RNA, 19 nt, Artificial Sequence
  Description of Artificial Sequence: Synthetic oligonucleotide
  Sense strand starting at position 3221 of SEQ ID NO: 1887412
gaagcaagugucuggaauu

SEQ ID NO: 2470519 - RNA, 19 nt, Artificial Sequence
  Description of Artificial Sequence: Synthetic oligonucleotide
  Antisense strand to SEQ ID NO: 2470518
aauuccagacacuugcuuc

SEQ ID NO: 2470520 - RNA, 19 nt, Artificial Sequence
  Description of Artificial Sequence: Synthetic oligonucleotide
  Sense strand starting at position 3313 of SEQ ID NO: 1887412
ucaacauugugggcacaaa

SEQ ID NO: 2470521 - RNA, 19 nt, Artificial Sequence
  Description of Artificial Sequence: Synthetic oligonucleotide
  Antisense strand to SEQ ID NO: 2470520
uuugugcccacaauguuga

SEQ ID NO: 2470522 - RNA, 19 nt, Artificial Sequence
  Description of Artificial Sequence: Synthetic oligonucleotide
  Sense strand starting at position 3751 of SEQ ID NO: 1887412
ucaaauaucugguuugaug

SEQ ID NO: 2470523 - RNA, 19 nt, Artificial Sequence
  Description of Artificial Sequence: Synthetic oligonucleotide
  Antisense strand to SEQ ID NO: 2470522
caucaaaccagauauuuga

SEQ ID NO: 2470524 - RNA, 19 nt, Artificial Sequence
  Description of Artificial Sequence: Synthetic oligonucleotide
  Sense strand starting at position 3780 of SEQ ID NO: 1887412
caagcuagugcucaauaug

SEQ ID NO: 2470525 - RNA, 19 nt, Artificial Sequence
  Description of Artificial Sequence: Synthetic oligonucleotide
  Antisense strand to SEQ ID NO: 2470524
cauauugagcacuagcuug

SEQ ID NO: 2470526 - RNA, 19 nt, Artificial Sequence
  Description of Artificial Sequence: Synthetic oligonucleotide
  Sense strand starting at position 3847 of SEQ ID NO: 1887412
acccaucagugguuuauaa

SEQ ID NO: 2470527 - RNA, 19 nt, Artificial Sequence
  Description of Artificial Sequence: Synthetic oligonucleotide
  Antisense strand to SEQ ID NO: 2470526
uuauaaaccacugaugggu

SEQ ID NO: 2470528 - RNA, 19 nt, Artificial Sequence
  Description of Artificial Sequence: Synthetic oligonucleotide
  Sense strand starting at position 3849 of SEQ ID NO: 1887412
ccaucagugguuuauaaag

SEQ ID NO: 2470529 - RNA, 19 nt, Artificial Sequence
  Description of Artificial Sequence: Synthetic oligonucleotide
  Antisense strand to SEQ ID NO: 2470528
cuuuauaaaccacugaugg

SEQ ID NO: 2470530 - RNA, 19 nt, Artificial Sequence
  Description of Artificial Sequence: Synthetic oligonucleotide
  Sense strand starting at position 3929 of SEQ ID NO: 1887412
guaaauggaaaguguuaua

SEQ ID NO: 2470531 - RNA, 19 nt, Artificial Sequence
  Description of Artificial Sequence: Synthetic oligonucleotide
  Antisense strand to SEQ ID NO: 2470530
uauaacacuuuccauuuac

SEQ ID NO: 2470532 - RNA, 19 nt, Artificial Sequence
  Description of Artificial Sequence: Synthetic oligonucleotide
  Sense strand starting at position 3975 of SEQ ID NO: 1887412
ugaaaugaugcaugcaauc

SEQ ID NO: 2470533 - RNA, 19 nt, Artificial Sequence
  Description of Artificial Sequence: Synthetic oligonucleotide
  Antisense strand to SEQ ID NO: 2470532
gauugcaugcaucauuuca

SEQ ID NO: 2470534 - RNA, 19 nt, Artificial Sequence
  Description of Artificial Sequence: Synthetic oligonucleotide
  Sense strand starting at position 144 of SEQ ID NO: 1887413
agcacuguuaaaugggaca

SEQ ID NO: 2470535 - RNA, 19 nt, Artificial Sequence
  Description of Artificial Sequence: Synthetic oligonucleotide
  Antisense strand to SEQ ID NO: 2470534
ugucccauuuaacagugcu

SEQ ID NO: 2470536 - RNA, 19 nt, Artificial Sequence
  Description of Artificial Sequence: Synthetic oligonucleotide
  Sense strand starting at position 339 of SEQ ID NO: 1887413
guguaagcacucuagaaau

SEQ ID NO: 2470537 - RNA, 19 nt, Artificial Sequence
  Description of Artificial Sequence: Synthetic oligonucleotide
  Antisense strand to SEQ ID NO: 2470536
auuucuagagugcuuacac

SEQ ID NO: 2470538 - RNA, 19 nt, Artificial Sequence
  Description of Artificial Sequence: Synthetic oligonucleotide
  Sense strand starting at position 341 of SEQ ID NO: 1887413
guaagcacucuagaaauau

SEQ ID NO: 2470539 - RNA, 19 nt, Artificial Sequence
  Description of Artificial Sequence: Synthetic oligonucleotide
  Antisense strand to SEQ ID NO: 2470538
auauuucuagagugcuuac

SEQ ID NO: 2470540 - RNA, 19 nt, Artificial Sequence
  Description of Artificial Sequence: Synthetic oligonucleotide
  Sense strand starting at position 453 of SEQ ID NO: 1887413
acgccuuaugaccauaaua

SEQ ID NO: 2470541 - RNA, 19 nt, Artificial Sequence
  Description of Artificial Sequence: Synthetic oligonucleotide
  Antisense strand to SEQ ID NO: 2470540
uauuauggucauaaggcgu

SEQ ID NO: 2470542 - RNA, 19 nt, Artificial Sequence
  Description of Artificial Sequence: Synthetic oligonucleotide
  Sense strand starting at position 455 of SEQ ID NO: 1887413
gccuuaugaccauaauaug

SEQ ID NO: 2470543 - RNA, 19 nt, Artificial Sequence
  Description of Artificial Sequence: Synthetic oligonucleotide
  Antisense strand to SEQ ID NO: 2470542
cauauuauggucauaaggc

SEQ ID NO: 2470544 - RNA, 19 nt, Artificial Sequence
  Description of Artificial Sequence: Synthetic oligonucleotide
  Sense strand starting at position 500 of SEQ ID NO: 1887413
uguguuugaauggaccuua

SEQ ID NO: 2470545 - RNA, 19 nt, Artificial Sequence
  Description of Artificial Sequence: Synthetic oligonucleotide
  Antisense strand to SEQ ID NO: 2470544
uaagguccauucaaacaca

SEQ ID NO: 2470546 - RNA, 19 nt, Artificial Sequence
  Description of Artificial Sequence: Synthetic oligonucleotide
  Sense strand starting at position 520 of SEQ ID NO: 1887413
aagauugcaugguuugaua

SEQ ID NO: 2470547 - RNA, 19 nt, Artificial Sequence
  Description of Artificial Sequence: Synthetic oligonucleotide
  Antisense strand to SEQ ID NO: 2470546
uaucaaaccaugcaaucuu

SEQ ID NO: 2470548 - RNA, 19 nt, Artificial Sequence
  Description of Artificial Sequence: Synthetic oligonucleotide
  Sense strand starting at position 578 of SEQ ID NO: 1887413
caugaaugagacugguuua

SEQ ID NO: 2470549 - RNA, 19 nt, Artificial Sequence
  Description of Artificial Sequence: Synthetic oligonucleotide
  Antisense strand to SEQ ID NO: 2470548
uaaaccagucucauucaug

SEQ ID NO: 2470550 - RNA, 19 nt, Artificial Sequence
  Description of Artificial Sequence: Synthetic oligonucleotide
  Sense strand starting at position 583 of SEQ ID NO: 1887413
augagacugguuuacaguu

SEQ ID NO: 2470551 - RNA, 19 nt, Artificial Sequence
  Description of Artificial Sequence: Synthetic oligonucleotide
  Antisense strand to SEQ ID NO: 2470550
aacuguaaaccagucucau

SEQ ID NO: 2470552 - RNA, 19 nt, Artificial Sequence
  Description of Artificial Sequence: Synthetic oligonucleotide
  Sense strand starting at position 613 of SEQ ID NO: 1887413
ugacuagaguguuccaaug

SEQ ID NO: 2470553 - RNA, 19 nt, Artificial Sequence
  Description of Artificial Sequence: Synthetic oligonucleotide
  Antisense strand to SEQ ID NO: 2470552
cauuggaacacucuaguca

SEQ ID NO: 2470554 - RNA, 19 nt, Artificial Sequence
  Description of Artificial Sequence: Synthetic oligonucleotide
  Sense strand starting at position 773 of SEQ ID NO: 1887413
cucagaagcgcuuaaagaa

SEQ ID NO: 2470555 - RNA, 19 nt, Artificial Sequence
  Description of Artificial Sequence: Synthetic oligonucleotide
  Antisense strand to SEQ ID NO: 2470554
uucuuuaagcgcuucugag

SEQ ID NO: 2470556 - RNA, 19 nt, Artificial Sequence
  Description of Artificial Sequence: Synthetic oligonucleotide
  Sense strand starting at position 1002 of SEQ ID NO: 1887413
ugggcuuagagauguaaac

SEQ ID NO: 2470557 - RNA, 19 nt, Artificial Sequence
  Description of Artificial Sequence: Synthetic oligonucleotide
  Antisense strand to SEQ ID NO: 2470556
guuuacaucucuaagccca

SEQ ID NO: 2470558 - RNA, 19 nt, Artificial Sequence
  Description of Artificial Sequence: Synthetic oligonucleotide
  Sense strand starting at position 1004 of SEQ ID NO: 1887413
ggcuuagagauguaaacuu

SEQ ID NO: 2470559 - RNA, 19 nt, Artificial Sequence
  Description of Artificial Sequence: Synthetic oligonucleotide
  Antisense strand to SEQ ID NO: 2470558
aaguuuacaucucuaagcc

SEQ ID NO: 2470560 - RNA, 19 nt, Artificial Sequence
  Description of Artificial Sequence: Synthetic oligonucleotide
  Sense strand starting at position 1011 of SEQ ID NO: 1887413
agauguaaacuuggaguga

SEQ ID NO: 2470561 - RNA, 19 nt, Artificial Sequence
  Description of Artificial Sequence: Synthetic oligonucleotide
  Antisense strand to SEQ ID NO: 2470560
ucacuccaaguuuacaucu

SEQ ID NO: 2470562 - RNA, 19 nt, Artificial Sequence
  Description of Artificial Sequence: Synthetic oligonucleotide
  Sense strand starting at position 1026 of SEQ ID NO: 1887413
gugagucugaaauaaugua

SEQ ID NO: 2470563 - RNA, 19 nt, Artificial Sequence
  Description of Artificial Sequence: Synthetic oligonucleotide
  Antisense strand to SEQ ID NO: 2470562
uacauuauuucagacucac

SEQ ID NO: 2470564 - RNA, 19 nt, Artificial Sequence
  Description of Artificial Sequence: Synthetic oligonucleotide
  Sense strand starting at position 1034 of SEQ ID NO: 1887413
gaaauaauguacuugugaa

SEQ ID NO: 2470565 - RNA, 19 nt, Artificial Sequence
  Description of Artificial Sequence: Synthetic oligonucleotide
  Antisense strand to SEQ ID NO: 2470564
uucacaaguacauuauuuc

SEQ ID NO: 2470566 - RNA, 19 nt, Artificial Sequence
  Description of Artificial Sequence: Synthetic oligonucleotide
  Sense strand starting at position 1295 of SEQ ID NO: 1887413
cccuucccagauugaagaa

SEQ ID NO: 2470567 - RNA, 19 nt, Artificial Sequence
  Description of Artificial Sequence: Synthetic oligonucleotide
  Antisense strand to SEQ ID NO: 2470566
uucuucaaucugggaaggg

SEQ ID NO: 2470568 - RNA, 19 nt, Artificial Sequence
  Description of Artificial Sequence: Synthetic oligonucleotide
  Sense strand starting at position 1315 of SEQ ID NO: 1887413
auugcuggagaaugugaaa

SEQ ID NO: 2470569 - RNA, 19 nt, Artificial Sequence
  Description of Artificial Sequence: Synthetic oligonucleotide
  Antisense strand to SEQ ID NO: 2470568
uuucacauucuccagcaau

SEQ ID NO: 2470570 - RNA, 19 nt, Artificial Sequence
  Description of Artificial Sequence: Synthetic oligonucleotide
  Sense strand starting at position 1328 of SEQ ID NO: 1887413
gugaaagucaaauacgagu

SEQ ID NO: 2470571 - RNA, 19 nt, Artificial Sequence
  Description of Artificial Sequence: Synthetic oligonucleotide
  Antisense strand to SEQ ID NO: 2470570
acucguauuugacuuucac

SEQ ID NO: 2470572 - RNA, 19 nt, Artificial Sequence
  Description of Artificial Sequence: Synthetic oligonucleotide
  Sense strand starting at position 1376 of SEQ ID NO: 1887413
ggaaaucacagccacguuu

SEQ ID NO: 2470573 - RNA, 19 nt, Artificial Sequence
  Description of Artificial Sequence: Synthetic oligonucleotide
  Antisense strand to SEQ ID NO: 2470572
aaacguggcugugauuucc

SEQ ID NO: 2470574 - RNA, 19 nt, Artificial Sequence
  Description of Artificial Sequence: Synthetic oligonucleotide
  Sense strand starting at position 1516 of SEQ ID NO: 1887413
uuaucacacgguuaaacau

SEQ ID NO: 2470575 - RNA, 19 nt, Artificial Sequence
  Description of Artificial Sequence: Synthetic oligonucleotide
  Antisense strand to SEQ ID NO: 2470574
auguuuaaccgugugauaa

SEQ ID NO: 2470576 - RNA, 19 nt, Artificial Sequence
  Description of Artificial Sequence: Synthetic oligonucleotide
  Sense strand starting at position 2098 of SEQ ID NO: 1887413
accucaauagcggaaucaa

SEQ ID NO: 2470577 - RNA, 19 nt, Artificial Sequence
  Description of Artificial Sequence: Synthetic oligonucleotide
  Antisense strand to SEQ ID NO: 2470576
uugauuccgcuauugaggu

SEQ ID NO: 2470578 - RNA, 19 nt, Artificial Sequence
  Description of Artificial Sequence: Synthetic oligonucleotide
  Sense strand starting at position 2215 of SEQ ID NO: 1887413
acucgccuuguugaaagaa

SEQ ID NO: 2470579 - RNA, 19 nt, Artificial Sequence
  Description of Artificial Sequence: Synthetic oligonucleotide
  Antisense strand to SEQ ID NO: 2470578
uucuuucaacaaggcgagu

SEQ ID NO: 2470580 - RNA, 19 nt, Artificial Sequence
  Description of Artificial Sequence: Synthetic oligonucleotide
  Sense strand starting at position 2529 of SEQ ID NO: 1887413
guuuaucgaguugaauuaa

SEQ ID NO: 2470581 - RNA, 19 nt, Artificial Sequence
  Description of Artificial Sequence: Synthetic oligonucleotide
  Antisense strand to SEQ ID NO: 2470580
uuaauucaacucgauaaac

SEQ ID NO: 2470582 - RNA, 19 nt, Artificial Sequence
  Description of Artificial Sequence: Synthetic oligonucleotide
  Sense strand starting at position 3033 of SEQ ID NO: 1887413
ugaaguugccaagauacuu

SEQ ID NO: 2470583 - RNA, 19 nt, Artificial Sequence
  Description of Artificial Sequence: Synthetic oligonucleotide
  Antisense strand to SEQ ID NO: 2470582
aaguaucuuggcaacuuca

SEQ ID NO: 2470584 - RNA, 19 nt, Artificial Sequence
  Description of Artificial Sequence: Synthetic oligonucleotide
  Sense strand starting at position 3369 of SEQ ID NO: 1887413
cagcguuaaugacugauuu

SEQ ID NO: 2470585 - RNA, 19 nt, Artificial Sequence
  Description of Artificial Sequence: Synthetic oligonucleotide
  Antisense strand to SEQ ID NO: 2470584
aaaucagucauuaacgcug

SEQ ID NO: 2470586 - RNA, 19 nt, Artificial Sequence
  Description of Artificial Sequence: Synthetic oligonucleotide
  Sense strand starting at position 3370 of SEQ ID NO: 1887413
agcguuaaugacugauuuc

SEQ ID NO: 2470587 - RNA, 19 nt, Artificial Sequence
  Description of Artificial Sequence: Synthetic oligonucleotide
  Antisense strand to SEQ ID NO: 2470586
gaaaucagucauuaacgcu

SEQ ID NO: 2470588 - RNA, 19 nt, Artificial Sequence
  Description of Artificial Sequence: Synthetic oligonucleotide
  Sense strand starting at position 3461 of SEQ ID NO: 1887413
agaguaacaugcuuuaauc

SEQ ID NO: 2470589 - RNA, 19 nt, Artificial Sequence
  Description of Artificial Sequence: Synthetic oligonucleotide
  Antisense strand to SEQ ID NO: 2470588
gauuaaagcauguuacucu

SEQ ID NO: 2470590 - RNA, 19 nt, Artificial Sequence
  Description of Artificial Sequence: Synthetic oligonucleotide
  Sense strand starting at position 3747 of SEQ ID NO: 1887413
cuggaaauguuaucuaaag

SEQ ID NO: 2470591 - RNA, 19 nt, Artificial Sequence
  Description of Artificial Sequence: Synthetic oligonucleotide
  Antisense strand to SEQ ID NO: 2470590
cuuuagauaacauuuccag

SEQ ID NO: 2470592 - RNA, 19 nt, Artificial Sequence
  Description of Artificial Sequence: Synthetic oligonucleotide
  Sense strand starting at position 3748 of SEQ ID NO: 1887413
uggaaauguuaucuaaagu

SEQ ID NO: 2470593 - RNA, 19 nt, Artificial Sequence
  Description of Artificial Sequence: Synthetic oligonucleotide
  Antisense strand to SEQ ID NO: 2470592
acuuuagauaacauuucca

SEQ ID NO: 2470594 - RNA, 19 nt, Artificial Sequence
  Description of Artificial Sequence: Synthetic oligonucleotide
  Sense strand starting at position 3781 of SEQ ID NO: 1887413
auaggagauaaauguaugu

SEQ ID NO: 2470595 - RNA, 19 nt, Artificial Sequence
  Description of Artificial Sequence: Synthetic oligonucleotide
  Antisense strand to SEQ ID NO: 2470594
acauacauuuaucuccuau

SEQ ID NO: 2470596 - RNA, 19 nt, Artificial Sequence
  Description of Artificial Sequence: Synthetic oligonucleotide
  Sense strand starting at position 3785 of SEQ ID NO: 1887413
gagauaaauguauguggua

SEQ ID NO: 2470597 - RNA, 19 nt, Artificial Sequence
  Description of Artificial Sequence: Synthetic oligonucleotide
  Antisense strand to SEQ ID NO: 2470596
uaccacauacauuuaucuc

SEQ ID NO: 2470598 - RNA, 19 nt, Artificial Sequence
  Description of Artificial Sequence: Synthetic oligonucleotide
  Sense strand starting at position 3786 of SEQ ID NO: 1887413
agauaaauguaugugguaa

SEQ ID NO: 2470599 - RNA, 19 nt, Artificial Sequence
  Description of Artificial Sequence: Synthetic oligonucleotide
  Antisense strand to SEQ ID NO: 2470598
uuaccacauacauuuaucu

SEQ ID NO: 2470600 - RNA, 19 nt, Artificial Sequence
  Description of Artificial Sequence: Synthetic oligonucleotide
  Sense strand starting at position 3830 of SEQ ID NO: 1887413
auacuuuacugcuuuagga

SEQ ID NO: 2470601 - RNA, 19 nt, Artificial Sequence
  Description of Artificial Sequence: Synthetic oligonucleotide
  Antisense strand to SEQ ID NO: 2470600
uccuaaagcaguaaaguau

SEQ ID NO: 2470602 - RNA, 19 nt, Artificial Sequence
  Description of Artificial Sequence: Synthetic oligonucleotide
  Sense strand starting at position 3832 of SEQ ID NO: 1887413
acuuuacugcuuuaggaag

SEQ ID NO: 2470603 - RNA, 19 nt, Artificial Sequence
  Description of Artificial Sequence: Synthetic oligonucleotide
  Antisense strand to SEQ ID NO: 2470602
cuuccuaaagcaguaaagu

SEQ ID NO: 2470604 - RNA, 19 nt, Artificial Sequence
  Description of Artificial Sequence: Synthetic oligonucleotide
  Sense strand starting at position 3846 of SEQ ID NO: 1887413
ggaagaaaggucugcagua

SEQ ID NO: 2470605 - RNA, 19 nt, Artificial Sequence
  Description of Artificial Sequence: Synthetic oligonucleotide
  Antisense strand to SEQ ID NO: 2470604
uacugcagaccuuucuucc

SEQ ID NO: 2470606 - RNA, 19 nt, Artificial Sequence
  Description of Artificial Sequence: Synthetic oligonucleotide
  Sense strand starting at position 3847 of SEQ ID NO: 1887413
gaagaaaggucugcaguau

SEQ ID NO: 2470607 - RNA, 19 nt, Artificial Sequence
  Description of Artificial Sequence: Synthetic oligonucleotide
  Antisense strand to SEQ ID NO: 2470606
auacugcagaccuuucuuc

SEQ ID NO: 2470608 - RNA, 19 nt, Artificial Sequence
  Description of Artificial Sequence: Synthetic oligonucleotide
  Sense strand starting at position 3848 of SEQ ID NO: 1887413
aagaaaggucugcaguauu

SEQ ID NO: 2470609 - RNA, 19 nt, Artificial Sequence
  Description of Artificial Sequence: Synthetic oligonucleotide
  Antisense strand to SEQ ID NO: 2470608
aauacugcagaccuuucuu

SEQ ID NO: 2470610 - RNA, 19 nt, Artificial Sequence
  Description of Artificial Sequence: Synthetic oligonucleotide
  Sense strand starting at position 3904 of SEQ ID NO: 1887413
guagguauacucuauaauc

SEQ ID NO: 2470611 - RNA, 19 nt, Artificial Sequence
  Description of Artificial Sequence: Synthetic oligonucleotide
  Antisense strand to SEQ ID NO: 2470610
gauuauagaguauaccuac

SEQ ID NO: 2470612 - RNA, 19 nt, Artificial Sequence
  Description of Artificial Sequence: Synthetic oligonucleotide
  Sense strand starting at position 3962 of SEQ ID NO: 1887413
cuguuagaagcauauaaca

SEQ ID NO: 2470613 - RNA, 19 nt, Artificial Sequence
  Description of Artificial Sequence: Synthetic oligonucleotide
  Antisense strand to SEQ ID NO: 2470612
uguuauaugcuucuaacag

SEQ ID NO: 2470614 - RNA, 19 nt, Artificial Sequence
  Description of Artificial Sequence: Synthetic oligonucleotide
  Sense strand starting at position 2 of SEQ ID NO: 1887414
ccucuuggaucuuugaacu

SEQ ID NO: 2470615 - RNA, 19 nt, Artificial Sequence
  Description of Artificial Sequence: Synthetic oligonucleotide
  Antisense strand to SEQ ID NO: 2470614
aguucaaagauccaagagg

SEQ ID NO: 2470616 - RNA, 19 nt, Artificial Sequence
  Description of Artificial Sequence: Synthetic oligonucleotide
  Sense strand starting at position 41 of SEQ ID NO: 1887414
ucaggaugguuucuguaac

SEQ ID NO: 2470617 - RNA, 19 nt, Artificial Sequence
  Description of Artificial Sequence: Synthetic oligonucleotide
  Antisense strand to SEQ ID NO: 2470616
guuacagaaaccauccuga

SEQ ID NO: 2470618 - RNA, 19 nt, Artificial Sequence
  Description of Artificial Sequence: Synthetic oligonucleotide
  Sense strand starting at position 72 of SEQ ID NO: 1887414
gcguuuguucccucugggu

SEQ ID NO: 2470619 - RNA, 19 nt, Artificial Sequence
  Description of Artificial Sequence: Synthetic oligonucleotide
  Antisense strand to SEQ ID NO: 2470618
acccagagggaacaaacgc

SEQ ID NO: 2470620 - RNA, 19 nt, Artificial Sequence
  Description of Artificial Sequence: Synthetic oligonucleotide
  Sense strand starting at position 129 of SEQ ID NO: 1887414
acccaugucccacagguau

SEQ ID NO: 2470621 - RNA, 19 nt, Artificial Sequence
  Description of Artificial Sequence: Synthetic oligonucleotide
  Antisense strand to SEQ ID NO: 2470620
auaccugugggacaugggu

SEQ ID NO: 2470622 - RNA, 19 nt, Artificial Sequence
  Description of Artificial Sequence: Synthetic oligonucleotide
  Sense strand starting at position 140 of SEQ ID NO: 1887414
acagguauagcugggaaga

SEQ ID NO: 2470623 - RNA, 19 nt, Artificial Sequence
  Description of Artificial Sequence: Synthetic oligonucleotide
  Antisense strand to SEQ ID NO: 2470622
ucuucccagcuauaccugu

SEQ ID NO: 2470624 - RNA, 19 nt, Artificial Sequence
  Description of Artificial Sequence: Synthetic oligonucleotide
  Sense strand starting at position 152 of SEQ ID NO: 1887414
gggaagacuguugggugau

SEQ ID NO: 2470625 - RNA, 19 nt, Artificial Sequence
  Description of Artificial Sequence: Synthetic oligonucleotide
  Antisense strand to SEQ ID NO: 2470624
aucacccaacagucuuccc

SEQ ID NO: 2470626 - RNA, 19 nt, Artificial Sequence
  Description of Artificial Sequence: Synthetic oligonucleotide
  Sense strand starting at position 196 of SEQ ID NO: 1887414
agaagagguuaggauauuu

SEQ ID NO: 2470627 - RNA, 19 nt, Artificial Sequence
  Description of Artificial Sequence: Synthetic oligonucleotide
  Antisense strand to SEQ ID NO: 2470626
aaauauccuaaccucuucu

SEQ ID NO: 2470628 - RNA, 19 nt, Artificial Sequence
  Description of Artificial Sequence: Synthetic oligonucleotide
  Sense strand starting at position 233 of SEQ ID NO: 1887414
aaccaaugucuagaugguu

SEQ ID NO: 2470629 - RNA, 19 nt, Artificial Sequence
  Description of Artificial Sequence: Synthetic oligonucleotide
  Antisense strand to SEQ ID NO: 2470628
aaccaucuagacauugguu

SEQ ID NO: 2470630 - RNA, 19 nt, Artificial Sequence
  Description of Artificial Sequence: Synthetic oligonucleotide
  Sense strand starting at position 236 of SEQ ID NO: 1887414
caaugucuagaugguugaa

SEQ ID NO: 2470631 - RNA, 19 nt, Artificial Sequence
  Description of Artificial Sequence: Synthetic oligonucleotide
  Antisense strand to SEQ ID NO: 2470630
uucaaccaucuagacauug

SEQ ID NO: 2470632 - RNA, 19 nt, Artificial Sequence
  Description of Artificial Sequence: Synthetic oligonucleotide
  Sense strand starting at position 238 of SEQ ID NO: 1887414
augucuagaugguugaaua

SEQ ID NO: 2470633 - RNA, 19 nt, Artificial Sequence
  Description of Artificial Sequence: Synthetic oligonucleotide
  Antisense strand to SEQ ID NO: 2470632
uauucaaccaucuagacau

SEQ ID NO: 2470634 - RNA, 19 nt, Artificial Sequence
  Description of Artificial Sequence: Synthetic oligonucleotide
  Sense strand starting at position 239 of SEQ ID NO: 1887414
ugucuagaugguugaauau

SEQ ID NO: 2470635 - RNA, 19 nt, Artificial Sequence
  Description of Artificial Sequence: Synthetic oligonucleotide
  Antisense strand to SEQ ID NO: 2470634
auauucaaccaucuagaca

SEQ ID NO: 2470636 - RNA, 19 nt, Artificial Sequence
  Description of Artificial Sequence: Synthetic oligonucleotide
  Sense strand starting at position 246 of SEQ ID NO: 1887414
augguugaauaugcaauaa

SEQ ID NO: 2470637 - RNA, 19 nt, Artificial Sequence
  Description of Artificial Sequence: Synthetic oligonucleotide
  Antisense strand to SEQ ID NO: 2470636
uuauugcauauucaaccau

SEQ ID NO: 2470638 - RNA, 19 nt, Artificial Sequence
  Description of Artificial Sequence: Synthetic oligonucleotide
  Sense strand starting at position 414 of SEQ ID NO: 1887414
gugaccuuuccucacuacu

SEQ ID NO: 2470639 - RNA, 19 nt, Artificial Sequence
  Description of Artificial Sequence: Synthetic oligonucleotide
  Antisense strand to SEQ ID NO: 2470638
aguagugaggaaaggucac

SEQ ID NO: 2470640 - RNA, 19 nt, Artificial Sequence
  Description of Artificial Sequence: Synthetic oligonucleotide
  Sense strand starting at position 527 of SEQ ID NO: 1887414
gucacucuccuuuaugacu

SEQ ID NO: 2470641 - RNA, 19 nt, Artificial Sequence
  Description of Artificial Sequence: Synthetic oligonucleotide
  Antisense strand to SEQ ID NO: 2470640
agucauaaaggagagugac

SEQ ID NO: 2470642 - RNA, 19 nt, Artificial Sequence
  Description of Artificial Sequence: Synthetic oligonucleotide
  Sense strand starting at position 616 of SEQ ID NO: 1887414
uuaugacuuccggagcuca

SEQ ID NO: 2470643 - RNA, 19 nt, Artificial Sequence
  Description of Artificial Sequence: Synthetic oligonucleotide
  Antisense strand to SEQ ID NO: 2470642
ugagcuccggaagucauaa

SEQ ID NO: 2470644 - RNA, 19 nt, Artificial Sequence
  Description of Artificial Sequence: Synthetic oligonucleotide
  Sense strand starting at position 797 of SEQ ID NO: 1887414
uucuuaacauagguguuaa

SEQ ID NO: 2470645 - RNA, 19 nt, Artificial Sequence
  Description of Artificial Sequence: Synthetic oligonucleotide
  Antisense strand to SEQ ID NO: 2470644
uuaacaccuauguuaagaa

SEQ ID NO: 2470646 - RNA, 19 nt, Artificial Sequence
  Description of Artificial Sequence: Synthetic oligonucleotide
  Sense strand starting at position 901 of SEQ ID NO: 1887414
gcugucuauguguuaugua

SEQ ID NO: 2470647 - RNA, 19 nt, Artificial Sequence
  Description of Artificial Sequence: Synthetic oligonucleotide
  Antisense strand to SEQ ID NO: 2470646
uacauaacacauagacagc

SEQ ID NO: 2470648 - RNA, 19 nt, Artificial Sequence
  Description of Artificial Sequence: Synthetic oligonucleotide
  Sense strand starting at position 927 of SEQ ID NO: 1887414
auguaauggguuuauaguu

SEQ ID NO: 2470649 - RNA, 19 nt, Artificial Sequence
  Description of Artificial Sequence: Synthetic oligonucleotide
  Antisense strand to SEQ ID NO: 2470648
aacuauaaacccauuacau

SEQ ID NO: 2470650 - RNA, 19 nt, Artificial Sequence
  Description of Artificial Sequence: Synthetic oligonucleotide
  Sense strand starting at position 1443 of SEQ ID NO: 1887414
gauaaucgcugagugaaga

SEQ ID NO: 2470651 - RNA, 19 nt, Artificial Sequence
  Description of Artificial Sequence: Synthetic oligonucleotide
  Antisense strand to SEQ ID NO: 2470650
ucuucacucagcgauuauc

SEQ ID NO: 2470652 - RNA, 19 nt, Artificial Sequence
  Description of Artificial Sequence: Synthetic oligonucleotide
  Sense strand starting at position 1481 of SEQ ID NO: 1887414
gagaacaucugccuaagga

SEQ ID NO: 2470653 - RNA, 19 nt, Artificial Sequence
  Description of Artificial Sequence: Synthetic oligonucleotide
  Antisense strand to SEQ ID NO: 2470652
uccuuaggcagauguucuc

SEQ ID NO: 2470654 - RNA, 19 nt, Artificial Sequence
  Description of Artificial Sequence: Synthetic oligonucleotide
  Sense strand starting at position 1564 of SEQ ID NO: 1887414
gggacauguuaacuguaaa

SEQ ID NO: 2470655 - RNA, 19 nt, Artificial Sequence
  Description of Artificial Sequence: Synthetic oligonucleotide
  Antisense strand to SEQ ID NO: 2470654
uuuacaguuaacauguccc

SEQ ID NO: 2470656 - RNA, 19 nt, Artificial Sequence
  Description of Artificial Sequence: Synthetic oligonucleotide
  Sense strand starting at position 1773 of SEQ ID NO: 1887414
cguggauguccagaugaag

SEQ ID NO: 2470657 - RNA, 19 nt, Artificial Sequence
  Description of Artificial Sequence: Synthetic oligonucleotide
  Antisense strand to SEQ ID NO: 2470656
cuucaucuggacauccacg

SEQ ID NO: 2470658 - RNA, 19 nt, Artificial Sequence
  Description of Artificial Sequence: Synthetic oligonucleotide
  Sense strand starting at position 1795 of SEQ ID NO: 1887414
uccacacuccuuugagaga

SEQ ID NO: 2470659 - RNA, 19 nt, Artificial Sequence
  Description of Artificial Sequence: Synthetic oligonucleotide
  Antisense strand to SEQ ID NO: 2470658
ucucucaaaggagugugga

SEQ ID NO: 2470660 - RNA, 19 nt, Artificial Sequence
  Description of Artificial Sequence: Synthetic oligonucleotide
  Sense strand starting at position 1820 of SEQ ID NO: 1887414
caaggaagaugugugcuua

SEQ ID NO: 2470661 - RNA, 19 nt, Artificial Sequence
  Description of Artificial Sequence: Synthetic oligonucleotide
  Antisense strand to SEQ ID NO: 2470660
uaagcacacaucuuccuug

SEQ ID NO: 2470662 - RNA, 19 nt, Artificial Sequence
  Description of Artificial Sequence: Synthetic oligonucleotide
  Sense strand starting at position 1971 of SEQ ID NO: 1887414
ucauguugccaugaaguua

SEQ ID NO: 2470663 - RNA, 19 nt, Artificial Sequence
  Description of Artificial Sequence: Synthetic oligonucleotide
  Antisense strand to SEQ ID NO: 2470662
uaacuucauggcaacauga

SEQ ID NO: 2470664 - RNA, 19 nt, Artificial Sequence
  Description of Artificial Sequence: Synthetic oligonucleotide
  Sense strand starting at position 2103 of SEQ ID NO: 1887414
acagauaaagcuggucuga

SEQ ID NO: 2470665 - RNA, 19 nt, Artificial Sequence
  Description of Artificial Sequence: Synthetic oligonucleotide
  Antisense strand to SEQ ID NO: 2470664
ucagaccagcuuuaucugu

SEQ ID NO: 2470666 - RNA, 19 nt, Artificial Sequence
  Description of Artificial Sequence: Synthetic oligonucleotide
  Sense strand starting at position 2105 of SEQ ID NO: 1887414
agauaaagcuggucugaaa

SEQ ID NO: 2470667 - RNA, 19 nt, Artificial Sequence
  Description of Artificial Sequence: Synthetic oligonucleotide
  Antisense strand to SEQ ID NO: 2470666
uuucagaccagcuuuaucu

SEQ ID NO: 2470668 - RNA, 19 nt, Artificial Sequence
  Description of Artificial Sequence: Synthetic oligonucleotide
  Sense strand starting at position 2176 of SEQ ID NO: 1887414
ucaggaucuggcugacuua

SEQ ID NO: 2470669 - RNA, 19 nt, Artificial Sequence
  Description of Artificial Sequence: Synthetic oligonucleotide
  Antisense strand to SEQ ID NO: 2470668
uaagucagccagauccuga

SEQ ID NO: 2470670 - RNA, 19 nt, Artificial Sequence
  Description of Artificial Sequence: Synthetic oligonucleotide
  Sense strand starting at position 2687 of SEQ ID NO: 1887414
cucuuuauauaugugagga

SEQ ID NO: 2470671 - RNA, 19 nt, Artificial Sequence
  Description of Artificial Sequence: Synthetic oligonucleotide
  Antisense strand to SEQ ID NO: 2470670
uccucacauauauaaagag

SEQ ID NO: 2470672 - RNA, 19 nt, Artificial Sequence
  Description of Artificial Sequence: Synthetic oligonucleotide
  Sense strand starting at position 2803 of SEQ ID NO: 1887414
gaguaagguuugcuaacag

SEQ ID NO: 2470673 - RNA, 19 nt, Artificial Sequence
  Description of Artificial Sequence: Synthetic oligonucleotide
  Antisense strand to SEQ ID NO: 2470672
cuguuagcaaaccuuacuc

SEQ ID NO: 2470674 - RNA, 19 nt, Artificial Sequence
  Description of Artificial Sequence: Synthetic oligonucleotide
  Sense strand starting at position 2896 of SEQ ID NO: 1887414
guacuaauccaauauugua

SEQ ID NO: 2470675 - RNA, 19 nt, Artificial Sequence
  Description of Artificial Sequence: Synthetic oligonucleotide
  Antisense strand to SEQ ID NO: 2470674
uacaauauuggauuaguac

SEQ ID NO: 2470676 - RNA, 19 nt, Artificial Sequence
  Description of Artificial Sequence: Synthetic oligonucleotide
  Sense strand starting at position 2980 of SEQ ID NO: 1887414
gguaaucuuccucagcauc

SEQ ID NO: 2470677 - RNA, 19 nt, Artificial Sequence
  Description of Artificial Sequence: Synthetic oligonucleotide
  Antisense strand to SEQ ID NO: 2470676
gaugcugaggaagauuacc

SEQ ID NO: 2470678 - RNA, 19 nt, Artificial Sequence
  Description of Artificial Sequence: Synthetic oligonucleotide
  Sense strand starting at position 3488 of SEQ ID NO: 1887414
gagcgugucccuccucauu

SEQ ID NO: 2470679 - RNA, 19 nt, Artificial Sequence
  Description of Artificial Sequence: Synthetic oligonucleotide
  Antisense strand to SEQ ID NO: 2470678
aaugaggagggacacgcuc

SEQ ID NO: 2470680 - RNA, 19 nt, Artificial Sequence
  Description of Artificial Sequence: Synthetic oligonucleotide
  Sense strand starting at position 3517 of SEQ ID NO: 1887414
gcaacucuugggugaucaa

SEQ ID NO: 2470681 - RNA, 19 nt, Artificial Sequence
  Description of Artificial Sequence: Synthetic oligonucleotide
  Antisense strand to SEQ ID NO: 2470680
uugaucacccaagaguugc

SEQ ID NO: 2470682 - RNA, 19 nt, Artificial Sequence
  Description of Artificial Sequence: Synthetic oligonucleotide
  Sense strand starting at position 3520 of SEQ ID NO: 1887414
acucuugggugaucaaaga

SEQ ID NO: 2470683 - RNA, 19 nt, Artificial Sequence
  Description of Artificial Sequence: Synthetic oligonucleotide
  Antisense strand to SEQ ID NO: 2470682
ucuuugaucacccaagagu

SEQ ID NO: 2470684 - RNA, 19 nt, Artificial Sequence
  Description of Artificial Sequence: Synthetic oligonucleotide
  Sense strand starting at position 3544 of SEQ ID NO: 1887414
gcuuauuguauuugguagu

SEQ ID NO: 2470685 - RNA, 19 nt, Artificial Sequence
  Description of Artificial Sequence: Synthetic oligonucleotide
  Antisense strand to SEQ ID NO: 2470684
acuaccaaauacaauaagc

SEQ ID NO: 2470686 - RNA, 19 nt, Artificial Sequence
  Description of Artificial Sequence: Synthetic oligonucleotide
  Sense strand starting at position 3661 of SEQ ID NO: 1887414
gcaagaauucuugaauucu

SEQ ID NO: 2470687 - RNA, 19 nt, Artificial Sequence
  Description of Artificial Sequence: Synthetic oligonucleotide
  Antisense strand to SEQ ID NO: 2470686
agaauucaagaauucuugc

SEQ ID NO: 2470688 - RNA, 19 nt, Artificial Sequence
  Description of Artificial Sequence: Synthetic oligonucleotide
  Sense strand starting at position 3709 of SEQ ID NO: 1887414
ggaucauguguagagugau

SEQ ID NO: 2470689 - RNA, 19 nt, Artificial Sequence
  Description of Artificial Sequence: Synthetic oligonucleotide
  Antisense strand to SEQ ID NO: 2470688
aucacucuacacaugaucc

SEQ ID NO: 2470690 - RNA, 19 nt, Artificial Sequence
  Description of Artificial Sequence: Synthetic oligonucleotide
  Sense strand starting at position 3715 of SEQ ID NO: 1887414
uguguagagugaucacaua

SEQ ID NO: 2470691 - RNA, 19 nt, Artificial Sequence
  Description of Artificial Sequence: Synthetic oligonucleotide
  Antisense strand to SEQ ID NO: 2470690
uaugugaucacucuacaca

SEQ ID NO: 2470692 - RNA, 19 nt, Artificial Sequence
  Description of Artificial Sequence: Synthetic oligonucleotide
  Sense strand starting at position 3868 of SEQ ID NO: 1887414
cauugauuagcugacaguu

SEQ ID NO: 2470693 - RNA, 19 nt, Artificial Sequence
  Description of Artificial Sequence: Synthetic oligonucleotide
  Antisense strand to SEQ ID NO: 2470692
aacugucagcuaaucaaug

SEQ ID NO: 2470694 - RNA, 19 nt, Artificial Sequence
  Description of Artificial Sequence: Synthetic oligonucleotide
  Sense strand starting at position 17 of SEQ ID NO: 1887415
uacgaagucgaacauaaau

SEQ ID NO: 2470695 - RNA, 19 nt, Artificial Sequence
  Description of Artificial Sequence: Synthetic oligonucleotide
  Antisense strand to SEQ ID NO: 2470694
auuuauguucgacuucgua

SEQ ID NO: 2470696 - RNA, 19 nt, Artificial Sequence
  Description of Artificial Sequence: Synthetic oligonucleotide
  Sense strand starting at position 19 of SEQ ID NO: 1887415
cgaagucgaacauaaauau

SEQ ID NO: 2470697 - RNA, 19 nt, Artificial Sequence
  Description of Artificial Sequence: Synthetic oligonucleotide
  Antisense strand to SEQ ID NO: 2470696
auauuuauguucgacuucg

SEQ ID NO: 2470698 - RNA, 19 nt, Artificial Sequence
  Description of Artificial Sequence: Synthetic oligonucleotide
  Sense strand starting at position 135 of SEQ ID NO: 1887415
acuuacuauuaggcagaua

SEQ ID NO: 2470699 - RNA, 19 nt, Artificial Sequence
  Description of Artificial Sequence: Synthetic oligonucleotide
  Antisense strand to SEQ ID NO: 2470698
uaucugccuaauaguaagu

SEQ ID NO: 2470700 - RNA, 19 nt, Artificial Sequence
  Description of Artificial Sequence: Synthetic oligonucleotide
  Sense strand starting at position 138 of SEQ ID NO: 1887415
uacuauuaggcagauaagu

SEQ ID NO: 2470701 - RNA, 19 nt, Artificial Sequence
  Description of Artificial Sequence: Synthetic oligonucleotide
  Antisense strand to SEQ ID NO: 2470700
acuuaucugccuaauagua

SEQ ID NO: 2470702 - RNA, 19 nt, Artificial Sequence
  Description of Artificial Sequence: Synthetic oligonucleotide
  Sense strand starting at position 149 of SEQ ID NO: 1887415
agauaaguggcuuaaggua

SEQ ID NO: 2470703 - RNA, 19 nt, Artificial Sequence
  Description of Artificial Sequence: Synthetic oligonucleotide
  Antisense strand to SEQ ID NO: 2470702
uaccuuaagccacuuaucu

SEQ ID NO: 2470704 - RNA, 19 nt, Artificial Sequence
  Description of Artificial Sequence: Synthetic oligonucleotide
  Sense strand starting at position 154 of SEQ ID NO: 1887415
aguggcuuaagguaaacau

SEQ ID NO: 2470705 - RNA, 19 nt, Artificial Sequence
  Description of Artificial Sequence: Synthetic oligonucleotide
  Antisense strand to SEQ ID NO: 2470704
auguuuaccuuaagccacu

SEQ ID NO: 2470706 - RNA, 19 nt, Artificial Sequence
  Description of Artificial Sequence: Synthetic oligonucleotide
  Sense strand starting at position 206 of SEQ ID NO: 1887415
gaguacugcucccuuuaag

SEQ ID NO: 2470707 - RNA, 19 nt, Artificial Sequence
  Description of Artificial Sequence: Synthetic oligonucleotide
  Antisense strand to SEQ ID NO: 2470706
cuuaaagggagcaguacuc

SEQ ID NO: 2470708 - RNA, 19 nt, Artificial Sequence
  Description of Artificial Sequence: Synthetic oligonucleotide
  Sense strand starting at position 376 of SEQ ID NO: 1887415
uuaaguuuacucugaguaa

SEQ ID NO: 2470709 - RNA, 19 nt, Artificial Sequence
  Description of Artificial Sequence: Synthetic oligonucleotide
  Antisense strand to SEQ ID NO: 2470708
uuacucagaguaaacuuaa

SEQ ID NO: 2470710 - RNA, 19 nt, Artificial Sequence
  Description of Artificial Sequence: Synthetic oligonucleotide
  Sense strand starting at position 380 of SEQ ID NO: 1887415
guuuacucugaguaaggga

SEQ ID NO: 2470711 - RNA, 19 nt, Artificial Sequence
  Description of Artificial Sequence: Synthetic oligonucleotide
  Antisense strand to SEQ ID NO: 2470710
ucccuuacucagaguaaac

SEQ ID NO: 2470712 - RNA, 19 nt, Artificial Sequence
  Description of Artificial Sequence: Synthetic oligonucleotide
  Sense strand starting at position 539 of SEQ ID NO: 1887415
auccuacuaugguuaucau

SEQ ID NO: 2470713 - RNA, 19 nt, Artificial Sequence
  Description of Artificial Sequence: Synthetic oligonucleotide
  Antisense strand to SEQ ID NO: 2470712
augauaaccauaguaggau

SEQ ID NO: 2470714 - RNA, 19 nt, Artificial Sequence
  Description of Artificial Sequence: Synthetic oligonucleotide
  Sense strand starting at position 581 of SEQ ID NO: 1887415
ucccuuauguaucccauga

SEQ ID NO: 2470715 - RNA, 19 nt, Artificial Sequence
  Description of Artificial Sequence: Synthetic oligonucleotide
  Antisense strand to SEQ ID NO: 2470714
ucaugggauacauaaggga

SEQ ID NO: 2470716 - RNA, 19 nt, Artificial Sequence
  Description of Artificial Sequence: Synthetic oligonucleotide
  Sense strand starting at position 585 of SEQ ID NO: 1887415
uuauguaucccaugaucuu

SEQ ID NO: 2470717 - RNA, 19 nt, Artificial Sequence
  Description of Artificial Sequence: Synthetic oligonucleotide
  Antisense strand to SEQ ID NO: 2470716
aagaucaugggauacauaa

SEQ ID NO: 2470718 - RNA, 19 nt, Artificial Sequence
  Description of Artificial Sequence: Synthetic oligonucleotide
  Sense strand starting at position 596 of SEQ ID NO: 1887415
augaucuucgcuuauauau

SEQ ID NO: 2470719 - RNA, 19 nt, Artificial Sequence
  Description of Artificial Sequence: Synthetic oligonucleotide
  Antisense strand to SEQ ID NO: 2470718
auauauaagcgaagaucau

SEQ ID NO: 2470720 - RNA, 19 nt, Artificial Sequence
  Description of Artificial Sequence: Synthetic oligonucleotide
  Sense strand starting at position 766 of SEQ ID NO: 1887415
uuucuaucgugacccaaau

SEQ ID NO: 2470721 - RNA, 19 nt, Artificial Sequence
  Description of Artificial Sequence: Synthetic oligonucleotide
  Antisense strand to SEQ ID NO: 2470720
auuugggucacgauagaaa

SEQ ID NO: 2470722 - RNA, 19 nt, Artificial Sequence
  Description of Artificial Sequence: Synthetic oligonucleotide
  Sense strand starting at position 850 of SEQ ID NO: 1887415
gccaucaggaaaugucaga

SEQ ID NO: 2470723 - RNA, 19 nt, Artificial Sequence
  Description of Artificial Sequence: Synthetic oligonucleotide
  Antisense strand to SEQ ID NO: 2470722
ucugacauuuccugauggc

SEQ ID NO: 2470724 - RNA, 19 nt, Artificial Sequence
  Description of Artificial Sequence: Synthetic oligonucleotide
  Sense strand starting at position 935 of SEQ ID NO: 1887415
cacuguuaacacugaagga

SEQ ID NO: 2470725 - RNA, 19 nt, Artificial Sequence
  Description of Artificial Sequence: Synthetic oligonucleotide
  Antisense strand to SEQ ID NO: 2470724
uccuucaguguuaacagug

SEQ ID NO: 2470726 - RNA, 19 nt, Artificial Sequence
  Description of Artificial Sequence: Synthetic oligonucleotide
  Sense strand starting at position 948 of SEQ ID NO: 1887415
gaaggagggcugggugauu

SEQ ID NO: 2470727 - RNA, 19 nt, Artificial Sequence
  Description of Artificial Sequence: Synthetic oligonucleotide
  Antisense strand to SEQ ID NO: 2470726
aaucacccagcccuccuuc

SEQ ID NO: 2470728 - RNA, 19 nt, Artificial Sequence
  Description of Artificial Sequence: Synthetic oligonucleotide
  Sense strand starting at position 966 of SEQ ID NO: 1887415
uucugaacauccgcauuaa

SEQ ID NO: 2470729 - RNA, 19 nt, Artificial Sequence
  Description of Artificial Sequence: Synthetic oligonucleotide
  Antisense strand to SEQ ID NO: 2470728
uuaaugcggauguucagaa

SEQ ID NO: 2470730 - RNA, 19 nt, Artificial Sequence
  Description of Artificial Sequence: Synthetic oligonucleotide
  Sense strand starting at position 967 of SEQ ID NO: 1887415
ucugaacauccgcauuaaa

SEQ ID NO: 2470731 - RNA, 19 nt, Artificial Sequence
  Description of Artificial Sequence: Synthetic oligonucleotide
  Antisense strand to SEQ ID NO: 2470730
uuuaaugcggauguucaga

SEQ ID NO: 2470732 - RNA, 19 nt, Artificial Sequence
  Description of Artificial Sequence: Synthetic oligonucleotide
  Sense strand starting at position 1100 of SEQ ID NO: 1887415
acagguaugucauccucaa

SEQ ID NO: 2470733 - RNA, 19 nt, Artificial Sequence
  Description of Artificial Sequence: Synthetic oligonucleotide
  Antisense strand to SEQ ID NO: 2470732
uugaggaugacauaccugu

SEQ ID NO: 2470734 - RNA, 19 nt, Artificial Sequence
  Description of Artificial Sequence: Synthetic oligonucleotide
  Sense strand starting at position 1104 of SEQ ID NO: 1887415
guaugucauccucaaacaa

SEQ ID NO: 2470735 - RNA, 19 nt, Artificial Sequence
  Description of Artificial Sequence: Synthetic oligonucleotide
  Antisense strand to SEQ ID NO: 2470734
uuguuugaggaugacauac

SEQ ID NO: 2470736 - RNA, 19 nt, Artificial Sequence
  Description of Artificial Sequence: Synthetic oligonucleotide
  Sense strand starting at position 2550 of SEQ ID NO: 1887415
cgggaugguugacugacaa

SEQ ID NO: 2470737 - RNA, 19 nt, Artificial Sequence
  Description of Artificial Sequence: Synthetic oligonucleotide
  Antisense strand to SEQ ID NO: 2470736
uugucagucaaccaucccg

SEQ ID NO: 2470738 - RNA, 19 nt, Artificial Sequence
  Description of Artificial Sequence: Synthetic oligonucleotide
  Sense strand starting at position 2777 of SEQ ID NO: 1887415
gguuauuggcauuaaauga

SEQ ID NO: 2470739 - RNA, 19 nt, Artificial Sequence
  Description of Artificial Sequence: Synthetic oligonucleotide
  Antisense strand to SEQ ID NO: 2470738
ucauuuaaugccaauaacc

SEQ ID NO: 2470740 - RNA, 19 nt, Artificial Sequence
  Description of Artificial Sequence: Synthetic oligonucleotide
  Sense strand starting at position 2820 of SEQ ID NO: 1887415
ucuugaugucuaggaggug

SEQ ID NO: 2470741 - RNA, 19 nt, Artificial Sequence
  Description of Artificial Sequence: Synthetic oligonucleotide
  Antisense strand to SEQ ID NO: 2470740
caccuccuagacaucaaga

SEQ ID NO: 2470742 - RNA, 19 nt, Artificial Sequence
  Description of Artificial Sequence: Synthetic oligonucleotide
  Sense strand starting at position 2842 of SEQ ID NO: 1887415
ggugaagggugccuaugau

SEQ ID NO: 2470743 - RNA, 19 nt, Artificial Sequence
  Description of Artificial Sequence: Synthetic oligonucleotide
  Antisense strand to SEQ ID NO: 2470742
aucauaggcacccuucacc

SEQ ID NO: 2470744 - RNA, 19 nt, Artificial Sequence
  Description of Artificial Sequence: Synthetic oligonucleotide
  Sense strand starting at position 2899 of SEQ ID NO: 1887415
uguuaaagucuguauccca

SEQ ID NO: 2470745 - RNA, 19 nt, Artificial Sequence
  Description of Artificial Sequence: Synthetic oligonucleotide
  Antisense strand to SEQ ID NO: 2470744
ugggauacagacuuuaaca

SEQ ID NO: 2470746 - RNA, 19 nt, Artificial Sequence
  Description of Artificial Sequence: Synthetic oligonucleotide
  Sense strand starting at position 2906 of SEQ ID NO: 1887415
gucuguaucccagacuuua

SEQ ID NO: 2470747 - RNA, 19 nt, Artificial Sequence
  Description of Artificial Sequence: Synthetic oligonucleotide
  Antisense strand to SEQ ID NO: 2470746
uaaagucugggauacagac

SEQ ID NO: 2470748 - RNA, 19 nt, Artificial Sequence
  Description of Artificial Sequence: Synthetic oligonucleotide
  Sense strand starting at position 2917 of SEQ ID NO: 1887415
agacuuuauuagucuuguu

SEQ ID NO: 2470749 - RNA, 19 nt, Artificial Sequence
  Description of Artificial Sequence: Synthetic oligonucleotide
  Antisense strand to SEQ ID NO: 2470748
aacaagacuaauaaagucu

SEQ ID NO: 2470750 - RNA, 19 nt, Artificial Sequence
  Description of Artificial Sequence: Synthetic oligonucleotide
  Sense strand starting at position 2945 of SEQ ID NO: 1887415
gacuuaagcgauuagcuca

SEQ ID NO: 2470751 - RNA, 19 nt, Artificial Sequence
  Description of Artificial Sequence: Synthetic oligonucleotide
  Antisense strand to SEQ ID NO: 2470750
ugagcuaaucgcuuaaguc

SEQ ID NO: 2470752 - RNA, 19 nt, Artificial Sequence
  Description of Artificial Sequence: Synthetic oligonucleotide
  Sense strand starting at position 3133 of SEQ ID NO: 1887415
agggaauucuaaguaguua

SEQ ID NO: 2470753 - RNA, 19 nt, Artificial Sequence
  Description of Artificial Sequence: Synthetic oligonucleotide
  Antisense strand to SEQ ID NO: 2470752
uaacuacuuagaauucccu

SEQ ID NO: 2470754 - RNA, 19 nt, Artificial Sequence
  Description of Artificial Sequence: Synthetic oligonucleotide
  Sense strand starting at position 3177 of SEQ ID NO: 1887415
agucuugaccaaggacaau

SEQ ID NO: 2470755 - RNA, 19 nt, Artificial Sequence
  Description of Artificial Sequence: Synthetic oligonucleotide
  Antisense strand to SEQ ID NO: 2470754
auuguccuuggucaagacu

SEQ ID NO: 2470756 - RNA, 19 nt, Artificial Sequence
  Description of Artificial Sequence: Synthetic oligonucleotide
  Sense strand starting at position 3189 of SEQ ID NO: 1887415
ggacaauguguuggcauuu

SEQ ID NO: 2470757 - RNA, 19 nt, Artificial Sequence
  Description of Artificial Sequence: Synthetic oligonucleotide
  Antisense strand to SEQ ID NO: 2470756
aaaugccaacacauugucc

SEQ ID NO: 2470758 - RNA, 19 nt, Artificial Sequence
  Description of Artificial Sequence: Synthetic oligonucleotide
  Sense strand starting at position 3254 of SEQ ID NO: 1887415
uuccuaaaucuguguaaua

SEQ ID NO: 2470759 - RNA, 19 nt, Artificial Sequence
  Description of Artificial Sequence: Synthetic oligonucleotide
  Antisense strand to SEQ ID NO: 2470758
uauuacacagauuuaggaa

SEQ ID NO: 2470760 - RNA, 19 nt, Artificial Sequence
  Description of Artificial Sequence: Synthetic oligonucleotide
  Sense strand starting at position 3346 of SEQ ID NO: 1887415
guaugaaauuucuaggagu

SEQ ID NO: 2470761 - RNA, 19 nt, Artificial Sequence
  Description of Artificial Sequence: Synthetic oligonucleotide
  Antisense strand to SEQ ID NO: 2470760
acuccuagaaauuucauac

SEQ ID NO: 2470762 - RNA, 19 nt, Artificial Sequence
  Description of Artificial Sequence: Synthetic oligonucleotide
  Sense strand starting at position 3349 of SEQ ID NO: 1887415
ugaaauuucuaggaguaau

SEQ ID NO: 2470763 - RNA, 19 nt, Artificial Sequence
  Description of Artificial Sequence: Synthetic oligonucleotide
  Antisense strand to SEQ ID NO: 2470762
auuacuccuagaaauuuca

SEQ ID NO: 2470764 - RNA, 19 nt, Artificial Sequence
  Description of Artificial Sequence: Synthetic oligonucleotide
  Sense strand starting at position 3393 of SEQ ID NO: 1887415
ccgaguaugugucuaauuu

SEQ ID NO: 2470765 - RNA, 19 nt, Artificial Sequence
  Description of Artificial Sequence: Synthetic oligonucleotide
  Antisense strand to SEQ ID NO: 2470764
aaauuagacacauacucgg

SEQ ID NO: 2470766 - RNA, 19 nt, Artificial Sequence
  Description of Artificial Sequence: Synthetic oligonucleotide
  Sense strand starting at position 3460 of SEQ ID NO: 1887415
ggugaaugcccuuauguga

SEQ ID NO: 2470767 - RNA, 19 nt, Artificial Sequence
  Description of Artificial Sequence: Synthetic oligonucleotide
  Antisense strand to SEQ ID NO: 2470766
ucacauaagggcauucacc

SEQ ID NO: 2470768 - RNA, 19 nt, Artificial Sequence
  Description of Artificial Sequence: Synthetic oligonucleotide
  Sense strand starting at position 3463 of SEQ ID NO: 1887415
gaaugcccuuaugugaauu

SEQ ID NO: 2470769 - RNA, 19 nt, Artificial Sequence
  Description of Artificial Sequence: Synthetic oligonucleotide
  Antisense strand to SEQ ID NO: 2470768
aauucacauaagggcauuc

SEQ ID NO: 2470770 - RNA, 19 nt, Artificial Sequence
  Description of Artificial Sequence: Synthetic oligonucleotide
  Sense strand starting at position 3602 of SEQ ID NO: 1887415
uagcaauucuggguaaaug

SEQ ID NO: 2470771 - RNA, 19 nt, Artificial Sequence
  Description of Artificial Sequence: Synthetic oligonucleotide
  Antisense strand to SEQ ID NO: 2470770
cauuuacccagaauugcua

SEQ ID NO: 2470772 - RNA, 19 nt, Artificial Sequence
  Description of Artificial Sequence: Synthetic oligonucleotide
  Sense strand starting at position 3684 of SEQ ID NO: 1887415
gccagucuugccuuacgua

SEQ ID NO: 2470773 - RNA, 19 nt, Artificial Sequence
  Description of Artificial Sequence: Synthetic oligonucleotide
  Antisense strand to SEQ ID NO: 2470772
uacguaaggcaagacuggc

SEQ ID NO: 2470774 - RNA, 19 nt, Artificial Sequence
  Description of Artificial Sequence: Synthetic oligonucleotide
  Sense strand starting at position 28 of SEQ ID NO: 1887416
ggcagaauuaguuguucca

SEQ ID NO: 2470775 - RNA, 19 nt, Artificial Sequence
  Description of Artificial Sequence: Synthetic oligonucleotide
  Antisense strand to SEQ ID NO: 2470774
uggaacaacuaauucugcc

SEQ ID NO: 2470776 - RNA, 19 nt, Artificial Sequence
  Description of Artificial Sequence: Synthetic oligonucleotide
  Sense strand starting at position 31 of SEQ ID NO: 1887416
agaauuaguuguuccauau

SEQ ID NO: 2470777 - RNA, 19 nt, Artificial Sequence
  Description of Artificial Sequence: Synthetic oligonucleotide
  Antisense strand to SEQ ID NO: 2470776
auauggaacaacuaauucu

SEQ ID NO: 2470778 - RNA, 19 nt, Artificial Sequence
  Description of Artificial Sequence: Synthetic oligonucleotide
  Sense strand starting at position 35 of SEQ ID NO: 1887416
uuaguuguuccauauccua

SEQ ID NO: 2470779 - RNA, 19 nt, Artificial Sequence
  Description of Artificial Sequence: Synthetic oligonucleotide
  Antisense strand to SEQ ID NO: 2470778
uaggauauggaacaacuaa

SEQ ID NO: 2470780 - RNA, 19 nt, Artificial Sequence
  Description of Artificial Sequence: Synthetic oligonucleotide
  Sense strand starting at position 110 of SEQ ID NO: 1887416
cuaacucaacuguguagau

SEQ ID NO: 2470781 - RNA, 19 nt, Artificial Sequence
  Description of Artificial Sequence: Synthetic oligonucleotide
  Antisense strand to SEQ ID NO: 2470780
aucuacacaguugaguuag

SEQ ID NO: 2470782 - RNA, 19 nt, Artificial Sequence
  Description of Artificial Sequence: Synthetic oligonucleotide
  Sense strand starting at position 120 of SEQ ID NO: 1887416
uguguagaucaagacaguu

SEQ ID NO: 2470783 - RNA, 19 nt, Artificial Sequence
  Description of Artificial Sequence: Synthetic oligonucleotide
  Antisense strand to SEQ ID NO: 2470782
aacugucuugaucuacaca

SEQ ID NO: 2470784 - RNA, 19 nt, Artificial Sequence
  Description of Artificial Sequence: Synthetic oligonucleotide
  Sense strand starting at position 505 of SEQ ID NO: 1887416
aggcaagacuggcucuaaa

SEQ ID NO: 2470785 - RNA, 19 nt, Artificial Sequence
  Description of Artificial Sequence: Synthetic oligonucleotide
  Antisense strand to SEQ ID NO: 2470784
uuuagagccagucuugccu

SEQ ID NO: 2470786 - RNA, 19 nt, Artificial Sequence
  Description of Artificial Sequence: Synthetic oligonucleotide
  Sense strand starting at position 612 of SEQ ID NO: 1887416
cugacaagguaucuuagca

SEQ ID NO: 2470787 - RNA, 19 nt, Artificial Sequence
  Description of Artificial Sequence: Synthetic oligonucleotide
  Antisense strand to SEQ ID NO: 2470786
ugcuaagauaccuugucag

SEQ ID NO: 2470788 - RNA, 19 nt, Artificial Sequence
  Description of Artificial Sequence: Synthetic oligonucleotide
  Sense strand starting at position 619 of SEQ ID NO: 1887416
gguaucuuagcagggcaga

SEQ ID NO: 2470789 - RNA, 19 nt, Artificial Sequence
  Description of Artificial Sequence: Synthetic oligonucleotide
  Antisense strand to SEQ ID NO: 2470788
ucugcccugcuaagauacc

SEQ ID NO: 2470790 - RNA, 19 nt, Artificial Sequence
  Description of Artificial Sequence: Synthetic oligonucleotide
  Sense strand starting at position 620 of SEQ ID NO: 1887416
guaucuuagcagggcagaa

SEQ ID NO: 2470791 - RNA, 19 nt, Artificial Sequence
  Description of Artificial Sequence: Synthetic oligonucleotide
  Antisense strand to SEQ ID NO: 2470790
uucugcccugcuaagauac

SEQ ID NO: 2470792 - RNA, 19 nt, Artificial Sequence
  Description of Artificial Sequence: Synthetic oligonucleotide
  Sense strand starting at position 636 of SEQ ID NO: 1887416
gaagucucaugguuugagu

SEQ ID NO: 2470793 - RNA, 19 nt, Artificial Sequence
  Description of Artificial Sequence: Synthetic oligonucleotide
  Antisense strand to SEQ ID NO: 2470792
acucaaaccaugagacuuc

SEQ ID NO: 2470794 - RNA, 19 nt, Artificial Sequence
  Description of Artificial Sequence: Synthetic oligonucleotide
  Sense strand starting at position 638 of SEQ ID NO: 1887416
agucucaugguuugaguca

SEQ ID NO: 2470795 - RNA, 19 nt, Artificial Sequence
  Description of Artificial Sequence: Synthetic oligonucleotide
  Antisense strand to SEQ ID NO: 2470794
ugacucaaaccaugagacu

SEQ ID NO: 2470796 - RNA, 19 nt, Artificial Sequence
  Description of Artificial Sequence: Synthetic oligonucleotide
  Sense strand starting at position 645 of SEQ ID NO: 1887416
ugguuugagucaguuggga

SEQ ID NO: 2470797 - RNA, 19 nt, Artificial Sequence
  Description of Artificial Sequence: Synthetic oligonucleotide
  Antisense strand to SEQ ID NO: 2470796
ucccaacugacucaaacca

SEQ ID NO: 2470798 - RNA, 19 nt, Artificial Sequence
  Description of Artificial Sequence: Synthetic oligonucleotide
  Sense strand starting at position 880 of SEQ ID NO: 1887416
aguaauaucugacugaauu

SEQ ID NO: 2470799 - RNA, 19 nt, Artificial Sequence
  Description of Artificial Sequence: Synthetic oligonucleotide
  Antisense strand to SEQ ID NO: 2470798
aauucagucagauauuacu

SEQ ID NO: 2470800 - RNA, 19 nt, Artificial Sequence
  Description of Artificial Sequence: Synthetic oligonucleotide
  Sense strand starting at position 901 of SEQ ID NO: 1887416
uuggaauagcuauguguag

SEQ ID NO: 2470801 - RNA, 19 nt, Artificial Sequence
  Description of Artificial Sequence: Synthetic oligonucleotide
  Antisense strand to SEQ ID NO: 2470800
cuacacauagcuauuccaa

SEQ ID NO: 2470802 - RNA, 19 nt, Artificial Sequence
  Description of Artificial Sequence: Synthetic oligonucleotide
  Sense strand starting at position 902 of SEQ ID NO: 1887416
uggaauagcuauguguaga

SEQ ID NO: 2470803 - RNA, 19 nt, Artificial Sequence
  Description of Artificial Sequence: Synthetic oligonucleotide
  Antisense strand to SEQ ID NO: 2470802
ucuacacauagcuauucca

SEQ ID NO: 2470804 - RNA, 19 nt, Artificial Sequence
  Description of Artificial Sequence: Synthetic oligonucleotide
  Sense strand starting at position 903 of SEQ ID NO: 1887416
ggaauagcuauguguagaa

SEQ ID NO: 2470805 - RNA, 19 nt, Artificial Sequence
  Description of Artificial Sequence: Synthetic oligonucleotide
  Antisense strand to SEQ ID NO: 2470804
uucuacacauagcuauucc

SEQ ID NO: 2470806 - RNA, 19 nt, Artificial Sequence
  Description of Artificial Sequence: Synthetic oligonucleotide
  Sense strand starting at position 955 of SEQ ID NO: 1887416
ggaucugauuccuuagucu

SEQ ID NO: 2470807 - RNA, 19 nt, Artificial Sequence
  Description of Artificial Sequence: Synthetic oligonucleotide
  Antisense strand to SEQ ID NO: 2470806
agacuaaggaaucagaucc

SEQ ID NO: 2470808 - RNA, 19 nt, Artificial Sequence
  Description of Artificial Sequence: Synthetic oligonucleotide
  Sense strand starting at position 959 of SEQ ID NO: 1887416
cugauuccuuagucucuua

SEQ ID NO: 2470809 - RNA, 19 nt, Artificial Sequence
  Description of Artificial Sequence: Synthetic oligonucleotide
  Antisense strand to SEQ ID NO: 2470808
uaagagacuaaggaaucag

SEQ ID NO: 2470810 - RNA, 19 nt, Artificial Sequence
  Description of Artificial Sequence: Synthetic oligonucleotide
  Sense strand starting at position 1009 of SEQ ID NO: 1887416
guccuuggucaagacuaca

SEQ ID NO: 2470811 - RNA, 19 nt, Artificial Sequence
  Description of Artificial Sequence: Synthetic oligonucleotide
  Antisense strand to SEQ ID NO: 2470810
uguagucuugaccaaggac

SEQ ID NO: 2470812 - RNA, 19 nt, Artificial Sequence
  Description of Artificial Sequence: Synthetic oligonucleotide
  Sense strand starting at position 1239 of SEQ ID NO: 1887416
gagcuaaucgcuuaaguca

SEQ ID NO: 2470813 - RNA, 19 nt, Artificial Sequence
  Description of Artificial Sequence: Synthetic oligonucleotide
  Antisense strand to SEQ ID NO: 2470812
ugacuuaagcgauuagcuc

SEQ ID NO: 2470814 - RNA, 19 nt, Artificial Sequence
  Description of Artificial Sequence: Synthetic oligonucleotide
  Sense strand starting at position 1385 of SEQ ID NO: 1887416
augcuagguucccuacauu

SEQ ID NO: 2470815 - RNA, 19 nt, Artificial Sequence
  Description of Artificial Sequence: Synthetic oligonucleotide
  Antisense strand to SEQ ID NO: 2470814
aauguagggaaccuagcau

SEQ ID NO: 2470816 - RNA, 19 nt, Artificial Sequence
  Description of Artificial Sequence: Synthetic oligonucleotide
  Sense strand starting at position 1536 of SEQ ID NO: 1887416
cgccuugucagcucgaguu

SEQ ID NO: 2470817 - RNA, 19 nt, Artificial Sequence
  Description of Artificial Sequence: Synthetic oligonucleotide
  Antisense strand to SEQ ID NO: 2470816
aacucgagcugacaaggcg

SEQ ID NO: 2470818 - RNA, 19 nt, Artificial Sequence
  Description of Artificial Sequence: Synthetic oligonucleotide
  Sense strand starting at position 2982 of SEQ ID NO: 1887416
gcgggagguguguuuccuu

SEQ ID NO: 2470819 - RNA, 19 nt, Artificial Sequence
  Description of Artificial Sequence: Synthetic oligonucleotide
  Antisense strand to SEQ ID NO: 2470818
aaggaaacacaccucccgc

SEQ ID NO: 2470820 - RNA, 19 nt, Artificial Sequence
  Description of Artificial Sequence: Synthetic oligonucleotide
  Sense strand starting at position 2985 of SEQ ID NO: 1887416
ggagguguguuuccuuaga

SEQ ID NO: 2470821 - RNA, 19 nt, Artificial Sequence
  Description of Artificial Sequence: Synthetic oligonucleotide
  Antisense strand to SEQ ID NO: 2470820
ucuaaggaaacacaccucc

SEQ ID NO: 2470822 - RNA, 19 nt, Artificial Sequence
  Description of Artificial Sequence: Synthetic oligonucleotide
  Sense strand starting at position 2989 of SEQ ID NO: 1887416
guguguuuccuuagagucg

SEQ ID NO: 2470823 - RNA, 19 nt, Artificial Sequence
  Description of Artificial Sequence: Synthetic oligonucleotide
  Antisense strand to SEQ ID NO: 2470822
cgacucuaaggaaacacac

SEQ ID NO: 2470824 - RNA, 19 nt, Artificial Sequence
  Description of Artificial Sequence: Synthetic oligonucleotide
  Sense strand starting at position 3078 of SEQ ID NO: 1887416
auuguuugaggaugacaua

SEQ ID NO: 2470825 - RNA, 19 nt, Artificial Sequence
  Description of Artificial Sequence: Synthetic oligonucleotide
  Antisense strand to SEQ ID NO: 2470824
uaugucauccucaaacaau

SEQ ID NO: 2470826 - RNA, 19 nt, Artificial Sequence
  Description of Artificial Sequence: Synthetic oligonucleotide
  Sense strand starting at position 3149 of SEQ ID NO: 1887416
aguggauuacgagaagguu

SEQ ID NO: 2470827 - RNA, 19 nt, Artificial Sequence
  Description of Artificial Sequence: Synthetic oligonucleotide
  Antisense strand to SEQ ID NO: 2470826
aaccuucucguaauccacu

SEQ ID NO: 2470828 - RNA, 19 nt, Artificial Sequence
  Description of Artificial Sequence: Synthetic oligonucleotide
  Sense strand starting at position 3152 of SEQ ID NO: 1887416
ggauuacgagaagguuaga

SEQ ID NO: 2470829 - RNA, 19 nt, Artificial Sequence
  Description of Artificial Sequence: Synthetic oligonucleotide
  Antisense strand to SEQ ID NO: 2470828
ucuaaccuucucguaaucc

SEQ ID NO: 2470830 - RNA, 19 nt, Artificial Sequence
  Description of Artificial Sequence: Synthetic oligonucleotide
  Sense strand starting at position 3275 of SEQ ID NO: 1887416
cuuugagguacugaaguuu

SEQ ID NO: 2470831 - RNA, 19 nt, Artificial Sequence
  Description of Artificial Sequence: Synthetic oligonucleotide
  Antisense strand to SEQ ID NO: 2470830
aaacuucaguaccucaaag

SEQ ID NO: 2470832 - RNA, 19 nt, Artificial Sequence
  Description of Artificial Sequence: Synthetic oligonucleotide
  Sense strand starting at position 3348 of SEQ ID NO: 1887416
uggcgacggaauugauauu

SEQ ID NO: 2470833 - RNA, 19 nt, Artificial Sequence
  Description of Artificial Sequence: Synthetic oligonucleotide
  Antisense strand to SEQ ID NO: 2470832
aauaucaauuccgucgcca

SEQ ID NO: 2470834 - RNA, 19 nt, Artificial Sequence
  Description of Artificial Sequence: Synthetic oligonucleotide
  Sense strand starting at position 3621 of SEQ ID NO: 1887416
ccaagaaauuguucugagu

SEQ ID NO: 2470835 - RNA, 19 nt, Artificial Sequence
  Description of Artificial Sequence: Synthetic oligonucleotide
  Antisense strand to SEQ ID NO: 2470834
acucagaacaauuucuugg

SEQ ID NO: 2470836 - RNA, 19 nt, Artificial Sequence
  Description of Artificial Sequence: Synthetic oligonucleotide
  Sense strand starting at position 3628 of SEQ ID NO: 1887416
auuguucugaguugagaug

SEQ ID NO: 2470837 - RNA, 19 nt, Artificial Sequence
  Description of Artificial Sequence: Synthetic oligonucleotide
  Antisense strand to SEQ ID NO: 2470836
caucucaacucagaacaau

SEQ ID NO: 2470838 - RNA, 19 nt, Artificial Sequence
  Description of Artificial Sequence: Synthetic oligonucleotide
  Sense strand starting at position 3629 of SEQ ID NO: 1887416
uuguucugaguugagauga

SEQ ID NO: 2470839 - RNA, 19 nt, Artificial Sequence
  Description of Artificial Sequence: Synthetic oligonucleotide
  Antisense strand to SEQ ID NO: 2470838
ucaucucaacucagaacaa

SEQ ID NO: 2470840 - RNA, 19 nt, Artificial Sequence
  Description of Artificial Sequence: Synthetic oligonucleotide
  Sense strand starting at position 3639 of SEQ ID NO: 1887416
uugagaugauaaccauagu

SEQ ID NO: 2470841 - RNA, 19 nt, Artificial Sequence
  Description of Artificial Sequence: Synthetic oligonucleotide
  Antisense strand to SEQ ID NO: 2470840
acuaugguuaucaucucaa

SEQ ID NO: 2470842 - RNA, 19 nt, Artificial Sequence
  Description of Artificial Sequence: Synthetic oligonucleotide
  Sense strand starting at position 3658 of SEQ ID NO: 1887416
aggauuguggucuguuuag

SEQ ID NO: 2470843 - RNA, 19 nt, Artificial Sequence
  Description of Artificial Sequence: Synthetic oligonucleotide
  Antisense strand to SEQ ID NO: 2470842
cuaaacagaccacaauccu

SEQ ID NO: 2470844 - RNA, 19 nt, Artificial Sequence
  Description of Artificial Sequence: Synthetic oligonucleotide
  Sense strand starting at position 3693 of SEQ ID NO: 1887416
ugcugagauugacugucua

SEQ ID NO: 2470845 - RNA, 19 nt, Artificial Sequence
  Description of Artificial Sequence: Synthetic oligonucleotide
  Antisense strand to SEQ ID NO: 2470844
uagacagucaaucucagca

SEQ ID NO: 2470846 - RNA, 19 nt, Artificial Sequence
  Description of Artificial Sequence: Synthetic oligonucleotide
  Sense strand starting at position 3697 of SEQ ID NO: 1887416
gagauugacugucuaguac

SEQ ID NO: 2470847 - RNA, 19 nt, Artificial Sequence
  Description of Artificial Sequence: Synthetic oligonucleotide
  Antisense strand to SEQ ID NO: 2470846
guacuagacagucaaucuc

SEQ ID NO: 2470848 - RNA, 19 nt, Artificial Sequence
  Description of Artificial Sequence: Synthetic oligonucleotide
  Sense strand starting at position 3709 of SEQ ID NO: 1887416
cuaguaccuguauaaguaa

SEQ ID NO: 2470849 - RNA, 19 nt, Artificial Sequence
  Description of Artificial Sequence: Synthetic oligonucleotide
  Antisense strand to SEQ ID NO: 2470848
uuacuuauacagguacuag

SEQ ID NO: 2470850 - RNA, 19 nt, Artificial Sequence
  Description of Artificial Sequence: Synthetic oligonucleotide
  Sense strand starting at position 3772 of SEQ ID NO: 1887416
guaguuaauccuuagcauu

SEQ ID NO: 2470851 - RNA, 19 nt, Artificial Sequence
  Description of Artificial Sequence: Synthetic oligonucleotide
  Antisense strand to SEQ ID NO: 2470850
aaugcuaaggauuaacuac

SEQ ID NO: 2470852 - RNA, 19 nt, Artificial Sequence
  Description of Artificial Sequence: Synthetic oligonucleotide
  Sense strand starting at position 3780 of SEQ ID NO: 1887416
uccuuagcauugucuaaug

SEQ ID NO: 2470853 - RNA, 19 nt, Artificial Sequence
  Description of Artificial Sequence: Synthetic oligonucleotide
  Antisense strand to SEQ ID NO: 2470852
cauuagacaaugcuaagga

SEQ ID NO: 2470854 - RNA, 19 nt, Artificial Sequence
  Description of Artificial Sequence: Synthetic oligonucleotide
  Sense strand starting at position 125 of SEQ ID NO: 1887417
guaagugaagcuggguuaa

SEQ ID NO: 2470855 - RNA, 19 nt, Artificial Sequence
  Description of Artificial Sequence: Synthetic oligonucleotide
  Antisense strand to SEQ ID NO: 2470854
uuaacccagcuucacuuac

SEQ ID NO: 2470856 - RNA, 19 nt, Artificial Sequence
  Description of Artificial Sequence: Synthetic oligonucleotide
  Sense strand starting at position 137 of SEQ ID NO: 1887417
ggguuaaagguauguagaa

SEQ ID NO: 2470857 - RNA, 19 nt, Artificial Sequence
  Description of Artificial Sequence: Synthetic oligonucleotide
  Antisense strand to SEQ ID NO: 2470856
uucuacauaccuuuaaccc

SEQ ID NO: 2470858 - RNA, 19 nt, Artificial Sequence
  Description of Artificial Sequence: Synthetic oligonucleotide
  Sense strand starting at position 138 of SEQ ID NO: 1887417
gguuaaagguauguagaau

SEQ ID NO: 2470859 - RNA, 19 nt, Artificial Sequence
  Description of Artificial Sequence: Synthetic oligonucleotide
  Antisense strand to SEQ ID NO: 2470858
auucuacauaccuuuaacc

SEQ ID NO: 2470860 - RNA, 19 nt, Artificial Sequence
  Description of Artificial Sequence: Synthetic oligonucleotide
  Sense strand starting at position 150 of SEQ ID NO: 1887417
guagaauaaugauugcuau

SEQ ID NO: 2470861 - RNA, 19 nt, Artificial Sequence
  Description of Artificial Sequence: Synthetic oligonucleotide
  Antisense strand to SEQ ID NO: 2470860
auagcaaucauuauucuac

SEQ ID NO: 2470862 - RNA, 19 nt, Artificial Sequence
  Description of Artificial Sequence: Synthetic oligonucleotide
  Sense strand starting at position 213 of SEQ ID NO: 1887417
guuuguaaacacugguuua

SEQ ID NO: 2470863 - RNA, 19 nt, Artificial Sequence
  Description of Artificial Sequence: Synthetic oligonucleotide
  Antisense strand to SEQ ID NO: 2470862
uaaaccaguguuuacaaac

SEQ ID NO: 2470864 - RNA, 19 nt, Artificial Sequence
  Description of Artificial Sequence: Synthetic oligonucleotide
  Sense strand starting at position 285 of SEQ ID NO: 1887417
ugugcugaaccaugaauga

SEQ ID NO: 2470865 - RNA, 19 nt, Artificial Sequence
  Description of Artificial Sequence: Synthetic oligonucleotide
  Antisense strand to SEQ ID NO: 2470864
ucauucaugguucagcaca

SEQ ID NO: 2470866 - RNA, 19 nt, Artificial Sequence
  Description of Artificial Sequence: Synthetic oligonucleotide
  Sense strand starting at position 300 of SEQ ID NO: 1887417
augauaccgucacugaaau

SEQ ID NO: 2470867 - RNA, 19 nt, Artificial Sequence
  Description of Artificial Sequence: Synthetic oligonucleotide
  Antisense strand to SEQ ID NO: 2470866
auuucagugacgguaucau

SEQ ID NO: 2470868 - RNA, 19 nt, Artificial Sequence
  Description of Artificial Sequence: Synthetic oligonucleotide
  Sense strand starting at position 301 of SEQ ID NO: 1887417
ugauaccgucacugaaaua

SEQ ID NO: 2470869 - RNA, 19 nt, Artificial Sequence
  Description of Artificial Sequence: Synthetic oligonucleotide
  Antisense strand to SEQ ID NO: 2470868
uauuucagugacgguauca

SEQ ID NO: 2470870 - RNA, 19 nt, Artificial Sequence
  Description of Artificial Sequence: Synthetic oligonucleotide
  Sense strand starting at position 385 of SEQ ID NO: 1887417
ugcauagcucuugaauaca

SEQ ID NO: 2470871 - RNA, 19 nt, Artificial Sequence
  Description of Artificial Sequence: Synthetic oligonucleotide
  Antisense strand to SEQ ID NO: 2470870
uguauucaagagcuaugca

SEQ ID NO: 2470872 - RNA, 19 nt, Artificial Sequence
  Description of Artificial Sequence: Synthetic oligonucleotide
  Sense strand starting at position 485 of SEQ ID NO: 1887417
ggcagaauuaguuguucca

SEQ ID NO: 2470873 - RNA, 19 nt, Artificial Sequence
  Description of Artificial Sequence: Synthetic oligonucleotide
  Antisense strand to SEQ ID NO: 2470872
uggaacaacuaauucugcc

SEQ ID NO: 2470874 - RNA, 19 nt, Artificial Sequence
  Description of Artificial Sequence: Synthetic oligonucleotide
  Sense strand starting at position 488 of SEQ ID NO: 1887417
agaauuaguuguuccauau

SEQ ID NO: 2470875 - RNA, 19 nt, Artificial Sequence
  Description of Artificial Sequence: Synthetic oligonucleotide
  Antisense strand to SEQ ID NO: 2470874
auauggaacaacuaauucu

SEQ ID NO: 2470876 - RNA, 19 nt, Artificial Sequence
  Description of Artificial Sequence: Synthetic oligonucleotide
  Sense strand starting at position 492 of SEQ ID NO: 1887417
uuaguuguuccauauccua

SEQ ID NO: 2470877 - RNA, 19 nt, Artificial Sequence
  Description of Artificial Sequence: Synthetic oligonucleotide
  Antisense strand to SEQ ID NO: 2470876
uaggauauggaacaacuaa

SEQ ID NO: 2470878 - RNA, 19 nt, Artificial Sequence
  Description of Artificial Sequence: Synthetic oligonucleotide
  Sense strand starting at position 567 of SEQ ID NO: 1887417
cuaacucaacuguguagau

SEQ ID NO: 2470879 - RNA, 19 nt, Artificial Sequence
  Description of Artificial Sequence: Synthetic oligonucleotide
  Antisense strand to SEQ ID NO: 2470878
aucuacacaguugaguuag

SEQ ID NO: 2470880 - RNA, 19 nt, Artificial Sequence
  Description of Artificial Sequence: Synthetic oligonucleotide
  Sense strand starting at position 577 of SEQ ID NO: 1887417
uguguagaucaagacaguu

SEQ ID NO: 2470881 - RNA, 19 nt, Artificial Sequence
  Description of Artificial Sequence: Synthetic oligonucleotide
  Antisense strand to SEQ ID NO: 2470880
aacugucuugaucuacaca

SEQ ID NO: 2470882 - RNA, 19 nt, Artificial Sequence
  Description of Artificial Sequence: Synthetic oligonucleotide
  Sense strand starting at position 962 of SEQ ID NO: 1887417
aggcaagacuggcucuaaa

SEQ ID NO: 2470883 - RNA, 19 nt, Artificial Sequence
  Description of Artificial Sequence: Synthetic oligonucleotide
  Antisense strand to SEQ ID NO: 2470882
uuuagagccagucuugccu

SEQ ID NO: 2470884 - RNA, 19 nt, Artificial Sequence
  Description of Artificial Sequence: Synthetic oligonucleotide
  Sense strand starting at position 1069 of SEQ ID NO: 1887417
cugacaagguaucuuagca

SEQ ID NO: 2470885 - RNA, 19 nt, Artificial Sequence
  Description of Artificial Sequence: Synthetic oligonucleotide
  Antisense strand to SEQ ID NO: 2470884
ugcuaagauaccuugucag

SEQ ID NO: 2470886 - RNA, 19 nt, Artificial Sequence
  Description of Artificial Sequence: Synthetic oligonucleotide
  Sense strand starting at position 1076 of SEQ ID NO: 1887417
gguaucuuagcagggcaga

SEQ ID NO: 2470887 - RNA, 19 nt, Artificial Sequence
  Description of Artificial Sequence: Synthetic oligonucleotide
  Antisense strand to SEQ ID NO: 2470886
ucugcccugcuaagauacc

SEQ ID NO: 2470888 - RNA, 19 nt, Artificial Sequence
  Description of Artificial Sequence: Synthetic oligonucleotide
  Sense strand starting at position 1077 of SEQ ID NO: 1887417
guaucuuagcagggcagaa

SEQ ID NO: 2470889 - RNA, 19 nt, Artificial Sequence
  Description of Artificial Sequence: Synthetic oligonucleotide
  Antisense strand to SEQ ID NO: 2470888
uucugcccugcuaagauac

SEQ ID NO: 2470890 - RNA, 19 nt, Artificial Sequence
  Description of Artificial Sequence: Synthetic oligonucleotide
  Sense strand starting at position 1093 of SEQ ID NO: 1887417
gaagucucaugguuugagu

SEQ ID NO: 2470891 - RNA, 19 nt, Artificial Sequence
  Description of Artificial Sequence: Synthetic oligonucleotide
  Antisense strand to SEQ ID NO: 2470890
acucaaaccaugagacuuc

SEQ ID NO: 2470892 - RNA, 19 nt, Artificial Sequence
  Description of Artificial Sequence: Synthetic oligonucleotide
  Sense strand starting at position 1095 of SEQ ID NO: 1887417
agucucaugguuugaguca

SEQ ID NO: 2470893 - RNA, 19 nt, Artificial Sequence
  Description of Artificial Sequence: Synthetic oligonucleotide
  Antisense strand to SEQ ID NO: 2470892
ugacucaaaccaugagacu

SEQ ID NO: 2470894 - RNA, 19 nt, Artificial Sequence
  Description of Artificial Sequence: Synthetic oligonucleotide
  Sense strand starting at position 1102 of SEQ ID NO: 1887417
ugguuugagucaguuggga

SEQ ID NO: 2470895 - RNA, 19 nt, Artificial Sequence
  Description of Artificial Sequence: Synthetic oligonucleotide
  Antisense strand to SEQ ID NO: 2470894
ucccaacugacucaaacca

SEQ ID NO: 2470896 - RNA, 19 nt, Artificial Sequence
  Description of Artificial Sequence: Synthetic oligonucleotide
  Sense strand starting at position 1337 of SEQ ID NO: 1887417
aguaauaucugacugaauu

SEQ ID NO: 2470897 - RNA, 19 nt, Artificial Sequence
  Description of Artificial Sequence: Synthetic oligonucleotide
  Antisense strand to SEQ ID NO: 2470896
aauucagucagauauuacu

SEQ ID NO: 2470898 - RNA, 19 nt, Artificial Sequence
  Description of Artificial Sequence: Synthetic oligonucleotide
  Sense strand starting at position 1358 of SEQ ID NO: 1887417
uuggaauagcuauguguag

SEQ ID NO: 2470899 - RNA, 19 nt, Artificial Sequence
  Description of Artificial Sequence: Synthetic oligonucleotide
  Antisense strand to SEQ ID NO: 2470898
cuacacauagcuauuccaa

SEQ ID NO: 2470900 - RNA, 19 nt, Artificial Sequence
  Description of Artificial Sequence: Synthetic oligonucleotide
  Sense strand starting at position 1359 of SEQ ID NO: 1887417
uggaauagcuauguguaga

SEQ ID NO: 2470901 - RNA, 19 nt, Artificial Sequence
  Description of Artificial Sequence: Synthetic oligonucleotide
  Antisense strand to SEQ ID NO: 2470900
ucuacacauagcuauucca

SEQ ID NO: 2470902 - RNA, 19 nt, Artificial Sequence
  Description of Artificial Sequence: Synthetic oligonucleotide
  Sense strand starting at position 1360 of SEQ ID NO: 1887417
ggaauagcuauguguagaa

SEQ ID NO: 2470903 - RNA, 19 nt, Artificial Sequence
  Description of Artificial Sequence: Synthetic oligonucleotide
  Antisense strand to SEQ ID NO: 2470902
uucuacacauagcuauucc

SEQ ID NO: 2470904 - RNA, 19 nt, Artificial Sequence
  Description of Artificial Sequence: Synthetic oligonucleotide
  Sense strand starting at position 1412 of SEQ ID NO: 1887417
ggaucugauuccuuagucu

SEQ ID NO: 2470905 - RNA, 19 nt, Artificial Sequence
  Description of Artificial Sequence: Synthetic oligonucleotide
  Antisense strand to SEQ ID NO: 2470904
agacuaaggaaucagaucc

SEQ ID NO: 2470906 - RNA, 19 nt, Artificial Sequence
  Description of Artificial Sequence: Synthetic oligonucleotide
  Sense strand starting at position 1416 of SEQ ID NO: 1887417
cugauuccuuagucucuua

SEQ ID NO: 2470907 - RNA, 19 nt, Artificial Sequence
  Description of Artificial Sequence: Synthetic oligonucleotide
  Antisense strand to SEQ ID NO: 2470906
uaagagacuaaggaaucag

SEQ ID NO: 2470908 - RNA, 19 nt, Artificial Sequence
  Description of Artificial Sequence: Synthetic oligonucleotide
  Sense strand starting at position 1466 of SEQ ID NO: 1887417
guccuuggucaagacuaca

SEQ ID NO: 2470909 - RNA, 19 nt, Artificial Sequence
  Description of Artificial Sequence: Synthetic oligonucleotide
  Antisense strand to SEQ ID NO: 2470908
uguagucuugaccaaggac

SEQ ID NO: 2470910 - RNA, 19 nt, Artificial Sequence
  Description of Artificial Sequence: Synthetic oligonucleotide
  Sense strand starting at position 1696 of SEQ ID NO: 1887417
gagcuaaucgcuuaaguca

SEQ ID NO: 2470911 - RNA, 19 nt, Artificial Sequence
  Description of Artificial Sequence: Synthetic oligonucleotide
  Antisense strand to SEQ ID NO: 2470910
ugacuuaagcgauuagcuc

SEQ ID NO: 2470912 - RNA, 19 nt, Artificial Sequence
  Description of Artificial Sequence: Synthetic oligonucleotide
  Sense strand starting at position 1842 of SEQ ID NO: 1887417
augcuagguucccuacauu

SEQ ID NO: 2470913 - RNA, 19 nt, Artificial Sequence
  Description of Artificial Sequence: Synthetic oligonucleotide
  Antisense strand to SEQ ID NO: 2470912
aauguagggaaccuagcau

SEQ ID NO: 2470914 - RNA, 19 nt, Artificial Sequence
  Description of Artificial Sequence: Synthetic oligonucleotide
  Sense strand starting at position 1993 of SEQ ID NO: 1887417
cgccuugucagcucgaguu

SEQ ID NO: 2470915 - RNA, 19 nt, Artificial Sequence
  Description of Artificial Sequence: Synthetic oligonucleotide
  Antisense strand to SEQ ID NO: 2470914
aacucgagcugacaaggcg

SEQ ID NO: 2470916 - RNA, 19 nt, Artificial Sequence
  Description of Artificial Sequence: Synthetic oligonucleotide
  Sense strand starting at position 3439 of SEQ ID NO: 1887417
gcgggagguguguuuccuu

SEQ ID NO: 2470917 - RNA, 19 nt, Artificial Sequence
  Description of Artificial Sequence: Synthetic oligonucleotide
  Antisense strand to SEQ ID NO: 2470916
aaggaaacacaccucccgc

SEQ ID NO: 2470918 - RNA, 19 nt, Artificial Sequence
  Description of Artificial Sequence: Synthetic oligonucleotide
  Sense strand starting at position 3442 of SEQ ID NO: 1887417
ggagguguguuuccuuaga

SEQ ID NO: 2470919 - RNA, 19 nt, Artificial Sequence
  Description of Artificial Sequence: Synthetic oligonucleotide
  Antisense strand to SEQ ID NO: 2470918
ucuaaggaaacacaccucc

SEQ ID NO: 2470920 - RNA, 19 nt, Artificial Sequence
  Description of Artificial Sequence: Synthetic oligonucleotide
  Sense strand starting at position 3446 of SEQ ID NO: 1887417
guguguuuccuuagagucg

SEQ ID NO: 2470921 - RNA, 19 nt, Artificial Sequence
  Description of Artificial Sequence: Synthetic oligonucleotide
  Antisense strand to SEQ ID NO: 2470920
cgacucuaaggaaacacac

SEQ ID NO: 2470922 - RNA, 19 nt, Artificial Sequence
  Description of Artificial Sequence: Synthetic oligonucleotide
  Sense strand starting at position 3535 of SEQ ID NO: 1887417
auuguuugaggaugacaua

SEQ ID NO: 2470923 - RNA, 19 nt, Artificial Sequence
  Description of Artificial Sequence: Synthetic oligonucleotide
  Antisense strand to SEQ ID NO: 2470922
uaugucauccucaaacaau

SEQ ID NO: 2470924 - RNA, 19 nt, Artificial Sequence
  Description of Artificial Sequence: Synthetic oligonucleotide
  Sense strand starting at position 3606 of SEQ ID NO: 1887417
aguggauuacgagaagguu

SEQ ID NO: 2470925 - RNA, 19 nt, Artificial Sequence
  Description of Artificial Sequence: Synthetic oligonucleotide
  Antisense strand to SEQ ID NO: 2470924
aaccuucucguaauccacu

SEQ ID NO: 2470926 - RNA, 19 nt, Artificial Sequence
  Description of Artificial Sequence: Synthetic oligonucleotide
  Sense strand starting at position 3609 of SEQ ID NO: 1887417
ggauuacgagaagguuaga

SEQ ID NO: 2470927 - RNA, 19 nt, Artificial Sequence
  Description of Artificial Sequence: Synthetic oligonucleotide
  Antisense strand to SEQ ID NO: 2470926
ucuaaccuucucguaaucc

SEQ ID NO: 2470928 - RNA, 19 nt, Artificial Sequence
  Description of Artificial Sequence: Synthetic oligonucleotide
  Sense strand starting at position 3732 of SEQ ID NO: 1887417
cuuugagguacugaaguuu

SEQ ID NO: 2470929 - RNA, 19 nt, Artificial Sequence
  Description of Artificial Sequence: Synthetic oligonucleotide
  Antisense strand to SEQ ID NO: 2470928
aaacuucaguaccucaaag

SEQ ID NO: 2470930 - RNA, 19 nt, Artificial Sequence
  Description of Artificial Sequence: Synthetic oligonucleotide
  Sense strand starting at position 3805 of SEQ ID NO: 1887417
uggcgacggaauugauauu

SEQ ID NO: 2470931 - RNA, 19 nt, Artificial Sequence
  Description of Artificial Sequence: Synthetic oligonucleotide
  Antisense strand to SEQ ID NO: 2470930
aauaucaauuccgucgcca

SEQ ID NO: 2470932 - RNA, 19 nt, Artificial Sequence
  Description of Artificial Sequence: Synthetic oligonucleotide
  Sense strand starting at position 3899 of SEQ ID NO: 1887417
aagaguuaagcagguuugu

SEQ ID NO: 2470933 - RNA, 19 nt, Artificial Sequence
  Description of Artificial Sequence: Synthetic oligonucleotide
  Antisense strand to SEQ ID NO: 2470932
acaaaccugcuuaacucuu

SEQ ID NO: 2470934 - RNA, 19 nt, Artificial Sequence
  Description of Artificial Sequence: Synthetic oligonucleotide
  Sense strand starting at position 25 of SEQ ID NO: 1887418
ucacaauacugcucugguu

SEQ ID NO: 2470935 - RNA, 19 nt, Artificial Sequence
  Description of Artificial Sequence: Synthetic oligonucleotide
  Antisense strand to SEQ ID NO: 2470934
aaccagagcaguauuguga

SEQ ID NO: 2470936 - RNA, 19 nt, Artificial Sequence
  Description of Artificial Sequence: Synthetic oligonucleotide
  Sense strand starting at position 39 of SEQ ID NO: 1887418
ugguuacaaccgugacuuu

SEQ ID NO: 2470937 - RNA, 19 nt, Artificial Sequence
  Description of Artificial Sequence: Synthetic oligonucleotide
  Antisense strand to SEQ ID NO: 2470936
aaagucacgguuguaacca

SEQ ID NO: 2470938 - RNA, 19 nt, Artificial Sequence
  Description of Artificial Sequence: Synthetic oligonucleotide
  Sense strand starting at position 71 of SEQ ID NO: 1887418
uguguucccgcagagaaua

SEQ ID NO: 2470939 - RNA, 19 nt, Artificial Sequence
  Description of Artificial Sequence: Synthetic oligonucleotide
  Antisense strand to SEQ ID NO: 2470938
uauucucugcgggaacaca

SEQ ID NO: 2470940 - RNA, 19 nt, Artificial Sequence
  Description of Artificial Sequence: Synthetic oligonucleotide
  Sense strand starting at position 111 of SEQ ID NO: 1887418
aaggguauggcugggucaa

SEQ ID NO: 2470941 - RNA, 19 nt, Artificial Sequence
  Description of Artificial Sequence: Synthetic oligonucleotide
  Antisense strand to SEQ ID NO: 2470940
uugacccagccauacccuu

SEQ ID NO: 2470942 - RNA, 19 nt, Artificial Sequence
  Description of Artificial Sequence: Synthetic oligonucleotide
  Sense strand starting at position 112 of SEQ ID NO: 1887418
aggguauggcugggucaaa

SEQ ID NO: 2470943 - RNA, 19 nt, Artificial Sequence
  Description of Artificial Sequence: Synthetic oligonucleotide
  Antisense strand to SEQ ID NO: 2470942
uuugacccagccauacccu

SEQ ID NO: 2470944 - RNA, 19 nt, Artificial Sequence
  Description of Artificial Sequence: Synthetic oligonucleotide
  Sense strand starting at position 131 of SEQ ID NO: 1887418
gggcgaauguguuugggau

SEQ ID NO: 2470945 - RNA, 19 nt, Artificial Sequence
  Description of Artificial Sequence: Synthetic oligonucleotide
  Antisense strand to SEQ ID NO: 2470944
aucccaaacacauucgccc

SEQ ID NO: 2470946 - RNA, 19 nt, Artificial Sequence
  Description of Artificial Sequence: Synthetic oligonucleotide
  Sense strand starting at position 132 of SEQ ID NO: 1887418
ggcgaauguguuugggauu

SEQ ID NO: 2470947 - RNA, 19 nt, Artificial Sequence
  Description of Artificial Sequence: Synthetic oligonucleotide
  Antisense strand to SEQ ID NO: 2470946
aaucccaaacacauucgcc

SEQ ID NO: 2470948 - RNA, 19 nt, Artificial Sequence
  Description of Artificial Sequence: Synthetic oligonucleotide
  Sense strand starting at position 506 of SEQ ID NO: 1887418
agugaacucgaaggguaaa

SEQ ID NO: 2470949 - RNA, 19 nt, Artificial Sequence
  Description of Artificial Sequence: Synthetic oligonucleotide
  Antisense strand to SEQ ID NO: 2470948
uuuacccuucgaguucacu

SEQ ID NO: 2470950 - RNA, 19 nt, Artificial Sequence
  Description of Artificial Sequence: Synthetic oligonucleotide
  Sense strand starting at position 507 of SEQ ID NO: 1887418
gugaacucgaaggguaaau

SEQ ID NO: 2470951 - RNA, 19 nt, Artificial Sequence
  Description of Artificial Sequence: Synthetic oligonucleotide
  Antisense strand to SEQ ID NO: 2470950
auuuacccuucgaguucac

SEQ ID NO: 2470952 - RNA, 19 nt, Artificial Sequence
  Description of Artificial Sequence: Synthetic oligonucleotide
  Sense strand starting at position 549 of SEQ ID NO: 1887418
auuagagccuaauccagua

SEQ ID NO: 2470953 - RNA, 19 nt, Artificial Sequence
  Description of Artificial Sequence: Synthetic oligonucleotide
  Antisense strand to SEQ ID NO: 2470952
uacuggauuaggcucuaau

SEQ ID NO: 2470954 - RNA, 19 nt, Artificial Sequence
  Description of Artificial Sequence: Synthetic oligonucleotide
  Sense strand starting at position 554 of SEQ ID NO: 1887418
agccuaauccaguaagaca

SEQ ID NO: 2470955 - RNA, 19 nt, Artificial Sequence
  Description of Artificial Sequence: Synthetic oligonucleotide
  Antisense strand to SEQ ID NO: 2470954
ugucuuacuggauuaggcu

SEQ ID NO: 2470956 - RNA, 19 nt, Artificial Sequence
  Description of Artificial Sequence: Synthetic oligonucleotide
  Sense strand starting at position 577 of SEQ ID NO: 1887418
ccacuucugugaucgagaa

SEQ ID NO: 2470957 - RNA, 19 nt, Artificial Sequence
  Description of Artificial Sequence: Synthetic oligonucleotide
  Antisense strand to SEQ ID NO: 2470956
uucucgaucacagaagugg

SEQ ID NO: 2470958 - RNA, 19 nt, Artificial Sequence
  Description of Artificial Sequence: Synthetic oligonucleotide
  Sense strand starting at position 578 of SEQ ID NO: 1887418
cacuucugugaucgagaag

SEQ ID NO: 2470959 - RNA, 19 nt, Artificial Sequence
  Description of Artificial Sequence: Synthetic oligonucleotide
  Antisense strand to SEQ ID NO: 2470958
cuucucgaucacagaagug

SEQ ID NO: 2470960 - RNA, 19 nt, Artificial Sequence
  Description of Artificial Sequence: Synthetic oligonucleotide
  Sense strand starting at position 581 of SEQ ID NO: 1887418
uucugugaucgagaagcau

SEQ ID NO: 2470961 - RNA, 19 nt, Artificial Sequence
  Description of Artificial Sequence: Synthetic oligonucleotide
  Antisense strand to SEQ ID NO: 2470960
augcuucucgaucacagaa

SEQ ID NO: 2470962 - RNA, 19 nt, Artificial Sequence
  Description of Artificial Sequence: Synthetic oligonucleotide
  Sense strand starting at position 603 of SEQ ID NO: 1887418
ggagaaugaugcuaauaac

SEQ ID NO: 2470963 - RNA, 19 nt, Artificial Sequence
  Description of Artificial Sequence: Synthetic oligonucleotide
  Antisense strand to SEQ ID NO: 2470962
guuauuagcaucauucucc

SEQ ID NO: 2470964 - RNA, 19 nt, Artificial Sequence
  Description of Artificial Sequence: Synthetic oligonucleotide
  Sense strand starting at position 679 of SEQ ID NO: 1887418
uagugaugauacguccaca

SEQ ID NO: 2470965 - RNA, 19 nt, Artificial Sequence
  Description of Artificial Sequence: Synthetic oligonucleotide
  Antisense strand to SEQ ID NO: 2470964
uguggacguaucaucacua

SEQ ID NO: 2470966 - RNA, 19 nt, Artificial Sequence
  Description of Artificial Sequence: Synthetic oligonucleotide
  Sense strand starting at position 739 of SEQ ID NO: 1887418
gacagaguucuugggagau

SEQ ID NO: 2470967 - RNA, 19 nt, Artificial Sequence
  Description of Artificial Sequence: Synthetic oligonucleotide
  Antisense strand to SEQ ID NO: 2470966
aucucccaagaacucuguc

SEQ ID NO: 2470968 - RNA, 19 nt, Artificial Sequence
  Description of Artificial Sequence: Synthetic oligonucleotide
  Sense strand starting at position 776 of SEQ ID NO: 1887418
uuuggaauggcauauucua

SEQ ID NO: 2470969 - RNA, 19 nt, Artificial Sequence
  Description of Artificial Sequence: Synthetic oligonucleotide
  Antisense strand to SEQ ID NO: 2470968
uagaauaugccauuccaaa

SEQ ID NO: 2470970 - RNA, 19 nt, Artificial Sequence
  Description of Artificial Sequence: Synthetic oligonucleotide
  Sense strand starting at position 1042 of SEQ ID NO: 1887418
cagaccuuugugugcaaca

SEQ ID NO: 2470971 - RNA, 19 nt, Artificial Sequence
  Description of Artificial Sequence: Synthetic oligonucleotide
  Antisense strand to SEQ ID NO: 2470970
uguugcacacaaaggucug

SEQ ID NO: 2470972 - RNA, 19 nt, Artificial Sequence
  Description of Artificial Sequence: Synthetic oligonucleotide
  Sense strand starting at position 1043 of SEQ ID NO: 1887418
agaccuuugugugcaacaa

SEQ ID NO: 2470973 - RNA, 19 nt, Artificial Sequence
  Description of Artificial Sequence: Synthetic oligonucleotide
  Antisense strand to SEQ ID NO: 2470972
uuguugcacacaaaggucu

SEQ ID NO: 2470974 - RNA, 19 nt, Artificial Sequence
  Description of Artificial Sequence: Synthetic oligonucleotide
  Sense strand starting at position 1044 of SEQ ID NO: 1887418
gaccuuugugugcaacaaa

SEQ ID NO: 2470975 - RNA, 19 nt, Artificial Sequence
  Description of Artificial Sequence: Synthetic oligonucleotide
  Antisense strand to SEQ ID NO: 2470974
uuuguugcacacaaagguc

SEQ ID NO: 2470976 - RNA, 19 nt, Artificial Sequence
  Description of Artificial Sequence: Synthetic oligonucleotide
  Sense strand starting at position 1104 of SEQ ID NO: 1887418
aggccuguccguuugccaa

SEQ ID NO: 2470977 - RNA, 19 nt, Artificial Sequence
  Description of Artificial Sequence: Synthetic oligonucleotide
  Antisense strand to SEQ ID NO: 2470976
uuggcaaacggacaggccu

SEQ ID NO: 2470978 - RNA, 19 nt, Artificial Sequence
  Description of Artificial Sequence: Synthetic oligonucleotide
  Sense strand starting at position 1362 of SEQ ID NO: 1887418
uaaguugugcaauagaaga

SEQ ID NO: 2470979 - RNA, 19 nt, Artificial Sequence
  Description of Artificial Sequence: Synthetic oligonucleotide
  Antisense strand to SEQ ID NO: 2470978
ucuucuauugcacaacuua

SEQ ID NO: 2470980 - RNA, 19 nt, Artificial Sequence
  Description of Artificial Sequence: Synthetic oligonucleotide
  Sense strand starting at position 1393 of SEQ ID NO: 1887418
uguuauauuucucuuccga

SEQ ID NO: 2470981 - RNA, 19 nt, Artificial Sequence
  Description of Artificial Sequence: Synthetic oligonucleotide
  Antisense strand to SEQ ID NO: 2470980
ucggaagagaaauauaaca

SEQ ID NO: 2470982 - RNA, 19 nt, Artificial Sequence
  Description of Artificial Sequence: Synthetic oligonucleotide
  Sense strand starting at position 1480 of SEQ ID NO: 1887418
ggaaguauuucucauuaaa

SEQ ID NO: 2470983 - RNA, 19 nt, Artificial Sequence
  Description of Artificial Sequence: Synthetic oligonucleotide
  Antisense strand to SEQ ID NO: 2470982
uuuaaugagaaauacuucc

SEQ ID NO: 2470984 - RNA, 19 nt, Artificial Sequence
  Description of Artificial Sequence: Synthetic oligonucleotide
  Sense strand starting at position 1518 of SEQ ID NO: 1887418
gucuuuaaauggucgacuu

SEQ ID NO: 2470985 - RNA, 19 nt, Artificial Sequence
  Description of Artificial Sequence: Synthetic oligonucleotide
  Antisense strand to SEQ ID NO: 2470984
aagucgaccauuuaaagac

SEQ ID NO: 2470986 - RNA, 19 nt, Artificial Sequence
  Description of Artificial Sequence: Synthetic oligonucleotide
  Sense strand starting at position 1519 of SEQ ID NO: 1887418
ucuuuaaauggucgacuuu

SEQ ID NO: 2470987 - RNA, 19 nt, Artificial Sequence
  Description of Artificial Sequence: Synthetic oligonucleotide
  Antisense strand to SEQ ID NO: 2470986
aaagucgaccauuuaaaga

SEQ ID NO: 2470988 - RNA, 19 nt, Artificial Sequence
  Description of Artificial Sequence: Synthetic oligonucleotide
  Sense strand starting at position 1576 of SEQ ID NO: 1887418
ucuuguuuguucccacaca

SEQ ID NO: 2470989 - RNA, 19 nt, Artificial Sequence
  Description of Artificial Sequence: Synthetic oligonucleotide
  Antisense strand to SEQ ID NO: 2470988
ugugugggaacaaacaaga

SEQ ID NO: 2470990 - RNA, 19 nt, Artificial Sequence
  Description of Artificial Sequence: Synthetic oligonucleotide
  Sense strand starting at position 1648 of SEQ ID NO: 1887418
ucauaaucggccugcagaa

SEQ ID NO: 2470991 - RNA, 19 nt, Artificial Sequence
  Description of Artificial Sequence: Synthetic oligonucleotide
  Antisense strand to SEQ ID NO: 2470990
uucugcaggccgauuauga

SEQ ID NO: 2470992 - RNA, 19 nt, Artificial Sequence
  Description of Artificial Sequence: Synthetic oligonucleotide
  Sense strand starting at position 1866 of SEQ ID NO: 1887418
ggaacaccuccuugucuuu

SEQ ID NO: 2470993 - RNA, 19 nt, Artificial Sequence
  Description of Artificial Sequence: Synthetic oligonucleotide
  Antisense strand to SEQ ID NO: 2470992
aaagacaaggagguguucc

SEQ ID NO: 2470994 - RNA, 19 nt, Artificial Sequence
  Description of Artificial Sequence: Synthetic oligonucleotide
  Sense strand starting at position 2321 of SEQ ID NO: 1887418
cuuaguucccuuugagcca

SEQ ID NO: 2470995 - RNA, 19 nt, Artificial Sequence
  Description of Artificial Sequence: Synthetic oligonucleotide
  Antisense strand to SEQ ID NO: 2470994
uggcucaaagggaacuaag

SEQ ID NO: 2470996 - RNA, 19 nt, Artificial Sequence
  Description of Artificial Sequence: Synthetic oligonucleotide
  Sense strand starting at position 2386 of SEQ ID NO: 1887418
gcugcugagauuugugaau

SEQ ID NO: 2470997 - RNA, 19 nt, Artificial Sequence
  Description of Artificial Sequence: Synthetic oligonucleotide
  Antisense strand to SEQ ID NO: 2470996
auucacaaaucucagcagc

SEQ ID NO: 2470998 - RNA, 19 nt, Artificial Sequence
  Description of Artificial Sequence: Synthetic oligonucleotide
  Sense strand starting at position 2788 of SEQ ID NO: 1887418
ggaugcugcccuggagaua

SEQ ID NO: 2470999 - RNA, 19 nt, Artificial Sequence
  Description of Artificial Sequence: Synthetic oligonucleotide
  Antisense strand to SEQ ID NO: 2470998
uaucuccagggcagcaucc

SEQ ID NO: 2471000 - RNA, 19 nt, Artificial Sequence
  Description of Artificial Sequence: Synthetic oligonucleotide
  Sense strand starting at position 2789 of SEQ ID NO: 1887418
gaugcugcccuggagauau

SEQ ID NO: 2471001 - RNA, 19 nt, Artificial Sequence
  Description of Artificial Sequence: Synthetic oligonucleotide
  Antisense strand to SEQ ID NO: 2471000
auaucuccagggcagcauc

SEQ ID NO: 2471002 - RNA, 19 nt, Artificial Sequence
  Description of Artificial Sequence: Synthetic oligonucleotide
  Sense strand starting at position 2935 of SEQ ID NO: 1887418
cgagcucaucccuguacaa

SEQ ID NO: 2471003 - RNA, 19 nt, Artificial Sequence
  Description of Artificial Sequence: Synthetic oligonucleotide
  Antisense strand to SEQ ID NO: 2471002
uuguacagggaugagcucg

SEQ ID NO: 2471004 - RNA, 19 nt, Artificial Sequence
  Description of Artificial Sequence: Synthetic oligonucleotide
  Sense strand starting at position 3537 of SEQ ID NO: 1887418
gccacaauauugcccagau

SEQ ID NO: 2471005 - RNA, 19 nt, Artificial Sequence
  Description of Artificial Sequence: Synthetic oligonucleotide
  Antisense strand to SEQ ID NO: 2471004
aucugggcaauauuguggc

SEQ ID NO: 2471006 - RNA, 19 nt, Artificial Sequence
  Description of Artificial Sequence: Synthetic oligonucleotide
  Sense strand starting at position 3673 of SEQ ID NO: 1887418
gaguaccagugcucagaaa

SEQ ID NO: 2471007 - RNA, 19 nt, Artificial Sequence
  Description of Artificial Sequence: Synthetic oligonucleotide
  Antisense strand to SEQ ID NO: 2471006
uuucugagcacugguacuc

SEQ ID NO: 2471008 - RNA, 19 nt, Artificial Sequence
  Description of Artificial Sequence: Synthetic oligonucleotide
  Sense strand starting at position 3703 of SEQ ID NO: 1887418
aagccuucuggagaagcaa

SEQ ID NO: 2471009 - RNA, 19 nt, Artificial Sequence
  Description of Artificial Sequence: Synthetic oligonucleotide
  Antisense strand to SEQ ID NO: 2471008
uugcuucuccagaaggcuu

SEQ ID NO: 2471010 - RNA, 19 nt, Artificial Sequence
  Description of Artificial Sequence: Synthetic oligonucleotide
  Sense strand starting at position 3728 of SEQ ID NO: 1887418
caguaaugccgccaucaga

SEQ ID NO: 2471011 - RNA, 19 nt, Artificial Sequence
  Description of Artificial Sequence: Synthetic oligonucleotide
  Antisense strand to SEQ ID NO: 2471010
ucugauggcggcauuacug

SEQ ID NO: 2471012 - RNA, 19 nt, Artificial Sequence
  Description of Artificial Sequence: Synthetic oligonucleotide
  Sense strand starting at position 3794 of SEQ ID NO: 1887418
ggagcagauguguggcaaa

SEQ ID NO: 2471013 - RNA, 19 nt, Artificial Sequence
  Description of Artificial Sequence: Synthetic oligonucleotide
  Antisense strand to SEQ ID NO: 2471012
uuugccacacaucugcucc

SEQ ID NO: 2471014 - RNA, 19 nt, Artificial Sequence
  Description of Artificial Sequence: Synthetic oligonucleotide
  Sense strand starting at position 371 of SEQ ID NO: 1887419
ugcagaaugucaucauucu

SEQ ID NO: 2471015 - RNA, 19 nt, Artificial Sequence
  Description of Artificial Sequence: Synthetic oligonucleotide
  Antisense strand to SEQ ID NO: 2471014
agaaugaugacauucugca

SEQ ID NO: 2471016 - RNA, 19 nt, Artificial Sequence
  Description of Artificial Sequence: Synthetic oligonucleotide
  Sense strand starting at position 372 of SEQ ID NO: 1887419
gcagaaugucaucauucua

SEQ ID NO: 2471017 - RNA, 19 nt, Artificial Sequence
  Description of Artificial Sequence: Synthetic oligonucleotide
  Antisense strand to SEQ ID NO: 2471016
uagaaugaugacauucugc

SEQ ID NO: 2471018 - RNA, 19 nt, Artificial Sequence
  Description of Artificial Sequence: Synthetic oligonucleotide
  Sense strand starting at position 611 of SEQ ID NO: 1887419
agacaucauucuguguaug

SEQ ID NO: 2471019 - RNA, 19 nt, Artificial Sequence
  Description of Artificial Sequence: Synthetic oligonucleotide
  Antisense strand to SEQ ID NO: 2471018
cauacacagaaugaugucu

SEQ ID NO: 2471020 - RNA, 19 nt, Artificial Sequence
  Description of Artificial Sequence: Synthetic oligonucleotide
  Sense strand starting at position 612 of SEQ ID NO: 1887419
gacaucauucuguguauga

SEQ ID NO: 2471021 - RNA, 19 nt, Artificial Sequence
  Description of Artificial Sequence: Synthetic oligonucleotide
  Antisense strand to SEQ ID NO: 2471020
ucauacacagaaugauguc

SEQ ID NO: 2471022 - RNA, 19 nt, Artificial Sequence
  Description of Artificial Sequence: Synthetic oligonucleotide
  Sense strand starting at position 613 of SEQ ID NO: 1887419
acaucauucuguguaugag

SEQ ID NO: 2471023 - RNA, 19 nt, Artificial Sequence
  Description of Artificial Sequence: Synthetic oligonucleotide
  Antisense strand to SEQ ID NO: 2471022
cucauacacagaaugaugu

SEQ ID NO: 2471024 - RNA, 19 nt, Artificial Sequence
  Description of Artificial Sequence: Synthetic oligonucleotide
  Sense strand starting at position 616 of SEQ ID NO: 1887419
ucauucuguguaugaggga

SEQ ID NO: 2471025 - RNA, 19 nt, Artificial Sequence
  Description of Artificial Sequence: Synthetic oligonucleotide
  Antisense strand to SEQ ID NO: 2471024
ucccucauacacagaauga

SEQ ID NO: 2471026 - RNA, 19 nt, Artificial Sequence
  Description of Artificial Sequence: Synthetic oligonucleotide
  Sense strand starting at position 719 of SEQ ID NO: 1887419
cgagaaaugugaguccaga

SEQ ID NO: 2471027 - RNA, 19 nt, Artificial Sequence
  Description of Artificial Sequence: Synthetic oligonucleotide
  Antisense strand to SEQ ID NO: 2471026
ucuggacucacauuucucg

SEQ ID NO: 2471028 - RNA, 19 nt, Artificial Sequence
  Description of Artificial Sequence: Synthetic oligonucleotide
  Sense strand starting at position 864 of SEQ ID NO: 1887419
aagcuauuguuguagcaga

SEQ ID NO: 2471029 - RNA, 19 nt, Artificial Sequence
  Description of Artificial Sequence: Synthetic oligonucleotide
  Antisense strand to SEQ ID NO: 2471028
ucugcuacaacaauagcuu

SEQ ID NO: 2471030 - RNA, 19 nt, Artificial Sequence
  Description of Artificial Sequence: Synthetic oligonucleotide
  Sense strand starting at position 1188 of SEQ ID NO: 1887419
gcaucuugaacccguguau

SEQ ID NO: 2471031 - RNA, 19 nt, Artificial Sequence
  Description of Artificial Sequence: Synthetic oligonucleotide
  Antisense strand to SEQ ID NO: 2471030
auacacggguucaagaugc

SEQ ID NO: 2471032 - RNA, 19 nt, Artificial Sequence
  Description of Artificial Sequence: Synthetic oligonucleotide
  Sense strand starting at position 1199 of SEQ ID NO: 1887419
ccguguaugcaacugucau

SEQ ID NO: 2471033 - RNA, 19 nt, Artificial Sequence
  Description of Artificial Sequence: Synthetic oligonucleotide
  Antisense strand to SEQ ID NO: 2471032
augacaguugcauacacgg

SEQ ID NO: 2471034 - RNA, 19 nt, Artificial Sequence
  Description of Artificial Sequence: Synthetic oligonucleotide
  Sense strand starting at position 1200 of SEQ ID NO: 1887419
cguguaugcaacugucaua

SEQ ID NO: 2471035 - RNA, 19 nt, Artificial Sequence
  Description of Artificial Sequence: Synthetic oligonucleotide
  Antisense strand to SEQ ID NO: 2471034
uaugacaguugcauacacg

SEQ ID NO: 2471036 - RNA, 19 nt, Artificial Sequence
  Description of Artificial Sequence: Synthetic oligonucleotide
  Sense strand starting at position 1203 of SEQ ID NO: 1887419
guaugcaacugucauacaa

SEQ ID NO: 2471037 - RNA, 19 nt, Artificial Sequence
  Description of Artificial Sequence: Synthetic oligonucleotide
  Antisense strand to SEQ ID NO: 2471036
uuguaugacaguugcauac

SEQ ID NO: 2471038 - RNA, 19 nt, Artificial Sequence
  Description of Artificial Sequence: Synthetic oligonucleotide
  Sense strand starting at position 1205 of SEQ ID NO: 1887419
augcaacugucauacaaag

SEQ ID NO: 2471039 - RNA, 19 nt, Artificial Sequence
  Description of Artificial Sequence: Synthetic oligonucleotide
  Antisense strand to SEQ ID NO: 2471038
cuuuguaugacaguugcau

SEQ ID NO: 2471040 - RNA, 19 nt, Artificial Sequence
  Description of Artificial Sequence: Synthetic oligonucleotide
  Sense strand starting at position 1380 of SEQ ID NO: 1887419
gccagccaucgguacuaau

SEQ ID NO: 2471041 - RNA, 19 nt, Artificial Sequence
  Description of Artificial Sequence: Synthetic oligonucleotide
  Antisense strand to SEQ ID NO: 2471040
auuaguaccgauggcuggc

SEQ ID NO: 2471042 - RNA, 19 nt, Artificial Sequence
  Description of Artificial Sequence: Synthetic oligonucleotide
  Sense strand starting at position 1383 of SEQ ID NO: 1887419
agccaucgguacuaaugaa

SEQ ID NO: 2471043 - RNA, 19 nt, Artificial Sequence
  Description of Artificial Sequence: Synthetic oligonucleotide
  Antisense strand to SEQ ID NO: 2471042
uucauuaguaccgauggcu

SEQ ID NO: 2471044 - RNA, 19 nt, Artificial Sequence
  Description of Artificial Sequence: Synthetic oligonucleotide
  Sense strand starting at position 1560 of SEQ ID NO: 1887419
guaucuuucuccuuucgau

SEQ ID NO: 2471045 - RNA, 19 nt, Artificial Sequence
  Description of Artificial Sequence: Synthetic oligonucleotide
  Antisense strand to SEQ ID NO: 2471044
aucgaaaggagaaagauac

SEQ ID NO: 2471046 - RNA, 19 nt, Artificial Sequence
  Description of Artificial Sequence: Synthetic oligonucleotide
  Sense strand starting at position 1883 of SEQ ID NO: 1887419
gcgauaccucuguuucgca

SEQ ID NO: 2471047 - RNA, 19 nt, Artificial Sequence
  Description of Artificial Sequence: Synthetic oligonucleotide
  Antisense strand to SEQ ID NO: 2471046
ugcgaaacagagguaucgc

SEQ ID NO: 2471048 - RNA, 19 nt, Artificial Sequence
  Description of Artificial Sequence: Synthetic oligonucleotide
  Sense strand starting at position 2502 of SEQ ID NO: 1887419
uguggaggugcguuccuua

SEQ ID NO: 2471049 - RNA, 19 nt, Artificial Sequence
  Description of Artificial Sequence: Synthetic oligonucleotide
  Antisense strand to SEQ ID NO: 2471048
uaaggaacgcaccuccaca

SEQ ID NO: 2471050 - RNA, 19 nt, Artificial Sequence
  Description of Artificial Sequence: Synthetic oligonucleotide
  Sense strand starting at position 2509 of SEQ ID NO: 1887419
gugcguuccuuagugcaga

SEQ ID NO: 2471051 - RNA, 19 nt, Artificial Sequence
  Description of Artificial Sequence: Synthetic oligonucleotide
  Antisense strand to SEQ ID NO: 2471050
ucugcacuaaggaacgcac

SEQ ID NO: 2471052 - RNA, 19 nt, Artificial Sequence
  Description of Artificial Sequence: Synthetic oligonucleotide
  Sense strand starting at position 2746 of SEQ ID NO: 1887419
aagaacgcauucucagaga

SEQ ID NO: 2471053 - RNA, 19 nt, Artificial Sequence
  Description of Artificial Sequence: Synthetic oligonucleotide
  Antisense strand to SEQ ID NO: 2471052
ucucugagaaugcguucuu

SEQ ID NO: 2471054 - RNA, 19 nt, Artificial Sequence
  Description of Artificial Sequence: Synthetic oligonucleotide
  Sense strand starting at position 2837 of SEQ ID NO: 1887419
gcgucguugcucuuggaga

SEQ ID NO: 2471055 - RNA, 19 nt, Artificial Sequence
  Description of Artificial Sequence: Synthetic oligonucleotide
  Antisense strand to SEQ ID NO: 2471054
ucuccaagagcaacgacgc

SEQ ID NO: 2471056 - RNA, 19 nt, Artificial Sequence
  Description of Artificial Sequence: Synthetic oligonucleotide
  Sense strand starting at position 2902 of SEQ ID NO: 1887419
cacugaggucuuugccaac

SEQ ID NO: 2471057 - RNA, 19 nt, Artificial Sequence
  Description of Artificial Sequence: Synthetic oligonucleotide
  Antisense strand to SEQ ID NO: 2471056
guuggcaaagaccucagug

SEQ ID NO: 2471058 - RNA, 19 nt, Artificial Sequence
  Description of Artificial Sequence: Synthetic oligonucleotide
  Sense strand starting at position 2905 of SEQ ID NO: 1887419
ugaggucuuugccaacagu

SEQ ID NO: 2471059 - RNA, 19 nt, Artificial Sequence
  Description of Artificial Sequence: Synthetic oligonucleotide
  Antisense strand to SEQ ID NO: 2471058
acuguuggcaaagaccuca

SEQ ID NO: 2471060 - RNA, 19 nt, Artificial Sequence
  Description of Artificial Sequence: Synthetic oligonucleotide
  Sense strand starting at position 2908 of SEQ ID NO: 1887419
ggucuuugccaacagucua

SEQ ID NO: 2471061 - RNA, 19 nt, Artificial Sequence
  Description of Artificial Sequence: Synthetic oligonucleotide
  Antisense strand to SEQ ID NO: 2471060
uagacuguuggcaaagacc

SEQ ID NO: 2471062 - RNA, 19 nt, Artificial Sequence
  Description of Artificial Sequence: Synthetic oligonucleotide
  Sense strand starting at position 3058 of SEQ ID NO: 1887419
cucugaggcuccugcaaau

SEQ ID NO: 2471063 - RNA, 19 nt, Artificial Sequence
  Description of Artificial Sequence: Synthetic oligonucleotide
  Antisense strand to SEQ ID NO: 2471062
auuugcaggagccucagag

SEQ ID NO: 2471064 - RNA, 19 nt, Artificial Sequence
  Description of Artificial Sequence: Synthetic oligonucleotide
  Sense strand starting at position 3103 of SEQ ID NO: 1887419
ucacaugugcccugugaca

SEQ ID NO: 2471065 - RNA, 19 nt, Artificial Sequence
  Description of Artificial Sequence: Synthetic oligonucleotide
  Antisense strand to SEQ ID NO: 2471064
ugucacagggcacauguga

SEQ ID NO: 2471066 - RNA, 19 nt, Artificial Sequence
  Description of Artificial Sequence: Synthetic oligonucleotide
  Sense strand starting at position 3105 of SEQ ID NO: 1887419
acaugugcccugugacagu

SEQ ID NO: 2471067 - RNA, 19 nt, Artificial Sequence
  Description of Artificial Sequence: Synthetic oligonucleotide
  Antisense strand to SEQ ID NO: 2471066
acugucacagggcacaugu

SEQ ID NO: 2471068 - RNA, 19 nt, Artificial Sequence
  Description of Artificial Sequence: Synthetic oligonucleotide
  Sense strand starting at position 3364 of SEQ ID NO: 1887419
agugguuucuuucuuuaau

SEQ ID NO: 2471069 - RNA, 19 nt, Artificial Sequence
  Description of Artificial Sequence: Synthetic oligonucleotide
  Antisense strand to SEQ ID NO: 2471068
auuaaagaaagaaaccacu

SEQ ID NO: 2471070 - RNA, 19 nt, Artificial Sequence
  Description of Artificial Sequence: Synthetic oligonucleotide
  Sense strand starting at position 3365 of SEQ ID NO: 1887419
gugguuucuuucuuuaaug

SEQ ID NO: 2471071 - RNA, 19 nt, Artificial Sequence
  Description of Artificial Sequence: Synthetic oligonucleotide
  Antisense strand to SEQ ID NO: 2471070
cauuaaagaaagaaaccac

SEQ ID NO: 2471072 - RNA, 19 nt, Artificial Sequence
  Description of Artificial Sequence: Synthetic oligonucleotide
  Sense strand starting at position 3366 of SEQ ID NO: 1887419
ugguuucuuucuuuaauga

SEQ ID NO: 2471073 - RNA, 19 nt, Artificial Sequence
  Description of Artificial Sequence: Synthetic oligonucleotide
  Antisense strand to SEQ ID NO: 2471072
ucauuaaagaaagaaacca

SEQ ID NO: 2471074 - RNA, 19 nt, Artificial Sequence
  Description of Artificial Sequence: Synthetic oligonucleotide
  Sense strand starting at position 3367 of SEQ ID NO: 1887419
gguuucuuucuuuaaugag

SEQ ID NO: 2471075 - RNA, 19 nt, Artificial Sequence
  Description of Artificial Sequence: Synthetic oligonucleotide
  Antisense strand to SEQ ID NO: 2471074
cucauuaaagaaagaaacc

SEQ ID NO: 2471076 - RNA, 19 nt, Artificial Sequence
  Description of Artificial Sequence: Synthetic oligonucleotide
  Sense strand starting at position 3376 of SEQ ID NO: 1887419
cuuuaaugagucugauaaa

SEQ ID NO: 2471077 - RNA, 19 nt, Artificial Sequence
  Description of Artificial Sequence: Synthetic oligonucleotide
  Antisense strand to SEQ ID NO: 2471076
uuuaucagacucauuaaag

SEQ ID NO: 2471078 - RNA, 19 nt, Artificial Sequence
  Description of Artificial Sequence: Synthetic oligonucleotide
  Sense strand starting at position 3379 of SEQ ID NO: 1887419
uaaugagucugauaaauag

SEQ ID NO: 2471079 - RNA, 19 nt, Artificial Sequence
  Description of Artificial Sequence: Synthetic oligonucleotide
  Antisense strand to SEQ ID NO: 2471078
cuauuuaucagacucauua

SEQ ID NO: 2471080 - RNA, 19 nt, Artificial Sequence
  Description of Artificial Sequence: Synthetic oligonucleotide
  Sense strand starting at position 3544 of SEQ ID NO: 1887419
ccaauucuuggaggccaga

SEQ ID NO: 2471081 - RNA, 19 nt, Artificial Sequence
  Description of Artificial Sequence: Synthetic oligonucleotide
  Antisense strand to SEQ ID NO: 2471080
ucuggccuccaagaauugg

SEQ ID NO: 2471082 - RNA, 19 nt, Artificial Sequence
  Description of Artificial Sequence: Synthetic oligonucleotide
  Sense strand starting at position 3584 of SEQ ID NO: 1887419
gggcaaucaccauagagcu

SEQ ID NO: 2471083 - RNA, 19 nt, Artificial Sequence
  Description of Artificial Sequence: Synthetic oligonucleotide
  Antisense strand to SEQ ID NO: 2471082
agcucuauggugauugccc

SEQ ID NO: 2471084 - RNA, 19 nt, Artificial Sequence
  Description of Artificial Sequence: Synthetic oligonucleotide
  Sense strand starting at position 3598 of SEQ ID NO: 1887419
gagcuuguuccaugcagaa

SEQ ID NO: 2471085 - RNA, 19 nt, Artificial Sequence
  Description of Artificial Sequence: Synthetic oligonucleotide
  Antisense strand to SEQ ID NO: 2471084
uucugcauggaacaagcuc

SEQ ID NO: 2471086 - RNA, 19 nt, Artificial Sequence
  Description of Artificial Sequence: Synthetic oligonucleotide
  Sense strand starting at position 3704 of SEQ ID NO: 1887419
ccgggaaagugacuucuaa

SEQ ID NO: 2471087 - RNA, 19 nt, Artificial Sequence
  Description of Artificial Sequence: Synthetic oligonucleotide
  Antisense strand to SEQ ID NO: 2471086
uuagaagucacuuucccgg

SEQ ID NO: 2471088 - RNA, 19 nt, Artificial Sequence
  Description of Artificial Sequence: Synthetic oligonucleotide
  Sense strand starting at position 3708 of SEQ ID NO: 1887419
gaaagugacuucuaaggcu

SEQ ID NO: 2471089 - RNA, 19 nt, Artificial Sequence
  Description of Artificial Sequence: Synthetic oligonucleotide
  Antisense strand to SEQ ID NO: 2471088
agccuuagaagucacuuuc

SEQ ID NO: 2471090 - RNA, 19 nt, Artificial Sequence
  Description of Artificial Sequence: Synthetic oligonucleotide
  Sense strand starting at position 3823 of SEQ ID NO: 1887419
ccauauucccaguggcaag

SEQ ID NO: 2471091 - RNA, 19 nt, Artificial Sequence
  Description of Artificial Sequence: Synthetic oligonucleotide
  Antisense strand to SEQ ID NO: 2471090
cuugccacugggaauaugg

SEQ ID NO: 2471092 - RNA, 19 nt, Artificial Sequence
  Description of Artificial Sequence: Synthetic oligonucleotide
  Sense strand starting at position 143 of SEQ ID NO: 1887420
ugugcuauaaaugguaagu

SEQ ID NO: 2471093 - RNA, 19 nt, Artificial Sequence
  Description of Artificial Sequence: Synthetic oligonucleotide
  Antisense strand to SEQ ID NO: 2471092
acuuaccauuuauagcaca

SEQ ID NO: 2471094 - RNA, 19 nt, Artificial Sequence
  Description of Artificial Sequence: Synthetic oligonucleotide
  Sense strand starting at position 2075 of SEQ ID NO: 1887420
uucccaucuucuugacagu

SEQ ID NO: 2471095 - RNA, 19 nt, Artificial Sequence
  Description of Artificial Sequence: Synthetic oligonucleotide
  Antisense strand to SEQ ID NO: 2471094
acugucaagaagaugggaa

SEQ ID NO: 2471096 - RNA, 19 nt, Artificial Sequence
  Description of Artificial Sequence: Synthetic oligonucleotide
  Sense strand starting at position 2215 of SEQ ID NO: 1887420
augggugccaguuagcaaa

SEQ ID NO: 2471097 - RNA, 19 nt, Artificial Sequence
  Description of Artificial Sequence: Synthetic oligonucleotide
  Antisense strand to SEQ ID NO: 2471096
uuugcuaacuggcacccau

SEQ ID NO: 2471098 - RNA, 19 nt, Artificial Sequence
  Description of Artificial Sequence: Synthetic oligonucleotide
  Sense strand starting at position 2218 of SEQ ID NO: 1887420
ggugccaguuagcaaagau

SEQ ID NO: 2471099 - RNA, 19 nt, Artificial Sequence
  Description of Artificial Sequence: Synthetic oligonucleotide
  Antisense strand to SEQ ID NO: 2471098
aucuuugcuaacuggcacc

SEQ ID NO: 2471100 - RNA, 19 nt, Artificial Sequence
  Description of Artificial Sequence: Synthetic oligonucleotide
  Sense strand starting at position 2419 of SEQ ID NO: 1887420
uaaauagaguuccuggcaa

SEQ ID NO: 2471101 - RNA, 19 nt, Artificial Sequence
  Description of Artificial Sequence: Synthetic oligonucleotide
  Antisense strand to SEQ ID NO: 2471100
uugccaggaacucuauuua

SEQ ID NO: 2471102 - RNA, 19 nt, Artificial Sequence
  Description of Artificial Sequence: Synthetic oligonucleotide
  Sense strand starting at position 2421 of SEQ ID NO: 1887420
aauagaguuccuggcaaag

SEQ ID NO: 2471103 - RNA, 19 nt, Artificial Sequence
  Description of Artificial Sequence: Synthetic oligonucleotide
  Antisense strand to SEQ ID NO: 2471102
cuuugccaggaacucuauu

SEQ ID NO: 2471104 - RNA, 19 nt, Artificial Sequence
  Description of Artificial Sequence: Synthetic oligonucleotide
  Sense strand starting at position 2423 of SEQ ID NO: 1887420
uagaguuccuggcaaagag

SEQ ID NO: 2471105 - RNA, 19 nt, Artificial Sequence
  Description of Artificial Sequence: Synthetic oligonucleotide
  Antisense strand to SEQ ID NO: 2471104
cucuuugccaggaacucua

SEQ ID NO: 2471106 - RNA, 19 nt, Artificial Sequence
  Description of Artificial Sequence: Synthetic oligonucleotide
  Sense strand starting at position 2552 of SEQ ID NO: 1887420
auaggaagaucauguaaau

SEQ ID NO: 2471107 - RNA, 19 nt, Artificial Sequence
  Description of Artificial Sequence: Synthetic oligonucleotide
  Antisense strand to SEQ ID NO: 2471106
auuuacaugaucuuccuau

SEQ ID NO: 2471108 - RNA, 19 nt, Artificial Sequence
  Description of Artificial Sequence: Synthetic oligonucleotide
  Sense strand starting at position 2588 of SEQ ID NO: 1887420
ugcuuaaaccagugaucaa

SEQ ID NO: 2471109 - RNA, 19 nt, Artificial Sequence
  Description of Artificial Sequence: Synthetic oligonucleotide
  Antisense strand to SEQ ID NO: 2471108
uugaucacugguuuaagca

SEQ ID NO: 2471110 - RNA, 19 nt, Artificial Sequence
  Description of Artificial Sequence: Synthetic oligonucleotide
  Sense strand starting at position 2611 of SEQ ID NO: 1887420
aguguuaacagccagagaa

SEQ ID NO: 2471111 - RNA, 19 nt, Artificial Sequence
  Description of Artificial Sequence: Synthetic oligonucleotide
  Antisense strand to SEQ ID NO: 2471110
uucucuggcuguuaacacu

SEQ ID NO: 2471112 - RNA, 19 nt, Artificial Sequence
  Description of Artificial Sequence: Synthetic oligonucleotide
  Sense strand starting at position 2642 of SEQ ID NO: 1887420
ugaugugcacaucaaugau

SEQ ID NO: 2471113 - RNA, 19 nt, Artificial Sequence
  Description of Artificial Sequence: Synthetic oligonucleotide
  Antisense strand to SEQ ID NO: 2471112
aucauugaugugcacauca

SEQ ID NO: 2471114 - RNA, 19 nt, Artificial Sequence
  Description of Artificial Sequence: Synthetic oligonucleotide
  Sense strand starting at position 2645 of SEQ ID NO: 1887420
ugugcacaucaaugaugaa

SEQ ID NO: 2471115 - RNA, 19 nt, Artificial Sequence
  Description of Artificial Sequence: Synthetic oligonucleotide
  Antisense strand to SEQ ID NO: 2471114
uucaucauugaugugcaca

SEQ ID NO: 2471116 - RNA, 19 nt, Artificial Sequence
  Description of Artificial Sequence: Synthetic oligonucleotide
  Sense strand starting at position 2648 of SEQ ID NO: 1887420
gcacaucaaugaugaaucu

SEQ ID NO: 2471117 - RNA, 19 nt, Artificial Sequence
  Description of Artificial Sequence: Synthetic oligonucleotide
  Antisense strand to SEQ ID NO: 2471116
agauucaucauugaugugc

SEQ ID NO: 2471118 - RNA, 19 nt, Artificial Sequence
  Description of Artificial Sequence: Synthetic oligonucleotide
  Sense strand starting at position 2658 of SEQ ID NO: 1887420
gaugaaucucuaugcaggu

SEQ ID NO: 2471119 - RNA, 19 nt, Artificial Sequence
  Description of Artificial Sequence: Synthetic oligonucleotide
  Antisense strand to SEQ ID NO: 2471118
accugcauagagauucauc

SEQ ID NO: 2471120 - RNA, 19 nt, Artificial Sequence
  Description of Artificial Sequence: Synthetic oligonucleotide
  Sense strand starting at position 2659 of SEQ ID NO: 1887420
augaaucucuaugcaggua

SEQ ID NO: 2471121 - RNA, 19 nt, Artificial Sequence
  Description of Artificial Sequence: Synthetic oligonucleotide
  Antisense strand to SEQ ID NO: 2471120
uaccugcauagagauucau

SEQ ID NO: 2471122 - RNA, 19 nt, Artificial Sequence
  Description of Artificial Sequence: Synthetic oligonucleotide
  Sense strand starting at position 2673 of SEQ ID NO: 1887420
agguaugcuaaguaacaga

SEQ ID NO: 2471123 - RNA, 19 nt, Artificial Sequence
  Description of Artificial Sequence: Synthetic oligonucleotide
  Antisense strand to SEQ ID NO: 2471122
ucuguuacuuagcauaccu

SEQ ID NO: 2471124 - RNA, 19 nt, Artificial Sequence
  Description of Artificial Sequence: Synthetic oligonucleotide
  Sense strand starting at position 2849 of SEQ ID NO: 1887420
ggucuauggcaauauguuc

SEQ ID NO: 2471125 - RNA, 19 nt, Artificial Sequence
  Description of Artificial Sequence: Synthetic oligonucleotide
  Antisense strand to SEQ ID NO: 2471124
gaacauauugccauagacc

SEQ ID NO: 2471126 - RNA, 19 nt, Artificial Sequence
  Description of Artificial Sequence: Synthetic oligonucleotide
  Sense strand starting at position 2856 of SEQ ID NO: 1887420
ggcaauauguuccucucca

SEQ ID NO: 2471127 - RNA, 19 nt, Artificial Sequence
  Description of Artificial Sequence: Synthetic oligonucleotide
  Antisense strand to SEQ ID NO: 2471126
uggagaggaacauauugcc

SEQ ID NO: 2471128 - RNA, 19 nt, Artificial Sequence
  Description of Artificial Sequence: Synthetic oligonucleotide
  Sense strand starting at position 2880 of SEQ ID NO: 1887420
gagacaucuuucugaggac

SEQ ID NO: 2471129 - RNA, 19 nt, Artificial Sequence
  Description of Artificial Sequence: Synthetic oligonucleotide
  Antisense strand to SEQ ID NO: 2471128
guccucagaaagaugucuc

SEQ ID NO: 2471130 - RNA, 19 nt, Artificial Sequence
  Description of Artificial Sequence: Synthetic oligonucleotide
  Sense strand starting at position 2881 of SEQ ID NO: 1887420
agacaucuuucugaggaca

SEQ ID NO: 2471131 - RNA, 19 nt, Artificial Sequence
  Description of Artificial Sequence: Synthetic oligonucleotide
  Antisense strand to SEQ ID NO: 2471130
uguccucagaaagaugucu

SEQ ID NO: 2471132 - RNA, 19 nt, Artificial Sequence
  Description of Artificial Sequence: Synthetic oligonucleotide
  Sense strand starting at position 2883 of SEQ ID NO: 1887420
acaucuuucugaggacagu

SEQ ID NO: 2471133 - RNA, 19 nt, Artificial Sequence
  Description of Artificial Sequence: Synthetic oligonucleotide
  Antisense strand to SEQ ID NO: 2471132
acuguccucagaaagaugu

SEQ ID NO: 2471134 - RNA, 19 nt, Artificial Sequence
  Description of Artificial Sequence: Synthetic oligonucleotide
  Sense strand starting at position 3037 of SEQ ID NO: 1887420
acgauacaugcacaaaguu

SEQ ID NO: 2471135 - RNA, 19 nt, Artificial Sequence
  Description of Artificial Sequence: Synthetic oligonucleotide
  Antisense strand to SEQ ID NO: 2471134
aacuuugugcauguaucgu

SEQ ID NO: 2471136 - RNA, 19 nt, Artificial Sequence
  Description of Artificial Sequence: Synthetic oligonucleotide
  Sense strand starting at position 3046 of SEQ ID NO: 1887420
gcacaaaguuguuuacuga

SEQ ID NO: 2471137 - RNA, 19 nt, Artificial Sequence
  Description of Artificial Sequence: Synthetic oligonucleotide
  Antisense strand to SEQ ID NO: 2471136
ucaguaaacaacuuugugc

SEQ ID NO: 2471138 - RNA, 19 nt, Artificial Sequence
  Description of Artificial Sequence: Synthetic oligonucleotide
  Sense strand starting at position 3126 of SEQ ID NO: 1887420
ucaauaaauuguggaauca

SEQ ID NO: 2471139 - RNA, 19 nt, Artificial Sequence
  Description of Artificial Sequence: Synthetic oligonucleotide
  Antisense strand to SEQ ID NO: 2471138
ugauuccacaauuuauuga

SEQ ID NO: 2471140 - RNA, 19 nt, Artificial Sequence
  Description of Artificial Sequence: Synthetic oligonucleotide
  Sense strand starting at position 3136 of SEQ ID NO: 1887420
guggaaucaucacauugug

SEQ ID NO: 2471141 - RNA, 19 nt, Artificial Sequence
  Description of Artificial Sequence: Synthetic oligonucleotide
  Antisense strand to SEQ ID NO: 2471140
cacaaugugaugauuccac

SEQ ID NO: 2471142 - RNA, 19 nt, Artificial Sequence
  Description of Artificial Sequence: Synthetic oligonucleotide
  Sense strand starting at position 3152 of SEQ ID NO: 1887420
gugaaacauucugaagcca

SEQ ID NO: 2471143 - RNA, 19 nt, Artificial Sequence
  Description of Artificial Sequence: Synthetic oligonucleotide
  Antisense strand to SEQ ID NO: 2471142
uggcuucagaauguuucac

SEQ ID NO: 2471144 - RNA, 19 nt, Artificial Sequence
  Description of Artificial Sequence: Synthetic oligonucleotide
  Sense strand starting at position 3178 of SEQ ID NO: 1887420
ucacuaguuuccuuggagu

SEQ ID NO: 2471145 - RNA, 19 nt, Artificial Sequence
  Description of Artificial Sequence: Synthetic oligonucleotide
  Antisense strand to SEQ ID NO: 2471144
acuccaaggaaacuaguga

SEQ ID NO: 2471146 - RNA, 19 nt, Artificial Sequence
  Description of Artificial Sequence: Synthetic oligonucleotide
  Sense strand starting at position 3180 of SEQ ID NO: 1887420
acuaguuuccuuggaguuu

SEQ ID NO: 2471147 - RNA, 19 nt, Artificial Sequence
  Description of Artificial Sequence: Synthetic oligonucleotide
  Antisense strand to SEQ ID NO: 2471146
aaacuccaaggaaacuagu

SEQ ID NO: 2471148 - RNA, 19 nt, Artificial Sequence
  Description of Artificial Sequence: Synthetic oligonucleotide
  Sense strand starting at position 3274 of SEQ ID NO: 1887420
guacauauuugucuuuagu

SEQ ID NO: 2471149 - RNA, 19 nt, Artificial Sequence
  Description of Artificial Sequence: Synthetic oligonucleotide
  Antisense strand to SEQ ID NO: 2471148
acuaaagacaaauauguac

SEQ ID NO: 2471150 - RNA, 19 nt, Artificial Sequence
  Description of Artificial Sequence: Synthetic oligonucleotide
  Sense strand starting at position 3298 of SEQ ID NO: 1887420
guacacauauacuaugagu

SEQ ID NO: 2471151 - RNA, 19 nt, Artificial Sequence
  Description of Artificial Sequence: Synthetic oligonucleotide
  Antisense strand to SEQ ID NO: 2471150
acucauaguauauguguac

SEQ ID NO: 2471152 - RNA, 19 nt, Artificial Sequence
  Description of Artificial Sequence: Synthetic oligonucleotide
  Sense strand starting at position 3300 of SEQ ID NO: 1887420
acacauauacuaugaguau

SEQ ID NO: 2471153 - RNA, 19 nt, Artificial Sequence
  Description of Artificial Sequence: Synthetic oligonucleotide
  Antisense strand to SEQ ID NO: 2471152
auacucauaguauaugugu

SEQ ID NO: 2471154 - RNA, 19 nt, Artificial Sequence
  Description of Artificial Sequence: Synthetic oligonucleotide
  Sense strand starting at position 3338 of SEQ ID NO: 1887420
uacauauuggcauaugguu

SEQ ID NO: 2471155 - RNA, 19 nt, Artificial Sequence
  Description of Artificial Sequence: Synthetic oligonucleotide
  Antisense strand to SEQ ID NO: 2471154
aaccauaugccaauaugua

SEQ ID NO: 2471156 - RNA, 19 nt, Artificial Sequence
  Description of Artificial Sequence: Synthetic oligonucleotide
  Sense strand starting at position 3360 of SEQ ID NO: 1887420
uauugagcauuaggaagau

SEQ ID NO: 2471157 - RNA, 19 nt, Artificial Sequence
  Description of Artificial Sequence: Synthetic oligonucleotide
  Antisense strand to SEQ ID NO: 2471156
aucuuccuaaugcucaaua

SEQ ID NO: 2471158 - RNA, 19 nt, Artificial Sequence
  Description of Artificial Sequence: Synthetic oligonucleotide
  Sense strand starting at position 3381 of SEQ ID NO: 1887420
aggaaucugcagugaguga

SEQ ID NO: 2471159 - RNA, 19 nt, Artificial Sequence
  Description of Artificial Sequence: Synthetic oligonucleotide
  Antisense strand to SEQ ID NO: 2471158
ucacucacugcagauuccu

SEQ ID NO: 2471160 - RNA, 19 nt, Artificial Sequence
  Description of Artificial Sequence: Synthetic oligonucleotide
  Sense strand starting at position 3382 of SEQ ID NO: 1887420
ggaaucugcagugagugau

SEQ ID NO: 2471161 - RNA, 19 nt, Artificial Sequence
  Description of Artificial Sequence: Synthetic oligonucleotide
  Antisense strand to SEQ ID NO: 2471160
aucacucacugcagauucc

SEQ ID NO: 2471162 - RNA, 19 nt, Artificial Sequence
  Description of Artificial Sequence: Synthetic oligonucleotide
  Sense strand starting at position 3385 of SEQ ID NO: 1887420
aucugcagugagugauaca

SEQ ID NO: 2471163 - RNA, 19 nt, Artificial Sequence
  Description of Artificial Sequence: Synthetic oligonucleotide
  Antisense strand to SEQ ID NO: 2471162
uguaucacucacugcagau

SEQ ID NO: 2471164 - RNA, 19 nt, Artificial Sequence
  Description of Artificial Sequence: Synthetic oligonucleotide
  Sense strand starting at position 3386 of SEQ ID NO: 1887420
ucugcagugagugauacaa

SEQ ID NO: 2471165 - RNA, 19 nt, Artificial Sequence
  Description of Artificial Sequence: Synthetic oligonucleotide
  Antisense strand to SEQ ID NO: 2471164
uuguaucacucacugcaga

SEQ ID NO: 2471166 - RNA, 19 nt, Artificial Sequence
  Description of Artificial Sequence: Synthetic oligonucleotide
  Sense strand starting at position 3390 of SEQ ID NO: 1887420
cagugagugauacaaggua

SEQ ID NO: 2471167 - RNA, 19 nt, Artificial Sequence
  Description of Artificial Sequence: Synthetic oligonucleotide
  Antisense strand to SEQ ID NO: 2471166
uaccuuguaucacucacug

SEQ ID NO: 2471168 - RNA, 19 nt, Artificial Sequence
  Description of Artificial Sequence: Synthetic oligonucleotide
  Sense strand starting at position 62 of SEQ ID NO: 1887421
augugagaauucccuugua

SEQ ID NO: 2471169 - RNA, 19 nt, Artificial Sequence
  Description of Artificial Sequence: Synthetic oligonucleotide
  Antisense strand to SEQ ID NO: 2471168
uacaagggaauucucacau

SEQ ID NO: 2471170 - RNA, 19 nt, Artificial Sequence
  Description of Artificial Sequence: Synthetic oligonucleotide
  Sense strand starting at position 119 of SEQ ID NO: 1887421
agugcagagauaugugaga

SEQ ID NO: 2471171 - RNA, 19 nt, Artificial Sequence
  Description of Artificial Sequence: Synthetic oligonucleotide
  Antisense strand to SEQ ID NO: 2471170
ucucacauaucucugcacu

SEQ ID NO: 2471172 - RNA, 19 nt, Artificial Sequence
  Description of Artificial Sequence: Synthetic oligonucleotide
  Sense strand starting at position 121 of SEQ ID NO: 1887421
ugcagagauaugugagaau

SEQ ID NO: 2471173 - RNA, 19 nt, Artificial Sequence
  Description of Artificial Sequence: Synthetic oligonucleotide
  Antisense strand to SEQ ID NO: 2471172
auucucacauaucucugca

SEQ ID NO: 2471174 - RNA, 19 nt, Artificial Sequence
  Description of Artificial Sequence: Synthetic oligonucleotide
  Sense strand starting at position 179 of SEQ ID NO: 1887421
agguuaucaguguaaguau

SEQ ID NO: 2471175 - RNA, 19 nt, Artificial Sequence
  Description of Artificial Sequence: Synthetic oligonucleotide
  Antisense strand to SEQ ID NO: 2471174
auacuuacacugauaaccu

SEQ ID NO: 2471176 - RNA, 19 nt, Artificial Sequence
  Description of Artificial Sequence: Synthetic oligonucleotide
  Sense strand starting at position 439 of SEQ ID NO: 1887421
gguccaucaccugggugau

SEQ ID NO: 2471177 - RNA, 19 nt, Artificial Sequence
  Description of Artificial Sequence: Synthetic oligonucleotide
  Antisense strand to SEQ ID NO: 2471176
aucacccaggugauggacc

SEQ ID NO: 2471178 - RNA, 19 nt, Artificial Sequence
  Description of Artificial Sequence: Synthetic oligonucleotide
  Sense strand starting at position 505 of SEQ ID NO: 1887421
agaguugaaucaccucaga

SEQ ID NO: 2471179 - RNA, 19 nt, Artificial Sequence
  Description of Artificial Sequence: Synthetic oligonucleotide
  Antisense strand to SEQ ID NO: 2471178
ucugaggugauucaacucu

SEQ ID NO: 2471180 - RNA, 19 nt, Artificial Sequence
  Description of Artificial Sequence: Synthetic oligonucleotide
  Sense strand starting at position 518 of SEQ ID NO: 1887421
cucagagaucagugcauag

SEQ ID NO: 2471181 - RNA, 19 nt, Artificial Sequence
  Description of Artificial Sequence: Synthetic oligonucleotide
  Antisense strand to SEQ ID NO: 2471180
cuaugcacugaucucugag

SEQ ID NO: 2471182 - RNA, 19 nt, Artificial Sequence
  Description of Artificial Sequence: Synthetic oligonucleotide
  Sense strand starting at position 861 of SEQ ID NO: 1887421
ccuagaugaucugugcaga

SEQ ID NO: 2471183 - RNA, 19 nt, Artificial Sequence
  Description of Artificial Sequence: Synthetic oligonucleotide
  Antisense strand to SEQ ID NO: 2471182
ucugcacagaucaucuagg

SEQ ID NO: 2471184 - RNA, 19 nt, Artificial Sequence
  Description of Artificial Sequence: Synthetic oligonucleotide
  Sense strand starting at position 864 of SEQ ID NO: 1887421
agaugaucugugcagagcu

SEQ ID NO: 2471185 - RNA, 19 nt, Artificial Sequence
  Description of Artificial Sequence: Synthetic oligonucleotide
  Antisense strand to SEQ ID NO: 2471184
agcucugcacagaucaucu

SEQ ID NO: 2471186 - RNA, 19 nt, Artificial Sequence
  Description of Artificial Sequence: Synthetic oligonucleotide
  Sense strand starting at position 866 of SEQ ID NO: 1887421
augaucugugcagagcuau

SEQ ID NO: 2471187 - RNA, 19 nt, Artificial Sequence
  Description of Artificial Sequence: Synthetic oligonucleotide
  Antisense strand to SEQ ID NO: 2471186
auagcucugcacagaucau

SEQ ID NO: 2471188 - RNA, 19 nt, Artificial Sequence
  Description of Artificial Sequence: Synthetic oligonucleotide
  Sense strand starting at position 999 of SEQ ID NO: 1887421
cugggugaucaguggagau

SEQ ID NO: 2471189 - RNA, 19 nt, Artificial Sequence
  Description of Artificial Sequence: Synthetic oligonucleotide
  Antisense strand to SEQ ID NO: 2471188
aucuccacugaucacccag

SEQ ID NO: 2471190 - RNA, 19 nt, Artificial Sequence
  Description of Artificial Sequence: Synthetic oligonucleotide
  Sense strand starting at position 1003 of SEQ ID NO: 1887421
gugaucaguggagauaucu

SEQ ID NO: 2471191 - RNA, 19 nt, Artificial Sequence
  Description of Artificial Sequence: Synthetic oligonucleotide
  Antisense strand to SEQ ID NO: 2471190
agauaucuccacugaucac

SEQ ID NO: 2471192 - RNA, 19 nt, Artificial Sequence
  Description of Artificial Sequence: Synthetic oligonucleotide
  Sense strand starting at position 1009 of SEQ ID NO: 1887421
aguggagauaucugucaca

SEQ ID NO: 2471193 - RNA, 19 nt, Artificial Sequence
  Description of Artificial Sequence: Synthetic oligonucleotide
  Antisense strand to SEQ ID NO: 2471192
ugugacagauaucuccacu

SEQ ID NO: 2471194 - RNA, 19 nt, Artificial Sequence
  Description of Artificial Sequence: Synthetic oligonucleotide
  Sense strand starting at position 1057 of SEQ ID NO: 1887421
guuacaucacaugagugau

SEQ ID NO: 2471195 - RNA, 19 nt, Artificial Sequence
  Description of Artificial Sequence: Synthetic oligonucleotide
  Antisense strand to SEQ ID NO: 2471194
aucacucaugugauguaac

SEQ ID NO: 2471196 - RNA, 19 nt, Artificial Sequence
  Description of Artificial Sequence: Synthetic oligonucleotide
  Sense strand starting at position 1067 of SEQ ID NO: 1887421
augagugaucagugcagag

SEQ ID NO: 2471197 - RNA, 19 nt, Artificial Sequence
  Description of Artificial Sequence: Synthetic oligonucleotide
  Antisense strand to SEQ ID NO: 2471196
cucugcacugaucacucau

SEQ ID NO: 2471198 - RNA, 19 nt, Artificial Sequence
  Description of Artificial Sequence: Synthetic oligonucleotide
  Sense strand starting at position 1124 of SEQ ID NO: 1887421
aguccaucaccugggugau

SEQ ID NO: 2471199 - RNA, 19 nt, Artificial Sequence
  Description of Artificial Sequence: Synthetic oligonucleotide
  Antisense strand to SEQ ID NO: 2471198
aucacccaggugauggacu

SEQ ID NO: 2471200 - RNA, 19 nt, Artificial Sequence
  Description of Artificial Sequence: Synthetic oligonucleotide
  Sense strand starting at position 1376 of SEQ ID NO: 1887421
guagccauauccuugacaa

SEQ ID NO: 2471201 - RNA, 19 nt, Artificial Sequence
  Description of Artificial Sequence: Synthetic oligonucleotide
  Antisense strand to SEQ ID NO: 2471200
uugucaaggauauggcuac

SEQ ID NO: 2471202 - RNA, 19 nt, Artificial Sequence
  Description of Artificial Sequence: Synthetic oligonucleotide
  Sense strand starting at position 1396 of SEQ ID NO: 1887421
agugacaucaccuggguga

SEQ ID NO: 2471203 - RNA, 19 nt, Artificial Sequence
  Description of Artificial Sequence: Synthetic oligonucleotide
  Antisense strand to SEQ ID NO: 2471202
ucacccaggugaugucacu

SEQ ID NO: 2471204 - RNA, 19 nt, Artificial Sequence
  Description of Artificial Sequence: Synthetic oligonucleotide
  Sense strand starting at position 1397 of SEQ ID NO: 1887421
gugacaucaccugggugau

SEQ ID NO: 2471205 - RNA, 19 nt, Artificial Sequence
  Description of Artificial Sequence: Synthetic oligonucleotide
  Antisense strand to SEQ ID NO: 2471204
aucacccaggugaugucac

SEQ ID NO: 2471206 - RNA, 19 nt, Artificial Sequence
  Description of Artificial Sequence: Synthetic oligonucleotide
  Sense strand starting at position 1467 of SEQ ID NO: 1887421
uuacaucaccucugugauc

SEQ ID NO: 2471207 - RNA, 19 nt, Artificial Sequence
  Description of Artificial Sequence: Synthetic oligonucleotide
  Antisense strand to SEQ ID NO: 2471206
gaucacagaggugauguaa

SEQ ID NO: 2471208 - RNA, 19 nt, Artificial Sequence
  Description of Artificial Sequence: Synthetic oligonucleotide
  Sense strand starting at position 1605 of SEQ ID NO: 1887421
uacauuaccugggugaucu

SEQ ID NO: 2471209 - RNA, 19 nt, Artificial Sequence
  Description of Artificial Sequence: Synthetic oligonucleotide
  Antisense strand to SEQ ID NO: 2471208
agaucacccagguaaugua

SEQ ID NO: 2471210 - RNA, 19 nt, Artificial Sequence
  Description of Artificial Sequence: Synthetic oligonucleotide
  Sense strand starting at position 2092 of SEQ ID NO: 1887421
gggugaucagagcaaaggu

SEQ ID NO: 2471211 - RNA, 19 nt, Artificial Sequence
  Description of Artificial Sequence: Synthetic oligonucleotide
  Antisense strand to SEQ ID NO: 2471210
accuuugcucugaucaccc

SEQ ID NO: 2471212 - RNA, 19 nt, Artificial Sequence
  Description of Artificial Sequence: Synthetic oligonucleotide
  Sense strand starting at position 2100 of SEQ ID NO: 1887421
agagcaaagguaugucaca

SEQ ID NO: 2471213 - RNA, 19 nt, Artificial Sequence
  Description of Artificial Sequence: Synthetic oligonucleotide
  Antisense strand to SEQ ID NO: 2471212
ugugacauaccuuugcucu

SEQ ID NO: 2471214 - RNA, 19 nt, Artificial Sequence
  Description of Artificial Sequence: Synthetic oligonucleotide
  Sense strand starting at position 2101 of SEQ ID NO: 1887421
gagcaaagguaugucacaa

SEQ ID NO: 2471215 - RNA, 19 nt, Artificial Sequence
  Description of Artificial Sequence: Synthetic oligonucleotide
  Antisense strand to SEQ ID NO: 2471214
uugugacauaccuuugcuc

SEQ ID NO: 2471216 - RNA, 19 nt, Artificial Sequence
  Description of Artificial Sequence: Synthetic oligonucleotide
  Sense strand starting at position 2131 of SEQ ID NO: 1887421
ggccaaagccuagacaaua

SEQ ID NO: 2471217 - RNA, 19 nt, Artificial Sequence
  Description of Artificial Sequence: Synthetic oligonucleotide
  Antisense strand to SEQ ID NO: 2471216
uauugucuaggcuuuggcc

SEQ ID NO: 2471218 - RNA, 19 nt, Artificial Sequence
  Description of Artificial Sequence: Synthetic oligonucleotide
  Sense strand starting at position 2299 of SEQ ID NO: 1887421
gugaucagugcagaaauac

SEQ ID NO: 2471219 - RNA, 19 nt, Artificial Sequence
  Description of Artificial Sequence: Synthetic oligonucleotide
  Antisense strand to SEQ ID NO: 2471218
guauuucugcacugaucac

SEQ ID NO: 2471220 - RNA, 19 nt, Artificial Sequence
  Description of Artificial Sequence: Synthetic oligonucleotide
  Sense strand starting at position 2362 of SEQ ID NO: 1887421
ccuggaugauuagugcaga

SEQ ID NO: 2471221 - RNA, 19 nt, Artificial Sequence
  Description of Artificial Sequence: Synthetic oligonucleotide
  Antisense strand to SEQ ID NO: 2471220
ucugcacuaaucauccagg

SEQ ID NO: 2471222 - RNA, 19 nt, Artificial Sequence
  Description of Artificial Sequence: Synthetic oligonucleotide
  Sense strand starting at position 2365 of SEQ ID NO: 1887421
ggaugauuagugcagaguu

SEQ ID NO: 2471223 - RNA, 19 nt, Artificial Sequence
  Description of Artificial Sequence: Synthetic oligonucleotide
  Antisense strand to SEQ ID NO: 2471222
aacucugcacuaaucaucc

SEQ ID NO: 2471224 - RNA, 19 nt, Artificial Sequence
  Description of Artificial Sequence: Synthetic oligonucleotide
  Sense strand starting at position 2367 of SEQ ID NO: 1887421
augauuagugcagaguuau

SEQ ID NO: 2471225 - RNA, 19 nt, Artificial Sequence
  Description of Artificial Sequence: Synthetic oligonucleotide
  Antisense strand to SEQ ID NO: 2471224
auaacucugcacuaaucau

SEQ ID NO: 2471226 - RNA, 19 nt, Artificial Sequence
  Description of Artificial Sequence: Synthetic oligonucleotide
  Sense strand starting at position 2423 of SEQ ID NO: 1887421
cccauuacuugggugauca

SEQ ID NO: 2471227 - RNA, 19 nt, Artificial Sequence
  Description of Artificial Sequence: Synthetic oligonucleotide
  Antisense strand to SEQ ID NO: 2471226
ugaucacccaaguaauggg

SEQ ID NO: 2471228 - RNA, 19 nt, Artificial Sequence
  Description of Artificial Sequence: Synthetic oligonucleotide
  Sense strand starting at position 2424 of SEQ ID NO: 1887421
ccauuacuugggugaucag

SEQ ID NO: 2471229 - RNA, 19 nt, Artificial Sequence
  Description of Artificial Sequence: Synthetic oligonucleotide
  Antisense strand to SEQ ID NO: 2471228
cugaucacccaaguaaugg

SEQ ID NO: 2471230 - RNA, 19 nt, Artificial Sequence
  Description of Artificial Sequence: Synthetic oligonucleotide
  Sense strand starting at position 2425 of SEQ ID NO: 1887421
cauuacuugggugaucagu

SEQ ID NO: 2471231 - RNA, 19 nt, Artificial Sequence
  Description of Artificial Sequence: Synthetic oligonucleotide
  Antisense strand to SEQ ID NO: 2471230
acugaucacccaaguaaug

SEQ ID NO: 2471232 - RNA, 19 nt, Artificial Sequence
  Description of Artificial Sequence: Synthetic oligonucleotide
  Sense strand starting at position 2706 of SEQ ID NO: 1887421
gggugaucagugcagucau

SEQ ID NO: 2471233 - RNA, 19 nt, Artificial Sequence
  Description of Artificial Sequence: Synthetic oligonucleotide
  Antisense strand to SEQ ID NO: 2471232
augacugcacugaucaccc

SEQ ID NO: 2471234 - RNA, 19 nt, Artificial Sequence
  Description of Artificial Sequence: Synthetic oligonucleotide
  Sense strand starting at position 2962 of SEQ ID NO: 1887421
aguauuacaucacuuaggu

SEQ ID NO: 2471235 - RNA, 19 nt, Artificial Sequence
  Description of Artificial Sequence: Synthetic oligonucleotide
  Antisense strand to SEQ ID NO: 2471234
accuaagugauguaauacu

SEQ ID NO: 2471236 - RNA, 19 nt, Artificial Sequence
  Description of Artificial Sequence: Synthetic oligonucleotide
  Sense strand starting at position 3054 of SEQ ID NO: 1887421
agugcagacauaugugaca

SEQ ID NO: 2471237 - RNA, 19 nt, Artificial Sequence
  Description of Artificial Sequence: Synthetic oligonucleotide
  Antisense strand to SEQ ID NO: 2471236
ugucacauaugucugcacu

SEQ ID NO: 2471238 - RNA, 19 nt, Artificial Sequence
  Description of Artificial Sequence: Synthetic oligonucleotide
  Sense strand starting at position 3236 of SEQ ID NO: 1887421
gagucagucaccuggguga

SEQ ID NO: 2471239 - RNA, 19 nt, Artificial Sequence
  Description of Artificial Sequence: Synthetic oligonucleotide
  Antisense strand to SEQ ID NO: 2471238
ucacccaggugacugacuc

SEQ ID NO: 2471240 - RNA, 19 nt, Artificial Sequence
  Description of Artificial Sequence: Synthetic oligonucleotide
  Sense strand starting at position 3372 of SEQ ID NO: 1887421
agaguuacaucaucugguu

SEQ ID NO: 2471241 - RNA, 19 nt, Artificial Sequence
  Description of Artificial Sequence: Synthetic oligonucleotide
  Antisense strand to SEQ ID NO: 2471240
aaccagaugauguaacucu

SEQ ID NO: 2471242 - RNA, 19 nt, Artificial Sequence
  Description of Artificial Sequence: Synthetic oligonucleotide
  Sense strand starting at position 3384 of SEQ ID NO: 1887421
ucugguugaucaguaaaga

SEQ ID NO: 2471243 - RNA, 19 nt, Artificial Sequence
  Description of Artificial Sequence: Synthetic oligonucleotide
  Antisense strand to SEQ ID NO: 2471242
ucuuuacugaucaaccaga

SEQ ID NO: 2471244 - RNA, 19 nt, Artificial Sequence
  Description of Artificial Sequence: Synthetic oligonucleotide
  Sense strand starting at position 3738 of SEQ ID NO: 1887421
gcagaaauaugucucaaug

SEQ ID NO: 2471245 - RNA, 19 nt, Artificial Sequence
  Description of Artificial Sequence: Synthetic oligonucleotide
  Antisense strand to SEQ ID NO: 2471244
cauugagacauauuucugc

SEQ ID NO: 2471246 - RNA, 19 nt, Artificial Sequence
  Description of Artificial Sequence: Synthetic oligonucleotide
  Sense strand starting at position 3916 of SEQ ID NO: 1887421
agaguuacaucacuuuguu

SEQ ID NO: 2471247 - RNA, 19 nt, Artificial Sequence
  Description of Artificial Sequence: Synthetic oligonucleotide
  Antisense strand to SEQ ID NO: 2471246
aacaaagugauguaacucu

SEQ ID NO: 2471248 - RNA, 19 nt, Artificial Sequence
  Description of Artificial Sequence: Synthetic oligonucleotide
  Sense strand starting at position 241 of SEQ ID NO: 1887422
augugauacuauuccuauu

SEQ ID NO: 2471249 - RNA, 19 nt, Artificial Sequence
  Description of Artificial Sequence: Synthetic oligonucleotide
  Antisense strand to SEQ ID NO: 2471248
aauaggaauaguaucacau

SEQ ID NO: 2471250 - RNA, 19 nt, Artificial Sequence
  Description of Artificial Sequence: Synthetic oligonucleotide
  Sense strand starting at position 324 of SEQ ID NO: 1887422
aauguaccuccauguggau

SEQ ID NO: 2471251 - RNA, 19 nt, Artificial Sequence
  Description of Artificial Sequence: Synthetic oligonucleotide
  Antisense strand to SEQ ID NO: 2471250
auccacauggagguacauu

SEQ ID NO: 2471252 - RNA, 19 nt, Artificial Sequence
  Description of Artificial Sequence: Synthetic oligonucleotide
  Sense strand starting at position 391 of SEQ ID NO: 1887422
agaaauucuacgcaaguga

SEQ ID NO: 2471253 - RNA, 19 nt, Artificial Sequence
  Description of Artificial Sequence: Synthetic oligonucleotide
  Antisense strand to SEQ ID NO: 2471252
ucacuugcguagaauuucu

SEQ ID NO: 2471254 - RNA, 19 nt, Artificial Sequence
  Description of Artificial Sequence: Synthetic oligonucleotide
  Sense strand starting at position 456 of SEQ ID NO: 1887422
cccuuuauuggugauggga

SEQ ID NO: 2471255 - RNA, 19 nt, Artificial Sequence
  Description of Artificial Sequence: Synthetic oligonucleotide
  Antisense strand to SEQ ID NO: 2471254
ucccaucaccaauaaaggg

SEQ ID NO: 2471256 - RNA, 19 nt, Artificial Sequence
  Description of Artificial Sequence: Synthetic oligonucleotide
  Sense strand starting at position 496 of SEQ ID NO: 1887422
ugaaguaauacccgcaaga

SEQ ID NO: 2471257 - RNA, 19 nt, Artificial Sequence
  Description of Artificial Sequence: Synthetic oligonucleotide
  Antisense strand to SEQ ID NO: 2471256
ucuugcggguauuacuuca

SEQ ID NO: 2471258 - RNA, 19 nt, Artificial Sequence
  Description of Artificial Sequence: Synthetic oligonucleotide
  Sense strand starting at position 553 of SEQ ID NO: 1887422
cuuggagacuaugucaaua

SEQ ID NO: 2471259 - RNA, 19 nt, Artificial Sequence
  Description of Artificial Sequence: Synthetic oligonucleotide
  Antisense strand to SEQ ID NO: 2471258
uauugacauagucuccaag

SEQ ID NO: 2471260 - RNA, 19 nt, Artificial Sequence
  Description of Artificial Sequence: Synthetic oligonucleotide
  Sense strand starting at position 627 of SEQ ID NO: 1887422
agaauccacucauuaguga

SEQ ID NO: 2471261 - RNA, 19 nt, Artificial Sequence
  Description of Artificial Sequence: Synthetic oligonucleotide
  Antisense strand to SEQ ID NO: 2471260
ucacuaaugaguggauucu

SEQ ID NO: 2471262 - RNA, 19 nt, Artificial Sequence
  Description of Artificial Sequence: Synthetic oligonucleotide
  Sense strand starting at position 1109 of SEQ ID NO: 1887422
auuugugaagcuugucuaa

SEQ ID NO: 2471263 - RNA, 19 nt, Artificial Sequence
  Description of Artificial Sequence: Synthetic oligonucleotide
  Antisense strand to SEQ ID NO: 2471262
uuagacaagcuucacaaau

SEQ ID NO: 2471264 - RNA, 19 nt, Artificial Sequence
  Description of Artificial Sequence: Synthetic oligonucleotide
  Sense strand starting at position 1122 of SEQ ID NO: 1887422
gucuaagauuuguacauuu

SEQ ID NO: 2471265 - RNA, 19 nt, Artificial Sequence
  Description of Artificial Sequence: Synthetic oligonucleotide
  Antisense strand to SEQ ID NO: 2471264
aaauguacaaaucuuagac

SEQ ID NO: 2471266 - RNA, 19 nt, Artificial Sequence
  Description of Artificial Sequence: Synthetic oligonucleotide
  Sense strand starting at position 1137 of SEQ ID NO: 1887422
auuugauugcguggauauu

SEQ ID NO: 2471267 - RNA, 19 nt, Artificial Sequence
  Description of Artificial Sequence: Synthetic oligonucleotide
  Antisense strand to SEQ ID NO: 2471266
aauauccacgcaaucaaau

SEQ ID NO: 2471268 - RNA, 19 nt, Artificial Sequence
  Description of Artificial Sequence: Synthetic oligonucleotide
  Sense strand starting at position 1176 of SEQ ID NO: 1887422
aaugaauaaugugugcuga

SEQ ID NO: 2471269 - RNA, 19 nt, Artificial Sequence
  Description of Artificial Sequence: Synthetic oligonucleotide
  Antisense strand to SEQ ID NO: 2471268
ucagcacacauuauucauu

SEQ ID NO: 2471270 - RNA, 19 nt, Artificial Sequence
  Description of Artificial Sequence: Synthetic oligonucleotide
  Sense strand starting at position 1197 of SEQ ID NO: 1887422
uguucauggguguagagua

SEQ ID NO: 2471271 - RNA, 19 nt, Artificial Sequence
  Description of Artificial Sequence: Synthetic oligonucleotide
  Antisense strand to SEQ ID NO: 2471270
uacucuacacccaugaaca

SEQ ID NO: 2471272 - RNA, 19 nt, Artificial Sequence
  Description of Artificial Sequence: Synthetic oligonucleotide
  Sense strand starting at position 1260 of SEQ ID NO: 1887422
gguggauagcaauauagca

SEQ ID NO: 2471273 - RNA, 19 nt, Artificial Sequence
  Description of Artificial Sequence: Synthetic oligonucleotide
  Antisense strand to SEQ ID NO: 2471272
ugcuauauugcuauccacc

SEQ ID NO: 2471274 - RNA, 19 nt, Artificial Sequence
  Description of Artificial Sequence: Synthetic oligonucleotide
  Sense strand starting at position 1283 of SEQ ID NO: 1887422
guuaacaauugggucgaua

SEQ ID NO: 2471275 - RNA, 19 nt, Artificial Sequence
  Description of Artificial Sequence: Synthetic oligonucleotide
  Antisense strand to SEQ ID NO: 2471274
uaucgacccaauuguuaac

SEQ ID NO: 2471276 - RNA, 19 nt, Artificial Sequence
  Description of Artificial Sequence: Synthetic oligonucleotide
  Sense strand starting at position 1285 of SEQ ID NO: 1887422
uaacaauugggucgauaug

SEQ ID NO: 2471277 - RNA, 19 nt, Artificial Sequence
  Description of Artificial Sequence: Synthetic oligonucleotide
  Antisense strand to SEQ ID NO: 2471276
cauaucgacccaauuguua

SEQ ID NO: 2471278 - RNA, 19 nt, Artificial Sequence
  Description of Artificial Sequence: Synthetic oligonucleotide
  Sense strand starting at position 1286 of SEQ ID NO: 1887422
aacaauugggucgauaugu

SEQ ID NO: 2471279 - RNA, 19 nt, Artificial Sequence
  Description of Artificial Sequence: Synthetic oligonucleotide
  Antisense strand to SEQ ID NO: 2471278
acauaucgacccaauuguu

SEQ ID NO: 2471280 - RNA, 19 nt, Artificial Sequence
  Description of Artificial Sequence: Synthetic oligonucleotide
  Sense strand starting at position 2131 of SEQ ID NO: 1887422
ggcuccugcccaguguuua

SEQ ID NO: 2471281 - RNA, 19 nt, Artificial Sequence
  Description of Artificial Sequence: Synthetic oligonucleotide
  Antisense strand to SEQ ID NO: 2471280
uaaacacugggcaggagcc

SEQ ID NO: 2471282 - RNA, 19 nt, Artificial Sequence
  Description of Artificial Sequence: Synthetic oligonucleotide
  Sense strand starting at position 2204 of SEQ ID NO: 1887422
augggugagaggugucaaa

SEQ ID NO: 2471283 - RNA, 19 nt, Artificial Sequence
  Description of Artificial Sequence: Synthetic oligonucleotide
  Antisense strand to SEQ ID NO: 2471282
uuugacaccucucacccau

SEQ ID NO: 2471284 - RNA, 19 nt, Artificial Sequence
  Description of Artificial Sequence: Synthetic oligonucleotide
  Sense strand starting at position 2458 of SEQ ID NO: 1887422
ucuugaaaucugggugauu

SEQ ID NO: 2471285 - RNA, 19 nt, Artificial Sequence
  Description of Artificial Sequence: Synthetic oligonucleotide
  Antisense strand to SEQ ID NO: 2471284
aaucacccagauuucaaga

SEQ ID NO: 2471286 - RNA, 19 nt, Artificial Sequence
  Description of Artificial Sequence: Synthetic oligonucleotide
  Sense strand starting at position 2459 of SEQ ID NO: 1887422
cuugaaaucugggugauug

SEQ ID NO: 2471287 - RNA, 19 nt, Artificial Sequence
  Description of Artificial Sequence: Synthetic oligonucleotide
  Antisense strand to SEQ ID NO: 2471286
caaucacccagauuucaag

SEQ ID NO: 2471288 - RNA, 19 nt, Artificial Sequence
  Description of Artificial Sequence: Synthetic oligonucleotide
  Sense strand starting at position 2715 of SEQ ID NO: 1887422
gcuuguuuggguuaaggag

SEQ ID NO: 2471289 - RNA, 19 nt, Artificial Sequence
  Description of Artificial Sequence: Synthetic oligonucleotide
  Antisense strand to SEQ ID NO: 2471288
cuccuuaacccaaacaagc

SEQ ID NO: 2471290 - RNA, 19 nt, Artificial Sequence
  Description of Artificial Sequence: Synthetic oligonucleotide
  Sense strand starting at position 2771 of SEQ ID NO: 1887422
cggugcaauuuccuguuua

SEQ ID NO: 2471291 - RNA, 19 nt, Artificial Sequence
  Description of Artificial Sequence: Synthetic oligonucleotide
  Antisense strand to SEQ ID NO: 2471290
uaaacaggaaauugcaccg

SEQ ID NO: 2471292 - RNA, 19 nt, Artificial Sequence
  Description of Artificial Sequence: Synthetic oligonucleotide
  Sense strand starting at position 2775 of SEQ ID NO: 1887422
gcaauuuccuguuuaguug

SEQ ID NO: 2471293 - RNA, 19 nt, Artificial Sequence
  Description of Artificial Sequence: Synthetic oligonucleotide
  Antisense strand to SEQ ID NO: 2471292
caacuaaacaggaaauugc

SEQ ID NO: 2471294 - RNA, 19 nt, Artificial Sequence
  Description of Artificial Sequence: Synthetic oligonucleotide
  Sense strand starting at position 2781 of SEQ ID NO: 1887422
uccuguuuaguugagacca

SEQ ID NO: 2471295 - RNA, 19 nt, Artificial Sequence
  Description of Artificial Sequence: Synthetic oligonucleotide
  Antisense strand to SEQ ID NO: 2471294
uggucucaacuaaacagga

SEQ ID NO: 2471296 - RNA, 19 nt, Artificial Sequence
  Description of Artificial Sequence: Synthetic oligonucleotide
  Sense strand starting at position 2786 of SEQ ID NO: 1887422
uuuaguugagaccaaaguu

SEQ ID NO: 2471297 - RNA, 19 nt, Artificial Sequence
  Description of Artificial Sequence: Synthetic oligonucleotide
  Antisense strand to SEQ ID NO: 2471296
aacuuuggucucaacuaaa

SEQ ID NO: 2471298 - RNA, 19 nt, Artificial Sequence
  Description of Artificial Sequence: Synthetic oligonucleotide
  Sense strand starting at position 2984 of SEQ ID NO: 1887422
uggagaggccugcagaaau

SEQ ID NO: 2471299 - RNA, 19 nt, Artificial Sequence
  Description of Artificial Sequence: Synthetic oligonucleotide
  Antisense strand to SEQ ID NO: 2471298
auuucugcaggccucucca

SEQ ID NO: 2471300 - RNA, 19 nt, Artificial Sequence
  Description of Artificial Sequence: Synthetic oligonucleotide
  Sense strand starting at position 3081 of SEQ ID NO: 1887422
accuaaguucuaggguuau

SEQ ID NO: 2471301 - RNA, 19 nt, Artificial Sequence
  Description of Artificial Sequence: Synthetic oligonucleotide
  Antisense strand to SEQ ID NO: 2471300
auaacccuagaacuuaggu

SEQ ID NO: 2471302 - RNA, 19 nt, Artificial Sequence
  Description of Artificial Sequence: Synthetic oligonucleotide
  Sense strand starting at position 3093 of SEQ ID NO: 1887422
ggguuaugaacuuguuuaa

SEQ ID NO: 2471303 - RNA, 19 nt, Artificial Sequence
  Description of Artificial Sequence: Synthetic oligonucleotide
  Antisense strand to SEQ ID NO: 2471302
uuaaacaaguucauaaccc

SEQ ID NO: 2471304 - RNA, 19 nt, Artificial Sequence
  Description of Artificial Sequence: Synthetic oligonucleotide
  Sense strand starting at position 3167 of SEQ ID NO: 1887422
uuacuuuaaggauguacga

SEQ ID NO: 2471305 - RNA, 19 nt, Artificial Sequence
  Description of Artificial Sequence: Synthetic oligonucleotide
  Antisense strand to SEQ ID NO: 2471304
ucguacauccuuaaaguaa

SEQ ID NO: 2471306 - RNA, 19 nt, Artificial Sequence
  Description of Artificial Sequence: Synthetic oligonucleotide
  Sense strand starting at position 3169 of SEQ ID NO: 1887422
acuuuaaggauguacgagu

SEQ ID NO: 2471307 - RNA, 19 nt, Artificial Sequence
  Description of Artificial Sequence: Synthetic oligonucleotide
  Antisense strand to SEQ ID NO: 2471306
acucguacauccuuaaagu

SEQ ID NO: 2471308 - RNA, 19 nt, Artificial Sequence
  Description of Artificial Sequence: Synthetic oligonucleotide
  Sense strand starting at position 3176 of SEQ ID NO: 1887422
ggauguacgagucgaagaa

SEQ ID NO: 2471309 - RNA, 19 nt, Artificial Sequence
  Description of Artificial Sequence: Synthetic oligonucleotide
  Antisense strand to SEQ ID NO: 2471308
uucuucgacucguacaucc

SEQ ID NO: 2471310 - RNA, 19 nt, Artificial Sequence
  Description of Artificial Sequence: Synthetic oligonucleotide
  Sense strand starting at position 3180 of SEQ ID NO: 1887422
guacgagucgaagaacauu

SEQ ID NO: 2471311 - RNA, 19 nt, Artificial Sequence
  Description of Artificial Sequence: Synthetic oligonucleotide
  Antisense strand to SEQ ID NO: 2471310
aauguucuucgacucguac

SEQ ID NO: 2471312 - RNA, 19 nt, Artificial Sequence
  Description of Artificial Sequence: Synthetic oligonucleotide
  Sense strand starting at position 3234 of SEQ ID NO: 1887422
aaagcuuggcaggaucuaa

SEQ ID NO: 2471313 - RNA, 19 nt, Artificial Sequence
  Description of Artificial Sequence: Synthetic oligonucleotide
  Antisense strand to SEQ ID NO: 2471312
uuagauccugccaagcuuu

SEQ ID NO: 2471314 - RNA, 19 nt, Artificial Sequence
  Description of Artificial Sequence: Synthetic oligonucleotide
  Sense strand starting at position 3397 of SEQ ID NO: 1887422
cuguguaauggcgaagaga

SEQ ID NO: 2471315 - RNA, 19 nt, Artificial Sequence
  Description of Artificial Sequence: Synthetic oligonucleotide
  Antisense strand to SEQ ID NO: 2471314
ucucuucgccauuacacag

SEQ ID NO: 2471316 - RNA, 19 nt, Artificial Sequence
  Description of Artificial Sequence: Synthetic oligonucleotide
  Sense strand starting at position 3503 of SEQ ID NO: 1887422
agggaugaguugagauaga

SEQ ID NO: 2471317 - RNA, 19 nt, Artificial Sequence
  Description of Artificial Sequence: Synthetic oligonucleotide
  Antisense strand to SEQ ID NO: 2471316
ucuaucucaacucaucccu

SEQ ID NO: 2471318 - RNA, 19 nt, Artificial Sequence
  Description of Artificial Sequence: Synthetic oligonucleotide
  Sense strand starting at position 3525 of SEQ ID NO: 1887422
ggagguggauuugauagaa

SEQ ID NO: 2471319 - RNA, 19 nt, Artificial Sequence
  Description of Artificial Sequence: Synthetic oligonucleotide
  Antisense strand to SEQ ID NO: 2471318
uucuaucaaauccaccucc

SEQ ID NO: 2471320 - RNA, 19 nt, Artificial Sequence
  Description of Artificial Sequence: Synthetic oligonucleotide
  Sense strand starting at position 3549 of SEQ ID NO: 1887422
auuggaugugguggaguaa

SEQ ID NO: 2471321 - RNA, 19 nt, Artificial Sequence
  Description of Artificial Sequence: Synthetic oligonucleotide
  Antisense strand to SEQ ID NO: 2471320
uuacuccaccacauccaau

SEQ ID NO: 2471322 - RNA, 19 nt, Artificial Sequence
  Description of Artificial Sequence: Synthetic oligonucleotide
  Sense strand starting at position 3562 of SEQ ID NO: 1887422
gaguaaauauaagaaggaa

SEQ ID NO: 2471323 - RNA, 19 nt, Artificial Sequence
  Description of Artificial Sequence: Synthetic oligonucleotide
  Antisense strand to SEQ ID NO: 2471322
uuccuucuuauauuuacuc

SEQ ID NO: 2471324 - RNA, 19 nt, Artificial Sequence
  Description of Artificial Sequence: Synthetic oligonucleotide
  Sense strand starting at position 3740 of SEQ ID NO: 1887422
ggagaugccagcuaagcau

SEQ ID NO: 2471325 - RNA, 19 nt, Artificial Sequence
  Description of Artificial Sequence: Synthetic oligonucleotide
  Antisense strand to SEQ ID NO: 2471324
augcuuagcuggcaucucc

SEQ ID NO: 2471326 - RNA, 19 nt, Artificial Sequence
  Description of Artificial Sequence: Synthetic oligonucleotide
  Sense strand starting at position 3820 of SEQ ID NO: 1887422
auccguauucugggaccaa

SEQ ID NO: 2471327 - RNA, 19 nt, Artificial Sequence
  Description of Artificial Sequence: Synthetic oligonucleotide
  Antisense strand to SEQ ID NO: 2471326
uuggucccagaauacggau

SEQ ID NO: 2471328 - RNA, 19 nt, Artificial Sequence
  Description of Artificial Sequence: Synthetic oligonucleotide
  Sense strand starting at position 144 of SEQ ID NO: 1887423
gggagaggcuguuuggaua

SEQ ID NO: 2471329 - RNA, 19 nt, Artificial Sequence
  Description of Artificial Sequence: Synthetic oligonucleotide
  Antisense strand to SEQ ID NO: 2471328
uauccaaacagccucuccc

SEQ ID NO: 2471330 - RNA, 19 nt, Artificial Sequence
  Description of Artificial Sequence: Synthetic oligonucleotide
  Sense strand starting at position 340 of SEQ ID NO: 1887423
cauaacgacguugaagaau

SEQ ID NO: 2471331 - RNA, 19 nt, Artificial Sequence
  Description of Artificial Sequence: Synthetic oligonucleotide
  Antisense strand to SEQ ID NO: 2471330
auucuucaacgucguuaug

SEQ ID NO: 2471332 - RNA, 19 nt, Artificial Sequence
  Description of Artificial Sequence: Synthetic oligonucleotide
  Sense strand starting at position 403 of SEQ ID NO: 1887423
gagcccacaggguaauauu

SEQ ID NO: 2471333 - RNA, 19 nt, Artificial Sequence
  Description of Artificial Sequence: Synthetic oligonucleotide
  Antisense strand to SEQ ID NO: 2471332
aauauuacccugugggcuc

SEQ ID NO: 2471334 - RNA, 19 nt, Artificial Sequence
  Description of Artificial Sequence: Synthetic oligonucleotide
  Sense strand starting at position 411 of SEQ ID NO: 1887423
aggguaauauucccugaga

SEQ ID NO: 2471335 - RNA, 19 nt, Artificial Sequence
  Description of Artificial Sequence: Synthetic oligonucleotide
  Antisense strand to SEQ ID NO: 2471334
ucucagggaauauuacccu

SEQ ID NO: 2471336 - RNA, 19 nt, Artificial Sequence
  Description of Artificial Sequence: Synthetic oligonucleotide
  Sense strand starting at position 412 of SEQ ID NO: 1887423
ggguaauauucccugagaa

SEQ ID NO: 2471337 - RNA, 19 nt, Artificial Sequence
  Description of Artificial Sequence: Synthetic oligonucleotide
  Antisense strand to SEQ ID NO: 2471336
uucucagggaauauuaccc

SEQ ID NO: 2471338 - RNA, 19 nt, Artificial Sequence
  Description of Artificial Sequence: Synthetic oligonucleotide
  Sense strand starting at position 413 of SEQ ID NO: 1887423
gguaauauucccugagaau

SEQ ID NO: 2471339 - RNA, 19 nt, Artificial Sequence
  Description of Artificial Sequence: Synthetic oligonucleotide
  Antisense strand to SEQ ID NO: 2471338
auucucagggaauauuacc

SEQ ID NO: 2471340 - RNA, 19 nt, Artificial Sequence
  Description of Artificial Sequence: Synthetic oligonucleotide
  Sense strand starting at position 575 of SEQ ID NO: 1887423
gcaucugggacaugguaua

SEQ ID NO: 2471341 - RNA, 19 nt, Artificial Sequence
  Description of Artificial Sequence: Synthetic oligonucleotide
  Antisense strand to SEQ ID NO: 2471340
uauaccaugucccagaugc

SEQ ID NO: 2471342 - RNA, 19 nt, Artificial Sequence
  Description of Artificial Sequence: Synthetic oligonucleotide
  Sense strand starting at position 734 of SEQ ID NO: 1887423
agguuugguuuauuuguau

SEQ ID NO: 2471343 - RNA, 19 nt, Artificial Sequence
  Description of Artificial Sequence: Synthetic oligonucleotide
  Antisense strand to SEQ ID NO: 2471342
auacaaauaaaccaaaccu

SEQ ID NO: 2471344 - RNA, 19 nt, Artificial Sequence
  Description of Artificial Sequence: Synthetic oligonucleotide
  Sense strand starting at position 745 of SEQ ID NO: 1887423
auuuguaugagccgauguu

SEQ ID NO: 2471345 - RNA, 19 nt, Artificial Sequence
  Description of Artificial Sequence: Synthetic oligonucleotide
  Antisense strand to SEQ ID NO: 2471344
aacaucggcucauacaaau

SEQ ID NO: 2471346 - RNA, 19 nt, Artificial Sequence
  Description of Artificial Sequence: Synthetic oligonucleotide
  Sense strand starting at position 885 of SEQ ID NO: 1887423
guggauuucucuccgcaga

SEQ ID NO: 2471347 - RNA, 19 nt, Artificial Sequence
  Description of Artificial Sequence: Synthetic oligonucleotide
  Antisense strand to SEQ ID NO: 2471346
ucugcggagagaaauccac

SEQ ID NO: 2471348 - RNA, 19 nt, Artificial Sequence
  Description of Artificial Sequence: Synthetic oligonucleotide
  Sense strand starting at position 1280 of SEQ ID NO: 1887423
uccaguuagccugaucaca

SEQ ID NO: 2471349 - RNA, 19 nt, Artificial Sequence
  Description of Artificial Sequence: Synthetic oligonucleotide
  Antisense strand to SEQ ID NO: 2471348
ugugaucaggcuaacugga

SEQ ID NO: 2471350 - RNA, 19 nt, Artificial Sequence
  Description of Artificial Sequence: Synthetic oligonucleotide
  Sense strand starting at position 1312 of SEQ ID NO: 1887423
acuaucugucaguaaucca

SEQ ID NO: 2471351 - RNA, 19 nt, Artificial Sequence
  Description of Artificial Sequence: Synthetic oligonucleotide
  Antisense strand to SEQ ID NO: 2471350
uggauuacugacagauagu

SEQ ID NO: 2471352 - RNA, 19 nt, Artificial Sequence
  Description of Artificial Sequence: Synthetic oligonucleotide
  Sense strand starting at position 1454 of SEQ ID NO: 1887423
aguuaaggcucuccaaaug

SEQ ID NO: 2471353 - RNA, 19 nt, Artificial Sequence
  Description of Artificial Sequence: Synthetic oligonucleotide
  Antisense strand to SEQ ID NO: 2471352
cauuuggagagccuuaacu

SEQ ID NO: 2471354 - RNA, 19 nt, Artificial Sequence
  Description of Artificial Sequence: Synthetic oligonucleotide
  Sense strand starting at position 1743 of SEQ ID NO: 1887423
ccgaguuuauugguaauuu

SEQ ID NO: 2471355 - RNA, 19 nt, Artificial Sequence
  Description of Artificial Sequence: Synthetic oligonucleotide
  Antisense strand to SEQ ID NO: 2471354
aaauuaccaauaaacucgg

SEQ ID NO: 2471356 - RNA, 19 nt, Artificial Sequence
  Description of Artificial Sequence: Synthetic oligonucleotide
  Sense strand starting at position 1747 of SEQ ID NO: 1887423
guuuauugguaauuuguca

SEQ ID NO: 2471357 - RNA, 19 nt, Artificial Sequence
  Description of Artificial Sequence: Synthetic oligonucleotide
  Antisense strand to SEQ ID NO: 2471356
ugacaaauuaccaauaaac

SEQ ID NO: 2471358 - RNA, 19 nt, Artificial Sequence
  Description of Artificial Sequence: Synthetic oligonucleotide
  Sense strand starting at position 1845 of SEQ ID NO: 1887423
ggaaucugcccagacguaa

SEQ ID NO: 2471359 - RNA, 19 nt, Artificial Sequence
  Description of Artificial Sequence: Synthetic oligonucleotide
  Antisense strand to SEQ ID NO: 2471358
uuacgucugggcagauucc

SEQ ID NO: 2471360 - RNA, 19 nt, Artificial Sequence
  Description of Artificial Sequence: Synthetic oligonucleotide
  Sense strand starting at position 1939 of SEQ ID NO: 1887423
agcuauauacccuggagga

SEQ ID NO: 2471361 - RNA, 19 nt, Artificial Sequence
  Description of Artificial Sequence: Synthetic oligonucleotide
  Antisense strand to SEQ ID NO: 2471360
uccuccaggguauauagcu

SEQ ID NO: 2471362 - RNA, 19 nt, Artificial Sequence
  Description of Artificial Sequence: Synthetic oligonucleotide
  Sense strand starting at position 1940 of SEQ ID NO: 1887423
gcuauauacccuggaggag

SEQ ID NO: 2471363 - RNA, 19 nt, Artificial Sequence
  Description of Artificial Sequence: Synthetic oligonucleotide
  Antisense strand to SEQ ID NO: 2471362
cuccuccaggguauauagc

SEQ ID NO: 2471364 - RNA, 19 nt, Artificial Sequence
  Description of Artificial Sequence: Synthetic oligonucleotide
  Sense strand starting at position 1988 of SEQ ID NO: 1887423
uuuccuguacauugaagga

SEQ ID NO: 2471365 - RNA, 19 nt, Artificial Sequence
  Description of Artificial Sequence: Synthetic oligonucleotide
  Antisense strand to SEQ ID NO: 2471364
uccuucaauguacaggaaa

SEQ ID NO: 2471366 - RNA, 19 nt, Artificial Sequence
  Description of Artificial Sequence: Synthetic oligonucleotide
  Sense strand starting at position 2058 of SEQ ID NO: 1887423
uguguaagaaagggagauu

SEQ ID NO: 2471367 - RNA, 19 nt, Artificial Sequence
  Description of Artificial Sequence: Synthetic oligonucleotide
  Antisense strand to SEQ ID NO: 2471366
aaucucccuuucuuacaca

SEQ ID NO: 2471368 - RNA, 19 nt, Artificial Sequence
  Description of Artificial Sequence: Synthetic oligonucleotide
  Sense strand starting at position 2195 of SEQ ID NO: 1887423
ggagguggucucugaacuc

SEQ ID NO: 2471369 - RNA, 19 nt, Artificial Sequence
  Description of Artificial Sequence: Synthetic oligonucleotide
  Antisense strand to SEQ ID NO: 2471368
gaguucagagaccaccucc

SEQ ID NO: 2471370 - RNA, 19 nt, Artificial Sequence
  Description of Artificial Sequence: Synthetic oligonucleotide
  Sense strand starting at position 2365 of SEQ ID NO: 1887423
gaaaucagucuuugguaag

SEQ ID NO: 2471371 - RNA, 19 nt, Artificial Sequence
  Description of Artificial Sequence: Synthetic oligonucleotide
  Antisense strand to SEQ ID NO: 2471370
cuuaccaaagacugauuuc

SEQ ID NO: 2471372 - RNA, 19 nt, Artificial Sequence
  Description of Artificial Sequence: Synthetic oligonucleotide
  Sense strand starting at position 2418 of SEQ ID NO: 1887423
agugcuuuccuccauggga

SEQ ID NO: 2471373 - RNA, 19 nt, Artificial Sequence
  Description of Artificial Sequence: Synthetic oligonucleotide
  Antisense strand to SEQ ID NO: 2471372
ucccauggaggaaagcacu

SEQ ID NO: 2471374 - RNA, 19 nt, Artificial Sequence
  Description of Artificial Sequence: Synthetic oligonucleotide
  Sense strand starting at position 2420 of SEQ ID NO: 1887423
ugcuuuccuccaugggaga

SEQ ID NO: 2471375 - RNA, 19 nt, Artificial Sequence
  Description of Artificial Sequence: Synthetic oligonucleotide
  Antisense strand to SEQ ID NO: 2471374
ucucccauggaggaaagca

SEQ ID NO: 2471376 - RNA, 19 nt, Artificial Sequence
  Description of Artificial Sequence: Synthetic oligonucleotide
  Sense strand starting at position 2508 of SEQ ID NO: 1887423
ugcaguccugggcacuaaa

SEQ ID NO: 2471377 - RNA, 19 nt, Artificial Sequence
  Description of Artificial Sequence: Synthetic oligonucleotide
  Antisense strand to SEQ ID NO: 2471376
uuuagugcccaggacugca

SEQ ID NO: 2471378 - RNA, 19 nt, Artificial Sequence
  Description of Artificial Sequence: Synthetic oligonucleotide
  Sense strand starting at position 2583 of SEQ ID NO: 1887423
cagccuauugagcauguaa

SEQ ID NO: 2471379 - RNA, 19 nt, Artificial Sequence
  Description of Artificial Sequence: Synthetic oligonucleotide
  Antisense strand to SEQ ID NO: 2471378
uuacaugcucaauaggcug

SEQ ID NO: 2471380 - RNA, 19 nt, Artificial Sequence
  Description of Artificial Sequence: Synthetic oligonucleotide
  Sense strand starting at position 2596 of SEQ ID NO: 1887423
auguaacuguguucaggga

SEQ ID NO: 2471381 - RNA, 19 nt, Artificial Sequence
  Description of Artificial Sequence: Synthetic oligonucleotide
  Antisense strand to SEQ ID NO: 2471380
ucccugaacacaguuacau

SEQ ID NO: 2471382 - RNA, 19 nt, Artificial Sequence
  Description of Artificial Sequence: Synthetic oligonucleotide
  Sense strand starting at position 2600 of SEQ ID NO: 1887423
aacuguguucagggaggua

SEQ ID NO: 2471383 - RNA, 19 nt, Artificial Sequence
  Description of Artificial Sequence: Synthetic oligonucleotide
  Antisense strand to SEQ ID NO: 2471382
uaccucccugaacacaguu

SEQ ID NO: 2471384 - RNA, 19 nt, Artificial Sequence
  Description of Artificial Sequence: Synthetic oligonucleotide
  Sense strand starting at position 2756 of SEQ ID NO: 1887423
guaacucucccucauguga

SEQ ID NO: 2471385 - RNA, 19 nt, Artificial Sequence
  Description of Artificial Sequence: Synthetic oligonucleotide
  Antisense strand to SEQ ID NO: 2471384
ucacaugagggagaguuac

SEQ ID NO: 2471386 - RNA, 19 nt, Artificial Sequence
  Description of Artificial Sequence: Synthetic oligonucleotide
  Sense strand starting at position 2912 of SEQ ID NO: 1887423
gggcaaauaucccugaaca

SEQ ID NO: 2471387 - RNA, 19 nt, Artificial Sequence
  Description of Artificial Sequence: Synthetic oligonucleotide
  Antisense strand to SEQ ID NO: 2471386
uguucagggauauuugccc

SEQ ID NO: 2471388 - RNA, 19 nt, Artificial Sequence
  Description of Artificial Sequence: Synthetic oligonucleotide
  Sense strand starting at position 2913 of SEQ ID NO: 1887423
ggcaaauaucccugaacaa

SEQ ID NO: 2471389 - RNA, 19 nt, Artificial Sequence
  Description of Artificial Sequence: Synthetic oligonucleotide
  Antisense strand to SEQ ID NO: 2471388
uuguucagggauauuugcc

SEQ ID NO: 2471390 - RNA, 19 nt, Artificial Sequence
  Description of Artificial Sequence: Synthetic oligonucleotide
  Sense strand starting at position 3115 of SEQ ID NO: 1887423
ggcugaccuccugagucuu

SEQ ID NO: 2471391 - RNA, 19 nt, Artificial Sequence
  Description of Artificial Sequence: Synthetic oligonucleotide
  Antisense strand to SEQ ID NO: 2471390
aagacucaggaggucagcc

SEQ ID NO: 2471392 - RNA, 19 nt, Artificial Sequence
  Description of Artificial Sequence: Synthetic oligonucleotide
  Sense strand starting at position 3598 of SEQ ID NO: 1887423
ccuacuaaugggugcucaa

SEQ ID NO: 2471393 - RNA, 19 nt, Artificial Sequence
  Description of Artificial Sequence: Synthetic oligonucleotide
  Antisense strand to SEQ ID NO: 2471392
uugagcacccauuaguagg

SEQ ID NO: 2471394 - RNA, 19 nt, Artificial Sequence
  Description of Artificial Sequence: Synthetic oligonucleotide
  Sense strand starting at position 3601 of SEQ ID NO: 1887423
acuaaugggugcucaacuu

SEQ ID NO: 2471395 - RNA, 19 nt, Artificial Sequence
  Description of Artificial Sequence: Synthetic oligonucleotide
  Antisense strand to SEQ ID NO: 2471394
aaguugagcacccauuagu

SEQ ID NO: 2471396 - RNA, 19 nt, Artificial Sequence
  Description of Artificial Sequence: Synthetic oligonucleotide
  Sense strand starting at position 3624 of SEQ ID NO: 1887423
caagauguuucugcagaau

SEQ ID NO: 2471397 - RNA, 19 nt, Artificial Sequence
  Description of Artificial Sequence: Synthetic oligonucleotide
  Antisense strand to SEQ ID NO: 2471396
auucugcagaaacaucuug

SEQ ID NO: 2471398 - RNA, 19 nt, Artificial Sequence
  Description of Artificial Sequence: Synthetic oligonucleotide
  Sense strand starting at position 3702 of SEQ ID NO: 1887423
cuggaagcugucugacaca

SEQ ID NO: 2471399 - RNA, 19 nt, Artificial Sequence
  Description of Artificial Sequence: Synthetic oligonucleotide
  Antisense strand to SEQ ID NO: 2471398
ugugucagacagcuuccag

SEQ ID NO: 2471400 - RNA, 19 nt, Artificial Sequence
  Description of Artificial Sequence: Synthetic oligonucleotide
  Sense strand starting at position 3788 of SEQ ID NO: 1887423
ugccuacuccagggaauua

SEQ ID NO: 2471401 - RNA, 19 nt, Artificial Sequence
  Description of Artificial Sequence: Synthetic oligonucleotide
  Antisense strand to SEQ ID NO: 2471400
uaauucccuggaguaggca

SEQ ID NO: 2471402 - RNA, 19 nt, Artificial Sequence
  Description of Artificial Sequence: Synthetic oligonucleotide
  Sense strand starting at position 3813 of SEQ ID NO: 1887423
uggucuugcaaaugagaca

SEQ ID NO: 2471403 - RNA, 19 nt, Artificial Sequence
  Description of Artificial Sequence: Synthetic oligonucleotide
  Antisense strand to SEQ ID NO: 2471402
ugucucauuugcaagacca

SEQ ID NO: 2471404 - RNA, 19 nt, Artificial Sequence
  Description of Artificial Sequence: Synthetic oligonucleotide
  Sense strand starting at position 3885 of SEQ ID NO: 1887423
acagaugaccuuugaguug

SEQ ID NO: 2471405 - RNA, 19 nt, Artificial Sequence
  Description of Artificial Sequence: Synthetic oligonucleotide
  Antisense strand to SEQ ID NO: 2471404
caacucaaaggucaucugu

SEQ ID NO: 2471406 - RNA, 19 nt, Artificial Sequence
  Description of Artificial Sequence: Synthetic oligonucleotide
  Sense strand starting at position 3888 of SEQ ID NO: 1887423
gaugaccuuugaguugauu

SEQ ID NO: 2471407 - RNA, 19 nt, Artificial Sequence
  Description of Artificial Sequence: Synthetic oligonucleotide
  Antisense strand to SEQ ID NO: 2471406
aaucaacucaaaggucauc

SEQ ID NO: 2471408 - RNA, 19 nt, Artificial Sequence
  Description of Artificial Sequence: Synthetic oligonucleotide
  Sense strand starting at position 241 of SEQ ID NO: 1887424
augugauacuauuccuauu

SEQ ID NO: 2471409 - RNA, 19 nt, Artificial Sequence
  Description of Artificial Sequence: Synthetic oligonucleotide
  Antisense strand to SEQ ID NO: 2471408
aauaggaauaguaucacau

SEQ ID NO: 2471410 - RNA, 19 nt, Artificial Sequence
  Description of Artificial Sequence: Synthetic oligonucleotide
  Sense strand starting at position 324 of SEQ ID NO: 1887424
aauguaccuccauguggau

SEQ ID NO: 2471411 - RNA, 19 nt, Artificial Sequence
  Description of Artificial Sequence: Synthetic oligonucleotide
  Antisense strand to SEQ ID NO: 2471410
auccacauggagguacauu

SEQ ID NO: 2471412 - RNA, 19 nt, Artificial Sequence
  Description of Artificial Sequence: Synthetic oligonucleotide
  Sense strand starting at position 391 of SEQ ID NO: 1887424
agaaauucuacgcaaguga

SEQ ID NO: 2471413 - RNA, 19 nt, Artificial Sequence
  Description of Artificial Sequence: Synthetic oligonucleotide
  Antisense strand to SEQ ID NO: 2471412
ucacuugcguagaauuucu

SEQ ID NO: 2471414 - RNA, 19 nt, Artificial Sequence
  Description of Artificial Sequence: Synthetic oligonucleotide
  Sense strand starting at position 456 of SEQ ID NO: 1887424
cccuuuauuggugauggga

SEQ ID NO: 2471415 - RNA, 19 nt, Artificial Sequence
  Description of Artificial Sequence: Synthetic oligonucleotide
  Antisense strand to SEQ ID NO: 2471414
ucccaucaccaauaaaggg

SEQ ID NO: 2471416 - RNA, 19 nt, Artificial Sequence
  Description of Artificial Sequence: Synthetic oligonucleotide
  Sense strand starting at position 496 of SEQ ID NO: 1887424
ugaaguaauacccgcaaga

SEQ ID NO: 2471417 - RNA, 19 nt, Artificial Sequence
  Description of Artificial Sequence: Synthetic oligonucleotide
  Antisense strand to SEQ ID NO: 2471416
ucuugcggguauuacuuca

SEQ ID NO: 2471418 - RNA, 19 nt, Artificial Sequence
  Description of Artificial Sequence: Synthetic oligonucleotide
  Sense strand starting at position 553 of SEQ ID NO: 1887424
cuuggagacuaugucaaua

SEQ ID NO: 2471419 - RNA, 19 nt, Artificial Sequence
  Description of Artificial Sequence: Synthetic oligonucleotide
  Antisense strand to SEQ ID NO: 2471418
uauugacauagucuccaag

SEQ ID NO: 2471420 - RNA, 19 nt, Artificial Sequence
  Description of Artificial Sequence: Synthetic oligonucleotide
  Sense strand starting at position 627 of SEQ ID NO: 1887424
agaauccacucauuaguga

SEQ ID NO: 2471421 - RNA, 19 nt, Artificial Sequence
  Description of Artificial Sequence: Synthetic oligonucleotide
  Antisense strand to SEQ ID NO: 2471420
ucacuaaugaguggauucu

SEQ ID NO: 2471422 - RNA, 19 nt, Artificial Sequence
  Description of Artificial Sequence: Synthetic oligonucleotide
  Sense strand starting at position 1109 of SEQ ID NO: 1887424
auuugugaagcuugucuaa

SEQ ID NO: 2471423 - RNA, 19 nt, Artificial Sequence
  Description of Artificial Sequence: Synthetic oligonucleotide
  Antisense strand to SEQ ID NO: 2471422
uuagacaagcuucacaaau

SEQ ID NO: 2471424 - RNA, 19 nt, Artificial Sequence
  Description of Artificial Sequence: Synthetic oligonucleotide
  Sense strand starting at position 1122 of SEQ ID NO: 1887424
gucuaagauuuguacauuu

SEQ ID NO: 2471425 - RNA, 19 nt, Artificial Sequence
  Description of Artificial Sequence: Synthetic oligonucleotide
  Antisense strand to SEQ ID NO: 2471424
aaauguacaaaucuuagac

SEQ ID NO: 2471426 - RNA, 19 nt, Artificial Sequence
  Description of Artificial Sequence: Synthetic oligonucleotide
  Sense strand starting at position 1137 of SEQ ID NO: 1887424
auuugauugcguggauauu

SEQ ID NO: 2471427 - RNA, 19 nt, Artificial Sequence
  Description of Artificial Sequence: Synthetic oligonucleotide
  Antisense strand to SEQ ID NO: 2471426
aauauccacgcaaucaaau

SEQ ID NO: 2471428 - RNA, 19 nt, Artificial Sequence
  Description of Artificial Sequence: Synthetic oligonucleotide
  Sense strand starting at position 1176 of SEQ ID NO: 1887424
aaugaauaaugugugcuga

SEQ ID NO: 2471429 - RNA, 19 nt, Artificial Sequence
  Description of Artificial Sequence: Synthetic oligonucleotide
  Antisense strand to SEQ ID NO: 2471428
ucagcacacauuauucauu

SEQ ID NO: 2471430 - RNA, 19 nt, Artificial Sequence
  Description of Artificial Sequence: Synthetic oligonucleotide
  Sense strand starting at position 1197 of SEQ ID NO: 1887424
uguucauggguguagagua

SEQ ID NO: 2471431 - RNA, 19 nt, Artificial Sequence
  Description of Artificial Sequence: Synthetic oligonucleotide
  Antisense strand to SEQ ID NO: 2471430
uacucuacacccaugaaca

SEQ ID NO: 2471432 - RNA, 19 nt, Artificial Sequence
  Description of Artificial Sequence: Synthetic oligonucleotide
  Sense strand starting at position 1260 of SEQ ID NO: 1887424
gguggauagcaauauagca

SEQ ID NO: 2471433 - RNA, 19 nt, Artificial Sequence
  Description of Artificial Sequence: Synthetic oligonucleotide
  Antisense strand to SEQ ID NO: 2471432
ugcuauauugcuauccacc

SEQ ID NO: 2471434 - RNA, 19 nt, Artificial Sequence
  Description of Artificial Sequence: Synthetic oligonucleotide
  Sense strand starting at position 1283 of SEQ ID NO: 1887424
guuaacaauugggucgaua

SEQ ID NO: 2471435 - RNA, 19 nt, Artificial Sequence
  Description of Artificial Sequence: Synthetic oligonucleotide
  Antisense strand to SEQ ID NO: 2471434
uaucgacccaauuguuaac

SEQ ID NO: 2471436 - RNA, 19 nt, Artificial Sequence
  Description of Artificial Sequence: Synthetic oligonucleotide
  Sense strand starting at position 1285 of SEQ ID NO: 1887424
uaacaauugggucgauaug

SEQ ID NO: 2471437 - RNA, 19 nt, Artificial Sequence
  Description of Artificial Sequence: Synthetic oligonucleotide
  Antisense strand to SEQ ID NO: 2471436
cauaucgacccaauuguua

SEQ ID NO: 2471438 - RNA, 19 nt, Artificial Sequence
  Description of Artificial Sequence: Synthetic oligonucleotide
  Sense strand starting at position 1286 of SEQ ID NO: 1887424
aacaauugggucgauaugu

SEQ ID NO: 2471439 - RNA, 19 nt, Artificial Sequence
  Description of Artificial Sequence: Synthetic oligonucleotide
  Antisense strand to SEQ ID NO: 2471438
acauaucgacccaauuguu

SEQ ID NO: 2471440 - RNA, 19 nt, Artificial Sequence
  Description of Artificial Sequence: Synthetic oligonucleotide
  Sense strand starting at position 2131 of SEQ ID NO: 1887424
ggcuccugcccaguguuua

SEQ ID NO: 2471441 - RNA, 19 nt, Artificial Sequence
  Description of Artificial Sequence: Synthetic oligonucleotide
  Antisense strand to SEQ ID NO: 2471440
uaaacacugggcaggagcc

SEQ ID NO: 2471442 - RNA, 19 nt, Artificial Sequence
  Description of Artificial Sequence: Synthetic oligonucleotide
  Sense strand starting at position 2204 of SEQ ID NO: 1887424
augggugagaggugucaaa

SEQ ID NO: 2471443 - RNA, 19 nt, Artificial Sequence
  Description of Artificial Sequence: Synthetic oligonucleotide
  Antisense strand to SEQ ID NO: 2471442
uuugacaccucucacccau

SEQ ID NO: 2471444 - RNA, 19 nt, Artificial Sequence
  Description of Artificial Sequence: Synthetic oligonucleotide
  Sense strand starting at position 2458 of SEQ ID NO: 1887424
ucuugaaaucugggugauu

SEQ ID NO: 2471445 - RNA, 19 nt, Artificial Sequence
  Description of Artificial Sequence: Synthetic oligonucleotide
  Antisense strand to SEQ ID NO: 2471444
aaucacccagauuucaaga

SEQ ID NO: 2471446 - RNA, 19 nt, Artificial Sequence
  Description of Artificial Sequence: Synthetic oligonucleotide
  Sense strand starting at position 2459 of SEQ ID NO: 1887424
cuugaaaucugggugauug

SEQ ID NO: 2471447 - RNA, 19 nt, Artificial Sequence
  Description of Artificial Sequence: Synthetic oligonucleotide
  Antisense strand to SEQ ID NO: 2471446
caaucacccagauuucaag

SEQ ID NO: 2471448 - RNA, 19 nt, Artificial Sequence
  Description of Artificial Sequence: Synthetic oligonucleotide
  Sense strand starting at position 2715 of SEQ ID NO: 1887424
gcuuguuuggguuaaggag

SEQ ID NO: 2471449 - RNA, 19 nt, Artificial Sequence
  Description of Artificial Sequence: Synthetic oligonucleotide
  Antisense strand to SEQ ID NO: 2471448
cuccuuaacccaaacaagc

SEQ ID NO: 2471450 - RNA, 19 nt, Artificial Sequence
  Description of Artificial Sequence: Synthetic oligonucleotide
  Sense strand starting at position 2771 of SEQ ID NO: 1887424
cggugcaauuuccuguuua

SEQ ID NO: 2471451 - RNA, 19 nt, Artificial Sequence
  Description of Artificial Sequence: Synthetic oligonucleotide
  Antisense strand to SEQ ID NO: 2471450
uaaacaggaaauugcaccg

SEQ ID NO: 2471452 - RNA, 19 nt, Artificial Sequence
  Description of Artificial Sequence: Synthetic oligonucleotide
  Sense strand starting at position 2775 of SEQ ID NO: 1887424
gcaauuuccuguuuaguug

SEQ ID NO: 2471453 - RNA, 19 nt, Artificial Sequence
  Description of Artificial Sequence: Synthetic oligonucleotide
  Antisense strand to SEQ ID NO: 2471452
caacuaaacaggaaauugc

SEQ ID NO: 2471454 - RNA, 19 nt, Artificial Sequence
  Description of Artificial Sequence: Synthetic oligonucleotide
  Sense strand starting at position 2781 of SEQ ID NO: 1887424
uccuguuuaguugagacca

SEQ ID NO: 2471455 - RNA, 19 nt, Artificial Sequence
  Description of Artificial Sequence: Synthetic oligonucleotide
  Antisense strand to SEQ ID NO: 2471454
uggucucaacuaaacagga

SEQ ID NO: 2471456 - RNA, 19 nt, Artificial Sequence
  Description of Artificial Sequence: Synthetic oligonucleotide
  Sense strand starting at position 2786 of SEQ ID NO: 1887424
uuuaguugagaccaaaguu

SEQ ID NO: 2471457 - RNA, 19 nt, Artificial Sequence
  Description of Artificial Sequence: Synthetic oligonucleotide
  Antisense strand to SEQ ID NO: 2471456
aacuuuggucucaacuaaa

SEQ ID NO: 2471458 - RNA, 19 nt, Artificial Sequence
  Description of Artificial Sequence: Synthetic oligonucleotide
  Sense strand starting at position 2984 of SEQ ID NO: 1887424
uggagaggccugcagaaau

SEQ ID NO: 2471459 - RNA, 19 nt, Artificial Sequence
  Description of Artificial Sequence: Synthetic oligonucleotide
  Antisense strand to SEQ ID NO: 2471458
auuucugcaggccucucca

SEQ ID NO: 2471460 - RNA, 19 nt, Artificial Sequence
  Description of Artificial Sequence: Synthetic oligonucleotide
  Sense strand starting at position 3081 of SEQ ID NO: 1887424
accuaaguucuaggguuau

SEQ ID NO: 2471461 - RNA, 19 nt, Artificial Sequence
  Description of Artificial Sequence: Synthetic oligonucleotide
  Antisense strand to SEQ ID NO: 2471460
auaacccuagaacuuaggu

SEQ ID NO: 2471462 - RNA, 19 nt, Artificial Sequence
  Description of Artificial Sequence: Synthetic oligonucleotide
  Sense strand starting at position 3093 of SEQ ID NO: 1887424
ggguuaugaacuuguuuaa

SEQ ID NO: 2471463 - RNA, 19 nt, Artificial Sequence
  Description of Artificial Sequence: Synthetic oligonucleotide
  Antisense strand to SEQ ID NO: 2471462
uuaaacaaguucauaaccc

SEQ ID NO: 2471464 - RNA, 19 nt, Artificial Sequence
  Description of Artificial Sequence: Synthetic oligonucleotide
  Sense strand starting at position 3167 of SEQ ID NO: 1887424
uuacuuuaaggauguacga

SEQ ID NO: 2471465 - RNA, 19 nt, Artificial Sequence
  Description of Artificial Sequence: Synthetic oligonucleotide
  Antisense strand to SEQ ID NO: 2471464
ucguacauccuuaaaguaa

SEQ ID NO: 2471466 - RNA, 19 nt, Artificial Sequence
  Description of Artificial Sequence: Synthetic oligonucleotide
  Sense strand starting at position 3169 of SEQ ID NO: 1887424
acuuuaaggauguacgagu

SEQ ID NO: 2471467 - RNA, 19 nt, Artificial Sequence
  Description of Artificial Sequence: Synthetic oligonucleotide
  Antisense strand to SEQ ID NO: 2471466
acucguacauccuuaaagu

SEQ ID NO: 2471468 - RNA, 19 nt, Artificial Sequence
  Description of Artificial Sequence: Synthetic oligonucleotide
  Sense strand starting at position 3176 of SEQ ID NO: 1887424
ggauguacgagucgaagaa

SEQ ID NO: 2471469 - RNA, 19 nt, Artificial Sequence
  Description of Artificial Sequence: Synthetic oligonucleotide
  Antisense strand to SEQ ID NO: 2471468
uucuucgacucguacaucc

SEQ ID NO: 2471470 - RNA, 19 nt, Artificial Sequence
  Description of Artificial Sequence: Synthetic oligonucleotide
  Sense strand starting at position 3180 of SEQ ID NO: 1887424
guacgagucgaagaacauu

SEQ ID NO: 2471471 - RNA, 19 nt, Artificial Sequence
  Description of Artificial Sequence: Synthetic oligonucleotide
  Antisense strand to SEQ ID NO: 2471470
aauguucuucgacucguac

SEQ ID NO: 2471472 - RNA, 19 nt, Artificial Sequence
  Description of Artificial Sequence: Synthetic oligonucleotide
  Sense strand starting at position 3234 of SEQ ID NO: 1887424
aaagcuuggcaggaucuaa

SEQ ID NO: 2471473 - RNA, 19 nt, Artificial Sequence
  Description of Artificial Sequence: Synthetic oligonucleotide
  Antisense strand to SEQ ID NO: 2471472
uuagauccugccaagcuuu

SEQ ID NO: 2471474 - RNA, 19 nt, Artificial Sequence
  Description of Artificial Sequence: Synthetic oligonucleotide
  Sense strand starting at position 3397 of SEQ ID NO: 1887424
cuguguaauggcgaagaga

SEQ ID NO: 2471475 - RNA, 19 nt, Artificial Sequence
  Description of Artificial Sequence: Synthetic oligonucleotide
  Antisense strand to SEQ ID NO: 2471474
ucucuucgccauuacacag

SEQ ID NO: 2471476 - RNA, 19 nt, Artificial Sequence
  Description of Artificial Sequence: Synthetic oligonucleotide
  Sense strand starting at position 3503 of SEQ ID NO: 1887424
agggaugaguugagauaga

SEQ ID NO: 2471477 - RNA, 19 nt, Artificial Sequence
  Description of Artificial Sequence: Synthetic oligonucleotide
  Antisense strand to SEQ ID NO: 2471476
ucuaucucaacucaucccu

SEQ ID NO: 2471478 - RNA, 19 nt, Artificial Sequence
  Description of Artificial Sequence: Synthetic oligonucleotide
  Sense strand starting at position 3525 of SEQ ID NO: 1887424
ggagguggauuugauagaa

SEQ ID NO: 2471479 - RNA, 19 nt, Artificial Sequence
  Description of Artificial Sequence: Synthetic oligonucleotide
  Antisense strand to SEQ ID NO: 2471478
uucuaucaaauccaccucc

SEQ ID NO: 2471480 - RNA, 19 nt, Artificial Sequence
  Description of Artificial Sequence: Synthetic oligonucleotide
  Sense strand starting at position 3549 of SEQ ID NO: 1887424
auuggaugugguggaguaa

SEQ ID NO: 2471481 - RNA, 19 nt, Artificial Sequence
  Description of Artificial Sequence: Synthetic oligonucleotide
  Antisense strand to SEQ ID NO: 2471480
uuacuccaccacauccaau

SEQ ID NO: 2471482 - RNA, 19 nt, Artificial Sequence
  Description of Artificial Sequence: Synthetic oligonucleotide
  Sense strand starting at position 3562 of SEQ ID NO: 1887424
gaguaaauauaagaaggaa

SEQ ID NO: 2471483 - RNA, 19 nt, Artificial Sequence
  Description of Artificial Sequence: Synthetic oligonucleotide
  Antisense strand to SEQ ID NO: 2471482
uuccuucuuauauuuacuc

SEQ ID NO: 2471484 - RNA, 19 nt, Artificial Sequence
  Description of Artificial Sequence: Synthetic oligonucleotide
  Sense strand starting at position 3740 of SEQ ID NO: 1887424
ggagaugccagcuaagcau

SEQ ID NO: 2471485 - RNA, 19 nt, Artificial Sequence
  Description of Artificial Sequence: Synthetic oligonucleotide
  Antisense strand to SEQ ID NO: 2471484
augcuuagcuggcaucucc

SEQ ID NO: 2471486 - RNA, 19 nt, Artificial Sequence
  Description of Artificial Sequence: Synthetic oligonucleotide
  Sense strand starting at position 3820 of SEQ ID NO: 1887424
auccguauucugggaccaa

SEQ ID NO: 2471487 - RNA, 19 nt, Artificial Sequence
  Description of Artificial Sequence: Synthetic oligonucleotide
  Antisense strand to SEQ ID NO: 2471486
uuggucccagaauacggau

SEQ ID NO: 2471488 - RNA, 19 nt, Artificial Sequence
  Description of Artificial Sequence: Synthetic oligonucleotide
  Sense strand starting at position 5 of SEQ ID NO: 1887425
cuauuagaacuuggcaguu

SEQ ID NO: 2471489 - RNA, 19 nt, Artificial Sequence
  Description of Artificial Sequence: Synthetic oligonucleotide
  Antisense strand to SEQ ID NO: 2471488
aacugccaaguucuaauag

SEQ ID NO: 2471490 - RNA, 19 nt, Artificial Sequence
  Description of Artificial Sequence: Synthetic oligonucleotide
  Sense strand starting at position 172 of SEQ ID NO: 1887425
ggguuaguauuauuagaau

SEQ ID NO: 2471491 - RNA, 19 nt, Artificial Sequence
  Description of Artificial Sequence: Synthetic oligonucleotide
  Antisense strand to SEQ ID NO: 2471490
auucuaauaauacuaaccc

SEQ ID NO: 2471492 - RNA, 19 nt, Artificial Sequence
  Description of Artificial Sequence: Synthetic oligonucleotide
  Sense strand starting at position 181 of SEQ ID NO: 1887425
uuauuagaaucugugugaa

SEQ ID NO: 2471493 - RNA, 19 nt, Artificial Sequence
  Description of Artificial Sequence: Synthetic oligonucleotide
  Antisense strand to SEQ ID NO: 2471492
uucacacagauucuaauaa

SEQ ID NO: 2471494 - RNA, 19 nt, Artificial Sequence
  Description of Artificial Sequence: Synthetic oligonucleotide
  Sense strand starting at position 183 of SEQ ID NO: 1887425
auuagaaucugugugaaca

SEQ ID NO: 2471495 - RNA, 19 nt, Artificial Sequence
  Description of Artificial Sequence: Synthetic oligonucleotide
  Antisense strand to SEQ ID NO: 2471494
uguucacacagauucuaau

SEQ ID NO: 2471496 - RNA, 19 nt, Artificial Sequence
  Description of Artificial Sequence: Synthetic oligonucleotide
  Sense strand starting at position 184 of SEQ ID NO: 1887425
uuagaaucugugugaacaa

SEQ ID NO: 2471497 - RNA, 19 nt, Artificial Sequence
  Description of Artificial Sequence: Synthetic oligonucleotide
  Antisense strand to SEQ ID NO: 2471496
uuguucacacagauucuaa

SEQ ID NO: 2471498 - RNA, 19 nt, Artificial Sequence
  Description of Artificial Sequence: Synthetic oligonucleotide
  Sense strand starting at position 312 of SEQ ID NO: 1887425
uauguaaagcagugacacu

SEQ ID NO: 2471499 - RNA, 19 nt, Artificial Sequence
  Description of Artificial Sequence: Synthetic oligonucleotide
  Antisense strand to SEQ ID NO: 2471498
agugucacugcuuuacaua

SEQ ID NO: 2471500 - RNA, 19 nt, Artificial Sequence
  Description of Artificial Sequence: Synthetic oligonucleotide
  Sense strand starting at position 486 of SEQ ID NO: 1887425
aaacaagacugguuguuaa

SEQ ID NO: 2471501 - RNA, 19 nt, Artificial Sequence
  Description of Artificial Sequence: Synthetic oligonucleotide
  Antisense strand to SEQ ID NO: 2471500
uuaacaaccagucuuguuu

SEQ ID NO: 2471502 - RNA, 19 nt, Artificial Sequence
  Description of Artificial Sequence: Synthetic oligonucleotide
  Sense strand starting at position 489 of SEQ ID NO: 1887425
caagacugguuguuaacaa

SEQ ID NO: 2471503 - RNA, 19 nt, Artificial Sequence
  Description of Artificial Sequence: Synthetic oligonucleotide
  Antisense strand to SEQ ID NO: 2471502
uuguuaacaaccagucuug

SEQ ID NO: 2471504 - RNA, 19 nt, Artificial Sequence
  Description of Artificial Sequence: Synthetic oligonucleotide
  Sense strand starting at position 577 of SEQ ID NO: 1887425
gaaacagguuuggcacaaa

SEQ ID NO: 2471505 - RNA, 19 nt, Artificial Sequence
  Description of Artificial Sequence: Synthetic oligonucleotide
  Antisense strand to SEQ ID NO: 2471504
uuugugccaaaccuguuuc

SEQ ID NO: 2471506 - RNA, 19 nt, Artificial Sequence
  Description of Artificial Sequence: Synthetic oligonucleotide
  Sense strand starting at position 580 of SEQ ID NO: 1887425
acagguuuggcacaaaucu

SEQ ID NO: 2471507 - RNA, 19 nt, Artificial Sequence
  Description of Artificial Sequence: Synthetic oligonucleotide
  Antisense strand to SEQ ID NO: 2471506
agauuugugccaaaccugu

SEQ ID NO: 2471508 - RNA, 19 nt, Artificial Sequence
  Description of Artificial Sequence: Synthetic oligonucleotide
  Sense strand starting at position 706 of SEQ ID NO: 1887425
uacgacuugccuuaagaug

SEQ ID NO: 2471509 - RNA, 19 nt, Artificial Sequence
  Description of Artificial Sequence: Synthetic oligonucleotide
  Antisense strand to SEQ ID NO: 2471508
caucuuaaggcaagucgua

SEQ ID NO: 2471510 - RNA, 19 nt, Artificial Sequence
  Description of Artificial Sequence: Synthetic oligonucleotide
  Sense strand starting at position 1408 of SEQ ID NO: 1887425
aauguuaaguggccacaaa

SEQ ID NO: 2471511 - RNA, 19 nt, Artificial Sequence
  Description of Artificial Sequence: Synthetic oligonucleotide
  Antisense strand to SEQ ID NO: 2471510
uuuguggccacuuaacauu

SEQ ID NO: 2471512 - RNA, 19 nt, Artificial Sequence
  Description of Artificial Sequence: Synthetic oligonucleotide
  Sense strand starting at position 1409 of SEQ ID NO: 1887425
auguuaaguggccacaaau

SEQ ID NO: 2471513 - RNA, 19 nt, Artificial Sequence
  Description of Artificial Sequence: Synthetic oligonucleotide
  Antisense strand to SEQ ID NO: 2471512
auuuguggccacuuaacau

SEQ ID NO: 2471514 - RNA, 19 nt, Artificial Sequence
  Description of Artificial Sequence: Synthetic oligonucleotide
  Sense strand starting at position 1594 of SEQ ID NO: 1887425
aguuuaagauguucuacug

SEQ ID NO: 2471515 - RNA, 19 nt, Artificial Sequence
  Description of Artificial Sequence: Synthetic oligonucleotide
  Antisense strand to SEQ ID NO: 2471514
caguagaacaucuuaaacu

SEQ ID NO: 2471516 - RNA, 19 nt, Artificial Sequence
  Description of Artificial Sequence: Synthetic oligonucleotide
  Sense strand starting at position 1610 of SEQ ID NO: 1887425
cugagaauagccuagucau

SEQ ID NO: 2471517 - RNA, 19 nt, Artificial Sequence
  Description of Artificial Sequence: Synthetic oligonucleotide
  Antisense strand to SEQ ID NO: 2471516
augacuaggcuauucucag

SEQ ID NO: 2471518 - RNA, 19 nt, Artificial Sequence
  Description of Artificial Sequence: Synthetic oligonucleotide
  Sense strand starting at position 1613 of SEQ ID NO: 1887425
agaauagccuagucaucua

SEQ ID NO: 2471519 - RNA, 19 nt, Artificial Sequence
  Description of Artificial Sequence: Synthetic oligonucleotide
  Antisense strand to SEQ ID NO: 2471518
uagaugacuaggcuauucu

SEQ ID NO: 2471520 - RNA, 19 nt, Artificial Sequence
  Description of Artificial Sequence: Synthetic oligonucleotide
  Sense strand starting at position 1624 of SEQ ID NO: 1887425
gucaucuauuccucaagga

SEQ ID NO: 2471521 - RNA, 19 nt, Artificial Sequence
  Description of Artificial Sequence: Synthetic oligonucleotide
  Antisense strand to SEQ ID NO: 2471520
uccuugaggaauagaugac

SEQ ID NO: 2471522 - RNA, 19 nt, Artificial Sequence
  Description of Artificial Sequence: Synthetic oligonucleotide
  Sense strand starting at position 1745 of SEQ ID NO: 1887425
acagaaugcucuguuaaug

SEQ ID NO: 2471523 - RNA, 19 nt, Artificial Sequence
  Description of Artificial Sequence: Synthetic oligonucleotide
  Antisense strand to SEQ ID NO: 2471522
cauuaacagagcauucugu

SEQ ID NO: 2471524 - RNA, 19 nt, Artificial Sequence
  Description of Artificial Sequence: Synthetic oligonucleotide
  Sense strand starting at position 1783 of SEQ ID NO: 1887425
acaauugugaacggcacua

SEQ ID NO: 2471525 - RNA, 19 nt, Artificial Sequence
  Description of Artificial Sequence: Synthetic oligonucleotide
  Antisense strand to SEQ ID NO: 2471524
uagugccguucacaauugu

SEQ ID NO: 2471526 - RNA, 19 nt, Artificial Sequence
  Description of Artificial Sequence: Synthetic oligonucleotide
  Sense strand starting at position 1785 of SEQ ID NO: 1887425
aauugugaacggcacuaaa

SEQ ID NO: 2471527 - RNA, 19 nt, Artificial Sequence
  Description of Artificial Sequence: Synthetic oligonucleotide
  Antisense strand to SEQ ID NO: 2471526
uuuagugccguucacaauu

SEQ ID NO: 2471528 - RNA, 19 nt, Artificial Sequence
  Description of Artificial Sequence: Synthetic oligonucleotide
  Sense strand starting at position 1866 of SEQ ID NO: 1887425
agaagaaauugucccauug

SEQ ID NO: 2471529 - RNA, 19 nt, Artificial Sequence
  Description of Artificial Sequence: Synthetic oligonucleotide
  Antisense strand to SEQ ID NO: 2471528
caaugggacaauuucuucu

SEQ ID NO: 2471530 - RNA, 19 nt, Artificial Sequence
  Description of Artificial Sequence: Synthetic oligonucleotide
  Sense strand starting at position 1986 of SEQ ID NO: 1887425
cugugaaagugcucacaau

SEQ ID NO: 2471531 - RNA, 19 nt, Artificial Sequence
  Description of Artificial Sequence: Synthetic oligonucleotide
  Antisense strand to SEQ ID NO: 2471530
auugugagcacuuucacag

SEQ ID NO: 2471532 - RNA, 19 nt, Artificial Sequence
  Description of Artificial Sequence: Synthetic oligonucleotide
  Sense strand starting at position 1987 of SEQ ID NO: 1887425
ugugaaagugcucacaaua

SEQ ID NO: 2471533 - RNA, 19 nt, Artificial Sequence
  Description of Artificial Sequence: Synthetic oligonucleotide
  Antisense strand to SEQ ID NO: 2471532
uauugugagcacuuucaca

SEQ ID NO: 2471534 - RNA, 19 nt, Artificial Sequence
  Description of Artificial Sequence: Synthetic oligonucleotide
  Sense strand starting at position 2194 of SEQ ID NO: 1887425
ggugauuacuaccuucuua

SEQ ID NO: 2471535 - RNA, 19 nt, Artificial Sequence
  Description of Artificial Sequence: Synthetic oligonucleotide
  Antisense strand to SEQ ID NO: 2471534
uaagaagguaguaaucacc

SEQ ID NO: 2471536 - RNA, 19 nt, Artificial Sequence
  Description of Artificial Sequence: Synthetic oligonucleotide
  Sense strand starting at position 2272 of SEQ ID NO: 1887425
guggaagacuaaguucuau

SEQ ID NO: 2471537 - RNA, 19 nt, Artificial Sequence
  Description of Artificial Sequence: Synthetic oligonucleotide
  Antisense strand to SEQ ID NO: 2471536
auagaacuuagucuuccac

SEQ ID NO: 2471538 - RNA, 19 nt, Artificial Sequence
  Description of Artificial Sequence: Synthetic oligonucleotide
  Sense strand starting at position 2364 of SEQ ID NO: 1887425
caggaauguguucguauuu

SEQ ID NO: 2471539 - RNA, 19 nt, Artificial Sequence
  Description of Artificial Sequence: Synthetic oligonucleotide
  Antisense strand to SEQ ID NO: 2471538
aaauacgaacacauuccug

SEQ ID NO: 2471540 - RNA, 19 nt, Artificial Sequence
  Description of Artificial Sequence: Synthetic oligonucleotide
  Sense strand starting at position 2365 of SEQ ID NO: 1887425
aggaauguguucguauuua

SEQ ID NO: 2471541 - RNA, 19 nt, Artificial Sequence
  Description of Artificial Sequence: Synthetic oligonucleotide
  Antisense strand to SEQ ID NO: 2471540
uaaauacgaacacauuccu

SEQ ID NO: 2471542 - RNA, 19 nt, Artificial Sequence
  Description of Artificial Sequence: Synthetic oligonucleotide
  Sense strand starting at position 2369 of SEQ ID NO: 1887425
auguguucguauuuacaug

SEQ ID NO: 2471543 - RNA, 19 nt, Artificial Sequence
  Description of Artificial Sequence: Synthetic oligonucleotide
  Antisense strand to SEQ ID NO: 2471542
cauguaaauacgaacacau

SEQ ID NO: 2471544 - RNA, 19 nt, Artificial Sequence
  Description of Artificial Sequence: Synthetic oligonucleotide
  Sense strand starting at position 2678 of SEQ ID NO: 1887425
cuaucaauagcauggcuua

SEQ ID NO: 2471545 - RNA, 19 nt, Artificial Sequence
  Description of Artificial Sequence: Synthetic oligonucleotide
  Antisense strand to SEQ ID NO: 2471544
uaagccaugcuauugauag

SEQ ID NO: 2471546 - RNA, 19 nt, Artificial Sequence
  Description of Artificial Sequence: Synthetic oligonucleotide
  Sense strand starting at position 2681 of SEQ ID NO: 1887425
ucaauagcauggcuuauua

SEQ ID NO: 2471547 - RNA, 19 nt, Artificial Sequence
  Description of Artificial Sequence: Synthetic oligonucleotide
  Antisense strand to SEQ ID NO: 2471546
uaauaagccaugcuauuga

SEQ ID NO: 2471548 - RNA, 19 nt, Artificial Sequence
  Description of Artificial Sequence: Synthetic oligonucleotide
  Sense strand starting at position 2715 of SEQ ID NO: 1887425
guguauuaaguccacggau

SEQ ID NO: 2471549 - RNA, 19 nt, Artificial Sequence
  Description of Artificial Sequence: Synthetic oligonucleotide
  Antisense strand to SEQ ID NO: 2471548
auccguggacuuaauacac

SEQ ID NO: 2471550 - RNA, 19 nt, Artificial Sequence
  Description of Artificial Sequence: Synthetic oligonucleotide
  Sense strand starting at position 2746 of SEQ ID NO: 1887425
aggcacuuucuugagcuua

SEQ ID NO: 2471551 - RNA, 19 nt, Artificial Sequence
  Description of Artificial Sequence: Synthetic oligonucleotide
  Antisense strand to SEQ ID NO: 2471550
uaagcucaagaaagugccu

SEQ ID NO: 2471552 - RNA, 19 nt, Artificial Sequence
  Description of Artificial Sequence: Synthetic oligonucleotide
  Sense strand starting at position 2915 of SEQ ID NO: 1887425
uccuuuguauuaucgaaua

SEQ ID NO: 2471553 - RNA, 19 nt, Artificial Sequence
  Description of Artificial Sequence: Synthetic oligonucleotide
  Antisense strand to SEQ ID NO: 2471552
uauucgauaauacaaagga

SEQ ID NO: 2471554 - RNA, 19 nt, Artificial Sequence
  Description of Artificial Sequence: Synthetic oligonucleotide
  Sense strand starting at position 2920 of SEQ ID NO: 1887425
uguauuaucgaauauguag

SEQ ID NO: 2471555 - RNA, 19 nt, Artificial Sequence
  Description of Artificial Sequence: Synthetic oligonucleotide
  Antisense strand to SEQ ID NO: 2471554
cuacauauucgauaauaca

SEQ ID NO: 2471556 - RNA, 19 nt, Artificial Sequence
  Description of Artificial Sequence: Synthetic oligonucleotide
  Sense strand starting at position 3090 of SEQ ID NO: 1887425
agaguauauucugcaauac

SEQ ID NO: 2471557 - RNA, 19 nt, Artificial Sequence
  Description of Artificial Sequence: Synthetic oligonucleotide
  Antisense strand to SEQ ID NO: 2471556
guauugcagaauauacucu

SEQ ID NO: 2471558 - RNA, 19 nt, Artificial Sequence
  Description of Artificial Sequence: Synthetic oligonucleotide
  Sense strand starting at position 3159 of SEQ ID NO: 1887425
aacuuucuuggaugaagua

SEQ ID NO: 2471559 - RNA, 19 nt, Artificial Sequence
  Description of Artificial Sequence: Synthetic oligonucleotide
  Antisense strand to SEQ ID NO: 2471558
uacuucauccaagaaaguu

SEQ ID NO: 2471560 - RNA, 19 nt, Artificial Sequence
  Description of Artificial Sequence: Synthetic oligonucleotide
  Sense strand starting at position 3181 of SEQ ID NO: 1887425
gaaaccuuguuacuguaga

SEQ ID NO: 2471561 - RNA, 19 nt, Artificial Sequence
  Description of Artificial Sequence: Synthetic oligonucleotide
  Antisense strand to SEQ ID NO: 2471560
ucuacaguaacaagguuuc

SEQ ID NO: 2471562 - RNA, 19 nt, Artificial Sequence
  Description of Artificial Sequence: Synthetic oligonucleotide
  Sense strand starting at position 3287 of SEQ ID NO: 1887425
uauaguuucgaugaauuac

SEQ ID NO: 2471563 - RNA, 19 nt, Artificial Sequence
  Description of Artificial Sequence: Synthetic oligonucleotide
  Antisense strand to SEQ ID NO: 2471562
guaauucaucgaaacuaua

SEQ ID NO: 2471564 - RNA, 19 nt, Artificial Sequence
  Description of Artificial Sequence: Synthetic oligonucleotide
  Sense strand starting at position 3377 of SEQ ID NO: 1887425
cgacgccuuccacauaaga

SEQ ID NO: 2471565 - RNA, 19 nt, Artificial Sequence
  Description of Artificial Sequence: Synthetic oligonucleotide
  Antisense strand to SEQ ID NO: 2471564
ucuuauguggaaggcgucg

SEQ ID NO: 2471566 - RNA, 19 nt, Artificial Sequence
  Description of Artificial Sequence: Synthetic oligonucleotide
  Sense strand starting at position 3595 of SEQ ID NO: 1887425
cagggagguaccugaagua

SEQ ID NO: 2471567 - RNA, 19 nt, Artificial Sequence
  Description of Artificial Sequence: Synthetic oligonucleotide
  Antisense strand to SEQ ID NO: 2471566
uacuucagguaccucccug

SEQ ID NO: 2471568 - RNA, 19 nt, Artificial Sequence
  Description of Artificial Sequence: Synthetic oligonucleotide
  Sense strand starting at position 301 of SEQ ID NO: 1887426
agaguccugccucaaugaa

SEQ ID NO: 2471569 - RNA, 19 nt, Artificial Sequence
  Description of Artificial Sequence: Synthetic oligonucleotide
  Antisense strand to SEQ ID NO: 2471568
uucauugaggcaggacucu

SEQ ID NO: 2471570 - RNA, 19 nt, Artificial Sequence
  Description of Artificial Sequence: Synthetic oligonucleotide
  Sense strand starting at position 498 of SEQ ID NO: 1887426
auucgaagucuugaugaua

SEQ ID NO: 2471571 - RNA, 19 nt, Artificial Sequence
  Description of Artificial Sequence: Synthetic oligonucleotide
  Antisense strand to SEQ ID NO: 2471570
uaucaucaagacuucgaau

SEQ ID NO: 2471572 - RNA, 19 nt, Artificial Sequence
  Description of Artificial Sequence: Synthetic oligonucleotide
  Sense strand starting at position 598 of SEQ ID NO: 1887426
aaaggcuaauggguaauau

SEQ ID NO: 2471573 - RNA, 19 nt, Artificial Sequence
  Description of Artificial Sequence: Synthetic oligonucleotide
  Antisense strand to SEQ ID NO: 2471572
auauuacccauuagccuuu

SEQ ID NO: 2471574 - RNA, 19 nt, Artificial Sequence
  Description of Artificial Sequence: Synthetic oligonucleotide
  Sense strand starting at position 642 of SEQ ID NO: 1887426
ucaacacaaguuugucauu

SEQ ID NO: 2471575 - RNA, 19 nt, Artificial Sequence
  Description of Artificial Sequence: Synthetic oligonucleotide
  Antisense strand to SEQ ID NO: 2471574
aaugacaaacuuguguuga

SEQ ID NO: 2471576 - RNA, 19 nt, Artificial Sequence
  Description of Artificial Sequence: Synthetic oligonucleotide
  Sense strand starting at position 783 of SEQ ID NO: 1887426
cuaccaaagguguauguca

SEQ ID NO: 2471577 - RNA, 19 nt, Artificial Sequence
  Description of Artificial Sequence: Synthetic oligonucleotide
  Antisense strand to SEQ ID NO: 2471576
ugacauacaccuuugguag

SEQ ID NO: 2471578 - RNA, 19 nt, Artificial Sequence
  Description of Artificial Sequence: Synthetic oligonucleotide
  Sense strand starting at position 785 of SEQ ID NO: 1887426
accaaagguguaugucaca

SEQ ID NO: 2471579 - RNA, 19 nt, Artificial Sequence
  Description of Artificial Sequence: Synthetic oligonucleotide
  Antisense strand to SEQ ID NO: 2471578
ugugacauacaccuuuggu

SEQ ID NO: 2471580 - RNA, 19 nt, Artificial Sequence
  Description of Artificial Sequence: Synthetic oligonucleotide
  Sense strand starting at position 870 of SEQ ID NO: 1887426
aaguguuaggcuuaaagag

SEQ ID NO: 2471581 - RNA, 19 nt, Artificial Sequence
  Description of Artificial Sequence: Synthetic oligonucleotide
  Antisense strand to SEQ ID NO: 2471580
cucuuuaagccuaacacuu

SEQ ID NO: 2471582 - RNA, 19 nt, Artificial Sequence
  Description of Artificial Sequence: Synthetic oligonucleotide
  Sense strand starting at position 1196 of SEQ ID NO: 1887426
auugcuuggccugaaagaa

SEQ ID NO: 2471583 - RNA, 19 nt, Artificial Sequence
  Description of Artificial Sequence: Synthetic oligonucleotide
  Antisense strand to SEQ ID NO: 2471582
uucuuucaggccaagcaau

SEQ ID NO: 2471584 - RNA, 19 nt, Artificial Sequence
  Description of Artificial Sequence: Synthetic oligonucleotide
  Sense strand starting at position 1286 of SEQ ID NO: 1887426
gguuucuuaggauaugguu

SEQ ID NO: 2471585 - RNA, 19 nt, Artificial Sequence
  Description of Artificial Sequence: Synthetic oligonucleotide
  Antisense strand to SEQ ID NO: 2471584
aaccauauccuaagaaacc

SEQ ID NO: 2471586 - RNA, 19 nt, Artificial Sequence
  Description of Artificial Sequence: Synthetic oligonucleotide
  Sense strand starting at position 1574 of SEQ ID NO: 1887426
gaguguucuaaguaugaag

SEQ ID NO: 2471587 - RNA, 19 nt, Artificial Sequence
  Description of Artificial Sequence: Synthetic oligonucleotide
  Antisense strand to SEQ ID NO: 2471586
cuucauacuuagaacacuc

SEQ ID NO: 2471588 - RNA, 19 nt, Artificial Sequence
  Description of Artificial Sequence: Synthetic oligonucleotide
  Sense strand starting at position 1576 of SEQ ID NO: 1887426
guguucuaaguaugaagaa

SEQ ID NO: 2471589 - RNA, 19 nt, Artificial Sequence
  Description of Artificial Sequence: Synthetic oligonucleotide
  Antisense strand to SEQ ID NO: 2471588
uucuucauacuuagaacac

SEQ ID NO: 2471590 - RNA, 19 nt, Artificial Sequence
  Description of Artificial Sequence: Synthetic oligonucleotide
  Sense strand starting at position 1588 of SEQ ID NO: 1887426
ugaagaauaaaguguuggu

SEQ ID NO: 2471591 - RNA, 19 nt, Artificial Sequence
  Description of Artificial Sequence: Synthetic oligonucleotide
  Antisense strand to SEQ ID NO: 2471590
accaacacuuuauucuuca

SEQ ID NO: 2471592 - RNA, 19 nt, Artificial Sequence
  Description of Artificial Sequence: Synthetic oligonucleotide
  Sense strand starting at position 1592 of SEQ ID NO: 1887426
gaauaaaguguugguuaac

SEQ ID NO: 2471593 - RNA, 19 nt, Artificial Sequence
  Description of Artificial Sequence: Synthetic oligonucleotide
  Antisense strand to SEQ ID NO: 2471592
guuaaccaacacuuuauuc

SEQ ID NO: 2471594 - RNA, 19 nt, Artificial Sequence
  Description of Artificial Sequence: Synthetic oligonucleotide
  Sense strand starting at position 1593 of SEQ ID NO: 1887426
aauaaaguguugguuaacu

SEQ ID NO: 2471595 - RNA, 19 nt, Artificial Sequence
  Description of Artificial Sequence: Synthetic oligonucleotide
  Antisense strand to SEQ ID NO: 2471594
aguuaaccaacacuuuauu

SEQ ID NO: 2471596 - RNA, 19 nt, Artificial Sequence
  Description of Artificial Sequence: Synthetic oligonucleotide
  Sense strand starting at position 1595 of SEQ ID NO: 1887426
uaaaguguugguuaacuag

SEQ ID NO: 2471597 - RNA, 19 nt, Artificial Sequence
  Description of Artificial Sequence: Synthetic oligonucleotide
  Antisense strand to SEQ ID NO: 2471596
cuaguuaaccaacacuuua

SEQ ID NO: 2471598 - RNA, 19 nt, Artificial Sequence
  Description of Artificial Sequence: Synthetic oligonucleotide
  Sense strand starting at position 1604 of SEQ ID NO: 1887426
gguuaacuagaucaaagcu

SEQ ID NO: 2471599 - RNA, 19 nt, Artificial Sequence
  Description of Artificial Sequence: Synthetic oligonucleotide
  Antisense strand to SEQ ID NO: 2471598
agcuuugaucuaguuaacc

SEQ ID NO: 2471600 - RNA, 19 nt, Artificial Sequence
  Description of Artificial Sequence: Synthetic oligonucleotide
  Sense strand starting at position 1669 of SEQ ID NO: 1887426
aaugucgaguuauuucuau

SEQ ID NO: 2471601 - RNA, 19 nt, Artificial Sequence
  Description of Artificial Sequence: Synthetic oligonucleotide
  Antisense strand to SEQ ID NO: 2471600
auagaaauaacucgacauu

SEQ ID NO: 2471602 - RNA, 19 nt, Artificial Sequence
  Description of Artificial Sequence: Synthetic oligonucleotide
  Sense strand starting at position 1730 of SEQ ID NO: 1887426
cagguaaacuucguugaag

SEQ ID NO: 2471603 - RNA, 19 nt, Artificial Sequence
  Description of Artificial Sequence: Synthetic oligonucleotide
  Antisense strand to SEQ ID NO: 2471602
cuucaacgaaguuuaccug

SEQ ID NO: 2471604 - RNA, 19 nt, Artificial Sequence
  Description of Artificial Sequence: Synthetic oligonucleotide
  Sense strand starting at position 1738 of SEQ ID NO: 1887426
cuucguugaagcuagagaa

SEQ ID NO: 2471605 - RNA, 19 nt, Artificial Sequence
  Description of Artificial Sequence: Synthetic oligonucleotide
  Antisense strand to SEQ ID NO: 2471604
uucucuagcuucaacgaag

SEQ ID NO: 2471606 - RNA, 19 nt, Artificial Sequence
  Description of Artificial Sequence: Synthetic oligonucleotide
  Sense strand starting at position 1967 of SEQ ID NO: 1887426
auccaaagguguccuaaga

SEQ ID NO: 2471607 - RNA, 19 nt, Artificial Sequence
  Description of Artificial Sequence: Synthetic oligonucleotide
  Antisense strand to SEQ ID NO: 2471606
ucuuaggacaccuuuggau

SEQ ID NO: 2471608 - RNA, 19 nt, Artificial Sequence
  Description of Artificial Sequence: Synthetic oligonucleotide
  Sense strand starting at position 2043 of SEQ ID NO: 1887426
cuaugaaucgcauaccuua

SEQ ID NO: 2471609 - RNA, 19 nt, Artificial Sequence
  Description of Artificial Sequence: Synthetic oligonucleotide
  Antisense strand to SEQ ID NO: 2471608
uaagguaugcgauucauag

SEQ ID NO: 2471610 - RNA, 19 nt, Artificial Sequence
  Description of Artificial Sequence: Synthetic oligonucleotide
  Sense strand starting at position 2085 of SEQ ID NO: 1887426
ucuugauuugcaugcuaga

SEQ ID NO: 2471611 - RNA, 19 nt, Artificial Sequence
  Description of Artificial Sequence: Synthetic oligonucleotide
  Antisense strand to SEQ ID NO: 2471610
ucuagcaugcaaaucaaga

SEQ ID NO: 2471612 - RNA, 19 nt, Artificial Sequence
  Description of Artificial Sequence: Synthetic oligonucleotide
  Sense strand starting at position 2242 of SEQ ID NO: 1887426
aggaaaguacaguguaauu

SEQ ID NO: 2471613 - RNA, 19 nt, Artificial Sequence
  Description of Artificial Sequence: Synthetic oligonucleotide
  Antisense strand to SEQ ID NO: 2471612
aauuacacuguacuuuccu

SEQ ID NO: 2471614 - RNA, 19 nt, Artificial Sequence
  Description of Artificial Sequence: Synthetic oligonucleotide
  Sense strand starting at position 2244 of SEQ ID NO: 1887426
gaaaguacaguguaauucu

SEQ ID NO: 2471615 - RNA, 19 nt, Artificial Sequence
  Description of Artificial Sequence: Synthetic oligonucleotide
  Antisense strand to SEQ ID NO: 2471614
agaauuacacuguacuuuc

SEQ ID NO: 2471616 - RNA, 19 nt, Artificial Sequence
  Description of Artificial Sequence: Synthetic oligonucleotide
  Sense strand starting at position 2478 of SEQ ID NO: 1887426
cagucaacccuuuggaaga

SEQ ID NO: 2471617 - RNA, 19 nt, Artificial Sequence
  Description of Artificial Sequence: Synthetic oligonucleotide
  Antisense strand to SEQ ID NO: 2471616
ucuuccaaaggguugacug

SEQ ID NO: 2471618 - RNA, 19 nt, Artificial Sequence
  Description of Artificial Sequence: Synthetic oligonucleotide
  Sense strand starting at position 2666 of SEQ ID NO: 1887426
cgggcuaugacccacuuua

SEQ ID NO: 2471619 - RNA, 19 nt, Artificial Sequence
  Description of Artificial Sequence: Synthetic oligonucleotide
  Antisense strand to SEQ ID NO: 2471618
uaaagugggucauagcccg

SEQ ID NO: 2471620 - RNA, 19 nt, Artificial Sequence
  Description of Artificial Sequence: Synthetic oligonucleotide
  Sense strand starting at position 3181 of SEQ ID NO: 1887426
agauucguagccgaagaaa

SEQ ID NO: 2471621 - RNA, 19 nt, Artificial Sequence
  Description of Artificial Sequence: Synthetic oligonucleotide
  Antisense strand to SEQ ID NO: 2471620
uuucuucggcuacgaaucu

SEQ ID NO: 2471622 - RNA, 19 nt, Artificial Sequence
  Description of Artificial Sequence: Synthetic oligonucleotide
  Sense strand starting at position 3269 of SEQ ID NO: 1887426
cgaauugccuacuuaggga

SEQ ID NO: 2471623 - RNA, 19 nt, Artificial Sequence
  Description of Artificial Sequence: Synthetic oligonucleotide
  Antisense strand to SEQ ID NO: 2471622
ucccuaaguaggcaauucg

SEQ ID NO: 2471624 - RNA, 19 nt, Artificial Sequence
  Description of Artificial Sequence: Synthetic oligonucleotide
  Sense strand starting at position 3373 of SEQ ID NO: 1887426
aggacaggcuacguauuau

SEQ ID NO: 2471625 - RNA, 19 nt, Artificial Sequence
  Description of Artificial Sequence: Synthetic oligonucleotide
  Antisense strand to SEQ ID NO: 2471624
auaauacguagccuguccu

SEQ ID NO: 2471626 - RNA, 19 nt, Artificial Sequence
  Description of Artificial Sequence: Synthetic oligonucleotide
  Sense strand starting at position 3414 of SEQ ID NO: 1887426
uuuauucgucaacauuagu

SEQ ID NO: 2471627 - RNA, 19 nt, Artificial Sequence
  Description of Artificial Sequence: Synthetic oligonucleotide
  Antisense strand to SEQ ID NO: 2471626
acuaauguugacgaauaaa

SEQ ID NO: 2471628 - RNA, 19 nt, Artificial Sequence
  Description of Artificial Sequence: Synthetic oligonucleotide
  Sense strand starting at position 3421 of SEQ ID NO: 1887426
gucaacauuaguuagguuu

SEQ ID NO: 2471629 - RNA, 19 nt, Artificial Sequence
  Description of Artificial Sequence: Synthetic oligonucleotide
  Antisense strand to SEQ ID NO: 2471628
aaaccuaacuaauguugac

SEQ ID NO: 2471630 - RNA, 19 nt, Artificial Sequence
  Description of Artificial Sequence: Synthetic oligonucleotide
  Sense strand starting at position 3424 of SEQ ID NO: 1887426
aacauuaguuagguuugau

SEQ ID NO: 2471631 - RNA, 19 nt, Artificial Sequence
  Description of Artificial Sequence: Synthetic oligonucleotide
  Antisense strand to SEQ ID NO: 2471630
aucaaaccuaacuaauguu

SEQ ID NO: 2471632 - RNA, 19 nt, Artificial Sequence
  Description of Artificial Sequence: Synthetic oligonucleotide
  Sense strand starting at position 3450 of SEQ ID NO: 1887426
cccuguacuccugaaagug

SEQ ID NO: 2471633 - RNA, 19 nt, Artificial Sequence
  Description of Artificial Sequence: Synthetic oligonucleotide
  Antisense strand to SEQ ID NO: 2471632
cacuuucaggaguacaggg

SEQ ID NO: 2471634 - RNA, 19 nt, Artificial Sequence
  Description of Artificial Sequence: Synthetic oligonucleotide
  Sense strand starting at position 3460 of SEQ ID NO: 1887426
cugaaagugguuuguaaau

SEQ ID NO: 2471635 - RNA, 19 nt, Artificial Sequence
  Description of Artificial Sequence: Synthetic oligonucleotide
  Antisense strand to SEQ ID NO: 2471634
auuuacaaaccacuuucag

SEQ ID NO: 2471636 - RNA, 19 nt, Artificial Sequence
  Description of Artificial Sequence: Synthetic oligonucleotide
  Sense strand starting at position 3470 of SEQ ID NO: 1887426
uuuguaaauggccaauuaa

SEQ ID NO: 2471637 - RNA, 19 nt, Artificial Sequence
  Description of Artificial Sequence: Synthetic oligonucleotide
  Antisense strand to SEQ ID NO: 2471636
uuaauuggccauuuacaaa

SEQ ID NO: 2471638 - RNA, 19 nt, Artificial Sequence
  Description of Artificial Sequence: Synthetic oligonucleotide
  Sense strand starting at position 3501 of SEQ ID NO: 1887426
augagacguaauuauggua

SEQ ID NO: 2471639 - RNA, 19 nt, Artificial Sequence
  Description of Artificial Sequence: Synthetic oligonucleotide
  Antisense strand to SEQ ID NO: 2471638
uaccauaauuacgucucau

SEQ ID NO: 2471640 - RNA, 19 nt, Artificial Sequence
  Description of Artificial Sequence: Synthetic oligonucleotide
  Sense strand starting at position 3537 of SEQ ID NO: 1887426
augggaaugucauccaauc

SEQ ID NO: 2471641 - RNA, 19 nt, Artificial Sequence
  Description of Artificial Sequence: Synthetic oligonucleotide
  Antisense strand to SEQ ID NO: 2471640
gauuggaugacauucccau

SEQ ID NO: 2471642 - RNA, 19 nt, Artificial Sequence
  Description of Artificial Sequence: Synthetic oligonucleotide
  Sense strand starting at position 3702 of SEQ ID NO: 1887426
ugguuauucccucauaguc

SEQ ID NO: 2471643 - RNA, 19 nt, Artificial Sequence
  Description of Artificial Sequence: Synthetic oligonucleotide
  Antisense strand to SEQ ID NO: 2471642
gacuaugagggaauaacca

SEQ ID NO: 2471644 - RNA, 19 nt, Artificial Sequence
  Description of Artificial Sequence: Synthetic oligonucleotide
  Sense strand starting at position 3778 of SEQ ID NO: 1887426
gcucaaacucuaggagagu

SEQ ID NO: 2471645 - RNA, 19 nt, Artificial Sequence
  Description of Artificial Sequence: Synthetic oligonucleotide
  Antisense strand to SEQ ID NO: 2471644
acucuccuagaguuugagc

SEQ ID NO: 2471646 - RNA, 19 nt, Artificial Sequence
  Description of Artificial Sequence: Synthetic oligonucleotide
  Sense strand starting at position 3823 of SEQ ID NO: 1887426
ccuugaccucaguguagga

SEQ ID NO: 2471647 - RNA, 19 nt, Artificial Sequence
  Description of Artificial Sequence: Synthetic oligonucleotide
  Antisense strand to SEQ ID NO: 2471646
uccuacacugaggucaagg

SEQ ID NO: 2471648 - RNA, 19 nt, Artificial Sequence
  Description of Artificial Sequence: Synthetic oligonucleotide
  Sense strand starting at position 116 of SEQ ID NO: 1887427
auucgaagucuugaugaua

SEQ ID NO: 2471649 - RNA, 19 nt, Artificial Sequence
  Description of Artificial Sequence: Synthetic oligonucleotide
  Antisense strand to SEQ ID NO: 2471648
uaucaucaagacuucgaau

SEQ ID NO: 2471650 - RNA, 19 nt, Artificial Sequence
  Description of Artificial Sequence: Synthetic oligonucleotide
  Sense strand starting at position 216 of SEQ ID NO: 1887427
aaaggcuaauggguaauau

SEQ ID NO: 2471651 - RNA, 19 nt, Artificial Sequence
  Description of Artificial Sequence: Synthetic oligonucleotide
  Antisense strand to SEQ ID NO: 2471650
auauuacccauuagccuuu

SEQ ID NO: 2471652 - RNA, 19 nt, Artificial Sequence
  Description of Artificial Sequence: Synthetic oligonucleotide
  Sense strand starting at position 260 of SEQ ID NO: 1887427
ucaacacaaguuugucauu

SEQ ID NO: 2471653 - RNA, 19 nt, Artificial Sequence
  Description of Artificial Sequence: Synthetic oligonucleotide
  Antisense strand to SEQ ID NO: 2471652
aaugacaaacuuguguuga

SEQ ID NO: 2471654 - RNA, 19 nt, Artificial Sequence
  Description of Artificial Sequence: Synthetic oligonucleotide
  Sense strand starting at position 401 of SEQ ID NO: 1887427
cuaccaaagguguauguca

SEQ ID NO: 2471655 - RNA, 19 nt, Artificial Sequence
  Description of Artificial Sequence: Synthetic oligonucleotide
  Antisense strand to SEQ ID NO: 2471654
ugacauacaccuuugguag

SEQ ID NO: 2471656 - RNA, 19 nt, Artificial Sequence
  Description of Artificial Sequence: Synthetic oligonucleotide
  Sense strand starting at position 403 of SEQ ID NO: 1887427
accaaagguguaugucaca

SEQ ID NO: 2471657 - RNA, 19 nt, Artificial Sequence
  Description of Artificial Sequence: Synthetic oligonucleotide
  Antisense strand to SEQ ID NO: 2471656
ugugacauacaccuuuggu

SEQ ID NO: 2471658 - RNA, 19 nt, Artificial Sequence
  Description of Artificial Sequence: Synthetic oligonucleotide
  Sense strand starting at position 488 of SEQ ID NO: 1887427
aaguguuaggcuuaaagag

SEQ ID NO: 2471659 - RNA, 19 nt, Artificial Sequence
  Description of Artificial Sequence: Synthetic oligonucleotide
  Antisense strand to SEQ ID NO: 2471658
cucuuuaagccuaacacuu

SEQ ID NO: 2471660 - RNA, 19 nt, Artificial Sequence
  Description of Artificial Sequence: Synthetic oligonucleotide
  Sense strand starting at position 814 of SEQ ID NO: 1887427
auugcuuggccugaaagaa

SEQ ID NO: 2471661 - RNA, 19 nt, Artificial Sequence
  Description of Artificial Sequence: Synthetic oligonucleotide
  Antisense strand to SEQ ID NO: 2471660
uucuuucaggccaagcaau

SEQ ID NO: 2471662 - RNA, 19 nt, Artificial Sequence
  Description of Artificial Sequence: Synthetic oligonucleotide
  Sense strand starting at position 904 of SEQ ID NO: 1887427
gguuucuuaggauaugguu

SEQ ID NO: 2471663 - RNA, 19 nt, Artificial Sequence
  Description of Artificial Sequence: Synthetic oligonucleotide
  Antisense strand to SEQ ID NO: 2471662
aaccauauccuaagaaacc

SEQ ID NO: 2471664 - RNA, 19 nt, Artificial Sequence
  Description of Artificial Sequence: Synthetic oligonucleotide
  Sense strand starting at position 1192 of SEQ ID NO: 1887427
gaguguucuaaguaugaag

SEQ ID NO: 2471665 - RNA, 19 nt, Artificial Sequence
  Description of Artificial Sequence: Synthetic oligonucleotide
  Antisense strand to SEQ ID NO: 2471664
cuucauacuuagaacacuc

SEQ ID NO: 2471666 - RNA, 19 nt, Artificial Sequence
  Description of Artificial Sequence: Synthetic oligonucleotide
  Sense strand starting at position 1194 of SEQ ID NO: 1887427
guguucuaaguaugaagaa

SEQ ID NO: 2471667 - RNA, 19 nt, Artificial Sequence
  Description of Artificial Sequence: Synthetic oligonucleotide
  Antisense strand to SEQ ID NO: 2471666
uucuucauacuuagaacac

SEQ ID NO: 2471668 - RNA, 19 nt, Artificial Sequence
  Description of Artificial Sequence: Synthetic oligonucleotide
  Sense strand starting at position 1206 of SEQ ID NO: 1887427
ugaagaauaaaguguuggu

SEQ ID NO: 2471669 - RNA, 19 nt, Artificial Sequence
  Description of Artificial Sequence: Synthetic oligonucleotide
  Antisense strand to SEQ ID NO: 2471668
accaacacuuuauucuuca

SEQ ID NO: 2471670 - RNA, 19 nt, Artificial Sequence
  Description of Artificial Sequence: Synthetic oligonucleotide
  Sense strand starting at position 1210 of SEQ ID NO: 1887427
gaauaaaguguugguuaac

SEQ ID NO: 2471671 - RNA, 19 nt, Artificial Sequence
  Description of Artificial Sequence: Synthetic oligonucleotide
  Antisense strand to SEQ ID NO: 2471670
guuaaccaacacuuuauuc

SEQ ID NO: 2471672 - RNA, 19 nt, Artificial Sequence
  Description of Artificial Sequence: Synthetic oligonucleotide
  Sense strand starting at position 1211 of SEQ ID NO: 1887427
aauaaaguguugguuaacu

SEQ ID NO: 2471673 - RNA, 19 nt, Artificial Sequence
  Description of Artificial Sequence: Synthetic oligonucleotide
  Antisense strand to SEQ ID NO: 2471672
aguuaaccaacacuuuauu

SEQ ID NO: 2471674 - RNA, 19 nt, Artificial Sequence
  Description of Artificial Sequence: Synthetic oligonucleotide
  Sense strand starting at position 1213 of SEQ ID NO: 1887427
uaaaguguugguuaacuag

SEQ ID NO: 2471675 - RNA, 19 nt, Artificial Sequence
  Description of Artificial Sequence: Synthetic oligonucleotide
  Antisense strand to SEQ ID NO: 2471674
cuaguuaaccaacacuuua

SEQ ID NO: 2471676 - RNA, 19 nt, Artificial Sequence
  Description of Artificial Sequence: Synthetic oligonucleotide
  Sense strand starting at position 1222 of SEQ ID NO: 1887427
gguuaacuagaucaaagcu

SEQ ID NO: 2471677 - RNA, 19 nt, Artificial Sequence
  Description of Artificial Sequence: Synthetic oligonucleotide
  Antisense strand to SEQ ID NO: 2471676
agcuuugaucuaguuaacc

SEQ ID NO: 2471678 - RNA, 19 nt, Artificial Sequence
  Description of Artificial Sequence: Synthetic oligonucleotide
  Sense strand starting at position 1287 of SEQ ID NO: 1887427
aaugucgaguuauuucuau

SEQ ID NO: 2471679 - RNA, 19 nt, Artificial Sequence
  Description of Artificial Sequence: Synthetic oligonucleotide
  Antisense strand to SEQ ID NO: 2471678
auagaaauaacucgacauu

SEQ ID NO: 2471680 - RNA, 19 nt, Artificial Sequence
  Description of Artificial Sequence: Synthetic oligonucleotide
  Sense strand starting at position 1348 of SEQ ID NO: 1887427
cagguaaacuucguugaag

SEQ ID NO: 2471681 - RNA, 19 nt, Artificial Sequence
  Description of Artificial Sequence: Synthetic oligonucleotide
  Antisense strand to SEQ ID NO: 2471680
cuucaacgaaguuuaccug

SEQ ID NO: 2471682 - RNA, 19 nt, Artificial Sequence
  Description of Artificial Sequence: Synthetic oligonucleotide
  Sense strand starting at position 1356 of SEQ ID NO: 1887427
cuucguugaagcuagagaa

SEQ ID NO: 2471683 - RNA, 19 nt, Artificial Sequence
  Description of Artificial Sequence: Synthetic oligonucleotide
  Antisense strand to SEQ ID NO: 2471682
uucucuagcuucaacgaag

SEQ ID NO: 2471684 - RNA, 19 nt, Artificial Sequence
  Description of Artificial Sequence: Synthetic oligonucleotide
  Sense strand starting at position 1661 of SEQ ID NO: 1887427
cuaugaaucgcauaccuua

SEQ ID NO: 2471685 - RNA, 19 nt, Artificial Sequence
  Description of Artificial Sequence: Synthetic oligonucleotide
  Antisense strand to SEQ ID NO: 2471684
uaagguaugcgauucauag

SEQ ID NO: 2471686 - RNA, 19 nt, Artificial Sequence
  Description of Artificial Sequence: Synthetic oligonucleotide
  Sense strand starting at position 1703 of SEQ ID NO: 1887427
ucuugauuugcaugcuaga

SEQ ID NO: 2471687 - RNA, 19 nt, Artificial Sequence
  Description of Artificial Sequence: Synthetic oligonucleotide
  Antisense strand to SEQ ID NO: 2471686
ucuagcaugcaaaucaaga

SEQ ID NO: 2471688 - RNA, 19 nt, Artificial Sequence
  Description of Artificial Sequence: Synthetic oligonucleotide
  Sense strand starting at position 1860 of SEQ ID NO: 1887427
aggaaaguacaguguaauu

SEQ ID NO: 2471689 - RNA, 19 nt, Artificial Sequence
  Description of Artificial Sequence: Synthetic oligonucleotide
  Antisense strand to SEQ ID NO: 2471688
aauuacacuguacuuuccu

SEQ ID NO: 2471690 - RNA, 19 nt, Artificial Sequence
  Description of Artificial Sequence: Synthetic oligonucleotide
  Sense strand starting at position 1862 of SEQ ID NO: 1887427
gaaaguacaguguaauucu

SEQ ID NO: 2471691 - RNA, 19 nt, Artificial Sequence
  Description of Artificial Sequence: Synthetic oligonucleotide
  Antisense strand to SEQ ID NO: 2471690
agaauuacacuguacuuuc

SEQ ID NO: 2471692 - RNA, 19 nt, Artificial Sequence
  Description of Artificial Sequence: Synthetic oligonucleotide
  Sense strand starting at position 1966 of SEQ ID NO: 1887427
auccaaagguguccuaaga

SEQ ID NO: 2471693 - RNA, 19 nt, Artificial Sequence
  Description of Artificial Sequence: Synthetic oligonucleotide
  Antisense strand to SEQ ID NO: 2471692
ucuuaggacaccuuuggau

SEQ ID NO: 2471694 - RNA, 19 nt, Artificial Sequence
  Description of Artificial Sequence: Synthetic oligonucleotide
  Sense strand starting at position 2096 of SEQ ID NO: 1887427
cagucaacccuuuggaaga

SEQ ID NO: 2471695 - RNA, 19 nt, Artificial Sequence
  Description of Artificial Sequence: Synthetic oligonucleotide
  Antisense strand to SEQ ID NO: 2471694
ucuuccaaaggguugacug

SEQ ID NO: 2471696 - RNA, 19 nt, Artificial Sequence
  Description of Artificial Sequence: Synthetic oligonucleotide
  Sense strand starting at position 2284 of SEQ ID NO: 1887427
cgggcuaugacccacuuua

SEQ ID NO: 2471697 - RNA, 19 nt, Artificial Sequence
  Description of Artificial Sequence: Synthetic oligonucleotide
  Antisense strand to SEQ ID NO: 2471696
uaaagugggucauagcccg

SEQ ID NO: 2471698 - RNA, 19 nt, Artificial Sequence
  Description of Artificial Sequence: Synthetic oligonucleotide
  Sense strand starting at position 2799 of SEQ ID NO: 1887427
agauucguagccgaagaaa

SEQ ID NO: 2471699 - RNA, 19 nt, Artificial Sequence
  Description of Artificial Sequence: Synthetic oligonucleotide
  Antisense strand to SEQ ID NO: 2471698
uuucuucggcuacgaaucu

SEQ ID NO: 2471700 - RNA, 19 nt, Artificial Sequence
  Description of Artificial Sequence: Synthetic oligonucleotide
  Sense strand starting at position 2887 of SEQ ID NO: 1887427
cgaauugccuacuuaggga

SEQ ID NO: 2471701 - RNA, 19 nt, Artificial Sequence
  Description of Artificial Sequence: Synthetic oligonucleotide
  Antisense strand to SEQ ID NO: 2471700
ucccuaaguaggcaauucg

SEQ ID NO: 2471702 - RNA, 19 nt, Artificial Sequence
  Description of Artificial Sequence: Synthetic oligonucleotide
  Sense strand starting at position 3032 of SEQ ID NO: 1887427
uuuauucgucaacauuagu

SEQ ID NO: 2471703 - RNA, 19 nt, Artificial Sequence
  Description of Artificial Sequence: Synthetic oligonucleotide
  Antisense strand to SEQ ID NO: 2471702
acuaauguugacgaauaaa

SEQ ID NO: 2471704 - RNA, 19 nt, Artificial Sequence
  Description of Artificial Sequence: Synthetic oligonucleotide
  Sense strand starting at position 3039 of SEQ ID NO: 1887427
gucaacauuaguuagguuu

SEQ ID NO: 2471705 - RNA, 19 nt, Artificial Sequence
  Description of Artificial Sequence: Synthetic oligonucleotide
  Antisense strand to SEQ ID NO: 2471704
aaaccuaacuaauguugac

SEQ ID NO: 2471706 - RNA, 19 nt, Artificial Sequence
  Description of Artificial Sequence: Synthetic oligonucleotide
  Sense strand starting at position 3042 of SEQ ID NO: 1887427
aacauuaguuagguuugau

SEQ ID NO: 2471707 - RNA, 19 nt, Artificial Sequence
  Description of Artificial Sequence: Synthetic oligonucleotide
  Antisense strand to SEQ ID NO: 2471706
aucaaaccuaacuaauguu

SEQ ID NO: 2471708 - RNA, 19 nt, Artificial Sequence
  Description of Artificial Sequence: Synthetic oligonucleotide
  Sense strand starting at position 3068 of SEQ ID NO: 1887427
cccuguacuccugaaagug

SEQ ID NO: 2471709 - RNA, 19 nt, Artificial Sequence
  Description of Artificial Sequence: Synthetic oligonucleotide
  Antisense strand to SEQ ID NO: 2471708
cacuuucaggaguacaggg

SEQ ID NO: 2471710 - RNA, 19 nt, Artificial Sequence
  Description of Artificial Sequence: Synthetic oligonucleotide
  Sense strand starting at position 3078 of SEQ ID NO: 1887427
cugaaagugguuuguaaau

SEQ ID NO: 2471711 - RNA, 19 nt, Artificial Sequence
  Description of Artificial Sequence: Synthetic oligonucleotide
  Antisense strand to SEQ ID NO: 2471710
auuuacaaaccacuuucag

SEQ ID NO: 2471712 - RNA, 19 nt, Artificial Sequence
  Description of Artificial Sequence: Synthetic oligonucleotide
  Sense strand starting at position 3088 of SEQ ID NO: 1887427
uuuguaaauggccaauuaa

SEQ ID NO: 2471713 - RNA, 19 nt, Artificial Sequence
  Description of Artificial Sequence: Synthetic oligonucleotide
  Antisense strand to SEQ ID NO: 2471712
uuaauuggccauuuacaaa

SEQ ID NO: 2471714 - RNA, 19 nt, Artificial Sequence
  Description of Artificial Sequence: Synthetic oligonucleotide
  Sense strand starting at position 3119 of SEQ ID NO: 1887427
augagacguaauuauggua

SEQ ID NO: 2471715 - RNA, 19 nt, Artificial Sequence
  Description of Artificial Sequence: Synthetic oligonucleotide
  Antisense strand to SEQ ID NO: 2471714
uaccauaauuacgucucau

SEQ ID NO: 2471716 - RNA, 19 nt, Artificial Sequence
  Description of Artificial Sequence: Synthetic oligonucleotide
  Sense strand starting at position 3155 of SEQ ID NO: 1887427
augggaaugucauccaauc

SEQ ID NO: 2471717 - RNA, 19 nt, Artificial Sequence
  Description of Artificial Sequence: Synthetic oligonucleotide
  Antisense strand to SEQ ID NO: 2471716
gauuggaugacauucccau

SEQ ID NO: 2471718 - RNA, 19 nt, Artificial Sequence
  Description of Artificial Sequence: Synthetic oligonucleotide
  Sense strand starting at position 3320 of SEQ ID NO: 1887427
ugguuauucccucauaguc

SEQ ID NO: 2471719 - RNA, 19 nt, Artificial Sequence
  Description of Artificial Sequence: Synthetic oligonucleotide
  Antisense strand to SEQ ID NO: 2471718
gacuaugagggaauaacca

SEQ ID NO: 2471720 - RNA, 19 nt, Artificial Sequence
  Description of Artificial Sequence: Synthetic oligonucleotide
  Sense strand starting at position 3396 of SEQ ID NO: 1887427
gcucaaacucuaggagagu

SEQ ID NO: 2471721 - RNA, 19 nt, Artificial Sequence
  Description of Artificial Sequence: Synthetic oligonucleotide
  Antisense strand to SEQ ID NO: 2471720
acucuccuagaguuugagc

SEQ ID NO: 2471722 - RNA, 19 nt, Artificial Sequence
  Description of Artificial Sequence: Synthetic oligonucleotide
  Sense strand starting at position 3441 of SEQ ID NO: 1887427
ccuugaccucaguguagga

SEQ ID NO: 2471723 - RNA, 19 nt, Artificial Sequence
  Description of Artificial Sequence: Synthetic oligonucleotide
  Antisense strand to SEQ ID NO: 2471722
uccuacacugaggucaagg

SEQ ID NO: 2471724 - RNA, 19 nt, Artificial Sequence
  Description of Artificial Sequence: Synthetic oligonucleotide
  Sense strand starting at position 3609 of SEQ ID NO: 1887427
gagcuagacccugauagca

SEQ ID NO: 2471725 - RNA, 19 nt, Artificial Sequence
  Description of Artificial Sequence: Synthetic oligonucleotide
  Antisense strand to SEQ ID NO: 2471724
ugcuaucagggucuagcuc

SEQ ID NO: 2471726 - RNA, 19 nt, Artificial Sequence
  Description of Artificial Sequence: Synthetic oligonucleotide
  Sense strand starting at position 3625 of SEQ ID NO: 1887427
gcaaacuacucccuggaca

SEQ ID NO: 2471727 - RNA, 19 nt, Artificial Sequence
  Description of Artificial Sequence: Synthetic oligonucleotide
  Antisense strand to SEQ ID NO: 2471726
uguccagggaguaguuugc

SEQ ID NO: 2471728 - RNA, 19 nt, Artificial Sequence
  Description of Artificial Sequence: Synthetic oligonucleotide
  Sense strand starting at position 156 of SEQ ID NO: 1887428
gcaggaucucgguaaagga

SEQ ID NO: 2471729 - RNA, 19 nt, Artificial Sequence
  Description of Artificial Sequence: Synthetic oligonucleotide
  Antisense strand to SEQ ID NO: 2471728
uccuuuaccgagauccugc

SEQ ID NO: 2471730 - RNA, 19 nt, Artificial Sequence
  Description of Artificial Sequence: Synthetic oligonucleotide
  Sense strand starting at position 420 of SEQ ID NO: 1887428
ucauaaaccguugguggaa

SEQ ID NO: 2471731 - RNA, 19 nt, Artificial Sequence
  Description of Artificial Sequence: Synthetic oligonucleotide
  Antisense strand to SEQ ID NO: 2471730
uuccaccaacgguuuauga

SEQ ID NO: 2471732 - RNA, 19 nt, Artificial Sequence
  Description of Artificial Sequence: Synthetic oligonucleotide
  Sense strand starting at position 458 of SEQ ID NO: 1887428
uggaaauauuuggaaguuc

SEQ ID NO: 2471733 - RNA, 19 nt, Artificial Sequence
  Description of Artificial Sequence: Synthetic oligonucleotide
  Antisense strand to SEQ ID NO: 2471732
gaacuuccaaauauuucca

SEQ ID NO: 2471734 - RNA, 19 nt, Artificial Sequence
  Description of Artificial Sequence: Synthetic oligonucleotide
  Sense strand starting at position 466 of SEQ ID NO: 1887428
uuuggaaguuccucagaug

SEQ ID NO: 2471735 - RNA, 19 nt, Artificial Sequence
  Description of Artificial Sequence: Synthetic oligonucleotide
  Antisense strand to SEQ ID NO: 2471734
caucugaggaacuuccaaa

SEQ ID NO: 2471736 - RNA, 19 nt, Artificial Sequence
  Description of Artificial Sequence: Synthetic oligonucleotide
  Sense strand starting at position 467 of SEQ ID NO: 1887428
uuggaaguuccucagaugu

SEQ ID NO: 2471737 - RNA, 19 nt, Artificial Sequence
  Description of Artificial Sequence: Synthetic oligonucleotide
  Antisense strand to SEQ ID NO: 2471736
acaucugaggaacuuccaa

SEQ ID NO: 2471738 - RNA, 19 nt, Artificial Sequence
  Description of Artificial Sequence: Synthetic oligonucleotide
  Sense strand starting at position 478 of SEQ ID NO: 1887428
ucagauguuuacucaggua

SEQ ID NO: 2471739 - RNA, 19 nt, Artificial Sequence
  Description of Artificial Sequence: Synthetic oligonucleotide
  Antisense strand to SEQ ID NO: 2471738
uaccugaguaaacaucuga

SEQ ID NO: 2471740 - RNA, 19 nt, Artificial Sequence
  Description of Artificial Sequence: Synthetic oligonucleotide
  Sense strand starting at position 494 of SEQ ID NO: 1887428
guaaccuuaugaucuagca

SEQ ID NO: 2471741 - RNA, 19 nt, Artificial Sequence
  Description of Artificial Sequence: Synthetic oligonucleotide
  Antisense strand to SEQ ID NO: 2471740
ugcuagaucauaagguuac

SEQ ID NO: 2471742 - RNA, 19 nt, Artificial Sequence
  Description of Artificial Sequence: Synthetic oligonucleotide
  Sense strand starting at position 724 of SEQ ID NO: 1887428
ggaugaucaacugguauau

SEQ ID NO: 2471743 - RNA, 19 nt, Artificial Sequence
  Description of Artificial Sequence: Synthetic oligonucleotide
  Antisense strand to SEQ ID NO: 2471742
auauaccaguugaucaucc

SEQ ID NO: 2471744 - RNA, 19 nt, Artificial Sequence
  Description of Artificial Sequence: Synthetic oligonucleotide
  Sense strand starting at position 750 of SEQ ID NO: 1887428
cuggauuguucugcaaaga

SEQ ID NO: 2471745 - RNA, 19 nt, Artificial Sequence
  Description of Artificial Sequence: Synthetic oligonucleotide
  Antisense strand to SEQ ID NO: 2471744
ucuuugcagaacaauccag

SEQ ID NO: 2471746 - RNA, 19 nt, Artificial Sequence
  Description of Artificial Sequence: Synthetic oligonucleotide
  Sense strand starting at position 751 of SEQ ID NO: 1887428
uggauuguucugcaaagaa

SEQ ID NO: 2471747 - RNA, 19 nt, Artificial Sequence
  Description of Artificial Sequence: Synthetic oligonucleotide
  Antisense strand to SEQ ID NO: 2471746
uucuuugcagaacaaucca

SEQ ID NO: 2471748 - RNA, 19 nt, Artificial Sequence
  Description of Artificial Sequence: Synthetic oligonucleotide
  Sense strand starting at position 1043 of SEQ ID NO: 1887428
uuuaauggugcaggguaaa

SEQ ID NO: 2471749 - RNA, 19 nt, Artificial Sequence
  Description of Artificial Sequence: Synthetic oligonucleotide
  Antisense strand to SEQ ID NO: 2471748
uuuacccugcaccauuaaa

SEQ ID NO: 2471750 - RNA, 19 nt, Artificial Sequence
  Description of Artificial Sequence: Synthetic oligonucleotide
  Sense strand starting at position 1306 of SEQ ID NO: 1887428
gcuuauucuggaggcagga

SEQ ID NO: 2471751 - RNA, 19 nt, Artificial Sequence
  Description of Artificial Sequence: Synthetic oligonucleotide
  Antisense strand to SEQ ID NO: 2471750
uccugccuccagaauaagc

SEQ ID NO: 2471752 - RNA, 19 nt, Artificial Sequence
  Description of Artificial Sequence: Synthetic oligonucleotide
  Sense strand starting at position 1320 of SEQ ID NO: 1887428
caggaaaccuagucguuaa

SEQ ID NO: 2471753 - RNA, 19 nt, Artificial Sequence
  Description of Artificial Sequence: Synthetic oligonucleotide
  Antisense strand to SEQ ID NO: 2471752
uuaacgacuagguuuccug

SEQ ID NO: 2471754 - RNA, 19 nt, Artificial Sequence
  Description of Artificial Sequence: Synthetic oligonucleotide
  Sense strand starting at position 1321 of SEQ ID NO: 1887428
aggaaaccuagucguuaag

SEQ ID NO: 2471755 - RNA, 19 nt, Artificial Sequence
  Description of Artificial Sequence: Synthetic oligonucleotide
  Antisense strand to SEQ ID NO: 2471754
cuuaacgacuagguuuccu

SEQ ID NO: 2471756 - RNA, 19 nt, Artificial Sequence
  Description of Artificial Sequence: Synthetic oligonucleotide
  Sense strand starting at position 1323 of SEQ ID NO: 1887428
gaaaccuagucguuaagga

SEQ ID NO: 2471757 - RNA, 19 nt, Artificial Sequence
  Description of Artificial Sequence: Synthetic oligonucleotide
  Antisense strand to SEQ ID NO: 2471756
uccuuaacgacuagguuuc

SEQ ID NO: 2471758 - RNA, 19 nt, Artificial Sequence
  Description of Artificial Sequence: Synthetic oligonucleotide
  Sense strand starting at position 1526 of SEQ ID NO: 1887428
gggccaucagcagauaauc

SEQ ID NO: 2471759 - RNA, 19 nt, Artificial Sequence
  Description of Artificial Sequence: Synthetic oligonucleotide
  Antisense strand to SEQ ID NO: 2471758
gauuaucugcugauggccc

SEQ ID NO: 2471760 - RNA, 19 nt, Artificial Sequence
  Description of Artificial Sequence: Synthetic oligonucleotide
  Sense strand starting at position 1551 of SEQ ID NO: 1887428
gccugagguacugaauaua

SEQ ID NO: 2471761 - RNA, 19 nt, Artificial Sequence
  Description of Artificial Sequence: Synthetic oligonucleotide
  Antisense strand to SEQ ID NO: 2471760
uauauucaguaccucaggc

SEQ ID NO: 2471762 - RNA, 19 nt, Artificial Sequence
  Description of Artificial Sequence: Synthetic oligonucleotide
  Sense strand starting at position 1913 of SEQ ID NO: 1887428
gugaaaggguugcucagaa

SEQ ID NO: 2471763 - RNA, 19 nt, Artificial Sequence
  Description of Artificial Sequence: Synthetic oligonucleotide
  Antisense strand to SEQ ID NO: 2471762
uucugagcaacccuuucac

SEQ ID NO: 2471764 - RNA, 19 nt, Artificial Sequence
  Description of Artificial Sequence: Synthetic oligonucleotide
  Sense strand starting at position 1951 of SEQ ID NO: 1887428
uuccaaagguguccuaaga

SEQ ID NO: 2471765 - RNA, 19 nt, Artificial Sequence
  Description of Artificial Sequence: Synthetic oligonucleotide
  Antisense strand to SEQ ID NO: 2471764
ucuuaggacaccuuuggaa

SEQ ID NO: 2471766 - RNA, 19 nt, Artificial Sequence
  Description of Artificial Sequence: Synthetic oligonucleotide
  Sense strand starting at position 1958 of SEQ ID NO: 1887428
gguguccuaagauagucau

SEQ ID NO: 2471767 - RNA, 19 nt, Artificial Sequence
  Description of Artificial Sequence: Synthetic oligonucleotide
  Antisense strand to SEQ ID NO: 2471766
augacuaucuuaggacacc

SEQ ID NO: 2471768 - RNA, 19 nt, Artificial Sequence
  Description of Artificial Sequence: Synthetic oligonucleotide
  Sense strand starting at position 1964 of SEQ ID NO: 1887428
cuaagauagucaucacagc

SEQ ID NO: 2471769 - RNA, 19 nt, Artificial Sequence
  Description of Artificial Sequence: Synthetic oligonucleotide
  Antisense strand to SEQ ID NO: 2471768
gcugugaugacuaucuuag

SEQ ID NO: 2471770 - RNA, 19 nt, Artificial Sequence
  Description of Artificial Sequence: Synthetic oligonucleotide
  Sense strand starting at position 2324 of SEQ ID NO: 1887428
agaguccugccucaaugaa

SEQ ID NO: 2471771 - RNA, 19 nt, Artificial Sequence
  Description of Artificial Sequence: Synthetic oligonucleotide
  Antisense strand to SEQ ID NO: 2471770
uucauugaggcaggacucu

SEQ ID NO: 2471772 - RNA, 19 nt, Artificial Sequence
  Description of Artificial Sequence: Synthetic oligonucleotide
  Sense strand starting at position 2521 of SEQ ID NO: 1887428
auucgaagucuugaugaua

SEQ ID NO: 2471773 - RNA, 19 nt, Artificial Sequence
  Description of Artificial Sequence: Synthetic oligonucleotide
  Antisense strand to SEQ ID NO: 2471772
uaucaucaagacuucgaau

SEQ ID NO: 2471774 - RNA, 19 nt, Artificial Sequence
  Description of Artificial Sequence: Synthetic oligonucleotide
  Sense strand starting at position 2621 of SEQ ID NO: 1887428
aaaggcuaauggguaauau

SEQ ID NO: 2471775 - RNA, 19 nt, Artificial Sequence
  Description of Artificial Sequence: Synthetic oligonucleotide
  Antisense strand to SEQ ID NO: 2471774
auauuacccauuagccuuu

SEQ ID NO: 2471776 - RNA, 19 nt, Artificial Sequence
  Description of Artificial Sequence: Synthetic oligonucleotide
  Sense strand starting at position 2665 of SEQ ID NO: 1887428
ucaacacaaguuugucauu

SEQ ID NO: 2471777 - RNA, 19 nt, Artificial Sequence
  Description of Artificial Sequence: Synthetic oligonucleotide
  Antisense strand to SEQ ID NO: 2471776
aaugacaaacuuguguuga

SEQ ID NO: 2471778 - RNA, 19 nt, Artificial Sequence
  Description of Artificial Sequence: Synthetic oligonucleotide
  Sense strand starting at position 2806 of SEQ ID NO: 1887428
cuaccaaagguguauguca

SEQ ID NO: 2471779 - RNA, 19 nt, Artificial Sequence
  Description of Artificial Sequence: Synthetic oligonucleotide
  Antisense strand to SEQ ID NO: 2471778
ugacauacaccuuugguag

SEQ ID NO: 2471780 - RNA, 19 nt, Artificial Sequence
  Description of Artificial Sequence: Synthetic oligonucleotide
  Sense strand starting at position 2808 of SEQ ID NO: 1887428
accaaagguguaugucaca

SEQ ID NO: 2471781 - RNA, 19 nt, Artificial Sequence
  Description of Artificial Sequence: Synthetic oligonucleotide
  Antisense strand to SEQ ID NO: 2471780
ugugacauacaccuuuggu

SEQ ID NO: 2471782 - RNA, 19 nt, Artificial Sequence
  Description of Artificial Sequence: Synthetic oligonucleotide
  Sense strand starting at position 2893 of SEQ ID NO: 1887428
aaguguuaggcuuaaagag

SEQ ID NO: 2471783 - RNA, 19 nt, Artificial Sequence
  Description of Artificial Sequence: Synthetic oligonucleotide
  Antisense strand to SEQ ID NO: 2471782
cucuuuaagccuaacacuu

SEQ ID NO: 2471784 - RNA, 19 nt, Artificial Sequence
  Description of Artificial Sequence: Synthetic oligonucleotide
  Sense strand starting at position 3219 of SEQ ID NO: 1887428
auugcuuggccugaaagaa

SEQ ID NO: 2471785 - RNA, 19 nt, Artificial Sequence
  Description of Artificial Sequence: Synthetic oligonucleotide
  Antisense strand to SEQ ID NO: 2471784
uucuuucaggccaagcaau

SEQ ID NO: 2471786 - RNA, 19 nt, Artificial Sequence
  Description of Artificial Sequence: Synthetic oligonucleotide
  Sense strand starting at position 3309 of SEQ ID NO: 1887428
gguuucuuaggauaugguu

SEQ ID NO: 2471787 - RNA, 19 nt, Artificial Sequence
  Description of Artificial Sequence: Synthetic oligonucleotide
  Antisense strand to SEQ ID NO: 2471786
aaccauauccuaagaaacc

SEQ ID NO: 2471788 - RNA, 19 nt, Artificial Sequence
  Description of Artificial Sequence: Synthetic oligonucleotide
  Sense strand starting at position 3597 of SEQ ID NO: 1887428
gaguguucuaaguaugaag

SEQ ID NO: 2471789 - RNA, 19 nt, Artificial Sequence
  Description of Artificial Sequence: Synthetic oligonucleotide
  Antisense strand to SEQ ID NO: 2471788
cuucauacuuagaacacuc

SEQ ID NO: 2471790 - RNA, 19 nt, Artificial Sequence
  Description of Artificial Sequence: Synthetic oligonucleotide
  Sense strand starting at position 3599 of SEQ ID NO: 1887428
guguucuaaguaugaagaa

SEQ ID NO: 2471791 - RNA, 19 nt, Artificial Sequence
  Description of Artificial Sequence: Synthetic oligonucleotide
  Antisense strand to SEQ ID NO: 2471790
uucuucauacuuagaacac

SEQ ID NO: 2471792 - RNA, 19 nt, Artificial Sequence
  Description of Artificial Sequence: Synthetic oligonucleotide
  Sense strand starting at position 3611 of SEQ ID NO: 1887428
ugaagaauaaaguguuggu

SEQ ID NO: 2471793 - RNA, 19 nt, Artificial Sequence
  Description of Artificial Sequence: Synthetic oligonucleotide
  Antisense strand to SEQ ID NO: 2471792
accaacacuuuauucuuca

SEQ ID NO: 2471794 - RNA, 19 nt, Artificial Sequence
  Description of Artificial Sequence: Synthetic oligonucleotide
  Sense strand starting at position 3615 of SEQ ID NO: 1887428
gaauaaaguguugguuaac

SEQ ID NO: 2471795 - RNA, 19 nt, Artificial Sequence
  Description of Artificial Sequence: Synthetic oligonucleotide
  Antisense strand to SEQ ID NO: 2471794
guuaaccaacacuuuauuc

SEQ ID NO: 2471796 - RNA, 19 nt, Artificial Sequence
  Description of Artificial Sequence: Synthetic oligonucleotide
  Sense strand starting at position 3616 of SEQ ID NO: 1887428
aauaaaguguugguuaacu

SEQ ID NO: 2471797 - RNA, 19 nt, Artificial Sequence
  Description of Artificial Sequence: Synthetic oligonucleotide
  Antisense strand to SEQ ID NO: 2471796
aguuaaccaacacuuuauu

SEQ ID NO: 2471798 - RNA, 19 nt, Artificial Sequence
  Description of Artificial Sequence: Synthetic oligonucleotide
  Sense strand starting at position 3618 of SEQ ID NO: 1887428
uaaaguguugguuaacuag

SEQ ID NO: 2471799 - RNA, 19 nt, Artificial Sequence
  Description of Artificial Sequence: Synthetic oligonucleotide
  Antisense strand to SEQ ID NO: 2471798
cuaguuaaccaacacuuua

SEQ ID NO: 2471800 - RNA, 19 nt, Artificial Sequence
  Description of Artificial Sequence: Synthetic oligonucleotide
  Sense strand starting at position 3627 of SEQ ID NO: 1887428
gguuaacuagaucaaagcu

SEQ ID NO: 2471801 - RNA, 19 nt, Artificial Sequence
  Description of Artificial Sequence: Synthetic oligonucleotide
  Antisense strand to SEQ ID NO: 2471800
agcuuugaucuaguuaacc

SEQ ID NO: 2471802 - RNA, 19 nt, Artificial Sequence
  Description of Artificial Sequence: Synthetic oligonucleotide
  Sense strand starting at position 3692 of SEQ ID NO: 1887428
aaugucgaguuauuucuau

SEQ ID NO: 2471803 - RNA, 19 nt, Artificial Sequence
  Description of Artificial Sequence: Synthetic oligonucleotide
  Antisense strand to SEQ ID NO: 2471802
auagaaauaacucgacauu

SEQ ID NO: 2471804 - RNA, 19 nt, Artificial Sequence
  Description of Artificial Sequence: Synthetic oligonucleotide
  Sense strand starting at position 3753 of SEQ ID NO: 1887428
cagguaaacuucguugaag

SEQ ID NO: 2471805 - RNA, 19 nt, Artificial Sequence
  Description of Artificial Sequence: Synthetic oligonucleotide
  Antisense strand to SEQ ID NO: 2471804
cuucaacgaaguuuaccug

SEQ ID NO: 2471806 - RNA, 19 nt, Artificial Sequence
  Description of Artificial Sequence: Synthetic oligonucleotide
  Sense strand starting at position 3761 of SEQ ID NO: 1887428
cuucguugaagcuagagaa

SEQ ID NO: 2471807 - RNA, 19 nt, Artificial Sequence
  Description of Artificial Sequence: Synthetic oligonucleotide
  Antisense strand to SEQ ID NO: 2471806
uucucuagcuucaacgaag

SEQ ID NO: 2471808 - RNA, 19 nt, Artificial Sequence
  Description of Artificial Sequence: Synthetic oligonucleotide
  Sense strand starting at position 8 of SEQ ID NO: 1887429
aagugcuuagcaugauaag

SEQ ID NO: 2471809 - RNA, 19 nt, Artificial Sequence
  Description of Artificial Sequence: Synthetic oligonucleotide
  Antisense strand to SEQ ID NO: 2471808
cuuaucaugcuaagcacuu

SEQ ID NO: 2471810 - RNA, 19 nt, Artificial Sequence
  Description of Artificial Sequence: Synthetic oligonucleotide
  Sense strand starting at position 30 of SEQ ID NO: 1887429
ccaauccuccaguaaguga

SEQ ID NO: 2471811 - RNA, 19 nt, Artificial Sequence
  Description of Artificial Sequence: Synthetic oligonucleotide
  Antisense strand to SEQ ID NO: 2471810
ucacuuacuggaggauugg

SEQ ID NO: 2471812 - RNA, 19 nt, Artificial Sequence
  Description of Artificial Sequence: Synthetic oligonucleotide
  Sense strand starting at position 161 of SEQ ID NO: 1887429
gcaagauaucuuggcuuac

SEQ ID NO: 2471813 - RNA, 19 nt, Artificial Sequence
  Description of Artificial Sequence: Synthetic oligonucleotide
  Antisense strand to SEQ ID NO: 2471812
guaagccaagauaucuugc

SEQ ID NO: 2471814 - RNA, 19 nt, Artificial Sequence
  Description of Artificial Sequence: Synthetic oligonucleotide
  Sense strand starting at position 226 of SEQ ID NO: 1887429
cucagacaguucuuucuua

SEQ ID NO: 2471815 - RNA, 19 nt, Artificial Sequence
  Description of Artificial Sequence: Synthetic oligonucleotide
  Antisense strand to SEQ ID NO: 2471814
uaagaaagaacugucugag

SEQ ID NO: 2471816 - RNA, 19 nt, Artificial Sequence
  Description of Artificial Sequence: Synthetic oligonucleotide
  Sense strand starting at position 430 of SEQ ID NO: 1887429
guaacagugccuuaacaau

SEQ ID NO: 2471817 - RNA, 19 nt, Artificial Sequence
  Description of Artificial Sequence: Synthetic oligonucleotide
  Antisense strand to SEQ ID NO: 2471816
auuguuaaggcacuguuac

SEQ ID NO: 2471818 - RNA, 19 nt, Artificial Sequence
  Description of Artificial Sequence: Synthetic oligonucleotide
  Sense strand starting at position 509 of SEQ ID NO: 1887429
ccacaacguguaugacuaa

SEQ ID NO: 2471819 - RNA, 19 nt, Artificial Sequence
  Description of Artificial Sequence: Synthetic oligonucleotide
  Antisense strand to SEQ ID NO: 2471818
uuagucauacacguugugg

SEQ ID NO: 2471820 - RNA, 19 nt, Artificial Sequence
  Description of Artificial Sequence: Synthetic oligonucleotide
  Sense strand starting at position 512 of SEQ ID NO: 1887429
caacguguaugacuaacua

SEQ ID NO: 2471821 - RNA, 19 nt, Artificial Sequence
  Description of Artificial Sequence: Synthetic oligonucleotide
  Antisense strand to SEQ ID NO: 2471820
uaguuagucauacacguug

SEQ ID NO: 2471822 - RNA, 19 nt, Artificial Sequence
  Description of Artificial Sequence: Synthetic oligonucleotide
  Sense strand starting at position 824 of SEQ ID NO: 1887429
aacaguagcguugacacau

SEQ ID NO: 2471823 - RNA, 19 nt, Artificial Sequence
  Description of Artificial Sequence: Synthetic oligonucleotide
  Antisense strand to SEQ ID NO: 2471822
augugucaacgcuacuguu

SEQ ID NO: 2471824 - RNA, 19 nt, Artificial Sequence
  Description of Artificial Sequence: Synthetic oligonucleotide
  Sense strand starting at position 859 of SEQ ID NO: 1887429
guaacaauugcaugacuga

SEQ ID NO: 2471825 - RNA, 19 nt, Artificial Sequence
  Description of Artificial Sequence: Synthetic oligonucleotide
  Antisense strand to SEQ ID NO: 2471824
ucagucaugcaauuguuac

SEQ ID NO: 2471826 - RNA, 19 nt, Artificial Sequence
  Description of Artificial Sequence: Synthetic oligonucleotide
  Sense strand starting at position 872 of SEQ ID NO: 1887429
gacugaucuguuugucaac

SEQ ID NO: 2471827 - RNA, 19 nt, Artificial Sequence
  Description of Artificial Sequence: Synthetic oligonucleotide
  Antisense strand to SEQ ID NO: 2471826
guugacaaacagaucaguc

SEQ ID NO: 2471828 - RNA, 19 nt, Artificial Sequence
  Description of Artificial Sequence: Synthetic oligonucleotide
  Sense strand starting at position 873 of SEQ ID NO: 1887429
acugaucuguuugucaacu

SEQ ID NO: 2471829 - RNA, 19 nt, Artificial Sequence
  Description of Artificial Sequence: Synthetic oligonucleotide
  Antisense strand to SEQ ID NO: 2471828
aguugacaaacagaucagu

SEQ ID NO: 2471830 - RNA, 19 nt, Artificial Sequence
  Description of Artificial Sequence: Synthetic oligonucleotide
  Sense strand starting at position 913 of SEQ ID NO: 1887429
ggguucugcuaauugaaag

SEQ ID NO: 2471831 - RNA, 19 nt, Artificial Sequence
  Description of Artificial Sequence: Synthetic oligonucleotide
  Antisense strand to SEQ ID NO: 2471830
cuuucaauuagcagaaccc

SEQ ID NO: 2471832 - RNA, 19 nt, Artificial Sequence
  Description of Artificial Sequence: Synthetic oligonucleotide
  Sense strand starting at position 914 of SEQ ID NO: 1887429
gguucugcuaauugaaagu

SEQ ID NO: 2471833 - RNA, 19 nt, Artificial Sequence
  Description of Artificial Sequence: Synthetic oligonucleotide
  Antisense strand to SEQ ID NO: 2471832
acuuucaauuagcagaacc

SEQ ID NO: 2471834 - RNA, 19 nt, Artificial Sequence
  Description of Artificial Sequence: Synthetic oligonucleotide
  Sense strand starting at position 948 of SEQ ID NO: 1887429
uuuaaagauugugcaggaa

SEQ ID NO: 2471835 - RNA, 19 nt, Artificial Sequence
  Description of Artificial Sequence: Synthetic oligonucleotide
  Antisense strand to SEQ ID NO: 2471834
uuccugcacaaucuuuaaa

SEQ ID NO: 2471836 - RNA, 19 nt, Artificial Sequence
  Description of Artificial Sequence: Synthetic oligonucleotide
  Sense strand starting at position 1001 of SEQ ID NO: 1887429
aaccgauucugacuugguu

SEQ ID NO: 2471837 - RNA, 19 nt, Artificial Sequence
  Description of Artificial Sequence: Synthetic oligonucleotide
  Antisense strand to SEQ ID NO: 2471836
aaccaagucagaaucgguu

SEQ ID NO: 2471838 - RNA, 19 nt, Artificial Sequence
  Description of Artificial Sequence: Synthetic oligonucleotide
  Sense strand starting at position 1003 of SEQ ID NO: 1887429
ccgauucugacuugguuaa

SEQ ID NO: 2471839 - RNA, 19 nt, Artificial Sequence
  Description of Artificial Sequence: Synthetic oligonucleotide
  Antisense strand to SEQ ID NO: 2471838
uuaaccaagucagaaucgg

SEQ ID NO: 2471840 - RNA, 19 nt, Artificial Sequence
  Description of Artificial Sequence: Synthetic oligonucleotide
  Sense strand starting at position 1004 of SEQ ID NO: 1887429
cgauucugacuugguuaaa

SEQ ID NO: 2471841 - RNA, 19 nt, Artificial Sequence
  Description of Artificial Sequence: Synthetic oligonucleotide
  Antisense strand to SEQ ID NO: 2471840
uuuaaccaagucagaaucg

SEQ ID NO: 2471842 - RNA, 19 nt, Artificial Sequence
  Description of Artificial Sequence: Synthetic oligonucleotide
  Sense strand starting at position 1005 of SEQ ID NO: 1887429
gauucugacuugguuaaau

SEQ ID NO: 2471843 - RNA, 19 nt, Artificial Sequence
  Description of Artificial Sequence: Synthetic oligonucleotide
  Antisense strand to SEQ ID NO: 2471842
auuuaaccaagucagaauc

SEQ ID NO: 2471844 - RNA, 19 nt, Artificial Sequence
  Description of Artificial Sequence: Synthetic oligonucleotide
  Sense strand starting at position 1266 of SEQ ID NO: 1887429
auaaucuaagcguauggaa

SEQ ID NO: 2471845 - RNA, 19 nt, Artificial Sequence
  Description of Artificial Sequence: Synthetic oligonucleotide
  Antisense strand to SEQ ID NO: 2471844
uuccauacgcuuagauuau

SEQ ID NO: 2471846 - RNA, 19 nt, Artificial Sequence
  Description of Artificial Sequence: Synthetic oligonucleotide
  Sense strand starting at position 1268 of SEQ ID NO: 1887429
aaucuaagcguauggaaau

SEQ ID NO: 2471847 - RNA, 19 nt, Artificial Sequence
  Description of Artificial Sequence: Synthetic oligonucleotide
  Antisense strand to SEQ ID NO: 2471846
auuuccauacgcuuagauu

SEQ ID NO: 2471848 - RNA, 19 nt, Artificial Sequence
  Description of Artificial Sequence: Synthetic oligonucleotide
  Sense strand starting at position 1278 of SEQ ID NO: 1887429
uauggaaauccacgguaua

SEQ ID NO: 2471849 - RNA, 19 nt, Artificial Sequence
  Description of Artificial Sequence: Synthetic oligonucleotide
  Antisense strand to SEQ ID NO: 2471848
uauaccguggauuuccaua

SEQ ID NO: 2471850 - RNA, 19 nt, Artificial Sequence
  Description of Artificial Sequence: Synthetic oligonucleotide
  Sense strand starting at position 1279 of SEQ ID NO: 1887429
auggaaauccacgguauaa

SEQ ID NO: 2471851 - RNA, 19 nt, Artificial Sequence
  Description of Artificial Sequence: Synthetic oligonucleotide
  Antisense strand to SEQ ID NO: 2471850
uuauaccguggauuuccau

SEQ ID NO: 2471852 - RNA, 19 nt, Artificial Sequence
  Description of Artificial Sequence: Synthetic oligonucleotide
  Sense strand starting at position 1317 of SEQ ID NO: 1887429
ggaaauuaacuucggcuau

SEQ ID NO: 2471853 - RNA, 19 nt, Artificial Sequence
  Description of Artificial Sequence: Synthetic oligonucleotide
  Antisense strand to SEQ ID NO: 2471852
auagccgaaguuaauuucc

SEQ ID NO: 2471854 - RNA, 19 nt, Artificial Sequence
  Description of Artificial Sequence: Synthetic oligonucleotide
  Sense strand starting at position 1321 of SEQ ID NO: 1887429
auuaacuucggcuauauua

SEQ ID NO: 2471855 - RNA, 19 nt, Artificial Sequence
  Description of Artificial Sequence: Synthetic oligonucleotide
  Antisense strand to SEQ ID NO: 2471854
uaauauagccgaaguuaau

SEQ ID NO: 2471856 - RNA, 19 nt, Artificial Sequence
  Description of Artificial Sequence: Synthetic oligonucleotide
  Sense strand starting at position 1474 of SEQ ID NO: 1887429
auauguuaacuguaaaguc

SEQ ID NO: 2471857 - RNA, 19 nt, Artificial Sequence
  Description of Artificial Sequence: Synthetic oligonucleotide
  Antisense strand to SEQ ID NO: 2471856
gacuuuacaguuaacauau

SEQ ID NO: 2471858 - RNA, 19 nt, Artificial Sequence
  Description of Artificial Sequence: Synthetic oligonucleotide
  Sense strand starting at position 2710 of SEQ ID NO: 1887429
agacuaucuccaggauucu

SEQ ID NO: 2471859 - RNA, 19 nt, Artificial Sequence
  Description of Artificial Sequence: Synthetic oligonucleotide
  Antisense strand to SEQ ID NO: 2471858
agaauccuggagauagucu

SEQ ID NO: 2471860 - RNA, 19 nt, Artificial Sequence
  Description of Artificial Sequence: Synthetic oligonucleotide
  Sense strand starting at position 2751 of SEQ ID NO: 1887429
aggacugauuuccgagaag

SEQ ID NO: 2471861 - RNA, 19 nt, Artificial Sequence
  Description of Artificial Sequence: Synthetic oligonucleotide
  Antisense strand to SEQ ID NO: 2471860
cuucucggaaaucaguccu

SEQ ID NO: 2471862 - RNA, 19 nt, Artificial Sequence
  Description of Artificial Sequence: Synthetic oligonucleotide
  Sense strand starting at position 2763 of SEQ ID NO: 1887429
cgagaagagugacucaaua

SEQ ID NO: 2471863 - RNA, 19 nt, Artificial Sequence
  Description of Artificial Sequence: Synthetic oligonucleotide
  Antisense strand to SEQ ID NO: 2471862
uauugagucacucuucucg

SEQ ID NO: 2471864 - RNA, 19 nt, Artificial Sequence
  Description of Artificial Sequence: Synthetic oligonucleotide
  Sense strand starting at position 2847 of SEQ ID NO: 1887429
cgcaguuagaauugacauu

SEQ ID NO: 2471865 - RNA, 19 nt, Artificial Sequence
  Description of Artificial Sequence: Synthetic oligonucleotide
  Antisense strand to SEQ ID NO: 2471864
aaugucaauucuaacugcg

SEQ ID NO: 2471866 - RNA, 19 nt, Artificial Sequence
  Description of Artificial Sequence: Synthetic oligonucleotide
  Sense strand starting at position 2985 of SEQ ID NO: 1887429
gugucucuaucaccucuaa

SEQ ID NO: 2471867 - RNA, 19 nt, Artificial Sequence
  Description of Artificial Sequence: Synthetic oligonucleotide
  Antisense strand to SEQ ID NO: 2471866
uuagaggugauagagacac

SEQ ID NO: 2471868 - RNA, 19 nt, Artificial Sequence
  Description of Artificial Sequence: Synthetic oligonucleotide
  Sense strand starting at position 3075 of SEQ ID NO: 1887429
cuuagauauuaagcgugau

SEQ ID NO: 2471869 - RNA, 19 nt, Artificial Sequence
  Description of Artificial Sequence: Synthetic oligonucleotide
  Antisense strand to SEQ ID NO: 2471868
aucacgcuuaauaucuaag

SEQ ID NO: 2471870 - RNA, 19 nt, Artificial Sequence
  Description of Artificial Sequence: Synthetic oligonucleotide
  Sense strand starting at position 3076 of SEQ ID NO: 1887429
uuagauauuaagcgugauc

SEQ ID NO: 2471871 - RNA, 19 nt, Artificial Sequence
  Description of Artificial Sequence: Synthetic oligonucleotide
  Antisense strand to SEQ ID NO: 2471870
gaucacgcuuaauaucuaa

SEQ ID NO: 2471872 - RNA, 19 nt, Artificial Sequence
  Description of Artificial Sequence: Synthetic oligonucleotide
  Sense strand starting at position 3078 of SEQ ID NO: 1887429
agauauuaagcgugauccu

SEQ ID NO: 2471873 - RNA, 19 nt, Artificial Sequence
  Description of Artificial Sequence: Synthetic oligonucleotide
  Antisense strand to SEQ ID NO: 2471872
aggaucacgcuuaauaucu

SEQ ID NO: 2471874 - RNA, 19 nt, Artificial Sequence
  Description of Artificial Sequence: Synthetic oligonucleotide
  Sense strand starting at position 3079 of SEQ ID NO: 1887429
gauauuaagcgugauccua

SEQ ID NO: 2471875 - RNA, 19 nt, Artificial Sequence
  Description of Artificial Sequence: Synthetic oligonucleotide
  Antisense strand to SEQ ID NO: 2471874
uaggaucacgcuuaauauc

SEQ ID NO: 2471876 - RNA, 19 nt, Artificial Sequence
  Description of Artificial Sequence: Synthetic oligonucleotide
  Sense strand starting at position 3081 of SEQ ID NO: 1887429
uauuaagcgugauccuaga

SEQ ID NO: 2471877 - RNA, 19 nt, Artificial Sequence
  Description of Artificial Sequence: Synthetic oligonucleotide
  Antisense strand to SEQ ID NO: 2471876
ucuaggaucacgcuuaaua

SEQ ID NO: 2471878 - RNA, 19 nt, Artificial Sequence
  Description of Artificial Sequence: Synthetic oligonucleotide
  Sense strand starting at position 3122 of SEQ ID NO: 1887429
uguugagugaaucgauaug

SEQ ID NO: 2471879 - RNA, 19 nt, Artificial Sequence
  Description of Artificial Sequence: Synthetic oligonucleotide
  Antisense strand to SEQ ID NO: 2471878
cauaucgauucacucaaca

SEQ ID NO: 2471880 - RNA, 19 nt, Artificial Sequence
  Description of Artificial Sequence: Synthetic oligonucleotide
  Sense strand starting at position 3156 of SEQ ID NO: 1887429
uuguaaugcagucagagaa

SEQ ID NO: 2471881 - RNA, 19 nt, Artificial Sequence
  Description of Artificial Sequence: Synthetic oligonucleotide
  Antisense strand to SEQ ID NO: 2471880
uucucugacugcauuacaa

SEQ ID NO: 2471882 - RNA, 19 nt, Artificial Sequence
  Description of Artificial Sequence: Synthetic oligonucleotide
  Sense strand starting at position 3862 of SEQ ID NO: 1887429
aaagacugcugucuagaaa

SEQ ID NO: 2471883 - RNA, 19 nt, Artificial Sequence
  Description of Artificial Sequence: Synthetic oligonucleotide
  Antisense strand to SEQ ID NO: 2471882
uuucuagacagcagucuuu

SEQ ID NO: 2471884 - RNA, 19 nt, Artificial Sequence
  Description of Artificial Sequence: Synthetic oligonucleotide
  Sense strand starting at position 3865 of SEQ ID NO: 1887429
gacugcugucuagaaagua

SEQ ID NO: 2471885 - RNA, 19 nt, Artificial Sequence
  Description of Artificial Sequence: Synthetic oligonucleotide
  Antisense strand to SEQ ID NO: 2471884
uacuuucuagacagcaguc

SEQ ID NO: 2471886 - RNA, 19 nt, Artificial Sequence
  Description of Artificial Sequence: Synthetic oligonucleotide
  Sense strand starting at position 3880 of SEQ ID NO: 1887429
aguagacucucaucagaua

SEQ ID NO: 2471887 - RNA, 19 nt, Artificial Sequence
  Description of Artificial Sequence: Synthetic oligonucleotide
  Antisense strand to SEQ ID NO: 2471886
uaucugaugagagucuacu

SEQ ID NO: 2471888 - RNA, 19 nt, Artificial Sequence
  Description of Artificial Sequence: Synthetic oligonucleotide
  Sense strand starting at position 24 of SEQ ID NO: 1887430
uuauuauauuggucccaug

SEQ ID NO: 2471889 - RNA, 19 nt, Artificial Sequence
  Description of Artificial Sequence: Synthetic oligonucleotide
  Antisense strand to SEQ ID NO: 2471888
caugggaccaauauaauaa

SEQ ID NO: 2471890 - RNA, 19 nt, Artificial Sequence
  Description of Artificial Sequence: Synthetic oligonucleotide
  Sense strand starting at position 71 of SEQ ID NO: 1887430
aggaguuauuucuaaaccu

SEQ ID NO: 2471891 - RNA, 19 nt, Artificial Sequence
  Description of Artificial Sequence: Synthetic oligonucleotide
  Antisense strand to SEQ ID NO: 2471890
agguuuagaaauaacuccu

SEQ ID NO: 2471892 - RNA, 19 nt, Artificial Sequence
  Description of Artificial Sequence: Synthetic oligonucleotide
  Sense strand starting at position 189 of SEQ ID NO: 1887430
caaggaagguuguccaauu

SEQ ID NO: 2471893 - RNA, 19 nt, Artificial Sequence
  Description of Artificial Sequence: Synthetic oligonucleotide
  Antisense strand to SEQ ID NO: 2471892
aauuggacaaccuuccuug

SEQ ID NO: 2471894 - RNA, 19 nt, Artificial Sequence
  Description of Artificial Sequence: Synthetic oligonucleotide
  Sense strand starting at position 209 of SEQ ID NO: 1887430
ggcauuagagcauaaucuu

SEQ ID NO: 2471895 - RNA, 19 nt, Artificial Sequence
  Description of Artificial Sequence: Synthetic oligonucleotide
  Antisense strand to SEQ ID NO: 2471894
aagauuaugcucuaaugcc

SEQ ID NO: 2471896 - RNA, 19 nt, Artificial Sequence
  Description of Artificial Sequence: Synthetic oligonucleotide
  Sense strand starting at position 212 of SEQ ID NO: 1887430
auuagagcauaaucuugau

SEQ ID NO: 2471897 - RNA, 19 nt, Artificial Sequence
  Description of Artificial Sequence: Synthetic oligonucleotide
  Antisense strand to SEQ ID NO: 2471896
aucaagauuaugcucuaau

SEQ ID NO: 2471898 - RNA, 19 nt, Artificial Sequence
  Description of Artificial Sequence: Synthetic oligonucleotide
  Sense strand starting at position 307 of SEQ ID NO: 1887430
auugcuugucucuagaaua

SEQ ID NO: 2471899 - RNA, 19 nt, Artificial Sequence
  Description of Artificial Sequence: Synthetic oligonucleotide
  Antisense strand to SEQ ID NO: 2471898
uauucuagagacaagcaau

SEQ ID NO: 2471900 - RNA, 19 nt, Artificial Sequence
  Description of Artificial Sequence: Synthetic oligonucleotide
  Sense strand starting at position 318 of SEQ ID NO: 1887430
cuagaauauuaggcaucca

SEQ ID NO: 2471901 - RNA, 19 nt, Artificial Sequence
  Description of Artificial Sequence: Synthetic oligonucleotide
  Antisense strand to SEQ ID NO: 2471900
uggaugccuaauauucuag

SEQ ID NO: 2471902 - RNA, 19 nt, Artificial Sequence
  Description of Artificial Sequence: Synthetic oligonucleotide
  Sense strand starting at position 352 of SEQ ID NO: 1887430
ucaucagaacagugagacu

SEQ ID NO: 2471903 - RNA, 19 nt, Artificial Sequence
  Description of Artificial Sequence: Synthetic oligonucleotide
  Antisense strand to SEQ ID NO: 2471902
agucucacuguucugauga

SEQ ID NO: 2471904 - RNA, 19 nt, Artificial Sequence
  Description of Artificial Sequence: Synthetic oligonucleotide
  Sense strand starting at position 363 of SEQ ID NO: 1887430
gugagacuucugugauaau

SEQ ID NO: 2471905 - RNA, 19 nt, Artificial Sequence
  Description of Artificial Sequence: Synthetic oligonucleotide
  Antisense strand to SEQ ID NO: 2471904
auuaucacagaagucucac

SEQ ID NO: 2471906 - RNA, 19 nt, Artificial Sequence
  Description of Artificial Sequence: Synthetic oligonucleotide
  Sense strand starting at position 372 of SEQ ID NO: 1887430
cugugauaaugguuaaauu

SEQ ID NO: 2471907 - RNA, 19 nt, Artificial Sequence
  Description of Artificial Sequence: Synthetic oligonucleotide
  Antisense strand to SEQ ID NO: 2471906
aauuuaaccauuaucacag

SEQ ID NO: 2471908 - RNA, 19 nt, Artificial Sequence
  Description of Artificial Sequence: Synthetic oligonucleotide
  Sense strand starting at position 373 of SEQ ID NO: 1887430
ugugauaaugguuaaauuc

SEQ ID NO: 2471909 - RNA, 19 nt, Artificial Sequence
  Description of Artificial Sequence: Synthetic oligonucleotide
  Antisense strand to SEQ ID NO: 2471908
gaauuuaaccauuaucaca

SEQ ID NO: 2471910 - RNA, 19 nt, Artificial Sequence
  Description of Artificial Sequence: Synthetic oligonucleotide
  Sense strand starting at position 413 of SEQ ID NO: 1887430
gacauuuggucauaugaac

SEQ ID NO: 2471911 - RNA, 19 nt, Artificial Sequence
  Description of Artificial Sequence: Synthetic oligonucleotide
  Antisense strand to SEQ ID NO: 2471910
guucauaugaccaaauguc

SEQ ID NO: 2471912 - RNA, 19 nt, Artificial Sequence
  Description of Artificial Sequence: Synthetic oligonucleotide
  Sense strand starting at position 444 of SEQ ID NO: 1887430
caagaauaauuggcagugu

SEQ ID NO: 2471913 - RNA, 19 nt, Artificial Sequence
  Description of Artificial Sequence: Synthetic oligonucleotide
  Antisense strand to SEQ ID NO: 2471912
acacugccaauuauucuug

SEQ ID NO: 2471914 - RNA, 19 nt, Artificial Sequence
  Description of Artificial Sequence: Synthetic oligonucleotide
  Sense strand starting at position 789 of SEQ ID NO: 1887430
caguuacucguggacaaag

SEQ ID NO: 2471915 - RNA, 19 nt, Artificial Sequence
  Description of Artificial Sequence: Synthetic oligonucleotide
  Antisense strand to SEQ ID NO: 2471914
cuuuguccacgaguaacug

SEQ ID NO: 2471916 - RNA, 19 nt, Artificial Sequence
  Description of Artificial Sequence: Synthetic oligonucleotide
  Sense strand starting at position 2103 of SEQ ID NO: 1887430
uugcuuugccgugcaggaa

SEQ ID NO: 2471917 - RNA, 19 nt, Artificial Sequence
  Description of Artificial Sequence: Synthetic oligonucleotide
  Antisense strand to SEQ ID NO: 2471916
uuccugcacggcaaagcaa

SEQ ID NO: 2471918 - RNA, 19 nt, Artificial Sequence
  Description of Artificial Sequence: Synthetic oligonucleotide
  Sense strand starting at position 2189 of SEQ ID NO: 1887430
aaaugaguuccugaugucu

SEQ ID NO: 2471919 - RNA, 19 nt, Artificial Sequence
  Description of Artificial Sequence: Synthetic oligonucleotide
  Antisense strand to SEQ ID NO: 2471918
agacaucaggaacucauuu

SEQ ID NO: 2471920 - RNA, 19 nt, Artificial Sequence
  Description of Artificial Sequence: Synthetic oligonucleotide
  Sense strand starting at position 2209 of SEQ ID NO: 1887430
ucaagcaggcguuauuuau

SEQ ID NO: 2471921 - RNA, 19 nt, Artificial Sequence
  Description of Artificial Sequence: Synthetic oligonucleotide
  Antisense strand to SEQ ID NO: 2471920
auaaauaacgccugcuuga

SEQ ID NO: 2471922 - RNA, 19 nt, Artificial Sequence
  Description of Artificial Sequence: Synthetic oligonucleotide
  Sense strand starting at position 2353 of SEQ ID NO: 1887430
agaacugaaaccugguagu

SEQ ID NO: 2471923 - RNA, 19 nt, Artificial Sequence
  Description of Artificial Sequence: Synthetic oligonucleotide
  Antisense strand to SEQ ID NO: 2471922
acuaccagguuucaguucu

SEQ ID NO: 2471924 - RNA, 19 nt, Artificial Sequence
  Description of Artificial Sequence: Synthetic oligonucleotide
  Sense strand starting at position 2450 of SEQ ID NO: 1887430
ugauuugccgucugauugu

SEQ ID NO: 2471925 - RNA, 19 nt, Artificial Sequence
  Description of Artificial Sequence: Synthetic oligonucleotide
  Antisense strand to SEQ ID NO: 2471924
acaaucagacggcaaauca

SEQ ID NO: 2471926 - RNA, 19 nt, Artificial Sequence
  Description of Artificial Sequence: Synthetic oligonucleotide
  Sense strand starting at position 2590 of SEQ ID NO: 1887430
ggagacagagucuguaaga

SEQ ID NO: 2471927 - RNA, 19 nt, Artificial Sequence
  Description of Artificial Sequence: Synthetic oligonucleotide
  Antisense strand to SEQ ID NO: 2471926
ucuuacagacucugucucc

SEQ ID NO: 2471928 - RNA, 19 nt, Artificial Sequence
  Description of Artificial Sequence: Synthetic oligonucleotide
  Sense strand starting at position 2636 of SEQ ID NO: 1887430
agagaauggugguuucuac

SEQ ID NO: 2471929 - RNA, 19 nt, Artificial Sequence
  Description of Artificial Sequence: Synthetic oligonucleotide
  Antisense strand to SEQ ID NO: 2471928
guagaaaccaccauucucu

SEQ ID NO: 2471930 - RNA, 19 nt, Artificial Sequence
  Description of Artificial Sequence: Synthetic oligonucleotide
  Sense strand starting at position 2644 of SEQ ID NO: 1887430
gugguuucuacccagcaga

SEQ ID NO: 2471931 - RNA, 19 nt, Artificial Sequence
  Description of Artificial Sequence: Synthetic oligonucleotide
  Antisense strand to SEQ ID NO: 2471930
ucugcuggguagaaaccac

SEQ ID NO: 2471932 - RNA, 19 nt, Artificial Sequence
  Description of Artificial Sequence: Synthetic oligonucleotide
  Sense strand starting at position 2671 of SEQ ID NO: 1887430
cuucuuaauggcgaagcaa

SEQ ID NO: 2471933 - RNA, 19 nt, Artificial Sequence
  Description of Artificial Sequence: Synthetic oligonucleotide
  Antisense strand to SEQ ID NO: 2471932
uugcuucgccauuaagaag

SEQ ID NO: 2471934 - RNA, 19 nt, Artificial Sequence
  Description of Artificial Sequence: Synthetic oligonucleotide
  Sense strand starting at position 2821 of SEQ ID NO: 1887430
ugguuucaagauggaguuu

SEQ ID NO: 2471935 - RNA, 19 nt, Artificial Sequence
  Description of Artificial Sequence: Synthetic oligonucleotide
  Antisense strand to SEQ ID NO: 2471934
aaacuccaucuugaaacca

SEQ ID NO: 2471936 - RNA, 19 nt, Artificial Sequence
  Description of Artificial Sequence: Synthetic oligonucleotide
  Sense strand starting at position 2928 of SEQ ID NO: 1887430
gugugaauauuuccuguac

SEQ ID NO: 2471937 - RNA, 19 nt, Artificial Sequence
  Description of Artificial Sequence: Synthetic oligonucleotide
  Antisense strand to SEQ ID NO: 2471936
guacaggaaauauucacac

SEQ ID NO: 2471938 - RNA, 19 nt, Artificial Sequence
  Description of Artificial Sequence: Synthetic oligonucleotide
  Sense strand starting at position 2981 of SEQ ID NO: 1887430
ugucguaugagagaaggau

SEQ ID NO: 2471939 - RNA, 19 nt, Artificial Sequence
  Description of Artificial Sequence: Synthetic oligonucleotide
  Antisense strand to SEQ ID NO: 2471938
auccuucucucauacgaca

SEQ ID NO: 2471940 - RNA, 19 nt, Artificial Sequence
  Description of Artificial Sequence: Synthetic oligonucleotide
  Sense strand starting at position 2997 of SEQ ID NO: 1887430
gauggagauaguuguagag

SEQ ID NO: 2471941 - RNA, 19 nt, Artificial Sequence
  Description of Artificial Sequence: Synthetic oligonucleotide
  Antisense strand to SEQ ID NO: 2471940
cucuacaacuaucuccauc

SEQ ID NO: 2471942 - RNA, 19 nt, Artificial Sequence
  Description of Artificial Sequence: Synthetic oligonucleotide
  Sense strand starting at position 3001 of SEQ ID NO: 1887430
gagauaguuguagagucaa

SEQ ID NO: 2471943 - RNA, 19 nt, Artificial Sequence
  Description of Artificial Sequence: Synthetic oligonucleotide
  Antisense strand to SEQ ID NO: 2471942
uugacucuacaacuaucuc

SEQ ID NO: 2471944 - RNA, 19 nt, Artificial Sequence
  Description of Artificial Sequence: Synthetic oligonucleotide
  Sense strand starting at position 3195 of SEQ ID NO: 1887430
guuaauagaaggcaguaua

SEQ ID NO: 2471945 - RNA, 19 nt, Artificial Sequence
  Description of Artificial Sequence: Synthetic oligonucleotide
  Antisense strand to SEQ ID NO: 2471944
uauacugccuucuauuaac

SEQ ID NO: 2471946 - RNA, 19 nt, Artificial Sequence
  Description of Artificial Sequence: Synthetic oligonucleotide
  Sense strand starting at position 3207 of SEQ ID NO: 1887430
caguauaugagugguugga

SEQ ID NO: 2471947 - RNA, 19 nt, Artificial Sequence
  Description of Artificial Sequence: Synthetic oligonucleotide
  Antisense strand to SEQ ID NO: 2471946
uccaaccacucauauacug

SEQ ID NO: 2471948 - RNA, 19 nt, Artificial Sequence
  Description of Artificial Sequence: Synthetic oligonucleotide
  Sense strand starting at position 3209 of SEQ ID NO: 1887430
guauaugagugguuggaaa

SEQ ID NO: 2471949 - RNA, 19 nt, Artificial Sequence
  Description of Artificial Sequence: Synthetic oligonucleotide
  Antisense strand to SEQ ID NO: 2471948
uuuccaaccacucauauac

SEQ ID NO: 2471950 - RNA, 19 nt, Artificial Sequence
  Description of Artificial Sequence: Synthetic oligonucleotide
  Sense strand starting at position 3264 of SEQ ID NO: 1887430
aagauacuucucugugggu

SEQ ID NO: 2471951 - RNA, 19 nt, Artificial Sequence
  Description of Artificial Sequence: Synthetic oligonucleotide
  Antisense strand to SEQ ID NO: 2471950
acccacagagaaguaucuu

SEQ ID NO: 2471952 - RNA, 19 nt, Artificial Sequence
  Description of Artificial Sequence: Synthetic oligonucleotide
  Sense strand starting at position 3289 of SEQ ID NO: 1887430
guuggagguguccagggaa

SEQ ID NO: 2471953 - RNA, 19 nt, Artificial Sequence
  Description of Artificial Sequence: Synthetic oligonucleotide
  Antisense strand to SEQ ID NO: 2471952
uucccuggacaccuccaac

SEQ ID NO: 2471954 - RNA, 19 nt, Artificial Sequence
  Description of Artificial Sequence: Synthetic oligonucleotide
  Sense strand starting at position 3292 of SEQ ID NO: 1887430
ggagguguccagggaauau

SEQ ID NO: 2471955 - RNA, 19 nt, Artificial Sequence
  Description of Artificial Sequence: Synthetic oligonucleotide
  Antisense strand to SEQ ID NO: 2471954
auauucccuggacaccucc

SEQ ID NO: 2471956 - RNA, 19 nt, Artificial Sequence
  Description of Artificial Sequence: Synthetic oligonucleotide
  Sense strand starting at position 3326 of SEQ ID NO: 1887430
aggugcugucugcuuguau

SEQ ID NO: 2471957 - RNA, 19 nt, Artificial Sequence
  Description of Artificial Sequence: Synthetic oligonucleotide
  Antisense strand to SEQ ID NO: 2471956
auacaagcagacagcaccu

SEQ ID NO: 2471958 - RNA, 19 nt, Artificial Sequence
  Description of Artificial Sequence: Synthetic oligonucleotide
  Sense strand starting at position 3455 of SEQ ID NO: 1887430
aagagugagguguaucuua

SEQ ID NO: 2471959 - RNA, 19 nt, Artificial Sequence
  Description of Artificial Sequence: Synthetic oligonucleotide
  Antisense strand to SEQ ID NO: 2471958
uaagauacaccucacucuu

SEQ ID NO: 2471960 - RNA, 19 nt, Artificial Sequence
  Description of Artificial Sequence: Synthetic oligonucleotide
  Sense strand starting at position 3462 of SEQ ID NO: 1887430
agguguaucuuaucaugac

SEQ ID NO: 2471961 - RNA, 19 nt, Artificial Sequence
  Description of Artificial Sequence: Synthetic oligonucleotide
  Antisense strand to SEQ ID NO: 2471960
gucaugauaagauacaccu

SEQ ID NO: 2471962 - RNA, 19 nt, Artificial Sequence
  Description of Artificial Sequence: Synthetic oligonucleotide
  Sense strand starting at position 3466 of SEQ ID NO: 1887430
guaucuuaucaugacaguu

SEQ ID NO: 2471963 - RNA, 19 nt, Artificial Sequence
  Description of Artificial Sequence: Synthetic oligonucleotide
  Antisense strand to SEQ ID NO: 2471962
aacugucaugauaagauac

SEQ ID NO: 2471964 - RNA, 19 nt, Artificial Sequence
  Description of Artificial Sequence: Synthetic oligonucleotide
  Sense strand starting at position 3542 of SEQ ID NO: 1887430
guucuaaaucaaggacucu

SEQ ID NO: 2471965 - RNA, 19 nt, Artificial Sequence
  Description of Artificial Sequence: Synthetic oligonucleotide
  Antisense strand to SEQ ID NO: 2471964
agaguccuugauuuagaac

SEQ ID NO: 2471966 - RNA, 19 nt, Artificial Sequence
  Description of Artificial Sequence: Synthetic oligonucleotide
  Sense strand starting at position 3718 of SEQ ID NO: 1887430
ggcuccaucugauuuguuu

SEQ ID NO: 2471967 - RNA, 19 nt, Artificial Sequence
  Description of Artificial Sequence: Synthetic oligonucleotide
  Antisense strand to SEQ ID NO: 2471966
aaacaaaucagauggagcc

SEQ ID NO: 2471968 - RNA, 19 nt, Artificial Sequence
  Description of Artificial Sequence: Synthetic oligonucleotide
  Sense strand starting at position 65 of SEQ ID NO: 1887431
ugcuaugguaagggagaaa

SEQ ID NO: 2471969 - RNA, 19 nt, Artificial Sequence
  Description of Artificial Sequence: Synthetic oligonucleotide
  Antisense strand to SEQ ID NO: 2471968
uuucucccuuaccauagca

SEQ ID NO: 2471970 - RNA, 19 nt, Artificial Sequence
  Description of Artificial Sequence: Synthetic oligonucleotide
  Sense strand starting at position 157 of SEQ ID NO: 1887431
aggugagguuccuuauuga

SEQ ID NO: 2471971 - RNA, 19 nt, Artificial Sequence
  Description of Artificial Sequence: Synthetic oligonucleotide
  Antisense strand to SEQ ID NO: 2471970
ucaauaaggaaccucaccu

SEQ ID NO: 2471972 - RNA, 19 nt, Artificial Sequence
  Description of Artificial Sequence: Synthetic oligonucleotide
  Sense strand starting at position 160 of SEQ ID NO: 1887431
ugagguuccuuauugaaau

SEQ ID NO: 2471973 - RNA, 19 nt, Artificial Sequence
  Description of Artificial Sequence: Synthetic oligonucleotide
  Antisense strand to SEQ ID NO: 2471972
auuucaauaaggaaccuca

SEQ ID NO: 2471974 - RNA, 19 nt, Artificial Sequence
  Description of Artificial Sequence: Synthetic oligonucleotide
  Sense strand starting at position 195 of SEQ ID NO: 1887431
uacuguggccuagauacuu

SEQ ID NO: 2471975 - RNA, 19 nt, Artificial Sequence
  Description of Artificial Sequence: Synthetic oligonucleotide
  Antisense strand to SEQ ID NO: 2471974
aaguaucuaggccacagua

SEQ ID NO: 2471976 - RNA, 19 nt, Artificial Sequence
  Description of Artificial Sequence: Synthetic oligonucleotide
  Sense strand starting at position 397 of SEQ ID NO: 1887431
uaugaaaugcaagguacua

SEQ ID NO: 2471977 - RNA, 19 nt, Artificial Sequence
  Description of Artificial Sequence: Synthetic oligonucleotide
  Antisense strand to SEQ ID NO: 2471976
uaguaccuugcauuucaua

SEQ ID NO: 2471978 - RNA, 19 nt, Artificial Sequence
  Description of Artificial Sequence: Synthetic oligonucleotide
  Sense strand starting at position 433 of SEQ ID NO: 1887431
guaagagagacugguccaa

SEQ ID NO: 2471979 - RNA, 19 nt, Artificial Sequence
  Description of Artificial Sequence: Synthetic oligonucleotide
  Antisense strand to SEQ ID NO: 2471978
uuggaccagucucucuuac

SEQ ID NO: 2471980 - RNA, 19 nt, Artificial Sequence
  Description of Artificial Sequence: Synthetic oligonucleotide
  Sense strand starting at position 604 of SEQ ID NO: 1887431
uacaguuauuuggacaaga

SEQ ID NO: 2471981 - RNA, 19 nt, Artificial Sequence
  Description of Artificial Sequence: Synthetic oligonucleotide
  Antisense strand to SEQ ID NO: 2471980
ucuuguccaaauaacugua

SEQ ID NO: 2471982 - RNA, 19 nt, Artificial Sequence
  Description of Artificial Sequence: Synthetic oligonucleotide
  Sense strand starting at position 614 of SEQ ID NO: 1887431
uggacaagaaaguguguua

SEQ ID NO: 2471983 - RNA, 19 nt, Artificial Sequence
  Description of Artificial Sequence: Synthetic oligonucleotide
  Antisense strand to SEQ ID NO: 2471982
uaacacacuuucuugucca

SEQ ID NO: 2471984 - RNA, 19 nt, Artificial Sequence
  Description of Artificial Sequence: Synthetic oligonucleotide
  Sense strand starting at position 617 of SEQ ID NO: 1887431
acaagaaaguguguuacau

SEQ ID NO: 2471985 - RNA, 19 nt, Artificial Sequence
  Description of Artificial Sequence: Synthetic oligonucleotide
  Antisense strand to SEQ ID NO: 2471984
auguaacacacuuucuugu

SEQ ID NO: 2471986 - RNA, 19 nt, Artificial Sequence
  Description of Artificial Sequence: Synthetic oligonucleotide
  Sense strand starting at position 627 of SEQ ID NO: 1887431
guguuacauaaacagugau

SEQ ID NO: 2471987 - RNA, 19 nt, Artificial Sequence
  Description of Artificial Sequence: Synthetic oligonucleotide
  Antisense strand to SEQ ID NO: 2471986
aucacuguuuauguaacac

SEQ ID NO: 2471988 - RNA, 19 nt, Artificial Sequence
  Description of Artificial Sequence: Synthetic oligonucleotide
  Sense strand starting at position 639 of SEQ ID NO: 1887431
cagugauaccagcaguaga

SEQ ID NO: 2471989 - RNA, 19 nt, Artificial Sequence
  Description of Artificial Sequence: Synthetic oligonucleotide
  Antisense strand to SEQ ID NO: 2471988
ucuacugcugguaucacug

SEQ ID NO: 2471990 - RNA, 19 nt, Artificial Sequence
  Description of Artificial Sequence: Synthetic oligonucleotide
  Sense strand starting at position 652 of SEQ ID NO: 1887431
aguagacugcuccaaguua

SEQ ID NO: 2471991 - RNA, 19 nt, Artificial Sequence
  Description of Artificial Sequence: Synthetic oligonucleotide
  Antisense strand to SEQ ID NO: 2471990
uaacuuggagcagucuacu

SEQ ID NO: 2471992 - RNA, 19 nt, Artificial Sequence
  Description of Artificial Sequence: Synthetic oligonucleotide
  Sense strand starting at position 782 of SEQ ID NO: 1887431
cugaaaucuugguucucaa

SEQ ID NO: 2471993 - RNA, 19 nt, Artificial Sequence
  Description of Artificial Sequence: Synthetic oligonucleotide
  Antisense strand to SEQ ID NO: 2471992
uugagaaccaagauuucag

SEQ ID NO: 2471994 - RNA, 19 nt, Artificial Sequence
  Description of Artificial Sequence: Synthetic oligonucleotide
  Sense strand starting at position 888 of SEQ ID NO: 1887431
guugauauuuaccaaagac

SEQ ID NO: 2471995 - RNA, 19 nt, Artificial Sequence
  Description of Artificial Sequence: Synthetic oligonucleotide
  Antisense strand to SEQ ID NO: 2471994
gucuuugguaaauaucaac

SEQ ID NO: 2471996 - RNA, 19 nt, Artificial Sequence
  Description of Artificial Sequence: Synthetic oligonucleotide
  Sense strand starting at position 1047 of SEQ ID NO: 1887431
gagccuaagcuacaaguua

SEQ ID NO: 2471997 - RNA, 19 nt, Artificial Sequence
  Description of Artificial Sequence: Synthetic oligonucleotide
  Antisense strand to SEQ ID NO: 2471996
uaacuuguagcuuaggcuc

SEQ ID NO: 2471998 - RNA, 19 nt, Artificial Sequence
  Description of Artificial Sequence: Synthetic oligonucleotide
  Sense strand starting at position 1132 of SEQ ID NO: 1887431
uucgaaaugcauuagcaga

SEQ ID NO: 2471999 - RNA, 19 nt, Artificial Sequence
  Description of Artificial Sequence: Synthetic oligonucleotide
  Antisense strand to SEQ ID NO: 2471998
ucugcuaaugcauuucgaa

SEQ ID NO: 2472000 - RNA, 19 nt, Artificial Sequence
  Description of Artificial Sequence: Synthetic oligonucleotide
  Sense strand starting at position 1134 of SEQ ID NO: 1887431
cgaaaugcauuagcagaaa

SEQ ID NO: 2472001 - RNA, 19 nt, Artificial Sequence
  Description of Artificial Sequence: Synthetic oligonucleotide
  Antisense strand to SEQ ID NO: 2472000
uuucugcuaaugcauuucg

SEQ ID NO: 2472002 - RNA, 19 nt, Artificial Sequence
  Description of Artificial Sequence: Synthetic oligonucleotide
  Sense strand starting at position 1214 of SEQ ID NO: 1887431
gagagauguagguggugaa

SEQ ID NO: 2472003 - RNA, 19 nt, Artificial Sequence
  Description of Artificial Sequence: Synthetic oligonucleotide
  Antisense strand to SEQ ID NO: 2472002
uucaccaccuacaucucuc

SEQ ID NO: 2472004 - RNA, 19 nt, Artificial Sequence
  Description of Artificial Sequence: Synthetic oligonucleotide
  Sense strand starting at position 1239 of SEQ ID NO: 1887431
caaaguguucgguaaauua

SEQ ID NO: 2472005 - RNA, 19 nt, Artificial Sequence
  Description of Artificial Sequence: Synthetic oligonucleotide
  Antisense strand to SEQ ID NO: 2472004
uaauuuaccgaacacuuug

SEQ ID NO: 2472006 - RNA, 19 nt, Artificial Sequence
  Description of Artificial Sequence: Synthetic oligonucleotide
  Sense strand starting at position 1789 of SEQ ID NO: 1887431
uggcuuugaaacugaagga

SEQ ID NO: 2472007 - RNA, 19 nt, Artificial Sequence
  Description of Artificial Sequence: Synthetic oligonucleotide
  Antisense strand to SEQ ID NO: 2472006
uccuucaguuucaaagcca

SEQ ID NO: 2472008 - RNA, 19 nt, Artificial Sequence
  Description of Artificial Sequence: Synthetic oligonucleotide
  Sense strand starting at position 2098 of SEQ ID NO: 1887431
cugaguagccucgcgcuaa

SEQ ID NO: 2472009 - RNA, 19 nt, Artificial Sequence
  Description of Artificial Sequence: Synthetic oligonucleotide
  Antisense strand to SEQ ID NO: 2472008
uuagcgcgaggcuacucag

SEQ ID NO: 2472010 - RNA, 19 nt, Artificial Sequence
  Description of Artificial Sequence: Synthetic oligonucleotide
  Sense strand starting at position 2306 of SEQ ID NO: 1887431
cuggaaguacuuugaagau

SEQ ID NO: 2472011 - RNA, 19 nt, Artificial Sequence
  Description of Artificial Sequence: Synthetic oligonucleotide
  Antisense strand to SEQ ID NO: 2472010
aucuucaaaguacuuccag

SEQ ID NO: 2472012 - RNA, 19 nt, Artificial Sequence
  Description of Artificial Sequence: Synthetic oligonucleotide
  Sense strand starting at position 2577 of SEQ ID NO: 1887431
aggguaaacuugcuaggaa

SEQ ID NO: 2472013 - RNA, 19 nt, Artificial Sequence
  Description of Artificial Sequence: Synthetic oligonucleotide
  Antisense strand to SEQ ID NO: 2472012
uuccuagcaaguuuacccu

SEQ ID NO: 2472014 - RNA, 19 nt, Artificial Sequence
  Description of Artificial Sequence: Synthetic oligonucleotide
  Sense strand starting at position 2580 of SEQ ID NO: 1887431
guaaacuugcuaggaaucu

SEQ ID NO: 2472015 - RNA, 19 nt, Artificial Sequence
  Description of Artificial Sequence: Synthetic oligonucleotide
  Antisense strand to SEQ ID NO: 2472014
agauuccuagcaaguuuac

SEQ ID NO: 2472016 - RNA, 19 nt, Artificial Sequence
  Description of Artificial Sequence: Synthetic oligonucleotide
  Sense strand starting at position 2632 of SEQ ID NO: 1887431
gguuagauggauggugaga

SEQ ID NO: 2472017 - RNA, 19 nt, Artificial Sequence
  Description of Artificial Sequence: Synthetic oligonucleotide
  Antisense strand to SEQ ID NO: 2472016
ucucaccauccaucuaacc

SEQ ID NO: 2472018 - RNA, 19 nt, Artificial Sequence
  Description of Artificial Sequence: Synthetic oligonucleotide
  Sense strand starting at position 2651 of SEQ ID NO: 1887431
gguaauauuccaggcaagg

SEQ ID NO: 2472019 - RNA, 19 nt, Artificial Sequence
  Description of Artificial Sequence: Synthetic oligonucleotide
  Antisense strand to SEQ ID NO: 2472018
ccuugccuggaauauuacc

SEQ ID NO: 2472020 - RNA, 19 nt, Artificial Sequence
  Description of Artificial Sequence: Synthetic oligonucleotide
  Sense strand starting at position 2733 of SEQ ID NO: 1887431
caugauguaccaggcaaga

SEQ ID NO: 2472021 - RNA, 19 nt, Artificial Sequence
  Description of Artificial Sequence: Synthetic oligonucleotide
  Antisense strand to SEQ ID NO: 2472020
ucuugccugguacaucaug

SEQ ID NO: 2472022 - RNA, 19 nt, Artificial Sequence
  Description of Artificial Sequence: Synthetic oligonucleotide
  Sense strand starting at position 2920 of SEQ ID NO: 1887431
gucagauaaugacuagcua

SEQ ID NO: 2472023 - RNA, 19 nt, Artificial Sequence
  Description of Artificial Sequence: Synthetic oligonucleotide
  Antisense strand to SEQ ID NO: 2472022
uagcuagucauuaucugac

SEQ ID NO: 2472024 - RNA, 19 nt, Artificial Sequence
  Description of Artificial Sequence: Synthetic oligonucleotide
  Sense strand starting at position 2994 of SEQ ID NO: 1887431
caauuacaaguguggugaa

SEQ ID NO: 2472025 - RNA, 19 nt, Artificial Sequence
  Description of Artificial Sequence: Synthetic oligonucleotide
  Antisense strand to SEQ ID NO: 2472024
uucaccacacuuguaauug

SEQ ID NO: 2472026 - RNA, 19 nt, Artificial Sequence
  Description of Artificial Sequence: Synthetic oligonucleotide
  Sense strand starting at position 3269 of SEQ ID NO: 1887431
gagauccauuuaggaggau

SEQ ID NO: 2472027 - RNA, 19 nt, Artificial Sequence
  Description of Artificial Sequence: Synthetic oligonucleotide
  Antisense strand to SEQ ID NO: 2472026
auccuccuaaauggaucuc

SEQ ID NO: 2472028 - RNA, 19 nt, Artificial Sequence
  Description of Artificial Sequence: Synthetic oligonucleotide
  Sense strand starting at position 3290 of SEQ ID NO: 1887431
uguggugauccaggaacua

SEQ ID NO: 2472029 - RNA, 19 nt, Artificial Sequence
  Description of Artificial Sequence: Synthetic oligonucleotide
  Antisense strand to SEQ ID NO: 2472028
uaguuccuggaucaccaca

SEQ ID NO: 2472030 - RNA, 19 nt, Artificial Sequence
  Description of Artificial Sequence: Synthetic oligonucleotide
  Sense strand starting at position 3373 of SEQ ID NO: 1887431
ccaauuuagugagaugaca

SEQ ID NO: 2472031 - RNA, 19 nt, Artificial Sequence
  Description of Artificial Sequence: Synthetic oligonucleotide
  Antisense strand to SEQ ID NO: 2472030
ugucaucucacuaaauugg

SEQ ID NO: 2472032 - RNA, 19 nt, Artificial Sequence
  Description of Artificial Sequence: Synthetic oligonucleotide
  Sense strand starting at position 3476 of SEQ ID NO: 1887431
gauauaguagaucgugaga

SEQ ID NO: 2472033 - RNA, 19 nt, Artificial Sequence
  Description of Artificial Sequence: Synthetic oligonucleotide
  Antisense strand to SEQ ID NO: 2472032
ucucacgaucuacuauauc

SEQ ID NO: 2472034 - RNA, 19 nt, Artificial Sequence
  Description of Artificial Sequence: Synthetic oligonucleotide
  Sense strand starting at position 3493 of SEQ ID NO: 1887431
gagggaugagccuggaacu

SEQ ID NO: 2472035 - RNA, 19 nt, Artificial Sequence
  Description of Artificial Sequence: Synthetic oligonucleotide
  Antisense strand to SEQ ID NO: 2472034
aguuccaggcucaucccuc

SEQ ID NO: 2472036 - RNA, 19 nt, Artificial Sequence
  Description of Artificial Sequence: Synthetic oligonucleotide
  Sense strand starting at position 3494 of SEQ ID NO: 1887431
agggaugagccuggaacua

SEQ ID NO: 2472037 - RNA, 19 nt, Artificial Sequence
  Description of Artificial Sequence: Synthetic oligonucleotide
  Antisense strand to SEQ ID NO: 2472036
uaguuccaggcucaucccu

SEQ ID NO: 2472038 - RNA, 19 nt, Artificial Sequence
  Description of Artificial Sequence: Synthetic oligonucleotide
  Sense strand starting at position 3547 of SEQ ID NO: 1887431
gagucaucagauuggguga

SEQ ID NO: 2472039 - RNA, 19 nt, Artificial Sequence
  Description of Artificial Sequence: Synthetic oligonucleotide
  Antisense strand to SEQ ID NO: 2472038
ucacccaaucugaugacuc

SEQ ID NO: 2472040 - RNA, 19 nt, Artificial Sequence
  Description of Artificial Sequence: Synthetic oligonucleotide
  Sense strand starting at position 3548 of SEQ ID NO: 1887431
agucaucagauugggugau

SEQ ID NO: 2472041 - RNA, 19 nt, Artificial Sequence
  Description of Artificial Sequence: Synthetic oligonucleotide
  Antisense strand to SEQ ID NO: 2472040
aucacccaaucugaugacu

SEQ ID NO: 2472042 - RNA, 19 nt, Artificial Sequence
  Description of Artificial Sequence: Synthetic oligonucleotide
  Sense strand starting at position 3552 of SEQ ID NO: 1887431
aucagauugggugauaguu

SEQ ID NO: 2472043 - RNA, 19 nt, Artificial Sequence
  Description of Artificial Sequence: Synthetic oligonucleotide
  Antisense strand to SEQ ID NO: 2472042
aacuaucacccaaucugau

SEQ ID NO: 2472044 - RNA, 19 nt, Artificial Sequence
  Description of Artificial Sequence: Synthetic oligonucleotide
  Sense strand starting at position 3601 of SEQ ID NO: 1887431
aaagguguugcagaaacau

SEQ ID NO: 2472045 - RNA, 19 nt, Artificial Sequence
  Description of Artificial Sequence: Synthetic oligonucleotide
  Antisense strand to SEQ ID NO: 2472044
auguuucugcaacaccuuu

SEQ ID NO: 2472046 - RNA, 19 nt, Artificial Sequence
  Description of Artificial Sequence: Synthetic oligonucleotide
  Sense strand starting at position 3659 of SEQ ID NO: 1887431
gaggcacaguaauuacauu

SEQ ID NO: 2472047 - RNA, 19 nt, Artificial Sequence
  Description of Artificial Sequence: Synthetic oligonucleotide
  Antisense strand to SEQ ID NO: 2472046
aauguaauuacugugccuc

SEQ ID NO: 2472048 - RNA, 19 nt, Artificial Sequence
  Description of Artificial Sequence: Synthetic oligonucleotide
  Sense strand starting at position 1998 of SEQ ID NO: 1887432
cucugcaauccuuacguca

SEQ ID NO: 2472049 - RNA, 19 nt, Artificial Sequence
  Description of Artificial Sequence: Synthetic oligonucleotide
  Antisense strand to SEQ ID NO: 2472048
ugacguaaggauugcagag

SEQ ID NO: 2472050 - RNA, 19 nt, Artificial Sequence
  Description of Artificial Sequence: Synthetic oligonucleotide
  Sense strand starting at position 2001 of SEQ ID NO: 1887432
ugcaauccuuacgucauuu

SEQ ID NO: 2472051 - RNA, 19 nt, Artificial Sequence
  Description of Artificial Sequence: Synthetic oligonucleotide
  Antisense strand to SEQ ID NO: 2472050
aaaugacguaaggauugca

SEQ ID NO: 2472052 - RNA, 19 nt, Artificial Sequence
  Description of Artificial Sequence: Synthetic oligonucleotide
  Sense strand starting at position 2211 of SEQ ID NO: 1887432
ucaaauaugccugguugca

SEQ ID NO: 2472053 - RNA, 19 nt, Artificial Sequence
  Description of Artificial Sequence: Synthetic oligonucleotide
  Antisense strand to SEQ ID NO: 2472052
ugcaaccaggcauauuuga

SEQ ID NO: 2472054 - RNA, 19 nt, Artificial Sequence
  Description of Artificial Sequence: Synthetic oligonucleotide
  Sense strand starting at position 2223 of SEQ ID NO: 1887432
gguugcaugauauaagucu

SEQ ID NO: 2472055 - RNA, 19 nt, Artificial Sequence
  Description of Artificial Sequence: Synthetic oligonucleotide
  Antisense strand to SEQ ID NO: 2472054
agacuuauaucaugcaacc

SEQ ID NO: 2472056 - RNA, 19 nt, Artificial Sequence
  Description of Artificial Sequence: Synthetic oligonucleotide
  Sense strand starting at position 2300 of SEQ ID NO: 1887432
agaaccuaacuguauuagu

SEQ ID NO: 2472057 - RNA, 19 nt, Artificial Sequence
  Description of Artificial Sequence: Synthetic oligonucleotide
  Antisense strand to SEQ ID NO: 2472056
acuaauacaguuagguucu

SEQ ID NO: 2472058 - RNA, 19 nt, Artificial Sequence
  Description of Artificial Sequence: Synthetic oligonucleotide
  Sense strand starting at position 2355 of SEQ ID NO: 1887432
gcuacaugacaaggguuua

SEQ ID NO: 2472059 - RNA, 19 nt, Artificial Sequence
  Description of Artificial Sequence: Synthetic oligonucleotide
  Antisense strand to SEQ ID NO: 2472058
uaaacccuugucauguagc

SEQ ID NO: 2472060 - RNA, 19 nt, Artificial Sequence
  Description of Artificial Sequence: Synthetic oligonucleotide
  Sense strand starting at position 2368 of SEQ ID NO: 1887432
gguuuacuggaaggacuau

SEQ ID NO: 2472061 - RNA, 19 nt, Artificial Sequence
  Description of Artificial Sequence: Synthetic oligonucleotide
  Antisense strand to SEQ ID NO: 2472060
auaguccuuccaguaaacc

SEQ ID NO: 2472062 - RNA, 19 nt, Artificial Sequence
  Description of Artificial Sequence: Synthetic oligonucleotide
  Sense strand starting at position 2379 of SEQ ID NO: 1887432
aggacuauuuaacgagaca

SEQ ID NO: 2472063 - RNA, 19 nt, Artificial Sequence
  Description of Artificial Sequence: Synthetic oligonucleotide
  Antisense strand to SEQ ID NO: 2472062
ugucucguuaaauaguccu

SEQ ID NO: 2472064 - RNA, 19 nt, Artificial Sequence
  Description of Artificial Sequence: Synthetic oligonucleotide
  Sense strand starting at position 2392 of SEQ ID NO: 1887432
gagacaggucaggguuaaa

SEQ ID NO: 2472065 - RNA, 19 nt, Artificial Sequence
  Description of Artificial Sequence: Synthetic oligonucleotide
  Antisense strand to SEQ ID NO: 2472064
uuuaacccugaccugucuc

SEQ ID NO: 2472066 - RNA, 19 nt, Artificial Sequence
  Description of Artificial Sequence: Synthetic oligonucleotide
  Sense strand starting at position 2490 of SEQ ID NO: 1887432
ggagguuuguuuccagugu

SEQ ID NO: 2472067 - RNA, 19 nt, Artificial Sequence
  Description of Artificial Sequence: Synthetic oligonucleotide
  Antisense strand to SEQ ID NO: 2472066
acacuggaaacaaaccucc

SEQ ID NO: 2472068 - RNA, 19 nt, Artificial Sequence
  Description of Artificial Sequence: Synthetic oligonucleotide
  Sense strand starting at position 2510 of SEQ ID NO: 1887432
aagcgaaagcuguagccau

SEQ ID NO: 2472069 - RNA, 19 nt, Artificial Sequence
  Description of Artificial Sequence: Synthetic oligonucleotide
  Antisense strand to SEQ ID NO: 2472068
auggcuacagcuuucgcuu

SEQ ID NO: 2472070 - RNA, 19 nt, Artificial Sequence
  Description of Artificial Sequence: Synthetic oligonucleotide
  Sense strand starting at position 2691 of SEQ ID NO: 1887432
caugucacauugcuggaau

SEQ ID NO: 2472071 - RNA, 19 nt, Artificial Sequence
  Description of Artificial Sequence: Synthetic oligonucleotide
  Antisense strand to SEQ ID NO: 2472070
auuccagcaaugugacaug

SEQ ID NO: 2472072 - RNA, 19 nt, Artificial Sequence
  Description of Artificial Sequence: Synthetic oligonucleotide
  Sense strand starting at position 2703 of SEQ ID NO: 1887432
cuggaauuggaguguagga

SEQ ID NO: 2472073 - RNA, 19 nt, Artificial Sequence
  Description of Artificial Sequence: Synthetic oligonucleotide
  Antisense strand to SEQ ID NO: 2472072
uccuacacuccaauuccag

SEQ ID NO: 2472074 - RNA, 19 nt, Artificial Sequence
  Description of Artificial Sequence: Synthetic oligonucleotide
  Sense strand starting at position 2710 of SEQ ID NO: 1887432
uggaguguaggaugaagua

SEQ ID NO: 2472075 - RNA, 19 nt, Artificial Sequence
  Description of Artificial Sequence: Synthetic oligonucleotide
  Antisense strand to SEQ ID NO: 2472074
uacuucauccuacacucca

SEQ ID NO: 2472076 - RNA, 19 nt, Artificial Sequence
  Description of Artificial Sequence: Synthetic oligonucleotide
  Sense strand starting at position 2738 of SEQ ID NO: 1887432
ucaugaagggccuaguaua

SEQ ID NO: 2472077 - RNA, 19 nt, Artificial Sequence
  Description of Artificial Sequence: Synthetic oligonucleotide
  Antisense strand to SEQ ID NO: 2472076
uauacuaggcccuucauga

SEQ ID NO: 2472078 - RNA, 19 nt, Artificial Sequence
  Description of Artificial Sequence: Synthetic oligonucleotide
  Sense strand starting at position 2835 of SEQ ID NO: 1887432
cuaauuaagucccuguguu

SEQ ID NO: 2472079 - RNA, 19 nt, Artificial Sequence
  Description of Artificial Sequence: Synthetic oligonucleotide
  Antisense strand to SEQ ID NO: 2472078
aacacagggacuuaauuag

SEQ ID NO: 2472080 - RNA, 19 nt, Artificial Sequence
  Description of Artificial Sequence: Synthetic oligonucleotide
  Sense strand starting at position 2975 of SEQ ID NO: 1887432
auauguuauggaggacacu

SEQ ID NO: 2472081 - RNA, 19 nt, Artificial Sequence
  Description of Artificial Sequence: Synthetic oligonucleotide
  Antisense strand to SEQ ID NO: 2472080
aguguccuccauaacauau

SEQ ID NO: 2472082 - RNA, 19 nt, Artificial Sequence
  Description of Artificial Sequence: Synthetic oligonucleotide
  Sense strand starting at position 3060 of SEQ ID NO: 1887432
ggaagagguucagaaagca

SEQ ID NO: 2472083 - RNA, 19 nt, Artificial Sequence
  Description of Artificial Sequence: Synthetic oligonucleotide
  Antisense strand to SEQ ID NO: 2472082
ugcuuucugaaccucuucc

SEQ ID NO: 2472084 - RNA, 19 nt, Artificial Sequence
  Description of Artificial Sequence: Synthetic oligonucleotide
  Sense strand starting at position 3093 of SEQ ID NO: 1887432
ggaauugaacaguggagua

SEQ ID NO: 2472085 - RNA, 19 nt, Artificial Sequence
  Description of Artificial Sequence: Synthetic oligonucleotide
  Antisense strand to SEQ ID NO: 2472084
uacuccacuguucaauucc

SEQ ID NO: 2472086 - RNA, 19 nt, Artificial Sequence
  Description of Artificial Sequence: Synthetic oligonucleotide
  Sense strand starting at position 3146 of SEQ ID NO: 1887432
gaaugauugcacugggcua

SEQ ID NO: 2472087 - RNA, 19 nt, Artificial Sequence
  Description of Artificial Sequence: Synthetic oligonucleotide
  Antisense strand to SEQ ID NO: 2472086
uagcccagugcaaucauuc

SEQ ID NO: 2472088 - RNA, 19 nt, Artificial Sequence
  Description of Artificial Sequence: Synthetic oligonucleotide
  Sense strand starting at position 3148 of SEQ ID NO: 1887432
augauugcacugggcuaaa

SEQ ID NO: 2472089 - RNA, 19 nt, Artificial Sequence
  Description of Artificial Sequence: Synthetic oligonucleotide
  Antisense strand to SEQ ID NO: 2472088
uuuagcccagugcaaucau

SEQ ID NO: 2472090 - RNA, 19 nt, Artificial Sequence
  Description of Artificial Sequence: Synthetic oligonucleotide
  Sense strand starting at position 3180 of SEQ ID NO: 1887432
ccugaauuccagcaagcaa

SEQ ID NO: 2472091 - RNA, 19 nt, Artificial Sequence
  Description of Artificial Sequence: Synthetic oligonucleotide
  Antisense strand to SEQ ID NO: 2472090
uugcuugcuggaauucagg

SEQ ID NO: 2472092 - RNA, 19 nt, Artificial Sequence
  Description of Artificial Sequence: Synthetic oligonucleotide
  Sense strand starting at position 3343 of SEQ ID NO: 1887432
ugaauaaucuguucugcuu

SEQ ID NO: 2472093 - RNA, 19 nt, Artificial Sequence
  Description of Artificial Sequence: Synthetic oligonucleotide
  Antisense strand to SEQ ID NO: 2472092
aagcagaacagauuauuca

SEQ ID NO: 2472094 - RNA, 19 nt, Artificial Sequence
  Description of Artificial Sequence: Synthetic oligonucleotide
  Sense strand starting at position 3369 of SEQ ID NO: 1887432
acucuugcccauugaagua

SEQ ID NO: 2472095 - RNA, 19 nt, Artificial Sequence
  Description of Artificial Sequence: Synthetic oligonucleotide
  Antisense strand to SEQ ID NO: 2472094
uacuucaaugggcaagagu

SEQ ID NO: 2472096 - RNA, 19 nt, Artificial Sequence
  Description of Artificial Sequence: Synthetic oligonucleotide
  Sense strand starting at position 3399 of SEQ ID NO: 1887432
cucagaagcuucuccaaag

SEQ ID NO: 2472097 - RNA, 19 nt, Artificial Sequence
  Description of Artificial Sequence: Synthetic oligonucleotide
  Antisense strand to SEQ ID NO: 2472096
cuuuggagaagcuucugag

SEQ ID NO: 2472098 - RNA, 19 nt, Artificial Sequence
  Description of Artificial Sequence: Synthetic oligonucleotide
  Sense strand starting at position 3400 of SEQ ID NO: 1887432
ucagaagcuucuccaaaga

SEQ ID NO: 2472099 - RNA, 19 nt, Artificial Sequence
  Description of Artificial Sequence: Synthetic oligonucleotide
  Antisense strand to SEQ ID NO: 2472098
ucuuuggagaagcuucuga

SEQ ID NO: 2472100 - RNA, 19 nt, Artificial Sequence
  Description of Artificial Sequence: Synthetic oligonucleotide
  Sense strand starting at position 3531 of SEQ ID NO: 1887432
uuuguauccgaacacacau

SEQ ID NO: 2472101 - RNA, 19 nt, Artificial Sequence
  Description of Artificial Sequence: Synthetic oligonucleotide
  Antisense strand to SEQ ID NO: 2472100
auguguguucggauacaaa

SEQ ID NO: 2472102 - RNA, 19 nt, Artificial Sequence
  Description of Artificial Sequence: Synthetic oligonucleotide
  Sense strand starting at position 3634 of SEQ ID NO: 1887432
agcagcauggcucauacaa

SEQ ID NO: 2472103 - RNA, 19 nt, Artificial Sequence
  Description of Artificial Sequence: Synthetic oligonucleotide
  Antisense strand to SEQ ID NO: 2472102
uuguaugagccaugcugcu

SEQ ID NO: 2472104 - RNA, 19 nt, Artificial Sequence
  Description of Artificial Sequence: Synthetic oligonucleotide
  Sense strand starting at position 3679 of SEQ ID NO: 1887432
agcucuauuggcuacuaua

SEQ ID NO: 2472105 - RNA, 19 nt, Artificial Sequence
  Description of Artificial Sequence: Synthetic oligonucleotide
  Antisense strand to SEQ ID NO: 2472104
uauaguagccaauagagcu

SEQ ID NO: 2472106 - RNA, 19 nt, Artificial Sequence
  Description of Artificial Sequence: Synthetic oligonucleotide
  Sense strand starting at position 3811 of SEQ ID NO: 1887432
cuaagucaguuauugcuuu

SEQ ID NO: 2472107 - RNA, 19 nt, Artificial Sequence
  Description of Artificial Sequence: Synthetic oligonucleotide
  Antisense strand to SEQ ID NO: 2472106
aaagcaauaacugacuuag

SEQ ID NO: 2472108 - RNA, 19 nt, Artificial Sequence
  Description of Artificial Sequence: Synthetic oligonucleotide
  Sense strand starting at position 3818 of SEQ ID NO: 1887432
aguuauugcuuucuaucca

SEQ ID NO: 2472109 - RNA, 19 nt, Artificial Sequence
  Description of Artificial Sequence: Synthetic oligonucleotide
  Antisense strand to SEQ ID NO: 2472108
uggauagaaagcaauaacu

SEQ ID NO: 2472110 - RNA, 19 nt, Artificial Sequence
  Description of Artificial Sequence: Synthetic oligonucleotide
  Sense strand starting at position 3864 of SEQ ID NO: 1887432
agcuuaacucguggacaau

SEQ ID NO: 2472111 - RNA, 19 nt, Artificial Sequence
  Description of Artificial Sequence: Synthetic oligonucleotide
  Antisense strand to SEQ ID NO: 2472110
auuguccacgaguuaagcu

SEQ ID NO: 2472112 - RNA, 19 nt, Artificial Sequence
  Description of Artificial Sequence: Synthetic oligonucleotide
  Sense strand starting at position 3865 of SEQ ID NO: 1887432
gcuuaacucguggacaaua

SEQ ID NO: 2472113 - RNA, 19 nt, Artificial Sequence
  Description of Artificial Sequence: Synthetic oligonucleotide
  Antisense strand to SEQ ID NO: 2472112
uauuguccacgaguuaagc

SEQ ID NO: 2472114 - RNA, 19 nt, Artificial Sequence
  Description of Artificial Sequence: Synthetic oligonucleotide
  Sense strand starting at position 3867 of SEQ ID NO: 1887432
uuaacucguggacaauaua

SEQ ID NO: 2472115 - RNA, 19 nt, Artificial Sequence
  Description of Artificial Sequence: Synthetic oligonucleotide
  Antisense strand to SEQ ID NO: 2472114
uauauuguccacgaguuaa

SEQ ID NO: 2472116 - RNA, 19 nt, Artificial Sequence
  Description of Artificial Sequence: Synthetic oligonucleotide
  Sense strand starting at position 3875 of SEQ ID NO: 1887432
uggacaauauaugauggua

SEQ ID NO: 2472117 - RNA, 19 nt, Artificial Sequence
  Description of Artificial Sequence: Synthetic oligonucleotide
  Antisense strand to SEQ ID NO: 2472116
uaccaucauauauugucca

SEQ ID NO: 2472118 - RNA, 19 nt, Artificial Sequence
  Description of Artificial Sequence: Synthetic oligonucleotide
  Sense strand starting at position 3887 of SEQ ID NO: 1887432
gaugguaugcacgguucua

SEQ ID NO: 2472119 - RNA, 19 nt, Artificial Sequence
  Description of Artificial Sequence: Synthetic oligonucleotide
  Antisense strand to SEQ ID NO: 2472118
uagaaccgugcauaccauc

SEQ ID NO: 2472120 - RNA, 19 nt, Artificial Sequence
  Description of Artificial Sequence: Synthetic oligonucleotide
  Sense strand starting at position 3899 of SEQ ID NO: 1887432
gguucuauuugcuuaucuu

SEQ ID NO: 2472121 - RNA, 19 nt, Artificial Sequence
  Description of Artificial Sequence: Synthetic oligonucleotide
  Antisense strand to SEQ ID NO: 2472120
aagauaagcaaauagaacc

SEQ ID NO: 2472122 - RNA, 19 nt, Artificial Sequence
  Description of Artificial Sequence: Synthetic oligonucleotide
  Sense strand starting at position 3902 of SEQ ID NO: 1887432
ucuauuugcuuaucuugua

SEQ ID NO: 2472123 - RNA, 19 nt, Artificial Sequence
  Description of Artificial Sequence: Synthetic oligonucleotide
  Antisense strand to SEQ ID NO: 2472122
uacaagauaagcaaauaga

SEQ ID NO: 2472124 - RNA, 19 nt, Artificial Sequence
  Description of Artificial Sequence: Synthetic oligonucleotide
  Sense strand starting at position 3903 of SEQ ID NO: 1887432
cuauuugcuuaucuuguau

SEQ ID NO: 2472125 - RNA, 19 nt, Artificial Sequence
  Description of Artificial Sequence: Synthetic oligonucleotide
  Antisense strand to SEQ ID NO: 2472124
auacaagauaagcaaauag

SEQ ID NO: 2472126 - RNA, 19 nt, Artificial Sequence
  Description of Artificial Sequence: Synthetic oligonucleotide
  Sense strand starting at position 3916 of SEQ ID NO: 1887432
uuguauacauucuggauuu

SEQ ID NO: 2472127 - RNA, 19 nt, Artificial Sequence
  Description of Artificial Sequence: Synthetic oligonucleotide
  Antisense strand to SEQ ID NO: 2472126
aaauccagaauguauacaa

SEQ ID NO: 2472128 - RNA, 19 nt, Artificial Sequence
  Description of Artificial Sequence: Synthetic oligonucleotide
  Sense strand starting at position 168 of SEQ ID NO: 1887433
ucuuuaauguuugcgacaa

SEQ ID NO: 2472129 - RNA, 19 nt, Artificial Sequence
  Description of Artificial Sequence: Synthetic oligonucleotide
  Antisense strand to SEQ ID NO: 2472128
uugucgcaaacauuaaaga

SEQ ID NO: 2472130 - RNA, 19 nt, Artificial Sequence
  Description of Artificial Sequence: Synthetic oligonucleotide
  Sense strand starting at position 172 of SEQ ID NO: 1887433
uaauguuugcgacaagugu

SEQ ID NO: 2472131 - RNA, 19 nt, Artificial Sequence
  Description of Artificial Sequence: Synthetic oligonucleotide
  Antisense strand to SEQ ID NO: 2472130
acacuugucgcaaacauua

SEQ ID NO: 2472132 - RNA, 19 nt, Artificial Sequence
  Description of Artificial Sequence: Synthetic oligonucleotide
  Sense strand starting at position 183 of SEQ ID NO: 1887433
acaagugucucaucuggau

SEQ ID NO: 2472133 - RNA, 19 nt, Artificial Sequence
  Description of Artificial Sequence: Synthetic oligonucleotide
  Antisense strand to SEQ ID NO: 2472132
auccagaugagacacuugu

SEQ ID NO: 2472134 - RNA, 19 nt, Artificial Sequence
  Description of Artificial Sequence: Synthetic oligonucleotide
  Sense strand starting at position 195 of SEQ ID NO: 1887433
ucuggauucucgucuacua

SEQ ID NO: 2472135 - RNA, 19 nt, Artificial Sequence
  Description of Artificial Sequence: Synthetic oligonucleotide
  Antisense strand to SEQ ID NO: 2472134
uaguagacgagaauccaga

SEQ ID NO: 2472136 - RNA, 19 nt, Artificial Sequence
  Description of Artificial Sequence: Synthetic oligonucleotide
  Sense strand starting at position 197 of SEQ ID NO: 1887433
uggauucucgucuacuaca

SEQ ID NO: 2472137 - RNA, 19 nt, Artificial Sequence
  Description of Artificial Sequence: Synthetic oligonucleotide
  Antisense strand to SEQ ID NO: 2472136
uguaguagacgagaaucca

SEQ ID NO: 2472138 - RNA, 19 nt, Artificial Sequence
  Description of Artificial Sequence: Synthetic oligonucleotide
  Sense strand starting at position 219 of SEQ ID NO: 1887433
ugguguuuaagugauucuu

SEQ ID NO: 2472139 - RNA, 19 nt, Artificial Sequence
  Description of Artificial Sequence: Synthetic oligonucleotide
  Antisense strand to SEQ ID NO: 2472138
aagaaucacuuaaacacca

SEQ ID NO: 2472140 - RNA, 19 nt, Artificial Sequence
  Description of Artificial Sequence: Synthetic oligonucleotide
  Sense strand starting at position 244 of SEQ ID NO: 1887433
aacauuaacgccuaucgua

SEQ ID NO: 2472141 - RNA, 19 nt, Artificial Sequence
  Description of Artificial Sequence: Synthetic oligonucleotide
  Antisense strand to SEQ ID NO: 2472140
uacgauaggcguuaauguu

SEQ ID NO: 2472142 - RNA, 19 nt, Artificial Sequence
  Description of Artificial Sequence: Synthetic oligonucleotide
  Sense strand starting at position 257 of SEQ ID NO: 1887433
aucguaaacgcucaacaaa

SEQ ID NO: 2472143 - RNA, 19 nt, Artificial Sequence
  Description of Artificial Sequence: Synthetic oligonucleotide
  Antisense strand to SEQ ID NO: 2472142
uuuguugagcguuuacgau

SEQ ID NO: 2472144 - RNA, 19 nt, Artificial Sequence
  Description of Artificial Sequence: Synthetic oligonucleotide
  Sense strand starting at position 260 of SEQ ID NO: 1887433
guaaacgcucaacaaauau

SEQ ID NO: 2472145 - RNA, 19 nt, Artificial Sequence
  Description of Artificial Sequence: Synthetic oligonucleotide
  Antisense strand to SEQ ID NO: 2472144
auauuuguugagcguuuac

SEQ ID NO: 2472146 - RNA, 19 nt, Artificial Sequence
  Description of Artificial Sequence: Synthetic oligonucleotide
  Sense strand starting at position 288 of SEQ ID NO: 1887433
ccaaucuguaggcaggaau

SEQ ID NO: 2472147 - RNA, 19 nt, Artificial Sequence
  Description of Artificial Sequence: Synthetic oligonucleotide
  Antisense strand to SEQ ID NO: 2472146
auuccugccuacagauugg

SEQ ID NO: 2472148 - RNA, 19 nt, Artificial Sequence
  Description of Artificial Sequence: Synthetic oligonucleotide
  Sense strand starting at position 301 of SEQ ID NO: 1887433
aggaaucaagcccgugaga

SEQ ID NO: 2472149 - RNA, 19 nt, Artificial Sequence
  Description of Artificial Sequence: Synthetic oligonucleotide
  Antisense strand to SEQ ID NO: 2472148
ucucacgggcuugauuccu

SEQ ID NO: 2472150 - RNA, 19 nt, Artificial Sequence
  Description of Artificial Sequence: Synthetic oligonucleotide
  Sense strand starting at position 303 of SEQ ID NO: 1887433
gaaucaagcccgugagaaa

SEQ ID NO: 2472151 - RNA, 19 nt, Artificial Sequence
  Description of Artificial Sequence: Synthetic oligonucleotide
  Antisense strand to SEQ ID NO: 2472150
uuucucacgggcuugauuc

SEQ ID NO: 2472152 - RNA, 19 nt, Artificial Sequence
  Description of Artificial Sequence: Synthetic oligonucleotide
  Sense strand starting at position 390 of SEQ ID NO: 1887433
cguuacuacucaucucaga

SEQ ID NO: 2472153 - RNA, 19 nt, Artificial Sequence
  Description of Artificial Sequence: Synthetic oligonucleotide
  Antisense strand to SEQ ID NO: 2472152
ucugagaugaguaguaacg

SEQ ID NO: 2472154 - RNA, 19 nt, Artificial Sequence
  Description of Artificial Sequence: Synthetic oligonucleotide
  Sense strand starting at position 2564 of SEQ ID NO: 1887433
gcuuccgugcgguccuaaa

SEQ ID NO: 2472155 - RNA, 19 nt, Artificial Sequence
  Description of Artificial Sequence: Synthetic oligonucleotide
  Antisense strand to SEQ ID NO: 2472154
uuuaggaccgcacggaagc

SEQ ID NO: 2472156 - RNA, 19 nt, Artificial Sequence
  Description of Artificial Sequence: Synthetic oligonucleotide
  Sense strand starting at position 2826 of SEQ ID NO: 1887433
ggguuucuccgaagugagu

SEQ ID NO: 2472157 - RNA, 19 nt, Artificial Sequence
  Description of Artificial Sequence: Synthetic oligonucleotide
  Antisense strand to SEQ ID NO: 2472156
acucacuucggagaaaccc

SEQ ID NO: 2472158 - RNA, 19 nt, Artificial Sequence
  Description of Artificial Sequence: Synthetic oligonucleotide
  Sense strand starting at position 2915 of SEQ ID NO: 1887433
ugucucccaccuugugaaa

SEQ ID NO: 2472159 - RNA, 19 nt, Artificial Sequence
  Description of Artificial Sequence: Synthetic oligonucleotide
  Antisense strand to SEQ ID NO: 2472158
uuucacaaggugggagaca

SEQ ID NO: 2472160 - RNA, 19 nt, Artificial Sequence
  Description of Artificial Sequence: Synthetic oligonucleotide
  Sense strand starting at position 2926 of SEQ ID NO: 1887433
uugugaaacuuugccaggu

SEQ ID NO: 2472161 - RNA, 19 nt, Artificial Sequence
  Description of Artificial Sequence: Synthetic oligonucleotide
  Antisense strand to SEQ ID NO: 2472160
accuggcaaaguuucacaa

SEQ ID NO: 2472162 - RNA, 19 nt, Artificial Sequence
  Description of Artificial Sequence: Synthetic oligonucleotide
  Sense strand starting at position 3241 of SEQ ID NO: 1887433
aaugacauuucggugccua

SEQ ID NO: 2472163 - RNA, 19 nt, Artificial Sequence
  Description of Artificial Sequence: Synthetic oligonucleotide
  Antisense strand to SEQ ID NO: 2472162
uaggcaccgaaaugucauu

SEQ ID NO: 2472164 - RNA, 19 nt, Artificial Sequence
  Description of Artificial Sequence: Synthetic oligonucleotide
  Sense strand starting at position 3242 of SEQ ID NO: 1887433
augacauuucggugccuaa

SEQ ID NO: 2472165 - RNA, 19 nt, Artificial Sequence
  Description of Artificial Sequence: Synthetic oligonucleotide
  Antisense strand to SEQ ID NO: 2472164
uuaggcaccgaaaugucau

SEQ ID NO: 2472166 - RNA, 19 nt, Artificial Sequence
  Description of Artificial Sequence: Synthetic oligonucleotide
  Sense strand starting at position 3274 of SEQ ID NO: 1887433
cuuguucugcugugaauuu

SEQ ID NO: 2472167 - RNA, 19 nt, Artificial Sequence
  Description of Artificial Sequence: Synthetic oligonucleotide
  Antisense strand to SEQ ID NO: 2472166
aaauucacagcagaacaag

SEQ ID NO: 2472168 - RNA, 19 nt, Artificial Sequence
  Description of Artificial Sequence: Synthetic oligonucleotide
  Sense strand starting at position 3302 of SEQ ID NO: 1887433
ggaggaauuuaauaagcua

SEQ ID NO: 2472169 - RNA, 19 nt, Artificial Sequence
  Description of Artificial Sequence: Synthetic oligonucleotide
  Antisense strand to SEQ ID NO: 2472168
uagcuuauuaaauuccucc

SEQ ID NO: 2472170 - RNA, 19 nt, Artificial Sequence
  Description of Artificial Sequence: Synthetic oligonucleotide
  Sense strand starting at position 3325 of SEQ ID NO: 1887433
cuugacaggcuuuaaacuu

SEQ ID NO: 2472171 - RNA, 19 nt, Artificial Sequence
  Description of Artificial Sequence: Synthetic oligonucleotide
  Antisense strand to SEQ ID NO: 2472170
aaguuuaaagccugucaag

SEQ ID NO: 2472172 - RNA, 19 nt, Artificial Sequence
  Description of Artificial Sequence: Synthetic oligonucleotide
  Sense strand starting at position 3373 of SEQ ID NO: 1887433
gauuuaggcuuccaagaug

SEQ ID NO: 2472173 - RNA, 19 nt, Artificial Sequence
  Description of Artificial Sequence: Synthetic oligonucleotide
  Antisense strand to SEQ ID NO: 2472172
caucuuggaagccuaaauc

SEQ ID NO: 2472174 - RNA, 19 nt, Artificial Sequence
  Description of Artificial Sequence: Synthetic oligonucleotide
  Sense strand starting at position 3534 of SEQ ID NO: 1887433
cuacuacagcuauguagua

SEQ ID NO: 2472175 - RNA, 19 nt, Artificial Sequence
  Description of Artificial Sequence: Synthetic oligonucleotide
  Antisense strand to SEQ ID NO: 2472174
uacuacauagcuguaguag

SEQ ID NO: 2472176 - RNA, 19 nt, Artificial Sequence
  Description of Artificial Sequence: Synthetic oligonucleotide
  Sense strand starting at position 3541 of SEQ ID NO: 1887433
agcuauguaguaggaguau

SEQ ID NO: 2472177 - RNA, 19 nt, Artificial Sequence
  Description of Artificial Sequence: Synthetic oligonucleotide
  Antisense strand to SEQ ID NO: 2472176
auacuccuacuacauagcu

SEQ ID NO: 2472178 - RNA, 19 nt, Artificial Sequence
  Description of Artificial Sequence: Synthetic oligonucleotide
  Sense strand starting at position 3547 of SEQ ID NO: 1887433
guaguaggaguaugcagaa

SEQ ID NO: 2472179 - RNA, 19 nt, Artificial Sequence
  Description of Artificial Sequence: Synthetic oligonucleotide
  Antisense strand to SEQ ID NO: 2472178
uucugcauacuccuacuac

SEQ ID NO: 2472180 - RNA, 19 nt, Artificial Sequence
  Description of Artificial Sequence: Synthetic oligonucleotide
  Sense strand starting at position 3566 of SEQ ID NO: 1887433
agauaagaaucacauugua

SEQ ID NO: 2472181 - RNA, 19 nt, Artificial Sequence
  Description of Artificial Sequence: Synthetic oligonucleotide
  Antisense strand to SEQ ID NO: 2472180
uacaaugugauucuuaucu

SEQ ID NO: 2472182 - RNA, 19 nt, Artificial Sequence
  Description of Artificial Sequence: Synthetic oligonucleotide
  Sense strand starting at position 3644 of SEQ ID NO: 1887433
ucacaaguuuauguccuaa

SEQ ID NO: 2472183 - RNA, 19 nt, Artificial Sequence
  Description of Artificial Sequence: Synthetic oligonucleotide
  Antisense strand to SEQ ID NO: 2472182
uuaggacauaaacuuguga

SEQ ID NO: 2472184 - RNA, 19 nt, Artificial Sequence
  Description of Artificial Sequence: Synthetic oligonucleotide
  Sense strand starting at position 3646 of SEQ ID NO: 1887433
acaaguuuauguccuaaga

SEQ ID NO: 2472185 - RNA, 19 nt, Artificial Sequence
  Description of Artificial Sequence: Synthetic oligonucleotide
  Antisense strand to SEQ ID NO: 2472184
ucuuaggacauaaacuugu

SEQ ID NO: 2472186 - RNA, 19 nt, Artificial Sequence
  Description of Artificial Sequence: Synthetic oligonucleotide
  Sense strand starting at position 3691 of SEQ ID NO: 1887433
ugaacugaagccugaauca

SEQ ID NO: 2472187 - RNA, 19 nt, Artificial Sequence
  Description of Artificial Sequence: Synthetic oligonucleotide
  Antisense strand to SEQ ID NO: 2472186
ugauucaggcuucaguuca

SEQ ID NO: 2472188 - RNA, 19 nt, Artificial Sequence
  Description of Artificial Sequence: Synthetic oligonucleotide
  Sense strand starting at position 3778 of SEQ ID NO: 1887433
agucacucuuucuuguaau

SEQ ID NO: 2472189 - RNA, 19 nt, Artificial Sequence
  Description of Artificial Sequence: Synthetic oligonucleotide
  Antisense strand to SEQ ID NO: 2472188
auuacaagaaagagugacu

SEQ ID NO: 2472190 - RNA, 19 nt, Artificial Sequence
  Description of Artificial Sequence: Synthetic oligonucleotide
  Sense strand starting at position 3792 of SEQ ID NO: 1887433
guaauuugcuaguucuuua

SEQ ID NO: 2472191 - RNA, 19 nt, Artificial Sequence
  Description of Artificial Sequence: Synthetic oligonucleotide
  Antisense strand to SEQ ID NO: 2472190
uaaagaacuagcaaauuac

SEQ ID NO: 2472192 - RNA, 19 nt, Artificial Sequence
  Description of Artificial Sequence: Synthetic oligonucleotide
  Sense strand starting at position 3805 of SEQ ID NO: 1887433
ucuuuacagucuuuagaug

SEQ ID NO: 2472193 - RNA, 19 nt, Artificial Sequence
  Description of Artificial Sequence: Synthetic oligonucleotide
  Antisense strand to SEQ ID NO: 2472192
caucuaaagacuguaaaga

SEQ ID NO: 2472194 - RNA, 19 nt, Artificial Sequence
  Description of Artificial Sequence: Synthetic oligonucleotide
  Sense strand starting at position 3806 of SEQ ID NO: 1887433
cuuuacagucuuuagaugu

SEQ ID NO: 2472195 - RNA, 19 nt, Artificial Sequence
  Description of Artificial Sequence: Synthetic oligonucleotide
  Antisense strand to SEQ ID NO: 2472194
acaucuaaagacuguaaag

SEQ ID NO: 2472196 - RNA, 19 nt, Artificial Sequence
  Description of Artificial Sequence: Synthetic oligonucleotide
  Sense strand starting at position 3819 of SEQ ID NO: 1887433
agauguaauuuacagccaa

SEQ ID NO: 2472197 - RNA, 19 nt, Artificial Sequence
  Description of Artificial Sequence: Synthetic oligonucleotide
  Antisense strand to SEQ ID NO: 2472196
uuggcuguaaauuacaucu

SEQ ID NO: 2472198 - RNA, 19 nt, Artificial Sequence
  Description of Artificial Sequence: Synthetic oligonucleotide
  Sense strand starting at position 3851 of SEQ ID NO: 1887433
ugaggacuuauacgucauu

SEQ ID NO: 2472199 - RNA, 19 nt, Artificial Sequence
  Description of Artificial Sequence: Synthetic oligonucleotide
  Antisense strand to SEQ ID NO: 2472198
aaugacguauaaguccuca

SEQ ID NO: 2472200 - RNA, 19 nt, Artificial Sequence
  Description of Artificial Sequence: Synthetic oligonucleotide
  Sense strand starting at position 3890 of SEQ ID NO: 1887433
ucaacuacccugggaucuu

SEQ ID NO: 2472201 - RNA, 19 nt, Artificial Sequence
  Description of Artificial Sequence: Synthetic oligonucleotide
  Antisense strand to SEQ ID NO: 2472200
aagaucccaggguaguuga

SEQ ID NO: 2472202 - RNA, 19 nt, Artificial Sequence
  Description of Artificial Sequence: Synthetic oligonucleotide
  Sense strand starting at position 3901 of SEQ ID NO: 1887433
gggaucuucuacucauauc

SEQ ID NO: 2472203 - RNA, 19 nt, Artificial Sequence
  Description of Artificial Sequence: Synthetic oligonucleotide
  Antisense strand to SEQ ID NO: 2472202
gauaugaguagaagauccc

SEQ ID NO: 2472204 - RNA, 19 nt, Artificial Sequence
  Description of Artificial Sequence: Synthetic oligonucleotide
  Sense strand starting at position 3942 of SEQ ID NO: 1887433
uaaagcuuagggugaaaua

SEQ ID NO: 2472205 - RNA, 19 nt, Artificial Sequence
  Description of Artificial Sequence: Synthetic oligonucleotide
  Antisense strand to SEQ ID NO: 2472204
uauuucacccuaagcuuua

SEQ ID NO: 2472206 - RNA, 19 nt, Artificial Sequence
  Description of Artificial Sequence: Synthetic oligonucleotide
  Sense strand starting at position 3954 of SEQ ID NO: 1887433
ugaaauacuuaggcaacua

SEQ ID NO: 2472207 - RNA, 19 nt, Artificial Sequence
  Description of Artificial Sequence: Synthetic oligonucleotide
  Antisense strand to SEQ ID NO: 2472206
uaguugccuaaguauuuca

SEQ ID NO: 2472208 - RNA, 19 nt, Artificial Sequence
  Description of Artificial Sequence: Synthetic oligonucleotide
  Sense strand starting at position 274 of SEQ ID NO: 1887434
gccuucucugacuggaaac

SEQ ID NO: 2472209 - RNA, 19 nt, Artificial Sequence
  Description of Artificial Sequence: Synthetic oligonucleotide
  Antisense strand to SEQ ID NO: 2472208
guuuccagucagagaaggc

SEQ ID NO: 2472210 - RNA, 19 nt, Artificial Sequence
  Description of Artificial Sequence: Synthetic oligonucleotide
  Sense strand starting at position 356 of SEQ ID NO: 1887434
gcacuaacaguuugacauu

SEQ ID NO: 2472211 - RNA, 19 nt, Artificial Sequence
  Description of Artificial Sequence: Synthetic oligonucleotide
  Antisense strand to SEQ ID NO: 2472210
aaugucaaacuguuagugc

SEQ ID NO: 2472212 - RNA, 19 nt, Artificial Sequence
  Description of Artificial Sequence: Synthetic oligonucleotide
  Sense strand starting at position 362 of SEQ ID NO: 1887434
acaguuugacauugagaca

SEQ ID NO: 2472213 - RNA, 19 nt, Artificial Sequence
  Description of Artificial Sequence: Synthetic oligonucleotide
  Antisense strand to SEQ ID NO: 2472212
ugucucaaugucaaacugu

SEQ ID NO: 2472214 - RNA, 19 nt, Artificial Sequence
  Description of Artificial Sequence: Synthetic oligonucleotide
  Sense strand starting at position 375 of SEQ ID NO: 1887434
gagacaacgugauugaaac

SEQ ID NO: 2472215 - RNA, 19 nt, Artificial Sequence
  Description of Artificial Sequence: Synthetic oligonucleotide
  Antisense strand to SEQ ID NO: 2472214
guuucaaucacguugucuc

SEQ ID NO: 2472216 - RNA, 19 nt, Artificial Sequence
  Description of Artificial Sequence: Synthetic oligonucleotide
  Sense strand starting at position 415 of SEQ ID NO: 1887434
uagagucagccuugagaug

SEQ ID NO: 2472217 - RNA, 19 nt, Artificial Sequence
  Description of Artificial Sequence: Synthetic oligonucleotide
  Antisense strand to SEQ ID NO: 2472216
caucucaaggcugacucua

SEQ ID NO: 2472218 - RNA, 19 nt, Artificial Sequence
  Description of Artificial Sequence: Synthetic oligonucleotide
  Sense strand starting at position 519 of SEQ ID NO: 1887434
gaaauaaugugguuuaaga

SEQ ID NO: 2472219 - RNA, 19 nt, Artificial Sequence
  Description of Artificial Sequence: Synthetic oligonucleotide
  Antisense strand to SEQ ID NO: 2472218
ucuuaaaccacauuauuuc

SEQ ID NO: 2472220 - RNA, 19 nt, Artificial Sequence
  Description of Artificial Sequence: Synthetic oligonucleotide
  Sense strand starting at position 712 of SEQ ID NO: 1887434
uugaaucuagguugucaga

SEQ ID NO: 2472221 - RNA, 19 nt, Artificial Sequence
  Description of Artificial Sequence: Synthetic oligonucleotide
  Antisense strand to SEQ ID NO: 2472220
ucugacaaccuagauucaa

SEQ ID NO: 2472222 - RNA, 19 nt, Artificial Sequence
  Description of Artificial Sequence: Synthetic oligonucleotide
  Sense strand starting at position 714 of SEQ ID NO: 1887434
gaaucuagguugucagacu

SEQ ID NO: 2472223 - RNA, 19 nt, Artificial Sequence
  Description of Artificial Sequence: Synthetic oligonucleotide
  Antisense strand to SEQ ID NO: 2472222
agucugacaaccuagauuc

SEQ ID NO: 2472224 - RNA, 19 nt, Artificial Sequence
  Description of Artificial Sequence: Synthetic oligonucleotide
  Sense strand starting at position 791 of SEQ ID NO: 1887434
uagcaaugaggucauuaua

SEQ ID NO: 2472225 - RNA, 19 nt, Artificial Sequence
  Description of Artificial Sequence: Synthetic oligonucleotide
  Antisense strand to SEQ ID NO: 2472224
uauaaugaccucauugcua

SEQ ID NO: 2472226 - RNA, 19 nt, Artificial Sequence
  Description of Artificial Sequence: Synthetic oligonucleotide
  Sense strand starting at position 848 of SEQ ID NO: 1887434
gagagagcugcaugagaau

SEQ ID NO: 2472227 - RNA, 19 nt, Artificial Sequence
  Description of Artificial Sequence: Synthetic oligonucleotide
  Antisense strand to SEQ ID NO: 2472226
auucucaugcagcucucuc

SEQ ID NO: 2472228 - RNA, 19 nt, Artificial Sequence
  Description of Artificial Sequence: Synthetic oligonucleotide
  Sense strand starting at position 889 of SEQ ID NO: 1887434
aagucaugugacuaugcuu

SEQ ID NO: 2472229 - RNA, 19 nt, Artificial Sequence
  Description of Artificial Sequence: Synthetic oligonucleotide
  Antisense strand to SEQ ID NO: 2472228
aagcauagucacaugacuu

SEQ ID NO: 2472230 - RNA, 19 nt, Artificial Sequence
  Description of Artificial Sequence: Synthetic oligonucleotide
  Sense strand starting at position 900 of SEQ ID NO: 1887434
cuaugcuugguacacuaaa

SEQ ID NO: 2472231 - RNA, 19 nt, Artificial Sequence
  Description of Artificial Sequence: Synthetic oligonucleotide
  Antisense strand to SEQ ID NO: 2472230
uuuaguguaccaagcauag

SEQ ID NO: 2472232 - RNA, 19 nt, Artificial Sequence
  Description of Artificial Sequence: Synthetic oligonucleotide
  Sense strand starting at position 921 of SEQ ID NO: 1887434
gguaauacugccuaacaga

SEQ ID NO: 2472233 - RNA, 19 nt, Artificial Sequence
  Description of Artificial Sequence: Synthetic oligonucleotide
  Antisense strand to SEQ ID NO: 2472232
ucuguuaggcaguauuacc

SEQ ID NO: 2472234 - RNA, 19 nt, Artificial Sequence
  Description of Artificial Sequence: Synthetic oligonucleotide
  Sense strand starting at position 1000 of SEQ ID NO: 1887434
cgccaaagccacuaagaaa

SEQ ID NO: 2472235 - RNA, 19 nt, Artificial Sequence
  Description of Artificial Sequence: Synthetic oligonucleotide
  Antisense strand to SEQ ID NO: 2472234
uuucuuaguggcuuuggcg

SEQ ID NO: 2472236 - RNA, 19 nt, Artificial Sequence
  Description of Artificial Sequence: Synthetic oligonucleotide
  Sense strand starting at position 1352 of SEQ ID NO: 1887434
auccaagagccagggauua

SEQ ID NO: 2472237 - RNA, 19 nt, Artificial Sequence
  Description of Artificial Sequence: Synthetic oligonucleotide
  Antisense strand to SEQ ID NO: 2472236
uaaucccuggcucuuggau

SEQ ID NO: 2472238 - RNA, 19 nt, Artificial Sequence
  Description of Artificial Sequence: Synthetic oligonucleotide
  Sense strand starting at position 1395 of SEQ ID NO: 1887434
auuccaagucuagagaugu

SEQ ID NO: 2472239 - RNA, 19 nt, Artificial Sequence
  Description of Artificial Sequence: Synthetic oligonucleotide
  Antisense strand to SEQ ID NO: 2472238
acaucucuagacuuggaau

SEQ ID NO: 2472240 - RNA, 19 nt, Artificial Sequence
  Description of Artificial Sequence: Synthetic oligonucleotide
  Sense strand starting at position 1491 of SEQ ID NO: 1887434
gaauucuagugguuaacac

SEQ ID NO: 2472241 - RNA, 19 nt, Artificial Sequence
  Description of Artificial Sequence: Synthetic oligonucleotide
  Antisense strand to SEQ ID NO: 2472240
guguuaaccacuagaauuc

SEQ ID NO: 2472242 - RNA, 19 nt, Artificial Sequence
  Description of Artificial Sequence: Synthetic oligonucleotide
  Sense strand starting at position 1498 of SEQ ID NO: 1887434
agugguuaacacuauguua

SEQ ID NO: 2472243 - RNA, 19 nt, Artificial Sequence
  Description of Artificial Sequence: Synthetic oligonucleotide
  Antisense strand to SEQ ID NO: 2472242
uaacauaguguuaaccacu

SEQ ID NO: 2472244 - RNA, 19 nt, Artificial Sequence
  Description of Artificial Sequence: Synthetic oligonucleotide
  Sense strand starting at position 1799 of SEQ ID NO: 1887434
cgagaaaccaugcacaguu

SEQ ID NO: 2472245 - RNA, 19 nt, Artificial Sequence
  Description of Artificial Sequence: Synthetic oligonucleotide
  Antisense strand to SEQ ID NO: 2472244
aacugugcaugguuucucg

SEQ ID NO: 2472246 - RNA, 19 nt, Artificial Sequence
  Description of Artificial Sequence: Synthetic oligonucleotide
  Sense strand starting at position 2027 of SEQ ID NO: 1887434
gagggcugccgagaauuaa

SEQ ID NO: 2472247 - RNA, 19 nt, Artificial Sequence
  Description of Artificial Sequence: Synthetic oligonucleotide
  Antisense strand to SEQ ID NO: 2472246
uuaauucucggcagcccuc

SEQ ID NO: 2472248 - RNA, 19 nt, Artificial Sequence
  Description of Artificial Sequence: Synthetic oligonucleotide
  Sense strand starting at position 2149 of SEQ ID NO: 1887434
gucggaauccauuaucuuu

SEQ ID NO: 2472249 - RNA, 19 nt, Artificial Sequence
  Description of Artificial Sequence: Synthetic oligonucleotide
  Antisense strand to SEQ ID NO: 2472248
aaagauaauggauuccgac

SEQ ID NO: 2472250 - RNA, 19 nt, Artificial Sequence
  Description of Artificial Sequence: Synthetic oligonucleotide
  Sense strand starting at position 2159 of SEQ ID NO: 1887434
auuaucuuucgggaaagcu

SEQ ID NO: 2472251 - RNA, 19 nt, Artificial Sequence
  Description of Artificial Sequence: Synthetic oligonucleotide
  Antisense strand to SEQ ID NO: 2472250
agcuuucccgaaagauaau

SEQ ID NO: 2472252 - RNA, 19 nt, Artificial Sequence
  Description of Artificial Sequence: Synthetic oligonucleotide
  Sense strand starting at position 2396 of SEQ ID NO: 1887434
cggaguugcugauuuagua

SEQ ID NO: 2472253 - RNA, 19 nt, Artificial Sequence
  Description of Artificial Sequence: Synthetic oligonucleotide
  Antisense strand to SEQ ID NO: 2472252
uacuaaaucagcaacuccg

SEQ ID NO: 2472254 - RNA, 19 nt, Artificial Sequence
  Description of Artificial Sequence: Synthetic oligonucleotide
  Sense strand starting at position 2442 of SEQ ID NO: 1887434
guucucaggugauccugaa

SEQ ID NO: 2472255 - RNA, 19 nt, Artificial Sequence
  Description of Artificial Sequence: Synthetic oligonucleotide
  Antisense strand to SEQ ID NO: 2472254
uucaggaucaccugagaac

SEQ ID NO: 2472256 - RNA, 19 nt, Artificial Sequence
  Description of Artificial Sequence: Synthetic oligonucleotide
  Sense strand starting at position 2505 of SEQ ID NO: 1887434
auaagugaugcucaguaau

SEQ ID NO: 2472257 - RNA, 19 nt, Artificial Sequence
  Description of Artificial Sequence: Synthetic oligonucleotide
  Antisense strand to SEQ ID NO: 2472256
auuacugagcaucacuuau

SEQ ID NO: 2472258 - RNA, 19 nt, Artificial Sequence
  Description of Artificial Sequence: Synthetic oligonucleotide
  Sense strand starting at position 2507 of SEQ ID NO: 1887434
aagugaugcucaguaauua

SEQ ID NO: 2472259 - RNA, 19 nt, Artificial Sequence
  Description of Artificial Sequence: Synthetic oligonucleotide
  Antisense strand to SEQ ID NO: 2472258
uaauuacugagcaucacuu

SEQ ID NO: 2472260 - RNA, 19 nt, Artificial Sequence
  Description of Artificial Sequence: Synthetic oligonucleotide
  Sense strand starting at position 2508 of SEQ ID NO: 1887434
agugaugcucaguaauuaa

SEQ ID NO: 2472261 - RNA, 19 nt, Artificial Sequence
  Description of Artificial Sequence: Synthetic oligonucleotide
  Antisense strand to SEQ ID NO: 2472260
uuaauuacugagcaucacu

SEQ ID NO: 2472262 - RNA, 19 nt, Artificial Sequence
  Description of Artificial Sequence: Synthetic oligonucleotide
  Sense strand starting at position 2528 of SEQ ID NO: 1887434
cccugaauuaacggaaagu

SEQ ID NO: 2472263 - RNA, 19 nt, Artificial Sequence
  Description of Artificial Sequence: Synthetic oligonucleotide
  Antisense strand to SEQ ID NO: 2472262
acuuuccguuaauucaggg

SEQ ID NO: 2472264 - RNA, 19 nt, Artificial Sequence
  Description of Artificial Sequence: Synthetic oligonucleotide
  Sense strand starting at position 2590 of SEQ ID NO: 1887434
auuuaagguuugcuugcua

SEQ ID NO: 2472265 - RNA, 19 nt, Artificial Sequence
  Description of Artificial Sequence: Synthetic oligonucleotide
  Antisense strand to SEQ ID NO: 2472264
uagcaagcaaaccuuaaau

SEQ ID NO: 2472266 - RNA, 19 nt, Artificial Sequence
  Description of Artificial Sequence: Synthetic oligonucleotide
  Sense strand starting at position 2617 of SEQ ID NO: 1887434
cucacugaucagggugaga

SEQ ID NO: 2472267 - RNA, 19 nt, Artificial Sequence
  Description of Artificial Sequence: Synthetic oligonucleotide
  Antisense strand to SEQ ID NO: 2472266
ucucacccugaucagugag

SEQ ID NO: 2472268 - RNA, 19 nt, Artificial Sequence
  Description of Artificial Sequence: Synthetic oligonucleotide
  Sense strand starting at position 2741 of SEQ ID NO: 1887434
accaaugagacgugugacu

SEQ ID NO: 2472269 - RNA, 19 nt, Artificial Sequence
  Description of Artificial Sequence: Synthetic oligonucleotide
  Antisense strand to SEQ ID NO: 2472268
agucacacgucucauuggu

SEQ ID NO: 2472270 - RNA, 19 nt, Artificial Sequence
  Description of Artificial Sequence: Synthetic oligonucleotide
  Sense strand starting at position 2743 of SEQ ID NO: 1887434
caaugagacgugugacuug

SEQ ID NO: 2472271 - RNA, 19 nt, Artificial Sequence
  Description of Artificial Sequence: Synthetic oligonucleotide
  Antisense strand to SEQ ID NO: 2472270
caagucacacgucucauug

SEQ ID NO: 2472272 - RNA, 19 nt, Artificial Sequence
  Description of Artificial Sequence: Synthetic oligonucleotide
  Sense strand starting at position 2875 of SEQ ID NO: 1887434
auaugaaauuuagggaugu

SEQ ID NO: 2472273 - RNA, 19 nt, Artificial Sequence
  Description of Artificial Sequence: Synthetic oligonucleotide
  Antisense strand to SEQ ID NO: 2472272
acaucccuaaauuucauau

SEQ ID NO: 2472274 - RNA, 19 nt, Artificial Sequence
  Description of Artificial Sequence: Synthetic oligonucleotide
  Sense strand starting at position 2876 of SEQ ID NO: 1887434
uaugaaauuuagggaugua

SEQ ID NO: 2472275 - RNA, 19 nt, Artificial Sequence
  Description of Artificial Sequence: Synthetic oligonucleotide
  Antisense strand to SEQ ID NO: 2472274
uacaucccuaaauuucaua

SEQ ID NO: 2472276 - RNA, 19 nt, Artificial Sequence
  Description of Artificial Sequence: Synthetic oligonucleotide
  Sense strand starting at position 3008 of SEQ ID NO: 1887434
cgcagcuuaggccuguaau

SEQ ID NO: 2472277 - RNA, 19 nt, Artificial Sequence
  Description of Artificial Sequence: Synthetic oligonucleotide
  Antisense strand to SEQ ID NO: 2472276
auuacaggccuaagcugcg

SEQ ID NO: 2472278 - RNA, 19 nt, Artificial Sequence
  Description of Artificial Sequence: Synthetic oligonucleotide
  Sense strand starting at position 3014 of SEQ ID NO: 1887434
uuaggccuguaauccuaaa

SEQ ID NO: 2472279 - RNA, 19 nt, Artificial Sequence
  Description of Artificial Sequence: Synthetic oligonucleotide
  Antisense strand to SEQ ID NO: 2472278
uuuaggauuacaggccuaa

SEQ ID NO: 2472280 - RNA, 19 nt, Artificial Sequence
  Description of Artificial Sequence: Synthetic oligonucleotide
  Sense strand starting at position 3369 of SEQ ID NO: 1887434
uuugauaaggcuuguuaaa

SEQ ID NO: 2472281 - RNA, 19 nt, Artificial Sequence
  Description of Artificial Sequence: Synthetic oligonucleotide
  Antisense strand to SEQ ID NO: 2472280
uuuaacaagccuuaucaaa

SEQ ID NO: 2472282 - RNA, 19 nt, Artificial Sequence
  Description of Artificial Sequence: Synthetic oligonucleotide
  Sense strand starting at position 3371 of SEQ ID NO: 1887434
ugauaaggcuuguuaaaug

SEQ ID NO: 2472283 - RNA, 19 nt, Artificial Sequence
  Description of Artificial Sequence: Synthetic oligonucleotide
  Antisense strand to SEQ ID NO: 2472282
cauuuaacaagccuuauca

SEQ ID NO: 2472284 - RNA, 19 nt, Artificial Sequence
  Description of Artificial Sequence: Synthetic oligonucleotide
  Sense strand starting at position 3399 of SEQ ID NO: 1887434
guggaacuaucacugcaau

SEQ ID NO: 2472285 - RNA, 19 nt, Artificial Sequence
  Description of Artificial Sequence: Synthetic oligonucleotide
  Antisense strand to SEQ ID NO: 2472284
auugcagugauaguuccac

SEQ ID NO: 2472286 - RNA, 19 nt, Artificial Sequence
  Description of Artificial Sequence: Synthetic oligonucleotide
  Sense strand starting at position 3506 of SEQ ID NO: 1887434
gcuguuacuagagauuagu

SEQ ID NO: 2472287 - RNA, 19 nt, Artificial Sequence
  Description of Artificial Sequence: Synthetic oligonucleotide
  Antisense strand to SEQ ID NO: 2472286
acuaaucucuaguaacagc

SEQ ID NO: 2472288 - RNA, 19 nt, Artificial Sequence
  Description of Artificial Sequence: Synthetic oligonucleotide
  Sense strand starting at position 73 of SEQ ID NO: 1887435
accuuaucccuugggacuu

SEQ ID NO: 2472289 - RNA, 19 nt, Artificial Sequence
  Description of Artificial Sequence: Synthetic oligonucleotide
  Antisense strand to SEQ ID NO: 2472288
aagucccaagggauaaggu

SEQ ID NO: 2472290 - RNA, 19 nt, Artificial Sequence
  Description of Artificial Sequence: Synthetic oligonucleotide
  Sense strand starting at position 301 of SEQ ID NO: 1887435
gcaucugauuggcugacaa

SEQ ID NO: 2472291 - RNA, 19 nt, Artificial Sequence
  Description of Artificial Sequence: Synthetic oligonucleotide
  Antisense strand to SEQ ID NO: 2472290
uugucagccaaucagaugc

SEQ ID NO: 2472292 - RNA, 19 nt, Artificial Sequence
  Description of Artificial Sequence: Synthetic oligonucleotide
  Sense strand starting at position 323 of SEQ ID NO: 1887435
auguguuuccauggaauga

SEQ ID NO: 2472293 - RNA, 19 nt, Artificial Sequence
  Description of Artificial Sequence: Synthetic oligonucleotide
  Antisense strand to SEQ ID NO: 2472292
ucauuccauggaaacacau

SEQ ID NO: 2472294 - RNA, 19 nt, Artificial Sequence
  Description of Artificial Sequence: Synthetic oligonucleotide
  Sense strand starting at position 324 of SEQ ID NO: 1887435
uguguuuccauggaaugaa

SEQ ID NO: 2472295 - RNA, 19 nt, Artificial Sequence
  Description of Artificial Sequence: Synthetic oligonucleotide
  Antisense strand to SEQ ID NO: 2472294
uucauuccauggaaacaca

SEQ ID NO: 2472296 - RNA, 19 nt, Artificial Sequence
  Description of Artificial Sequence: Synthetic oligonucleotide
  Sense strand starting at position 406 of SEQ ID NO: 1887435
aaggguaagccuggauauu

SEQ ID NO: 2472297 - RNA, 19 nt, Artificial Sequence
  Description of Artificial Sequence: Synthetic oligonucleotide
  Antisense strand to SEQ ID NO: 2472296
aauauccaggcuuacccuu

SEQ ID NO: 2472298 - RNA, 19 nt, Artificial Sequence
  Description of Artificial Sequence: Synthetic oligonucleotide
  Sense strand starting at position 482 of SEQ ID NO: 1887435
guguguccucuggaagauu

SEQ ID NO: 2472299 - RNA, 19 nt, Artificial Sequence
  Description of Artificial Sequence: Synthetic oligonucleotide
  Antisense strand to SEQ ID NO: 2472298
aaucuuccagaggacacac

SEQ ID NO: 2472300 - RNA, 19 nt, Artificial Sequence
  Description of Artificial Sequence: Synthetic oligonucleotide
  Sense strand starting at position 558 of SEQ ID NO: 1887435
gggccaucucaagacaguu

SEQ ID NO: 2472301 - RNA, 19 nt, Artificial Sequence
  Description of Artificial Sequence: Synthetic oligonucleotide
  Antisense strand to SEQ ID NO: 2472300
aacugucuugagauggccc

SEQ ID NO: 2472302 - RNA, 19 nt, Artificial Sequence
  Description of Artificial Sequence: Synthetic oligonucleotide
  Sense strand starting at position 601 of SEQ ID NO: 1887435
cccgaauguggcuaaggaa

SEQ ID NO: 2472303 - RNA, 19 nt, Artificial Sequence
  Description of Artificial Sequence: Synthetic oligonucleotide
  Antisense strand to SEQ ID NO: 2472302
uuccuuagccacauucggg

SEQ ID NO: 2472304 - RNA, 19 nt, Artificial Sequence
  Description of Artificial Sequence: Synthetic oligonucleotide
  Sense strand starting at position 628 of SEQ ID NO: 1887435
ccauaaaguuucccaacga

SEQ ID NO: 2472305 - RNA, 19 nt, Artificial Sequence
  Description of Artificial Sequence: Synthetic oligonucleotide
  Antisense strand to SEQ ID NO: 2472304
ucguugggaaacuuuaugg

SEQ ID NO: 2472306 - RNA, 19 nt, Artificial Sequence
  Description of Artificial Sequence: Synthetic oligonucleotide
  Sense strand starting at position 767 of SEQ ID NO: 1887435
gugaaauauuuguaaguag

SEQ ID NO: 2472307 - RNA, 19 nt, Artificial Sequence
  Description of Artificial Sequence: Synthetic oligonucleotide
  Antisense strand to SEQ ID NO: 2472306
cuacuuacaaauauuucac

SEQ ID NO: 2472308 - RNA, 19 nt, Artificial Sequence
  Description of Artificial Sequence: Synthetic oligonucleotide
  Sense strand starting at position 850 of SEQ ID NO: 1887435
uucugaaaugugcaauaaa

SEQ ID NO: 2472309 - RNA, 19 nt, Artificial Sequence
  Description of Artificial Sequence: Synthetic oligonucleotide
  Antisense strand to SEQ ID NO: 2472308
uuuauugcacauuucagaa

SEQ ID NO: 2472310 - RNA, 19 nt, Artificial Sequence
  Description of Artificial Sequence: Synthetic oligonucleotide
  Sense strand starting at position 978 of SEQ ID NO: 1887435
cagaguaguggaugugaga

SEQ ID NO: 2472311 - RNA, 19 nt, Artificial Sequence
  Description of Artificial Sequence: Synthetic oligonucleotide
  Antisense strand to SEQ ID NO: 2472310
ucucacauccacuacucug

SEQ ID NO: 2472312 - RNA, 19 nt, Artificial Sequence
  Description of Artificial Sequence: Synthetic oligonucleotide
  Sense strand starting at position 1036 of SEQ ID NO: 1887435
agugucuuugauuaaaguu

SEQ ID NO: 2472313 - RNA, 19 nt, Artificial Sequence
  Description of Artificial Sequence: Synthetic oligonucleotide
  Antisense strand to SEQ ID NO: 2472312
aacuuuaaucaaagacacu

SEQ ID NO: 2472314 - RNA, 19 nt, Artificial Sequence
  Description of Artificial Sequence: Synthetic oligonucleotide
  Sense strand starting at position 1068 of SEQ ID NO: 1887435
agcagucauuuagacugaa

SEQ ID NO: 2472315 - RNA, 19 nt, Artificial Sequence
  Description of Artificial Sequence: Synthetic oligonucleotide
  Antisense strand to SEQ ID NO: 2472314
uucagucuaaaugacugcu

SEQ ID NO: 2472316 - RNA, 19 nt, Artificial Sequence
  Description of Artificial Sequence: Synthetic oligonucleotide
  Sense strand starting at position 1098 of SEQ ID NO: 1887435
ggucuaggccucuauguaa

SEQ ID NO: 2472317 - RNA, 19 nt, Artificial Sequence
  Description of Artificial Sequence: Synthetic oligonucleotide
  Antisense strand to SEQ ID NO: 2472316
uuacauagaggccuagacc

SEQ ID NO: 2472318 - RNA, 19 nt, Artificial Sequence
  Description of Artificial Sequence: Synthetic oligonucleotide
  Sense strand starting at position 1148 of SEQ ID NO: 1887435
cuaaguuacuaccuuagga

SEQ ID NO: 2472319 - RNA, 19 nt, Artificial Sequence
  Description of Artificial Sequence: Synthetic oligonucleotide
  Antisense strand to SEQ ID NO: 2472318
uccuaagguaguaacuuag

SEQ ID NO: 2472320 - RNA, 19 nt, Artificial Sequence
  Description of Artificial Sequence: Synthetic oligonucleotide
  Sense strand starting at position 1402 of SEQ ID NO: 1887435
auauaagcugucuauguuu

SEQ ID NO: 2472321 - RNA, 19 nt, Artificial Sequence
  Description of Artificial Sequence: Synthetic oligonucleotide
  Antisense strand to SEQ ID NO: 2472320
aaacauagacagcuuauau

SEQ ID NO: 2472322 - RNA, 19 nt, Artificial Sequence
  Description of Artificial Sequence: Synthetic oligonucleotide
  Sense strand starting at position 1807 of SEQ ID NO: 1887435
ccuggagucuuagcuauaa

SEQ ID NO: 2472323 - RNA, 19 nt, Artificial Sequence
  Description of Artificial Sequence: Synthetic oligonucleotide
  Antisense strand to SEQ ID NO: 2472322
uuauagcuaagacuccagg

SEQ ID NO: 2472324 - RNA, 19 nt, Artificial Sequence
  Description of Artificial Sequence: Synthetic oligonucleotide
  Sense strand starting at position 1866 of SEQ ID NO: 1887435
ggcagaaucaccgaagucu

SEQ ID NO: 2472325 - RNA, 19 nt, Artificial Sequence
  Description of Artificial Sequence: Synthetic oligonucleotide
  Antisense strand to SEQ ID NO: 2472324
agacuucggugauucugcc

SEQ ID NO: 2472326 - RNA, 19 nt, Artificial Sequence
  Description of Artificial Sequence: Synthetic oligonucleotide
  Sense strand starting at position 1877 of SEQ ID NO: 1887435
cgaagucucccggagcaga

SEQ ID NO: 2472327 - RNA, 19 nt, Artificial Sequence
  Description of Artificial Sequence: Synthetic oligonucleotide
  Antisense strand to SEQ ID NO: 2472326
ucugcuccgggagacuucg

SEQ ID NO: 2472328 - RNA, 19 nt, Artificial Sequence
  Description of Artificial Sequence: Synthetic oligonucleotide
  Sense strand starting at position 2199 of SEQ ID NO: 1887435
gguguauaacguuaugaag

SEQ ID NO: 2472329 - RNA, 19 nt, Artificial Sequence
  Description of Artificial Sequence: Synthetic oligonucleotide
  Antisense strand to SEQ ID NO: 2472328
cuucauaacguuauacacc

SEQ ID NO: 2472330 - RNA, 19 nt, Artificial Sequence
  Description of Artificial Sequence: Synthetic oligonucleotide
  Sense strand starting at position 2318 of SEQ ID NO: 1887435
cggucuuuggagugggaca

SEQ ID NO: 2472331 - RNA, 19 nt, Artificial Sequence
  Description of Artificial Sequence: Synthetic oligonucleotide
  Antisense strand to SEQ ID NO: 2472330
ugucccacuccaaagaccg

SEQ ID NO: 2472332 - RNA, 19 nt, Artificial Sequence
  Description of Artificial Sequence: Synthetic oligonucleotide
  Sense strand starting at position 2731 of SEQ ID NO: 1887435
gugaaauuguuuguaauac

SEQ ID NO: 2472333 - RNA, 19 nt, Artificial Sequence
  Description of Artificial Sequence: Synthetic oligonucleotide
  Antisense strand to SEQ ID NO: 2472332
guauuacaaacaauuucac

SEQ ID NO: 2472334 - RNA, 19 nt, Artificial Sequence
  Description of Artificial Sequence: Synthetic oligonucleotide
  Sense strand starting at position 2784 of SEQ ID NO: 1887435
auguguggucaacaaauaa

SEQ ID NO: 2472335 - RNA, 19 nt, Artificial Sequence
  Description of Artificial Sequence: Synthetic oligonucleotide
  Antisense strand to SEQ ID NO: 2472334
uuauuuguugaccacacau

SEQ ID NO: 2472336 - RNA, 19 nt, Artificial Sequence
  Description of Artificial Sequence: Synthetic oligonucleotide
  Sense strand starting at position 2829 of SEQ ID NO: 1887435
uuaaacucgcuguguauuu

SEQ ID NO: 2472337 - RNA, 19 nt, Artificial Sequence
  Description of Artificial Sequence: Synthetic oligonucleotide
  Antisense strand to SEQ ID NO: 2472336
aaauacacagcgaguuuaa

SEQ ID NO: 2472338 - RNA, 19 nt, Artificial Sequence
  Description of Artificial Sequence: Synthetic oligonucleotide
  Sense strand starting at position 2940 of SEQ ID NO: 1887435
uuuguauuucuaggcuauu

SEQ ID NO: 2472339 - RNA, 19 nt, Artificial Sequence
  Description of Artificial Sequence: Synthetic oligonucleotide
  Antisense strand to SEQ ID NO: 2472338
aauagccuagaaauacaaa

SEQ ID NO: 2472340 - RNA, 19 nt, Artificial Sequence
  Description of Artificial Sequence: Synthetic oligonucleotide
  Sense strand starting at position 3012 of SEQ ID NO: 1887435
uuugaaggcaagugacaua

SEQ ID NO: 2472341 - RNA, 19 nt, Artificial Sequence
  Description of Artificial Sequence: Synthetic oligonucleotide
  Antisense strand to SEQ ID NO: 2472340
uaugucacuugccuucaaa

SEQ ID NO: 2472342 - RNA, 19 nt, Artificial Sequence
  Description of Artificial Sequence: Synthetic oligonucleotide
  Sense strand starting at position 3058 of SEQ ID NO: 1887435
gcugcaauuuagccaauca

SEQ ID NO: 2472343 - RNA, 19 nt, Artificial Sequence
  Description of Artificial Sequence: Synthetic oligonucleotide
  Antisense strand to SEQ ID NO: 2472342
ugauuggcuaaauugcagc

SEQ ID NO: 2472344 - RNA, 19 nt, Artificial Sequence
  Description of Artificial Sequence: Synthetic oligonucleotide
  Sense strand starting at position 3066 of SEQ ID NO: 1887435
uuagccaaucagcagaaua

SEQ ID NO: 2472345 - RNA, 19 nt, Artificial Sequence
  Description of Artificial Sequence: Synthetic oligonucleotide
  Antisense strand to SEQ ID NO: 2472344
uauucugcugauuggcuaa

SEQ ID NO: 2472346 - RNA, 19 nt, Artificial Sequence
  Description of Artificial Sequence: Synthetic oligonucleotide
  Sense strand starting at position 3076 of SEQ ID NO: 1887435
agcagaauaugcuuugaag

SEQ ID NO: 2472347 - RNA, 19 nt, Artificial Sequence
  Description of Artificial Sequence: Synthetic oligonucleotide
  Antisense strand to SEQ ID NO: 2472346
cuucaaagcauauucugcu

SEQ ID NO: 2472348 - RNA, 19 nt, Artificial Sequence
  Description of Artificial Sequence: Synthetic oligonucleotide
  Sense strand starting at position 3082 of SEQ ID NO: 1887435
auaugcuuugaaggguaaa

SEQ ID NO: 2472349 - RNA, 19 nt, Artificial Sequence
  Description of Artificial Sequence: Synthetic oligonucleotide
  Antisense strand to SEQ ID NO: 2472348
uuuacccuucaaagcauau

SEQ ID NO: 2472350 - RNA, 19 nt, Artificial Sequence
  Description of Artificial Sequence: Synthetic oligonucleotide
  Sense strand starting at position 3235 of SEQ ID NO: 1887435
cuuguagaggaguguuuaa

SEQ ID NO: 2472351 - RNA, 19 nt, Artificial Sequence
  Description of Artificial Sequence: Synthetic oligonucleotide
  Antisense strand to SEQ ID NO: 2472350
uuaaacacuccucuacaag

SEQ ID NO: 2472352 - RNA, 19 nt, Artificial Sequence
  Description of Artificial Sequence: Synthetic oligonucleotide
  Sense strand starting at position 3299 of SEQ ID NO: 1887435
gagugagaccuaggcaaca

SEQ ID NO: 2472353 - RNA, 19 nt, Artificial Sequence
  Description of Artificial Sequence: Synthetic oligonucleotide
  Antisense strand to SEQ ID NO: 2472352
uguugccuaggucucacuc

SEQ ID NO: 2472354 - RNA, 19 nt, Artificial Sequence
  Description of Artificial Sequence: Synthetic oligonucleotide
  Sense strand starting at position 3328 of SEQ ID NO: 1887435
aagcucucgggugauuaua

SEQ ID NO: 2472355 - RNA, 19 nt, Artificial Sequence
  Description of Artificial Sequence: Synthetic oligonucleotide
  Antisense strand to SEQ ID NO: 2472354
uauaaucacccgagagcuu

SEQ ID NO: 2472356 - RNA, 19 nt, Artificial Sequence
  Description of Artificial Sequence: Synthetic oligonucleotide
  Sense strand starting at position 3392 of SEQ ID NO: 1887435
uggagagccaguugaaauu

SEQ ID NO: 2472357 - RNA, 19 nt, Artificial Sequence
  Description of Artificial Sequence: Synthetic oligonucleotide
  Antisense strand to SEQ ID NO: 2472356
aauuucaacuggcucucca

SEQ ID NO: 2472358 - RNA, 19 nt, Artificial Sequence
  Description of Artificial Sequence: Synthetic oligonucleotide
  Sense strand starting at position 3449 of SEQ ID NO: 1887435
gcggccuuucagucuugau

SEQ ID NO: 2472359 - RNA, 19 nt, Artificial Sequence
  Description of Artificial Sequence: Synthetic oligonucleotide
  Antisense strand to SEQ ID NO: 2472358
aucaagacugaaaggccgc

SEQ ID NO: 2472360 - RNA, 19 nt, Artificial Sequence
  Description of Artificial Sequence: Synthetic oligonucleotide
  Sense strand starting at position 3478 of SEQ ID NO: 1887435
cuauccuuugcagaacuga

SEQ ID NO: 2472361 - RNA, 19 nt, Artificial Sequence
  Description of Artificial Sequence: Synthetic oligonucleotide
  Antisense strand to SEQ ID NO: 2472360
ucaguucugcaaaggauag

SEQ ID NO: 2472362 - RNA, 19 nt, Artificial Sequence
  Description of Artificial Sequence: Synthetic oligonucleotide
  Sense strand starting at position 3593 of SEQ ID NO: 1887435
gaguacuaucguggaggaa

SEQ ID NO: 2472363 - RNA, 19 nt, Artificial Sequence
  Description of Artificial Sequence: Synthetic oligonucleotide
  Antisense strand to SEQ ID NO: 2472362
uuccuccacgauaguacuc

SEQ ID NO: 2472364 - RNA, 19 nt, Artificial Sequence
  Description of Artificial Sequence: Synthetic oligonucleotide
  Sense strand starting at position 3594 of SEQ ID NO: 1887435
aguacuaucguggaggaag

SEQ ID NO: 2472365 - RNA, 19 nt, Artificial Sequence
  Description of Artificial Sequence: Synthetic oligonucleotide
  Antisense strand to SEQ ID NO: 2472364
cuuccuccacgauaguacu

SEQ ID NO: 2472366 - RNA, 19 nt, Artificial Sequence
  Description of Artificial Sequence: Synthetic oligonucleotide
  Sense strand starting at position 3745 of SEQ ID NO: 1887435
ucucaugaugucugacacu

SEQ ID NO: 2472367 - RNA, 19 nt, Artificial Sequence
  Description of Artificial Sequence: Synthetic oligonucleotide
  Antisense strand to SEQ ID NO: 2472366
agugucagacaucaugaga

SEQ ID NO: 2472368 - RNA, 19 nt, Artificial Sequence
  Description of Artificial Sequence: Synthetic oligonucleotide
  Sense strand starting at position 24 of SEQ ID NO: 1887436
gaaccacaguccucaggaa

SEQ ID NO: 2472369 - RNA, 19 nt, Artificial Sequence
  Description of Artificial Sequence: Synthetic oligonucleotide
  Antisense strand to SEQ ID NO: 2472368
uuccugaggacugugguuc

SEQ ID NO: 2472370 - RNA, 19 nt, Artificial Sequence
  Description of Artificial Sequence: Synthetic oligonucleotide
  Sense strand starting at position 335 of SEQ ID NO: 1887436
uauaauuguugcugggcau

SEQ ID NO: 2472371 - RNA, 19 nt, Artificial Sequence
  Description of Artificial Sequence: Synthetic oligonucleotide
  Antisense strand to SEQ ID NO: 2472370
augcccagcaacaauuaua

SEQ ID NO: 2472372 - RNA, 19 nt, Artificial Sequence
  Description of Artificial Sequence: Synthetic oligonucleotide
  Sense strand starting at position 667 of SEQ ID NO: 1887436
gaagcagccauaugugagu

SEQ ID NO: 2472373 - RNA, 19 nt, Artificial Sequence
  Description of Artificial Sequence: Synthetic oligonucleotide
  Antisense strand to SEQ ID NO: 2472372
acucacauauggcugcuuc

SEQ ID NO: 2472374 - RNA, 19 nt, Artificial Sequence
  Description of Artificial Sequence: Synthetic oligonucleotide
  Sense strand starting at position 816 of SEQ ID NO: 1887436
ugcugaaacccuuggccaa

SEQ ID NO: 2472375 - RNA, 19 nt, Artificial Sequence
  Description of Artificial Sequence: Synthetic oligonucleotide
  Antisense strand to SEQ ID NO: 2472374
uuggccaaggguuucagca

SEQ ID NO: 2472376 - RNA, 19 nt, Artificial Sequence
  Description of Artificial Sequence: Synthetic oligonucleotide
  Sense strand starting at position 817 of SEQ ID NO: 1887436
gcugaaacccuuggccaau

SEQ ID NO: 2472377 - RNA, 19 nt, Artificial Sequence
  Description of Artificial Sequence: Synthetic oligonucleotide
  Antisense strand to SEQ ID NO: 2472376
auuggccaaggguuucagc

SEQ ID NO: 2472378 - RNA, 19 nt, Artificial Sequence
  Description of Artificial Sequence: Synthetic oligonucleotide
  Sense strand starting at position 2180 of SEQ ID NO: 1887436
ggaaggguguuccugggau

SEQ ID NO: 2472379 - RNA, 19 nt, Artificial Sequence
  Description of Artificial Sequence: Synthetic oligonucleotide
  Antisense strand to SEQ ID NO: 2472378
aucccaggaacacccuucc

SEQ ID NO: 2472380 - RNA, 19 nt, Artificial Sequence
  Description of Artificial Sequence: Synthetic oligonucleotide
  Sense strand starting at position 2261 of SEQ ID NO: 1887436
uaguaaugcugccugcauu

SEQ ID NO: 2472381 - RNA, 19 nt, Artificial Sequence
  Description of Artificial Sequence: Synthetic oligonucleotide
  Antisense strand to SEQ ID NO: 2472380
aaugcaggcagcauuacua

SEQ ID NO: 2472382 - RNA, 19 nt, Artificial Sequence
  Description of Artificial Sequence: Synthetic oligonucleotide
  Sense strand starting at position 2561 of SEQ ID NO: 1887436
cgagcugauucugagcgau

SEQ ID NO: 2472383 - RNA, 19 nt, Artificial Sequence
  Description of Artificial Sequence: Synthetic oligonucleotide
  Antisense strand to SEQ ID NO: 2472382
aucgcucagaaucagcucg

SEQ ID NO: 2472384 - RNA, 19 nt, Artificial Sequence
  Description of Artificial Sequence: Synthetic oligonucleotide
  Sense strand starting at position 2564 of SEQ ID NO: 1887436
gcugauucugagcgauggu

SEQ ID NO: 2472385 - RNA, 19 nt, Artificial Sequence
  Description of Artificial Sequence: Synthetic oligonucleotide
  Antisense strand to SEQ ID NO: 2472384
accaucgcucagaaucagc

SEQ ID NO: 2472386 - RNA, 19 nt, Artificial Sequence
  Description of Artificial Sequence: Synthetic oligonucleotide
  Sense strand starting at position 2719 of SEQ ID NO: 1887436
gguccuaaacugcaaauau

SEQ ID NO: 2472387 - RNA, 19 nt, Artificial Sequence
  Description of Artificial Sequence: Synthetic oligonucleotide
  Antisense strand to SEQ ID NO: 2472386
auauuugcaguuuaggacc

SEQ ID NO: 2472388 - RNA, 19 nt, Artificial Sequence
  Description of Artificial Sequence: Synthetic oligonucleotide
  Sense strand starting at position 2737 of SEQ ID NO: 1887436
ugaugaugagcgugacaac

SEQ ID NO: 2472389 - RNA, 19 nt, Artificial Sequence
  Description of Artificial Sequence: Synthetic oligonucleotide
  Antisense strand to SEQ ID NO: 2472388
guugucacgcucaucauca

SEQ ID NO: 2472390 - RNA, 19 nt, Artificial Sequence
  Description of Artificial Sequence: Synthetic oligonucleotide
  Sense strand starting at position 3089 of SEQ ID NO: 1887436
ccgucugugucuguagaca

SEQ ID NO: 2472391 - RNA, 19 nt, Artificial Sequence
  Description of Artificial Sequence: Synthetic oligonucleotide
  Antisense strand to SEQ ID NO: 2472390
ugucuacagacacagacgg

SEQ ID NO: 2472392 - RNA, 19 nt, Artificial Sequence
  Description of Artificial Sequence: Synthetic oligonucleotide
  Sense strand starting at position 3128 of SEQ ID NO: 1887436
ugaaagggugcgugugaga

SEQ ID NO: 2472393 - RNA, 19 nt, Artificial Sequence
  Description of Artificial Sequence: Synthetic oligonucleotide
  Antisense strand to SEQ ID NO: 2472392
ucucacacgcacccuuuca

SEQ ID NO: 2472394 - RNA, 19 nt, Artificial Sequence
  Description of Artificial Sequence: Synthetic oligonucleotide
  Sense strand starting at position 3131 of SEQ ID NO: 1887436
aagggugcgugugagauau

SEQ ID NO: 2472395 - RNA, 19 nt, Artificial Sequence
  Description of Artificial Sequence: Synthetic oligonucleotide
  Antisense strand to SEQ ID NO: 2472394
auaucucacacgcacccuu

SEQ ID NO: 2472396 - RNA, 19 nt, Artificial Sequence
  Description of Artificial Sequence: Synthetic oligonucleotide
  Sense strand starting at position 3135 of SEQ ID NO: 1887436
gugcgugugagauauccaa

SEQ ID NO: 2472397 - RNA, 19 nt, Artificial Sequence
  Description of Artificial Sequence: Synthetic oligonucleotide
  Antisense strand to SEQ ID NO: 2472396
uuggauaucucacacgcac

SEQ ID NO: 2472398 - RNA, 19 nt, Artificial Sequence
  Description of Artificial Sequence: Synthetic oligonucleotide
  Sense strand starting at position 3208 of SEQ ID NO: 1887436
caggucauugcgggcagaa

SEQ ID NO: 2472399 - RNA, 19 nt, Artificial Sequence
  Description of Artificial Sequence: Synthetic oligonucleotide
  Antisense strand to SEQ ID NO: 2472398
uucugcccgcaaugaccug

SEQ ID NO: 2472400 - RNA, 19 nt, Artificial Sequence
  Description of Artificial Sequence: Synthetic oligonucleotide
  Sense strand starting at position 3210 of SEQ ID NO: 1887436
ggucauugcgggcagaaga

SEQ ID NO: 2472401 - RNA, 19 nt, Artificial Sequence
  Description of Artificial Sequence: Synthetic oligonucleotide
  Antisense strand to SEQ ID NO: 2472400
ucuucugcccgcaaugacc

SEQ ID NO: 2472402 - RNA, 19 nt, Artificial Sequence
  Description of Artificial Sequence: Synthetic oligonucleotide
  Sense strand starting at position 3304 of SEQ ID NO: 1887436
gugugcugcuccgcagaga

SEQ ID NO: 2472403 - RNA, 19 nt, Artificial Sequence
  Description of Artificial Sequence: Synthetic oligonucleotide
  Antisense strand to SEQ ID NO: 2472402
ucucugcggagcagcacac

SEQ ID NO: 2472404 - RNA, 19 nt, Artificial Sequence
  Description of Artificial Sequence: Synthetic oligonucleotide
  Sense strand starting at position 3494 of SEQ ID NO: 1887436
acaacauuuccguggcuga

SEQ ID NO: 2472405 - RNA, 19 nt, Artificial Sequence
  Description of Artificial Sequence: Synthetic oligonucleotide
  Antisense strand to SEQ ID NO: 2472404
ucagccacggaaauguugu

SEQ ID NO: 2472406 - RNA, 19 nt, Artificial Sequence
  Description of Artificial Sequence: Synthetic oligonucleotide
  Sense strand starting at position 3773 of SEQ ID NO: 1887436
ccuggaauuucggcuuauu

SEQ ID NO: 2472407 - RNA, 19 nt, Artificial Sequence
  Description of Artificial Sequence: Synthetic oligonucleotide
  Antisense strand to SEQ ID NO: 2472406
aauaagccgaaauuccagg

SEQ ID NO: 2472408 - RNA, 19 nt, Artificial Sequence
  Description of Artificial Sequence: Synthetic oligonucleotide
  Sense strand starting at position 3899 of SEQ ID NO: 1887436
uuuauuacuggccauguca

SEQ ID NO: 2472409 - RNA, 19 nt, Artificial Sequence
  Description of Artificial Sequence: Synthetic oligonucleotide
  Antisense strand to SEQ ID NO: 2472408
ugacauggccaguaauaaa

SEQ ID NO: 2472410 - RNA, 19 nt, Artificial Sequence
  Description of Artificial Sequence: Synthetic oligonucleotide
  Sense strand starting at position 3901 of SEQ ID NO: 1887436
uauuacuggccaugucagu

SEQ ID NO: 2472411 - RNA, 19 nt, Artificial Sequence
  Description of Artificial Sequence: Synthetic oligonucleotide
  Antisense strand to SEQ ID NO: 2472410
acugacauggccaguaaua

SEQ ID NO: 2472412 - RNA, 19 nt, Artificial Sequence
  Description of Artificial Sequence: Synthetic oligonucleotide
  Sense strand starting at position 3907 of SEQ ID NO: 1887436
uggccaugucagucgucau

SEQ ID NO: 2472413 - RNA, 19 nt, Artificial Sequence
  Description of Artificial Sequence: Synthetic oligonucleotide
  Antisense strand to SEQ ID NO: 2472412
augacgacugacauggcca

SEQ ID NO: 2472414 - RNA, 19 nt, Artificial Sequence
  Description of Artificial Sequence: Synthetic oligonucleotide
  Sense strand starting at position 3908 of SEQ ID NO: 1887436
ggccaugucagucgucaua

SEQ ID NO: 2472415 - RNA, 19 nt, Artificial Sequence
  Description of Artificial Sequence: Synthetic oligonucleotide
  Antisense strand to SEQ ID NO: 2472414
uaugacgacugacauggcc

SEQ ID NO: 2472416 - RNA, 19 nt, Artificial Sequence
  Description of Artificial Sequence: Synthetic oligonucleotide
  Sense strand starting at position 3910 of SEQ ID NO: 1887436
ccaugucagucgucauacu

SEQ ID NO: 2472417 - RNA, 19 nt, Artificial Sequence
  Description of Artificial Sequence: Synthetic oligonucleotide
  Antisense strand to SEQ ID NO: 2472416
aguaugacgacugacaugg

SEQ ID NO: 2472418 - RNA, 19 nt, Artificial Sequence
  Description of Artificial Sequence: Synthetic oligonucleotide
  Sense strand starting at position 1 of SEQ ID NO: 1887437
agguuuggucauuagugac

SEQ ID NO: 2472419 - RNA, 19 nt, Artificial Sequence
  Description of Artificial Sequence: Synthetic oligonucleotide
  Antisense strand to SEQ ID NO: 2472418
gucacuaaugaccaaaccu

SEQ ID NO: 2472420 - RNA, 19 nt, Artificial Sequence
  Description of Artificial Sequence: Synthetic oligonucleotide
  Sense strand starting at position 130 of SEQ ID NO: 1887437
ccaugaaacugucuuccag

SEQ ID NO: 2472421 - RNA, 19 nt, Artificial Sequence
  Description of Artificial Sequence: Synthetic oligonucleotide
  Antisense strand to SEQ ID NO: 2472420
cuggaagacaguuucaugg

SEQ ID NO: 2472422 - RNA, 19 nt, Artificial Sequence
  Description of Artificial Sequence: Synthetic oligonucleotide
  Sense strand starting at position 132 of SEQ ID NO: 1887437
augaaacugucuuccaguu

SEQ ID NO: 2472423 - RNA, 19 nt, Artificial Sequence
  Description of Artificial Sequence: Synthetic oligonucleotide
  Antisense strand to SEQ ID NO: 2472422
aacuggaagacaguuucau

SEQ ID NO: 2472424 - RNA, 19 nt, Artificial Sequence
  Description of Artificial Sequence: Synthetic oligonucleotide
  Sense strand starting at position 152 of SEQ ID NO: 1887437
uugguaagacuuggugaga

SEQ ID NO: 2472425 - RNA, 19 nt, Artificial Sequence
  Description of Artificial Sequence: Synthetic oligonucleotide
  Antisense strand to SEQ ID NO: 2472424
ucucaccaagucuuaccaa

SEQ ID NO: 2472426 - RNA, 19 nt, Artificial Sequence
  Description of Artificial Sequence: Synthetic oligonucleotide
  Sense strand starting at position 153 of SEQ ID NO: 1887437
ugguaagacuuggugagaa

SEQ ID NO: 2472427 - RNA, 19 nt, Artificial Sequence
  Description of Artificial Sequence: Synthetic oligonucleotide
  Antisense strand to SEQ ID NO: 2472426
uucucaccaagucuuacca

SEQ ID NO: 2472428 - RNA, 19 nt, Artificial Sequence
  Description of Artificial Sequence: Synthetic oligonucleotide
  Sense strand starting at position 176 of SEQ ID NO: 1887437
auuccaaucccagggaugu

SEQ ID NO: 2472429 - RNA, 19 nt, Artificial Sequence
  Description of Artificial Sequence: Synthetic oligonucleotide
  Antisense strand to SEQ ID NO: 2472428
acaucccugggauuggaau

SEQ ID NO: 2472430 - RNA, 19 nt, Artificial Sequence
  Description of Artificial Sequence: Synthetic oligonucleotide
  Sense strand starting at position 237 of SEQ ID NO: 1887437
acagaaaggcucuggcaga

SEQ ID NO: 2472431 - RNA, 19 nt, Artificial Sequence
  Description of Artificial Sequence: Synthetic oligonucleotide
  Antisense strand to SEQ ID NO: 2472430
ucugccagagccuuucugu

SEQ ID NO: 2472432 - RNA, 19 nt, Artificial Sequence
  Description of Artificial Sequence: Synthetic oligonucleotide
  Sense strand starting at position 278 of SEQ ID NO: 1887437
gauguuugacgccagauac

SEQ ID NO: 2472433 - RNA, 19 nt, Artificial Sequence
  Description of Artificial Sequence: Synthetic oligonucleotide
  Antisense strand to SEQ ID NO: 2472432
guaucuggcgucaaacauc

SEQ ID NO: 2472434 - RNA, 19 nt, Artificial Sequence
  Description of Artificial Sequence: Synthetic oligonucleotide
  Sense strand starting at position 875 of SEQ ID NO: 1887437
ccuggcugaucuucuaaca

SEQ ID NO: 2472435 - RNA, 19 nt, Artificial Sequence
  Description of Artificial Sequence: Synthetic oligonucleotide
  Antisense strand to SEQ ID NO: 2472434
uguuagaagaucagccagg

SEQ ID NO: 2472436 - RNA, 19 nt, Artificial Sequence
  Description of Artificial Sequence: Synthetic oligonucleotide
  Sense strand starting at position 939 of SEQ ID NO: 1887437
ugggccagauaucuuuauu

SEQ ID NO: 2472437 - RNA, 19 nt, Artificial Sequence
  Description of Artificial Sequence: Synthetic oligonucleotide
  Antisense strand to SEQ ID NO: 2472436
aauaaagauaucuggccca

SEQ ID NO: 2472438 - RNA, 19 nt, Artificial Sequence
  Description of Artificial Sequence: Synthetic oligonucleotide
  Sense strand starting at position 1073 of SEQ ID NO: 1887437
cucgcuuauuugccuauua

SEQ ID NO: 2472439 - RNA, 19 nt, Artificial Sequence
  Description of Artificial Sequence: Synthetic oligonucleotide
  Antisense strand to SEQ ID NO: 2472438
uaauaggcaaauaagcgag

SEQ ID NO: 2472440 - RNA, 19 nt, Artificial Sequence
  Description of Artificial Sequence: Synthetic oligonucleotide
  Sense strand starting at position 1074 of SEQ ID NO: 1887437
ucgcuuauuugccuauuaa

SEQ ID NO: 2472441 - RNA, 19 nt, Artificial Sequence
  Description of Artificial Sequence: Synthetic oligonucleotide
  Antisense strand to SEQ ID NO: 2472440
uuaauaggcaaauaagcga

SEQ ID NO: 2472442 - RNA, 19 nt, Artificial Sequence
  Description of Artificial Sequence: Synthetic oligonucleotide
  Sense strand starting at position 1075 of SEQ ID NO: 1887437
cgcuuauuugccuauuaag

SEQ ID NO: 2472443 - RNA, 19 nt, Artificial Sequence
  Description of Artificial Sequence: Synthetic oligonucleotide
  Antisense strand to SEQ ID NO: 2472442
cuuaauaggcaaauaagcg

SEQ ID NO: 2472444 - RNA, 19 nt, Artificial Sequence
  Description of Artificial Sequence: Synthetic oligonucleotide
  Sense strand starting at position 1115 of SEQ ID NO: 1887437
gaggaauucuugucuguau

SEQ ID NO: 2472445 - RNA, 19 nt, Artificial Sequence
  Description of Artificial Sequence: Synthetic oligonucleotide
  Antisense strand to SEQ ID NO: 2472444
auacagacaagaauuccuc

SEQ ID NO: 2472446 - RNA, 19 nt, Artificial Sequence
  Description of Artificial Sequence: Synthetic oligonucleotide
  Sense strand starting at position 1116 of SEQ ID NO: 1887437
aggaauucuugucuguauu

SEQ ID NO: 2472447 - RNA, 19 nt, Artificial Sequence
  Description of Artificial Sequence: Synthetic oligonucleotide
  Antisense strand to SEQ ID NO: 2472446
aauacagacaagaauuccu

SEQ ID NO: 2472448 - RNA, 19 nt, Artificial Sequence
  Description of Artificial Sequence: Synthetic oligonucleotide
  Sense strand starting at position 1290 of SEQ ID NO: 1887437
gcgccuuucccaguucuga

SEQ ID NO: 2472449 - RNA, 19 nt, Artificial Sequence
  Description of Artificial Sequence: Synthetic oligonucleotide
  Antisense strand to SEQ ID NO: 2472448
ucagaacugggaaaggcgc

SEQ ID NO: 2472450 - RNA, 19 nt, Artificial Sequence
  Description of Artificial Sequence: Synthetic oligonucleotide
  Sense strand starting at position 1861 of SEQ ID NO: 1887437
cugcgauagcugcugcuaa

SEQ ID NO: 2472451 - RNA, 19 nt, Artificial Sequence
  Description of Artificial Sequence: Synthetic oligonucleotide
  Antisense strand to SEQ ID NO: 2472450
uuagcagcagcuaucgcag

SEQ ID NO: 2472452 - RNA, 19 nt, Artificial Sequence
  Description of Artificial Sequence: Synthetic oligonucleotide
  Sense strand starting at position 2056 of SEQ ID NO: 1887437
auucuaaggccucagugau

SEQ ID NO: 2472453 - RNA, 19 nt, Artificial Sequence
  Description of Artificial Sequence: Synthetic oligonucleotide
  Antisense strand to SEQ ID NO: 2472452
aucacugaggccuuagaau

SEQ ID NO: 2472454 - RNA, 19 nt, Artificial Sequence
  Description of Artificial Sequence: Synthetic oligonucleotide
  Sense strand starting at position 2068 of SEQ ID NO: 1887437
cagugauuggccuacagaa

SEQ ID NO: 2472455 - RNA, 19 nt, Artificial Sequence
  Description of Artificial Sequence: Synthetic oligonucleotide
  Antisense strand to SEQ ID NO: 2472454
uucuguaggccaaucacug

SEQ ID NO: 2472456 - RNA, 19 nt, Artificial Sequence
  Description of Artificial Sequence: Synthetic oligonucleotide
  Sense strand starting at position 2098 of SEQ ID NO: 1887437
ggcggaguccuauagaauu

SEQ ID NO: 2472457 - RNA, 19 nt, Artificial Sequence
  Description of Artificial Sequence: Synthetic oligonucleotide
  Antisense strand to SEQ ID NO: 2472456
aauucuauaggacuccgcc

SEQ ID NO: 2472458 - RNA, 19 nt, Artificial Sequence
  Description of Artificial Sequence: Synthetic oligonucleotide
  Sense strand starting at position 2126 of SEQ ID NO: 1887437
ggagcugugcacuacggaa

SEQ ID NO: 2472459 - RNA, 19 nt, Artificial Sequence
  Description of Artificial Sequence: Synthetic oligonucleotide
  Antisense strand to SEQ ID NO: 2472458
uuccguagugcacagcucc

SEQ ID NO: 2472460 - RNA, 19 nt, Artificial Sequence
  Description of Artificial Sequence: Synthetic oligonucleotide
  Sense strand starting at position 2440 of SEQ ID NO: 1887437
gaauaaaugugauuaaucg

SEQ ID NO: 2472461 - RNA, 19 nt, Artificial Sequence
  Description of Artificial Sequence: Synthetic oligonucleotide
  Antisense strand to SEQ ID NO: 2472460
cgauuaaucacauuuauuc

SEQ ID NO: 2472462 - RNA, 19 nt, Artificial Sequence
  Description of Artificial Sequence: Synthetic oligonucleotide
  Sense strand starting at position 2444 of SEQ ID NO: 1887437
aaaugugauuaaucguaac

SEQ ID NO: 2472463 - RNA, 19 nt, Artificial Sequence
  Description of Artificial Sequence: Synthetic oligonucleotide
  Antisense strand to SEQ ID NO: 2472462
guuacgauuaaucacauuu

SEQ ID NO: 2472464 - RNA, 19 nt, Artificial Sequence
  Description of Artificial Sequence: Synthetic oligonucleotide
  Sense strand starting at position 2482 of SEQ ID NO: 1887437
auggcauaugcuuauaugu

SEQ ID NO: 2472465 - RNA, 19 nt, Artificial Sequence
  Description of Artificial Sequence: Synthetic oligonucleotide
  Antisense strand to SEQ ID NO: 2472464
acauauaagcauaugccau

SEQ ID NO: 2472466 - RNA, 19 nt, Artificial Sequence
  Description of Artificial Sequence: Synthetic oligonucleotide
  Sense strand starting at position 2663 of SEQ ID NO: 1887437
cacucugggcucgagagau

SEQ ID NO: 2472467 - RNA, 19 nt, Artificial Sequence
  Description of Artificial Sequence: Synthetic oligonucleotide
  Antisense strand to SEQ ID NO: 2472466
aucucucgagcccagagug

SEQ ID NO: 2472468 - RNA, 19 nt, Artificial Sequence
  Description of Artificial Sequence: Synthetic oligonucleotide
  Sense strand starting at position 2908 of SEQ ID NO: 1887437
uuucuuuagguguaauagu

SEQ ID NO: 2472469 - RNA, 19 nt, Artificial Sequence
  Description of Artificial Sequence: Synthetic oligonucleotide
  Antisense strand to SEQ ID NO: 2472468
acuauuacaccuaaagaaa

SEQ ID NO: 2472470 - RNA, 19 nt, Artificial Sequence
  Description of Artificial Sequence: Synthetic oligonucleotide
  Sense strand starting at position 2915 of SEQ ID NO: 1887437
agguguaauaguggcauuu

SEQ ID NO: 2472471 - RNA, 19 nt, Artificial Sequence
  Description of Artificial Sequence: Synthetic oligonucleotide
  Antisense strand to SEQ ID NO: 2472470
aaaugccacuauuacaccu

SEQ ID NO: 2472472 - RNA, 19 nt, Artificial Sequence
  Description of Artificial Sequence: Synthetic oligonucleotide
  Sense strand starting at position 2962 of SEQ ID NO: 1887437
cuaagaaguuaacugaucu

SEQ ID NO: 2472473 - RNA, 19 nt, Artificial Sequence
  Description of Artificial Sequence: Synthetic oligonucleotide
  Antisense strand to SEQ ID NO: 2472472
agaucaguuaacuucuuag

SEQ ID NO: 2472474 - RNA, 19 nt, Artificial Sequence
  Description of Artificial Sequence: Synthetic oligonucleotide
  Sense strand starting at position 2966 of SEQ ID NO: 1887437
gaaguuaacugaucuuaug

SEQ ID NO: 2472475 - RNA, 19 nt, Artificial Sequence
  Description of Artificial Sequence: Synthetic oligonucleotide
  Antisense strand to SEQ ID NO: 2472474
cauaagaucaguuaacuuc

SEQ ID NO: 2472476 - RNA, 19 nt, Artificial Sequence
  Description of Artificial Sequence: Synthetic oligonucleotide
  Sense strand starting at position 2974 of SEQ ID NO: 1887437
cugaucuuauggccaggau

SEQ ID NO: 2472477 - RNA, 19 nt, Artificial Sequence
  Description of Artificial Sequence: Synthetic oligonucleotide
  Antisense strand to SEQ ID NO: 2472476
auccuggccauaagaucag

SEQ ID NO: 2472478 - RNA, 19 nt, Artificial Sequence
  Description of Artificial Sequence: Synthetic oligonucleotide
  Sense strand starting at position 3062 of SEQ ID NO: 1887437
agcugaagacauuggucau

SEQ ID NO: 2472479 - RNA, 19 nt, Artificial Sequence
  Description of Artificial Sequence: Synthetic oligonucleotide
  Antisense strand to SEQ ID NO: 2472478
augaccaaugucuucagcu

SEQ ID NO: 2472480 - RNA, 19 nt, Artificial Sequence
  Description of Artificial Sequence: Synthetic oligonucleotide
  Sense strand starting at position 3063 of SEQ ID NO: 1887437
gcugaagacauuggucaug

SEQ ID NO: 2472481 - RNA, 19 nt, Artificial Sequence
  Description of Artificial Sequence: Synthetic oligonucleotide
  Antisense strand to SEQ ID NO: 2472480
caugaccaaugucuucagc

SEQ ID NO: 2472482 - RNA, 19 nt, Artificial Sequence
  Description of Artificial Sequence: Synthetic oligonucleotide
  Sense strand starting at position 3080 of SEQ ID NO: 1887437
uggguuggugauggauaga

SEQ ID NO: 2472483 - RNA, 19 nt, Artificial Sequence
  Description of Artificial Sequence: Synthetic oligonucleotide
  Antisense strand to SEQ ID NO: 2472482
ucuauccaucaccaaccca

SEQ ID NO: 2472484 - RNA, 19 nt, Artificial Sequence
  Description of Artificial Sequence: Synthetic oligonucleotide
  Sense strand starting at position 3242 of SEQ ID NO: 1887437
gugagcaaacuccaaacau

SEQ ID NO: 2472485 - RNA, 19 nt, Artificial Sequence
  Description of Artificial Sequence: Synthetic oligonucleotide
  Antisense strand to SEQ ID NO: 2472484
auguuuggaguuugcucac

SEQ ID NO: 2472486 - RNA, 19 nt, Artificial Sequence
  Description of Artificial Sequence: Synthetic oligonucleotide
  Sense strand starting at position 3261 of SEQ ID NO: 1887437
gaagcagagaucugacgga

SEQ ID NO: 2472487 - RNA, 19 nt, Artificial Sequence
  Description of Artificial Sequence: Synthetic oligonucleotide
  Antisense strand to SEQ ID NO: 2472486
uccgucagaucucugcuuc

SEQ ID NO: 2472488 - RNA, 19 nt, Artificial Sequence
  Description of Artificial Sequence: Synthetic oligonucleotide
  Sense strand starting at position 3404 of SEQ ID NO: 1887437
ugccacagucaucauugua

SEQ ID NO: 2472489 - RNA, 19 nt, Artificial Sequence
  Description of Artificial Sequence: Synthetic oligonucleotide
  Antisense strand to SEQ ID NO: 2472488
uacaaugaugacuguggca

SEQ ID NO: 2472490 - RNA, 19 nt, Artificial Sequence
  Description of Artificial Sequence: Synthetic oligonucleotide
  Sense strand starting at position 3485 of SEQ ID NO: 1887437
cugccugagguguauugaa

SEQ ID NO: 2472491 - RNA, 19 nt, Artificial Sequence
  Description of Artificial Sequence: Synthetic oligonucleotide
  Antisense strand to SEQ ID NO: 2472490
uucaauacaccucaggcag

SEQ ID NO: 2472492 - RNA, 19 nt, Artificial Sequence
  Description of Artificial Sequence: Synthetic oligonucleotide
  Sense strand starting at position 3504 of SEQ ID NO: 1887437
guggcuugagcagagaaga

SEQ ID NO: 2472493 - RNA, 19 nt, Artificial Sequence
  Description of Artificial Sequence: Synthetic oligonucleotide
  Antisense strand to SEQ ID NO: 2472492
ucuucucugcucaagccac

SEQ ID NO: 2472494 - RNA, 19 nt, Artificial Sequence
  Description of Artificial Sequence: Synthetic oligonucleotide
  Sense strand starting at position 3572 of SEQ ID NO: 1887437
ugacucuuccaaggacaca

SEQ ID NO: 2472495 - RNA, 19 nt, Artificial Sequence
  Description of Artificial Sequence: Synthetic oligonucleotide
  Antisense strand to SEQ ID NO: 2472494
uguguccuuggaagaguca

SEQ ID NO: 2472496 - RNA, 19 nt, Artificial Sequence
  Description of Artificial Sequence: Synthetic oligonucleotide
  Sense strand starting at position 3649 of SEQ ID NO: 1887437
gcucuuguaucauuugacu

SEQ ID NO: 2472497 - RNA, 19 nt, Artificial Sequence
  Description of Artificial Sequence: Synthetic oligonucleotide
  Antisense strand to SEQ ID NO: 2472496
agucaaaugauacaagagc

SEQ ID NO: 2472498 - RNA, 19 nt, Artificial Sequence
  Description of Artificial Sequence: Synthetic oligonucleotide
  Sense strand starting at position 442 of SEQ ID NO: 1887438
cagcucuaugccuggcuua

SEQ ID NO: 2472499 - RNA, 19 nt, Artificial Sequence
  Description of Artificial Sequence: Synthetic oligonucleotide
  Antisense strand to SEQ ID NO: 2472498
uaagccaggcauagagcug

SEQ ID NO: 2472500 - RNA, 19 nt, Artificial Sequence
  Description of Artificial Sequence: Synthetic oligonucleotide
  Sense strand starting at position 443 of SEQ ID NO: 1887438
agcucuaugccuggcuuau

SEQ ID NO: 2472501 - RNA, 19 nt, Artificial Sequence
  Description of Artificial Sequence: Synthetic oligonucleotide
  Antisense strand to SEQ ID NO: 2472500
auaagccaggcauagagcu

SEQ ID NO: 2472502 - RNA, 19 nt, Artificial Sequence
  Description of Artificial Sequence: Synthetic oligonucleotide
  Sense strand starting at position 1291 of SEQ ID NO: 1887438
ugcuuuagguggucuugaa

SEQ ID NO: 2472503 - RNA, 19 nt, Artificial Sequence
  Description of Artificial Sequence: Synthetic oligonucleotide
  Antisense strand to SEQ ID NO: 2472502
uucaagaccaccuaaagca

SEQ ID NO: 2472504 - RNA, 19 nt, Artificial Sequence
  Description of Artificial Sequence: Synthetic oligonucleotide
  Sense strand starting at position 2228 of SEQ ID NO: 1887438
gcccgccucuagugugaaa

SEQ ID NO: 2472505 - RNA, 19 nt, Artificial Sequence
  Description of Artificial Sequence: Synthetic oligonucleotide
  Antisense strand to SEQ ID NO: 2472504
uuucacacuagaggcgggc

SEQ ID NO: 2472506 - RNA, 19 nt, Artificial Sequence
  Description of Artificial Sequence: Synthetic oligonucleotide
  Sense strand starting at position 2230 of SEQ ID NO: 1887438
ccgccucuagugugaaauu

SEQ ID NO: 2472507 - RNA, 19 nt, Artificial Sequence
  Description of Artificial Sequence: Synthetic oligonucleotide
  Antisense strand to SEQ ID NO: 2472506
aauuucacacuagaggcgg

SEQ ID NO: 2472508 - RNA, 19 nt, Artificial Sequence
  Description of Artificial Sequence: Synthetic oligonucleotide
  Sense strand starting at position 2836 of SEQ ID NO: 1887438
gcauguuccuucccgugaa

SEQ ID NO: 2472509 - RNA, 19 nt, Artificial Sequence
  Description of Artificial Sequence: Synthetic oligonucleotide
  Antisense strand to SEQ ID NO: 2472508
uucacgggaaggaacaugc

SEQ ID NO: 2472510 - RNA, 19 nt, Artificial Sequence
  Description of Artificial Sequence: Synthetic oligonucleotide
  Sense strand starting at position 2837 of SEQ ID NO: 1887438
cauguuccuucccgugaaa

SEQ ID NO: 2472511 - RNA, 19 nt, Artificial Sequence
  Description of Artificial Sequence: Synthetic oligonucleotide
  Antisense strand to SEQ ID NO: 2472510
uuucacgggaaggaacaug

SEQ ID NO: 2472512 - RNA, 19 nt, Artificial Sequence
  Description of Artificial Sequence: Synthetic oligonucleotide
  Sense strand starting at position 2849 of SEQ ID NO: 1887438
cgugaaaggguucgucauc

SEQ ID NO: 2472513 - RNA, 19 nt, Artificial Sequence
  Description of Artificial Sequence: Synthetic oligonucleotide
  Antisense strand to SEQ ID NO: 2472512
gaugacgaacccuuucacg

SEQ ID NO: 2472514 - RNA, 19 nt, Artificial Sequence
  Description of Artificial Sequence: Synthetic oligonucleotide
  Sense strand starting at position 2867 of SEQ ID NO: 1887438
cgcagcuguguuuaugaga

SEQ ID NO: 2472515 - RNA, 19 nt, Artificial Sequence
  Description of Artificial Sequence: Synthetic oligonucleotide
  Antisense strand to SEQ ID NO: 2472514
ucucauaaacacagcugcg

SEQ ID NO: 2472516 - RNA, 19 nt, Artificial Sequence
  Description of Artificial Sequence: Synthetic oligonucleotide
  Sense strand starting at position 2870 of SEQ ID NO: 1887438
agcuguguuuaugagauuc

SEQ ID NO: 2472517 - RNA, 19 nt, Artificial Sequence
  Description of Artificial Sequence: Synthetic oligonucleotide
  Antisense strand to SEQ ID NO: 2472516
gaaucucauaaacacagcu

SEQ ID NO: 2472518 - RNA, 19 nt, Artificial Sequence
  Description of Artificial Sequence: Synthetic oligonucleotide
  Sense strand starting at position 2878 of SEQ ID NO: 1887438
uuaugagauucuuugacuu

SEQ ID NO: 2472519 - RNA, 19 nt, Artificial Sequence
  Description of Artificial Sequence: Synthetic oligonucleotide
  Antisense strand to SEQ ID NO: 2472518
aagucaaagaaucucauaa

SEQ ID NO: 2472520 - RNA, 19 nt, Artificial Sequence
  Description of Artificial Sequence: Synthetic oligonucleotide
  Sense strand starting at position 2914 of SEQ ID NO: 1887438
ccgaaauuaugagugccuu

SEQ ID NO: 2472521 - RNA, 19 nt, Artificial Sequence
  Description of Artificial Sequence: Synthetic oligonucleotide
  Antisense strand to SEQ ID NO: 2472520
aaggcacucauaauuucgg

SEQ ID NO: 2472522 - RNA, 19 nt, Artificial Sequence
  Description of Artificial Sequence: Synthetic oligonucleotide
  Sense strand starting at position 2915 of SEQ ID NO: 1887438
cgaaauuaugagugccuua

SEQ ID NO: 2472523 - RNA, 19 nt, Artificial Sequence
  Description of Artificial Sequence: Synthetic oligonucleotide
  Antisense strand to SEQ ID NO: 2472522
uaaggcacucauaauuucg

SEQ ID NO: 2472524 - RNA, 19 nt, Artificial Sequence
  Description of Artificial Sequence: Synthetic oligonucleotide
  Sense strand starting at position 2989 of SEQ ID NO: 1887438
ucuuuaauguccugagcuu

SEQ ID NO: 2472525 - RNA, 19 nt, Artificial Sequence
  Description of Artificial Sequence: Synthetic oligonucleotide
  Antisense strand to SEQ ID NO: 2472524
aagcucaggacauuaaaga

SEQ ID NO: 2472526 - RNA, 19 nt, Artificial Sequence
  Description of Artificial Sequence: Synthetic oligonucleotide
  Sense strand starting at position 2990 of SEQ ID NO: 1887438
cuuuaauguccugagcuuu

SEQ ID NO: 2472527 - RNA, 19 nt, Artificial Sequence
  Description of Artificial Sequence: Synthetic oligonucleotide
  Antisense strand to SEQ ID NO: 2472526
aaagcucaggacauuaaag

SEQ ID NO: 2472528 - RNA, 19 nt, Artificial Sequence
  Description of Artificial Sequence: Synthetic oligonucleotide
  Sense strand starting at position 2996 of SEQ ID NO: 1887438
uguccugagcuuugccuau

SEQ ID NO: 2472529 - RNA, 19 nt, Artificial Sequence
  Description of Artificial Sequence: Synthetic oligonucleotide
  Antisense strand to SEQ ID NO: 2472528
auaggcaaagcucaggaca

SEQ ID NO: 2472530 - RNA, 19 nt, Artificial Sequence
  Description of Artificial Sequence: Synthetic oligonucleotide
  Sense strand starting at position 2998 of SEQ ID NO: 1887438
uccugagcuuugccuauaa

SEQ ID NO: 2472531 - RNA, 19 nt, Artificial Sequence
  Description of Artificial Sequence: Synthetic oligonucleotide
  Antisense strand to SEQ ID NO: 2472530
uuauaggcaaagcucagga

SEQ ID NO: 2472532 - RNA, 19 nt, Artificial Sequence
  Description of Artificial Sequence: Synthetic oligonucleotide
  Sense strand starting at position 3000 of SEQ ID NO: 1887438
cugagcuuugccuauaaua

SEQ ID NO: 2472533 - RNA, 19 nt, Artificial Sequence
  Description of Artificial Sequence: Synthetic oligonucleotide
  Antisense strand to SEQ ID NO: 2472532
uauuauaggcaaagcucag

SEQ ID NO: 2472534 - RNA, 19 nt, Artificial Sequence
  Description of Artificial Sequence: Synthetic oligonucleotide
  Sense strand starting at position 3423 of SEQ ID NO: 1887438
gagacugugucaggagaau

SEQ ID NO: 2472535 - RNA, 19 nt, Artificial Sequence
  Description of Artificial Sequence: Synthetic oligonucleotide
  Antisense strand to SEQ ID NO: 2472534
auucuccugacacagucuc

SEQ ID NO: 2472536 - RNA, 19 nt, Artificial Sequence
  Description of Artificial Sequence: Synthetic oligonucleotide
  Sense strand starting at position 3555 of SEQ ID NO: 1887438
ggaagaccuuccucuuucu

SEQ ID NO: 2472537 - RNA, 19 nt, Artificial Sequence
  Description of Artificial Sequence: Synthetic oligonucleotide
  Antisense strand to SEQ ID NO: 2472536
agaaagaggaaggucuucc

SEQ ID NO: 2472538 - RNA, 19 nt, Artificial Sequence
  Description of Artificial Sequence: Synthetic oligonucleotide
  Sense strand starting at position 3696 of SEQ ID NO: 1887438
gggauagaguugggacaaa

SEQ ID NO: 2472539 - RNA, 19 nt, Artificial Sequence
  Description of Artificial Sequence: Synthetic oligonucleotide
  Antisense strand to SEQ ID NO: 2472538
uuugucccaacucuauccc

SEQ ID NO: 2472540 - RNA, 19 nt, Artificial Sequence
  Description of Artificial Sequence: Synthetic oligonucleotide
  Sense strand starting at position 3716 of SEQ ID NO: 1887438
gaaguacugagugaggcua

SEQ ID NO: 2472541 - RNA, 19 nt, Artificial Sequence
  Description of Artificial Sequence: Synthetic oligonucleotide
  Antisense strand to SEQ ID NO: 2472540
uagccucacucaguacuuc

SEQ ID NO: 2472542 - RNA, 19 nt, Artificial Sequence
  Description of Artificial Sequence: Synthetic oligonucleotide
  Sense strand starting at position 3718 of SEQ ID NO: 1887438
aguacugagugaggcuaaa

SEQ ID NO: 2472543 - RNA, 19 nt, Artificial Sequence
  Description of Artificial Sequence: Synthetic oligonucleotide
  Antisense strand to SEQ ID NO: 2472542
uuuagccucacucaguacu

SEQ ID NO: 2472544 - RNA, 19 nt, Artificial Sequence
  Description of Artificial Sequence: Synthetic oligonucleotide
  Sense strand starting at position 3937 of SEQ ID NO: 1887438
gccagcucauucucuggaa

SEQ ID NO: 2472545 - RNA, 19 nt, Artificial Sequence
  Description of Artificial Sequence: Synthetic oligonucleotide
  Antisense strand to SEQ ID NO: 2472544
uuccagagaaugagcuggc

SEQ ID NO: 2472546 - RNA, 19 nt, Artificial Sequence
  Description of Artificial Sequence: Synthetic oligonucleotide
  Sense strand starting at position 3938 of SEQ ID NO: 1887438
ccagcucauucucuggaau

SEQ ID NO: 2472547 - RNA, 19 nt, Artificial Sequence
  Description of Artificial Sequence: Synthetic oligonucleotide
  Antisense strand to SEQ ID NO: 2472546
auuccagagaaugagcugg

SEQ ID NO: 2472548 - RNA, 19 nt, Artificial Sequence
  Description of Artificial Sequence: Synthetic oligonucleotide
  Sense strand starting at position 3940 of SEQ ID NO: 1887438
agcucauucucuggaaucu

SEQ ID NO: 2472549 - RNA, 19 nt, Artificial Sequence
  Description of Artificial Sequence: Synthetic oligonucleotide
  Antisense strand to SEQ ID NO: 2472548
agauuccagagaaugagcu

SEQ ID NO: 2472550 - RNA, 19 nt, Artificial Sequence
  Description of Artificial Sequence: Synthetic oligonucleotide
  Sense strand starting at position 462 of SEQ ID NO: 1887439
augagacagcgaugagaau

SEQ ID NO: 2472551 - RNA, 19 nt, Artificial Sequence
  Description of Artificial Sequence: Synthetic oligonucleotide
  Antisense strand to SEQ ID NO: 2472550
auucucaucgcugucucau

SEQ ID NO: 2472552 - RNA, 19 nt, Artificial Sequence
  Description of Artificial Sequence: Synthetic oligonucleotide
  Sense strand starting at position 471 of SEQ ID NO: 1887439
cgaugagaauaggaucaaa

SEQ ID NO: 2472553 - RNA, 19 nt, Artificial Sequence
  Description of Artificial Sequence: Synthetic oligonucleotide
  Antisense strand to SEQ ID NO: 2472552
uuugauccuauucucaucg

SEQ ID NO: 2472554 - RNA, 19 nt, Artificial Sequence
  Description of Artificial Sequence: Synthetic oligonucleotide
  Sense strand starting at position 497 of SEQ ID NO: 1887439
aggagaucagagugucuga

SEQ ID NO: 2472555 - RNA, 19 nt, Artificial Sequence
  Description of Artificial Sequence: Synthetic oligonucleotide
  Antisense strand to SEQ ID NO: 2472554
ucagacacucugaucuccu

SEQ ID NO: 2472556 - RNA, 19 nt, Artificial Sequence
  Description of Artificial Sequence: Synthetic oligonucleotide
  Sense strand starting at position 1417 of SEQ ID NO: 1887439
ggacccaggcucuaucuua

SEQ ID NO: 2472557 - RNA, 19 nt, Artificial Sequence
  Description of Artificial Sequence: Synthetic oligonucleotide
  Antisense strand to SEQ ID NO: 2472556
uaagauagagccugggucc

SEQ ID NO: 2472558 - RNA, 19 nt, Artificial Sequence
  Description of Artificial Sequence: Synthetic oligonucleotide
  Sense strand starting at position 1425 of SEQ ID NO: 1887439
gcucuaucuuaccgagcgu

SEQ ID NO: 2472559 - RNA, 19 nt, Artificial Sequence
  Description of Artificial Sequence: Synthetic oligonucleotide
  Antisense strand to SEQ ID NO: 2472558
acgcucgguaagauagagc

SEQ ID NO: 2472560 - RNA, 19 nt, Artificial Sequence
  Description of Artificial Sequence: Synthetic oligonucleotide
  Sense strand starting at position 1426 of SEQ ID NO: 1887439
cucuaucuuaccgagcguu

SEQ ID NO: 2472561 - RNA, 19 nt, Artificial Sequence
  Description of Artificial Sequence: Synthetic oligonucleotide
  Antisense strand to SEQ ID NO: 2472560
aacgcucgguaagauagag

SEQ ID NO: 2472562 - RNA, 19 nt, Artificial Sequence
  Description of Artificial Sequence: Synthetic oligonucleotide
  Sense strand starting at position 2083 of SEQ ID NO: 1887439
gucauuaagucucagggaa

SEQ ID NO: 2472563 - RNA, 19 nt, Artificial Sequence
  Description of Artificial Sequence: Synthetic oligonucleotide
  Antisense strand to SEQ ID NO: 2472562
uucccugagacuuaaugac

SEQ ID NO: 2472564 - RNA, 19 nt, Artificial Sequence
  Description of Artificial Sequence: Synthetic oligonucleotide
  Sense strand starting at position 2085 of SEQ ID NO: 1887439
cauuaagucucagggaauc

SEQ ID NO: 2472565 - RNA, 19 nt, Artificial Sequence
  Description of Artificial Sequence: Synthetic oligonucleotide
  Antisense strand to SEQ ID NO: 2472564
gauucccugagacuuaaug

SEQ ID NO: 2472566 - RNA, 19 nt, Artificial Sequence
  Description of Artificial Sequence: Synthetic oligonucleotide
  Sense strand starting at position 2128 of SEQ ID NO: 1887439
ggagcacggccuuaugaga

SEQ ID NO: 2472567 - RNA, 19 nt, Artificial Sequence
  Description of Artificial Sequence: Synthetic oligonucleotide
  Antisense strand to SEQ ID NO: 2472566
ucucauaaggccgugcucc

SEQ ID NO: 2472568 - RNA, 19 nt, Artificial Sequence
  Description of Artificial Sequence: Synthetic oligonucleotide
  Sense strand starting at position 2333 of SEQ ID NO: 1887439
gaggcugaguugguagaau

SEQ ID NO: 2472569 - RNA, 19 nt, Artificial Sequence
  Description of Artificial Sequence: Synthetic oligonucleotide
  Antisense strand to SEQ ID NO: 2472568
auucuaccaacucagccuc

SEQ ID NO: 2472570 - RNA, 19 nt, Artificial Sequence
  Description of Artificial Sequence: Synthetic oligonucleotide
  Sense strand starting at position 2534 of SEQ ID NO: 1887439
aggagagaagaucguuuga

SEQ ID NO: 2472571 - RNA, 19 nt, Artificial Sequence
  Description of Artificial Sequence: Synthetic oligonucleotide
  Antisense strand to SEQ ID NO: 2472570
ucaaacgaucuucucuccu

SEQ ID NO: 2472572 - RNA, 19 nt, Artificial Sequence
  Description of Artificial Sequence: Synthetic oligonucleotide
  Sense strand starting at position 2536 of SEQ ID NO: 1887439
gagagaagaucguuugagc

SEQ ID NO: 2472573 - RNA, 19 nt, Artificial Sequence
  Description of Artificial Sequence: Synthetic oligonucleotide
  Antisense strand to SEQ ID NO: 2472572
gcucaaacgaucuucucuc

SEQ ID NO: 2472574 - RNA, 19 nt, Artificial Sequence
  Description of Artificial Sequence: Synthetic oligonucleotide
  Sense strand starting at position 2539 of SEQ ID NO: 1887439
agaagaucguuugagccua

SEQ ID NO: 2472575 - RNA, 19 nt, Artificial Sequence
  Description of Artificial Sequence: Synthetic oligonucleotide
  Antisense strand to SEQ ID NO: 2472574
uaggcucaaacgaucuucu

SEQ ID NO: 2472576 - RNA, 19 nt, Artificial Sequence
  Description of Artificial Sequence: Synthetic oligonucleotide
  Sense strand starting at position 2544 of SEQ ID NO: 1887439
aucguuugagccuacuagu

SEQ ID NO: 2472577 - RNA, 19 nt, Artificial Sequence
  Description of Artificial Sequence: Synthetic oligonucleotide
  Antisense strand to SEQ ID NO: 2472576
acuaguaggcucaaacgau

SEQ ID NO: 2472578 - RNA, 19 nt, Artificial Sequence
  Description of Artificial Sequence: Synthetic oligonucleotide
  Sense strand starting at position 2712 of SEQ ID NO: 1887439
cugggcucacugcaacauu

SEQ ID NO: 2472579 - RNA, 19 nt, Artificial Sequence
  Description of Artificial Sequence: Synthetic oligonucleotide
  Antisense strand to SEQ ID NO: 2472578
aauguugcagugagcccag

SEQ ID NO: 2472580 - RNA, 19 nt, Artificial Sequence
  Description of Artificial Sequence: Synthetic oligonucleotide
  Sense strand starting at position 2922 of SEQ ID NO: 1887439
cggagaccuugucuuuguu

SEQ ID NO: 2472581 - RNA, 19 nt, Artificial Sequence
  Description of Artificial Sequence: Synthetic oligonucleotide
  Antisense strand to SEQ ID NO: 2472580
aacaaagacaaggucuccg

SEQ ID NO: 2472582 - RNA, 19 nt, Artificial Sequence
  Description of Artificial Sequence: Synthetic oligonucleotide
  Sense strand starting at position 3344 of SEQ ID NO: 1887439
cucugagagucuuaguguc

SEQ ID NO: 2472583 - RNA, 19 nt, Artificial Sequence
  Description of Artificial Sequence: Synthetic oligonucleotide
  Antisense strand to SEQ ID NO: 2472582
gacacuaagacucucagag

SEQ ID NO: 2472584 - RNA, 19 nt, Artificial Sequence
  Description of Artificial Sequence: Synthetic oligonucleotide
  Sense strand starting at position 3350 of SEQ ID NO: 1887439
gagucuuagugucccaucu

SEQ ID NO: 2472585 - RNA, 19 nt, Artificial Sequence
  Description of Artificial Sequence: Synthetic oligonucleotide
  Antisense strand to SEQ ID NO: 2472584
agaugggacacuaagacuc

SEQ ID NO: 2472586 - RNA, 19 nt, Artificial Sequence
  Description of Artificial Sequence: Synthetic oligonucleotide
  Sense strand starting at position 3374 of SEQ ID NO: 1887439
augugagaauccuaacgag

SEQ ID NO: 2472587 - RNA, 19 nt, Artificial Sequence
  Description of Artificial Sequence: Synthetic oligonucleotide
  Antisense strand to SEQ ID NO: 2472586
cucguuaggauucucacau

SEQ ID NO: 2472588 - RNA, 19 nt, Artificial Sequence
  Description of Artificial Sequence: Synthetic oligonucleotide
  Sense strand starting at position 3377 of SEQ ID NO: 1887439
ugagaauccuaacgagguu

SEQ ID NO: 2472589 - RNA, 19 nt, Artificial Sequence
  Description of Artificial Sequence: Synthetic oligonucleotide
  Antisense strand to SEQ ID NO: 2472588
aaccucguuaggauucuca

SEQ ID NO: 2472590 - RNA, 19 nt, Artificial Sequence
  Description of Artificial Sequence: Synthetic oligonucleotide
  Sense strand starting at position 3380 of SEQ ID NO: 1887439
gaauccuaacgagguugau

SEQ ID NO: 2472591 - RNA, 19 nt, Artificial Sequence
  Description of Artificial Sequence: Synthetic oligonucleotide
  Antisense strand to SEQ ID NO: 2472590
aucaaccucguuaggauuc

SEQ ID NO: 2472592 - RNA, 19 nt, Artificial Sequence
  Description of Artificial Sequence: Synthetic oligonucleotide
  Sense strand starting at position 3484 of SEQ ID NO: 1887439
caauaaagcuguuuguguu

SEQ ID NO: 2472593 - RNA, 19 nt, Artificial Sequence
  Description of Artificial Sequence: Synthetic oligonucleotide
  Antisense strand to SEQ ID NO: 2472592
aacacaaacagcuuuauug

SEQ ID NO: 2472594 - RNA, 19 nt, Artificial Sequence
  Description of Artificial Sequence: Synthetic oligonucleotide
  Sense strand starting at position 3485 of SEQ ID NO: 1887439
aauaaagcuguuuguguuu

SEQ ID NO: 2472595 - RNA, 19 nt, Artificial Sequence
  Description of Artificial Sequence: Synthetic oligonucleotide
  Antisense strand to SEQ ID NO: 2472594
aaacacaaacagcuuuauu

SEQ ID NO: 2472596 - RNA, 19 nt, Artificial Sequence
  Description of Artificial Sequence: Synthetic oligonucleotide
  Sense strand starting at position 3487 of SEQ ID NO: 1887439
uaaagcuguuuguguuuau

SEQ ID NO: 2472597 - RNA, 19 nt, Artificial Sequence
  Description of Artificial Sequence: Synthetic oligonucleotide
  Antisense strand to SEQ ID NO: 2472596
auaaacacaaacagcuuua

SEQ ID NO: 2472598 - RNA, 19 nt, Artificial Sequence
  Description of Artificial Sequence: Synthetic oligonucleotide
  Sense strand starting at position 3488 of SEQ ID NO: 1887439
aaagcuguuuguguuuauu

SEQ ID NO: 2472599 - RNA, 19 nt, Artificial Sequence
  Description of Artificial Sequence: Synthetic oligonucleotide
  Antisense strand to SEQ ID NO: 2472598
aauaaacacaaacagcuuu

SEQ ID NO: 2472600 - RNA, 19 nt, Artificial Sequence
  Description of Artificial Sequence: Synthetic oligonucleotide
  Sense strand starting at position 3644 of SEQ ID NO: 1887439
caccgagccuggcuuaauu

SEQ ID NO: 2472601 - RNA, 19 nt, Artificial Sequence
  Description of Artificial Sequence: Synthetic oligonucleotide
  Antisense strand to SEQ ID NO: 2472600
aauuaagccaggcucggug

SEQ ID NO: 2472602 - RNA, 19 nt, Artificial Sequence
  Description of Artificial Sequence: Synthetic oligonucleotide
  Sense strand starting at position 3682 of SEQ ID NO: 1887439
caggaaauguugcuauguu

SEQ ID NO: 2472603 - RNA, 19 nt, Artificial Sequence
  Description of Artificial Sequence: Synthetic oligonucleotide
  Antisense strand to SEQ ID NO: 2472602
aacauagcaacauuuccug

SEQ ID NO: 2472604 - RNA, 19 nt, Artificial Sequence
  Description of Artificial Sequence: Synthetic oligonucleotide
  Sense strand starting at position 3683 of SEQ ID NO: 1887439
aggaaauguugcuauguug

SEQ ID NO: 2472605 - RNA, 19 nt, Artificial Sequence
  Description of Artificial Sequence: Synthetic oligonucleotide
  Antisense strand to SEQ ID NO: 2472604
caacauagcaacauuuccu

SEQ ID NO: 2472606 - RNA, 19 nt, Artificial Sequence
  Description of Artificial Sequence: Synthetic oligonucleotide
  Sense strand starting at position 3741 of SEQ ID NO: 1887439
cuaucauggccucaguacu

SEQ ID NO: 2472607 - RNA, 19 nt, Artificial Sequence
  Description of Artificial Sequence: Synthetic oligonucleotide
  Antisense strand to SEQ ID NO: 2472606
aguacugaggccaugauag

SEQ ID NO: 2472608 - RNA, 19 nt, Artificial Sequence
  Description of Artificial Sequence: Synthetic oligonucleotide
  Sense strand starting at position 3790 of SEQ ID NO: 1887439
ggauguaugauccaggccu

SEQ ID NO: 2472609 - RNA, 19 nt, Artificial Sequence
  Description of Artificial Sequence: Synthetic oligonucleotide
  Antisense strand to SEQ ID NO: 2472608
aggccuggaucauacaucc

SEQ ID NO: 2472610 - RNA, 19 nt, Artificial Sequence
  Description of Artificial Sequence: Synthetic oligonucleotide
  Sense strand starting at position 3836 of SEQ ID NO: 1887439
guacaugacuagcucuuaa

SEQ ID NO: 2472611 - RNA, 19 nt, Artificial Sequence
  Description of Artificial Sequence: Synthetic oligonucleotide
  Antisense strand to SEQ ID NO: 2472610
uuaagagcuagucauguac

SEQ ID NO: 2472612 - RNA, 19 nt, Artificial Sequence
  Description of Artificial Sequence: Synthetic oligonucleotide
  Sense strand starting at position 3840 of SEQ ID NO: 1887439
augacuagcucuuaauuga

SEQ ID NO: 2472613 - RNA, 19 nt, Artificial Sequence
  Description of Artificial Sequence: Synthetic oligonucleotide
  Antisense strand to SEQ ID NO: 2472612
ucaauuaagagcuagucau

SEQ ID NO: 2472614 - RNA, 19 nt, Artificial Sequence
  Description of Artificial Sequence: Synthetic oligonucleotide
  Sense strand starting at position 3851 of SEQ ID NO: 1887439
uuaauugaaggucauguau

SEQ ID NO: 2472615 - RNA, 19 nt, Artificial Sequence
  Description of Artificial Sequence: Synthetic oligonucleotide
  Antisense strand to SEQ ID NO: 2472614
auacaugaccuucaauuaa

SEQ ID NO: 2472616 - RNA, 19 nt, Artificial Sequence
  Description of Artificial Sequence: Synthetic oligonucleotide
  Sense strand starting at position 3882 of SEQ ID NO: 1887439
guccaaucauauccagaug

SEQ ID NO: 2472617 - RNA, 19 nt, Artificial Sequence
  Description of Artificial Sequence: Synthetic oligonucleotide
  Antisense strand to SEQ ID NO: 2472616
caucuggauaugauuggac

SEQ ID NO: 2472618 - RNA, 19 nt, Artificial Sequence
  Description of Artificial Sequence: Synthetic oligonucleotide
  Sense strand starting at position 3893 of SEQ ID NO: 1887439
uccagaugcugagagaacu

SEQ ID NO: 2472619 - RNA, 19 nt, Artificial Sequence
  Description of Artificial Sequence: Synthetic oligonucleotide
  Antisense strand to SEQ ID NO: 2472618
aguucucucagcaucugga

SEQ ID NO: 2472620 - RNA, 19 nt, Artificial Sequence
  Description of Artificial Sequence: Synthetic oligonucleotide
  Sense strand starting at position 385 of SEQ ID NO: 1887440
gacggaauguugcuuuguu

SEQ ID NO: 2472621 - RNA, 19 nt, Artificial Sequence
  Description of Artificial Sequence: Synthetic oligonucleotide
  Antisense strand to SEQ ID NO: 2472620
aacaaagcaacauuccguc

SEQ ID NO: 2472622 - RNA, 19 nt, Artificial Sequence
  Description of Artificial Sequence: Synthetic oligonucleotide
  Sense strand starting at position 704 of SEQ ID NO: 1887440
gggaaacugucccugacgu

SEQ ID NO: 2472623 - RNA, 19 nt, Artificial Sequence
  Description of Artificial Sequence: Synthetic oligonucleotide
  Antisense strand to SEQ ID NO: 2472622
acgucagggacaguuuccc

SEQ ID NO: 2472624 - RNA, 19 nt, Artificial Sequence
  Description of Artificial Sequence: Synthetic oligonucleotide
  Sense strand starting at position 712 of SEQ ID NO: 1887440
gucccugacgucugagauc

SEQ ID NO: 2472625 - RNA, 19 nt, Artificial Sequence
  Description of Artificial Sequence: Synthetic oligonucleotide
  Antisense strand to SEQ ID NO: 2472624
gaucucagacgucagggac

SEQ ID NO: 2472626 - RNA, 19 nt, Artificial Sequence
  Description of Artificial Sequence: Synthetic oligonucleotide
  Sense strand starting at position 721 of SEQ ID NO: 1887440
gucugagauccuugagauc

SEQ ID NO: 2472627 - RNA, 19 nt, Artificial Sequence
  Description of Artificial Sequence: Synthetic oligonucleotide
  Antisense strand to SEQ ID NO: 2472626
gaucucaaggaucucagac

SEQ ID NO: 2472628 - RNA, 19 nt, Artificial Sequence
  Description of Artificial Sequence: Synthetic oligonucleotide
  Sense strand starting at position 1437 of SEQ ID NO: 1887440
ggcucaagccgcugggaau

SEQ ID NO: 2472629 - RNA, 19 nt, Artificial Sequence
  Description of Artificial Sequence: Synthetic oligonucleotide
  Antisense strand to SEQ ID NO: 2472628
auucccagcggcuugagcc

SEQ ID NO: 2472630 - RNA, 19 nt, Artificial Sequence
  Description of Artificial Sequence: Synthetic oligonucleotide
  Sense strand starting at position 1438 of SEQ ID NO: 1887440
gcucaagccgcugggaauu

SEQ ID NO: 2472631 - RNA, 19 nt, Artificial Sequence
  Description of Artificial Sequence: Synthetic oligonucleotide
  Antisense strand to SEQ ID NO: 2472630
aauucccagcggcuugagc

SEQ ID NO: 2472632 - RNA, 19 nt, Artificial Sequence
  Description of Artificial Sequence: Synthetic oligonucleotide
  Sense strand starting at position 1545 of SEQ ID NO: 1887440
uguggagauccauacguca

SEQ ID NO: 2472633 - RNA, 19 nt, Artificial Sequence
  Description of Artificial Sequence: Synthetic oligonucleotide
  Antisense strand to SEQ ID NO: 2472632
ugacguauggaucuccaca

SEQ ID NO: 2472634 - RNA, 19 nt, Artificial Sequence
  Description of Artificial Sequence: Synthetic oligonucleotide
  Sense strand starting at position 1547 of SEQ ID NO: 1887440
uggagauccauacgucauc

SEQ ID NO: 2472635 - RNA, 19 nt, Artificial Sequence
  Description of Artificial Sequence: Synthetic oligonucleotide
  Antisense strand to SEQ ID NO: 2472634
gaugacguauggaucucca

SEQ ID NO: 2472636 - RNA, 19 nt, Artificial Sequence
  Description of Artificial Sequence: Synthetic oligonucleotide
  Sense strand starting at position 1552 of SEQ ID NO: 1887440
auccauacgucaucgguua

SEQ ID NO: 2472637 - RNA, 19 nt, Artificial Sequence
  Description of Artificial Sequence: Synthetic oligonucleotide
  Antisense strand to SEQ ID NO: 2472636
uaaccgaugacguauggau

SEQ ID NO: 2472638 - RNA, 19 nt, Artificial Sequence
  Description of Artificial Sequence: Synthetic oligonucleotide
  Sense strand starting at position 1554 of SEQ ID NO: 1887440
ccauacgucaucgguuacu

SEQ ID NO: 2472639 - RNA, 19 nt, Artificial Sequence
  Description of Artificial Sequence: Synthetic oligonucleotide
  Antisense strand to SEQ ID NO: 2472638
aguaaccgaugacguaugg

SEQ ID NO: 2472640 - RNA, 19 nt, Artificial Sequence
  Description of Artificial Sequence: Synthetic oligonucleotide
  Sense strand starting at position 1574 of SEQ ID NO: 1887440
gggcucuccugggcagauu

SEQ ID NO: 2472641 - RNA, 19 nt, Artificial Sequence
  Description of Artificial Sequence: Synthetic oligonucleotide
  Antisense strand to SEQ ID NO: 2472640
aaucugcccaggagagccc

SEQ ID NO: 2472642 - RNA, 19 nt, Artificial Sequence
  Description of Artificial Sequence: Synthetic oligonucleotide
  Sense strand starting at position 2534 of SEQ ID NO: 1887440
cccugauauucucugggcu

SEQ ID NO: 2472643 - RNA, 19 nt, Artificial Sequence
  Description of Artificial Sequence: Synthetic oligonucleotide
  Antisense strand to SEQ ID NO: 2472642
agcccagagaauaucaggg

SEQ ID NO: 2472644 - RNA, 19 nt, Artificial Sequence
  Description of Artificial Sequence: Synthetic oligonucleotide
  Sense strand starting at position 2536 of SEQ ID NO: 1887440
cugauauucucugggcucu

SEQ ID NO: 2472645 - RNA, 19 nt, Artificial Sequence
  Description of Artificial Sequence: Synthetic oligonucleotide
  Antisense strand to SEQ ID NO: 2472644
agagcccagagaauaucag

SEQ ID NO: 2472646 - RNA, 19 nt, Artificial Sequence
  Description of Artificial Sequence: Synthetic oligonucleotide
  Sense strand starting at position 2548 of SEQ ID NO: 1887440
gggcucuuaacuugaugau

SEQ ID NO: 2472647 - RNA, 19 nt, Artificial Sequence
  Description of Artificial Sequence: Synthetic oligonucleotide
  Antisense strand to SEQ ID NO: 2472646
aucaucaaguuaagagccc

SEQ ID NO: 2472648 - RNA, 19 nt, Artificial Sequence
  Description of Artificial Sequence: Synthetic oligonucleotide
  Sense strand starting at position 2549 of SEQ ID NO: 1887440
ggcucuuaacuugaugauu

SEQ ID NO: 2472649 - RNA, 19 nt, Artificial Sequence
  Description of Artificial Sequence: Synthetic oligonucleotide
  Antisense strand to SEQ ID NO: 2472648
aaucaucaaguuaagagcc

SEQ ID NO: 2472650 - RNA, 19 nt, Artificial Sequence
  Description of Artificial Sequence: Synthetic oligonucleotide
  Sense strand starting at position 2601 of SEQ ID NO: 1887440
gccuuagcuggacacuaaa

SEQ ID NO: 2472651 - RNA, 19 nt, Artificial Sequence
  Description of Artificial Sequence: Synthetic oligonucleotide
  Antisense strand to SEQ ID NO: 2472650
uuuaguguccagcuaaggc

SEQ ID NO: 2472652 - RNA, 19 nt, Artificial Sequence
  Description of Artificial Sequence: Synthetic oligonucleotide
  Sense strand starting at position 2938 of SEQ ID NO: 1887440
gcugcaaagcucugagugu

SEQ ID NO: 2472653 - RNA, 19 nt, Artificial Sequence
  Description of Artificial Sequence: Synthetic oligonucleotide
  Antisense strand to SEQ ID NO: 2472652
acacucagagcuuugcagc

SEQ ID NO: 2472654 - RNA, 19 nt, Artificial Sequence
  Description of Artificial Sequence: Synthetic oligonucleotide
  Sense strand starting at position 2939 of SEQ ID NO: 1887440
cugcaaagcucugagugua

SEQ ID NO: 2472655 - RNA, 19 nt, Artificial Sequence
  Description of Artificial Sequence: Synthetic oligonucleotide
  Antisense strand to SEQ ID NO: 2472654
uacacucagagcuuugcag

SEQ ID NO: 2472656 - RNA, 19 nt, Artificial Sequence
  Description of Artificial Sequence: Synthetic oligonucleotide
  Sense strand starting at position 3976 of SEQ ID NO: 1887440
ggaagguuguggugagaug

SEQ ID NO: 2472657 - RNA, 19 nt, Artificial Sequence
  Description of Artificial Sequence: Synthetic oligonucleotide
  Antisense strand to SEQ ID NO: 2472656
caucucaccacaaccuucc

SEQ ID NO: 2472658 - RNA, 19 nt, Artificial Sequence
  Description of Artificial Sequence: Synthetic oligonucleotide
  Sense strand starting at position 3977 of SEQ ID NO: 1887440
gaagguuguggugagauga

SEQ ID NO: 2472659 - RNA, 19 nt, Artificial Sequence
  Description of Artificial Sequence: Synthetic oligonucleotide
  Antisense strand to SEQ ID NO: 2472658
ucaucucaccacaaccuuc

SEQ ID NO: 2472660 - RNA, 19 nt, Artificial Sequence
  Description of Artificial Sequence: Synthetic oligonucleotide
  Sense strand starting at position 160 of SEQ ID NO: 1887441
ugagcuaccucuguggaca

SEQ ID NO: 2472661 - RNA, 19 nt, Artificial Sequence
  Description of Artificial Sequence: Synthetic oligonucleotide
  Antisense strand to SEQ ID NO: 2472660
uguccacagagguagcuca

SEQ ID NO: 2472662 - RNA, 19 nt, Artificial Sequence
  Description of Artificial Sequence: Synthetic oligonucleotide
  Sense strand starting at position 342 of SEQ ID NO: 1887441
ugccuuggccggugacuua

SEQ ID NO: 2472663 - RNA, 19 nt, Artificial Sequence
  Description of Artificial Sequence: Synthetic oligonucleotide
  Antisense strand to SEQ ID NO: 2472662
uaagucaccggccaaggca

SEQ ID NO: 2472664 - RNA, 19 nt, Artificial Sequence
  Description of Artificial Sequence: Synthetic oligonucleotide
  Sense strand starting at position 407 of SEQ ID NO: 1887441
auaucuaccucaggguuau

SEQ ID NO: 2472665 - RNA, 19 nt, Artificial Sequence
  Description of Artificial Sequence: Synthetic oligonucleotide
  Antisense strand to SEQ ID NO: 2472664
auaacccugagguagauau

SEQ ID NO: 2472666 - RNA, 19 nt, Artificial Sequence
  Description of Artificial Sequence: Synthetic oligonucleotide
  Sense strand starting at position 417 of SEQ ID NO: 1887441
caggguuaucgugagaauu

SEQ ID NO: 2472667 - RNA, 19 nt, Artificial Sequence
  Description of Artificial Sequence: Synthetic oligonucleotide
  Antisense strand to SEQ ID NO: 2472666
aauucucacgauaacccug

SEQ ID NO: 2472668 - RNA, 19 nt, Artificial Sequence
  Description of Artificial Sequence: Synthetic oligonucleotide
  Sense strand starting at position 471 of SEQ ID NO: 1887441
cuugcacauugucuacaua

SEQ ID NO: 2472669 - RNA, 19 nt, Artificial Sequence
  Description of Artificial Sequence: Synthetic oligonucleotide
  Antisense strand to SEQ ID NO: 2472668
uauguagacaaugugcaag

SEQ ID NO: 2472670 - RNA, 19 nt, Artificial Sequence
  Description of Artificial Sequence: Synthetic oligonucleotide
  Sense strand starting at position 474 of SEQ ID NO: 1887441
gcacauugucuacauacgu

SEQ ID NO: 2472671 - RNA, 19 nt, Artificial Sequence
  Description of Artificial Sequence: Synthetic oligonucleotide
  Antisense strand to SEQ ID NO: 2472670
acguauguagacaaugugc

SEQ ID NO: 2472672 - RNA, 19 nt, Artificial Sequence
  Description of Artificial Sequence: Synthetic oligonucleotide
  Sense strand starting at position 478 of SEQ ID NO: 1887441
auugucuacauacguguua

SEQ ID NO: 2472673 - RNA, 19 nt, Artificial Sequence
  Description of Artificial Sequence: Synthetic oligonucleotide
  Antisense strand to SEQ ID NO: 2472672
uaacacguauguagacaau

SEQ ID NO: 2472674 - RNA, 19 nt, Artificial Sequence
  Description of Artificial Sequence: Synthetic oligonucleotide
  Sense strand starting at position 479 of SEQ ID NO: 1887441
uugucuacauacguguuaa

SEQ ID NO: 2472675 - RNA, 19 nt, Artificial Sequence
  Description of Artificial Sequence: Synthetic oligonucleotide
  Antisense strand to SEQ ID NO: 2472674
uuaacacguauguagacaa

SEQ ID NO: 2472676 - RNA, 19 nt, Artificial Sequence
  Description of Artificial Sequence: Synthetic oligonucleotide
  Sense strand starting at position 480 of SEQ ID NO: 1887441
ugucuacauacguguuaaa

SEQ ID NO: 2472677 - RNA, 19 nt, Artificial Sequence
  Description of Artificial Sequence: Synthetic oligonucleotide
  Antisense strand to SEQ ID NO: 2472676
uuuaacacguauguagaca

SEQ ID NO: 2472678 - RNA, 19 nt, Artificial Sequence
  Description of Artificial Sequence: Synthetic oligonucleotide
  Sense strand starting at position 483 of SEQ ID NO: 1887441
cuacauacguguuaaauuu

SEQ ID NO: 2472679 - RNA, 19 nt, Artificial Sequence
  Description of Artificial Sequence: Synthetic oligonucleotide
  Antisense strand to SEQ ID NO: 2472678
aaauuuaacacguauguag

SEQ ID NO: 2472680 - RNA, 19 nt, Artificial Sequence
  Description of Artificial Sequence: Synthetic oligonucleotide
  Sense strand starting at position 697 of SEQ ID NO: 1887441
aucuguuagccaggaugau

SEQ ID NO: 2472681 - RNA, 19 nt, Artificial Sequence
  Description of Artificial Sequence: Synthetic oligonucleotide
  Antisense strand to SEQ ID NO: 2472680
aucauccuggcuaacagau

SEQ ID NO: 2472682 - RNA, 19 nt, Artificial Sequence
  Description of Artificial Sequence: Synthetic oligonucleotide
  Sense strand starting at position 787 of SEQ ID NO: 1887441
cgugccuggcccuguauua

SEQ ID NO: 2472683 - RNA, 19 nt, Artificial Sequence
  Description of Artificial Sequence: Synthetic oligonucleotide
  Antisense strand to SEQ ID NO: 2472682
uaauacagggccaggcacg

SEQ ID NO: 2472684 - RNA, 19 nt, Artificial Sequence
  Description of Artificial Sequence: Synthetic oligonucleotide
  Sense strand starting at position 821 of SEQ ID NO: 1887441
acuggauaaugcugaucua

SEQ ID NO: 2472685 - RNA, 19 nt, Artificial Sequence
  Description of Artificial Sequence: Synthetic oligonucleotide
  Antisense strand to SEQ ID NO: 2472684
uagaucagcauuauccagu

SEQ ID NO: 2472686 - RNA, 19 nt, Artificial Sequence
  Description of Artificial Sequence: Synthetic oligonucleotide
  Sense strand starting at position 2097 of SEQ ID NO: 1887441
guggcaaucagaggucaug

SEQ ID NO: 2472687 - RNA, 19 nt, Artificial Sequence
  Description of Artificial Sequence: Synthetic oligonucleotide
  Antisense strand to SEQ ID NO: 2472686
caugaccucugauugccac

SEQ ID NO: 2472688 - RNA, 19 nt, Artificial Sequence
  Description of Artificial Sequence: Synthetic oligonucleotide
  Sense strand starting at position 2620 of SEQ ID NO: 1887441
gaagaaagcucuuaccgug

SEQ ID NO: 2472689 - RNA, 19 nt, Artificial Sequence
  Description of Artificial Sequence: Synthetic oligonucleotide
  Antisense strand to SEQ ID NO: 2472688
cacgguaagagcuuucuuc

SEQ ID NO: 2472690 - RNA, 19 nt, Artificial Sequence
  Description of Artificial Sequence: Synthetic oligonucleotide
  Sense strand starting at position 2626 of SEQ ID NO: 1887441
agcucuuaccguggagacu

SEQ ID NO: 2472691 - RNA, 19 nt, Artificial Sequence
  Description of Artificial Sequence: Synthetic oligonucleotide
  Antisense strand to SEQ ID NO: 2472690
agucuccacgguaagagcu

SEQ ID NO: 2472692 - RNA, 19 nt, Artificial Sequence
  Description of Artificial Sequence: Synthetic oligonucleotide
  Sense strand starting at position 2644 of SEQ ID NO: 1887441
uggcaauauaggugcucaa

SEQ ID NO: 2472693 - RNA, 19 nt, Artificial Sequence
  Description of Artificial Sequence: Synthetic oligonucleotide
  Antisense strand to SEQ ID NO: 2472692
uugagcaccuauauugcca

SEQ ID NO: 2472694 - RNA, 19 nt, Artificial Sequence
  Description of Artificial Sequence: Synthetic oligonucleotide
  Sense strand starting at position 2647 of SEQ ID NO: 1887441
caauauaggugcucaaaga

SEQ ID NO: 2472695 - RNA, 19 nt, Artificial Sequence
  Description of Artificial Sequence: Synthetic oligonucleotide
  Antisense strand to SEQ ID NO: 2472694
ucuuugagcaccuauauug

SEQ ID NO: 2472696 - RNA, 19 nt, Artificial Sequence
  Description of Artificial Sequence: Synthetic oligonucleotide
  Sense strand starting at position 2657 of SEQ ID NO: 1887441
gcucaaagaucauugcugu

SEQ ID NO: 2472697 - RNA, 19 nt, Artificial Sequence
  Description of Artificial Sequence: Synthetic oligonucleotide
  Antisense strand to SEQ ID NO: 2472696
acagcaaugaucuuugagc

SEQ ID NO: 2472698 - RNA, 19 nt, Artificial Sequence
  Description of Artificial Sequence: Synthetic oligonucleotide
  Sense strand starting at position 2658 of SEQ ID NO: 1887441
cucaaagaucauugcuguu

SEQ ID NO: 2472699 - RNA, 19 nt, Artificial Sequence
  Description of Artificial Sequence: Synthetic oligonucleotide
  Antisense strand to SEQ ID NO: 2472698
aacagcaaugaucuuugag

SEQ ID NO: 2472700 - RNA, 19 nt, Artificial Sequence
  Description of Artificial Sequence: Synthetic oligonucleotide
  Sense strand starting at position 2996 of SEQ ID NO: 1887441
gugucuaauuucuccuagu

SEQ ID NO: 2472701 - RNA, 19 nt, Artificial Sequence
  Description of Artificial Sequence: Synthetic oligonucleotide
  Antisense strand to SEQ ID NO: 2472700
acuaggagaaauuagacac

SEQ ID NO: 2472702 - RNA, 19 nt, Artificial Sequence
  Description of Artificial Sequence: Synthetic oligonucleotide
  Sense strand starting at position 2997 of SEQ ID NO: 1887441
ugucuaauuucuccuaguc

SEQ ID NO: 2472703 - RNA, 19 nt, Artificial Sequence
  Description of Artificial Sequence: Synthetic oligonucleotide
  Antisense strand to SEQ ID NO: 2472702
gacuaggagaaauuagaca

SEQ ID NO: 2472704 - RNA, 19 nt, Artificial Sequence
  Description of Artificial Sequence: Synthetic oligonucleotide
  Sense strand starting at position 3061 of SEQ ID NO: 1887441
aaggguugaugagaggaaa

SEQ ID NO: 2472705 - RNA, 19 nt, Artificial Sequence
  Description of Artificial Sequence: Synthetic oligonucleotide
  Antisense strand to SEQ ID NO: 2472704
uuuccucucaucaacccuu

SEQ ID NO: 2472706 - RNA, 19 nt, Artificial Sequence
  Description of Artificial Sequence: Synthetic oligonucleotide
  Sense strand starting at position 3144 of SEQ ID NO: 1887441
ccaagcauuccuugaguuc

SEQ ID NO: 2472707 - RNA, 19 nt, Artificial Sequence
  Description of Artificial Sequence: Synthetic oligonucleotide
  Antisense strand to SEQ ID NO: 2472706
gaacucaaggaaugcuugg

SEQ ID NO: 2472708 - RNA, 19 nt, Artificial Sequence
  Description of Artificial Sequence: Synthetic oligonucleotide
  Sense strand starting at position 3147 of SEQ ID NO: 1887441
agcauuccuugaguucuca

SEQ ID NO: 2472709 - RNA, 19 nt, Artificial Sequence
  Description of Artificial Sequence: Synthetic oligonucleotide
  Antisense strand to SEQ ID NO: 2472708
ugagaacucaaggaaugcu

SEQ ID NO: 2472710 - RNA, 19 nt, Artificial Sequence
  Description of Artificial Sequence: Synthetic oligonucleotide
  Sense strand starting at position 3186 of SEQ ID NO: 1887441
gggugacucuggcuucaga

SEQ ID NO: 2472711 - RNA, 19 nt, Artificial Sequence
  Description of Artificial Sequence: Synthetic oligonucleotide
  Antisense strand to SEQ ID NO: 2472710
ucugaagccagagucaccc

SEQ ID NO: 2472712 - RNA, 19 nt, Artificial Sequence
  Description of Artificial Sequence: Synthetic oligonucleotide
  Sense strand starting at position 3620 of SEQ ID NO: 1887441
gucccagugccagaaauag

SEQ ID NO: 2472713 - RNA, 19 nt, Artificial Sequence
  Description of Artificial Sequence: Synthetic oligonucleotide
  Antisense strand to SEQ ID NO: 2472712
cuauuucuggcacugggac

SEQ ID NO: 2472714 - RNA, 19 nt, Artificial Sequence
  Description of Artificial Sequence: Synthetic oligonucleotide
  Sense strand starting at position 3626 of SEQ ID NO: 1887441
gugccagaaauagagcauu

SEQ ID NO: 2472715 - RNA, 19 nt, Artificial Sequence
  Description of Artificial Sequence: Synthetic oligonucleotide
  Antisense strand to SEQ ID NO: 2472714
aaugcucuauuucuggcac

SEQ ID NO: 2472716 - RNA, 19 nt, Artificial Sequence
  Description of Artificial Sequence: Synthetic oligonucleotide
  Sense strand starting at position 367 of SEQ ID NO: 1887442
gcgaucuuggcuugcugua

SEQ ID NO: 2472717 - RNA, 19 nt, Artificial Sequence
  Description of Artificial Sequence: Synthetic oligonucleotide
  Antisense strand to SEQ ID NO: 2472716
uacagcaagccaagaucgc

SEQ ID NO: 2472718 - RNA, 19 nt, Artificial Sequence
  Description of Artificial Sequence: Synthetic oligonucleotide
  Sense strand starting at position 608 of SEQ ID NO: 1887442
ggcugaaacucuuauaaac

SEQ ID NO: 2472719 - RNA, 19 nt, Artificial Sequence
  Description of Artificial Sequence: Synthetic oligonucleotide
  Antisense strand to SEQ ID NO: 2472718
guuuauaagaguuucagcc

SEQ ID NO: 2472720 - RNA, 19 nt, Artificial Sequence
  Description of Artificial Sequence: Synthetic oligonucleotide
  Sense strand starting at position 656 of SEQ ID NO: 1887442
acacaauucuaacgugacu

SEQ ID NO: 2472721 - RNA, 19 nt, Artificial Sequence
  Description of Artificial Sequence: Synthetic oligonucleotide
  Antisense strand to SEQ ID NO: 2472720
agucacguuagaauugugu

SEQ ID NO: 2472722 - RNA, 19 nt, Artificial Sequence
  Description of Artificial Sequence: Synthetic oligonucleotide
  Sense strand starting at position 661 of SEQ ID NO: 1887442
auucuaacgugacuuugaa

SEQ ID NO: 2472723 - RNA, 19 nt, Artificial Sequence
  Description of Artificial Sequence: Synthetic oligonucleotide
  Antisense strand to SEQ ID NO: 2472722
uucaaagucacguuagaau

SEQ ID NO: 2472724 - RNA, 19 nt, Artificial Sequence
  Description of Artificial Sequence: Synthetic oligonucleotide
  Sense strand starting at position 674 of SEQ ID NO: 1887442
uuugaacucuuaguuggua

SEQ ID NO: 2472725 - RNA, 19 nt, Artificial Sequence
  Description of Artificial Sequence: Synthetic oligonucleotide
  Antisense strand to SEQ ID NO: 2472724
uaccaacuaagaguucaaa

SEQ ID NO: 2472726 - RNA, 19 nt, Artificial Sequence
  Description of Artificial Sequence: Synthetic oligonucleotide
  Sense strand starting at position 675 of SEQ ID NO: 1887442
uugaacucuuaguugguaa

SEQ ID NO: 2472727 - RNA, 19 nt, Artificial Sequence
  Description of Artificial Sequence: Synthetic oligonucleotide
  Antisense strand to SEQ ID NO: 2472726
uuaccaacuaagaguucaa

SEQ ID NO: 2472728 - RNA, 19 nt, Artificial Sequence
  Description of Artificial Sequence: Synthetic oligonucleotide
  Sense strand starting at position 677 of SEQ ID NO: 1887442
gaacucuuaguugguaagu

SEQ ID NO: 2472729 - RNA, 19 nt, Artificial Sequence
  Description of Artificial Sequence: Synthetic oligonucleotide
  Antisense strand to SEQ ID NO: 2472728
acuuaccaacuaagaguuc

SEQ ID NO: 2472730 - RNA, 19 nt, Artificial Sequence
  Description of Artificial Sequence: Synthetic oligonucleotide
  Sense strand starting at position 678 of SEQ ID NO: 1887442
aacucuuaguugguaagua

SEQ ID NO: 2472731 - RNA, 19 nt, Artificial Sequence
  Description of Artificial Sequence: Synthetic oligonucleotide
  Antisense strand to SEQ ID NO: 2472730
uacuuaccaacuaagaguu

SEQ ID NO: 2472732 - RNA, 19 nt, Artificial Sequence
  Description of Artificial Sequence: Synthetic oligonucleotide
  Sense strand starting at position 679 of SEQ ID NO: 1887442
acucuuaguugguaaguaa

SEQ ID NO: 2472733 - RNA, 19 nt, Artificial Sequence
  Description of Artificial Sequence: Synthetic oligonucleotide
  Antisense strand to SEQ ID NO: 2472732
uuacuuaccaacuaagagu

SEQ ID NO: 2472734 - RNA, 19 nt, Artificial Sequence
  Description of Artificial Sequence: Synthetic oligonucleotide
  Sense strand starting at position 686 of SEQ ID NO: 1887442
guugguaaguaauucuaau

SEQ ID NO: 2472735 - RNA, 19 nt, Artificial Sequence
  Description of Artificial Sequence: Synthetic oligonucleotide
  Antisense strand to SEQ ID NO: 2472734
auuagaauuacuuaccaac

SEQ ID NO: 2472736 - RNA, 19 nt, Artificial Sequence
  Description of Artificial Sequence: Synthetic oligonucleotide
  Sense strand starting at position 698 of SEQ ID NO: 1887442
uucuaauacugcugauaug

SEQ ID NO: 2472737 - RNA, 19 nt, Artificial Sequence
  Description of Artificial Sequence: Synthetic oligonucleotide
  Antisense strand to SEQ ID NO: 2472736
cauaucagcaguauuagaa

SEQ ID NO: 2472738 - RNA, 19 nt, Artificial Sequence
  Description of Artificial Sequence: Synthetic oligonucleotide
  Sense strand starting at position 926 of SEQ ID NO: 1887442
cgcuguaugucaccuacaa

SEQ ID NO: 2472739 - RNA, 19 nt, Artificial Sequence
  Description of Artificial Sequence: Synthetic oligonucleotide
  Antisense strand to SEQ ID NO: 2472738
uuguaggugacauacagcg

SEQ ID NO: 2472740 - RNA, 19 nt, Artificial Sequence
  Description of Artificial Sequence: Synthetic oligonucleotide
  Sense strand starting at position 1198 of SEQ ID NO: 1887442
gcacgauccuaguuccuau

SEQ ID NO: 2472741 - RNA, 19 nt, Artificial Sequence
  Description of Artificial Sequence: Synthetic oligonucleotide
  Antisense strand to SEQ ID NO: 2472740
auaggaacuaggaucgugc

SEQ ID NO: 2472742 - RNA, 19 nt, Artificial Sequence
  Description of Artificial Sequence: Synthetic oligonucleotide
  Sense strand starting at position 1271 of SEQ ID NO: 1887442
aggaguguccaccaucaau

SEQ ID NO: 2472743 - RNA, 19 nt, Artificial Sequence
  Description of Artificial Sequence: Synthetic oligonucleotide
  Antisense strand to SEQ ID NO: 2472742
auugaugguggacacuccu

SEQ ID NO: 2472744 - RNA, 19 nt, Artificial Sequence
  Description of Artificial Sequence: Synthetic oligonucleotide
  Sense strand starting at position 1297 of SEQ ID NO: 1887442
gaaggaagguaguucugau

SEQ ID NO: 2472745 - RNA, 19 nt, Artificial Sequence
  Description of Artificial Sequence: Synthetic oligonucleotide
  Antisense strand to SEQ ID NO: 2472744
aucagaacuaccuuccuuc

SEQ ID NO: 2472746 - RNA, 19 nt, Artificial Sequence
  Description of Artificial Sequence: Synthetic oligonucleotide
  Sense strand starting at position 1301 of SEQ ID NO: 1887442
gaagguaguucugauuauu

SEQ ID NO: 2472747 - RNA, 19 nt, Artificial Sequence
  Description of Artificial Sequence: Synthetic oligonucleotide
  Antisense strand to SEQ ID NO: 2472746
aauaaucagaacuaccuuc

SEQ ID NO: 2472748 - RNA, 19 nt, Artificial Sequence
  Description of Artificial Sequence: Synthetic oligonucleotide
  Sense strand starting at position 1304 of SEQ ID NO: 1887442
gguaguucugauuauugua

SEQ ID NO: 2472749 - RNA, 19 nt, Artificial Sequence
  Description of Artificial Sequence: Synthetic oligonucleotide
  Antisense strand to SEQ ID NO: 2472748
uacaauaaucagaacuacc

SEQ ID NO: 2472750 - RNA, 19 nt, Artificial Sequence
  Description of Artificial Sequence: Synthetic oligonucleotide
  Sense strand starting at position 1309 of SEQ ID NO: 1887442
uucugauuauuguacccau

SEQ ID NO: 2472751 - RNA, 19 nt, Artificial Sequence
  Description of Artificial Sequence: Synthetic oligonucleotide
  Antisense strand to SEQ ID NO: 2472750
auggguacaauaaucagaa

SEQ ID NO: 2472752 - RNA, 19 nt, Artificial Sequence
  Description of Artificial Sequence: Synthetic oligonucleotide
  Sense strand starting at position 1362 of SEQ ID NO: 1887442
agcaaaggaucuugcccaa

SEQ ID NO: 2472753 - RNA, 19 nt, Artificial Sequence
  Description of Artificial Sequence: Synthetic oligonucleotide
  Antisense strand to SEQ ID NO: 2472752
uugggcaagauccuuugcu

SEQ ID NO: 2472754 - RNA, 19 nt, Artificial Sequence
  Description of Artificial Sequence: Synthetic oligonucleotide
  Sense strand starting at position 2464 of SEQ ID NO: 1887442
ugagaauuaugcucaggga

SEQ ID NO: 2472755 - RNA, 19 nt, Artificial Sequence
  Description of Artificial Sequence: Synthetic oligonucleotide
  Antisense strand to SEQ ID NO: 2472754
ucccugagcauaauucuca

SEQ ID NO: 2472756 - RNA, 19 nt, Artificial Sequence
  Description of Artificial Sequence: Synthetic oligonucleotide
  Sense strand starting at position 2518 of SEQ ID NO: 1887442
ggaugaaugaagugcucca

SEQ ID NO: 2472757 - RNA, 19 nt, Artificial Sequence
  Description of Artificial Sequence: Synthetic oligonucleotide
  Antisense strand to SEQ ID NO: 2472756
uggagcacuucauucaucc

SEQ ID NO: 2472758 - RNA, 19 nt, Artificial Sequence
  Description of Artificial Sequence: Synthetic oligonucleotide
  Sense strand starting at position 2525 of SEQ ID NO: 1887442
ugaagugcuccaggaaagu

SEQ ID NO: 2472759 - RNA, 19 nt, Artificial Sequence
  Description of Artificial Sequence: Synthetic oligonucleotide
  Antisense strand to SEQ ID NO: 2472758
acuuuccuggagcacuuca

SEQ ID NO: 2472760 - RNA, 19 nt, Artificial Sequence
  Description of Artificial Sequence: Synthetic oligonucleotide
  Sense strand starting at position 2850 of SEQ ID NO: 1887442
uuuggagcuguggauaaau

SEQ ID NO: 2472761 - RNA, 19 nt, Artificial Sequence
  Description of Artificial Sequence: Synthetic oligonucleotide
  Antisense strand to SEQ ID NO: 2472760
auuuauccacagcuccaaa

SEQ ID NO: 2472762 - RNA, 19 nt, Artificial Sequence
  Description of Artificial Sequence: Synthetic oligonucleotide
  Sense strand starting at position 2869 of SEQ ID NO: 1887442
ucaguaucuuaacuguaau

SEQ ID NO: 2472763 - RNA, 19 nt, Artificial Sequence
  Description of Artificial Sequence: Synthetic oligonucleotide
  Antisense strand to SEQ ID NO: 2472762
auuacaguuaagauacuga

SEQ ID NO: 2472764 - RNA, 19 nt, Artificial Sequence
  Description of Artificial Sequence: Synthetic oligonucleotide
  Sense strand starting at position 2872 of SEQ ID NO: 1887442
guaucuuaacuguaauagu

SEQ ID NO: 2472765 - RNA, 19 nt, Artificial Sequence
  Description of Artificial Sequence: Synthetic oligonucleotide
  Antisense strand to SEQ ID NO: 2472764
acuauuacaguuaagauac

SEQ ID NO: 2472766 - RNA, 19 nt, Artificial Sequence
  Description of Artificial Sequence: Synthetic oligonucleotide
  Sense strand starting at position 2913 of SEQ ID NO: 1887442
aucagauuguacgcuuaaa

SEQ ID NO: 2472767 - RNA, 19 nt, Artificial Sequence
  Description of Artificial Sequence: Synthetic oligonucleotide
  Antisense strand to SEQ ID NO: 2472766
uuuaagcguacaaucugau

SEQ ID NO: 2472768 - RNA, 19 nt, Artificial Sequence
  Description of Artificial Sequence: Synthetic oligonucleotide
  Sense strand starting at position 2946 of SEQ ID NO: 1887442
guauaugucuauuauaccu

SEQ ID NO: 2472769 - RNA, 19 nt, Artificial Sequence
  Description of Artificial Sequence: Synthetic oligonucleotide
  Antisense strand to SEQ ID NO: 2472768
agguauaauagacauauac

SEQ ID NO: 2472770 - RNA, 19 nt, Artificial Sequence
  Description of Artificial Sequence: Synthetic oligonucleotide
  Sense strand starting at position 3053 of SEQ ID NO: 1887442
gccugaaacuccuuagcuc

SEQ ID NO: 2472771 - RNA, 19 nt, Artificial Sequence
  Description of Artificial Sequence: Synthetic oligonucleotide
  Antisense strand to SEQ ID NO: 2472770
gagcuaaggaguuucaggc

SEQ ID NO: 2472772 - RNA, 19 nt, Artificial Sequence
  Description of Artificial Sequence: Synthetic oligonucleotide
  Sense strand starting at position 3211 of SEQ ID NO: 1887442
cucugucauccagacuaca

SEQ ID NO: 2472773 - RNA, 19 nt, Artificial Sequence
  Description of Artificial Sequence: Synthetic oligonucleotide
  Antisense strand to SEQ ID NO: 2472772
uguagucuggaugacagag

SEQ ID NO: 2472774 - RNA, 19 nt, Artificial Sequence
  Description of Artificial Sequence: Synthetic oligonucleotide
  Sense strand starting at position 3688 of SEQ ID NO: 1887442
cccaguguugcucaggcua

SEQ ID NO: 2472775 - RNA, 19 nt, Artificial Sequence
  Description of Artificial Sequence: Synthetic oligonucleotide
  Antisense strand to SEQ ID NO: 2472774
uagccugagcaacacuggg

SEQ ID NO: 2472776 - RNA, 19 nt, Artificial Sequence
  Description of Artificial Sequence: Synthetic oligonucleotide
  Sense strand starting at position 3751 of SEQ ID NO: 1887442
guucuaggaugacagacau

SEQ ID NO: 2472777 - RNA, 19 nt, Artificial Sequence
  Description of Artificial Sequence: Synthetic oligonucleotide
  Antisense strand to SEQ ID NO: 2472776
augucugucauccuagaac

SEQ ID NO: 2472778 - RNA, 19 nt, Artificial Sequence
  Description of Artificial Sequence: Synthetic oligonucleotide
  Sense strand starting at position 55 of SEQ ID NO: 1887443
ccauguuagguuugagaug

SEQ ID NO: 2472779 - RNA, 19 nt, Artificial Sequence
  Description of Artificial Sequence: Synthetic oligonucleotide
  Antisense strand to SEQ ID NO: 2472778
caucucaaaccuaacaugg

SEQ ID NO: 2472780 - RNA, 19 nt, Artificial Sequence
  Description of Artificial Sequence: Synthetic oligonucleotide
  Sense strand starting at position 60 of SEQ ID NO: 1887443
uuagguuugagaugccagu

SEQ ID NO: 2472781 - RNA, 19 nt, Artificial Sequence
  Description of Artificial Sequence: Synthetic oligonucleotide
  Antisense strand to SEQ ID NO: 2472780
acuggcaucucaaaccuaa

SEQ ID NO: 2472782 - RNA, 19 nt, Artificial Sequence
  Description of Artificial Sequence: Synthetic oligonucleotide
  Sense strand starting at position 103 of SEQ ID NO: 1887443
uggcaaacugccuauguga

SEQ ID NO: 2472783 - RNA, 19 nt, Artificial Sequence
  Description of Artificial Sequence: Synthetic oligonucleotide
  Antisense strand to SEQ ID NO: 2472782
ucacauaggcaguuugcca

SEQ ID NO: 2472784 - RNA, 19 nt, Artificial Sequence
  Description of Artificial Sequence: Synthetic oligonucleotide
  Sense strand starting at position 122 of SEQ ID NO: 1887443
gcuggaguccuugagaagg

SEQ ID NO: 2472785 - RNA, 19 nt, Artificial Sequence
  Description of Artificial Sequence: Synthetic oligonucleotide
  Antisense strand to SEQ ID NO: 2472784
ccuucucaaggacuccagc

SEQ ID NO: 2472786 - RNA, 19 nt, Artificial Sequence
  Description of Artificial Sequence: Synthetic oligonucleotide
  Sense strand starting at position 192 of SEQ ID NO: 1887443
cacagugcugccugggaau

SEQ ID NO: 2472787 - RNA, 19 nt, Artificial Sequence
  Description of Artificial Sequence: Synthetic oligonucleotide
  Antisense strand to SEQ ID NO: 2472786
auucccaggcagcacugug

SEQ ID NO: 2472788 - RNA, 19 nt, Artificial Sequence
  Description of Artificial Sequence: Synthetic oligonucleotide
  Sense strand starting at position 346 of SEQ ID NO: 1887443
uagaaauaguuggucagga

SEQ ID NO: 2472789 - RNA, 19 nt, Artificial Sequence
  Description of Artificial Sequence: Synthetic oligonucleotide
  Antisense strand to SEQ ID NO: 2472788
uccugaccaacuauuucua

SEQ ID NO: 2472790 - RNA, 19 nt, Artificial Sequence
  Description of Artificial Sequence: Synthetic oligonucleotide
  Sense strand starting at position 540 of SEQ ID NO: 1887443
cccaguucuugcuccauga

SEQ ID NO: 2472791 - RNA, 19 nt, Artificial Sequence
  Description of Artificial Sequence: Synthetic oligonucleotide
  Antisense strand to SEQ ID NO: 2472790
ucauggagcaagaacuggg

SEQ ID NO: 2472792 - RNA, 19 nt, Artificial Sequence
  Description of Artificial Sequence: Synthetic oligonucleotide
  Sense strand starting at position 685 of SEQ ID NO: 1887443
uuucucgacuagccauaua

SEQ ID NO: 2472793 - RNA, 19 nt, Artificial Sequence
  Description of Artificial Sequence: Synthetic oligonucleotide
  Antisense strand to SEQ ID NO: 2472792
uauauggcuagucgagaaa

SEQ ID NO: 2472794 - RNA, 19 nt, Artificial Sequence
  Description of Artificial Sequence: Synthetic oligonucleotide
  Sense strand starting at position 1027 of SEQ ID NO: 1887443
uggcucaucaguuaugguu

SEQ ID NO: 2472795 - RNA, 19 nt, Artificial Sequence
  Description of Artificial Sequence: Synthetic oligonucleotide
  Antisense strand to SEQ ID NO: 2472794
aaccauaacugaugagcca

SEQ ID NO: 2472796 - RNA, 19 nt, Artificial Sequence
  Description of Artificial Sequence: Synthetic oligonucleotide
  Sense strand starting at position 1033 of SEQ ID NO: 1887443
aucaguuaugguuagugua

SEQ ID NO: 2472797 - RNA, 19 nt, Artificial Sequence
  Description of Artificial Sequence: Synthetic oligonucleotide
  Antisense strand to SEQ ID NO: 2472796
uacacuaaccauaacugau

SEQ ID NO: 2472798 - RNA, 19 nt, Artificial Sequence
  Description of Artificial Sequence: Synthetic oligonucleotide
  Sense strand starting at position 1035 of SEQ ID NO: 1887443
caguuaugguuaguguauu

SEQ ID NO: 2472799 - RNA, 19 nt, Artificial Sequence
  Description of Artificial Sequence: Synthetic oligonucleotide
  Antisense strand to SEQ ID NO: 2472798
aauacacuaaccauaacug

SEQ ID NO: 2472800 - RNA, 19 nt, Artificial Sequence
  Description of Artificial Sequence: Synthetic oligonucleotide
  Sense strand starting at position 1152 of SEQ ID NO: 1887443
gagcuuugaagaggagagu

SEQ ID NO: 2472801 - RNA, 19 nt, Artificial Sequence
  Description of Artificial Sequence: Synthetic oligonucleotide
  Antisense strand to SEQ ID NO: 2472800
acucuccucuucaaagcuc

SEQ ID NO: 2472802 - RNA, 19 nt, Artificial Sequence
  Description of Artificial Sequence: Synthetic oligonucleotide
  Sense strand starting at position 1429 of SEQ ID NO: 1887443
cccagaucaugcccuuaga

SEQ ID NO: 2472803 - RNA, 19 nt, Artificial Sequence
  Description of Artificial Sequence: Synthetic oligonucleotide
  Antisense strand to SEQ ID NO: 2472802
ucuaagggcaugaucuggg

SEQ ID NO: 2472804 - RNA, 19 nt, Artificial Sequence
  Description of Artificial Sequence: Synthetic oligonucleotide
  Sense strand starting at position 1540 of SEQ ID NO: 1887443
auccuucggucuucuaaga

SEQ ID NO: 2472805 - RNA, 19 nt, Artificial Sequence
  Description of Artificial Sequence: Synthetic oligonucleotide
  Antisense strand to SEQ ID NO: 2472804
ucuuagaagaccgaaggau

SEQ ID NO: 2472806 - RNA, 19 nt, Artificial Sequence
  Description of Artificial Sequence: Synthetic oligonucleotide
  Sense strand starting at position 1703 of SEQ ID NO: 1887443
uggauacucucagccaagu

SEQ ID NO: 2472807 - RNA, 19 nt, Artificial Sequence
  Description of Artificial Sequence: Synthetic oligonucleotide
  Antisense strand to SEQ ID NO: 2472806
acuuggcugagaguaucca

SEQ ID NO: 2472808 - RNA, 19 nt, Artificial Sequence
  Description of Artificial Sequence: Synthetic oligonucleotide
  Sense strand starting at position 2499 of SEQ ID NO: 1887443
aucuuucccuaggagaaga

SEQ ID NO: 2472809 - RNA, 19 nt, Artificial Sequence
  Description of Artificial Sequence: Synthetic oligonucleotide
  Antisense strand to SEQ ID NO: 2472808
ucuucuccuagggaaagau

SEQ ID NO: 2472810 - RNA, 19 nt, Artificial Sequence
  Description of Artificial Sequence: Synthetic oligonucleotide
  Sense strand starting at position 2522 of SEQ ID NO: 1887443
guguucuucccggcagagu

SEQ ID NO: 2472811 - RNA, 19 nt, Artificial Sequence
  Description of Artificial Sequence: Synthetic oligonucleotide
  Antisense strand to SEQ ID NO: 2472810
acucugccgggaagaacac

SEQ ID NO: 2472812 - RNA, 19 nt, Artificial Sequence
  Description of Artificial Sequence: Synthetic oligonucleotide
  Sense strand starting at position 2523 of SEQ ID NO: 1887443
uguucuucccggcagagua

SEQ ID NO: 2472813 - RNA, 19 nt, Artificial Sequence
  Description of Artificial Sequence: Synthetic oligonucleotide
  Antisense strand to SEQ ID NO: 2472812
uacucugccgggaagaaca

SEQ ID NO: 2472814 - RNA, 19 nt, Artificial Sequence
  Description of Artificial Sequence: Synthetic oligonucleotide
  Sense strand starting at position 2539 of SEQ ID NO: 1887443
guaccuuucuuuccugacu

SEQ ID NO: 2472815 - RNA, 19 nt, Artificial Sequence
  Description of Artificial Sequence: Synthetic oligonucleotide
  Antisense strand to SEQ ID NO: 2472814
agucaggaaagaaagguac

SEQ ID NO: 2472816 - RNA, 19 nt, Artificial Sequence
  Description of Artificial Sequence: Synthetic oligonucleotide
  Sense strand starting at position 2684 of SEQ ID NO: 1887443
gggugaagagguuagaugu

SEQ ID NO: 2472817 - RNA, 19 nt, Artificial Sequence
  Description of Artificial Sequence: Synthetic oligonucleotide
  Antisense strand to SEQ ID NO: 2472816
acaucuaaccucuucaccc

SEQ ID NO: 2472818 - RNA, 19 nt, Artificial Sequence
  Description of Artificial Sequence: Synthetic oligonucleotide
  Sense strand starting at position 2694 of SEQ ID NO: 1887443
guuagaugucaagguuaga

SEQ ID NO: 2472819 - RNA, 19 nt, Artificial Sequence
  Description of Artificial Sequence: Synthetic oligonucleotide
  Antisense strand to SEQ ID NO: 2472818
ucuaaccuugacaucuaac

SEQ ID NO: 2472820 - RNA, 19 nt, Artificial Sequence
  Description of Artificial Sequence: Synthetic oligonucleotide
  Sense strand starting at position 2743 of SEQ ID NO: 1887443
aguugaaagcuagaucgca

SEQ ID NO: 2472821 - RNA, 19 nt, Artificial Sequence
  Description of Artificial Sequence: Synthetic oligonucleotide
  Antisense strand to SEQ ID NO: 2472820
ugcgaucuagcuuucaacu

SEQ ID NO: 2472822 - RNA, 19 nt, Artificial Sequence
  Description of Artificial Sequence: Synthetic oligonucleotide
  Sense strand starting at position 2751 of SEQ ID NO: 1887443
gcuagaucgcagcaugaag

SEQ ID NO: 2472823 - RNA, 19 nt, Artificial Sequence
  Description of Artificial Sequence: Synthetic oligonucleotide
  Antisense strand to SEQ ID NO: 2472822
cuucaugcugcgaucuagc

SEQ ID NO: 2472824 - RNA, 19 nt, Artificial Sequence
  Description of Artificial Sequence: Synthetic oligonucleotide
  Sense strand starting at position 2857 of SEQ ID NO: 1887443
guucuagaugccgagguua

SEQ ID NO: 2472825 - RNA, 19 nt, Artificial Sequence
  Description of Artificial Sequence: Synthetic oligonucleotide
  Antisense strand to SEQ ID NO: 2472824
uaaccucggcaucuagaac

SEQ ID NO: 2472826 - RNA, 19 nt, Artificial Sequence
  Description of Artificial Sequence: Synthetic oligonucleotide
  Sense strand starting at position 2951 of SEQ ID NO: 1887443
gaggaugaauaagaaacaa

SEQ ID NO: 2472827 - RNA, 19 nt, Artificial Sequence
  Description of Artificial Sequence: Synthetic oligonucleotide
  Antisense strand to SEQ ID NO: 2472826
uuguuucuuauucauccuc

SEQ ID NO: 2472828 - RNA, 19 nt, Artificial Sequence
  Description of Artificial Sequence: Synthetic oligonucleotide
  Sense strand starting at position 2970 of SEQ ID NO: 1887443
aggaaucagcaaggcaauu

SEQ ID NO: 2472829 - RNA, 19 nt, Artificial Sequence
  Description of Artificial Sequence: Synthetic oligonucleotide
  Antisense strand to SEQ ID NO: 2472828
aauugccuugcugauuccu

SEQ ID NO: 2472830 - RNA, 19 nt, Artificial Sequence
  Description of Artificial Sequence: Synthetic oligonucleotide
  Sense strand starting at position 3055 of SEQ ID NO: 1887443
gugacauugaaguagaagu

SEQ ID NO: 2472831 - RNA, 19 nt, Artificial Sequence
  Description of Artificial Sequence: Synthetic oligonucleotide
  Antisense strand to SEQ ID NO: 2472830
acuucuacuucaaugucac

SEQ ID NO: 2472832 - RNA, 19 nt, Artificial Sequence
  Description of Artificial Sequence: Synthetic oligonucleotide
  Sense strand starting at position 3068 of SEQ ID NO: 1887443
agaagugaaugauaaggaa

SEQ ID NO: 2472833 - RNA, 19 nt, Artificial Sequence
  Description of Artificial Sequence: Synthetic oligonucleotide
  Antisense strand to SEQ ID NO: 2472832
uuccuuaucauucacuucu

SEQ ID NO: 2472834 - RNA, 19 nt, Artificial Sequence
  Description of Artificial Sequence: Synthetic oligonucleotide
  Sense strand starting at position 3071 of SEQ ID NO: 1887443
agugaaugauaaggaaaga

SEQ ID NO: 2472835 - RNA, 19 nt, Artificial Sequence
  Description of Artificial Sequence: Synthetic oligonucleotide
  Antisense strand to SEQ ID NO: 2472834
ucuuuccuuaucauucacu

SEQ ID NO: 2472836 - RNA, 19 nt, Artificial Sequence
  Description of Artificial Sequence: Synthetic oligonucleotide
  Sense strand starting at position 3125 of SEQ ID NO: 1887443
agagguagccucuagagca

SEQ ID NO: 2472837 - RNA, 19 nt, Artificial Sequence
  Description of Artificial Sequence: Synthetic oligonucleotide
  Antisense strand to SEQ ID NO: 2472836
ugcucuagaggcuaccucu

SEQ ID NO: 2472838 - RNA, 19 nt, Artificial Sequence
  Description of Artificial Sequence: Synthetic oligonucleotide
  Sense strand starting at position 3164 of SEQ ID NO: 1887443
ccagcuugcagacagagau

SEQ ID NO: 2472839 - RNA, 19 nt, Artificial Sequence
  Description of Artificial Sequence: Synthetic oligonucleotide
  Antisense strand to SEQ ID NO: 2472838
aucucugucugcaagcugg

SEQ ID NO: 2472840 - RNA, 19 nt, Artificial Sequence
  Description of Artificial Sequence: Synthetic oligonucleotide
  Sense strand starting at position 3810 of SEQ ID NO: 1887443
ccaacagauugagaaacua

SEQ ID NO: 2472841 - RNA, 19 nt, Artificial Sequence
  Description of Artificial Sequence: Synthetic oligonucleotide
  Antisense strand to SEQ ID NO: 2472840
uaguuucucaaucuguugg

SEQ ID NO: 2472842 - RNA, 19 nt, Artificial Sequence
  Description of Artificial Sequence: Synthetic oligonucleotide
  Sense strand starting at position 3844 of SEQ ID NO: 1887443
ggcugugcacgugaggaaa

SEQ ID NO: 2472843 - RNA, 19 nt, Artificial Sequence
  Description of Artificial Sequence: Synthetic oligonucleotide
  Antisense strand to SEQ ID NO: 2472842
uuuccucacgugcacagcc

SEQ ID NO: 2472844 - RNA, 19 nt, Artificial Sequence
  Description of Artificial Sequence: Synthetic oligonucleotide
  Sense strand starting at position 3890 of SEQ ID NO: 1887443
ggguguggcagcugaauaa

SEQ ID NO: 2472845 - RNA, 19 nt, Artificial Sequence
  Description of Artificial Sequence: Synthetic oligonucleotide
  Antisense strand to SEQ ID NO: 2472844
uuauucagcugccacaccc

SEQ ID NO: 2472846 - RNA, 19 nt, Artificial Sequence
  Description of Artificial Sequence: Synthetic oligonucleotide
  Sense strand starting at position 3927 of SEQ ID NO: 1887443
cugugaaucccugggcacu

SEQ ID NO: 2472847 - RNA, 19 nt, Artificial Sequence
  Description of Artificial Sequence: Synthetic oligonucleotide
  Antisense strand to SEQ ID NO: 2472846
agugcccagggauucacag

SEQ ID NO: 2472848 - RNA, 19 nt, Artificial Sequence
  Description of Artificial Sequence: Synthetic oligonucleotide
  Sense strand starting at position 3939 of SEQ ID NO: 1887443
gggcacugugacuauguua

SEQ ID NO: 2472849 - RNA, 19 nt, Artificial Sequence
  Description of Artificial Sequence: Synthetic oligonucleotide
  Antisense strand to SEQ ID NO: 2472848
uaacauagucacagugccc

SEQ ID NO: 2472850 - RNA, 19 nt, Artificial Sequence
  Description of Artificial Sequence: Synthetic oligonucleotide
  Sense strand starting at position 3946 of SEQ ID NO: 1887443
gugacuauguuacuuucua

SEQ ID NO: 2472851 - RNA, 19 nt, Artificial Sequence
  Description of Artificial Sequence: Synthetic oligonucleotide
  Antisense strand to SEQ ID NO: 2472850
uagaaaguaacauagucac

SEQ ID NO: 2472852 - RNA, 19 nt, Artificial Sequence
  Description of Artificial Sequence: Synthetic oligonucleotide
  Sense strand starting at position 3947 of SEQ ID NO: 1887443
ugacuauguuacuuucuau

SEQ ID NO: 2472853 - RNA, 19 nt, Artificial Sequence
  Description of Artificial Sequence: Synthetic oligonucleotide
  Antisense strand to SEQ ID NO: 2472852
auagaaaguaacauaguca

SEQ ID NO: 2472854 - RNA, 19 nt, Artificial Sequence
  Description of Artificial Sequence: Synthetic oligonucleotide
  Sense strand starting at position 3950 of SEQ ID NO: 1887443
cuauguuacuuucuauggu

SEQ ID NO: 2472855 - RNA, 19 nt, Artificial Sequence
  Description of Artificial Sequence: Synthetic oligonucleotide
  Antisense strand to SEQ ID NO: 2472854
accauagaaaguaacauag

SEQ ID NO: 2472856 - RNA, 19 nt, Artificial Sequence
  Description of Artificial Sequence: Synthetic oligonucleotide
  Sense strand starting at position 3953 of SEQ ID NO: 1887443
uguuacuuucuaugguaaa

SEQ ID NO: 2472857 - RNA, 19 nt, Artificial Sequence
  Description of Artificial Sequence: Synthetic oligonucleotide
  Antisense strand to SEQ ID NO: 2472856
uuuaccauagaaaguaaca

SEQ ID NO: 2472858 - RNA, 19 nt, Artificial Sequence
  Description of Artificial Sequence: Synthetic oligonucleotide
  Sense strand starting at position 150 of SEQ ID NO: 1887444
ccagcuaaucuucguacuu

SEQ ID NO: 2472859 - RNA, 19 nt, Artificial Sequence
  Description of Artificial Sequence: Synthetic oligonucleotide
  Antisense strand to SEQ ID NO: 2472858
aaguacgaagauuagcugg

SEQ ID NO: 2472860 - RNA, 19 nt, Artificial Sequence
  Description of Artificial Sequence: Synthetic oligonucleotide
  Sense strand starting at position 354 of SEQ ID NO: 1887444
cuguccucaucuuggagau

SEQ ID NO: 2472861 - RNA, 19 nt, Artificial Sequence
  Description of Artificial Sequence: Synthetic oligonucleotide
  Antisense strand to SEQ ID NO: 2472860
aucuccaagaugaggacag

SEQ ID NO: 2472862 - RNA, 19 nt, Artificial Sequence
  Description of Artificial Sequence: Synthetic oligonucleotide
  Sense strand starting at position 356 of SEQ ID NO: 1887444
guccucaucuuggagaucu

SEQ ID NO: 2472863 - RNA, 19 nt, Artificial Sequence
  Description of Artificial Sequence: Synthetic oligonucleotide
  Antisense strand to SEQ ID NO: 2472862
agaucuccaagaugaggac

SEQ ID NO: 2472864 - RNA, 19 nt, Artificial Sequence
  Description of Artificial Sequence: Synthetic oligonucleotide
  Sense strand starting at position 569 of SEQ ID NO: 1887444
cugugugucuugccuugga

SEQ ID NO: 2472865 - RNA, 19 nt, Artificial Sequence
  Description of Artificial Sequence: Synthetic oligonucleotide
  Antisense strand to SEQ ID NO: 2472864
uccaaggcaagacacacag

SEQ ID NO: 2472866 - RNA, 19 nt, Artificial Sequence
  Description of Artificial Sequence: Synthetic oligonucleotide
  Sense strand starting at position 572 of SEQ ID NO: 1887444
ugugucuugccuuggacau

SEQ ID NO: 2472867 - RNA, 19 nt, Artificial Sequence
  Description of Artificial Sequence: Synthetic oligonucleotide
  Antisense strand to SEQ ID NO: 2472866
auguccaaggcaagacaca

SEQ ID NO: 2472868 - RNA, 19 nt, Artificial Sequence
  Description of Artificial Sequence: Synthetic oligonucleotide
  Sense strand starting at position 573 of SEQ ID NO: 1887444
gugucuugccuuggacauc

SEQ ID NO: 2472869 - RNA, 19 nt, Artificial Sequence
  Description of Artificial Sequence: Synthetic oligonucleotide
  Antisense strand to SEQ ID NO: 2472868
gauguccaaggcaagacac

SEQ ID NO: 2472870 - RNA, 19 nt, Artificial Sequence
  Description of Artificial Sequence: Synthetic oligonucleotide
  Sense strand starting at position 882 of SEQ ID NO: 1887444
cgggcuauauguuauaucu

SEQ ID NO: 2472871 - RNA, 19 nt, Artificial Sequence
  Description of Artificial Sequence: Synthetic oligonucleotide
  Antisense strand to SEQ ID NO: 2472870
agauauaacauauagcccg

SEQ ID NO: 2472872 - RNA, 19 nt, Artificial Sequence
  Description of Artificial Sequence: Synthetic oligonucleotide
  Sense strand starting at position 884 of SEQ ID NO: 1887444
ggcuauauguuauaucuca

SEQ ID NO: 2472873 - RNA, 19 nt, Artificial Sequence
  Description of Artificial Sequence: Synthetic oligonucleotide
  Antisense strand to SEQ ID NO: 2472872
ugagauauaacauauagcc

SEQ ID NO: 2472874 - RNA, 19 nt, Artificial Sequence
  Description of Artificial Sequence: Synthetic oligonucleotide
  Sense strand starting at position 989 of SEQ ID NO: 1887444
gacggacaucgucagaaga

SEQ ID NO: 2472875 - RNA, 19 nt, Artificial Sequence
  Description of Artificial Sequence: Synthetic oligonucleotide
  Antisense strand to SEQ ID NO: 2472874
ucuucugacgauguccguc

SEQ ID NO: 2472876 - RNA, 19 nt, Artificial Sequence
  Description of Artificial Sequence: Synthetic oligonucleotide
  Sense strand starting at position 991 of SEQ ID NO: 1887444
cggacaucgucagaagauc

SEQ ID NO: 2472877 - RNA, 19 nt, Artificial Sequence
  Description of Artificial Sequence: Synthetic oligonucleotide
  Antisense strand to SEQ ID NO: 2472876
gaucuucugacgauguccg

SEQ ID NO: 2472878 - RNA, 19 nt, Artificial Sequence
  Description of Artificial Sequence: Synthetic oligonucleotide
  Sense strand starting at position 999 of SEQ ID NO: 1887444
gucagaagauccuggaauc

SEQ ID NO: 2472879 - RNA, 19 nt, Artificial Sequence
  Description of Artificial Sequence: Synthetic oligonucleotide
  Antisense strand to SEQ ID NO: 2472878
gauuccaggaucuucugac

SEQ ID NO: 2472880 - RNA, 19 nt, Artificial Sequence
  Description of Artificial Sequence: Synthetic oligonucleotide
  Sense strand starting at position 1010 of SEQ ID NO: 1887444
cuggaaucuucuccacuag

SEQ ID NO: 2472881 - RNA, 19 nt, Artificial Sequence
  Description of Artificial Sequence: Synthetic oligonucleotide
  Antisense strand to SEQ ID NO: 2472880
cuaguggagaagauuccag

SEQ ID NO: 2472882 - RNA, 19 nt, Artificial Sequence
  Description of Artificial Sequence: Synthetic oligonucleotide
  Sense strand starting at position 1356 of SEQ ID NO: 1887444
cugagucacgucugaguca

SEQ ID NO: 2472883 - RNA, 19 nt, Artificial Sequence
  Description of Artificial Sequence: Synthetic oligonucleotide
  Antisense strand to SEQ ID NO: 2472882
ugacucagacgugacucag

SEQ ID NO: 2472884 - RNA, 19 nt, Artificial Sequence
  Description of Artificial Sequence: Synthetic oligonucleotide
  Sense strand starting at position 2415 of SEQ ID NO: 1887444
gcggagcaguguuauggua

SEQ ID NO: 2472885 - RNA, 19 nt, Artificial Sequence
  Description of Artificial Sequence: Synthetic oligonucleotide
  Antisense strand to SEQ ID NO: 2472884
uaccauaacacugcuccgc

SEQ ID NO: 2472886 - RNA, 19 nt, Artificial Sequence
  Description of Artificial Sequence: Synthetic oligonucleotide
  Sense strand starting at position 2784 of SEQ ID NO: 1887444
ggcgguuauguaagucaug

SEQ ID NO: 2472887 - RNA, 19 nt, Artificial Sequence
  Description of Artificial Sequence: Synthetic oligonucleotide
  Antisense strand to SEQ ID NO: 2472886
caugacuuacauaaccgcc

SEQ ID NO: 2472888 - RNA, 19 nt, Artificial Sequence
  Description of Artificial Sequence: Synthetic oligonucleotide
  Sense strand starting at position 2785 of SEQ ID NO: 1887444
gcgguuauguaagucaugu

SEQ ID NO: 2472889 - RNA, 19 nt, Artificial Sequence
  Description of Artificial Sequence: Synthetic oligonucleotide
  Antisense strand to SEQ ID NO: 2472888
acaugacuuacauaaccgc

SEQ ID NO: 2472890 - RNA, 19 nt, Artificial Sequence
  Description of Artificial Sequence: Synthetic oligonucleotide
  Sense strand starting at position 2787 of SEQ ID NO: 1887444
gguuauguaagucaugucu

SEQ ID NO: 2472891 - RNA, 19 nt, Artificial Sequence
  Description of Artificial Sequence: Synthetic oligonucleotide
  Antisense strand to SEQ ID NO: 2472890
agacaugacuuacauaacc

SEQ ID NO: 2472892 - RNA, 19 nt, Artificial Sequence
  Description of Artificial Sequence: Synthetic oligonucleotide
  Sense strand starting at position 2789 of SEQ ID NO: 1887444
uuauguaagucaugucuga

SEQ ID NO: 2472893 - RNA, 19 nt, Artificial Sequence
  Description of Artificial Sequence: Synthetic oligonucleotide
  Antisense strand to SEQ ID NO: 2472892
ucagacaugacuuacauaa

SEQ ID NO: 2472894 - RNA, 19 nt, Artificial Sequence
  Description of Artificial Sequence: Synthetic oligonucleotide
  Sense strand starting at position 2901 of SEQ ID NO: 1887444
gguuauagccauugagacc

SEQ ID NO: 2472895 - RNA, 19 nt, Artificial Sequence
  Description of Artificial Sequence: Synthetic oligonucleotide
  Antisense strand to SEQ ID NO: 2472894
ggucucaauggcuauaacc

SEQ ID NO: 2472896 - RNA, 19 nt, Artificial Sequence
  Description of Artificial Sequence: Synthetic oligonucleotide
  Sense strand starting at position 2975 of SEQ ID NO: 1887444
agggauccuuacugaagaa

SEQ ID NO: 2472897 - RNA, 19 nt, Artificial Sequence
  Description of Artificial Sequence: Synthetic oligonucleotide
  Antisense strand to SEQ ID NO: 2472896
uucuucaguaaggaucccu

SEQ ID NO: 2472898 - RNA, 19 nt, Artificial Sequence
  Description of Artificial Sequence: Synthetic oligonucleotide
  Sense strand starting at position 3207 of SEQ ID NO: 1887444
ggcucucggugaucacaaa

SEQ ID NO: 2472899 - RNA, 19 nt, Artificial Sequence
  Description of Artificial Sequence: Synthetic oligonucleotide
  Antisense strand to SEQ ID NO: 2472898
uuugugaucaccgagagcc

SEQ ID NO: 2472900 - RNA, 19 nt, Artificial Sequence
  Description of Artificial Sequence: Synthetic oligonucleotide
  Sense strand starting at position 3442 of SEQ ID NO: 1887444
guguuugacuucucuccuu

SEQ ID NO: 2472901 - RNA, 19 nt, Artificial Sequence
  Description of Artificial Sequence: Synthetic oligonucleotide
  Antisense strand to SEQ ID NO: 2472900
aaggagagaagucaaacac

SEQ ID NO: 2472902 - RNA, 19 nt, Artificial Sequence
  Description of Artificial Sequence: Synthetic oligonucleotide
  Sense strand starting at position 3490 of SEQ ID NO: 1887444
cuugcuugcucagugguua

SEQ ID NO: 2472903 - RNA, 19 nt, Artificial Sequence
  Description of Artificial Sequence: Synthetic oligonucleotide
  Antisense strand to SEQ ID NO: 2472902
uaaccacugagcaagcaag

SEQ ID NO: 2472904 - RNA, 19 nt, Artificial Sequence
  Description of Artificial Sequence: Synthetic oligonucleotide
  Sense strand starting at position 3494 of SEQ ID NO: 1887444
cuugcucagugguuacgaa

SEQ ID NO: 2472905 - RNA, 19 nt, Artificial Sequence
  Description of Artificial Sequence: Synthetic oligonucleotide
  Antisense strand to SEQ ID NO: 2472904
uucguaaccacugagcaag

SEQ ID NO: 2472906 - RNA, 19 nt, Artificial Sequence
  Description of Artificial Sequence: Synthetic oligonucleotide
  Sense strand starting at position 3495 of SEQ ID NO: 1887444
uugcucagugguuacgaaa

SEQ ID NO: 2472907 - RNA, 19 nt, Artificial Sequence
  Description of Artificial Sequence: Synthetic oligonucleotide
  Antisense strand to SEQ ID NO: 2472906
uuucguaaccacugagcaa

SEQ ID NO: 2472908 - RNA, 19 nt, Artificial Sequence
  Description of Artificial Sequence: Synthetic oligonucleotide
  Sense strand starting at position 3528 of SEQ ID NO: 1887444
ggaguuugaacacacuguu

SEQ ID NO: 2472909 - RNA, 19 nt, Artificial Sequence
  Description of Artificial Sequence: Synthetic oligonucleotide
  Antisense strand to SEQ ID NO: 2472908
aacaguguguucaaacucc

SEQ ID NO: 2472910 - RNA, 19 nt, Artificial Sequence
  Description of Artificial Sequence: Synthetic oligonucleotide
  Sense strand starting at position 3531 of SEQ ID NO: 1887444
guuugaacacacuguucua

SEQ ID NO: 2472911 - RNA, 19 nt, Artificial Sequence
  Description of Artificial Sequence: Synthetic oligonucleotide
  Antisense strand to SEQ ID NO: 2472910
uagaacaguguguucaaac

SEQ ID NO: 2472912 - RNA, 19 nt, Artificial Sequence
  Description of Artificial Sequence: Synthetic oligonucleotide
  Sense strand starting at position 3759 of SEQ ID NO: 1887444
ugggcuauguccugaggca

SEQ ID NO: 2472913 - RNA, 19 nt, Artificial Sequence
  Description of Artificial Sequence: Synthetic oligonucleotide
  Antisense strand to SEQ ID NO: 2472912
ugccucaggacauagccca

SEQ ID NO: 2472914 - RNA, 19 nt, Artificial Sequence
  Description of Artificial Sequence: Synthetic oligonucleotide
  Sense strand starting at position 3803 of SEQ ID NO: 1887444
gcagacaucacaugggaau

SEQ ID NO: 2472915 - RNA, 19 nt, Artificial Sequence
  Description of Artificial Sequence: Synthetic oligonucleotide
  Antisense strand to SEQ ID NO: 2472914
auucccaugugaugucugc

SEQ ID NO: 2472916 - RNA, 19 nt, Artificial Sequence
  Description of Artificial Sequence: Synthetic oligonucleotide
  Sense strand starting at position 276 of SEQ ID NO: 1887445
cccugagagcagggaugua

SEQ ID NO: 2472917 - RNA, 19 nt, Artificial Sequence
  Description of Artificial Sequence: Synthetic oligonucleotide
  Antisense strand to SEQ ID NO: 2472916
uacaucccugcucucaggg

SEQ ID NO: 2472918 - RNA, 19 nt, Artificial Sequence
  Description of Artificial Sequence: Synthetic oligonucleotide
  Sense strand starting at position 353 of SEQ ID NO: 1887445
uccaguaaaugcuuguuga

SEQ ID NO: 2472919 - RNA, 19 nt, Artificial Sequence
  Description of Artificial Sequence: Synthetic oligonucleotide
  Antisense strand to SEQ ID NO: 2472918
ucaacaagcauuuacugga

SEQ ID NO: 2472920 - RNA, 19 nt, Artificial Sequence
  Description of Artificial Sequence: Synthetic oligonucleotide
  Sense strand starting at position 655 of SEQ ID NO: 1887445
gcaaucauccugcaggaga

SEQ ID NO: 2472921 - RNA, 19 nt, Artificial Sequence
  Description of Artificial Sequence: Synthetic oligonucleotide
  Antisense strand to SEQ ID NO: 2472920
ucuccugcaggaugauugc

SEQ ID NO: 2472922 - RNA, 19 nt, Artificial Sequence
  Description of Artificial Sequence: Synthetic oligonucleotide
  Sense strand starting at position 889 of SEQ ID NO: 1887445
gcugggaguccggaauguu

SEQ ID NO: 2472923 - RNA, 19 nt, Artificial Sequence
  Description of Artificial Sequence: Synthetic oligonucleotide
  Antisense strand to SEQ ID NO: 2472922
aacauuccggacucccagc

SEQ ID NO: 2472924 - RNA, 19 nt, Artificial Sequence
  Description of Artificial Sequence: Synthetic oligonucleotide
  Sense strand starting at position 1213 of SEQ ID NO: 1887445
gggugucacuccucaaauc

SEQ ID NO: 2472925 - RNA, 19 nt, Artificial Sequence
  Description of Artificial Sequence: Synthetic oligonucleotide
  Antisense strand to SEQ ID NO: 2472924
gauuugaggagugacaccc

SEQ ID NO: 2472926 - RNA, 19 nt, Artificial Sequence
  Description of Artificial Sequence: Synthetic oligonucleotide
  Sense strand starting at position 1214 of SEQ ID NO: 1887445
ggugucacuccucaaaucu

SEQ ID NO: 2472927 - RNA, 19 nt, Artificial Sequence
  Description of Artificial Sequence: Synthetic oligonucleotide
  Antisense strand to SEQ ID NO: 2472926
agauuugaggagugacacc

SEQ ID NO: 2472928 - RNA, 19 nt, Artificial Sequence
  Description of Artificial Sequence: Synthetic oligonucleotide
  Sense strand starting at position 1774 of SEQ ID NO: 1887445
gcccgauccgggaguuucu

SEQ ID NO: 2472929 - RNA, 19 nt, Artificial Sequence
  Description of Artificial Sequence: Synthetic oligonucleotide
  Antisense strand to SEQ ID NO: 2472928
agaaacucccggaucgggc

SEQ ID NO: 2472930 - RNA, 19 nt, Artificial Sequence
  Description of Artificial Sequence: Synthetic oligonucleotide
  Sense strand starting at position 1795 of SEQ ID NO: 1887445
cccucagugcuuggagauc

SEQ ID NO: 2472931 - RNA, 19 nt, Artificial Sequence
  Description of Artificial Sequence: Synthetic oligonucleotide
  Antisense strand to SEQ ID NO: 2472930
gaucuccaagcacugaggg

SEQ ID NO: 2472932 - RNA, 19 nt, Artificial Sequence
  Description of Artificial Sequence: Synthetic oligonucleotide
  Sense strand starting at position 2118 of SEQ ID NO: 1887445
ucacgugacuguccaauga

SEQ ID NO: 2472933 - RNA, 19 nt, Artificial Sequence
  Description of Artificial Sequence: Synthetic oligonucleotide
  Antisense strand to SEQ ID NO: 2472932
ucauuggacagucacguga

SEQ ID NO: 2472934 - RNA, 19 nt, Artificial Sequence
  Description of Artificial Sequence: Synthetic oligonucleotide
  Sense strand starting at position 2122 of SEQ ID NO: 1887445
gugacuguccaaugagcau

SEQ ID NO: 2472935 - RNA, 19 nt, Artificial Sequence
  Description of Artificial Sequence: Synthetic oligonucleotide
  Antisense strand to SEQ ID NO: 2472934
augcucauuggacagucac

SEQ ID NO: 2472936 - RNA, 19 nt, Artificial Sequence
  Description of Artificial Sequence: Synthetic oligonucleotide
  Sense strand starting at position 2134 of SEQ ID NO: 1887445
ugagcaucucccgauaagu

SEQ ID NO: 2472937 - RNA, 19 nt, Artificial Sequence
  Description of Artificial Sequence: Synthetic oligonucleotide
  Antisense strand to SEQ ID NO: 2472936
acuuaucgggagaugcuca

SEQ ID NO: 2472938 - RNA, 19 nt, Artificial Sequence
  Description of Artificial Sequence: Synthetic oligonucleotide
  Sense strand starting at position 2182 of SEQ ID NO: 1887445
cguccaaucgcagcucuaa

SEQ ID NO: 2472939 - RNA, 19 nt, Artificial Sequence
  Description of Artificial Sequence: Synthetic oligonucleotide
  Antisense strand to SEQ ID NO: 2472938
uuagagcugcgauuggacg

SEQ ID NO: 2472940 - RNA, 19 nt, Artificial Sequence
  Description of Artificial Sequence: Synthetic oligonucleotide
  Sense strand starting at position 2229 of SEQ ID NO: 1887445
agaaguuucgggcaggguu

SEQ ID NO: 2472941 - RNA, 19 nt, Artificial Sequence
  Description of Artificial Sequence: Synthetic oligonucleotide
  Antisense strand to SEQ ID NO: 2472940
aacccugcccgaaacuucu

SEQ ID NO: 2472942 - RNA, 19 nt, Artificial Sequence
  Description of Artificial Sequence: Synthetic oligonucleotide
  Sense strand starting at position 2315 of SEQ ID NO: 1887445
caggcaggacguuauagau

SEQ ID NO: 2472943 - RNA, 19 nt, Artificial Sequence
  Description of Artificial Sequence: Synthetic oligonucleotide
  Antisense strand to SEQ ID NO: 2472942
aucuauaacguccugccug

SEQ ID NO: 2472944 - RNA, 19 nt, Artificial Sequence
  Description of Artificial Sequence: Synthetic oligonucleotide
  Sense strand starting at position 2321 of SEQ ID NO: 1887445
ggacguuauagaugacuaa

SEQ ID NO: 2472945 - RNA, 19 nt, Artificial Sequence
  Description of Artificial Sequence: Synthetic oligonucleotide
  Antisense strand to SEQ ID NO: 2472944
uuagucaucuauaacgucc

SEQ ID NO: 2472946 - RNA, 19 nt, Artificial Sequence
  Description of Artificial Sequence: Synthetic oligonucleotide
  Sense strand starting at position 2395 of SEQ ID NO: 1887445
ccaggcuugucucuaacuu

SEQ ID NO: 2472947 - RNA, 19 nt, Artificial Sequence
  Description of Artificial Sequence: Synthetic oligonucleotide
  Antisense strand to SEQ ID NO: 2472946
aaguuagagacaagccugg

SEQ ID NO: 2472948 - RNA, 19 nt, Artificial Sequence
  Description of Artificial Sequence: Synthetic oligonucleotide
  Sense strand starting at position 2399 of SEQ ID NO: 1887445
gcuugucucuaacuuguga

SEQ ID NO: 2472949 - RNA, 19 nt, Artificial Sequence
  Description of Artificial Sequence: Synthetic oligonucleotide
  Antisense strand to SEQ ID NO: 2472948
ucacaaguuagagacaagc

SEQ ID NO: 2472950 - RNA, 19 nt, Artificial Sequence
  Description of Artificial Sequence: Synthetic oligonucleotide
  Sense strand starting at position 2599 of SEQ ID NO: 1887445
ucuggaauucccgggcuga

SEQ ID NO: 2472951 - RNA, 19 nt, Artificial Sequence
  Description of Artificial Sequence: Synthetic oligonucleotide
  Antisense strand to SEQ ID NO: 2472950
ucagcccgggaauuccaga

SEQ ID NO: 2472952 - RNA, 19 nt, Artificial Sequence
  Description of Artificial Sequence: Synthetic oligonucleotide
  Sense strand starting at position 2600 of SEQ ID NO: 1887445
cuggaauucccgggcugaa

SEQ ID NO: 2472953 - RNA, 19 nt, Artificial Sequence
  Description of Artificial Sequence: Synthetic oligonucleotide
  Antisense strand to SEQ ID NO: 2472952
uucagcccgggaauuccag

SEQ ID NO: 2472954 - RNA, 19 nt, Artificial Sequence
  Description of Artificial Sequence: Synthetic oligonucleotide
  Sense strand starting at position 2801 of SEQ ID NO: 1887445
ccagucaugacucgaaugu

SEQ ID NO: 2472955 - RNA, 19 nt, Artificial Sequence
  Description of Artificial Sequence: Synthetic oligonucleotide
  Antisense strand to SEQ ID NO: 2472954
acauucgagucaugacugg

SEQ ID NO: 2472956 - RNA, 19 nt, Artificial Sequence
  Description of Artificial Sequence: Synthetic oligonucleotide
  Sense strand starting at position 2802 of SEQ ID NO: 1887445
cagucaugacucgaauguu

SEQ ID NO: 2472957 - RNA, 19 nt, Artificial Sequence
  Description of Artificial Sequence: Synthetic oligonucleotide
  Antisense strand to SEQ ID NO: 2472956
aacauucgagucaugacug

SEQ ID NO: 2472958 - RNA, 19 nt, Artificial Sequence
  Description of Artificial Sequence: Synthetic oligonucleotide
  Sense strand starting at position 2805 of SEQ ID NO: 1887445
ucaugacucgaauguuugu

SEQ ID NO: 2472959 - RNA, 19 nt, Artificial Sequence
  Description of Artificial Sequence: Synthetic oligonucleotide
  Antisense strand to SEQ ID NO: 2472958
acaaacauucgagucauga

SEQ ID NO: 2472960 - RNA, 19 nt, Artificial Sequence
  Description of Artificial Sequence: Synthetic oligonucleotide
  Sense strand starting at position 2867 of SEQ ID NO: 1887445
gaaacuaaucugugcugau

SEQ ID NO: 2472961 - RNA, 19 nt, Artificial Sequence
  Description of Artificial Sequence: Synthetic oligonucleotide
  Antisense strand to SEQ ID NO: 2472960
aucagcacagauuaguuuc

SEQ ID NO: 2472962 - RNA, 19 nt, Artificial Sequence
  Description of Artificial Sequence: Synthetic oligonucleotide
  Sense strand starting at position 2871 of SEQ ID NO: 1887445
cuaaucugugcugauagau

SEQ ID NO: 2472963 - RNA, 19 nt, Artificial Sequence
  Description of Artificial Sequence: Synthetic oligonucleotide
  Antisense strand to SEQ ID NO: 2472962
aucuaucagcacagauuag

SEQ ID NO: 2472964 - RNA, 19 nt, Artificial Sequence
  Description of Artificial Sequence: Synthetic oligonucleotide
  Sense strand starting at position 2883 of SEQ ID NO: 1887445
gauagaucagcaggguaug

SEQ ID NO: 2472965 - RNA, 19 nt, Artificial Sequence
  Description of Artificial Sequence: Synthetic oligonucleotide
  Antisense strand to SEQ ID NO: 2472964
cauacccugcugaucuauc

SEQ ID NO: 2472966 - RNA, 19 nt, Artificial Sequence
  Description of Artificial Sequence: Synthetic oligonucleotide
  Sense strand starting at position 2958 of SEQ ID NO: 1887445
ucugaaugguguuuacaug

SEQ ID NO: 2472967 - RNA, 19 nt, Artificial Sequence
  Description of Artificial Sequence: Synthetic oligonucleotide
  Antisense strand to SEQ ID NO: 2472966
cauguaaacaccauucaga

SEQ ID NO: 2472968 - RNA, 19 nt, Artificial Sequence
  Description of Artificial Sequence: Synthetic oligonucleotide
  Sense strand starting at position 2964 of SEQ ID NO: 1887445
ugguguuuacauggguaua

SEQ ID NO: 2472969 - RNA, 19 nt, Artificial Sequence
  Description of Artificial Sequence: Synthetic oligonucleotide
  Antisense strand to SEQ ID NO: 2472968
uauacccauguaaacacca

SEQ ID NO: 2472970 - RNA, 19 nt, Artificial Sequence
  Description of Artificial Sequence: Synthetic oligonucleotide
  Sense strand starting at position 2965 of SEQ ID NO: 1887445
gguguuuacauggguauac

SEQ ID NO: 2472971 - RNA, 19 nt, Artificial Sequence
  Description of Artificial Sequence: Synthetic oligonucleotide
  Antisense strand to SEQ ID NO: 2472970
guauacccauguaaacacc

SEQ ID NO: 2472972 - RNA, 19 nt, Artificial Sequence
  Description of Artificial Sequence: Synthetic oligonucleotide
  Sense strand starting at position 2966 of SEQ ID NO: 1887445
guguuuacauggguauaca

SEQ ID NO: 2472973 - RNA, 19 nt, Artificial Sequence
  Description of Artificial Sequence: Synthetic oligonucleotide
  Antisense strand to SEQ ID NO: 2472972
uguauacccauguaaacac

SEQ ID NO: 2472974 - RNA, 19 nt, Artificial Sequence
  Description of Artificial Sequence: Synthetic oligonucleotide
  Sense strand starting at position 3345 of SEQ ID NO: 1887445
auaagacuugugugcuuua

SEQ ID NO: 2472975 - RNA, 19 nt, Artificial Sequence
  Description of Artificial Sequence: Synthetic oligonucleotide
  Antisense strand to SEQ ID NO: 2472974
uaaagcacacaagucuuau

SEQ ID NO: 2472976 - RNA, 19 nt, Artificial Sequence
  Description of Artificial Sequence: Synthetic oligonucleotide
  Sense strand starting at position 3346 of SEQ ID NO: 1887445
uaagacuugugugcuuuau

SEQ ID NO: 2472977 - RNA, 19 nt, Artificial Sequence
  Description of Artificial Sequence: Synthetic oligonucleotide
  Antisense strand to SEQ ID NO: 2472976
auaaagcacacaagucuua

SEQ ID NO: 2472978 - RNA, 19 nt, Artificial Sequence
  Description of Artificial Sequence: Synthetic oligonucleotide
  Sense strand starting at position 3348 of SEQ ID NO: 1887445
agacuugugugcuuuauga

SEQ ID NO: 2472979 - RNA, 19 nt, Artificial Sequence
  Description of Artificial Sequence: Synthetic oligonucleotide
  Antisense strand to SEQ ID NO: 2472978
ucauaaagcacacaagucu

SEQ ID NO: 2472980 - RNA, 19 nt, Artificial Sequence
  Description of Artificial Sequence: Synthetic oligonucleotide
  Sense strand starting at position 3350 of SEQ ID NO: 1887445
acuugugugcuuuaugaau

SEQ ID NO: 2472981 - RNA, 19 nt, Artificial Sequence
  Description of Artificial Sequence: Synthetic oligonucleotide
  Antisense strand to SEQ ID NO: 2472980
auucauaaagcacacaagu

SEQ ID NO: 2472982 - RNA, 19 nt, Artificial Sequence
  Description of Artificial Sequence: Synthetic oligonucleotide
  Sense strand starting at position 3356 of SEQ ID NO: 1887445
gugcuuuaugaauauuaug

SEQ ID NO: 2472983 - RNA, 19 nt, Artificial Sequence
  Description of Artificial Sequence: Synthetic oligonucleotide
  Antisense strand to SEQ ID NO: 2472982
cauaauauucauaaagcac

SEQ ID NO: 2472984 - RNA, 19 nt, Artificial Sequence
  Description of Artificial Sequence: Synthetic oligonucleotide
  Sense strand starting at position 3364 of SEQ ID NO: 1887445
ugaauauuaugacauguca

SEQ ID NO: 2472985 - RNA, 19 nt, Artificial Sequence
  Description of Artificial Sequence: Synthetic oligonucleotide
  Antisense strand to SEQ ID NO: 2472984
ugacaugucauaauauuca

SEQ ID NO: 2472986 - RNA, 19 nt, Artificial Sequence
  Description of Artificial Sequence: Synthetic oligonucleotide
  Sense strand starting at position 3427 of SEQ ID NO: 1887445
gagcuaggaucagaugaua

SEQ ID NO: 2472987 - RNA, 19 nt, Artificial Sequence
  Description of Artificial Sequence: Synthetic oligonucleotide
  Antisense strand to SEQ ID NO: 2472986
uaucaucugauccuagcuc

SEQ ID NO: 2472988 - RNA, 19 nt, Artificial Sequence
  Description of Artificial Sequence: Synthetic oligonucleotide
  Sense strand starting at position 3447 of SEQ ID NO: 1887445
aggguuugggccugucaga

SEQ ID NO: 2472989 - RNA, 19 nt, Artificial Sequence
  Description of Artificial Sequence: Synthetic oligonucleotide
  Antisense strand to SEQ ID NO: 2472988
ucugacaggcccaaacccu

SEQ ID NO: 2472990 - RNA, 19 nt, Artificial Sequence
  Description of Artificial Sequence: Synthetic oligonucleotide
  Sense strand starting at position 3470 of SEQ ID NO: 1887445
ggacuugaucuauguccag

SEQ ID NO: 2472991 - RNA, 19 nt, Artificial Sequence
  Description of Artificial Sequence: Synthetic oligonucleotide
  Antisense strand to SEQ ID NO: 2472990
cuggacauagaucaagucc

SEQ ID NO: 2472992 - RNA, 19 nt, Artificial Sequence
  Description of Artificial Sequence: Synthetic oligonucleotide
  Sense strand starting at position 3473 of SEQ ID NO: 1887445
cuugaucuauguccagaag

SEQ ID NO: 2472993 - RNA, 19 nt, Artificial Sequence
  Description of Artificial Sequence: Synthetic oligonucleotide
  Antisense strand to SEQ ID NO: 2472992
cuucuggacauagaucaag

SEQ ID NO: 2472994 - RNA, 19 nt, Artificial Sequence
  Description of Artificial Sequence: Synthetic oligonucleotide
  Sense strand starting at position 3553 of SEQ ID NO: 1887445
ggaagaucucuuggacuuc

SEQ ID NO: 2472995 - RNA, 19 nt, Artificial Sequence
  Description of Artificial Sequence: Synthetic oligonucleotide
  Antisense strand to SEQ ID NO: 2472994
gaaguccaagagaucuucc

SEQ ID NO: 2472996 - RNA, 19 nt, Artificial Sequence
  Description of Artificial Sequence: Synthetic oligonucleotide
  Sense strand starting at position 480 of SEQ ID NO: 1887446
acuggacuccaaggguuua

SEQ ID NO: 2472997 - RNA, 19 nt, Artificial Sequence
  Description of Artificial Sequence: Synthetic oligonucleotide
  Antisense strand to SEQ ID NO: 2472996
uaaacccuuggaguccagu

SEQ ID NO: 2472998 - RNA, 19 nt, Artificial Sequence
  Description of Artificial Sequence: Synthetic oligonucleotide
  Sense strand starting at position 517 of SEQ ID NO: 1887446
gggaccaggacuugugagu

SEQ ID NO: 2472999 - RNA, 19 nt, Artificial Sequence
  Description of Artificial Sequence: Synthetic oligonucleotide
  Antisense strand to SEQ ID NO: 2472998
acucacaaguccugguccc

SEQ ID NO: 2473000 - RNA, 19 nt, Artificial Sequence
  Description of Artificial Sequence: Synthetic oligonucleotide
  Sense strand starting at position 522 of SEQ ID NO: 1887446
caggacuugugagucccaa

SEQ ID NO: 2473001 - RNA, 19 nt, Artificial Sequence
  Description of Artificial Sequence: Synthetic oligonucleotide
  Antisense strand to SEQ ID NO: 2473000
uugggacucacaaguccug

SEQ ID NO: 2473002 - RNA, 19 nt, Artificial Sequence
  Description of Artificial Sequence: Synthetic oligonucleotide
  Sense strand starting at position 526 of SEQ ID NO: 1887446
acuugugagucccaaggaa

SEQ ID NO: 2473003 - RNA, 19 nt, Artificial Sequence
  Description of Artificial Sequence: Synthetic oligonucleotide
  Antisense strand to SEQ ID NO: 2473002
uuccuugggacucacaagu

SEQ ID NO: 2473004 - RNA, 19 nt, Artificial Sequence
  Description of Artificial Sequence: Synthetic oligonucleotide
  Sense strand starting at position 676 of SEQ ID NO: 1887446
cccagauucgugggucuaa

SEQ ID NO: 2473005 - RNA, 19 nt, Artificial Sequence
  Description of Artificial Sequence: Synthetic oligonucleotide
  Antisense strand to SEQ ID NO: 2473004
uuagacccacgaaucuggg

SEQ ID NO: 2473006 - RNA, 19 nt, Artificial Sequence
  Description of Artificial Sequence: Synthetic oligonucleotide
  Sense strand starting at position 677 of SEQ ID NO: 1887446
ccagauucgugggucuaaa

SEQ ID NO: 2473007 - RNA, 19 nt, Artificial Sequence
  Description of Artificial Sequence: Synthetic oligonucleotide
  Antisense strand to SEQ ID NO: 2473006
uuuagacccacgaaucugg

SEQ ID NO: 2473008 - RNA, 19 nt, Artificial Sequence
  Description of Artificial Sequence: Synthetic oligonucleotide
  Sense strand starting at position 719 of SEQ ID NO: 1887446
acuucugagucuuagagaa

SEQ ID NO: 2473009 - RNA, 19 nt, Artificial Sequence
  Description of Artificial Sequence: Synthetic oligonucleotide
  Antisense strand to SEQ ID NO: 2473008
uucucuaagacucagaagu

SEQ ID NO: 2473010 - RNA, 19 nt, Artificial Sequence
  Description of Artificial Sequence: Synthetic oligonucleotide
  Sense strand starting at position 761 of SEQ ID NO: 1887446
uuaggucucccaggaagaa

SEQ ID NO: 2473011 - RNA, 19 nt, Artificial Sequence
  Description of Artificial Sequence: Synthetic oligonucleotide
  Antisense strand to SEQ ID NO: 2473010
uucuuccugggagaccuaa

SEQ ID NO: 2473012 - RNA, 19 nt, Artificial Sequence
  Description of Artificial Sequence: Synthetic oligonucleotide
  Sense strand starting at position 796 of SEQ ID NO: 1887446
acuccuggauucuauaaga

SEQ ID NO: 2473013 - RNA, 19 nt, Artificial Sequence
  Description of Artificial Sequence: Synthetic oligonucleotide
  Antisense strand to SEQ ID NO: 2473012
ucuuauagaauccaggagu

SEQ ID NO: 2473014 - RNA, 19 nt, Artificial Sequence
  Description of Artificial Sequence: Synthetic oligonucleotide
  Sense strand starting at position 801 of SEQ ID NO: 1887446
uggauucuauaagaggcau

SEQ ID NO: 2473015 - RNA, 19 nt, Artificial Sequence
  Description of Artificial Sequence: Synthetic oligonucleotide
  Antisense strand to SEQ ID NO: 2473014
augccucuuauagaaucca

SEQ ID NO: 2473016 - RNA, 19 nt, Artificial Sequence
  Description of Artificial Sequence: Synthetic oligonucleotide
  Sense strand starting at position 839 of SEQ ID NO: 1887446
cuuaaagcaucgggaacua

SEQ ID NO: 2473017 - RNA, 19 nt, Artificial Sequence
  Description of Artificial Sequence: Synthetic oligonucleotide
  Antisense strand to SEQ ID NO: 2473016
uaguucccgaugcuuuaag

SEQ ID NO: 2473018 - RNA, 19 nt, Artificial Sequence
  Description of Artificial Sequence: Synthetic oligonucleotide
  Sense strand starting at position 918 of SEQ ID NO: 1887446
ccugcugugagguguaguu

SEQ ID NO: 2473019 - RNA, 19 nt, Artificial Sequence
  Description of Artificial Sequence: Synthetic oligonucleotide
  Antisense strand to SEQ ID NO: 2473018
aacuacaccucacagcagg

SEQ ID NO: 2473020 - RNA, 19 nt, Artificial Sequence
  Description of Artificial Sequence: Synthetic oligonucleotide
  Sense strand starting at position 976 of SEQ ID NO: 1887446
acccuuggauaucagagaa

SEQ ID NO: 2473021 - RNA, 19 nt, Artificial Sequence
  Description of Artificial Sequence: Synthetic oligonucleotide
  Antisense strand to SEQ ID NO: 2473020
uucucugauauccaagggu

SEQ ID NO: 2473022 - RNA, 19 nt, Artificial Sequence
  Description of Artificial Sequence: Synthetic oligonucleotide
  Sense strand starting at position 1991 of SEQ ID NO: 1887446
gauacuuacuuucgaugau

SEQ ID NO: 2473023 - RNA, 19 nt, Artificial Sequence
  Description of Artificial Sequence: Synthetic oligonucleotide
  Antisense strand to SEQ ID NO: 2473022
aucaucgaaaguaaguauc

SEQ ID NO: 2473024 - RNA, 19 nt, Artificial Sequence
  Description of Artificial Sequence: Synthetic oligonucleotide
  Sense strand starting at position 1992 of SEQ ID NO: 1887446
auacuuacuuucgaugaug

SEQ ID NO: 2473025 - RNA, 19 nt, Artificial Sequence
  Description of Artificial Sequence: Synthetic oligonucleotide
  Antisense strand to SEQ ID NO: 2473024
caucaucgaaaguaaguau

SEQ ID NO: 2473026 - RNA, 19 nt, Artificial Sequence
  Description of Artificial Sequence: Synthetic oligonucleotide
  Sense strand starting at position 2023 of SEQ ID NO: 1887446
gaggucuauacuggcggaa

SEQ ID NO: 2473027 - RNA, 19 nt, Artificial Sequence
  Description of Artificial Sequence: Synthetic oligonucleotide
  Antisense strand to SEQ ID NO: 2473026
uuccgccaguauagaccuc

SEQ ID NO: 2473028 - RNA, 19 nt, Artificial Sequence
  Description of Artificial Sequence: Synthetic oligonucleotide
  Sense strand starting at position 2025 of SEQ ID NO: 1887446
ggucuauacuggcggaauu

SEQ ID NO: 2473029 - RNA, 19 nt, Artificial Sequence
  Description of Artificial Sequence: Synthetic oligonucleotide
  Antisense strand to SEQ ID NO: 2473028
aauuccgccaguauagacc

SEQ ID NO: 2473030 - RNA, 19 nt, Artificial Sequence
  Description of Artificial Sequence: Synthetic oligonucleotide
  Sense strand starting at position 2027 of SEQ ID NO: 1887446
ucuauacuggcggaauuga

SEQ ID NO: 2473031 - RNA, 19 nt, Artificial Sequence
  Description of Artificial Sequence: Synthetic oligonucleotide
  Antisense strand to SEQ ID NO: 2473030
ucaauuccgccaguauaga

SEQ ID NO: 2473032 - RNA, 19 nt, Artificial Sequence
  Description of Artificial Sequence: Synthetic oligonucleotide
  Sense strand starting at position 2079 of SEQ ID NO: 1887446
aaggaugugccauggauau

SEQ ID NO: 2473033 - RNA, 19 nt, Artificial Sequence
  Description of Artificial Sequence: Synthetic oligonucleotide
  Antisense strand to SEQ ID NO: 2473032
auauccauggcacauccuu

SEQ ID NO: 2473034 - RNA, 19 nt, Artificial Sequence
  Description of Artificial Sequence: Synthetic oligonucleotide
  Sense strand starting at position 2624 of SEQ ID NO: 1887446
gccggauccgcugacugau

SEQ ID NO: 2473035 - RNA, 19 nt, Artificial Sequence
  Description of Artificial Sequence: Synthetic oligonucleotide
  Antisense strand to SEQ ID NO: 2473034
aucagucagcggauccggc

SEQ ID NO: 2473036 - RNA, 19 nt, Artificial Sequence
  Description of Artificial Sequence: Synthetic oligonucleotide
  Sense strand starting at position 2698 of SEQ ID NO: 1887446
ccgguuaguacgcaaagga

SEQ ID NO: 2473037 - RNA, 19 nt, Artificial Sequence
  Description of Artificial Sequence: Synthetic oligonucleotide
  Antisense strand to SEQ ID NO: 2473036
uccuuugcguacuaaccgg

SEQ ID NO: 2473038 - RNA, 19 nt, Artificial Sequence
  Description of Artificial Sequence: Synthetic oligonucleotide
  Sense strand starting at position 2754 of SEQ ID NO: 1887446
ggcucuugguuguaggaua

SEQ ID NO: 2473039 - RNA, 19 nt, Artificial Sequence
  Description of Artificial Sequence: Synthetic oligonucleotide
  Antisense strand to SEQ ID NO: 2473038
uauccuacaaccaagagcc

SEQ ID NO: 2473040 - RNA, 19 nt, Artificial Sequence
  Description of Artificial Sequence: Synthetic oligonucleotide
  Sense strand starting at position 2790 of SEQ ID NO: 1887446
cuugaaacaucagagguga

SEQ ID NO: 2473041 - RNA, 19 nt, Artificial Sequence
  Description of Artificial Sequence: Synthetic oligonucleotide
  Antisense strand to SEQ ID NO: 2473040
ucaccucugauguuucaag

SEQ ID NO: 2473042 - RNA, 19 nt, Artificial Sequence
  Description of Artificial Sequence: Synthetic oligonucleotide
  Sense strand starting at position 2831 of SEQ ID NO: 1887446
guuccuaacuaccgaauua

SEQ ID NO: 2473043 - RNA, 19 nt, Artificial Sequence
  Description of Artificial Sequence: Synthetic oligonucleotide
  Antisense strand to SEQ ID NO: 2473042
uaauucgguaguuaggaac

SEQ ID NO: 2473044 - RNA, 19 nt, Artificial Sequence
  Description of Artificial Sequence: Synthetic oligonucleotide
  Sense strand starting at position 2843 of SEQ ID NO: 1887446
cgaauuaguauaugccaga

SEQ ID NO: 2473045 - RNA, 19 nt, Artificial Sequence
  Description of Artificial Sequence: Synthetic oligonucleotide
  Antisense strand to SEQ ID NO: 2473044
ucuggcauauacuaauucg

SEQ ID NO: 2473046 - RNA, 19 nt, Artificial Sequence
  Description of Artificial Sequence: Synthetic oligonucleotide
  Sense strand starting at position 2846 of SEQ ID NO: 1887446
auuaguauaugccagaggu

SEQ ID NO: 2473047 - RNA, 19 nt, Artificial Sequence
  Description of Artificial Sequence: Synthetic oligonucleotide
  Antisense strand to SEQ ID NO: 2473046
accucuggcauauacuaau

SEQ ID NO: 2473048 - RNA, 19 nt, Artificial Sequence
  Description of Artificial Sequence: Synthetic oligonucleotide
  Sense strand starting at position 2850 of SEQ ID NO: 1887446
guauaugccagagguggua

SEQ ID NO: 2473049 - RNA, 19 nt, Artificial Sequence
  Description of Artificial Sequence: Synthetic oligonucleotide
  Antisense strand to SEQ ID NO: 2473048
uaccaccucuggcauauac

SEQ ID NO: 2473050 - RNA, 19 nt, Artificial Sequence
  Description of Artificial Sequence: Synthetic oligonucleotide
  Sense strand starting at position 2945 of SEQ ID NO: 1887446
uuggaagccuggcuuagaa

SEQ ID NO: 2473051 - RNA, 19 nt, Artificial Sequence
  Description of Artificial Sequence: Synthetic oligonucleotide
  Antisense strand to SEQ ID NO: 2473050
uucuaagccaggcuuccaa

SEQ ID NO: 2473052 - RNA, 19 nt, Artificial Sequence
  Description of Artificial Sequence: Synthetic oligonucleotide
  Sense strand starting at position 2949 of SEQ ID NO: 1887446
aagccuggcuuagaaagaa

SEQ ID NO: 2473053 - RNA, 19 nt, Artificial Sequence
  Description of Artificial Sequence: Synthetic oligonucleotide
  Antisense strand to SEQ ID NO: 2473052
uucuuucuaagccaggcuu

SEQ ID NO: 2473054 - RNA, 19 nt, Artificial Sequence
  Description of Artificial Sequence: Synthetic oligonucleotide
  Sense strand starting at position 3514 of SEQ ID NO: 1887446
guuagaacuugccagggaa

SEQ ID NO: 2473055 - RNA, 19 nt, Artificial Sequence
  Description of Artificial Sequence: Synthetic oligonucleotide
  Antisense strand to SEQ ID NO: 2473054
uucccuggcaaguucuaac

SEQ ID NO: 2473056 - RNA, 19 nt, Artificial Sequence
  Description of Artificial Sequence: Synthetic oligonucleotide
  Sense strand starting at position 3540 of SEQ ID NO: 1887446
gguguuaggacucgggaga

SEQ ID NO: 2473057 - RNA, 19 nt, Artificial Sequence
  Description of Artificial Sequence: Synthetic oligonucleotide
  Antisense strand to SEQ ID NO: 2473056
ucucccgaguccuaacacc

SEQ ID NO: 2473058 - RNA, 19 nt, Artificial Sequence
  Description of Artificial Sequence: Synthetic oligonucleotide
  Sense strand starting at position 3652 of SEQ ID NO: 1887446
auauguucccgggagggau

SEQ ID NO: 2473059 - RNA, 19 nt, Artificial Sequence
  Description of Artificial Sequence: Synthetic oligonucleotide
  Antisense strand to SEQ ID NO: 2473058
aucccucccgggaacauau

SEQ ID NO: 2473060 - RNA, 19 nt, Artificial Sequence
  Description of Artificial Sequence: Synthetic oligonucleotide
  Sense strand starting at position 3726 of SEQ ID NO: 1887446
aaggguugcguuuagcaga

SEQ ID NO: 2473061 - RNA, 19 nt, Artificial Sequence
  Description of Artificial Sequence: Synthetic oligonucleotide
  Antisense strand to SEQ ID NO: 2473060
ucugcuaaacgcaacccuu

SEQ ID NO: 2473062 - RNA, 19 nt, Artificial Sequence
  Description of Artificial Sequence: Synthetic oligonucleotide
  Sense strand starting at position 3778 of SEQ ID NO: 1887446
aaucuacgaguuugugaac

SEQ ID NO: 2473063 - RNA, 19 nt, Artificial Sequence
  Description of Artificial Sequence: Synthetic oligonucleotide
  Antisense strand to SEQ ID NO: 2473062
guucacaaacucguagauu

SEQ ID NO: 2473064 - RNA, 19 nt, Artificial Sequence
  Description of Artificial Sequence: Synthetic oligonucleotide
  Sense strand starting at position 3781 of SEQ ID NO: 1887446
cuacgaguuugugaacuca

SEQ ID NO: 2473065 - RNA, 19 nt, Artificial Sequence
  Description of Artificial Sequence: Synthetic oligonucleotide
  Antisense strand to SEQ ID NO: 2473064
ugaguucacaaacucguag

SEQ ID NO: 2473066 - RNA, 19 nt, Artificial Sequence
  Description of Artificial Sequence: Synthetic oligonucleotide
  Sense strand starting at position 3943 of SEQ ID NO: 1887446
uucugauacccaggugaga

SEQ ID NO: 2473067 - RNA, 19 nt, Artificial Sequence
  Description of Artificial Sequence: Synthetic oligonucleotide
  Antisense strand to SEQ ID NO: 2473066
ucucaccuggguaucagaa

SEQ ID NO: 2473068 - RNA, 19 nt, Artificial Sequence
  Description of Artificial Sequence: Synthetic oligonucleotide
  Sense strand starting at position 3945 of SEQ ID NO: 1887446
cugauacccaggugagaau

SEQ ID NO: 2473069 - RNA, 19 nt, Artificial Sequence
  Description of Artificial Sequence: Synthetic oligonucleotide
  Antisense strand to SEQ ID NO: 2473068
auucucaccuggguaucag

SEQ ID NO: 2473070 - RNA, 19 nt, Artificial Sequence
  Description of Artificial Sequence: Synthetic oligonucleotide
  Sense strand starting at position 3956 of SEQ ID NO: 1887446
gugagaaugugcccaacuu

SEQ ID NO: 2473071 - RNA, 19 nt, Artificial Sequence
  Description of Artificial Sequence: Synthetic oligonucleotide
  Antisense strand to SEQ ID NO: 2473070
aaguugggcacauucucac

SEQ ID NO: 2473072 - RNA, 19 nt, Artificial Sequence
  Description of Artificial Sequence: Synthetic oligonucleotide
  Sense strand starting at position 3957 of SEQ ID NO: 1887446
ugagaaugugcccaacuuu

SEQ ID NO: 2473073 - RNA, 19 nt, Artificial Sequence
  Description of Artificial Sequence: Synthetic oligonucleotide
  Antisense strand to SEQ ID NO: 2473072
aaaguugggcacauucuca

SEQ ID NO: 2473074 - RNA, 19 nt, Artificial Sequence
  Description of Artificial Sequence: Synthetic oligonucleotide
  Sense strand starting at position 496 of SEQ ID NO: 1887447
gguuaagugcgauguuaag

SEQ ID NO: 2473075 - RNA, 19 nt, Artificial Sequence
  Description of Artificial Sequence: Synthetic oligonucleotide
  Antisense strand to SEQ ID NO: 2473074
cuuaacaucgcacuuaacc

SEQ ID NO: 2473076 - RNA, 19 nt, Artificial Sequence
  Description of Artificial Sequence: Synthetic oligonucleotide
  Sense strand starting at position 506 of SEQ ID NO: 1887447
gauguuaagugugcaucaa

SEQ ID NO: 2473077 - RNA, 19 nt, Artificial Sequence
  Description of Artificial Sequence: Synthetic oligonucleotide
  Antisense strand to SEQ ID NO: 2473076
uugaugcacacuuaacauc

SEQ ID NO: 2473078 - RNA, 19 nt, Artificial Sequence
  Description of Artificial Sequence: Synthetic oligonucleotide
  Sense strand starting at position 507 of SEQ ID NO: 1887447
auguuaagugugcaucaaa

SEQ ID NO: 2473079 - RNA, 19 nt, Artificial Sequence
  Description of Artificial Sequence: Synthetic oligonucleotide
  Antisense strand to SEQ ID NO: 2473078
uuugaugcacacuuaacau

SEQ ID NO: 2473080 - RNA, 19 nt, Artificial Sequence
  Description of Artificial Sequence: Synthetic oligonucleotide
  Sense strand starting at position 510 of SEQ ID NO: 1887447
uuaagugugcaucaaauaa

SEQ ID NO: 2473081 - RNA, 19 nt, Artificial Sequence
  Description of Artificial Sequence: Synthetic oligonucleotide
  Antisense strand to SEQ ID NO: 2473080
uuauuugaugcacacuuaa

SEQ ID NO: 2473082 - RNA, 19 nt, Artificial Sequence
  Description of Artificial Sequence: Synthetic oligonucleotide
  Sense strand starting at position 558 of SEQ ID NO: 1887447
ugggacagucacugacuua

SEQ ID NO: 2473083 - RNA, 19 nt, Artificial Sequence
  Description of Artificial Sequence: Synthetic oligonucleotide
  Antisense strand to SEQ ID NO: 2473082
uaagucagugacuguccca

SEQ ID NO: 2473084 - RNA, 19 nt, Artificial Sequence
  Description of Artificial Sequence: Synthetic oligonucleotide
  Sense strand starting at position 561 of SEQ ID NO: 1887447
gacagucacugacuuaaug

SEQ ID NO: 2473085 - RNA, 19 nt, Artificial Sequence
  Description of Artificial Sequence: Synthetic oligonucleotide
  Antisense strand to SEQ ID NO: 2473084
cauuaagucagugacuguc

SEQ ID NO: 2473086 - RNA, 19 nt, Artificial Sequence
  Description of Artificial Sequence: Synthetic oligonucleotide
  Sense strand starting at position 593 of SEQ ID NO: 1887447
aagugugagcugggaacaa

SEQ ID NO: 2473087 - RNA, 19 nt, Artificial Sequence
  Description of Artificial Sequence: Synthetic oligonucleotide
  Antisense strand to SEQ ID NO: 2473086
uuguucccagcucacacuu

SEQ ID NO: 2473088 - RNA, 19 nt, Artificial Sequence
  Description of Artificial Sequence: Synthetic oligonucleotide
  Sense strand starting at position 634 of SEQ ID NO: 1887447
guccaugggaucugacaac

SEQ ID NO: 2473089 - RNA, 19 nt, Artificial Sequence
  Description of Artificial Sequence: Synthetic oligonucleotide
  Antisense strand to SEQ ID NO: 2473088
guugucagaucccauggac

SEQ ID NO: 2473090 - RNA, 19 nt, Artificial Sequence
  Description of Artificial Sequence: Synthetic oligonucleotide
  Sense strand starting at position 1140 of SEQ ID NO: 1887447
agaagacagcaaugcaaau

SEQ ID NO: 2473091 - RNA, 19 nt, Artificial Sequence
  Description of Artificial Sequence: Synthetic oligonucleotide
  Antisense strand to SEQ ID NO: 2473090
auuugcauugcugucuucu

SEQ ID NO: 2473092 - RNA, 19 nt, Artificial Sequence
  Description of Artificial Sequence: Synthetic oligonucleotide
  Sense strand starting at position 1193 of SEQ ID NO: 1887447
ugcacuagucauuaucaag

SEQ ID NO: 2473093 - RNA, 19 nt, Artificial Sequence
  Description of Artificial Sequence: Synthetic oligonucleotide
  Antisense strand to SEQ ID NO: 2473092
cuugauaaugacuagugca

SEQ ID NO: 2473094 - RNA, 19 nt, Artificial Sequence
  Description of Artificial Sequence: Synthetic oligonucleotide
  Sense strand starting at position 1476 of SEQ ID NO: 1887447
cuaugauauugggacuauc

SEQ ID NO: 2473095 - RNA, 19 nt, Artificial Sequence
  Description of Artificial Sequence: Synthetic oligonucleotide
  Antisense strand to SEQ ID NO: 2473094
gauagucccaauaucauag

SEQ ID NO: 2473096 - RNA, 19 nt, Artificial Sequence
  Description of Artificial Sequence: Synthetic oligonucleotide
  Sense strand starting at position 1486 of SEQ ID NO: 1887447
gggacuaucugcucucauu

SEQ ID NO: 2473097 - RNA, 19 nt, Artificial Sequence
  Description of Artificial Sequence: Synthetic oligonucleotide
  Antisense strand to SEQ ID NO: 2473096
aaugagagcagauaguccc

SEQ ID NO: 2473098 - RNA, 19 nt, Artificial Sequence
  Description of Artificial Sequence: Synthetic oligonucleotide
  Sense strand starting at position 1496 of SEQ ID NO: 1887447
gcucucauuguacagauga

SEQ ID NO: 2473099 - RNA, 19 nt, Artificial Sequence
  Description of Artificial Sequence: Synthetic oligonucleotide
  Antisense strand to SEQ ID NO: 2473098
ucaucuguacaaugagagc

SEQ ID NO: 2473100 - RNA, 19 nt, Artificial Sequence
  Description of Artificial Sequence: Synthetic oligonucleotide
  Sense strand starting at position 1617 of SEQ ID NO: 1887447
auacuaagcgcucaaacau

SEQ ID NO: 2473101 - RNA, 19 nt, Artificial Sequence
  Description of Artificial Sequence: Synthetic oligonucleotide
  Antisense strand to SEQ ID NO: 2473100
auguuugagcgcuuaguau

SEQ ID NO: 2473102 - RNA, 19 nt, Artificial Sequence
  Description of Artificial Sequence: Synthetic oligonucleotide
  Sense strand starting at position 1651 of SEQ ID NO: 1887447
uaguauaguaacgaaguga

SEQ ID NO: 2473103 - RNA, 19 nt, Artificial Sequence
  Description of Artificial Sequence: Synthetic oligonucleotide
  Antisense strand to SEQ ID NO: 2473102
ucacuucguuacuauacua

SEQ ID NO: 2473104 - RNA, 19 nt, Artificial Sequence
  Description of Artificial Sequence: Synthetic oligonucleotide
  Sense strand starting at position 1732 of SEQ ID NO: 1887447
uuauaaagccggugauaca

SEQ ID NO: 2473105 - RNA, 19 nt, Artificial Sequence
  Description of Artificial Sequence: Synthetic oligonucleotide
  Antisense strand to SEQ ID NO: 2473104
uguaucaccggcuuuauaa

SEQ ID NO: 2473106 - RNA, 19 nt, Artificial Sequence
  Description of Artificial Sequence: Synthetic oligonucleotide
  Sense strand starting at position 1741 of SEQ ID NO: 1887447
cggugauacagucggauuc

SEQ ID NO: 2473107 - RNA, 19 nt, Artificial Sequence
  Description of Artificial Sequence: Synthetic oligonucleotide
  Antisense strand to SEQ ID NO: 2473106
gaauccgacuguaucaccg

SEQ ID NO: 2473108 - RNA, 19 nt, Artificial Sequence
  Description of Artificial Sequence: Synthetic oligonucleotide
  Sense strand starting at position 1742 of SEQ ID NO: 1887447
ggugauacagucggauucu

SEQ ID NO: 2473109 - RNA, 19 nt, Artificial Sequence
  Description of Artificial Sequence: Synthetic oligonucleotide
  Antisense strand to SEQ ID NO: 2473108
agaauccgacuguaucacc

SEQ ID NO: 2473110 - RNA, 19 nt, Artificial Sequence
  Description of Artificial Sequence: Synthetic oligonucleotide
  Sense strand starting at position 2407 of SEQ ID NO: 1887447
ugucuuccacgcuauaaug

SEQ ID NO: 2473111 - RNA, 19 nt, Artificial Sequence
  Description of Artificial Sequence: Synthetic oligonucleotide
  Antisense strand to SEQ ID NO: 2473110
cauuauagcguggaagaca

SEQ ID NO: 2473112 - RNA, 19 nt, Artificial Sequence
  Description of Artificial Sequence: Synthetic oligonucleotide
  Sense strand starting at position 2416 of SEQ ID NO: 1887447
cgcuauaaugcauggaaua

SEQ ID NO: 2473113 - RNA, 19 nt, Artificial Sequence
  Description of Artificial Sequence: Synthetic oligonucleotide
  Antisense strand to SEQ ID NO: 2473112
uauuccaugcauuauagcg

SEQ ID NO: 2473114 - RNA, 19 nt, Artificial Sequence
  Description of Artificial Sequence: Synthetic oligonucleotide
  Sense strand starting at position 2417 of SEQ ID NO: 1887447
gcuauaaugcauggaauau

SEQ ID NO: 2473115 - RNA, 19 nt, Artificial Sequence
  Description of Artificial Sequence: Synthetic oligonucleotide
  Antisense strand to SEQ ID NO: 2473114
auauuccaugcauuauagc

SEQ ID NO: 2473116 - RNA, 19 nt, Artificial Sequence
  Description of Artificial Sequence: Synthetic oligonucleotide
  Sense strand starting at position 2491 of SEQ ID NO: 1887447
ugucuuccacgcuauaauu

SEQ ID NO: 2473117 - RNA, 19 nt, Artificial Sequence
  Description of Artificial Sequence: Synthetic oligonucleotide
  Antisense strand to SEQ ID NO: 2473116
aauuauagcguggaagaca

SEQ ID NO: 2473118 - RNA, 19 nt, Artificial Sequence
  Description of Artificial Sequence: Synthetic oligonucleotide
  Sense strand starting at position 2617 of SEQ ID NO: 1887447
cuccucuuguugucaucaa

SEQ ID NO: 2473119 - RNA, 19 nt, Artificial Sequence
  Description of Artificial Sequence: Synthetic oligonucleotide
  Antisense strand to SEQ ID NO: 2473118
uugaugacaacaagaggag

SEQ ID NO: 2473120 - RNA, 19 nt, Artificial Sequence
  Description of Artificial Sequence: Synthetic oligonucleotide
  Sense strand starting at position 2638 of SEQ ID NO: 1887447
cccuuaacucgcuuucguu

SEQ ID NO: 2473121 - RNA, 19 nt, Artificial Sequence
  Description of Artificial Sequence: Synthetic oligonucleotide
  Antisense strand to SEQ ID NO: 2473120
aacgaaagcgaguuaaggg

SEQ ID NO: 2473122 - RNA, 19 nt, Artificial Sequence
  Description of Artificial Sequence: Synthetic oligonucleotide
  Sense strand starting at position 2683 of SEQ ID NO: 1887447
ggucguaaucgcucccuuu

SEQ ID NO: 2473123 - RNA, 19 nt, Artificial Sequence
  Description of Artificial Sequence: Synthetic oligonucleotide
  Antisense strand to SEQ ID NO: 2473122
aaagggagcgauuacgacc

SEQ ID NO: 2473124 - RNA, 19 nt, Artificial Sequence
  Description of Artificial Sequence: Synthetic oligonucleotide
  Sense strand starting at position 2684 of SEQ ID NO: 1887447
gucguaaucgcucccuuua

SEQ ID NO: 2473125 - RNA, 19 nt, Artificial Sequence
  Description of Artificial Sequence: Synthetic oligonucleotide
  Antisense strand to SEQ ID NO: 2473124
uaaagggagcgauuacgac

SEQ ID NO: 2473126 - RNA, 19 nt, Artificial Sequence
  Description of Artificial Sequence: Synthetic oligonucleotide
  Sense strand starting at position 2701 of SEQ ID NO: 1887447
uaaauucgucaucgccaua

SEQ ID NO: 2473127 - RNA, 19 nt, Artificial Sequence
  Description of Artificial Sequence: Synthetic oligonucleotide
  Antisense strand to SEQ ID NO: 2473126
uauggcgaugacgaauuua

SEQ ID NO: 2473128 - RNA, 19 nt, Artificial Sequence
  Description of Artificial Sequence: Synthetic oligonucleotide
  Sense strand starting at position 2706 of SEQ ID NO: 1887447
ucgucaucgccauauguua

SEQ ID NO: 2473129 - RNA, 19 nt, Artificial Sequence
  Description of Artificial Sequence: Synthetic oligonucleotide
  Antisense strand to SEQ ID NO: 2473128
uaacauauggcgaugacga

SEQ ID NO: 2473130 - RNA, 19 nt, Artificial Sequence
  Description of Artificial Sequence: Synthetic oligonucleotide
  Sense strand starting at position 2714 of SEQ ID NO: 1887447
gccauauguuaccugcauc

SEQ ID NO: 2473131 - RNA, 19 nt, Artificial Sequence
  Description of Artificial Sequence: Synthetic oligonucleotide
  Antisense strand to SEQ ID NO: 2473130
gaugcagguaacauauggc

SEQ ID NO: 2473132 - RNA, 19 nt, Artificial Sequence
  Description of Artificial Sequence: Synthetic oligonucleotide
  Sense strand starting at position 2741 of SEQ ID NO: 1887447
guugccauuucuccuuuau

SEQ ID NO: 2473133 - RNA, 19 nt, Artificial Sequence
  Description of Artificial Sequence: Synthetic oligonucleotide
  Antisense strand to SEQ ID NO: 2473132
auaaaggagaaauggcaac

SEQ ID NO: 2473134 - RNA, 19 nt, Artificial Sequence
  Description of Artificial Sequence: Synthetic oligonucleotide
  Sense strand starting at position 2835 of SEQ ID NO: 1887447
cuuaaaucgcgcuaaugca

SEQ ID NO: 2473135 - RNA, 19 nt, Artificial Sequence
  Description of Artificial Sequence: Synthetic oligonucleotide
  Antisense strand to SEQ ID NO: 2473134
ugcauuagcgcgauuuaag

SEQ ID NO: 2473136 - RNA, 19 nt, Artificial Sequence
  Description of Artificial Sequence: Synthetic oligonucleotide
  Sense strand starting at position 2854 of SEQ ID NO: 1887447
acucuuacgucaucauuac

SEQ ID NO: 2473137 - RNA, 19 nt, Artificial Sequence
  Description of Artificial Sequence: Synthetic oligonucleotide
  Antisense strand to SEQ ID NO: 2473136
guaaugaugacguaagagu

SEQ ID NO: 2473138 - RNA, 19 nt, Artificial Sequence
  Description of Artificial Sequence: Synthetic oligonucleotide
  Sense strand starting at position 2991 of SEQ ID NO: 1887447
cuccgugucuucgucauuu

SEQ ID NO: 2473139 - RNA, 19 nt, Artificial Sequence
  Description of Artificial Sequence: Synthetic oligonucleotide
  Antisense strand to SEQ ID NO: 2473138
aaaugacgaagacacggag

SEQ ID NO: 2473140 - RNA, 19 nt, Artificial Sequence
  Description of Artificial Sequence: Synthetic oligonucleotide
  Sense strand starting at position 3181 of SEQ ID NO: 1887447
ugugacgauucugugaguu

SEQ ID NO: 2473141 - RNA, 19 nt, Artificial Sequence
  Description of Artificial Sequence: Synthetic oligonucleotide
  Antisense strand to SEQ ID NO: 2473140
aacucacagaaucgucaca

SEQ ID NO: 2473142 - RNA, 19 nt, Artificial Sequence
  Description of Artificial Sequence: Synthetic oligonucleotide
  Sense strand starting at position 3185 of SEQ ID NO: 1887447
acgauucugugaguuuauu

SEQ ID NO: 2473143 - RNA, 19 nt, Artificial Sequence
  Description of Artificial Sequence: Synthetic oligonucleotide
  Antisense strand to SEQ ID NO: 2473142
aauaaacucacagaaucgu

SEQ ID NO: 2473144 - RNA, 19 nt, Artificial Sequence
  Description of Artificial Sequence: Synthetic oligonucleotide
  Sense strand starting at position 3193 of SEQ ID NO: 1887447
gugaguuuauucuuguggu

SEQ ID NO: 2473145 - RNA, 19 nt, Artificial Sequence
  Description of Artificial Sequence: Synthetic oligonucleotide
  Antisense strand to SEQ ID NO: 2473144
accacaagaauaaacucac

SEQ ID NO: 2473146 - RNA, 19 nt, Artificial Sequence
  Description of Artificial Sequence: Synthetic oligonucleotide
  Sense strand starting at position 3755 of SEQ ID NO: 1887447
acaggagaaucguucgaau

SEQ ID NO: 2473147 - RNA, 19 nt, Artificial Sequence
  Description of Artificial Sequence: Synthetic oligonucleotide
  Antisense strand to SEQ ID NO: 2473146
auucgaacgauucuccugu

SEQ ID NO: 2473148 - RNA, 19 nt, Artificial Sequence
  Description of Artificial Sequence: Synthetic oligonucleotide
  Sense strand starting at position 3757 of SEQ ID NO: 1887447
aggagaaucguucgaaucu

SEQ ID NO: 2473149 - RNA, 19 nt, Artificial Sequence
  Description of Artificial Sequence: Synthetic oligonucleotide
  Antisense strand to SEQ ID NO: 2473148
agauucgaacgauucuccu

SEQ ID NO: 2473150 - RNA, 19 nt, Artificial Sequence
  Description of Artificial Sequence: Synthetic oligonucleotide
  Sense strand starting at position 3877 of SEQ ID NO: 1887447
gcaugaucuugggcaacua

SEQ ID NO: 2473151 - RNA, 19 nt, Artificial Sequence
  Description of Artificial Sequence: Synthetic oligonucleotide
  Antisense strand to SEQ ID NO: 2473150
uaguugcccaagaucaugc

SEQ ID NO: 2473152 - RNA, 19 nt, Artificial Sequence
  Description of Artificial Sequence: Synthetic oligonucleotide
  Sense strand starting at position 3917 of SEQ ID NO: 1887447
guuacugcaucugcaauau

SEQ ID NO: 2473153 - RNA, 19 nt, Artificial Sequence
  Description of Artificial Sequence: Synthetic oligonucleotide
  Antisense strand to SEQ ID NO: 2473152
auauugcagaugcaguaac

SEQ ID NO: 2473154 - RNA, 19 nt, Artificial Sequence
  Description of Artificial Sequence: Synthetic oligonucleotide
  Sense strand starting at position 119 of SEQ ID NO: 1887448
ugagguaaggauugugguu

SEQ ID NO: 2473155 - RNA, 19 nt, Artificial Sequence
  Description of Artificial Sequence: Synthetic oligonucleotide
  Antisense strand to SEQ ID NO: 2473154
aaccacaauccuuaccuca

SEQ ID NO: 2473156 - RNA, 19 nt, Artificial Sequence
  Description of Artificial Sequence: Synthetic oligonucleotide
  Sense strand starting at position 124 of SEQ ID NO: 1887448
uaaggauugugguuguggu

SEQ ID NO: 2473157 - RNA, 19 nt, Artificial Sequence
  Description of Artificial Sequence: Synthetic oligonucleotide
  Antisense strand to SEQ ID NO: 2473156
accacaaccacaauccuua

SEQ ID NO: 2473158 - RNA, 19 nt, Artificial Sequence
  Description of Artificial Sequence: Synthetic oligonucleotide
  Sense strand starting at position 191 of SEQ ID NO: 1887448
ggguacgagguuuaggauu

SEQ ID NO: 2473159 - RNA, 19 nt, Artificial Sequence
  Description of Artificial Sequence: Synthetic oligonucleotide
  Antisense strand to SEQ ID NO: 2473158
aauccuaaaccucguaccc

SEQ ID NO: 2473160 - RNA, 19 nt, Artificial Sequence
  Description of Artificial Sequence: Synthetic oligonucleotide
  Sense strand starting at position 265 of SEQ ID NO: 1887448
gagcuacuccugggauugu

SEQ ID NO: 2473161 - RNA, 19 nt, Artificial Sequence
  Description of Artificial Sequence: Synthetic oligonucleotide
  Antisense strand to SEQ ID NO: 2473160
acaaucccaggaguagcuc

SEQ ID NO: 2473162 - RNA, 19 nt, Artificial Sequence
  Description of Artificial Sequence: Synthetic oligonucleotide
  Sense strand starting at position 509 of SEQ ID NO: 1887448
uggugauggcagugucauu

SEQ ID NO: 2473163 - RNA, 19 nt, Artificial Sequence
  Description of Artificial Sequence: Synthetic oligonucleotide
  Antisense strand to SEQ ID NO: 2473162
aaugacacugccaucacca

SEQ ID NO: 2473164 - RNA, 19 nt, Artificial Sequence
  Description of Artificial Sequence: Synthetic oligonucleotide
  Sense strand starting at position 922 of SEQ ID NO: 1887448
gggacagguuguuccuaga

SEQ ID NO: 2473165 - RNA, 19 nt, Artificial Sequence
  Description of Artificial Sequence: Synthetic oligonucleotide
  Antisense strand to SEQ ID NO: 2473164
ucuaggaacaaccuguccc

SEQ ID NO: 2473166 - RNA, 19 nt, Artificial Sequence
  Description of Artificial Sequence: Synthetic oligonucleotide
  Sense strand starting at position 1118 of SEQ ID NO: 1887448
acagcucugccaugaacuu

SEQ ID NO: 2473167 - RNA, 19 nt, Artificial Sequence
  Description of Artificial Sequence: Synthetic oligonucleotide
  Antisense strand to SEQ ID NO: 2473166
aaguucauggcagagcugu

SEQ ID NO: 2473168 - RNA, 19 nt, Artificial Sequence
  Description of Artificial Sequence: Synthetic oligonucleotide
  Sense strand starting at position 1183 of SEQ ID NO: 1887448
ggugguguaucuuuggaca

SEQ ID NO: 2473169 - RNA, 19 nt, Artificial Sequence
  Description of Artificial Sequence: Synthetic oligonucleotide
  Antisense strand to SEQ ID NO: 2473168
uguccaaagauacaccacc

SEQ ID NO: 2473170 - RNA, 19 nt, Artificial Sequence
  Description of Artificial Sequence: Synthetic oligonucleotide
  Sense strand starting at position 1250 of SEQ ID NO: 1887448
uuuggaugguaucaaaggu

SEQ ID NO: 2473171 - RNA, 19 nt, Artificial Sequence
  Description of Artificial Sequence: Synthetic oligonucleotide
  Antisense strand to SEQ ID NO: 2473170
accuuugauaccauccaaa

SEQ ID NO: 2473172 - RNA, 19 nt, Artificial Sequence
  Description of Artificial Sequence: Synthetic oligonucleotide
  Sense strand starting at position 1258 of SEQ ID NO: 1887448
guaucaaaggugcguauga

SEQ ID NO: 2473173 - RNA, 19 nt, Artificial Sequence
  Description of Artificial Sequence: Synthetic oligonucleotide
  Antisense strand to SEQ ID NO: 2473172
ucauacgcaccuuugauac

SEQ ID NO: 2473174 - RNA, 19 nt, Artificial Sequence
  Description of Artificial Sequence: Synthetic oligonucleotide
  Sense strand starting at position 1260 of SEQ ID NO: 1887448
aucaaaggugcguaugaca

SEQ ID NO: 2473175 - RNA, 19 nt, Artificial Sequence
  Description of Artificial Sequence: Synthetic oligonucleotide
  Antisense strand to SEQ ID NO: 2473174
ugucauacgcaccuuugau

SEQ ID NO: 2473176 - RNA, 19 nt, Artificial Sequence
  Description of Artificial Sequence: Synthetic oligonucleotide
  Sense strand starting at position 1284 of SEQ ID NO: 1887448
gggucugguaagugcuaaa

SEQ ID NO: 2473177 - RNA, 19 nt, Artificial Sequence
  Description of Artificial Sequence: Synthetic oligonucleotide
  Antisense strand to SEQ ID NO: 2473176
uuuagcacuuaccagaccc

SEQ ID NO: 2473178 - RNA, 19 nt, Artificial Sequence
  Description of Artificial Sequence: Synthetic oligonucleotide
  Sense strand starting at position 1360 of SEQ ID NO: 1887448
cuugguuuauucuuggaaa

SEQ ID NO: 2473179 - RNA, 19 nt, Artificial Sequence
  Description of Artificial Sequence: Synthetic oligonucleotide
  Antisense strand to SEQ ID NO: 2473178
uuuccaagaauaaaccaag

SEQ ID NO: 2473180 - RNA, 19 nt, Artificial Sequence
  Description of Artificial Sequence: Synthetic oligonucleotide
  Sense strand starting at position 1362 of SEQ ID NO: 1887448
ugguuuauucuuggaaauu

SEQ ID NO: 2473181 - RNA, 19 nt, Artificial Sequence
  Description of Artificial Sequence: Synthetic oligonucleotide
  Antisense strand to SEQ ID NO: 2473180
aauuuccaagaauaaacca

SEQ ID NO: 2473182 - RNA, 19 nt, Artificial Sequence
  Description of Artificial Sequence: Synthetic oligonucleotide
  Sense strand starting at position 1363 of SEQ ID NO: 1887448
gguuuauucuuggaaauuu

SEQ ID NO: 2473183 - RNA, 19 nt, Artificial Sequence
  Description of Artificial Sequence: Synthetic oligonucleotide
  Antisense strand to SEQ ID NO: 2473182
aaauuuccaagaauaaacc

SEQ ID NO: 2473184 - RNA, 19 nt, Artificial Sequence
  Description of Artificial Sequence: Synthetic oligonucleotide
  Sense strand starting at position 1376 of SEQ ID NO: 1887448
aaauuucuguucgaugagu

SEQ ID NO: 2473185 - RNA, 19 nt, Artificial Sequence
  Description of Artificial Sequence: Synthetic oligonucleotide
  Antisense strand to SEQ ID NO: 2473184
acucaucgaacagaaauuu

SEQ ID NO: 2473186 - RNA, 19 nt, Artificial Sequence
  Description of Artificial Sequence: Synthetic oligonucleotide
  Sense strand starting at position 1378 of SEQ ID NO: 1887448
auuucuguucgaugaguau

SEQ ID NO: 2473187 - RNA, 19 nt, Artificial Sequence
  Description of Artificial Sequence: Synthetic oligonucleotide
  Antisense strand to SEQ ID NO: 2473186
auacucaucgaacagaaau

SEQ ID NO: 2473188 - RNA, 19 nt, Artificial Sequence
  Description of Artificial Sequence: Synthetic oligonucleotide
  Sense strand starting at position 1387 of SEQ ID NO: 1887448
cgaugaguaucuguuucua

SEQ ID NO: 2473189 - RNA, 19 nt, Artificial Sequence
  Description of Artificial Sequence: Synthetic oligonucleotide
  Antisense strand to SEQ ID NO: 2473188
uagaaacagauacucaucg

SEQ ID NO: 2473190 - RNA, 19 nt, Artificial Sequence
  Description of Artificial Sequence: Synthetic oligonucleotide
  Sense strand starting at position 1714 of SEQ ID NO: 1887448
cuaaguaucucgcucaacu

SEQ ID NO: 2473191 - RNA, 19 nt, Artificial Sequence
  Description of Artificial Sequence: Synthetic oligonucleotide
  Antisense strand to SEQ ID NO: 2473190
aguugagcgagauacuuag

SEQ ID NO: 2473192 - RNA, 19 nt, Artificial Sequence
  Description of Artificial Sequence: Synthetic oligonucleotide
  Sense strand starting at position 1753 of SEQ ID NO: 1887448
uucuguaccuaugugauga

SEQ ID NO: 2473193 - RNA, 19 nt, Artificial Sequence
  Description of Artificial Sequence: Synthetic oligonucleotide
  Antisense strand to SEQ ID NO: 2473192
ucaucacauagguacagaa

SEQ ID NO: 2473194 - RNA, 19 nt, Artificial Sequence
  Description of Artificial Sequence: Synthetic oligonucleotide
  Sense strand starting at position 1880 of SEQ ID NO: 1887448
ucaggaggucuuuguuugu

SEQ ID NO: 2473195 - RNA, 19 nt, Artificial Sequence
  Description of Artificial Sequence: Synthetic oligonucleotide
  Antisense strand to SEQ ID NO: 2473194
acaaacaaagaccuccuga

SEQ ID NO: 2473196 - RNA, 19 nt, Artificial Sequence
  Description of Artificial Sequence: Synthetic oligonucleotide
  Sense strand starting at position 1884 of SEQ ID NO: 1887448
gaggucuuuguuugucuca

SEQ ID NO: 2473197 - RNA, 19 nt, Artificial Sequence
  Description of Artificial Sequence: Synthetic oligonucleotide
  Antisense strand to SEQ ID NO: 2473196
ugagacaaacaaagaccuc

SEQ ID NO: 2473198 - RNA, 19 nt, Artificial Sequence
  Description of Artificial Sequence: Synthetic oligonucleotide
  Sense strand starting at position 2069 of SEQ ID NO: 1887448
cgcggaguuauccgggauc

SEQ ID NO: 2473199 - RNA, 19 nt, Artificial Sequence
  Description of Artificial Sequence: Synthetic oligonucleotide
  Antisense strand to SEQ ID NO: 2473198
gaucccggauaacuccgcg

SEQ ID NO: 2473200 - RNA, 19 nt, Artificial Sequence
  Description of Artificial Sequence: Synthetic oligonucleotide
  Sense strand starting at position 2072 of SEQ ID NO: 1887448
ggaguuauccgggauccca

SEQ ID NO: 2473201 - RNA, 19 nt, Artificial Sequence
  Description of Artificial Sequence: Synthetic oligonucleotide
  Antisense strand to SEQ ID NO: 2473200
ugggaucccggauaacucc

SEQ ID NO: 2473202 - RNA, 19 nt, Artificial Sequence
  Description of Artificial Sequence: Synthetic oligonucleotide
  Sense strand starting at position 2667 of SEQ ID NO: 1887448
acagauucuuuaggacuca

SEQ ID NO: 2473203 - RNA, 19 nt, Artificial Sequence
  Description of Artificial Sequence: Synthetic oligonucleotide
  Antisense strand to SEQ ID NO: 2473202
ugaguccuaaagaaucugu

SEQ ID NO: 2473204 - RNA, 19 nt, Artificial Sequence
  Description of Artificial Sequence: Synthetic oligonucleotide
  Sense strand starting at position 2748 of SEQ ID NO: 1887448
ggaggucuuagccauucua

SEQ ID NO: 2473205 - RNA, 19 nt, Artificial Sequence
  Description of Artificial Sequence: Synthetic oligonucleotide
  Antisense strand to SEQ ID NO: 2473204
uagaauggcuaagaccucc

SEQ ID NO: 2473206 - RNA, 19 nt, Artificial Sequence
  Description of Artificial Sequence: Synthetic oligonucleotide
  Sense strand starting at position 2781 of SEQ ID NO: 1887448
cuaggugccgugucucuaa

SEQ ID NO: 2473207 - RNA, 19 nt, Artificial Sequence
  Description of Artificial Sequence: Synthetic oligonucleotide
  Antisense strand to SEQ ID NO: 2473206
uuagagacacggcaccuag

SEQ ID NO: 2473208 - RNA, 19 nt, Artificial Sequence
  Description of Artificial Sequence: Synthetic oligonucleotide
  Sense strand starting at position 2886 of SEQ ID NO: 1887448
ugugauauuacuuguguau

SEQ ID NO: 2473209 - RNA, 19 nt, Artificial Sequence
  Description of Artificial Sequence: Synthetic oligonucleotide
  Antisense strand to SEQ ID NO: 2473208
auacacaaguaauaucaca

SEQ ID NO: 2473210 - RNA, 19 nt, Artificial Sequence
  Description of Artificial Sequence: Synthetic oligonucleotide
  Sense strand starting at position 2889 of SEQ ID NO: 1887448
gauauuacuuguguauuag

SEQ ID NO: 2473211 - RNA, 19 nt, Artificial Sequence
  Description of Artificial Sequence: Synthetic oligonucleotide
  Antisense strand to SEQ ID NO: 2473210
cuaauacacaaguaauauc

SEQ ID NO: 2473212 - RNA, 19 nt, Artificial Sequence
  Description of Artificial Sequence: Synthetic oligonucleotide
  Sense strand starting at position 2895 of SEQ ID NO: 1887448
acuuguguauuaguagaca

SEQ ID NO: 2473213 - RNA, 19 nt, Artificial Sequence
  Description of Artificial Sequence: Synthetic oligonucleotide
  Antisense strand to SEQ ID NO: 2473212
ugucuacuaauacacaagu

SEQ ID NO: 2473214 - RNA, 19 nt, Artificial Sequence
  Description of Artificial Sequence: Synthetic oligonucleotide
  Sense strand starting at position 2969 of SEQ ID NO: 1887448
ggugguugugacaguguuu

SEQ ID NO: 2473215 - RNA, 19 nt, Artificial Sequence
  Description of Artificial Sequence: Synthetic oligonucleotide
  Antisense strand to SEQ ID NO: 2473214
aaacacugucacaaccacc

SEQ ID NO: 2473216 - RNA, 19 nt, Artificial Sequence
  Description of Artificial Sequence: Synthetic oligonucleotide
  Sense strand starting at position 2990 of SEQ ID NO: 1887448
cugagaagcaaucgucauu

SEQ ID NO: 2473217 - RNA, 19 nt, Artificial Sequence
  Description of Artificial Sequence: Synthetic oligonucleotide
  Antisense strand to SEQ ID NO: 2473216
aaugacgauugcuucucag

SEQ ID NO: 2473218 - RNA, 19 nt, Artificial Sequence
  Description of Artificial Sequence: Synthetic oligonucleotide
  Sense strand starting at position 2993 of SEQ ID NO: 1887448
agaagcaaucgucauuauu

SEQ ID NO: 2473219 - RNA, 19 nt, Artificial Sequence
  Description of Artificial Sequence: Synthetic oligonucleotide
  Antisense strand to SEQ ID NO: 2473218
aauaaugacgauugcuucu

SEQ ID NO: 2473220 - RNA, 19 nt, Artificial Sequence
  Description of Artificial Sequence: Synthetic oligonucleotide
  Sense strand starting at position 2996 of SEQ ID NO: 1887448
agcaaucgucauuauuaca

SEQ ID NO: 2473221 - RNA, 19 nt, Artificial Sequence
  Description of Artificial Sequence: Synthetic oligonucleotide
  Antisense strand to SEQ ID NO: 2473220
uguaauaaugacgauugcu

SEQ ID NO: 2473222 - RNA, 19 nt, Artificial Sequence
  Description of Artificial Sequence: Synthetic oligonucleotide
  Sense strand starting at position 3144 of SEQ ID NO: 1887448
agcauauauucuguaagaa

SEQ ID NO: 2473223 - RNA, 19 nt, Artificial Sequence
  Description of Artificial Sequence: Synthetic oligonucleotide
  Antisense strand to SEQ ID NO: 2473222
uucuuacagaauauaugcu

SEQ ID NO: 2473224 - RNA, 19 nt, Artificial Sequence
  Description of Artificial Sequence: Synthetic oligonucleotide
  Sense strand starting at position 3145 of SEQ ID NO: 1887448
gcauauauucuguaagaau

SEQ ID NO: 2473225 - RNA, 19 nt, Artificial Sequence
  Description of Artificial Sequence: Synthetic oligonucleotide
  Antisense strand to SEQ ID NO: 2473224
auucuuacagaauauaugc

SEQ ID NO: 2473226 - RNA, 19 nt, Artificial Sequence
  Description of Artificial Sequence: Synthetic oligonucleotide
  Sense strand starting at position 3168 of SEQ ID NO: 1887448
accugaagaugucaaauca

SEQ ID NO: 2473227 - RNA, 19 nt, Artificial Sequence
  Description of Artificial Sequence: Synthetic oligonucleotide
  Antisense strand to SEQ ID NO: 2473226
ugauuugacaucuucaggu

SEQ ID NO: 2473228 - RNA, 19 nt, Artificial Sequence
  Description of Artificial Sequence: Synthetic oligonucleotide
  Sense strand starting at position 3176 of SEQ ID NO: 1887448
augucaaaucagggcaaga

SEQ ID NO: 2473229 - RNA, 19 nt, Artificial Sequence
  Description of Artificial Sequence: Synthetic oligonucleotide
  Antisense strand to SEQ ID NO: 2473228
ucuugcccugauuugacau

SEQ ID NO: 2473230 - RNA, 19 nt, Artificial Sequence
  Description of Artificial Sequence: Synthetic oligonucleotide
  Sense strand starting at position 3826 of SEQ ID NO: 1887448
ggaacagcuucugaaagua

SEQ ID NO: 2473231 - RNA, 19 nt, Artificial Sequence
  Description of Artificial Sequence: Synthetic oligonucleotide
  Antisense strand to SEQ ID NO: 2473230
uacuuucagaagcuguucc

SEQ ID NO: 2473232 - RNA, 19 nt, Artificial Sequence
  Description of Artificial Sequence: Synthetic oligonucleotide
  Sense strand starting at position 3886 of SEQ ID NO: 1887448
agaggaguggcauagguau

SEQ ID NO: 2473233 - RNA, 19 nt, Artificial Sequence
  Description of Artificial Sequence: Synthetic oligonucleotide
  Antisense strand to SEQ ID NO: 2473232
auaccuaugccacuccucu

SEQ ID NO: 2473234 - RNA, 19 nt, Artificial Sequence
  Description of Artificial Sequence: Synthetic oligonucleotide
  Sense strand starting at position 244 of SEQ ID NO: 1887449
gggccagucuuucucugaa

SEQ ID NO: 2473235 - RNA, 19 nt, Artificial Sequence
  Description of Artificial Sequence: Synthetic oligonucleotide
  Antisense strand to SEQ ID NO: 2473234
uucagagaaagacuggccc

SEQ ID NO: 2473236 - RNA, 19 nt, Artificial Sequence
  Description of Artificial Sequence: Synthetic oligonucleotide
  Sense strand starting at position 246 of SEQ ID NO: 1887449
gccagucuuucucugaauc

SEQ ID NO: 2473237 - RNA, 19 nt, Artificial Sequence
  Description of Artificial Sequence: Synthetic oligonucleotide
  Antisense strand to SEQ ID NO: 2473236
gauucagagaaagacuggc

SEQ ID NO: 2473238 - RNA, 19 nt, Artificial Sequence
  Description of Artificial Sequence: Synthetic oligonucleotide
  Sense strand starting at position 318 of SEQ ID NO: 1887449
gagcccacucaagauuguu

SEQ ID NO: 2473239 - RNA, 19 nt, Artificial Sequence
  Description of Artificial Sequence: Synthetic oligonucleotide
  Antisense strand to SEQ ID NO: 2473238
aacaaucuugagugggcuc

SEQ ID NO: 2473240 - RNA, 19 nt, Artificial Sequence
  Description of Artificial Sequence: Synthetic oligonucleotide
  Sense strand starting at position 326 of SEQ ID NO: 1887449
ucaagauuguugccaccuu

SEQ ID NO: 2473241 - RNA, 19 nt, Artificial Sequence
  Description of Artificial Sequence: Synthetic oligonucleotide
  Antisense strand to SEQ ID NO: 2473240
aagguggcaacaaucuuga

SEQ ID NO: 2473242 - RNA, 19 nt, Artificial Sequence
  Description of Artificial Sequence: Synthetic oligonucleotide
  Sense strand starting at position 939 of SEQ ID NO: 1887449
ggaauaugaucugaauagg

SEQ ID NO: 2473243 - RNA, 19 nt, Artificial Sequence
  Description of Artificial Sequence: Synthetic oligonucleotide
  Antisense strand to SEQ ID NO: 2473242
ccuauucagaucauauucc

SEQ ID NO: 2473244 - RNA, 19 nt, Artificial Sequence
  Description of Artificial Sequence: Synthetic oligonucleotide
  Sense strand starting at position 953 of SEQ ID NO: 1887449
auaggacugcuuuguacaa

SEQ ID NO: 2473245 - RNA, 19 nt, Artificial Sequence
  Description of Artificial Sequence: Synthetic oligonucleotide
  Antisense strand to SEQ ID NO: 2473244
uuguacaaagcaguccuau

SEQ ID NO: 2473246 - RNA, 19 nt, Artificial Sequence
  Description of Artificial Sequence: Synthetic oligonucleotide
  Sense strand starting at position 1043 of SEQ ID NO: 1887449
agagcuuugcaguguacaa

SEQ ID NO: 2473247 - RNA, 19 nt, Artificial Sequence
  Description of Artificial Sequence: Synthetic oligonucleotide
  Antisense strand to SEQ ID NO: 2473246
uuguacacugcaaagcucu

SEQ ID NO: 2473248 - RNA, 19 nt, Artificial Sequence
  Description of Artificial Sequence: Synthetic oligonucleotide
  Sense strand starting at position 1159 of SEQ ID NO: 1887449
ggaguaggauuggugccaa

SEQ ID NO: 2473249 - RNA, 19 nt, Artificial Sequence
  Description of Artificial Sequence: Synthetic oligonucleotide
  Antisense strand to SEQ ID NO: 2473248
uuggcaccaauccuacucc

SEQ ID NO: 2473250 - RNA, 19 nt, Artificial Sequence
  Description of Artificial Sequence: Synthetic oligonucleotide
  Sense strand starting at position 1232 of SEQ ID NO: 1887449
augcuuugaugugcaaaug

SEQ ID NO: 2473251 - RNA, 19 nt, Artificial Sequence
  Description of Artificial Sequence: Synthetic oligonucleotide
  Antisense strand to SEQ ID NO: 2473250
cauuugcacaucaaagcau

SEQ ID NO: 2473252 - RNA, 19 nt, Artificial Sequence
  Description of Artificial Sequence: Synthetic oligonucleotide
  Sense strand starting at position 1336 of SEQ ID NO: 1887449
gugcuuuaggguuaagguu

SEQ ID NO: 2473253 - RNA, 19 nt, Artificial Sequence
  Description of Artificial Sequence: Synthetic oligonucleotide
  Antisense strand to SEQ ID NO: 2473252
aaccuuaacccuaaagcac

SEQ ID NO: 2473254 - RNA, 19 nt, Artificial Sequence
  Description of Artificial Sequence: Synthetic oligonucleotide
  Sense strand starting at position 1475 of SEQ ID NO: 1887449
cccugagucccugggugua

SEQ ID NO: 2473255 - RNA, 19 nt, Artificial Sequence
  Description of Artificial Sequence: Synthetic oligonucleotide
  Antisense strand to SEQ ID NO: 2473254
uacacccagggacucaggg

SEQ ID NO: 2473256 - RNA, 19 nt, Artificial Sequence
  Description of Artificial Sequence: Synthetic oligonucleotide
  Sense strand starting at position 1757 of SEQ ID NO: 1887449
ccauuucucuaaugaggaa

SEQ ID NO: 2473257 - RNA, 19 nt, Artificial Sequence
  Description of Artificial Sequence: Synthetic oligonucleotide
  Antisense strand to SEQ ID NO: 2473256
uuccucauuagagaaaugg

SEQ ID NO: 2473258 - RNA, 19 nt, Artificial Sequence
  Description of Artificial Sequence: Synthetic oligonucleotide
  Sense strand starting at position 1993 of SEQ ID NO: 1887449
agagaucuguucuuagggu

SEQ ID NO: 2473259 - RNA, 19 nt, Artificial Sequence
  Description of Artificial Sequence: Synthetic oligonucleotide
  Antisense strand to SEQ ID NO: 2473258
acccuaagaacagaucucu

SEQ ID NO: 2473260 - RNA, 19 nt, Artificial Sequence
  Description of Artificial Sequence: Synthetic oligonucleotide
  Sense strand starting at position 1999 of SEQ ID NO: 1887449
cuguucuuaggguaagaua

SEQ ID NO: 2473261 - RNA, 19 nt, Artificial Sequence
  Description of Artificial Sequence: Synthetic oligonucleotide
  Antisense strand to SEQ ID NO: 2473260
uaucuuacccuaagaacag

SEQ ID NO: 2473262 - RNA, 19 nt, Artificial Sequence
  Description of Artificial Sequence: Synthetic oligonucleotide
  Sense strand starting at position 2176 of SEQ ID NO: 1887449
uccacuggcuuguuaaaua

SEQ ID NO: 2473263 - RNA, 19 nt, Artificial Sequence
  Description of Artificial Sequence: Synthetic oligonucleotide
  Antisense strand to SEQ ID NO: 2473262
uauuuaacaagccagugga

SEQ ID NO: 2473264 - RNA, 19 nt, Artificial Sequence
  Description of Artificial Sequence: Synthetic oligonucleotide
  Sense strand starting at position 2212 of SEQ ID NO: 1887449
ggacaauuccacugucucu

SEQ ID NO: 2473265 - RNA, 19 nt, Artificial Sequence
  Description of Artificial Sequence: Synthetic oligonucleotide
  Antisense strand to SEQ ID NO: 2473264
agagacaguggaauugucc

SEQ ID NO: 2473266 - RNA, 19 nt, Artificial Sequence
  Description of Artificial Sequence: Synthetic oligonucleotide
  Sense strand starting at position 2256 of SEQ ID NO: 1887449
uucagagauggcugugcaa

SEQ ID NO: 2473267 - RNA, 19 nt, Artificial Sequence
  Description of Artificial Sequence: Synthetic oligonucleotide
  Antisense strand to SEQ ID NO: 2473266
uugcacagccaucucugaa

SEQ ID NO: 2473268 - RNA, 19 nt, Artificial Sequence
  Description of Artificial Sequence: Synthetic oligonucleotide
  Sense strand starting at position 2346 of SEQ ID NO: 1887449
ugacgaauauaucccauaa

SEQ ID NO: 2473269 - RNA, 19 nt, Artificial Sequence
  Description of Artificial Sequence: Synthetic oligonucleotide
  Antisense strand to SEQ ID NO: 2473268
uuaugggauauauucguca

SEQ ID NO: 2473270 - RNA, 19 nt, Artificial Sequence
  Description of Artificial Sequence: Synthetic oligonucleotide
  Sense strand starting at position 2379 of SEQ ID NO: 1887449
gcagauguggucuaggcaa

SEQ ID NO: 2473271 - RNA, 19 nt, Artificial Sequence
  Description of Artificial Sequence: Synthetic oligonucleotide
  Antisense strand to SEQ ID NO: 2473270
uugccuagaccacaucugc

SEQ ID NO: 2473272 - RNA, 19 nt, Artificial Sequence
  Description of Artificial Sequence: Synthetic oligonucleotide
  Sense strand starting at position 2511 of SEQ ID NO: 1887449
auguuagagcugcaggaau

SEQ ID NO: 2473273 - RNA, 19 nt, Artificial Sequence
  Description of Artificial Sequence: Synthetic oligonucleotide
  Antisense strand to SEQ ID NO: 2473272
auuccugcagcucuaacau

SEQ ID NO: 2473274 - RNA, 19 nt, Artificial Sequence
  Description of Artificial Sequence: Synthetic oligonucleotide
  Sense strand starting at position 2513 of SEQ ID NO: 1887449
guuagagcugcaggaauga

SEQ ID NO: 2473275 - RNA, 19 nt, Artificial Sequence
  Description of Artificial Sequence: Synthetic oligonucleotide
  Antisense strand to SEQ ID NO: 2473274
ucauuccugcagcucuaac

SEQ ID NO: 2473276 - RNA, 19 nt, Artificial Sequence
  Description of Artificial Sequence: Synthetic oligonucleotide
  Sense strand starting at position 2533 of SEQ ID NO: 1887449
ucauauaauguccagaagu

SEQ ID NO: 2473277 - RNA, 19 nt, Artificial Sequence
  Description of Artificial Sequence: Synthetic oligonucleotide
  Antisense strand to SEQ ID NO: 2473276
acuucuggacauuauauga

SEQ ID NO: 2473278 - RNA, 19 nt, Artificial Sequence
  Description of Artificial Sequence: Synthetic oligonucleotide
  Sense strand starting at position 2553 of SEQ ID NO: 1887449
gcagacauagcccauacaa

SEQ ID NO: 2473279 - RNA, 19 nt, Artificial Sequence
  Description of Artificial Sequence: Synthetic oligonucleotide
  Antisense strand to SEQ ID NO: 2473278
uuguaugggcuaugucugc

SEQ ID NO: 2473280 - RNA, 19 nt, Artificial Sequence
  Description of Artificial Sequence: Synthetic oligonucleotide
  Sense strand starting at position 2599 of SEQ ID NO: 1887449
accucauagcaaugcagau

SEQ ID NO: 2473281 - RNA, 19 nt, Artificial Sequence
  Description of Artificial Sequence: Synthetic oligonucleotide
  Antisense strand to SEQ ID NO: 2473280
aucugcauugcuaugaggu

SEQ ID NO: 2473282 - RNA, 19 nt, Artificial Sequence
  Description of Artificial Sequence: Synthetic oligonucleotide
  Sense strand starting at position 2608 of SEQ ID NO: 1887449
caaugcagauggucuguaa

SEQ ID NO: 2473283 - RNA, 19 nt, Artificial Sequence
  Description of Artificial Sequence: Synthetic oligonucleotide
  Antisense strand to SEQ ID NO: 2473282
uuacagaccaucugcauug

SEQ ID NO: 2473284 - RNA, 19 nt, Artificial Sequence
  Description of Artificial Sequence: Synthetic oligonucleotide
  Sense strand starting at position 2634 of SEQ ID NO: 1887449
ggcagcaaaugugucauuu

SEQ ID NO: 2473285 - RNA, 19 nt, Artificial Sequence
  Description of Artificial Sequence: Synthetic oligonucleotide
  Antisense strand to SEQ ID NO: 2473284
aaaugacacauuugcugcc

SEQ ID NO: 2473286 - RNA, 19 nt, Artificial Sequence
  Description of Artificial Sequence: Synthetic oligonucleotide
  Sense strand starting at position 2643 of SEQ ID NO: 1887449
ugugucauuuaccaucaca

SEQ ID NO: 2473287 - RNA, 19 nt, Artificial Sequence
  Description of Artificial Sequence: Synthetic oligonucleotide
  Antisense strand to SEQ ID NO: 2473286
ugugaugguaaaugacaca

SEQ ID NO: 2473288 - RNA, 19 nt, Artificial Sequence
  Description of Artificial Sequence: Synthetic oligonucleotide
  Sense strand starting at position 2658 of SEQ ID NO: 1887449
cacauagagcugcagagau

SEQ ID NO: 2473289 - RNA, 19 nt, Artificial Sequence
  Description of Artificial Sequence: Synthetic oligonucleotide
  Antisense strand to SEQ ID NO: 2473288
aucucugcagcucuaugug

SEQ ID NO: 2473290 - RNA, 19 nt, Artificial Sequence
  Description of Artificial Sequence: Synthetic oligonucleotide
  Sense strand starting at position 2736 of SEQ ID NO: 1887449
uggucuaaacugugaagug

SEQ ID NO: 2473291 - RNA, 19 nt, Artificial Sequence
  Description of Artificial Sequence: Synthetic oligonucleotide
  Antisense strand to SEQ ID NO: 2473290
cacuucacaguuuagacca

SEQ ID NO: 2473292 - RNA, 19 nt, Artificial Sequence
  Description of Artificial Sequence: Synthetic oligonucleotide
  Sense strand starting at position 2853 of SEQ ID NO: 1887449
gcagacauggucuguacaa

SEQ ID NO: 2473293 - RNA, 19 nt, Artificial Sequence
  Description of Artificial Sequence: Synthetic oligonucleotide
  Antisense strand to SEQ ID NO: 2473292
uuguacagaccaugucugc

SEQ ID NO: 2473294 - RNA, 19 nt, Artificial Sequence
  Description of Artificial Sequence: Synthetic oligonucleotide
  Sense strand starting at position 2854 of SEQ ID NO: 1887449
cagacauggucuguacaac

SEQ ID NO: 2473295 - RNA, 19 nt, Artificial Sequence
  Description of Artificial Sequence: Synthetic oligonucleotide
  Antisense strand to SEQ ID NO: 2473294
guuguacagaccaugucug

SEQ ID NO: 2473296 - RNA, 19 nt, Artificial Sequence
  Description of Artificial Sequence: Synthetic oligonucleotide
  Sense strand starting at position 2886 of SEQ ID NO: 1887449
auagguagcccagaauauc

SEQ ID NO: 2473297 - RNA, 19 nt, Artificial Sequence
  Description of Artificial Sequence: Synthetic oligonucleotide
  Antisense strand to SEQ ID NO: 2473296
gauauucugggcuaccuau

SEQ ID NO: 2473298 - RNA, 19 nt, Artificial Sequence
  Description of Artificial Sequence: Synthetic oligonucleotide
  Sense strand starting at position 2898 of SEQ ID NO: 1887449
gaauaucucauggguggga

SEQ ID NO: 2473299 - RNA, 19 nt, Artificial Sequence
  Description of Artificial Sequence: Synthetic oligonucleotide
  Antisense strand to SEQ ID NO: 2473298
ucccacccaugagauauuc

SEQ ID NO: 2473300 - RNA, 19 nt, Artificial Sequence
  Description of Artificial Sequence: Synthetic oligonucleotide
  Sense strand starting at position 2900 of SEQ ID NO: 1887449
auaucucaugggugggaga

SEQ ID NO: 2473301 - RNA, 19 nt, Artificial Sequence
  Description of Artificial Sequence: Synthetic oligonucleotide
  Antisense strand to SEQ ID NO: 2473300
ucucccacccaugagauau

SEQ ID NO: 2473302 - RNA, 19 nt, Artificial Sequence
  Description of Artificial Sequence: Synthetic oligonucleotide
  Sense strand starting at position 2934 of SEQ ID NO: 1887449
cccuaaaugcuacagaagu

SEQ ID NO: 2473303 - RNA, 19 nt, Artificial Sequence
  Description of Artificial Sequence: Synthetic oligonucleotide
  Antisense strand to SEQ ID NO: 2473302
acuucuguagcauuuaggg

SEQ ID NO: 2473304 - RNA, 19 nt, Artificial Sequence
  Description of Artificial Sequence: Synthetic oligonucleotide
  Sense strand starting at position 3238 of SEQ ID NO: 1887449
cucaguagucccugaguac

SEQ ID NO: 2473305 - RNA, 19 nt, Artificial Sequence
  Description of Artificial Sequence: Synthetic oligonucleotide
  Antisense strand to SEQ ID NO: 2473304
guacucagggacuacugag

SEQ ID NO: 2473306 - RNA, 19 nt, Artificial Sequence
  Description of Artificial Sequence: Synthetic oligonucleotide
  Sense strand starting at position 3572 of SEQ ID NO: 1887449
cuuguuucucuguacucaa

SEQ ID NO: 2473307 - RNA, 19 nt, Artificial Sequence
  Description of Artificial Sequence: Synthetic oligonucleotide
  Antisense strand to SEQ ID NO: 2473306
uugaguacagagaaacaag

SEQ ID NO: 2473308 - RNA, 19 nt, Artificial Sequence
  Description of Artificial Sequence: Synthetic oligonucleotide
  Sense strand starting at position 3661 of SEQ ID NO: 1887449
gagccucauccuugaggua

SEQ ID NO: 2473309 - RNA, 19 nt, Artificial Sequence
  Description of Artificial Sequence: Synthetic oligonucleotide
  Antisense strand to SEQ ID NO: 2473308
uaccucaaggaugaggcuc

SEQ ID NO: 2473310 - RNA, 19 nt, Artificial Sequence
  Description of Artificial Sequence: Synthetic oligonucleotide
  Sense strand starting at position 3662 of SEQ ID NO: 1887449
agccucauccuugagguaa

SEQ ID NO: 2473311 - RNA, 19 nt, Artificial Sequence
  Description of Artificial Sequence: Synthetic oligonucleotide
  Antisense strand to SEQ ID NO: 2473310
uuaccucaaggaugaggcu

SEQ ID NO: 2473312 - RNA, 19 nt, Artificial Sequence
  Description of Artificial Sequence: Synthetic oligonucleotide
  Sense strand starting at position 3749 of SEQ ID NO: 1887449
ggucacccucaguauucua

SEQ ID NO: 2473313 - RNA, 19 nt, Artificial Sequence
  Description of Artificial Sequence: Synthetic oligonucleotide
  Antisense strand to SEQ ID NO: 2473312
uagaauacugagggugacc

SEQ ID NO: 2473314 - RNA, 19 nt, Artificial Sequence
  Description of Artificial Sequence: Synthetic oligonucleotide
  Sense strand starting at position 1587 of SEQ ID NO: 1887450
ucgggcuugacccguaaau

SEQ ID NO: 2473315 - RNA, 19 nt, Artificial Sequence
  Description of Artificial Sequence: Synthetic oligonucleotide
  Antisense strand to SEQ ID NO: 2473314
auuuacgggucaagcccga

SEQ ID NO: 2473316 - RNA, 19 nt, Artificial Sequence
  Description of Artificial Sequence: Synthetic oligonucleotide
  Sense strand starting at position 1589 of SEQ ID NO: 1887450
gggcuugacccguaaauaa

SEQ ID NO: 2473317 - RNA, 19 nt, Artificial Sequence
  Description of Artificial Sequence: Synthetic oligonucleotide
  Antisense strand to SEQ ID NO: 2473316
uuauuuacgggucaagccc

SEQ ID NO: 2473318 - RNA, 19 nt, Artificial Sequence
  Description of Artificial Sequence: Synthetic oligonucleotide
  Sense strand starting at position 1916 of SEQ ID NO: 1887450
cccacuucugagugguaga

SEQ ID NO: 2473319 - RNA, 19 nt, Artificial Sequence
  Description of Artificial Sequence: Synthetic oligonucleotide
  Antisense strand to SEQ ID NO: 2473318
ucuaccacucagaaguggg

SEQ ID NO: 2473320 - RNA, 19 nt, Artificial Sequence
  Description of Artificial Sequence: Synthetic oligonucleotide
  Sense strand starting at position 1917 of SEQ ID NO: 1887450
ccacuucugagugguagag

SEQ ID NO: 2473321 - RNA, 19 nt, Artificial Sequence
  Description of Artificial Sequence: Synthetic oligonucleotide
  Antisense strand to SEQ ID NO: 2473320
cucuaccacucagaagugg

SEQ ID NO: 2473322 - RNA, 19 nt, Artificial Sequence
  Description of Artificial Sequence: Synthetic oligonucleotide
  Sense strand starting at position 1919 of SEQ ID NO: 1887450
acuucugagugguagagga

SEQ ID NO: 2473323 - RNA, 19 nt, Artificial Sequence
  Description of Artificial Sequence: Synthetic oligonucleotide
  Antisense strand to SEQ ID NO: 2473322
uccucuaccacucagaagu

SEQ ID NO: 2473324 - RNA, 19 nt, Artificial Sequence
  Description of Artificial Sequence: Synthetic oligonucleotide
  Sense strand starting at position 2862 of SEQ ID NO: 1887450
ugauuuccauguuggagaa

SEQ ID NO: 2473325 - RNA, 19 nt, Artificial Sequence
  Description of Artificial Sequence: Synthetic oligonucleotide
  Antisense strand to SEQ ID NO: 2473324
uucuccaacauggaaauca

SEQ ID NO: 2473326 - RNA, 19 nt, Artificial Sequence
  Description of Artificial Sequence: Synthetic oligonucleotide
  Sense strand starting at position 302 of SEQ ID NO: 1887451
uguguccagagcuaagaau

SEQ ID NO: 2473327 - RNA, 19 nt, Artificial Sequence
  Description of Artificial Sequence: Synthetic oligonucleotide
  Antisense strand to SEQ ID NO: 2473326
auucuuagcucuggacaca

SEQ ID NO: 2473328 - RNA, 19 nt, Artificial Sequence
  Description of Artificial Sequence: Synthetic oligonucleotide
  Sense strand starting at position 641 of SEQ ID NO: 1887451
cagagauguggugaggcuu

SEQ ID NO: 2473329 - RNA, 19 nt, Artificial Sequence
  Description of Artificial Sequence: Synthetic oligonucleotide
  Antisense strand to SEQ ID NO: 2473328
aagccucaccacaucucug

SEQ ID NO: 2473330 - RNA, 19 nt, Artificial Sequence
  Description of Artificial Sequence: Synthetic oligonucleotide
  Sense strand starting at position 647 of SEQ ID NO: 1887451
uguggugaggcuuaagcua

SEQ ID NO: 2473331 - RNA, 19 nt, Artificial Sequence
  Description of Artificial Sequence: Synthetic oligonucleotide
  Antisense strand to SEQ ID NO: 2473330
uagcuuaagccucaccaca

SEQ ID NO: 2473332 - RNA, 19 nt, Artificial Sequence
  Description of Artificial Sequence: Synthetic oligonucleotide
  Sense strand starting at position 706 of SEQ ID NO: 1887451
ccagaagagucauuguccu

SEQ ID NO: 2473333 - RNA, 19 nt, Artificial Sequence
  Description of Artificial Sequence: Synthetic oligonucleotide
  Antisense strand to SEQ ID NO: 2473332
aggacaaugacucuucugg

SEQ ID NO: 2473334 - RNA, 19 nt, Artificial Sequence
  Description of Artificial Sequence: Synthetic oligonucleotide
  Sense strand starting at position 710 of SEQ ID NO: 1887451
aagagucauuguccuuguu

SEQ ID NO: 2473335 - RNA, 19 nt, Artificial Sequence
  Description of Artificial Sequence: Synthetic oligonucleotide
  Antisense strand to SEQ ID NO: 2473334
aacaaggacaaugacucuu

SEQ ID NO: 2473336 - RNA, 19 nt, Artificial Sequence
  Description of Artificial Sequence: Synthetic oligonucleotide
  Sense strand starting at position 712 of SEQ ID NO: 1887451
gagucauuguccuuguuau

SEQ ID NO: 2473337 - RNA, 19 nt, Artificial Sequence
  Description of Artificial Sequence: Synthetic oligonucleotide
  Antisense strand to SEQ ID NO: 2473336
auaacaaggacaaugacuc

SEQ ID NO: 2473338 - RNA, 19 nt, Artificial Sequence
  Description of Artificial Sequence: Synthetic oligonucleotide
  Sense strand starting at position 713 of SEQ ID NO: 1887451
agucauuguccuuguuauc

SEQ ID NO: 2473339 - RNA, 19 nt, Artificial Sequence
  Description of Artificial Sequence: Synthetic oligonucleotide
  Antisense strand to SEQ ID NO: 2473338
gauaacaaggacaaugacu

SEQ ID NO: 2473340 - RNA, 19 nt, Artificial Sequence
  Description of Artificial Sequence: Synthetic oligonucleotide
  Sense strand starting at position 1129 of SEQ ID NO: 1887451
ucacuuggagcucauaauu

SEQ ID NO: 2473341 - RNA, 19 nt, Artificial Sequence
  Description of Artificial Sequence: Synthetic oligonucleotide
  Antisense strand to SEQ ID NO: 2473340
aauuaugagcuccaaguga

SEQ ID NO: 2473342 - RNA, 19 nt, Artificial Sequence
  Description of Artificial Sequence: Synthetic oligonucleotide
  Sense strand starting at position 1187 of SEQ ID NO: 1887451
gaguaagacuuggagauua

SEQ ID NO: 2473343 - RNA, 19 nt, Artificial Sequence
  Description of Artificial Sequence: Synthetic oligonucleotide
  Antisense strand to SEQ ID NO: 2473342
uaaucuccaagucuuacuc

SEQ ID NO: 2473344 - RNA, 19 nt, Artificial Sequence
  Description of Artificial Sequence: Synthetic oligonucleotide
  Sense strand starting at position 1198 of SEQ ID NO: 1887451
ggagauuaggucggcuuca

SEQ ID NO: 2473345 - RNA, 19 nt, Artificial Sequence
  Description of Artificial Sequence: Synthetic oligonucleotide
  Antisense strand to SEQ ID NO: 2473344
ugaagccgaccuaaucucc

SEQ ID NO: 2473346 - RNA, 19 nt, Artificial Sequence
  Description of Artificial Sequence: Synthetic oligonucleotide
  Sense strand starting at position 1244 of SEQ ID NO: 1887451
uugccacauccauaggagu

SEQ ID NO: 2473347 - RNA, 19 nt, Artificial Sequence
  Description of Artificial Sequence: Synthetic oligonucleotide
  Antisense strand to SEQ ID NO: 2473346
acuccuauggauguggcaa

SEQ ID NO: 2473348 - RNA, 19 nt, Artificial Sequence
  Description of Artificial Sequence: Synthetic oligonucleotide
  Sense strand starting at position 1269 of SEQ ID NO: 1887451
gccuccuugccaggaaaga

SEQ ID NO: 2473349 - RNA, 19 nt, Artificial Sequence
  Description of Artificial Sequence: Synthetic oligonucleotide
  Antisense strand to SEQ ID NO: 2473348
ucuuuccuggcaaggaggc

SEQ ID NO: 2473350 - RNA, 19 nt, Artificial Sequence
  Description of Artificial Sequence: Synthetic oligonucleotide
  Sense strand starting at position 1286 of SEQ ID NO: 1887451
gagagaaguuguguuaaau

SEQ ID NO: 2473351 - RNA, 19 nt, Artificial Sequence
  Description of Artificial Sequence: Synthetic oligonucleotide
  Antisense strand to SEQ ID NO: 2473350
auuuaacacaacuucucuc

SEQ ID NO: 2473352 - RNA, 19 nt, Artificial Sequence
  Description of Artificial Sequence: Synthetic oligonucleotide
  Sense strand starting at position 1297 of SEQ ID NO: 1887451
uguuaaauggcuggugacu

SEQ ID NO: 2473353 - RNA, 19 nt, Artificial Sequence
  Description of Artificial Sequence: Synthetic oligonucleotide
  Antisense strand to SEQ ID NO: 2473352
agucaccagccauuuaaca

SEQ ID NO: 2473354 - RNA, 19 nt, Artificial Sequence
  Description of Artificial Sequence: Synthetic oligonucleotide
  Sense strand starting at position 1310 of SEQ ID NO: 1887451
gugacuuaaugggauagag

SEQ ID NO: 2473355 - RNA, 19 nt, Artificial Sequence
  Description of Artificial Sequence: Synthetic oligonucleotide
  Antisense strand to SEQ ID NO: 2473354
cucuaucccauuaagucac

SEQ ID NO: 2473356 - RNA, 19 nt, Artificial Sequence
  Description of Artificial Sequence: Synthetic oligonucleotide
  Sense strand starting at position 2077 of SEQ ID NO: 1887451
ugcccagauggugaauaau

SEQ ID NO: 2473357 - RNA, 19 nt, Artificial Sequence
  Description of Artificial Sequence: Synthetic oligonucleotide
  Antisense strand to SEQ ID NO: 2473356
auuauucaccaucugggca

SEQ ID NO: 2473358 - RNA, 19 nt, Artificial Sequence
  Description of Artificial Sequence: Synthetic oligonucleotide
  Sense strand starting at position 2702 of SEQ ID NO: 1887451
agaugaggucucugaaggu

SEQ ID NO: 2473359 - RNA, 19 nt, Artificial Sequence
  Description of Artificial Sequence: Synthetic oligonucleotide
  Antisense strand to SEQ ID NO: 2473358
accuucagagaccucaucu

SEQ ID NO: 2473360 - RNA, 19 nt, Artificial Sequence
  Description of Artificial Sequence: Synthetic oligonucleotide
  Sense strand starting at position 2973 of SEQ ID NO: 1887451
gggccacauggcugugaau

SEQ ID NO: 2473361 - RNA, 19 nt, Artificial Sequence
  Description of Artificial Sequence: Synthetic oligonucleotide
  Antisense strand to SEQ ID NO: 2473360
auucacagccauguggccc

SEQ ID NO: 2473362 - RNA, 19 nt, Artificial Sequence
  Description of Artificial Sequence: Synthetic oligonucleotide
  Sense strand starting at position 3048 of SEQ ID NO: 1887451
gcagggaucgagugugguu

SEQ ID NO: 2473363 - RNA, 19 nt, Artificial Sequence
  Description of Artificial Sequence: Synthetic oligonucleotide
  Antisense strand to SEQ ID NO: 2473362
aaccacacucgaucccugc

SEQ ID NO: 2473364 - RNA, 19 nt, Artificial Sequence
  Description of Artificial Sequence: Synthetic oligonucleotide
  Sense strand starting at position 3082 of SEQ ID NO: 1887451
ugaucuugucucugggagu

SEQ ID NO: 2473365 - RNA, 19 nt, Artificial Sequence
  Description of Artificial Sequence: Synthetic oligonucleotide
  Antisense strand to SEQ ID NO: 2473364
acucccagagacaagauca

SEQ ID NO: 2473366 - RNA, 19 nt, Artificial Sequence
  Description of Artificial Sequence: Synthetic oligonucleotide
  Sense strand starting at position 3093 of SEQ ID NO: 1887451
cugggagugaaccaugcau

SEQ ID NO: 2473367 - RNA, 19 nt, Artificial Sequence
  Description of Artificial Sequence: Synthetic oligonucleotide
  Antisense strand to SEQ ID NO: 2473366
augcaugguucacucccag

SEQ ID NO: 2473368 - RNA, 19 nt, Artificial Sequence
  Description of Artificial Sequence: Synthetic oligonucleotide
  Sense strand starting at position 3184 of SEQ ID NO: 1887451
gagagucugugacuguuaa

SEQ ID NO: 2473369 - RNA, 19 nt, Artificial Sequence
  Description of Artificial Sequence: Synthetic oligonucleotide
  Antisense strand to SEQ ID NO: 2473368
uuaacagucacagacucuc

SEQ ID NO: 2473370 - RNA, 19 nt, Artificial Sequence
  Description of Artificial Sequence: Synthetic oligonucleotide
  Sense strand starting at position 3185 of SEQ ID NO: 1887451
agagucugugacuguuaaa

SEQ ID NO: 2473371 - RNA, 19 nt, Artificial Sequence
  Description of Artificial Sequence: Synthetic oligonucleotide
  Antisense strand to SEQ ID NO: 2473370
uuuaacagucacagacucu

SEQ ID NO: 2473372 - RNA, 19 nt, Artificial Sequence
  Description of Artificial Sequence: Synthetic oligonucleotide
  Sense strand starting at position 3197 of SEQ ID NO: 1887451
uguuaaauacuguguguuc

SEQ ID NO: 2473373 - RNA, 19 nt, Artificial Sequence
  Description of Artificial Sequence: Synthetic oligonucleotide
  Antisense strand to SEQ ID NO: 2473372
gaacacacaguauuuaaca

SEQ ID NO: 2473374 - RNA, 19 nt, Artificial Sequence
  Description of Artificial Sequence: Synthetic oligonucleotide
  Sense strand starting at position 3199 of SEQ ID NO: 1887451
uuaaauacuguguguucuu

SEQ ID NO: 2473375 - RNA, 19 nt, Artificial Sequence
  Description of Artificial Sequence: Synthetic oligonucleotide
  Antisense strand to SEQ ID NO: 2473374
aagaacacacaguauuuaa

SEQ ID NO: 2473376 - RNA, 19 nt, Artificial Sequence
  Description of Artificial Sequence: Synthetic oligonucleotide
  Sense strand starting at position 3230 of SEQ ID NO: 1887451
cugugucugucuguaucua

SEQ ID NO: 2473377 - RNA, 19 nt, Artificial Sequence
  Description of Artificial Sequence: Synthetic oligonucleotide
  Antisense strand to SEQ ID NO: 2473376
uagauacagacagacacag

SEQ ID NO: 2473378 - RNA, 19 nt, Artificial Sequence
  Description of Artificial Sequence: Synthetic oligonucleotide
  Sense strand starting at position 3231 of SEQ ID NO: 1887451
ugugucugucuguaucuau

SEQ ID NO: 2473379 - RNA, 19 nt, Artificial Sequence
  Description of Artificial Sequence: Synthetic oligonucleotide
  Antisense strand to SEQ ID NO: 2473378
auagauacagacagacaca

SEQ ID NO: 2473380 - RNA, 19 nt, Artificial Sequence
  Description of Artificial Sequence: Synthetic oligonucleotide
  Sense strand starting at position 3234 of SEQ ID NO: 1887451
gucugucuguaucuaugua

SEQ ID NO: 2473381 - RNA, 19 nt, Artificial Sequence
  Description of Artificial Sequence: Synthetic oligonucleotide
  Antisense strand to SEQ ID NO: 2473380
uacauagauacagacagac

SEQ ID NO: 2473382 - RNA, 19 nt, Artificial Sequence
  Description of Artificial Sequence: Synthetic oligonucleotide
  Sense strand starting at position 3287 of SEQ ID NO: 1887451
cugucugugucugucacau

SEQ ID NO: 2473383 - RNA, 19 nt, Artificial Sequence
  Description of Artificial Sequence: Synthetic oligonucleotide
  Antisense strand to SEQ ID NO: 2473382
augugacagacacagacag

SEQ ID NO: 2473384 - RNA, 19 nt, Artificial Sequence
  Description of Artificial Sequence: Synthetic oligonucleotide
  Sense strand starting at position 3339 of SEQ ID NO: 1887451
ugucuaugucugucguguu

SEQ ID NO: 2473385 - RNA, 19 nt, Artificial Sequence
  Description of Artificial Sequence: Synthetic oligonucleotide
  Antisense strand to SEQ ID NO: 2473384
aacacgacagacauagaca

SEQ ID NO: 2473386 - RNA, 19 nt, Artificial Sequence
  Description of Artificial Sequence: Synthetic oligonucleotide
  Sense strand starting at position 3500 of SEQ ID NO: 1887451
guaugugucuauguauuug

SEQ ID NO: 2473387 - RNA, 19 nt, Artificial Sequence
  Description of Artificial Sequence: Synthetic oligonucleotide
  Antisense strand to SEQ ID NO: 2473386
caaauacauagacacauac

SEQ ID NO: 2473388 - RNA, 19 nt, Artificial Sequence
  Description of Artificial Sequence: Synthetic oligonucleotide
  Sense strand starting at position 3508 of SEQ ID NO: 1887451
cuauguauuugccauguuu

SEQ ID NO: 2473389 - RNA, 19 nt, Artificial Sequence
  Description of Artificial Sequence: Synthetic oligonucleotide
  Antisense strand to SEQ ID NO: 2473388
aaacauggcaaauacauag

SEQ ID NO: 2473390 - RNA, 19 nt, Artificial Sequence
  Description of Artificial Sequence: Synthetic oligonucleotide
  Sense strand starting at position 3510 of SEQ ID NO: 1887451
auguauuugccauguuucu

SEQ ID NO: 2473391 - RNA, 19 nt, Artificial Sequence
  Description of Artificial Sequence: Synthetic oligonucleotide
  Antisense strand to SEQ ID NO: 2473390
agaaacauggcaaauacau

SEQ ID NO: 2473392 - RNA, 19 nt, Artificial Sequence
  Description of Artificial Sequence: Synthetic oligonucleotide
  Sense strand starting at position 3580 of SEQ ID NO: 1887451
cacauuucugccugugugu

SEQ ID NO: 2473393 - RNA, 19 nt, Artificial Sequence
  Description of Artificial Sequence: Synthetic oligonucleotide
  Antisense strand to SEQ ID NO: 2473392
acacacaggcagaaaugug

SEQ ID NO: 2473394 - RNA, 19 nt, Artificial Sequence
  Description of Artificial Sequence: Synthetic oligonucleotide
  Sense strand starting at position 3595 of SEQ ID NO: 1887451
gugucugucauguuucugu

SEQ ID NO: 2473395 - RNA, 19 nt, Artificial Sequence
  Description of Artificial Sequence: Synthetic oligonucleotide
  Antisense strand to SEQ ID NO: 2473394
acagaaacaugacagacac

SEQ ID NO: 2473396 - RNA, 19 nt, Artificial Sequence
  Description of Artificial Sequence: Synthetic oligonucleotide
  Sense strand starting at position 3661 of SEQ ID NO: 1887451
guguaucugccauguuucu

SEQ ID NO: 2473397 - RNA, 19 nt, Artificial Sequence
  Description of Artificial Sequence: Synthetic oligonucleotide
  Antisense strand to SEQ ID NO: 2473396
agaaacauggcagauacac

SEQ ID NO: 2473398 - RNA, 19 nt, Artificial Sequence
  Description of Artificial Sequence: Synthetic oligonucleotide
  Sense strand starting at position 3710 of SEQ ID NO: 1887451
gucugcuguguuucuguca

SEQ ID NO: 2473399 - RNA, 19 nt, Artificial Sequence
  Description of Artificial Sequence: Synthetic oligonucleotide
  Antisense strand to SEQ ID NO: 2473398
ugacagaaacacagcagac

SEQ ID NO: 2473400 - RNA, 19 nt, Artificial Sequence
  Description of Artificial Sequence: Synthetic oligonucleotide
  Sense strand starting at position 3713 of SEQ ID NO: 1887451
ugcuguguuucugucacau

SEQ ID NO: 2473401 - RNA, 19 nt, Artificial Sequence
  Description of Artificial Sequence: Synthetic oligonucleotide
  Antisense strand to SEQ ID NO: 2473400
augugacagaaacacagca

SEQ ID NO: 2473402 - RNA, 19 nt, Artificial Sequence
  Description of Artificial Sequence: Synthetic oligonucleotide
  Sense strand starting at position 3938 of SEQ ID NO: 1887451
gugcauguugguggaauca

SEQ ID NO: 2473403 - RNA, 19 nt, Artificial Sequence
  Description of Artificial Sequence: Synthetic oligonucleotide
  Antisense strand to SEQ ID NO: 2473402
ugauuccaccaacaugcac

SEQ ID NO: 2473404 - RNA, 19 nt, Artificial Sequence
  Description of Artificial Sequence: Synthetic oligonucleotide
  Sense strand starting at position 3948 of SEQ ID NO: 1887451
guggaaucacuguaacuug

SEQ ID NO: 2473405 - RNA, 19 nt, Artificial Sequence
  Description of Artificial Sequence: Synthetic oligonucleotide
  Antisense strand to SEQ ID NO: 2473404
caaguuacagugauuccac

SEQ ID NO: 2473406 - RNA, 19 nt, Artificial Sequence
  Description of Artificial Sequence: Synthetic oligonucleotide
  Sense strand starting at position 249 of SEQ ID NO: 1887453
ugugauacacauuguauca

SEQ ID NO: 2473407 - RNA, 19 nt, Artificial Sequence
  Description of Artificial Sequence: Synthetic oligonucleotide
  Antisense strand to SEQ ID NO: 2473406
ugauacaauguguaucaca

SEQ ID NO: 2473408 - RNA, 19 nt, Artificial Sequence
  Description of Artificial Sequence: Synthetic oligonucleotide
  Sense strand starting at position 656 of SEQ ID NO: 1887453
aggaucacuuggguccaaa

SEQ ID NO: 2473409 - RNA, 19 nt, Artificial Sequence
  Description of Artificial Sequence: Synthetic oligonucleotide
  Antisense strand to SEQ ID NO: 2473408
uuuggacccaagugauccu

SEQ ID NO: 2473410 - RNA, 19 nt, Artificial Sequence
  Description of Artificial Sequence: Synthetic oligonucleotide
  Sense strand starting at position 959 of SEQ ID NO: 1887453
ugugaauaugaauguguag

SEQ ID NO: 2473411 - RNA, 19 nt, Artificial Sequence
  Description of Artificial Sequence: Synthetic oligonucleotide
  Antisense strand to SEQ ID NO: 2473410
cuacacauucauauucaca

SEQ ID NO: 2473412 - RNA, 19 nt, Artificial Sequence
  Description of Artificial Sequence: Synthetic oligonucleotide
  Sense strand starting at position 961 of SEQ ID NO: 1887453
ugaauaugaauguguagca

SEQ ID NO: 2473413 - RNA, 19 nt, Artificial Sequence
  Description of Artificial Sequence: Synthetic oligonucleotide
  Antisense strand to SEQ ID NO: 2473412
ugcuacacauucauauuca

SEQ ID NO: 2473414 - RNA, 19 nt, Artificial Sequence
  Description of Artificial Sequence: Synthetic oligonucleotide
  Sense strand starting at position 962 of SEQ ID NO: 1887453
gaauaugaauguguagcaa

SEQ ID NO: 2473415 - RNA, 19 nt, Artificial Sequence
  Description of Artificial Sequence: Synthetic oligonucleotide
  Antisense strand to SEQ ID NO: 2473414
uugcuacacauucauauuc

SEQ ID NO: 2473416 - RNA, 19 nt, Artificial Sequence
  Description of Artificial Sequence: Synthetic oligonucleotide
  Sense strand starting at position 970 of SEQ ID NO: 1887453
auguguagcaauggaaacu

SEQ ID NO: 2473417 - RNA, 19 nt, Artificial Sequence
  Description of Artificial Sequence: Synthetic oligonucleotide
  Antisense strand to SEQ ID NO: 2473416
aguuuccauugcuacacau

SEQ ID NO: 2473418 - RNA, 19 nt, Artificial Sequence
  Description of Artificial Sequence: Synthetic oligonucleotide
  Sense strand starting at position 987 of SEQ ID NO: 1887453
cucguaaaccaguagugga

SEQ ID NO: 2473419 - RNA, 19 nt, Artificial Sequence
  Description of Artificial Sequence: Synthetic oligonucleotide
  Antisense strand to SEQ ID NO: 2473418
uccacuacugguuuacgag

SEQ ID NO: 2473420 - RNA, 19 nt, Artificial Sequence
  Description of Artificial Sequence: Synthetic oligonucleotide
  Sense strand starting at position 1021 of SEQ ID NO: 1887453
agccgcuuuggagaauaaa

SEQ ID NO: 2473421 - RNA, 19 nt, Artificial Sequence
  Description of Artificial Sequence: Synthetic oligonucleotide
  Antisense strand to SEQ ID NO: 2473420
uuuauucuccaaagcggcu

SEQ ID NO: 2473422 - RNA, 19 nt, Artificial Sequence
  Description of Artificial Sequence: Synthetic oligonucleotide
  Sense strand starting at position 1030 of SEQ ID NO: 1887453
ggagaauaaacuggcugua

SEQ ID NO: 2473423 - RNA, 19 nt, Artificial Sequence
  Description of Artificial Sequence: Synthetic oligonucleotide
  Antisense strand to SEQ ID NO: 2473422
uacagccaguuuauucucc

SEQ ID NO: 2473424 - RNA, 19 nt, Artificial Sequence
  Description of Artificial Sequence: Synthetic oligonucleotide
  Sense strand starting at position 1073 of SEQ ID NO: 1887453
cuugaaauuauguguggac

SEQ ID NO: 2473425 - RNA, 19 nt, Artificial Sequence
  Description of Artificial Sequence: Synthetic oligonucleotide
  Antisense strand to SEQ ID NO: 2473424
guccacacauaauuucaag

SEQ ID NO: 2473426 - RNA, 19 nt, Artificial Sequence
  Description of Artificial Sequence: Synthetic oligonucleotide
  Sense strand starting at position 1074 of SEQ ID NO: 1887453
uugaaauuauguguggaca

SEQ ID NO: 2473427 - RNA, 19 nt, Artificial Sequence
  Description of Artificial Sequence: Synthetic oligonucleotide
  Antisense strand to SEQ ID NO: 2473426
uguccacacauaauuucaa

SEQ ID NO: 2473428 - RNA, 19 nt, Artificial Sequence
  Description of Artificial Sequence: Synthetic oligonucleotide
  Sense strand starting at position 1075 of SEQ ID NO: 1887453
ugaaauuauguguggacaa

SEQ ID NO: 2473429 - RNA, 19 nt, Artificial Sequence
  Description of Artificial Sequence: Synthetic oligonucleotide
  Antisense strand to SEQ ID NO: 2473428
uuguccacacauaauuuca

SEQ ID NO: 2473430 - RNA, 19 nt, Artificial Sequence
  Description of Artificial Sequence: Synthetic oligonucleotide
  Sense strand starting at position 1731 of SEQ ID NO: 1887453
ccgagaguggcuggaugaa

SEQ ID NO: 2473431 - RNA, 19 nt, Artificial Sequence
  Description of Artificial Sequence: Synthetic oligonucleotide
  Antisense strand to SEQ ID NO: 2473430
uucauccagccacucucgg

SEQ ID NO: 2473432 - RNA, 19 nt, Artificial Sequence
  Description of Artificial Sequence: Synthetic oligonucleotide
  Sense strand starting at position 1842 of SEQ ID NO: 1887453
auuauaaacucugcagaag

SEQ ID NO: 2473433 - RNA, 19 nt, Artificial Sequence
  Description of Artificial Sequence: Synthetic oligonucleotide
  Antisense strand to SEQ ID NO: 2473432
cuucugcagaguuuauaau

SEQ ID NO: 2473434 - RNA, 19 nt, Artificial Sequence
  Description of Artificial Sequence: Synthetic oligonucleotide
  Sense strand starting at position 1843 of SEQ ID NO: 1887453
uuauaaacucugcagaagu

SEQ ID NO: 2473435 - RNA, 19 nt, Artificial Sequence
  Description of Artificial Sequence: Synthetic oligonucleotide
  Antisense strand to SEQ ID NO: 2473434
acuucugcagaguuuauaa

SEQ ID NO: 2473436 - RNA, 19 nt, Artificial Sequence
  Description of Artificial Sequence: Synthetic oligonucleotide
  Sense strand starting at position 2109 of SEQ ID NO: 1887453
agcgcuuaccaugugaguu

SEQ ID NO: 2473437 - RNA, 19 nt, Artificial Sequence
  Description of Artificial Sequence: Synthetic oligonucleotide
  Antisense strand to SEQ ID NO: 2473436
aacucacaugguaagcgcu

SEQ ID NO: 2473438 - RNA, 19 nt, Artificial Sequence
  Description of Artificial Sequence: Synthetic oligonucleotide
  Sense strand starting at position 2344 of SEQ ID NO: 1887453
caaugacuuggcugggaca

SEQ ID NO: 2473439 - RNA, 19 nt, Artificial Sequence
  Description of Artificial Sequence: Synthetic oligonucleotide
  Antisense strand to SEQ ID NO: 2473438
ugucccagccaagucauug

SEQ ID NO: 2473440 - RNA, 19 nt, Artificial Sequence
  Description of Artificial Sequence: Synthetic oligonucleotide
  Sense strand starting at position 2539 of SEQ ID NO: 1887453
ggaauagagcauugcaauu

SEQ ID NO: 2473441 - RNA, 19 nt, Artificial Sequence
  Description of Artificial Sequence: Synthetic oligonucleotide
  Antisense strand to SEQ ID NO: 2473440
aauugcaaugcucuauucc

SEQ ID NO: 2473442 - RNA, 19 nt, Artificial Sequence
  Description of Artificial Sequence: Synthetic oligonucleotide
  Sense strand starting at position 2557 of SEQ ID NO: 1887453
ugggaauagauaugccaua

SEQ ID NO: 2473443 - RNA, 19 nt, Artificial Sequence
  Description of Artificial Sequence: Synthetic oligonucleotide
  Antisense strand to SEQ ID NO: 2473442
uauggcauaucuauuccca

SEQ ID NO: 2473444 - RNA, 19 nt, Artificial Sequence
  Description of Artificial Sequence: Synthetic oligonucleotide
  Sense strand starting at position 2558 of SEQ ID NO: 1887453
gggaauagauaugccauau

SEQ ID NO: 2473445 - RNA, 19 nt, Artificial Sequence
  Description of Artificial Sequence: Synthetic oligonucleotide
  Antisense strand to SEQ ID NO: 2473444
auauggcauaucuauuccc

SEQ ID NO: 2473446 - RNA, 19 nt, Artificial Sequence
  Description of Artificial Sequence: Synthetic oligonucleotide
  Sense strand starting at position 2717 of SEQ ID NO: 1887453
gcauuccuugcagaaauau

SEQ ID NO: 2473447 - RNA, 19 nt, Artificial Sequence
  Description of Artificial Sequence: Synthetic oligonucleotide
  Antisense strand to SEQ ID NO: 2473446
auauuucugcaaggaaugc

SEQ ID NO: 2473448 - RNA, 19 nt, Artificial Sequence
  Description of Artificial Sequence: Synthetic oligonucleotide
  Sense strand starting at position 2842 of SEQ ID NO: 1887453
uggcuuuauuugucagggu

SEQ ID NO: 2473449 - RNA, 19 nt, Artificial Sequence
  Description of Artificial Sequence: Synthetic oligonucleotide
  Antisense strand to SEQ ID NO: 2473448
acccugacaaauaaagcca

SEQ ID NO: 2473450 - RNA, 19 nt, Artificial Sequence
  Description of Artificial Sequence: Synthetic oligonucleotide
  Sense strand starting at position 2851 of SEQ ID NO: 1887453
uugucagggucaucuuaac

SEQ ID NO: 2473451 - RNA, 19 nt, Artificial Sequence
  Description of Artificial Sequence: Synthetic oligonucleotide
  Antisense strand to SEQ ID NO: 2473450
guuaagaugacccugacaa

SEQ ID NO: 2473452 - RNA, 19 nt, Artificial Sequence
  Description of Artificial Sequence: Synthetic oligonucleotide
  Sense strand starting at position 2906 of SEQ ID NO: 1887453
uucuccuugugaucaagaa

SEQ ID NO: 2473453 - RNA, 19 nt, Artificial Sequence
  Description of Artificial Sequence: Synthetic oligonucleotide
  Antisense strand to SEQ ID NO: 2473452
uucuugaucacaaggagaa

SEQ ID NO: 2473454 - RNA, 19 nt, Artificial Sequence
  Description of Artificial Sequence: Synthetic oligonucleotide
  Sense strand starting at position 2907 of SEQ ID NO: 1887453
ucuccuugugaucaagaac

SEQ ID NO: 2473455 - RNA, 19 nt, Artificial Sequence
  Description of Artificial Sequence: Synthetic oligonucleotide
  Antisense strand to SEQ ID NO: 2473454
guucuugaucacaaggaga

SEQ ID NO: 2473456 - RNA, 19 nt, Artificial Sequence
  Description of Artificial Sequence: Synthetic oligonucleotide
  Sense strand starting at position 2910 of SEQ ID NO: 1887453
ccuugugaucaagaacuuu

SEQ ID NO: 2473457 - RNA, 19 nt, Artificial Sequence
  Description of Artificial Sequence: Synthetic oligonucleotide
  Antisense strand to SEQ ID NO: 2473456
aaaguucuugaucacaagg

SEQ ID NO: 2473458 - RNA, 19 nt, Artificial Sequence
  Description of Artificial Sequence: Synthetic oligonucleotide
  Sense strand starting at position 3118 of SEQ ID NO: 1887453
ccuggaguccauuaguaag

SEQ ID NO: 2473459 - RNA, 19 nt, Artificial Sequence
  Description of Artificial Sequence: Synthetic oligonucleotide
  Antisense strand to SEQ ID NO: 2473458
cuuacuaauggacuccagg

SEQ ID NO: 2473460 - RNA, 19 nt, Artificial Sequence
  Description of Artificial Sequence: Synthetic oligonucleotide
  Sense strand starting at position 3163 of SEQ ID NO: 1887453
uugcuaucccuuuaaagug

SEQ ID NO: 2473461 - RNA, 19 nt, Artificial Sequence
  Description of Artificial Sequence: Synthetic oligonucleotide
  Antisense strand to SEQ ID NO: 2473460
cacuuuaaagggauagcaa

SEQ ID NO: 2473462 - RNA, 19 nt, Artificial Sequence
  Description of Artificial Sequence: Synthetic oligonucleotide
  Sense strand starting at position 3327 of SEQ ID NO: 1887453
gccauaaaccuagguuuaa

SEQ ID NO: 2473463 - RNA, 19 nt, Artificial Sequence
  Description of Artificial Sequence: Synthetic oligonucleotide
  Antisense strand to SEQ ID NO: 2473462
uuaaaccuagguuuauggc

SEQ ID NO: 2473464 - RNA, 19 nt, Artificial Sequence
  Description of Artificial Sequence: Synthetic oligonucleotide
  Sense strand starting at position 3364 of SEQ ID NO: 1887453
cucaaacaguuauucgaga

SEQ ID NO: 2473465 - RNA, 19 nt, Artificial Sequence
  Description of Artificial Sequence: Synthetic oligonucleotide
  Antisense strand to SEQ ID NO: 2473464
ucucgaauaacuguuugag

SEQ ID NO: 2473466 - RNA, 19 nt, Artificial Sequence
  Description of Artificial Sequence: Synthetic oligonucleotide
  Sense strand starting at position 3369 of SEQ ID NO: 1887453
acaguuauucgagacagca

SEQ ID NO: 2473467 - RNA, 19 nt, Artificial Sequence
  Description of Artificial Sequence: Synthetic oligonucleotide
  Antisense strand to SEQ ID NO: 2473466
ugcugucucgaauaacugu

SEQ ID NO: 2473468 - RNA, 19 nt, Artificial Sequence
  Description of Artificial Sequence: Synthetic oligonucleotide
  Sense strand starting at position 3488 of SEQ ID NO: 1887453
ucguauuagcaacaucaca

SEQ ID NO: 2473469 - RNA, 19 nt, Artificial Sequence
  Description of Artificial Sequence: Synthetic oligonucleotide
  Antisense strand to SEQ ID NO: 2473468
ugugauguugcuaauacga

SEQ ID NO: 2473470 - RNA, 19 nt, Artificial Sequence
  Description of Artificial Sequence: Synthetic oligonucleotide
  Sense strand starting at position 3523 of SEQ ID NO: 1887453
accaauggauacuaaagaa

SEQ ID NO: 2473471 - RNA, 19 nt, Artificial Sequence
  Description of Artificial Sequence: Synthetic oligonucleotide
  Antisense strand to SEQ ID NO: 2473470
uucuuuaguauccauuggu

SEQ ID NO: 2473472 - RNA, 19 nt, Artificial Sequence
  Description of Artificial Sequence: Synthetic oligonucleotide
  Sense strand starting at position 3608 of SEQ ID NO: 1887453
uuauucugcuaaguagaaa

SEQ ID NO: 2473473 - RNA, 19 nt, Artificial Sequence
  Description of Artificial Sequence: Synthetic oligonucleotide
  Antisense strand to SEQ ID NO: 2473472
uuucuacuuagcagaauaa

SEQ ID NO: 2473474 - RNA, 19 nt, Artificial Sequence
  Description of Artificial Sequence: Synthetic oligonucleotide
  Sense strand starting at position 3628 of SEQ ID NO: 1887453
ggucgaauuaagugagaug

SEQ ID NO: 2473475 - RNA, 19 nt, Artificial Sequence
  Description of Artificial Sequence: Synthetic oligonucleotide
  Antisense strand to SEQ ID NO: 2473474
caucucacuuaauucgacc

SEQ ID NO: 2473476 - RNA, 19 nt, Artificial Sequence
  Description of Artificial Sequence: Synthetic oligonucleotide
  Sense strand starting at position 3629 of SEQ ID NO: 1887453
gucgaauuaagugagauga

SEQ ID NO: 2473477 - RNA, 19 nt, Artificial Sequence
  Description of Artificial Sequence: Synthetic oligonucleotide
  Antisense strand to SEQ ID NO: 2473476
ucaucucacuuaauucgac

SEQ ID NO: 2473478 - RNA, 19 nt, Artificial Sequence
  Description of Artificial Sequence: Synthetic oligonucleotide
  Sense strand starting at position 3677 of SEQ ID NO: 1887453
cagcaucuugcagaaaguu

SEQ ID NO: 2473479 - RNA, 19 nt, Artificial Sequence
  Description of Artificial Sequence: Synthetic oligonucleotide
  Antisense strand to SEQ ID NO: 2473478
aacuuucugcaagaugcug

SEQ ID NO: 2473480 - RNA, 19 nt, Artificial Sequence
  Description of Artificial Sequence: Synthetic oligonucleotide
  Sense strand starting at position 3690 of SEQ ID NO: 1887453
aaaguuauacagugugaaa

SEQ ID NO: 2473481 - RNA, 19 nt, Artificial Sequence
  Description of Artificial Sequence: Synthetic oligonucleotide
  Antisense strand to SEQ ID NO: 2473480
uuucacacuguauaacuuu

SEQ ID NO: 2473482 - RNA, 19 nt, Artificial Sequence
  Description of Artificial Sequence: Synthetic oligonucleotide
  Sense strand starting at position 3728 of SEQ ID NO: 1887453
guuuguagugugaacgucu

SEQ ID NO: 2473483 - RNA, 19 nt, Artificial Sequence
  Description of Artificial Sequence: Synthetic oligonucleotide
  Antisense strand to SEQ ID NO: 2473482
agacguucacacuacaaac

SEQ ID NO: 2473484 - RNA, 19 nt, Artificial Sequence
  Description of Artificial Sequence: Synthetic oligonucleotide
  Sense strand starting at position 3740 of SEQ ID NO: 1887453
aacgucucugguuaugaua

SEQ ID NO: 2473485 - RNA, 19 nt, Artificial Sequence
  Description of Artificial Sequence: Synthetic oligonucleotide
  Antisense strand to SEQ ID NO: 2473484
uaucauaaccagagacguu

SEQ ID NO: 2473486 - RNA, 19 nt, Artificial Sequence
  Description of Artificial Sequence: Synthetic oligonucleotide
  Sense strand starting at position 48 of SEQ ID NO: 1887452
agaugaaguuguuugcaca

SEQ ID NO: 2473487 - RNA, 19 nt, Artificial Sequence
  Description of Artificial Sequence: Synthetic oligonucleotide
  Antisense strand to SEQ ID NO: 2473486
ugugcaaacaacuucaucu

SEQ ID NO: 2473488 - RNA, 19 nt, Artificial Sequence
  Description of Artificial Sequence: Synthetic oligonucleotide
  Sense strand starting at position 92 of SEQ ID NO: 1887452
aagguaggaucucuuuauu

SEQ ID NO: 2473489 - RNA, 19 nt, Artificial Sequence
  Description of Artificial Sequence: Synthetic oligonucleotide
  Antisense strand to SEQ ID NO: 2473488
aauaaagagauccuaccuu

SEQ ID NO: 2473490 - RNA, 19 nt, Artificial Sequence
  Description of Artificial Sequence: Synthetic oligonucleotide
  Sense strand starting at position 117 of SEQ ID NO: 1887452
gagcgugucagggaugaug

SEQ ID NO: 2473491 - RNA, 19 nt, Artificial Sequence
  Description of Artificial Sequence: Synthetic oligonucleotide
  Antisense strand to SEQ ID NO: 2473490
caucaucccugacacgcuc

SEQ ID NO: 2473492 - RNA, 19 nt, Artificial Sequence
  Description of Artificial Sequence: Synthetic oligonucleotide
  Sense strand starting at position 137 of SEQ ID NO: 1887452
acacuagagugaucugcau

SEQ ID NO: 2473493 - RNA, 19 nt, Artificial Sequence
  Description of Artificial Sequence: Synthetic oligonucleotide
  Antisense strand to SEQ ID NO: 2473492
augcagaucacucuagugu

SEQ ID NO: 2473494 - RNA, 19 nt, Artificial Sequence
  Description of Artificial Sequence: Synthetic oligonucleotide
  Sense strand starting at position 170 of SEQ ID NO: 1887452
agacaucacucagcaguga

SEQ ID NO: 2473495 - RNA, 19 nt, Artificial Sequence
  Description of Artificial Sequence: Synthetic oligonucleotide
  Antisense strand to SEQ ID NO: 2473494
ucacugcugagugaugucu

SEQ ID NO: 2473496 - RNA, 19 nt, Artificial Sequence
  Description of Artificial Sequence: Synthetic oligonucleotide
  Sense strand starting at position 271 of SEQ ID NO: 1887452
aauccuuguggugauuaau

SEQ ID NO: 2473497 - RNA, 19 nt, Artificial Sequence
  Description of Artificial Sequence: Synthetic oligonucleotide
  Antisense strand to SEQ ID NO: 2473496
auuaaucaccacaaggauu

SEQ ID NO: 2473498 - RNA, 19 nt, Artificial Sequence
  Description of Artificial Sequence: Synthetic oligonucleotide
  Sense strand starting at position 274 of SEQ ID NO: 1887452
ccuuguggugauuaaucau

SEQ ID NO: 2473499 - RNA, 19 nt, Artificial Sequence
  Description of Artificial Sequence: Synthetic oligonucleotide
  Antisense strand to SEQ ID NO: 2473498
augauuaaucaccacaagg

SEQ ID NO: 2473500 - RNA, 19 nt, Artificial Sequence
  Description of Artificial Sequence: Synthetic oligonucleotide
  Sense strand starting at position 277 of SEQ ID NO: 1887452
uguggugauuaaucauaga

SEQ ID NO: 2473501 - RNA, 19 nt, Artificial Sequence
  Description of Artificial Sequence: Synthetic oligonucleotide
  Antisense strand to SEQ ID NO: 2473500
ucuaugauuaaucaccaca

SEQ ID NO: 2473502 - RNA, 19 nt, Artificial Sequence
  Description of Artificial Sequence: Synthetic oligonucleotide
  Sense strand starting at position 303 of SEQ ID NO: 1887452
aauuacuuagcgcaagagu

SEQ ID NO: 2473503 - RNA, 19 nt, Artificial Sequence
  Description of Artificial Sequence: Synthetic oligonucleotide
  Antisense strand to SEQ ID NO: 2473502
acucuugcgcuaaguaauu

SEQ ID NO: 2473504 - RNA, 19 nt, Artificial Sequence
  Description of Artificial Sequence: Synthetic oligonucleotide
  Sense strand starting at position 386 of SEQ ID NO: 1887452
ucaucugucucagucauuu

SEQ ID NO: 2473505 - RNA, 19 nt, Artificial Sequence
  Description of Artificial Sequence: Synthetic oligonucleotide
  Antisense strand to SEQ ID NO: 2473504
aaaugacugagacagauga

SEQ ID NO: 2473506 - RNA, 19 nt, Artificial Sequence
  Description of Artificial Sequence: Synthetic oligonucleotide
  Sense strand starting at position 747 of SEQ ID NO: 1887452
gcuugugaacaauauaaau

SEQ ID NO: 2473507 - RNA, 19 nt, Artificial Sequence
  Description of Artificial Sequence: Synthetic oligonucleotide
  Antisense strand to SEQ ID NO: 2473506
auuuauauuguucacaagc

SEQ ID NO: 2473508 - RNA, 19 nt, Artificial Sequence
  Description of Artificial Sequence: Synthetic oligonucleotide
  Sense strand starting at position 882 of SEQ ID NO: 1887452
aaaggagcucuccaggguu

SEQ ID NO: 2473509 - RNA, 19 nt, Artificial Sequence
  Description of Artificial Sequence: Synthetic oligonucleotide
  Antisense strand to SEQ ID NO: 2473508
aacccuggagagcuccuuu

SEQ ID NO: 2473510 - RNA, 19 nt, Artificial Sequence
  Description of Artificial Sequence: Synthetic oligonucleotide
  Sense strand starting at position 1051 of SEQ ID NO: 1887452
gucugaauugcauacauga

SEQ ID NO: 2473511 - RNA, 19 nt, Artificial Sequence
  Description of Artificial Sequence: Synthetic oligonucleotide
  Antisense strand to SEQ ID NO: 2473510
ucauguaugcaauucagac

SEQ ID NO: 2473512 - RNA, 19 nt, Artificial Sequence
  Description of Artificial Sequence: Synthetic oligonucleotide
  Sense strand starting at position 1235 of SEQ ID NO: 1887452
augcuaugggauugucaag

SEQ ID NO: 2473513 - RNA, 19 nt, Artificial Sequence
  Description of Artificial Sequence: Synthetic oligonucleotide
  Antisense strand to SEQ ID NO: 2473512
cuugacaaucccauagcau

SEQ ID NO: 2473514 - RNA, 19 nt, Artificial Sequence
  Description of Artificial Sequence: Synthetic oligonucleotide
  Sense strand starting at position 1757 of SEQ ID NO: 1887452
caugcagagaugggugaau

SEQ ID NO: 2473515 - RNA, 19 nt, Artificial Sequence
  Description of Artificial Sequence: Synthetic oligonucleotide
  Antisense strand to SEQ ID NO: 2473514
auucacccaucucugcaug

SEQ ID NO: 2473516 - RNA, 19 nt, Artificial Sequence
  Description of Artificial Sequence: Synthetic oligonucleotide
  Sense strand starting at position 1759 of SEQ ID NO: 1887452
ugcagagaugggugaauga

SEQ ID NO: 2473517 - RNA, 19 nt, Artificial Sequence
  Description of Artificial Sequence: Synthetic oligonucleotide
  Antisense strand to SEQ ID NO: 2473516
ucauucacccaucucugca

SEQ ID NO: 2473518 - RNA, 19 nt, Artificial Sequence
  Description of Artificial Sequence: Synthetic oligonucleotide
  Sense strand starting at position 1789 of SEQ ID NO: 1887452
gcagaaccuuucuuccaga

SEQ ID NO: 2473519 - RNA, 19 nt, Artificial Sequence
  Description of Artificial Sequence: Synthetic oligonucleotide
  Antisense strand to SEQ ID NO: 2473518
ucuggaagaaagguucugc

SEQ ID NO: 2473520 - RNA, 19 nt, Artificial Sequence
  Description of Artificial Sequence: Synthetic oligonucleotide
  Sense strand starting at position 1966 of SEQ ID NO: 1887452
ugugguauuuaugucuuua

SEQ ID NO: 2473521 - RNA, 19 nt, Artificial Sequence
  Description of Artificial Sequence: Synthetic oligonucleotide
  Antisense strand to SEQ ID NO: 2473520
uaaagacauaaauaccaca

SEQ ID NO: 2473522 - RNA, 19 nt, Artificial Sequence
  Description of Artificial Sequence: Synthetic oligonucleotide
  Sense strand starting at position 1968 of SEQ ID NO: 1887452
ugguauuuaugucuuuacu

SEQ ID NO: 2473523 - RNA, 19 nt, Artificial Sequence
  Description of Artificial Sequence: Synthetic oligonucleotide
  Antisense strand to SEQ ID NO: 2473522
aguaaagacauaaauacca

SEQ ID NO: 2473524 - RNA, 19 nt, Artificial Sequence
  Description of Artificial Sequence: Synthetic oligonucleotide
  Sense strand starting at position 1970 of SEQ ID NO: 1887452
guauuuaugucuuuacugu

SEQ ID NO: 2473525 - RNA, 19 nt, Artificial Sequence
  Description of Artificial Sequence: Synthetic oligonucleotide
  Antisense strand to SEQ ID NO: 2473524
acaguaaagacauaaauac

SEQ ID NO: 2473526 - RNA, 19 nt, Artificial Sequence
  Description of Artificial Sequence: Synthetic oligonucleotide
  Sense strand starting at position 2049 of SEQ ID NO: 1887452
agauaaaucuuagcuucug

SEQ ID NO: 2473527 - RNA, 19 nt, Artificial Sequence
  Description of Artificial Sequence: Synthetic oligonucleotide
  Antisense strand to SEQ ID NO: 2473526
cagaagcuaagauuuaucu

SEQ ID NO: 2473528 - RNA, 19 nt, Artificial Sequence
  Description of Artificial Sequence: Synthetic oligonucleotide
  Sense strand starting at position 2070 of SEQ ID NO: 1887452
ucucucaaagguugacaaa

SEQ ID NO: 2473529 - RNA, 19 nt, Artificial Sequence
  Description of Artificial Sequence: Synthetic oligonucleotide
  Antisense strand to SEQ ID NO: 2473528
uuugucaaccuuugagaga

SEQ ID NO: 2473530 - RNA, 19 nt, Artificial Sequence
  Description of Artificial Sequence: Synthetic oligonucleotide
  Sense strand starting at position 2110 of SEQ ID NO: 1887452
agagaugcaucaguggaau

SEQ ID NO: 2473531 - RNA, 19 nt, Artificial Sequence
  Description of Artificial Sequence: Synthetic oligonucleotide
  Antisense strand to SEQ ID NO: 2473530
auuccacugaugcaucucu

SEQ ID NO: 2473532 - RNA, 19 nt, Artificial Sequence
  Description of Artificial Sequence: Synthetic oligonucleotide
  Sense strand starting at position 2252 of SEQ ID NO: 1887452
gcgagaucuugacucacag

SEQ ID NO: 2473533 - RNA, 19 nt, Artificial Sequence
  Description of Artificial Sequence: Synthetic oligonucleotide
  Antisense strand to SEQ ID NO: 2473532
cugugagucaagaucucgc

SEQ ID NO: 2473534 - RNA, 19 nt, Artificial Sequence
  Description of Artificial Sequence: Synthetic oligonucleotide
  Sense strand starting at position 2528 of SEQ ID NO: 1887452
gggucugcaaguuaaguua

SEQ ID NO: 2473535 - RNA, 19 nt, Artificial Sequence
  Description of Artificial Sequence: Synthetic oligonucleotide
  Antisense strand to SEQ ID NO: 2473534
uaacuuaacuugcagaccc

SEQ ID NO: 2473536 - RNA, 19 nt, Artificial Sequence
  Description of Artificial Sequence: Synthetic oligonucleotide
  Sense strand starting at position 2536 of SEQ ID NO: 1887452
aaguuaaguuaugcagaac

SEQ ID NO: 2473537 - RNA, 19 nt, Artificial Sequence
  Description of Artificial Sequence: Synthetic oligonucleotide
  Antisense strand to SEQ ID NO: 2473536
guucugcauaacuuaacuu

SEQ ID NO: 2473538 - RNA, 19 nt, Artificial Sequence
  Description of Artificial Sequence: Synthetic oligonucleotide
  Sense strand starting at position 2692 of SEQ ID NO: 1887452
ggaaccguugucuaaucca

SEQ ID NO: 2473539 - RNA, 19 nt, Artificial Sequence
  Description of Artificial Sequence: Synthetic oligonucleotide
  Antisense strand to SEQ ID NO: 2473538
uggauuagacaacgguucc

SEQ ID NO: 2473540 - RNA, 19 nt, Artificial Sequence
  Description of Artificial Sequence: Synthetic oligonucleotide
  Sense strand starting at position 2983 of SEQ ID NO: 1887452
uagguugacucauucugga

SEQ ID NO: 2473541 - RNA, 19 nt, Artificial Sequence
  Description of Artificial Sequence: Synthetic oligonucleotide
  Antisense strand to SEQ ID NO: 2473540
uccagaaugagucaaccua

SEQ ID NO: 2473542 - RNA, 19 nt, Artificial Sequence
  Description of Artificial Sequence: Synthetic oligonucleotide
  Sense strand starting at position 3009 of SEQ ID NO: 1887452
uuuaauaggaguuguuaug

SEQ ID NO: 2473543 - RNA, 19 nt, Artificial Sequence
  Description of Artificial Sequence: Synthetic oligonucleotide
  Antisense strand to SEQ ID NO: 2473542
cauaacaacuccuauuaaa

SEQ ID NO: 2473544 - RNA, 19 nt, Artificial Sequence
  Description of Artificial Sequence: Synthetic oligonucleotide
  Sense strand starting at position 3016 of SEQ ID NO: 1887452
ggaguuguuauggaccgaa

SEQ ID NO: 2473545 - RNA, 19 nt, Artificial Sequence
  Description of Artificial Sequence: Synthetic oligonucleotide
  Antisense strand to SEQ ID NO: 2473544
uucgguccauaacaacucc

SEQ ID NO: 2473546 - RNA, 19 nt, Artificial Sequence
  Description of Artificial Sequence: Synthetic oligonucleotide
  Sense strand starting at position 3020 of SEQ ID NO: 1887452
uuguuauggaccgaaugua

SEQ ID NO: 2473547 - RNA, 19 nt, Artificial Sequence
  Description of Artificial Sequence: Synthetic oligonucleotide
  Antisense strand to SEQ ID NO: 2473546
uacauucgguccauaacaa

SEQ ID NO: 2473548 - RNA, 19 nt, Artificial Sequence
  Description of Artificial Sequence: Synthetic oligonucleotide
  Sense strand starting at position 3139 of SEQ ID NO: 1887452
ccucaugaauggucucaac

SEQ ID NO: 2473549 - RNA, 19 nt, Artificial Sequence
  Description of Artificial Sequence: Synthetic oligonucleotide
  Antisense strand to SEQ ID NO: 2473548
guugagaccauucaugagg

SEQ ID NO: 2473550 - RNA, 19 nt, Artificial Sequence
  Description of Artificial Sequence: Synthetic oligonucleotide
  Sense strand starting at position 3221 of SEQ ID NO: 1887452
aagucagccgucuaugaac

SEQ ID NO: 2473551 - RNA, 19 nt, Artificial Sequence
  Description of Artificial Sequence: Synthetic oligonucleotide
  Antisense strand to SEQ ID NO: 2473550
guucauagacggcugacuu

SEQ ID NO: 2473552 - RNA, 19 nt, Artificial Sequence
  Description of Artificial Sequence: Synthetic oligonucleotide
  Sense strand starting at position 3335 of SEQ ID NO: 1887452
agccacauagucuaugaua

SEQ ID NO: 2473553 - RNA, 19 nt, Artificial Sequence
  Description of Artificial Sequence: Synthetic oligonucleotide
  Antisense strand to SEQ ID NO: 2473552
uaucauagacuauguggcu

SEQ ID NO: 2473554 - RNA, 19 nt, Artificial Sequence
  Description of Artificial Sequence: Synthetic oligonucleotide
  Sense strand starting at position 3337 of SEQ ID NO: 1887452
ccacauagucuaugauacu

SEQ ID NO: 2473555 - RNA, 19 nt, Artificial Sequence
  Description of Artificial Sequence: Synthetic oligonucleotide
  Antisense strand to SEQ ID NO: 2473554
aguaucauagacuaugugg

SEQ ID NO: 2473556 - RNA, 19 nt, Artificial Sequence
  Description of Artificial Sequence: Synthetic oligonucleotide
  Sense strand starting at position 3642 of SEQ ID NO: 1887452
uccuucucuuggguacaua

SEQ ID NO: 2473557 - RNA, 19 nt, Artificial Sequence
  Description of Artificial Sequence: Synthetic oligonucleotide
  Antisense strand to SEQ ID NO: 2473556
uauguacccaagagaagga

SEQ ID NO: 2473558 - RNA, 19 nt, Artificial Sequence
  Description of Artificial Sequence: Synthetic oligonucleotide
  Sense strand starting at position 3657 of SEQ ID NO: 1887452
cauacuuaggaguggaguu

SEQ ID NO: 2473559 - RNA, 19 nt, Artificial Sequence
  Description of Artificial Sequence: Synthetic oligonucleotide
  Antisense strand to SEQ ID NO: 2473558
aacuccacuccuaaguaug

SEQ ID NO: 2473560 - RNA, 19 nt, Artificial Sequence
  Description of Artificial Sequence: Synthetic oligonucleotide
  Sense strand starting at position 3868 of SEQ ID NO: 1887452
gccauucuaguacauguaa

SEQ ID NO: 2473561 - RNA, 19 nt, Artificial Sequence
  Description of Artificial Sequence: Synthetic oligonucleotide
  Antisense strand to SEQ ID NO: 2473560
uuacauguacuagaauggc

SEQ ID NO: 2473562 - RNA, 19 nt, Artificial Sequence
  Description of Artificial Sequence: Synthetic oligonucleotide
  Sense strand starting at position 3877 of SEQ ID NO: 1887452
guacauguaaagugauaag

SEQ ID NO: 2473563 - RNA, 19 nt, Artificial Sequence
  Description of Artificial Sequence: Synthetic oligonucleotide
  Antisense strand to SEQ ID NO: 2473562
cuuaucacuuuacauguac

SEQ ID NO: 2473564 - RNA, 19 nt, Artificial Sequence
  Description of Artificial Sequence: Synthetic oligonucleotide
  Sense strand starting at position 3887 of SEQ ID NO: 1887452
agugauaaguuauugugau

SEQ ID NO: 2473565 - RNA, 19 nt, Artificial Sequence
  Description of Artificial Sequence: Synthetic oligonucleotide
  Antisense strand to SEQ ID NO: 2473564
aucacaauaacuuaucacu

SEQ ID NO: 2473566 - RNA, 19 nt, Artificial Sequence
  Description of Artificial Sequence: Synthetic oligonucleotide
  Sense strand starting at position 1472 of SEQ ID NO: 1887454
gacguuucuggauaguggu

SEQ ID NO: 2473567 - RNA, 19 nt, Artificial Sequence
  Description of Artificial Sequence: Synthetic oligonucleotide
  Antisense strand to SEQ ID NO: 2473566
accacuauccagaaacguc

SEQ ID NO: 2473568 - RNA, 19 nt, Artificial Sequence
  Description of Artificial Sequence: Synthetic oligonucleotide
  Sense strand starting at position 1496 of SEQ ID NO: 1887454
cugagaguggcuggaugaa

SEQ ID NO: 2473569 - RNA, 19 nt, Artificial Sequence
  Description of Artificial Sequence: Synthetic oligonucleotide
  Antisense strand to SEQ ID NO: 2473568
uucauccagccacucucag

SEQ ID NO: 2473570 - RNA, 19 nt, Artificial Sequence
  Description of Artificial Sequence: Synthetic oligonucleotide
  Sense strand starting at position 1607 of SEQ ID NO: 1887454
auuauaaacucugcagaag

SEQ ID NO: 2473571 - RNA, 19 nt, Artificial Sequence
  Description of Artificial Sequence: Synthetic oligonucleotide
  Antisense strand to SEQ ID NO: 2473570
cuucugcagaguuuauaau

SEQ ID NO: 2473572 - RNA, 19 nt, Artificial Sequence
  Description of Artificial Sequence: Synthetic oligonucleotide
  Sense strand starting at position 1608 of SEQ ID NO: 1887454
uuauaaacucugcagaagu

SEQ ID NO: 2473573 - RNA, 19 nt, Artificial Sequence
  Description of Artificial Sequence: Synthetic oligonucleotide
  Antisense strand to SEQ ID NO: 2473572
acuucugcagaguuuauaa

SEQ ID NO: 2473574 - RNA, 19 nt, Artificial Sequence
  Description of Artificial Sequence: Synthetic oligonucleotide
  Sense strand starting at position 1765 of SEQ ID NO: 1887454
cucugcgagcguuauuuca

SEQ ID NO: 2473575 - RNA, 19 nt, Artificial Sequence
  Description of Artificial Sequence: Synthetic oligonucleotide
  Antisense strand to SEQ ID NO: 2473574
ugaaauaacgcucgcagag

SEQ ID NO: 2473576 - RNA, 19 nt, Artificial Sequence
  Description of Artificial Sequence: Synthetic oligonucleotide
  Sense strand starting at position 1767 of SEQ ID NO: 1887454
cugcgagcguuauuucaaa

SEQ ID NO: 2473577 - RNA, 19 nt, Artificial Sequence
  Description of Artificial Sequence: Synthetic oligonucleotide
  Antisense strand to SEQ ID NO: 2473576
uuugaaauaacgcucgcag

SEQ ID NO: 2473578 - RNA, 19 nt, Artificial Sequence
  Description of Artificial Sequence: Synthetic oligonucleotide
  Sense strand starting at position 2220 of SEQ ID NO: 1887454
acuguaacuguauaacuuu

SEQ ID NO: 2473579 - RNA, 19 nt, Artificial Sequence
  Description of Artificial Sequence: Synthetic oligonucleotide
  Antisense strand to SEQ ID NO: 2473578
aaaguuauacaguuacagu

SEQ ID NO: 2473580 - RNA, 19 nt, Artificial Sequence
  Description of Artificial Sequence: Synthetic oligonucleotide
  Sense strand starting at position 2627 of SEQ ID NO: 1887454
ugggaauagacaugccgua

SEQ ID NO: 2473581 - RNA, 19 nt, Artificial Sequence
  Description of Artificial Sequence: Synthetic oligonucleotide
  Antisense strand to SEQ ID NO: 2473580
uacggcaugucuauuccca

SEQ ID NO: 2473582 - RNA, 19 nt, Artificial Sequence
  Description of Artificial Sequence: Synthetic oligonucleotide
  Sense strand starting at position 2632 of SEQ ID NO: 1887454
auagacaugccguauuaaa

SEQ ID NO: 2473583 - RNA, 19 nt, Artificial Sequence
  Description of Artificial Sequence: Synthetic oligonucleotide
  Antisense strand to SEQ ID NO: 2473582
uuuaauacggcaugucuau

SEQ ID NO: 2473584 - RNA, 19 nt, Artificial Sequence
  Description of Artificial Sequence: Synthetic oligonucleotide
  Sense strand starting at position 2655 of SEQ ID NO: 1887454
guguauauucagggagaua

SEQ ID NO: 2473585 - RNA, 19 nt, Artificial Sequence
  Description of Artificial Sequence: Synthetic oligonucleotide
  Antisense strand to SEQ ID NO: 2473584
uaucucccugaauauacac

SEQ ID NO: 2473586 - RNA, 19 nt, Artificial Sequence
  Description of Artificial Sequence: Synthetic oligonucleotide
  Sense strand starting at position 2738 of SEQ ID NO: 1887454
caguaacaagggugacauu

SEQ ID NO: 2473587 - RNA, 19 nt, Artificial Sequence
  Description of Artificial Sequence: Synthetic oligonucleotide
  Antisense strand to SEQ ID NO: 2473586
aaugucacccuuguuacug

SEQ ID NO: 2473588 - RNA, 19 nt, Artificial Sequence
  Description of Artificial Sequence: Synthetic oligonucleotide
  Sense strand starting at position 2752 of SEQ ID NO: 1887454
acauuaguccuagguugga

SEQ ID NO: 2473589 - RNA, 19 nt, Artificial Sequence
  Description of Artificial Sequence: Synthetic oligonucleotide
  Antisense strand to SEQ ID NO: 2473588
uccaaccuaggacuaaugu

SEQ ID NO: 2473590 - RNA, 19 nt, Artificial Sequence
  Description of Artificial Sequence: Synthetic oligonucleotide
  Sense strand starting at position 2788 of SEQ ID NO: 1887454
gcauuccuugcagaaauau

SEQ ID NO: 2473591 - RNA, 19 nt, Artificial Sequence
  Description of Artificial Sequence: Synthetic oligonucleotide
  Antisense strand to SEQ ID NO: 2473590
auauuucugcaaggaaugc

SEQ ID NO: 2473592 - RNA, 19 nt, Artificial Sequence
  Description of Artificial Sequence: Synthetic oligonucleotide
  Sense strand starting at position 2822 of SEQ ID NO: 1887454
ugugaagaccuuuauguaa

SEQ ID NO: 2473593 - RNA, 19 nt, Artificial Sequence
  Description of Artificial Sequence: Synthetic oligonucleotide
  Antisense strand to SEQ ID NO: 2473592
uuacauaaaggucuucaca

SEQ ID NO: 2473594 - RNA, 19 nt, Artificial Sequence
  Description of Artificial Sequence: Synthetic oligonucleotide
  Sense strand starting at position 2922 of SEQ ID NO: 1887454
uugucaggguuaucuuaac

SEQ ID NO: 2473595 - RNA, 19 nt, Artificial Sequence
  Description of Artificial Sequence: Synthetic oligonucleotide
  Antisense strand to SEQ ID NO: 2473594
guuaagauaacccugacaa

SEQ ID NO: 2473596 - RNA, 19 nt, Artificial Sequence
  Description of Artificial Sequence: Synthetic oligonucleotide
  Sense strand starting at position 2981 of SEQ ID NO: 1887454
ccuugugaucaagaaguuu

SEQ ID NO: 2473597 - RNA, 19 nt, Artificial Sequence
  Description of Artificial Sequence: Synthetic oligonucleotide
  Antisense strand to SEQ ID NO: 2473596
aaacuucuugaucacaagg

SEQ ID NO: 2473598 - RNA, 19 nt, Artificial Sequence
  Description of Artificial Sequence: Synthetic oligonucleotide
  Sense strand starting at position 2989 of SEQ ID NO: 1887454
ucaagaaguuucucugaaa

SEQ ID NO: 2473599 - RNA, 19 nt, Artificial Sequence
  Description of Artificial Sequence: Synthetic oligonucleotide
  Antisense strand to SEQ ID NO: 2473598
uuucagagaaacuucuuga

SEQ ID NO: 2473600 - RNA, 19 nt, Artificial Sequence
  Description of Artificial Sequence: Synthetic oligonucleotide
  Sense strand starting at position 3221 of SEQ ID NO: 1887454
aaagaauuacuguggcauu

SEQ ID NO: 2473601 - RNA, 19 nt, Artificial Sequence
  Description of Artificial Sequence: Synthetic oligonucleotide
  Antisense strand to SEQ ID NO: 2473600
aaugccacaguaauucuuu

SEQ ID NO: 2473602 - RNA, 19 nt, Artificial Sequence
  Description of Artificial Sequence: Synthetic oligonucleotide
  Sense strand starting at position 3336 of SEQ ID NO: 1887454
cuaagugguugccuagaag

SEQ ID NO: 2473603 - RNA, 19 nt, Artificial Sequence
  Description of Artificial Sequence: Synthetic oligonucleotide
  Antisense strand to SEQ ID NO: 2473602
cuucuaggcaaccacuuag

SEQ ID NO: 2473604 - RNA, 19 nt, Artificial Sequence
  Description of Artificial Sequence: Synthetic oligonucleotide
  Sense strand starting at position 3339 of SEQ ID NO: 1887454
agugguugccuagaaguau

SEQ ID NO: 2473605 - RNA, 19 nt, Artificial Sequence
  Description of Artificial Sequence: Synthetic oligonucleotide
  Antisense strand to SEQ ID NO: 2473604
auacuucuaggcaaccacu

SEQ ID NO: 2473606 - RNA, 19 nt, Artificial Sequence
  Description of Artificial Sequence: Synthetic oligonucleotide
  Sense strand starting at position 3377 of SEQ ID NO: 1887454
auugaaauaugagcuaacu

SEQ ID NO: 2473607 - RNA, 19 nt, Artificial Sequence
  Description of Artificial Sequence: Synthetic oligonucleotide
  Antisense strand to SEQ ID NO: 2473606
aguuagcucauauuucaau

SEQ ID NO: 2473608 - RNA, 19 nt, Artificial Sequence
  Description of Artificial Sequence: Synthetic oligonucleotide
  Sense strand starting at position 3616 of SEQ ID NO: 1887454
cucuuccacuuuguugaua

SEQ ID NO: 2473609 - RNA, 19 nt, Artificial Sequence
  Description of Artificial Sequence: Synthetic oligonucleotide
  Antisense strand to SEQ ID NO: 2473608
uaucaacaaaguggaagag

SEQ ID NO: 2473610 - RNA, 19 nt, Artificial Sequence
  Description of Artificial Sequence: Synthetic oligonucleotide
  Sense strand starting at position 3627 of SEQ ID NO: 1887454
uguugauagucauuucugu

SEQ ID NO: 2473611 - RNA, 19 nt, Artificial Sequence
  Description of Artificial Sequence: Synthetic oligonucleotide
  Antisense strand to SEQ ID NO: 2473610
acagaaaugacuaucaaca

SEQ ID NO: 2473612 - RNA, 19 nt, Artificial Sequence
  Description of Artificial Sequence: Synthetic oligonucleotide
  Sense strand starting at position 3679 of SEQ ID NO: 1887454
uuuccucuaugcuugagau

SEQ ID NO: 2473613 - RNA, 19 nt, Artificial Sequence
  Description of Artificial Sequence: Synthetic oligonucleotide
  Antisense strand to SEQ ID NO: 2473612
aucucaagcauagaggaaa

SEQ ID NO: 2473614 - RNA, 19 nt, Artificial Sequence
  Description of Artificial Sequence: Synthetic oligonucleotide
  Sense strand starting at position 3680 of SEQ ID NO: 1887454
uuccucuaugcuugagaua

SEQ ID NO: 2473615 - RNA, 19 nt, Artificial Sequence
  Description of Artificial Sequence: Synthetic oligonucleotide
  Antisense strand to SEQ ID NO: 2473614
uaucucaagcauagaggaa

SEQ ID NO: 2473616 - RNA, 19 nt, Artificial Sequence
  Description of Artificial Sequence: Synthetic oligonucleotide
  Sense strand starting at position 3681 of SEQ ID NO: 1887454
uccucuaugcuugagauag

SEQ ID NO: 2473617 - RNA, 19 nt, Artificial Sequence
  Description of Artificial Sequence: Synthetic oligonucleotide
  Antisense strand to SEQ ID NO: 2473616
cuaucucaagcauagagga

SEQ ID NO: 2473618 - RNA, 19 nt, Artificial Sequence
  Description of Artificial Sequence: Synthetic oligonucleotide
  Sense strand starting at position 3687 of SEQ ID NO: 1887454
augcuugagauaggaugau

SEQ ID NO: 2473619 - RNA, 19 nt, Artificial Sequence
  Description of Artificial Sequence: Synthetic oligonucleotide
  Antisense strand to SEQ ID NO: 2473618
aucauccuaucucaagcau

SEQ ID NO: 2473620 - RNA, 19 nt, Artificial Sequence
  Description of Artificial Sequence: Synthetic oligonucleotide
  Sense strand starting at position 3707 of SEQ ID NO: 1887454
gggauucuucaauggcugu

SEQ ID NO: 2473621 - RNA, 19 nt, Artificial Sequence
  Description of Artificial Sequence: Synthetic oligonucleotide
  Antisense strand to SEQ ID NO: 2473620
acagccauugaagaauccc

SEQ ID NO: 2473622 - RNA, 19 nt, Artificial Sequence
  Description of Artificial Sequence: Synthetic oligonucleotide
  Sense strand starting at position 3733 of SEQ ID NO: 1887454
guuauucuagggcacuuaa

SEQ ID NO: 2473623 - RNA, 19 nt, Artificial Sequence
  Description of Artificial Sequence: Synthetic oligonucleotide
  Antisense strand to SEQ ID NO: 2473622
uuaagugcccuagaauaac

SEQ ID NO: 2473624 - RNA, 19 nt, Artificial Sequence
  Description of Artificial Sequence: Synthetic oligonucleotide
  Sense strand starting at position 3760 of SEQ ID NO: 1887454
uaugaauugcuuuggucaa

SEQ ID NO: 2473625 - RNA, 19 nt, Artificial Sequence
  Description of Artificial Sequence: Synthetic oligonucleotide
  Antisense strand to SEQ ID NO: 2473624
uugaccaaagcaauucaua

SEQ ID NO: 2473626 - RNA, 19 nt, Artificial Sequence
  Description of Artificial Sequence: Synthetic oligonucleotide
  Sense strand starting at position 3789 of SEQ ID NO: 1887454
cuuuacugauacucuguua

SEQ ID NO: 2473627 - RNA, 19 nt, Artificial Sequence
  Description of Artificial Sequence: Synthetic oligonucleotide
  Antisense strand to SEQ ID NO: 2473626
uaacagaguaucaguaaag

SEQ ID NO: 2473628 - RNA, 19 nt, Artificial Sequence
  Description of Artificial Sequence: Synthetic oligonucleotide
  Sense strand starting at position 3808 of SEQ ID NO: 1887454
uucuguuaauugcugaaag

SEQ ID NO: 2473629 - RNA, 19 nt, Artificial Sequence
  Description of Artificial Sequence: Synthetic oligonucleotide
  Antisense strand to SEQ ID NO: 2473628
cuuucagcaauuaacagaa

SEQ ID NO: 2473630 - RNA, 19 nt, Artificial Sequence
  Description of Artificial Sequence: Synthetic oligonucleotide
  Sense strand starting at position 3810 of SEQ ID NO: 1887454
cuguuaauugcugaaagac

SEQ ID NO: 2473631 - RNA, 19 nt, Artificial Sequence
  Description of Artificial Sequence: Synthetic oligonucleotide
  Antisense strand to SEQ ID NO: 2473630
gucuuucagcaauuaacag

SEQ ID NO: 2473632 - RNA, 19 nt, Artificial Sequence
  Description of Artificial Sequence: Synthetic oligonucleotide
  Sense strand starting at position 3851 of SEQ ID NO: 1887454
aguggaggauuauucuaua

SEQ ID NO: 2473633 - RNA, 19 nt, Artificial Sequence
  Description of Artificial Sequence: Synthetic oligonucleotide
  Antisense strand to SEQ ID NO: 2473632
uauagaauaauccuccacu

SEQ ID NO: 2473634 - RNA, 19 nt, Artificial Sequence
  Description of Artificial Sequence: Synthetic oligonucleotide
  Sense strand starting at position 3856 of SEQ ID NO: 1887454
aggauuauucuauaucugu

SEQ ID NO: 2473635 - RNA, 19 nt, Artificial Sequence
  Description of Artificial Sequence: Synthetic oligonucleotide
  Antisense strand to SEQ ID NO: 2473634
acagauauagaauaauccu

SEQ ID NO: 2473636 - RNA, 19 nt, Artificial Sequence
  Description of Artificial Sequence: Synthetic oligonucleotide
  Sense strand starting at position 3880 of SEQ ID NO: 1887454
auucuacccguguauacua

SEQ ID NO: 2473637 - RNA, 19 nt, Artificial Sequence
  Description of Artificial Sequence: Synthetic oligonucleotide
  Antisense strand to SEQ ID NO: 2473636
uaguauacacggguagaau

SEQ ID NO: 2473638 - RNA, 19 nt, Artificial Sequence
  Description of Artificial Sequence: Synthetic oligonucleotide
  Sense strand starting at position 3887 of SEQ ID NO: 1887454
ccguguauacuauauacau

SEQ ID NO: 2473639 - RNA, 19 nt, Artificial Sequence
  Description of Artificial Sequence: Synthetic oligonucleotide
  Antisense strand to SEQ ID NO: 2473638
auguauauaguauacacgg

SEQ ID NO: 2473640 - RNA, 19 nt, Artificial Sequence
  Description of Artificial Sequence: Synthetic oligonucleotide
  Sense strand starting at position 3911 of SEQ ID NO: 1887454
aagugugaauauguauaca

SEQ ID NO: 2473641 - RNA, 19 nt, Artificial Sequence
  Description of Artificial Sequence: Synthetic oligonucleotide
  Antisense strand to SEQ ID NO: 2473640
uguauacauauucacacuu

SEQ ID NO: 2473642 - RNA, 19 nt, Artificial Sequence
  Description of Artificial Sequence: Synthetic oligonucleotide
  Sense strand starting at position 3957 of SEQ ID NO: 1887454
agugaucuacuuuauacuu

SEQ ID NO: 2473643 - RNA, 19 nt, Artificial Sequence
  Description of Artificial Sequence: Synthetic oligonucleotide
  Antisense strand to SEQ ID NO: 2473642
aaguauaaaguagaucacu

SEQ ID NO: 2473644 - RNA, 19 nt, Artificial Sequence
  Description of Artificial Sequence: Synthetic oligonucleotide
  Sense strand starting at position 3976 of SEQ ID NO: 1887454
aguaaugcuguuuagguaa

SEQ ID NO: 2473645 - RNA, 19 nt, Artificial Sequence
  Description of Artificial Sequence: Synthetic oligonucleotide
  Antisense strand to SEQ ID NO: 2473644
uuaccuaaacagcauuacu

SEQ ID NO: 2473646 - RNA, 19 nt, Artificial Sequence
  Description of Artificial Sequence: Synthetic oligonucleotide
  Sense strand starting at position 114 of SEQ ID NO: 1887455
ucuccugcugcuuagauuu

SEQ ID NO: 2473647 - RNA, 19 nt, Artificial Sequence
  Description of Artificial Sequence: Synthetic oligonucleotide
  Antisense strand to SEQ ID NO: 2473646
aaaucuaagcagcaggaga

SEQ ID NO: 2473648 - RNA, 19 nt, Artificial Sequence
  Description of Artificial Sequence: Synthetic oligonucleotide
  Sense strand starting at position 178 of SEQ ID NO: 1887455
guagaucuccugcaucuua

SEQ ID NO: 2473649 - RNA, 19 nt, Artificial Sequence
  Description of Artificial Sequence: Synthetic oligonucleotide
  Antisense strand to SEQ ID NO: 2473648
uaagaugcaggagaucuac

SEQ ID NO: 2473650 - RNA, 19 nt, Artificial Sequence
  Description of Artificial Sequence: Synthetic oligonucleotide
  Sense strand starting at position 234 of SEQ ID NO: 1887455
aggucagcuccugguagau

SEQ ID NO: 2473651 - RNA, 19 nt, Artificial Sequence
  Description of Artificial Sequence: Synthetic oligonucleotide
  Antisense strand to SEQ ID NO: 2473650
aucuaccaggagcugaccu

SEQ ID NO: 2473652 - RNA, 19 nt, Artificial Sequence
  Description of Artificial Sequence: Synthetic oligonucleotide
  Sense strand starting at position 316 of SEQ ID NO: 1887455
guagaucuccugcagcuua

SEQ ID NO: 2473653 - RNA, 19 nt, Artificial Sequence
  Description of Artificial Sequence: Synthetic oligonucleotide
  Antisense strand to SEQ ID NO: 2473652
uaagcugcaggagaucuac

SEQ ID NO: 2473654 - RNA, 19 nt, Artificial Sequence
  Description of Artificial Sequence: Synthetic oligonucleotide
  Sense strand starting at position 403 of SEQ ID NO: 1887455
ggauuucucugagagcuca

SEQ ID NO: 2473655 - RNA, 19 nt, Artificial Sequence
  Description of Artificial Sequence: Synthetic oligonucleotide
  Antisense strand to SEQ ID NO: 2473654
ugagcucucagagaaaucc

SEQ ID NO: 2473656 - RNA, 19 nt, Artificial Sequence
  Description of Artificial Sequence: Synthetic oligonucleotide
  Sense strand starting at position 469 of SEQ ID NO: 1887455
ccuggauuguuccugacuu

SEQ ID NO: 2473657 - RNA, 19 nt, Artificial Sequence
  Description of Artificial Sequence: Synthetic oligonucleotide
  Antisense strand to SEQ ID NO: 2473656
aagucaggaacaauccagg

SEQ ID NO: 2473658 - RNA, 19 nt, Artificial Sequence
  Description of Artificial Sequence: Synthetic oligonucleotide
  Sense strand starting at position 471 of SEQ ID NO: 1887455
uggauuguuccugacuuau

SEQ ID NO: 2473659 - RNA, 19 nt, Artificial Sequence
  Description of Artificial Sequence: Synthetic oligonucleotide
  Antisense strand to SEQ ID NO: 2473658
auaagucaggaacaaucca

SEQ ID NO: 2473660 - RNA, 19 nt, Artificial Sequence
  Description of Artificial Sequence: Synthetic oligonucleotide
  Sense strand starting at position 587 of SEQ ID NO: 1887455
caucauuugugagagccaa

SEQ ID NO: 2473661 - RNA, 19 nt, Artificial Sequence
  Description of Artificial Sequence: Synthetic oligonucleotide
  Antisense strand to SEQ ID NO: 2473660
uuggcucucacaaaugaug

SEQ ID NO: 2473662 - RNA, 19 nt, Artificial Sequence
  Description of Artificial Sequence: Synthetic oligonucleotide
  Sense strand starting at position 600 of SEQ ID NO: 1887455
agccaaggucuugguuaau

SEQ ID NO: 2473663 - RNA, 19 nt, Artificial Sequence
  Description of Artificial Sequence: Synthetic oligonucleotide
  Antisense strand to SEQ ID NO: 2473662
auuaaccaagaccuuggcu

SEQ ID NO: 2473664 - RNA, 19 nt, Artificial Sequence
  Description of Artificial Sequence: Synthetic oligonucleotide
  Sense strand starting at position 1006 of SEQ ID NO: 1887455
cagggagagccuggucuaa

SEQ ID NO: 2473665 - RNA, 19 nt, Artificial Sequence
  Description of Artificial Sequence: Synthetic oligonucleotide
  Antisense strand to SEQ ID NO: 2473664
uuagaccaggcucucccug

SEQ ID NO: 2473666 - RNA, 19 nt, Artificial Sequence
  Description of Artificial Sequence: Synthetic oligonucleotide
  Sense strand starting at position 1008 of SEQ ID NO: 1887455
gggagagccuggucuaaau

SEQ ID NO: 2473667 - RNA, 19 nt, Artificial Sequence
  Description of Artificial Sequence: Synthetic oligonucleotide
  Antisense strand to SEQ ID NO: 2473666
auuuagaccaggcucuccc

SEQ ID NO: 2473668 - RNA, 19 nt, Artificial Sequence
  Description of Artificial Sequence: Synthetic oligonucleotide
  Sense strand starting at position 1994 of SEQ ID NO: 1887455
cugugaucuuuacuuccua

SEQ ID NO: 2473669 - RNA, 19 nt, Artificial Sequence
  Description of Artificial Sequence: Synthetic oligonucleotide
  Antisense strand to SEQ ID NO: 2473668
uaggaaguaaagaucacag

SEQ ID NO: 2473670 - RNA, 19 nt, Artificial Sequence
  Description of Artificial Sequence: Synthetic oligonucleotide
  Sense strand starting at position 2047 of SEQ ID NO: 1887455
uggguagggaucugucauc

SEQ ID NO: 2473671 - RNA, 19 nt, Artificial Sequence
  Description of Artificial Sequence: Synthetic oligonucleotide
  Antisense strand to SEQ ID NO: 2473670
gaugacagaucccuaccca

SEQ ID NO: 2473672 - RNA, 19 nt, Artificial Sequence
  Description of Artificial Sequence: Synthetic oligonucleotide
  Sense strand starting at position 2093 of SEQ ID NO: 1887455
augagaugggccggaucuu

SEQ ID NO: 2473673 - RNA, 19 nt, Artificial Sequence
  Description of Artificial Sequence: Synthetic oligonucleotide
  Antisense strand to SEQ ID NO: 2473672
aagauccggcccaucucau

SEQ ID NO: 2473674 - RNA, 19 nt, Artificial Sequence
  Description of Artificial Sequence: Synthetic oligonucleotide
  Sense strand starting at position 2094 of SEQ ID NO: 1887455
ugagaugggccggaucuuu

SEQ ID NO: 2473675 - RNA, 19 nt, Artificial Sequence
  Description of Artificial Sequence: Synthetic oligonucleotide
  Antisense strand to SEQ ID NO: 2473674
aaagauccggcccaucuca

SEQ ID NO: 2473676 - RNA, 19 nt, Artificial Sequence
  Description of Artificial Sequence: Synthetic oligonucleotide
  Sense strand starting at position 2215 of SEQ ID NO: 1887455
gauaaauuguaagagaaag

SEQ ID NO: 2473677 - RNA, 19 nt, Artificial Sequence
  Description of Artificial Sequence: Synthetic oligonucleotide
  Antisense strand to SEQ ID NO: 2473676
cuuucucuuacaauuuauc

SEQ ID NO: 2473678 - RNA, 19 nt, Artificial Sequence
  Description of Artificial Sequence: Synthetic oligonucleotide
  Sense strand starting at position 2610 of SEQ ID NO: 1887455
gcaugcuguuaaccaaaga

SEQ ID NO: 2473679 - RNA, 19 nt, Artificial Sequence
  Description of Artificial Sequence: Synthetic oligonucleotide
  Antisense strand to SEQ ID NO: 2473678
ucuuugguuaacagcaugc

SEQ ID NO: 2473680 - RNA, 19 nt, Artificial Sequence
  Description of Artificial Sequence: Synthetic oligonucleotide
  Sense strand starting at position 2711 of SEQ ID NO: 1887455
ccagcaggugaaugauaaa

SEQ ID NO: 2473681 - RNA, 19 nt, Artificial Sequence
  Description of Artificial Sequence: Synthetic oligonucleotide
  Antisense strand to SEQ ID NO: 2473680
uuuaucauucaccugcugg

SEQ ID NO: 2473682 - RNA, 19 nt, Artificial Sequence
  Description of Artificial Sequence: Synthetic oligonucleotide
  Sense strand starting at position 2844 of SEQ ID NO: 1887455
gugaguacacacuguaaga

SEQ ID NO: 2473683 - RNA, 19 nt, Artificial Sequence
  Description of Artificial Sequence: Synthetic oligonucleotide
  Antisense strand to SEQ ID NO: 2473682
ucuuacaguguguacucac

SEQ ID NO: 2473684 - RNA, 19 nt, Artificial Sequence
  Description of Artificial Sequence: Synthetic oligonucleotide
  Sense strand starting at position 2912 of SEQ ID NO: 1887455
gacucagaaugggaauuau

SEQ ID NO: 2473685 - RNA, 19 nt, Artificial Sequence
  Description of Artificial Sequence: Synthetic oligonucleotide
  Antisense strand to SEQ ID NO: 2473684
auaauucccauucugaguc

SEQ ID NO: 2473686 - RNA, 19 nt, Artificial Sequence
  Description of Artificial Sequence: Synthetic oligonucleotide
  Sense strand starting at position 2964 of SEQ ID NO: 1887455
uucuguaugcuggaaaugu

SEQ ID NO: 2473687 - RNA, 19 nt, Artificial Sequence
  Description of Artificial Sequence: Synthetic oligonucleotide
  Antisense strand to SEQ ID NO: 2473686
acauuuccagcauacagaa

SEQ ID NO: 2473688 - RNA, 19 nt, Artificial Sequence
  Description of Artificial Sequence: Synthetic oligonucleotide
  Sense strand starting at position 2968 of SEQ ID NO: 1887455
guaugcuggaaauguucua

SEQ ID NO: 2473689 - RNA, 19 nt, Artificial Sequence
  Description of Artificial Sequence: Synthetic oligonucleotide
  Antisense strand to SEQ ID NO: 2473688
uagaacauuuccagcauac

SEQ ID NO: 2473690 - RNA, 19 nt, Artificial Sequence
  Description of Artificial Sequence: Synthetic oligonucleotide
  Sense strand starting at position 2992 of SEQ ID NO: 1887455
ugaucauagagaugugcau

SEQ ID NO: 2473691 - RNA, 19 nt, Artificial Sequence
  Description of Artificial Sequence: Synthetic oligonucleotide
  Antisense strand to SEQ ID NO: 2473690
augcacaucucuaugauca

SEQ ID NO: 2473692 - RNA, 19 nt, Artificial Sequence
  Description of Artificial Sequence: Synthetic oligonucleotide
  Sense strand starting at position 3005 of SEQ ID NO: 1887455
gugcauuuaccacaugugu

SEQ ID NO: 2473693 - RNA, 19 nt, Artificial Sequence
  Description of Artificial Sequence: Synthetic oligonucleotide
  Antisense strand to SEQ ID NO: 2473692
acacaugugguaaaugcac

SEQ ID NO: 2473694 - RNA, 19 nt, Artificial Sequence
  Description of Artificial Sequence: Synthetic oligonucleotide
  Sense strand starting at position 3007 of SEQ ID NO: 1887455
gcauuuaccacaugugugu

SEQ ID NO: 2473695 - RNA, 19 nt, Artificial Sequence
  Description of Artificial Sequence: Synthetic oligonucleotide
  Antisense strand to SEQ ID NO: 2473694
acacacaugugguaaaugc

SEQ ID NO: 2473696 - RNA, 19 nt, Artificial Sequence
  Description of Artificial Sequence: Synthetic oligonucleotide
  Sense strand starting at position 3011 of SEQ ID NO: 1887455
uuaccacauguguguuaaa

SEQ ID NO: 2473697 - RNA, 19 nt, Artificial Sequence
  Description of Artificial Sequence: Synthetic oligonucleotide
  Antisense strand to SEQ ID NO: 2473696
uuuaacacacaugugguaa

SEQ ID NO: 2473698 - RNA, 19 nt, Artificial Sequence
  Description of Artificial Sequence: Synthetic oligonucleotide
  Sense strand starting at position 3083 of SEQ ID NO: 1887455
ucgaccugaucuuuacuuu

SEQ ID NO: 2473699 - RNA, 19 nt, Artificial Sequence
  Description of Artificial Sequence: Synthetic oligonucleotide
  Antisense strand to SEQ ID NO: 2473698
aaaguaaagaucaggucga

SEQ ID NO: 2473700 - RNA, 19 nt, Artificial Sequence
  Description of Artificial Sequence: Synthetic oligonucleotide
  Sense strand starting at position 3086 of SEQ ID NO: 1887455
accugaucuuuacuuugua

SEQ ID NO: 2473701 - RNA, 19 nt, Artificial Sequence
  Description of Artificial Sequence: Synthetic oligonucleotide
  Antisense strand to SEQ ID NO: 2473700
uacaaaguaaagaucaggu

SEQ ID NO: 2473702 - RNA, 19 nt, Artificial Sequence
  Description of Artificial Sequence: Synthetic oligonucleotide
  Sense strand starting at position 3087 of SEQ ID NO: 1887455
ccugaucuuuacuuuguau

SEQ ID NO: 2473703 - RNA, 19 nt, Artificial Sequence
  Description of Artificial Sequence: Synthetic oligonucleotide
  Antisense strand to SEQ ID NO: 2473702
auacaaaguaaagaucagg

SEQ ID NO: 2473704 - RNA, 19 nt, Artificial Sequence
  Description of Artificial Sequence: Synthetic oligonucleotide
  Sense strand starting at position 3155 of SEQ ID NO: 1887455
guugcaaauguaggaaaga

SEQ ID NO: 2473705 - RNA, 19 nt, Artificial Sequence
  Description of Artificial Sequence: Synthetic oligonucleotide
  Antisense strand to SEQ ID NO: 2473704
ucuuuccuacauuugcaac

SEQ ID NO: 2473706 - RNA, 19 nt, Artificial Sequence
  Description of Artificial Sequence: Synthetic oligonucleotide
  Sense strand starting at position 3250 of SEQ ID NO: 1887455
gguaaugagguaggaaacu

SEQ ID NO: 2473707 - RNA, 19 nt, Artificial Sequence
  Description of Artificial Sequence: Synthetic oligonucleotide
  Antisense strand to SEQ ID NO: 2473706
aguuuccuaccucauuacc

SEQ ID NO: 2473708 - RNA, 19 nt, Artificial Sequence
  Description of Artificial Sequence: Synthetic oligonucleotide
  Sense strand starting at position 3307 of SEQ ID NO: 1887455
uacagaaucugguccagau

SEQ ID NO: 2473709 - RNA, 19 nt, Artificial Sequence
  Description of Artificial Sequence: Synthetic oligonucleotide
  Antisense strand to SEQ ID NO: 2473708
aucuggaccagauucugua

SEQ ID NO: 2473710 - RNA, 19 nt, Artificial Sequence
  Description of Artificial Sequence: Synthetic oligonucleotide
  Sense strand starting at position 3324 of SEQ ID NO: 1887455
augagaugaugugaagaaa

SEQ ID NO: 2473711 - RNA, 19 nt, Artificial Sequence
  Description of Artificial Sequence: Synthetic oligonucleotide
  Antisense strand to SEQ ID NO: 2473710
uuucuucacaucaucucau

SEQ ID NO: 2473712 - RNA, 19 nt, Artificial Sequence
  Description of Artificial Sequence: Synthetic oligonucleotide
  Sense strand starting at position 3446 of SEQ ID NO: 1887455
ggcaaugaccuagaaguuc

SEQ ID NO: 2473713 - RNA, 19 nt, Artificial Sequence
  Description of Artificial Sequence: Synthetic oligonucleotide
  Antisense strand to SEQ ID NO: 2473712
gaacuucuaggucauugcc

SEQ ID NO: 2473714 - RNA, 19 nt, Artificial Sequence
  Description of Artificial Sequence: Synthetic oligonucleotide
  Sense strand starting at position 3557 of SEQ ID NO: 1887455
uuaacugacguauaacuga

SEQ ID NO: 2473715 - RNA, 19 nt, Artificial Sequence
  Description of Artificial Sequence: Synthetic oligonucleotide
  Antisense strand to SEQ ID NO: 2473714
ucaguuauacgucaguuaa

SEQ ID NO: 2473716 - RNA, 19 nt, Artificial Sequence
  Description of Artificial Sequence: Synthetic oligonucleotide
  Sense strand starting at position 3562 of SEQ ID NO: 1887455
ugacguauaacugaaagug

SEQ ID NO: 2473717 - RNA, 19 nt, Artificial Sequence
  Description of Artificial Sequence: Synthetic oligonucleotide
  Antisense strand to SEQ ID NO: 2473716
cacuuucaguuauacguca

SEQ ID NO: 2473718 - RNA, 19 nt, Artificial Sequence
  Description of Artificial Sequence: Synthetic oligonucleotide
  Sense strand starting at position 3570 of SEQ ID NO: 1887455
aacugaaagugaguugaca

SEQ ID NO: 2473719 - RNA, 19 nt, Artificial Sequence
  Description of Artificial Sequence: Synthetic oligonucleotide
  Antisense strand to SEQ ID NO: 2473718
ugucaacucacuuucaguu

SEQ ID NO: 2473720 - RNA, 19 nt, Artificial Sequence
  Description of Artificial Sequence: Synthetic oligonucleotide
  Sense strand starting at position 3572 of SEQ ID NO: 1887455
cugaaagugaguugacaug

SEQ ID NO: 2473721 - RNA, 19 nt, Artificial Sequence
  Description of Artificial Sequence: Synthetic oligonucleotide
  Antisense strand to SEQ ID NO: 2473720
caugucaacucacuuucag

SEQ ID NO: 2473722 - RNA, 19 nt, Artificial Sequence
  Description of Artificial Sequence: Synthetic oligonucleotide
  Sense strand starting at position 3578 of SEQ ID NO: 1887455
gugaguugacaugaguaua

SEQ ID NO: 2473723 - RNA, 19 nt, Artificial Sequence
  Description of Artificial Sequence: Synthetic oligonucleotide
  Antisense strand to SEQ ID NO: 2473722
uauacucaugucaacucac

SEQ ID NO: 2473724 - RNA, 19 nt, Artificial Sequence
  Description of Artificial Sequence: Synthetic oligonucleotide
  Sense strand starting at position 3668 of SEQ ID NO: 1887455
ggagcaguaucauuacaua

SEQ ID NO: 2473725 - RNA, 19 nt, Artificial Sequence
  Description of Artificial Sequence: Synthetic oligonucleotide
  Antisense strand to SEQ ID NO: 2473724
uauguaaugauacugcucc

SEQ ID NO: 2473726 - RNA, 19 nt, Artificial Sequence
  Description of Artificial Sequence: Synthetic oligonucleotide
  Sense strand starting at position 2 of SEQ ID NO: 1887456
cgugguaaucaggauucua

SEQ ID NO: 2473727 - RNA, 19 nt, Artificial Sequence
  Description of Artificial Sequence: Synthetic oligonucleotide
  Antisense strand to SEQ ID NO: 2473726
uagaauccugauuaccacg

SEQ ID NO: 2473728 - RNA, 19 nt, Artificial Sequence
  Description of Artificial Sequence: Synthetic oligonucleotide
  Sense strand starting at position 96 of SEQ ID NO: 1887456
guaauuaaagcucaaaguc

SEQ ID NO: 2473729 - RNA, 19 nt, Artificial Sequence
  Description of Artificial Sequence: Synthetic oligonucleotide
  Antisense strand to SEQ ID NO: 2473728
gacuuugagcuuuaauuac

SEQ ID NO: 2473730 - RNA, 19 nt, Artificial Sequence
  Description of Artificial Sequence: Synthetic oligonucleotide
  Sense strand starting at position 186 of SEQ ID NO: 1887456
augagaaagucagagaauc

SEQ ID NO: 2473731 - RNA, 19 nt, Artificial Sequence
  Description of Artificial Sequence: Synthetic oligonucleotide
  Antisense strand to SEQ ID NO: 2473730
gauucucugacuuucucau

SEQ ID NO: 2473732 - RNA, 19 nt, Artificial Sequence
  Description of Artificial Sequence: Synthetic oligonucleotide
  Sense strand starting at position 271 of SEQ ID NO: 1887456
gguagaguggccugcaaga

SEQ ID NO: 2473733 - RNA, 19 nt, Artificial Sequence
  Description of Artificial Sequence: Synthetic oligonucleotide
  Antisense strand to SEQ ID NO: 2473732
ucuugcaggccacucuacc

SEQ ID NO: 2473734 - RNA, 19 nt, Artificial Sequence
  Description of Artificial Sequence: Synthetic oligonucleotide
  Sense strand starting at position 335 of SEQ ID NO: 1887456
guccuacaacuguaagaac

SEQ ID NO: 2473735 - RNA, 19 nt, Artificial Sequence
  Description of Artificial Sequence: Synthetic oligonucleotide
  Antisense strand to SEQ ID NO: 2473734
guucuuacaguuguaggac

SEQ ID NO: 2473736 - RNA, 19 nt, Artificial Sequence
  Description of Artificial Sequence: Synthetic oligonucleotide
  Sense strand starting at position 344 of SEQ ID NO: 1887456
cuguaagaaccuggauucu

SEQ ID NO: 2473737 - RNA, 19 nt, Artificial Sequence
  Description of Artificial Sequence: Synthetic oligonucleotide
  Antisense strand to SEQ ID NO: 2473736
agaauccagguucuuacag

SEQ ID NO: 2473738 - RNA, 19 nt, Artificial Sequence
  Description of Artificial Sequence: Synthetic oligonucleotide
  Sense strand starting at position 617 of SEQ ID NO: 1887456
ggauucugccaccaucuga

SEQ ID NO: 2473739 - RNA, 19 nt, Artificial Sequence
  Description of Artificial Sequence: Synthetic oligonucleotide
  Antisense strand to SEQ ID NO: 2473738
ucagaugguggcagaaucc

SEQ ID NO: 2473740 - RNA, 19 nt, Artificial Sequence
  Description of Artificial Sequence: Synthetic oligonucleotide
  Sense strand starting at position 625 of SEQ ID NO: 1887456
ccaccaucugaaugagcuu

SEQ ID NO: 2473741 - RNA, 19 nt, Artificial Sequence
  Description of Artificial Sequence: Synthetic oligonucleotide
  Antisense strand to SEQ ID NO: 2473740
aagcucauucagauggugg

SEQ ID NO: 2473742 - RNA, 19 nt, Artificial Sequence
  Description of Artificial Sequence: Synthetic oligonucleotide
  Sense strand starting at position 632 of SEQ ID NO: 1887456
cugaaugagcuuggauaug

SEQ ID NO: 2473743 - RNA, 19 nt, Artificial Sequence
  Description of Artificial Sequence: Synthetic oligonucleotide
  Antisense strand to SEQ ID NO: 2473742
cauauccaagcucauucag

SEQ ID NO: 2473744 - RNA, 19 nt, Artificial Sequence
  Description of Artificial Sequence: Synthetic oligonucleotide
  Sense strand starting at position 644 of SEQ ID NO: 1887456
ggauauggguucuuuccca

SEQ ID NO: 2473745 - RNA, 19 nt, Artificial Sequence
  Description of Artificial Sequence: Synthetic oligonucleotide
  Antisense strand to SEQ ID NO: 2473744
ugggaaagaacccauaucc

SEQ ID NO: 2473746 - RNA, 19 nt, Artificial Sequence
  Description of Artificial Sequence: Synthetic oligonucleotide
  Sense strand starting at position 798 of SEQ ID NO: 1887456
agaaucagacucugcacua

SEQ ID NO: 2473747 - RNA, 19 nt, Artificial Sequence
  Description of Artificial Sequence: Synthetic oligonucleotide
  Antisense strand to SEQ ID NO: 2473746
uagugcagagucugauucu

SEQ ID NO: 2473748 - RNA, 19 nt, Artificial Sequence
  Description of Artificial Sequence: Synthetic oligonucleotide
  Sense strand starting at position 805 of SEQ ID NO: 1887456
gacucugcacuagaaugua

SEQ ID NO: 2473749 - RNA, 19 nt, Artificial Sequence
  Description of Artificial Sequence: Synthetic oligonucleotide
  Antisense strand to SEQ ID NO: 2473748
uacauucuagugcagaguc

SEQ ID NO: 2473750 - RNA, 19 nt, Artificial Sequence
  Description of Artificial Sequence: Synthetic oligonucleotide
  Sense strand starting at position 813 of SEQ ID NO: 1887456
acuagaauguaagugcaau

SEQ ID NO: 2473751 - RNA, 19 nt, Artificial Sequence
  Description of Artificial Sequence: Synthetic oligonucleotide
  Antisense strand to SEQ ID NO: 2473750
auugcacuuacauucuagu

SEQ ID NO: 2473752 - RNA, 19 nt, Artificial Sequence
  Description of Artificial Sequence: Synthetic oligonucleotide
  Sense strand starting at position 1052 of SEQ ID NO: 1887456
uggagaaagcauuggcaga

SEQ ID NO: 2473753 - RNA, 19 nt, Artificial Sequence
  Description of Artificial Sequence: Synthetic oligonucleotide
  Antisense strand to SEQ ID NO: 2473752
ucugccaaugcuuucucca

SEQ ID NO: 2473754 - RNA, 19 nt, Artificial Sequence
  Description of Artificial Sequence: Synthetic oligonucleotide
  Sense strand starting at position 1542 of SEQ ID NO: 1887456
cuugguguuaguuaauggu

SEQ ID NO: 2473755 - RNA, 19 nt, Artificial Sequence
  Description of Artificial Sequence: Synthetic oligonucleotide
  Antisense strand to SEQ ID NO: 2473754
accauuaacuaacaccaag

SEQ ID NO: 2473756 - RNA, 19 nt, Artificial Sequence
  Description of Artificial Sequence: Synthetic oligonucleotide
  Sense strand starting at position 1557 of SEQ ID NO: 1887456
uggucacucccaggauguu

SEQ ID NO: 2473757 - RNA, 19 nt, Artificial Sequence
  Description of Artificial Sequence: Synthetic oligonucleotide
  Antisense strand to SEQ ID NO: 2473756
aacauccugggagugacca

SEQ ID NO: 2473758 - RNA, 19 nt, Artificial Sequence
  Description of Artificial Sequence: Synthetic oligonucleotide
  Sense strand starting at position 1558 of SEQ ID NO: 1887456
ggucacucccaggauguua

SEQ ID NO: 2473759 - RNA, 19 nt, Artificial Sequence
  Description of Artificial Sequence: Synthetic oligonucleotide
  Antisense strand to SEQ ID NO: 2473758
uaacauccugggagugacc

SEQ ID NO: 2473760 - RNA, 19 nt, Artificial Sequence
  Description of Artificial Sequence: Synthetic oligonucleotide
  Sense strand starting at position 1618 of SEQ ID NO: 1887456
auccucuuguacucagaga

SEQ ID NO: 2473761 - RNA, 19 nt, Artificial Sequence
  Description of Artificial Sequence: Synthetic oligonucleotide
  Antisense strand to SEQ ID NO: 2473760
ucucugaguacaagaggau

SEQ ID NO: 2473762 - RNA, 19 nt, Artificial Sequence
  Description of Artificial Sequence: Synthetic oligonucleotide
  Sense strand starting at position 1740 of SEQ ID NO: 1887456
aaaguccugugugucaaua

SEQ ID NO: 2473763 - RNA, 19 nt, Artificial Sequence
  Description of Artificial Sequence: Synthetic oligonucleotide
  Antisense strand to SEQ ID NO: 2473762
uauugacacacaggacuuu

SEQ ID NO: 2473764 - RNA, 19 nt, Artificial Sequence
  Description of Artificial Sequence: Synthetic oligonucleotide
  Sense strand starting at position 1773 of SEQ ID NO: 1887456
cugaaaggaagacguauau

SEQ ID NO: 2473765 - RNA, 19 nt, Artificial Sequence
  Description of Artificial Sequence: Synthetic oligonucleotide
  Antisense strand to SEQ ID NO: 2473764
auauacgucuuccuuucag

SEQ ID NO: 2473766 - RNA, 19 nt, Artificial Sequence
  Description of Artificial Sequence: Synthetic oligonucleotide
  Sense strand starting at position 1858 of SEQ ID NO: 1887456
ugauucuaccagugucuuu

SEQ ID NO: 2473767 - RNA, 19 nt, Artificial Sequence
  Description of Artificial Sequence: Synthetic oligonucleotide
  Antisense strand to SEQ ID NO: 2473766
aaagacacugguagaauca

SEQ ID NO: 2473768 - RNA, 19 nt, Artificial Sequence
  Description of Artificial Sequence: Synthetic oligonucleotide
  Sense strand starting at position 1863 of SEQ ID NO: 1887456
cuaccagugucuuucugga

SEQ ID NO: 2473769 - RNA, 19 nt, Artificial Sequence
  Description of Artificial Sequence: Synthetic oligonucleotide
  Antisense strand to SEQ ID NO: 2473768
uccagaaagacacugguag

SEQ ID NO: 2473770 - RNA, 19 nt, Artificial Sequence
  Description of Artificial Sequence: Synthetic oligonucleotide
  Sense strand starting at position 1865 of SEQ ID NO: 1887456
accagugucuuucuggaaa

SEQ ID NO: 2473771 - RNA, 19 nt, Artificial Sequence
  Description of Artificial Sequence: Synthetic oligonucleotide
  Antisense strand to SEQ ID NO: 2473770
uuuccagaaagacacuggu

SEQ ID NO: 2473772 - RNA, 19 nt, Artificial Sequence
  Description of Artificial Sequence: Synthetic oligonucleotide
  Sense strand starting at position 1982 of SEQ ID NO: 1887456
agaaguaaugcugaaugcu

SEQ ID NO: 2473773 - RNA, 19 nt, Artificial Sequence
  Description of Artificial Sequence: Synthetic oligonucleotide
  Antisense strand to SEQ ID NO: 2473772
agcauucagcauuacuucu

SEQ ID NO: 2473774 - RNA, 19 nt, Artificial Sequence
  Description of Artificial Sequence: Synthetic oligonucleotide
  Sense strand starting at position 1991 of SEQ ID NO: 1887456
gcugaaugcuuuccaaaug

SEQ ID NO: 2473775 - RNA, 19 nt, Artificial Sequence
  Description of Artificial Sequence: Synthetic oligonucleotide
  Antisense strand to SEQ ID NO: 2473774
cauuuggaaagcauucagc

SEQ ID NO: 2473776 - RNA, 19 nt, Artificial Sequence
  Description of Artificial Sequence: Synthetic oligonucleotide
  Sense strand starting at position 2113 of SEQ ID NO: 1887456
aaaucucuguuaucgguau

SEQ ID NO: 2473777 - RNA, 19 nt, Artificial Sequence
  Description of Artificial Sequence: Synthetic oligonucleotide
  Antisense strand to SEQ ID NO: 2473776
auaccgauaacagagauuu

SEQ ID NO: 2473778 - RNA, 19 nt, Artificial Sequence
  Description of Artificial Sequence: Synthetic oligonucleotide
  Sense strand starting at position 2119 of SEQ ID NO: 1887456
cuguuaucgguauagcaac

SEQ ID NO: 2473779 - RNA, 19 nt, Artificial Sequence
  Description of Artificial Sequence: Synthetic oligonucleotide
  Antisense strand to SEQ ID NO: 2473778
guugcuauaccgauaacag

SEQ ID NO: 2473780 - RNA, 19 nt, Artificial Sequence
  Description of Artificial Sequence: Synthetic oligonucleotide
  Sense strand starting at position 2245 of SEQ ID NO: 1887456
uugaaugauuagucuggua

SEQ ID NO: 2473781 - RNA, 19 nt, Artificial Sequence
  Description of Artificial Sequence: Synthetic oligonucleotide
  Antisense strand to SEQ ID NO: 2473780
uaccagacuaaucauucaa

SEQ ID NO: 2473782 - RNA, 19 nt, Artificial Sequence
  Description of Artificial Sequence: Synthetic oligonucleotide
  Sense strand starting at position 2247 of SEQ ID NO: 1887456
gaaugauuagucugguaua

SEQ ID NO: 2473783 - RNA, 19 nt, Artificial Sequence
  Description of Artificial Sequence: Synthetic oligonucleotide
  Antisense strand to SEQ ID NO: 2473782
uauaccagacuaaucauuc

SEQ ID NO: 2473784 - RNA, 19 nt, Artificial Sequence
  Description of Artificial Sequence: Synthetic oligonucleotide
  Sense strand starting at position 2308 of SEQ ID NO: 1887456
uaugauaauugaguuggca

SEQ ID NO: 2473785 - RNA, 19 nt, Artificial Sequence
  Description of Artificial Sequence: Synthetic oligonucleotide
  Antisense strand to SEQ ID NO: 2473784
ugccaacucaauuaucaua

SEQ ID NO: 2473786 - RNA, 19 nt, Artificial Sequence
  Description of Artificial Sequence: Synthetic oligonucleotide
  Sense strand starting at position 2310 of SEQ ID NO: 1887456
ugauaauugaguuggcaaa

SEQ ID NO: 2473787 - RNA, 19 nt, Artificial Sequence
  Description of Artificial Sequence: Synthetic oligonucleotide
  Antisense strand to SEQ ID NO: 2473786
uuugccaacucaauuauca

SEQ ID NO: 2473788 - RNA, 19 nt, Artificial Sequence
  Description of Artificial Sequence: Synthetic oligonucleotide
  Sense strand starting at position 2311 of SEQ ID NO: 1887456
gauaauugaguuggcaaag

SEQ ID NO: 2473789 - RNA, 19 nt, Artificial Sequence
  Description of Artificial Sequence: Synthetic oligonucleotide
  Antisense strand to SEQ ID NO: 2473788
cuuugccaacucaauuauc

SEQ ID NO: 2473790 - RNA, 19 nt, Artificial Sequence
  Description of Artificial Sequence: Synthetic oligonucleotide
  Sense strand starting at position 2312 of SEQ ID NO: 1887456
auaauugaguuggcaaaga

SEQ ID NO: 2473791 - RNA, 19 nt, Artificial Sequence
  Description of Artificial Sequence: Synthetic oligonucleotide
  Antisense strand to SEQ ID NO: 2473790
ucuuugccaacucaauuau

SEQ ID NO: 2473792 - RNA, 19 nt, Artificial Sequence
  Description of Artificial Sequence: Synthetic oligonucleotide
  Sense strand starting at position 3053 of SEQ ID NO: 1887456
gugagacauaaguauugua

SEQ ID NO: 2473793 - RNA, 19 nt, Artificial Sequence
  Description of Artificial Sequence: Synthetic oligonucleotide
  Antisense strand to SEQ ID NO: 2473792
uacaauacuuaugucucac

SEQ ID NO: 2473794 - RNA, 19 nt, Artificial Sequence
  Description of Artificial Sequence: Synthetic oligonucleotide
  Sense strand starting at position 3159 of SEQ ID NO: 1887456
guaauaugauauguagcau

SEQ ID NO: 2473795 - RNA, 19 nt, Artificial Sequence
  Description of Artificial Sequence: Synthetic oligonucleotide
  Antisense strand to SEQ ID NO: 2473794
augcuacauaucauauuac

SEQ ID NO: 2473796 - RNA, 19 nt, Artificial Sequence
  Description of Artificial Sequence: Synthetic oligonucleotide
  Sense strand starting at position 3165 of SEQ ID NO: 1887456
ugauauguagcauaaucaa

SEQ ID NO: 2473797 - RNA, 19 nt, Artificial Sequence
  Description of Artificial Sequence: Synthetic oligonucleotide
  Antisense strand to SEQ ID NO: 2473796
uugauuaugcuacauauca

SEQ ID NO: 2473798 - RNA, 19 nt, Artificial Sequence
  Description of Artificial Sequence: Synthetic oligonucleotide
  Sense strand starting at position 3209 of SEQ ID NO: 1887456
uuaucuguaggcuauaguu

SEQ ID NO: 2473799 - RNA, 19 nt, Artificial Sequence
  Description of Artificial Sequence: Synthetic oligonucleotide
  Antisense strand to SEQ ID NO: 2473798
aacuauagccuacagauaa

SEQ ID NO: 2473800 - RNA, 19 nt, Artificial Sequence
  Description of Artificial Sequence: Synthetic oligonucleotide
  Sense strand starting at position 3306 of SEQ ID NO: 1887456
aauaauguaguugguacaa

SEQ ID NO: 2473801 - RNA, 19 nt, Artificial Sequence
  Description of Artificial Sequence: Synthetic oligonucleotide
  Antisense strand to SEQ ID NO: 2473800
uuguaccaacuacauuauu

SEQ ID NO: 2473802 - RNA, 19 nt, Artificial Sequence
  Description of Artificial Sequence: Synthetic oligonucleotide
  Sense strand starting at position 3842 of SEQ ID NO: 1887456
uguaauaacugaucuugug

SEQ ID NO: 2473803 - RNA, 19 nt, Artificial Sequence
  Description of Artificial Sequence: Synthetic oligonucleotide
  Antisense strand to SEQ ID NO: 2473802
cacaagaucaguuauuaca

SEQ ID NO: 2473804 - RNA, 19 nt, Artificial Sequence
  Description of Artificial Sequence: Synthetic oligonucleotide
  Sense strand starting at position 3858 of SEQ ID NO: 1887456
gugauauaccuuuaugauu

SEQ ID NO: 2473805 - RNA, 19 nt, Artificial Sequence
  Description of Artificial Sequence: Synthetic oligonucleotide
  Antisense strand to SEQ ID NO: 2473804
aaucauaaagguauaucac

SEQ ID NO: 2473806 - RNA, 19 nt, Artificial Sequence
  Description of Artificial Sequence: Synthetic oligonucleotide
  Sense strand starting at position 256 of SEQ ID NO: 1887457
ggcucaguucugggaagag

SEQ ID NO: 2473807 - RNA, 19 nt, Artificial Sequence
  Description of Artificial Sequence: Synthetic oligonucleotide
  Antisense strand to SEQ ID NO: 2473806
cucuucccagaacugagcc

SEQ ID NO: 2473808 - RNA, 19 nt, Artificial Sequence
  Description of Artificial Sequence: Synthetic oligonucleotide
  Sense strand starting at position 275 of SEQ ID NO: 1887457
uugagcuucucucugagaa

SEQ ID NO: 2473809 - RNA, 19 nt, Artificial Sequence
  Description of Artificial Sequence: Synthetic oligonucleotide
  Antisense strand to SEQ ID NO: 2473808
uucucagagagaagcucaa

SEQ ID NO: 2473810 - RNA, 19 nt, Artificial Sequence
  Description of Artificial Sequence: Synthetic oligonucleotide
  Sense strand starting at position 276 of SEQ ID NO: 1887457
ugagcuucucucugagaau

SEQ ID NO: 2473811 - RNA, 19 nt, Artificial Sequence
  Description of Artificial Sequence: Synthetic oligonucleotide
  Antisense strand to SEQ ID NO: 2473810
auucucagagagaagcuca

SEQ ID NO: 2473812 - RNA, 19 nt, Artificial Sequence
  Description of Artificial Sequence: Synthetic oligonucleotide
  Sense strand starting at position 582 of SEQ ID NO: 1887457
aucccauaugugggaagua

SEQ ID NO: 2473813 - RNA, 19 nt, Artificial Sequence
  Description of Artificial Sequence: Synthetic oligonucleotide
  Antisense strand to SEQ ID NO: 2473812
uacuucccacauaugggau

SEQ ID NO: 2473814 - RNA, 19 nt, Artificial Sequence
  Description of Artificial Sequence: Synthetic oligonucleotide
  Sense strand starting at position 1011 of SEQ ID NO: 1887457
gagaaagcaucagucaaua

SEQ ID NO: 2473815 - RNA, 19 nt, Artificial Sequence
  Description of Artificial Sequence: Synthetic oligonucleotide
  Antisense strand to SEQ ID NO: 2473814
uauugacugaugcuuucuc

SEQ ID NO: 2473816 - RNA, 19 nt, Artificial Sequence
  Description of Artificial Sequence: Synthetic oligonucleotide
  Sense strand starting at position 1251 of SEQ ID NO: 1887457
cagggcauccuugggagau

SEQ ID NO: 2473817 - RNA, 19 nt, Artificial Sequence
  Description of Artificial Sequence: Synthetic oligonucleotide
  Antisense strand to SEQ ID NO: 2473816
aucucccaaggaugcccug

SEQ ID NO: 2473818 - RNA, 19 nt, Artificial Sequence
  Description of Artificial Sequence: Synthetic oligonucleotide
  Sense strand starting at position 1372 of SEQ ID NO: 1887457
agaucucuuugggugucua

SEQ ID NO: 2473819 - RNA, 19 nt, Artificial Sequence
  Description of Artificial Sequence: Synthetic oligonucleotide
  Antisense strand to SEQ ID NO: 2473818
uagacacccaaagagaucu

SEQ ID NO: 2473820 - RNA, 19 nt, Artificial Sequence
  Description of Artificial Sequence: Synthetic oligonucleotide
  Sense strand starting at position 1394 of SEQ ID NO: 1887457
ucaucucugcaagagugua

SEQ ID NO: 2473821 - RNA, 19 nt, Artificial Sequence
  Description of Artificial Sequence: Synthetic oligonucleotide
  Antisense strand to SEQ ID NO: 2473820
uacacucuugcagagauga

SEQ ID NO: 2473822 - RNA, 19 nt, Artificial Sequence
  Description of Artificial Sequence: Synthetic oligonucleotide
  Sense strand starting at position 1424 of SEQ ID NO: 1887457
cacagagacuugucugaua

SEQ ID NO: 2473823 - RNA, 19 nt, Artificial Sequence
  Description of Artificial Sequence: Synthetic oligonucleotide
  Antisense strand to SEQ ID NO: 2473822
uaucagacaagucucugug

SEQ ID NO: 2473824 - RNA, 19 nt, Artificial Sequence
  Description of Artificial Sequence: Synthetic oligonucleotide
  Sense strand starting at position 1426 of SEQ ID NO: 1887457
cagagacuugucugauauu

SEQ ID NO: 2473825 - RNA, 19 nt, Artificial Sequence
  Description of Artificial Sequence: Synthetic oligonucleotide
  Antisense strand to SEQ ID NO: 2473824
aauaucagacaagucucug

SEQ ID NO: 2473826 - RNA, 19 nt, Artificial Sequence
  Description of Artificial Sequence: Synthetic oligonucleotide
  Sense strand starting at position 1427 of SEQ ID NO: 1887457
agagacuugucugauauuu

SEQ ID NO: 2473827 - RNA, 19 nt, Artificial Sequence
  Description of Artificial Sequence: Synthetic oligonucleotide
  Antisense strand to SEQ ID NO: 2473826
aaauaucagacaagucucu

SEQ ID NO: 2473828 - RNA, 19 nt, Artificial Sequence
  Description of Artificial Sequence: Synthetic oligonucleotide
  Sense strand starting at position 1433 of SEQ ID NO: 1887457
uugucugauauuuguugua

SEQ ID NO: 2473829 - RNA, 19 nt, Artificial Sequence
  Description of Artificial Sequence: Synthetic oligonucleotide
  Antisense strand to SEQ ID NO: 2473828
uacaacaaauaucagacaa

SEQ ID NO: 2473830 - RNA, 19 nt, Artificial Sequence
  Description of Artificial Sequence: Synthetic oligonucleotide
  Sense strand starting at position 1477 of SEQ ID NO: 1887457
aauacugguggaugaguua

SEQ ID NO: 2473831 - RNA, 19 nt, Artificial Sequence
  Description of Artificial Sequence: Synthetic oligonucleotide
  Antisense strand to SEQ ID NO: 2473830
uaacucauccaccaguauu

SEQ ID NO: 2473832 - RNA, 19 nt, Artificial Sequence
  Description of Artificial Sequence: Synthetic oligonucleotide
  Sense strand starting at position 1612 of SEQ ID NO: 1887457
aauuguaguggccaguaau

SEQ ID NO: 2473833 - RNA, 19 nt, Artificial Sequence
  Description of Artificial Sequence: Synthetic oligonucleotide
  Antisense strand to SEQ ID NO: 2473832
auuacuggccacuacaauu

SEQ ID NO: 2473834 - RNA, 19 nt, Artificial Sequence
  Description of Artificial Sequence: Synthetic oligonucleotide
  Sense strand starting at position 1615 of SEQ ID NO: 1887457
uguaguggccaguaaugau

SEQ ID NO: 2473835 - RNA, 19 nt, Artificial Sequence
  Description of Artificial Sequence: Synthetic oligonucleotide
  Antisense strand to SEQ ID NO: 2473834
aucauuacuggccacuaca

SEQ ID NO: 2473836 - RNA, 19 nt, Artificial Sequence
  Description of Artificial Sequence: Synthetic oligonucleotide
  Sense strand starting at position 2044 of SEQ ID NO: 1887457
gagcacuuuccagggucau

SEQ ID NO: 2473837 - RNA, 19 nt, Artificial Sequence
  Description of Artificial Sequence: Synthetic oligonucleotide
  Antisense strand to SEQ ID NO: 2473836
augacccuggaaagugcuc

SEQ ID NO: 2473838 - RNA, 19 nt, Artificial Sequence
  Description of Artificial Sequence: Synthetic oligonucleotide
  Sense strand starting at position 2311 of SEQ ID NO: 1887457
uuucucugugacggagaaa

SEQ ID NO: 2473839 - RNA, 19 nt, Artificial Sequence
  Description of Artificial Sequence: Synthetic oligonucleotide
  Antisense strand to SEQ ID NO: 2473838
uuucuccgucacagagaaa

SEQ ID NO: 2473840 - RNA, 19 nt, Artificial Sequence
  Description of Artificial Sequence: Synthetic oligonucleotide
  Sense strand starting at position 2359 of SEQ ID NO: 1887457
guucucacaugucugggaa

SEQ ID NO: 2473841 - RNA, 19 nt, Artificial Sequence
  Description of Artificial Sequence: Synthetic oligonucleotide
  Antisense strand to SEQ ID NO: 2473840
uucccagacaugugagaac

SEQ ID NO: 2473842 - RNA, 19 nt, Artificial Sequence
  Description of Artificial Sequence: Synthetic oligonucleotide
  Sense strand starting at position 2362 of SEQ ID NO: 1887457
cucacaugucugggaaggu

SEQ ID NO: 2473843 - RNA, 19 nt, Artificial Sequence
  Description of Artificial Sequence: Synthetic oligonucleotide
  Antisense strand to SEQ ID NO: 2473842
accuucccagacaugugag

SEQ ID NO: 2473844 - RNA, 19 nt, Artificial Sequence
  Description of Artificial Sequence: Synthetic oligonucleotide
  Sense strand starting at position 2381 of SEQ ID NO: 1887457
uggauuuacucccagcaag

SEQ ID NO: 2473845 - RNA, 19 nt, Artificial Sequence
  Description of Artificial Sequence: Synthetic oligonucleotide
  Antisense strand to SEQ ID NO: 2473844
cuugcugggaguaaaucca

SEQ ID NO: 2473846 - RNA, 19 nt, Artificial Sequence
  Description of Artificial Sequence: Synthetic oligonucleotide
  Sense strand starting at position 2419 of SEQ ID NO: 1887457
ggguccuacaaauggauau

SEQ ID NO: 2473847 - RNA, 19 nt, Artificial Sequence
  Description of Artificial Sequence: Synthetic oligonucleotide
  Antisense strand to SEQ ID NO: 2473846
auauccauuuguaggaccc

SEQ ID NO: 2473848 - RNA, 19 nt, Artificial Sequence
  Description of Artificial Sequence: Synthetic oligonucleotide
  Sense strand starting at position 2431 of SEQ ID NO: 1887457
uggauauaucuagggcuaa

SEQ ID NO: 2473849 - RNA, 19 nt, Artificial Sequence
  Description of Artificial Sequence: Synthetic oligonucleotide
  Antisense strand to SEQ ID NO: 2473848
uuagcccuagauauaucca

SEQ ID NO: 2473850 - RNA, 19 nt, Artificial Sequence
  Description of Artificial Sequence: Synthetic oligonucleotide
  Sense strand starting at position 2444 of SEQ ID NO: 1887457
ggcuaaagcccggaucuaa

SEQ ID NO: 2473851 - RNA, 19 nt, Artificial Sequence
  Description of Artificial Sequence: Synthetic oligonucleotide
  Antisense strand to SEQ ID NO: 2473850
uuagauccgggcuuuagcc

SEQ ID NO: 2473852 - RNA, 19 nt, Artificial Sequence
  Description of Artificial Sequence: Synthetic oligonucleotide
  Sense strand starting at position 2485 of SEQ ID NO: 1887457
agcauuaugugacucuaau

SEQ ID NO: 2473853 - RNA, 19 nt, Artificial Sequence
  Description of Artificial Sequence: Synthetic oligonucleotide
  Antisense strand to SEQ ID NO: 2473852
auuagagucacauaaugcu

SEQ ID NO: 2473854 - RNA, 19 nt, Artificial Sequence
  Description of Artificial Sequence: Synthetic oligonucleotide
  Sense strand starting at position 2573 of SEQ ID NO: 1887457
cuaggcugacuuuaugauu

SEQ ID NO: 2473855 - RNA, 19 nt, Artificial Sequence
  Description of Artificial Sequence: Synthetic oligonucleotide
  Antisense strand to SEQ ID NO: 2473854
aaucauaaagucagccuag

SEQ ID NO: 2473856 - RNA, 19 nt, Artificial Sequence
  Description of Artificial Sequence: Synthetic oligonucleotide
  Sense strand starting at position 2798 of SEQ ID NO: 1887457
acagauuugaugugugcuu

SEQ ID NO: 2473857 - RNA, 19 nt, Artificial Sequence
  Description of Artificial Sequence: Synthetic oligonucleotide
  Antisense strand to SEQ ID NO: 2473856
aagcacacaucaaaucugu

SEQ ID NO: 2473858 - RNA, 19 nt, Artificial Sequence
  Description of Artificial Sequence: Synthetic oligonucleotide
  Sense strand starting at position 2799 of SEQ ID NO: 1887457
cagauuugaugugugcuua

SEQ ID NO: 2473859 - RNA, 19 nt, Artificial Sequence
  Description of Artificial Sequence: Synthetic oligonucleotide
  Antisense strand to SEQ ID NO: 2473858
uaagcacacaucaaaucug

SEQ ID NO: 2473860 - RNA, 19 nt, Artificial Sequence
  Description of Artificial Sequence: Synthetic oligonucleotide
  Sense strand starting at position 2932 of SEQ ID NO: 1887457
ugaacuuuauguccagaug

SEQ ID NO: 2473861 - RNA, 19 nt, Artificial Sequence
  Description of Artificial Sequence: Synthetic oligonucleotide
  Antisense strand to SEQ ID NO: 2473860
caucuggacauaaaguuca

SEQ ID NO: 2473862 - RNA, 19 nt, Artificial Sequence
  Description of Artificial Sequence: Synthetic oligonucleotide
  Sense strand starting at position 2933 of SEQ ID NO: 1887457
gaacuuuauguccagaugu

SEQ ID NO: 2473863 - RNA, 19 nt, Artificial Sequence
  Description of Artificial Sequence: Synthetic oligonucleotide
  Antisense strand to SEQ ID NO: 2473862
acaucuggacauaaaguuc

SEQ ID NO: 2473864 - RNA, 19 nt, Artificial Sequence
  Description of Artificial Sequence: Synthetic oligonucleotide
  Sense strand starting at position 2935 of SEQ ID NO: 1887457
acuuuauguccagauguac

SEQ ID NO: 2473865 - RNA, 19 nt, Artificial Sequence
  Description of Artificial Sequence: Synthetic oligonucleotide
  Antisense strand to SEQ ID NO: 2473864
guacaucuggacauaaagu

SEQ ID NO: 2473866 - RNA, 19 nt, Artificial Sequence
  Description of Artificial Sequence: Synthetic oligonucleotide
  Sense strand starting at position 3070 of SEQ ID NO: 1887457
aguuguugggaauaaguga

SEQ ID NO: 2473867 - RNA, 19 nt, Artificial Sequence
  Description of Artificial Sequence: Synthetic oligonucleotide
  Antisense strand to SEQ ID NO: 2473866
ucacuuauucccaacaacu

SEQ ID NO: 2473868 - RNA, 19 nt, Artificial Sequence
  Description of Artificial Sequence: Synthetic oligonucleotide
  Sense strand starting at position 3318 of SEQ ID NO: 1887457
ggucaaguugccuaacuuu

SEQ ID NO: 2473869 - RNA, 19 nt, Artificial Sequence
  Description of Artificial Sequence: Synthetic oligonucleotide
  Antisense strand to SEQ ID NO: 2473868
aaaguuaggcaacuugacc

SEQ ID NO: 2473870 - RNA, 19 nt, Artificial Sequence
  Description of Artificial Sequence: Synthetic oligonucleotide
  Sense strand starting at position 3615 of SEQ ID NO: 1887457
auguguggaaaguaucaca

SEQ ID NO: 2473871 - RNA, 19 nt, Artificial Sequence
  Description of Artificial Sequence: Synthetic oligonucleotide
  Antisense strand to SEQ ID NO: 2473870
ugugauacuuuccacacau

SEQ ID NO: 2473872 - RNA, 19 nt, Artificial Sequence
  Description of Artificial Sequence: Synthetic oligonucleotide
  Sense strand starting at position 3716 of SEQ ID NO: 1887457
ccgauaaauacuugagagu

SEQ ID NO: 2473873 - RNA, 19 nt, Artificial Sequence
  Description of Artificial Sequence: Synthetic oligonucleotide
  Antisense strand to SEQ ID NO: 2473872
acucucaaguauuuaucgg

SEQ ID NO: 2473874 - RNA, 19 nt, Artificial Sequence
  Description of Artificial Sequence: Synthetic oligonucleotide
  Sense strand starting at position 3730 of SEQ ID NO: 1887457
agaguccaugcugauauau

SEQ ID NO: 2473875 - RNA, 19 nt, Artificial Sequence
  Description of Artificial Sequence: Synthetic oligonucleotide
  Antisense strand to SEQ ID NO: 2473874
auauaucagcauggacucu

SEQ ID NO: 2473876 - RNA, 19 nt, Artificial Sequence
  Description of Artificial Sequence: Synthetic oligonucleotide
  Sense strand starting at position 3804 of SEQ ID NO: 1887457
agcagcguuccaguuaauc

SEQ ID NO: 2473877 - RNA, 19 nt, Artificial Sequence
  Description of Artificial Sequence: Synthetic oligonucleotide
  Antisense strand to SEQ ID NO: 2473876
gauuaacuggaacgcugcu

SEQ ID NO: 2473878 - RNA, 19 nt, Artificial Sequence
  Description of Artificial Sequence: Synthetic oligonucleotide
  Sense strand starting at position 3812 of SEQ ID NO: 1887457
uccaguuaaucaguguaga

SEQ ID NO: 2473879 - RNA, 19 nt, Artificial Sequence
  Description of Artificial Sequence: Synthetic oligonucleotide
  Antisense strand to SEQ ID NO: 2473878
ucuacacugauuaacugga

SEQ ID NO: 2473880 - RNA, 19 nt, Artificial Sequence
  Description of Artificial Sequence: Synthetic oligonucleotide
  Sense strand starting at position 3813 of SEQ ID NO: 1887457
ccaguuaaucaguguagaa

SEQ ID NO: 2473881 - RNA, 19 nt, Artificial Sequence
  Description of Artificial Sequence: Synthetic oligonucleotide
  Antisense strand to SEQ ID NO: 2473880
uucuacacugauuaacugg

SEQ ID NO: 2473882 - RNA, 19 nt, Artificial Sequence
  Description of Artificial Sequence: Synthetic oligonucleotide
  Sense strand starting at position 3879 of SEQ ID NO: 1887457
guuuaucggcuacaauuau

SEQ ID NO: 2473883 - RNA, 19 nt, Artificial Sequence
  Description of Artificial Sequence: Synthetic oligonucleotide
  Antisense strand to SEQ ID NO: 2473882
auaauuguagccgauaaac

SEQ ID NO: 2473884 - RNA, 19 nt, Artificial Sequence
  Description of Artificial Sequence: Synthetic oligonucleotide
  Sense strand starting at position 3965 of SEQ ID NO: 1887457
aguaccuguccacaagaua

SEQ ID NO: 2473885 - RNA, 19 nt, Artificial Sequence
  Description of Artificial Sequence: Synthetic oligonucleotide
  Antisense strand to SEQ ID NO: 2473884
uaucuuguggacagguacu

SEQ ID NO: 2473886 - RNA, 19 nt, Artificial Sequence
  Description of Artificial Sequence: Synthetic oligonucleotide
  Sense strand starting at position 3264 of SEQ ID NO: 1887458
ccaagaagucgguggacaa

SEQ ID NO: 2473887 - RNA, 19 nt, Artificial Sequence
  Description of Artificial Sequence: Synthetic oligonucleotide
  Antisense strand to SEQ ID NO: 2473886
uuguccaccgacuucuugg

SEQ ID NO: 2473888 - RNA, 19 nt, Artificial Sequence
  Description of Artificial Sequence: Synthetic oligonucleotide
  Sense strand starting at position 3388 of SEQ ID NO: 1887458
ggagcugaccagugacaau

SEQ ID NO: 2473889 - RNA, 19 nt, Artificial Sequence
  Description of Artificial Sequence: Synthetic oligonucleotide
  Antisense strand to SEQ ID NO: 2473888
auugucacuggucagcucc

SEQ ID NO: 2473890 - RNA, 19 nt, Artificial Sequence
  Description of Artificial Sequence: Synthetic oligonucleotide
  Sense strand starting at position 3480 of SEQ ID NO: 1887458
cagagagcuccuuggucaa

SEQ ID NO: 2473891 - RNA, 19 nt, Artificial Sequence
  Description of Artificial Sequence: Synthetic oligonucleotide
  Antisense strand to SEQ ID NO: 2473890
uugaccaaggagcucucug

SEQ ID NO: 2473892 - RNA, 19 nt, Artificial Sequence
  Description of Artificial Sequence: Synthetic oligonucleotide
  Sense strand starting at position 3776 of SEQ ID NO: 1887458
cggcaacucuaguauuuag

SEQ ID NO: 2473893 - RNA, 19 nt, Artificial Sequence
  Description of Artificial Sequence: Synthetic oligonucleotide
  Antisense strand to SEQ ID NO: 2473892
cuaaauacuagaguugccg

SEQ ID NO: 2473894 - RNA, 19 nt, Artificial Sequence
  Description of Artificial Sequence: Synthetic oligonucleotide
  Sense strand starting at position 3798 of SEQ ID NO: 1887458
aaccuugugccuuggaaau

SEQ ID NO: 2473895 - RNA, 19 nt, Artificial Sequence
  Description of Artificial Sequence: Synthetic oligonucleotide
  Antisense strand to SEQ ID NO: 2473894
auuuccaaggcacaagguu

SEQ ID NO: 2473896 - RNA, 19 nt, Artificial Sequence
  Description of Artificial Sequence: Synthetic oligonucleotide
  Sense strand starting at position 3853 of SEQ ID NO: 1887458
agcaaaucgugccuuguca

SEQ ID NO: 2473897 - RNA, 19 nt, Artificial Sequence
  Description of Artificial Sequence: Synthetic oligonucleotide
  Antisense strand to SEQ ID NO: 2473896
ugacaaggcacgauuugcu

SEQ ID NO: 2473898 - RNA, 19 nt, Artificial Sequence
  Description of Artificial Sequence: Synthetic oligonucleotide
  Sense strand starting at position 3854 of SEQ ID NO: 1887458
gcaaaucgugccuugucau

SEQ ID NO: 2473899 - RNA, 19 nt, Artificial Sequence
  Description of Artificial Sequence: Synthetic oligonucleotide
  Antisense strand to SEQ ID NO: 2473898
augacaaggcacgauuugc

SEQ ID NO: 2473900 - RNA, 19 nt, Artificial Sequence
  Description of Artificial Sequence: Synthetic oligonucleotide
  Sense strand starting at position 3855 of SEQ ID NO: 1887458
caaaucgugccuugucauu

SEQ ID NO: 2473901 - RNA, 19 nt, Artificial Sequence
  Description of Artificial Sequence: Synthetic oligonucleotide
  Antisense strand to SEQ ID NO: 2473900
aaugacaaggcacgauuug

SEQ ID NO: 2473902 - RNA, 19 nt, Artificial Sequence
  Description of Artificial Sequence: Synthetic oligonucleotide
  Sense strand starting at position 83 of SEQ ID NO: 1887459
cuaauaaggucauguuggu

SEQ ID NO: 2473903 - RNA, 19 nt, Artificial Sequence
  Description of Artificial Sequence: Synthetic oligonucleotide
  Antisense strand to SEQ ID NO: 2473902
accaacaugaccuuauuag

SEQ ID NO: 2473904 - RNA, 19 nt, Artificial Sequence
  Description of Artificial Sequence: Synthetic oligonucleotide
  Sense strand starting at position 255 of SEQ ID NO: 1887459
gaugcugauucugaagaca

SEQ ID NO: 2473905 - RNA, 19 nt, Artificial Sequence
  Description of Artificial Sequence: Synthetic oligonucleotide
  Antisense strand to SEQ ID NO: 2473904
ugucuucagaaucagcauc

SEQ ID NO: 2473906 - RNA, 19 nt, Artificial Sequence
  Description of Artificial Sequence: Synthetic oligonucleotide
  Sense strand starting at position 581 of SEQ ID NO: 1887459
ugguccugcucuguugaca

SEQ ID NO: 2473907 - RNA, 19 nt, Artificial Sequence
  Description of Artificial Sequence: Synthetic oligonucleotide
  Antisense strand to SEQ ID NO: 2473906
ugucaacagagcaggacca

SEQ ID NO: 2473908 - RNA, 19 nt, Artificial Sequence
  Description of Artificial Sequence: Synthetic oligonucleotide
  Sense strand starting at position 841 of SEQ ID NO: 1887459
acgggaaucuuucuagaaa

SEQ ID NO: 2473909 - RNA, 19 nt, Artificial Sequence
  Description of Artificial Sequence: Synthetic oligonucleotide
  Antisense strand to SEQ ID NO: 2473908
uuucuagaaagauucccgu

SEQ ID NO: 2473910 - RNA, 19 nt, Artificial Sequence
  Description of Artificial Sequence: Synthetic oligonucleotide
  Sense strand starting at position 842 of SEQ ID NO: 1887459
cgggaaucuuucuagaaau

SEQ ID NO: 2473911 - RNA, 19 nt, Artificial Sequence
  Description of Artificial Sequence: Synthetic oligonucleotide
  Antisense strand to SEQ ID NO: 2473910
auuucuagaaagauucccg

SEQ ID NO: 2473912 - RNA, 19 nt, Artificial Sequence
  Description of Artificial Sequence: Synthetic oligonucleotide
  Sense strand starting at position 1081 of SEQ ID NO: 1887459
ggguuucuuuccucccuca

SEQ ID NO: 2473913 - RNA, 19 nt, Artificial Sequence
  Description of Artificial Sequence: Synthetic oligonucleotide
  Antisense strand to SEQ ID NO: 2473912
ugagggaggaaagaaaccc

SEQ ID NO: 2473914 - RNA, 19 nt, Artificial Sequence
  Description of Artificial Sequence: Synthetic oligonucleotide
  Sense strand starting at position 1326 of SEQ ID NO: 1887459
cagggucuuccuggaggau

SEQ ID NO: 2473915 - RNA, 19 nt, Artificial Sequence
  Description of Artificial Sequence: Synthetic oligonucleotide
  Antisense strand to SEQ ID NO: 2473914
auccuccaggaagacccug

SEQ ID NO: 2473916 - RNA, 19 nt, Artificial Sequence
  Description of Artificial Sequence: Synthetic oligonucleotide
  Sense strand starting at position 1507 of SEQ ID NO: 1887459
augccaucggagggagaau

SEQ ID NO: 2473917 - RNA, 19 nt, Artificial Sequence
  Description of Artificial Sequence: Synthetic oligonucleotide
  Antisense strand to SEQ ID NO: 2473916
auucucccuccgauggcau

SEQ ID NO: 2473918 - RNA, 19 nt, Artificial Sequence
  Description of Artificial Sequence: Synthetic oligonucleotide
  Sense strand starting at position 1848 of SEQ ID NO: 1887459
ccgucuuccuuuguaguua

SEQ ID NO: 2473919 - RNA, 19 nt, Artificial Sequence
  Description of Artificial Sequence: Synthetic oligonucleotide
  Antisense strand to SEQ ID NO: 2473918
uaacuacaaaggaagacgg

SEQ ID NO: 2473920 - RNA, 19 nt, Artificial Sequence
  Description of Artificial Sequence: Synthetic oligonucleotide
  Sense strand starting at position 3077 of SEQ ID NO: 1887459
gggcaucggccggaagaau

SEQ ID NO: 2473921 - RNA, 19 nt, Artificial Sequence
  Description of Artificial Sequence: Synthetic oligonucleotide
  Antisense strand to SEQ ID NO: 2473920
auucuuccggccgaugccc

SEQ ID NO: 2473922 - RNA, 19 nt, Artificial Sequence
  Description of Artificial Sequence: Synthetic oligonucleotide
  Sense strand starting at position 3130 of SEQ ID NO: 1887459
cguugaaagcgcccgugau

SEQ ID NO: 2473923 - RNA, 19 nt, Artificial Sequence
  Description of Artificial Sequence: Synthetic oligonucleotide
  Antisense strand to SEQ ID NO: 2473922
aucacgggcgcuuucaacg

SEQ ID NO: 2473924 - RNA, 19 nt, Artificial Sequence
  Description of Artificial Sequence: Synthetic oligonucleotide
  Sense strand starting at position 3131 of SEQ ID NO: 1887459
guugaaagcgcccgugauc

SEQ ID NO: 2473925 - RNA, 19 nt, Artificial Sequence
  Description of Artificial Sequence: Synthetic oligonucleotide
  Antisense strand to SEQ ID NO: 2473924
gaucacgggcgcuuucaac

SEQ ID NO: 2473926 - RNA, 19 nt, Artificial Sequence
  Description of Artificial Sequence: Synthetic oligonucleotide
  Sense strand starting at position 3140 of SEQ ID NO: 1887459
gcccgugauccuuaaagua

SEQ ID NO: 2473927 - RNA, 19 nt, Artificial Sequence
  Description of Artificial Sequence: Synthetic oligonucleotide
  Antisense strand to SEQ ID NO: 2473926
uacuuuaaggaucacgggc

SEQ ID NO: 2473928 - RNA, 19 nt, Artificial Sequence
  Description of Artificial Sequence: Synthetic oligonucleotide
  Sense strand starting at position 3156 of SEQ ID NO: 1887459
guagguaacucaucaauaa

SEQ ID NO: 2473929 - RNA, 19 nt, Artificial Sequence
  Description of Artificial Sequence: Synthetic oligonucleotide
  Antisense strand to SEQ ID NO: 2473928
uuauugaugaguuaccuac

SEQ ID NO: 2473930 - RNA, 19 nt, Artificial Sequence
  Description of Artificial Sequence: Synthetic oligonucleotide
  Sense strand starting at position 3626 of SEQ ID NO: 1887459
gaaaguguccuuggcccuu

SEQ ID NO: 2473931 - RNA, 19 nt, Artificial Sequence
  Description of Artificial Sequence: Synthetic oligonucleotide
  Antisense strand to SEQ ID NO: 2473930
aagggccaaggacacuuuc

SEQ ID NO: 2473932 - RNA, 19 nt, Artificial Sequence
  Description of Artificial Sequence: Synthetic oligonucleotide
  Sense strand starting at position 3639 of SEQ ID NO: 1887459
gcccuuuaaguauguaacu

SEQ ID NO: 2473933 - RNA, 19 nt, Artificial Sequence
  Description of Artificial Sequence: Synthetic oligonucleotide
  Antisense strand to SEQ ID NO: 2473932
aguuacauacuuaaagggc

SEQ ID NO: 2473934 - RNA, 19 nt, Artificial Sequence
  Description of Artificial Sequence: Synthetic oligonucleotide
  Sense strand starting at position 3644 of SEQ ID NO: 1887459
uuaaguauguaacucauca

SEQ ID NO: 2473935 - RNA, 19 nt, Artificial Sequence
  Description of Artificial Sequence: Synthetic oligonucleotide
  Antisense strand to SEQ ID NO: 2473934
ugaugaguuacauacuuaa

SEQ ID NO: 2473936 - RNA, 19 nt, Artificial Sequence
  Description of Artificial Sequence: Synthetic oligonucleotide
  Sense strand starting at position 3684 of SEQ ID NO: 1887459
gagacuggcucgcacugau

SEQ ID NO: 2473937 - RNA, 19 nt, Artificial Sequence
  Description of Artificial Sequence: Synthetic oligonucleotide
  Antisense strand to SEQ ID NO: 2473936
aucagugcgagccagucuc

SEQ ID NO: 2473938 - RNA, 19 nt, Artificial Sequence
  Description of Artificial Sequence: Synthetic oligonucleotide
  Sense strand starting at position 3687 of SEQ ID NO: 1887459
acuggcucgcacugauaau

SEQ ID NO: 2473939 - RNA, 19 nt, Artificial Sequence
  Description of Artificial Sequence: Synthetic oligonucleotide
  Antisense strand to SEQ ID NO: 2473938
auuaucagugcgagccagu

SEQ ID NO: 2473940 - RNA, 19 nt, Artificial Sequence
  Description of Artificial Sequence: Synthetic oligonucleotide
  Sense strand starting at position 3725 of SEQ ID NO: 1887459
ugaaguaucucccagcucu

SEQ ID NO: 2473941 - RNA, 19 nt, Artificial Sequence
  Description of Artificial Sequence: Synthetic oligonucleotide
  Antisense strand to SEQ ID NO: 2473940
agagcugggagauacuuca

SEQ ID NO: 2473942 - RNA, 19 nt, Artificial Sequence
  Description of Artificial Sequence: Synthetic oligonucleotide
  Sense strand starting at position 3739 of SEQ ID NO: 1887459
gcucuaaagugcccgugau

SEQ ID NO: 2473943 - RNA, 19 nt, Artificial Sequence
  Description of Artificial Sequence: Synthetic oligonucleotide
  Antisense strand to SEQ ID NO: 2473942
aucacgggcacuuuagagc

SEQ ID NO: 2473944 - RNA, 19 nt, Artificial Sequence
  Description of Artificial Sequence: Synthetic oligonucleotide
  Sense strand starting at position 3740 of SEQ ID NO: 1887459
cucuaaagugcccgugauc

SEQ ID NO: 2473945 - RNA, 19 nt, Artificial Sequence
  Description of Artificial Sequence: Synthetic oligonucleotide
  Antisense strand to SEQ ID NO: 2473944
gaucacgggcacuuuagag

SEQ ID NO: 2473946 - RNA, 19 nt, Artificial Sequence
  Description of Artificial Sequence: Synthetic oligonucleotide
  Sense strand starting at position 3749 of SEQ ID NO: 1887459
gcccgugauccuuuacgua

SEQ ID NO: 2473947 - RNA, 19 nt, Artificial Sequence
  Description of Artificial Sequence: Synthetic oligonucleotide
  Antisense strand to SEQ ID NO: 2473946
uacguaaaggaucacgggc

SEQ ID NO: 2473948 - RNA, 19 nt, Artificial Sequence
  Description of Artificial Sequence: Synthetic oligonucleotide
  Sense strand starting at position 3752 of SEQ ID NO: 1887459
cgugauccuuuacguauga

SEQ ID NO: 2473949 - RNA, 19 nt, Artificial Sequence
  Description of Artificial Sequence: Synthetic oligonucleotide
  Antisense strand to SEQ ID NO: 2473948
ucauacguaaaggaucacg

SEQ ID NO: 2473950 - RNA, 19 nt, Artificial Sequence
  Description of Artificial Sequence: Synthetic oligonucleotide
  Sense strand starting at position 3753 of SEQ ID NO: 1887459
gugauccuuuacguaugaa

SEQ ID NO: 2473951 - RNA, 19 nt, Artificial Sequence
  Description of Artificial Sequence: Synthetic oligonucleotide
  Antisense strand to SEQ ID NO: 2473950
uucauacguaaaggaucac

SEQ ID NO: 2473952 - RNA, 19 nt, Artificial Sequence
  Description of Artificial Sequence: Synthetic oligonucleotide
  Sense strand starting at position 3756 of SEQ ID NO: 1887459
auccuuuacguaugaaacu

SEQ ID NO: 2473953 - RNA, 19 nt, Artificial Sequence
  Description of Artificial Sequence: Synthetic oligonucleotide
  Antisense strand to SEQ ID NO: 2473952
aguuucauacguaaaggau

SEQ ID NO: 2473954 - RNA, 19 nt, Artificial Sequence
  Description of Artificial Sequence: Synthetic oligonucleotide
  Sense strand starting at position 3907 of SEQ ID NO: 1887459
gugagacgccauugcugua

SEQ ID NO: 2473955 - RNA, 19 nt, Artificial Sequence
  Description of Artificial Sequence: Synthetic oligonucleotide
  Antisense strand to SEQ ID NO: 2473954
uacagcaauggcgucucac

SEQ ID NO: 2473956 - RNA, 19 nt, Artificial Sequence
  Description of Artificial Sequence: Synthetic oligonucleotide
  Sense strand starting at position 69 of SEQ ID NO: 1887460
gaaccaugugaauguaaca

SEQ ID NO: 2473957 - RNA, 19 nt, Artificial Sequence
  Description of Artificial Sequence: Synthetic oligonucleotide
  Antisense strand to SEQ ID NO: 2473956
uguuacauucacaugguuc

SEQ ID NO: 2473958 - RNA, 19 nt, Artificial Sequence
  Description of Artificial Sequence: Synthetic oligonucleotide
  Sense strand starting at position 244 of SEQ ID NO: 1887460
gcgaaaccaugucuguauu

SEQ ID NO: 2473959 - RNA, 19 nt, Artificial Sequence
  Description of Artificial Sequence: Synthetic oligonucleotide
  Antisense strand to SEQ ID NO: 2473958
aauacagacaugguuucgc

SEQ ID NO: 2473960 - RNA, 19 nt, Artificial Sequence
  Description of Artificial Sequence: Synthetic oligonucleotide
  Sense strand starting at position 245 of SEQ ID NO: 1887460
cgaaaccaugucuguauua

SEQ ID NO: 2473961 - RNA, 19 nt, Artificial Sequence
  Description of Artificial Sequence: Synthetic oligonucleotide
  Antisense strand to SEQ ID NO: 2473960
uaauacagacaugguuucg

SEQ ID NO: 2473962 - RNA, 19 nt, Artificial Sequence
  Description of Artificial Sequence: Synthetic oligonucleotide
  Sense strand starting at position 558 of SEQ ID NO: 1887460
gccagauccugccauugca

SEQ ID NO: 2473963 - RNA, 19 nt, Artificial Sequence
  Description of Artificial Sequence: Synthetic oligonucleotide
  Antisense strand to SEQ ID NO: 2473962
ugcaauggcaggaucuggc

SEQ ID NO: 2473964 - RNA, 19 nt, Artificial Sequence
  Description of Artificial Sequence: Synthetic oligonucleotide
  Sense strand starting at position 1081 of SEQ ID NO: 1887460
cugaccguucuuuguggaa

SEQ ID NO: 2473965 - RNA, 19 nt, Artificial Sequence
  Description of Artificial Sequence: Synthetic oligonucleotide
  Antisense strand to SEQ ID NO: 2473964
uuccacaaagaacggucag

SEQ ID NO: 2473966 - RNA, 19 nt, Artificial Sequence
  Description of Artificial Sequence: Synthetic oligonucleotide
  Sense strand starting at position 1083 of SEQ ID NO: 1887460
gaccguucuuuguggaaug

SEQ ID NO: 2473967 - RNA, 19 nt, Artificial Sequence
  Description of Artificial Sequence: Synthetic oligonucleotide
  Antisense strand to SEQ ID NO: 2473966
cauuccacaaagaacgguc

SEQ ID NO: 2473968 - RNA, 19 nt, Artificial Sequence
  Description of Artificial Sequence: Synthetic oligonucleotide
  Sense strand starting at position 1084 of SEQ ID NO: 1887460
accguucuuuguggaauga

SEQ ID NO: 2473969 - RNA, 19 nt, Artificial Sequence
  Description of Artificial Sequence: Synthetic oligonucleotide
  Antisense strand to SEQ ID NO: 2473968
ucauuccacaaagaacggu

SEQ ID NO: 2473970 - RNA, 19 nt, Artificial Sequence
  Description of Artificial Sequence: Synthetic oligonucleotide
  Sense strand starting at position 1101 of SEQ ID NO: 1887460
gacuacaccuaugaugagu

SEQ ID NO: 2473971 - RNA, 19 nt, Artificial Sequence
  Description of Artificial Sequence: Synthetic oligonucleotide
  Antisense strand to SEQ ID NO: 2473970
acucaucauagguguaguc

SEQ ID NO: 2473972 - RNA, 19 nt, Artificial Sequence
  Description of Artificial Sequence: Synthetic oligonucleotide
  Sense strand starting at position 1131 of SEQ ID NO: 1887460
ccaugcaccugccuugaaa

SEQ ID NO: 2473973 - RNA, 19 nt, Artificial Sequence
  Description of Artificial Sequence: Synthetic oligonucleotide
  Antisense strand to SEQ ID NO: 2473972
uuucaaggcaggugcaugg

SEQ ID NO: 2473974 - RNA, 19 nt, Artificial Sequence
  Description of Artificial Sequence: Synthetic oligonucleotide
  Sense strand starting at position 1396 of SEQ ID NO: 1887460
ucacgaagucuggguggau

SEQ ID NO: 2473975 - RNA, 19 nt, Artificial Sequence
  Description of Artificial Sequence: Synthetic oligonucleotide
  Antisense strand to SEQ ID NO: 2473974
auccacccagacuucguga

SEQ ID NO: 2473976 - RNA, 19 nt, Artificial Sequence
  Description of Artificial Sequence: Synthetic oligonucleotide
  Sense strand starting at position 1398 of SEQ ID NO: 1887460
acgaagucuggguggauga

SEQ ID NO: 2473977 - RNA, 19 nt, Artificial Sequence
  Description of Artificial Sequence: Synthetic oligonucleotide
  Antisense strand to SEQ ID NO: 2473976
ucauccacccagacuucgu

SEQ ID NO: 2473978 - RNA, 19 nt, Artificial Sequence
  Description of Artificial Sequence: Synthetic oligonucleotide
  Sense strand starting at position 1630 of SEQ ID NO: 1887460
cguguagcgggucuacauu

SEQ ID NO: 2473979 - RNA, 19 nt, Artificial Sequence
  Description of Artificial Sequence: Synthetic oligonucleotide
  Antisense strand to SEQ ID NO: 2473978
aauguagacccgcuacacg

SEQ ID NO: 2473980 - RNA, 19 nt, Artificial Sequence
  Description of Artificial Sequence: Synthetic oligonucleotide
  Sense strand starting at position 2116 of SEQ ID NO: 1887460
uggcuuucucgccgccuaa

SEQ ID NO: 2473981 - RNA, 19 nt, Artificial Sequence
  Description of Artificial Sequence: Synthetic oligonucleotide
  Antisense strand to SEQ ID NO: 2473980
uuaggcggcgagaaagcca

SEQ ID NO: 2473982 - RNA, 19 nt, Artificial Sequence
  Description of Artificial Sequence: Synthetic oligonucleotide
  Sense strand starting at position 2117 of SEQ ID NO: 1887460
ggcuuucucgccgccuaau

SEQ ID NO: 2473983 - RNA, 19 nt, Artificial Sequence
  Description of Artificial Sequence: Synthetic oligonucleotide
  Antisense strand to SEQ ID NO: 2473982
auuaggcggcgagaaagcc

SEQ ID NO: 2473984 - RNA, 19 nt, Artificial Sequence
  Description of Artificial Sequence: Synthetic oligonucleotide
  Sense strand starting at position 2128 of SEQ ID NO: 1887460
cgccuaaugucuuugucuu

SEQ ID NO: 2473985 - RNA, 19 nt, Artificial Sequence
  Description of Artificial Sequence: Synthetic oligonucleotide
  Antisense strand to SEQ ID NO: 2473984
aagacaaagacauuaggcg

SEQ ID NO: 2473986 - RNA, 19 nt, Artificial Sequence
  Description of Artificial Sequence: Synthetic oligonucleotide
  Sense strand starting at position 2129 of SEQ ID NO: 1887460
gccuaaugucuuugucuua

SEQ ID NO: 2473987 - RNA, 19 nt, Artificial Sequence
  Description of Artificial Sequence: Synthetic oligonucleotide
  Antisense strand to SEQ ID NO: 2473986
uaagacaaagacauuaggc

SEQ ID NO: 2473988 - RNA, 19 nt, Artificial Sequence
  Description of Artificial Sequence: Synthetic oligonucleotide
  Sense strand starting at position 2134 of SEQ ID NO: 1887460
augucuuugucuuacauca

SEQ ID NO: 2473989 - RNA, 19 nt, Artificial Sequence
  Description of Artificial Sequence: Synthetic oligonucleotide
  Antisense strand to SEQ ID NO: 2473988
ugauguaagacaaagacau

SEQ ID NO: 2473990 - RNA, 19 nt, Artificial Sequence
  Description of Artificial Sequence: Synthetic oligonucleotide
  Sense strand starting at position 2175 of SEQ ID NO: 1887460
cuggguaugugucacuauu

SEQ ID NO: 2473991 - RNA, 19 nt, Artificial Sequence
  Description of Artificial Sequence: Synthetic oligonucleotide
  Antisense strand to SEQ ID NO: 2473990
aauagugacacauacccag

SEQ ID NO: 2473992 - RNA, 19 nt, Artificial Sequence
  Description of Artificial Sequence: Synthetic oligonucleotide
  Sense strand starting at position 2590 of SEQ ID NO: 1887460
acaugacucucagugagca

SEQ ID NO: 2473993 - RNA, 19 nt, Artificial Sequence
  Description of Artificial Sequence: Synthetic oligonucleotide
  Antisense strand to SEQ ID NO: 2473992
ugcucacugagagucaugu

SEQ ID NO: 2473994 - RNA, 19 nt, Artificial Sequence
  Description of Artificial Sequence: Synthetic oligonucleotide
  Sense strand starting at position 2591 of SEQ ID NO: 1887460
caugacucucagugagcau

SEQ ID NO: 2473995 - RNA, 19 nt, Artificial Sequence
  Description of Artificial Sequence: Synthetic oligonucleotide
  Antisense strand to SEQ ID NO: 2473994
augcucacugagagucaug

SEQ ID NO: 2473996 - RNA, 19 nt, Artificial Sequence
  Description of Artificial Sequence: Synthetic oligonucleotide
  Sense strand starting at position 165 of SEQ ID NO: 1887461
gcuguacuuccagguagga

SEQ ID NO: 2473997 - RNA, 19 nt, Artificial Sequence
  Description of Artificial Sequence: Synthetic oligonucleotide
  Antisense strand to SEQ ID NO: 2473996
uccuaccuggaaguacagc

SEQ ID NO: 2473998 - RNA, 19 nt, Artificial Sequence
  Description of Artificial Sequence: Synthetic oligonucleotide
  Sense strand starting at position 410 of SEQ ID NO: 1887461
auguaaaugacauguguuu

SEQ ID NO: 2473999 - RNA, 19 nt, Artificial Sequence
  Description of Artificial Sequence: Synthetic oligonucleotide
  Antisense strand to SEQ ID NO: 2473998
aaacacaugucauuuacau

SEQ ID NO: 2474000 - RNA, 19 nt, Artificial Sequence
  Description of Artificial Sequence: Synthetic oligonucleotide
  Sense strand starting at position 993 of SEQ ID NO: 1887461
ugcuucugcucacuguaaa

SEQ ID NO: 2474001 - RNA, 19 nt, Artificial Sequence
  Description of Artificial Sequence: Synthetic oligonucleotide
  Antisense strand to SEQ ID NO: 2474000
uuuacagugagcagaagca

SEQ ID NO: 2474002 - RNA, 19 nt, Artificial Sequence
  Description of Artificial Sequence: Synthetic oligonucleotide
  Sense strand starting at position 1170 of SEQ ID NO: 1887461
aguggcauuuaggagaacu

SEQ ID NO: 2474003 - RNA, 19 nt, Artificial Sequence
  Description of Artificial Sequence: Synthetic oligonucleotide
  Antisense strand to SEQ ID NO: 2474002
aguucuccuaaaugccacu

SEQ ID NO: 2474004 - RNA, 19 nt, Artificial Sequence
  Description of Artificial Sequence: Synthetic oligonucleotide
  Sense strand starting at position 1202 of SEQ ID NO: 1887461
ggcggucagugcugacaca

SEQ ID NO: 2474005 - RNA, 19 nt, Artificial Sequence
  Description of Artificial Sequence: Synthetic oligonucleotide
  Antisense strand to SEQ ID NO: 2474004
ugugucagcacugaccgcc

SEQ ID NO: 2474006 - RNA, 19 nt, Artificial Sequence
  Description of Artificial Sequence: Synthetic oligonucleotide
  Sense strand starting at position 1254 of SEQ ID NO: 1887461
cccaguggcucugagaacu

SEQ ID NO: 2474007 - RNA, 19 nt, Artificial Sequence
  Description of Artificial Sequence: Synthetic oligonucleotide
  Antisense strand to SEQ ID NO: 2474006
aguucucagagccacuggg

SEQ ID NO: 2474008 - RNA, 19 nt, Artificial Sequence
  Description of Artificial Sequence: Synthetic oligonucleotide
  Sense strand starting at position 1268 of SEQ ID NO: 1887461
gaacuagacuuggaagucu

SEQ ID NO: 2474009 - RNA, 19 nt, Artificial Sequence
  Description of Artificial Sequence: Synthetic oligonucleotide
  Antisense strand to SEQ ID NO: 2474008
agacuuccaagucuaguuc

SEQ ID NO: 2474010 - RNA, 19 nt, Artificial Sequence
  Description of Artificial Sequence: Synthetic oligonucleotide
  Sense strand starting at position 1394 of SEQ ID NO: 1887461
cguccuuucccucaugcaa

SEQ ID NO: 2474011 - RNA, 19 nt, Artificial Sequence
  Description of Artificial Sequence: Synthetic oligonucleotide
  Antisense strand to SEQ ID NO: 2474010
uugcaugagggaaaggacg

SEQ ID NO: 2474012 - RNA, 19 nt, Artificial Sequence
  Description of Artificial Sequence: Synthetic oligonucleotide
  Sense strand starting at position 1407 of SEQ ID NO: 1887461
augcaaucgcaaugggaaa

SEQ ID NO: 2474013 - RNA, 19 nt, Artificial Sequence
  Description of Artificial Sequence: Synthetic oligonucleotide
  Antisense strand to SEQ ID NO: 2474012
uuucccauugcgauugcau

SEQ ID NO: 2474014 - RNA, 19 nt, Artificial Sequence
  Description of Artificial Sequence: Synthetic oligonucleotide
  Sense strand starting at position 1453 of SEQ ID NO: 1887461
aagcguugguguguggaua

SEQ ID NO: 2474015 - RNA, 19 nt, Artificial Sequence
  Description of Artificial Sequence: Synthetic oligonucleotide
  Antisense strand to SEQ ID NO: 2474014
uauccacacaccaacgcuu

SEQ ID NO: 2474016 - RNA, 19 nt, Artificial Sequence
  Description of Artificial Sequence: Synthetic oligonucleotide
  Sense strand starting at position 2016 of SEQ ID NO: 1887461
gcgcgccugcgucuuauau

SEQ ID NO: 2474017 - RNA, 19 nt, Artificial Sequence
  Description of Artificial Sequence: Synthetic oligonucleotide
  Antisense strand to SEQ ID NO: 2474016
auauaagacgcaggcgcgc

SEQ ID NO: 2474018 - RNA, 19 nt, Artificial Sequence
  Description of Artificial Sequence: Synthetic oligonucleotide
  Sense strand starting at position 2017 of SEQ ID NO: 1887461
cgcgccugcgucuuauauu

SEQ ID NO: 2474019 - RNA, 19 nt, Artificial Sequence
  Description of Artificial Sequence: Synthetic oligonucleotide
  Antisense strand to SEQ ID NO: 2474018
aauauaagacgcaggcgcg

SEQ ID NO: 2474020 - RNA, 19 nt, Artificial Sequence
  Description of Artificial Sequence: Synthetic oligonucleotide
  Sense strand starting at position 2085 of SEQ ID NO: 1887461
ggugucgggcucgacuauu

SEQ ID NO: 2474021 - RNA, 19 nt, Artificial Sequence
  Description of Artificial Sequence: Synthetic oligonucleotide
  Antisense strand to SEQ ID NO: 2474020
aauagucgagcccgacacc

SEQ ID NO: 2474022 - RNA, 19 nt, Artificial Sequence
  Description of Artificial Sequence: Synthetic oligonucleotide
  Sense strand starting at position 2096 of SEQ ID NO: 1887461
cgacuauuggccgagacgu

SEQ ID NO: 2474023 - RNA, 19 nt, Artificial Sequence
  Description of Artificial Sequence: Synthetic oligonucleotide
  Antisense strand to SEQ ID NO: 2474022
acgucucggccaauagucg

SEQ ID NO: 2474024 - RNA, 19 nt, Artificial Sequence
  Description of Artificial Sequence: Synthetic oligonucleotide
  Sense strand starting at position 2098 of SEQ ID NO: 1887461
acuauuggccgagacguuu

SEQ ID NO: 2474025 - RNA, 19 nt, Artificial Sequence
  Description of Artificial Sequence: Synthetic oligonucleotide
  Antisense strand to SEQ ID NO: 2474024
aaacgucucggccaauagu

SEQ ID NO: 2474026 - RNA, 19 nt, Artificial Sequence
  Description of Artificial Sequence: Synthetic oligonucleotide
  Sense strand starting at position 2269 of SEQ ID NO: 1887461
gggacuucugggugucacu

SEQ ID NO: 2474027 - RNA, 19 nt, Artificial Sequence
  Description of Artificial Sequence: Synthetic oligonucleotide
  Antisense strand to SEQ ID NO: 2474026
agugacacccagaaguccc

SEQ ID NO: 2474028 - RNA, 19 nt, Artificial Sequence
  Description of Artificial Sequence: Synthetic oligonucleotide
  Sense strand starting at position 2310 of SEQ ID NO: 1887461
uccagcagucccgacauaa

SEQ ID NO: 2474029 - RNA, 19 nt, Artificial Sequence
  Description of Artificial Sequence: Synthetic oligonucleotide
  Antisense strand to SEQ ID NO: 2474028
uuaugucgggacugcugga

SEQ ID NO: 2474030 - RNA, 19 nt, Artificial Sequence
  Description of Artificial Sequence: Synthetic oligonucleotide
  Sense strand starting at position 2394 of SEQ ID NO: 1887461
cccgacaccugucgugaua

SEQ ID NO: 2474031 - RNA, 19 nt, Artificial Sequence
  Description of Artificial Sequence: Synthetic oligonucleotide
  Antisense strand to SEQ ID NO: 2474030
uaucacgacaggugucggg

SEQ ID NO: 2474032 - RNA, 19 nt, Artificial Sequence
  Description of Artificial Sequence: Synthetic oligonucleotide
  Sense strand starting at position 2396 of SEQ ID NO: 1887461
cgacaccugucgugauauu

SEQ ID NO: 2474033 - RNA, 19 nt, Artificial Sequence
  Description of Artificial Sequence: Synthetic oligonucleotide
  Antisense strand to SEQ ID NO: 2474032
aauaucacgacaggugucg

SEQ ID NO: 2474034 - RNA, 19 nt, Artificial Sequence
  Description of Artificial Sequence: Synthetic oligonucleotide
  Sense strand starting at position 2397 of SEQ ID NO: 1887461
gacaccugucgugauauuc

SEQ ID NO: 2474035 - RNA, 19 nt, Artificial Sequence
  Description of Artificial Sequence: Synthetic oligonucleotide
  Antisense strand to SEQ ID NO: 2474034
gaauaucacgacagguguc

SEQ ID NO: 2474036 - RNA, 19 nt, Artificial Sequence
  Description of Artificial Sequence: Synthetic oligonucleotide
  Sense strand starting at position 2405 of SEQ ID NO: 1887461
ucgugauauucuugccaau

SEQ ID NO: 2474037 - RNA, 19 nt, Artificial Sequence
  Description of Artificial Sequence: Synthetic oligonucleotide
  Antisense strand to SEQ ID NO: 2474036
auuggcaagaauaucacga

SEQ ID NO: 2474038 - RNA, 19 nt, Artificial Sequence
  Description of Artificial Sequence: Synthetic oligonucleotide
  Sense strand starting at position 2407 of SEQ ID NO: 1887461
gugauauucuugccaauac

SEQ ID NO: 2474039 - RNA, 19 nt, Artificial Sequence
  Description of Artificial Sequence: Synthetic oligonucleotide
  Antisense strand to SEQ ID NO: 2474038
guauuggcaagaauaucac

SEQ ID NO: 2474040 - RNA, 19 nt, Artificial Sequence
  Description of Artificial Sequence: Synthetic oligonucleotide
  Sense strand starting at position 3100 of SEQ ID NO: 1887461
cagaaagucuucggaggga

SEQ ID NO: 2474041 - RNA, 19 nt, Artificial Sequence
  Description of Artificial Sequence: Synthetic oligonucleotide
  Antisense strand to SEQ ID NO: 2474040
ucccuccgaagacuuucug

SEQ ID NO: 2474042 - RNA, 19 nt, Artificial Sequence
  Description of Artificial Sequence: Synthetic oligonucleotide
  Sense strand starting at position 3103 of SEQ ID NO: 1887461
aaagucuucggagggauga

SEQ ID NO: 2474043 - RNA, 19 nt, Artificial Sequence
  Description of Artificial Sequence: Synthetic oligonucleotide
  Antisense strand to SEQ ID NO: 2474042
ucaucccuccgaagacuuu

SEQ ID NO: 2474044 - RNA, 19 nt, Artificial Sequence
  Description of Artificial Sequence: Synthetic oligonucleotide
  Sense strand starting at position 3172 of SEQ ID NO: 1887461
cugcucaucccagggaaau

SEQ ID NO: 2474045 - RNA, 19 nt, Artificial Sequence
  Description of Artificial Sequence: Synthetic oligonucleotide
  Antisense strand to SEQ ID NO: 2474044
auuucccugggaugagcag

SEQ ID NO: 2474046 - RNA, 19 nt, Artificial Sequence
  Description of Artificial Sequence: Synthetic oligonucleotide
  Sense strand starting at position 3173 of SEQ ID NO: 1887461
ugcucaucccagggaaauc

SEQ ID NO: 2474047 - RNA, 19 nt, Artificial Sequence
  Description of Artificial Sequence: Synthetic oligonucleotide
  Antisense strand to SEQ ID NO: 2474046
gauuucccugggaugagca

SEQ ID NO: 2474048 - RNA, 19 nt, Artificial Sequence
  Description of Artificial Sequence: Synthetic oligonucleotide
  Sense strand starting at position 3259 of SEQ ID NO: 1887461
cgcugucuccagugacaag

SEQ ID NO: 2474049 - RNA, 19 nt, Artificial Sequence
  Description of Artificial Sequence: Synthetic oligonucleotide
  Antisense strand to SEQ ID NO: 2474048
cuugucacuggagacagcg

SEQ ID NO: 2474050 - RNA, 19 nt, Artificial Sequence
  Description of Artificial Sequence: Synthetic oligonucleotide
  Sense strand starting at position 3319 of SEQ ID NO: 1887461
gcagcagcugugugauuca

SEQ ID NO: 2474051 - RNA, 19 nt, Artificial Sequence
  Description of Artificial Sequence: Synthetic oligonucleotide
  Antisense strand to SEQ ID NO: 2474050
ugaaucacacagcugcugc

SEQ ID NO: 2474052 - RNA, 19 nt, Artificial Sequence
  Description of Artificial Sequence: Synthetic oligonucleotide
  Sense strand starting at position 3422 of SEQ ID NO: 1887461
cacgcagggugguuauuaa

SEQ ID NO: 2474053 - RNA, 19 nt, Artificial Sequence
  Description of Artificial Sequence: Synthetic oligonucleotide
  Antisense strand to SEQ ID NO: 2474052
uuaauaaccacccugcgug

SEQ ID NO: 2474054 - RNA, 19 nt, Artificial Sequence
  Description of Artificial Sequence: Synthetic oligonucleotide
  Sense strand starting at position 3426 of SEQ ID NO: 1887461
cagggugguuauuaaagga

SEQ ID NO: 2474055 - RNA, 19 nt, Artificial Sequence
  Description of Artificial Sequence: Synthetic oligonucleotide
  Antisense strand to SEQ ID NO: 2474054
uccuuuaauaaccacccug

SEQ ID NO: 2474056 - RNA, 19 nt, Artificial Sequence
  Description of Artificial Sequence: Synthetic oligonucleotide
  Sense strand starting at position 3430 of SEQ ID NO: 1887461
gugguuauuaaaggagaga

SEQ ID NO: 2474057 - RNA, 19 nt, Artificial Sequence
  Description of Artificial Sequence: Synthetic oligonucleotide
  Antisense strand to SEQ ID NO: 2474056
ucucuccuuuaauaaccac

SEQ ID NO: 2474058 - RNA, 19 nt, Artificial Sequence
  Description of Artificial Sequence: Synthetic oligonucleotide
  Sense strand starting at position 3555 of SEQ ID NO: 1887461
ggcccauucuuucugaucu

SEQ ID NO: 2474059 - RNA, 19 nt, Artificial Sequence
  Description of Artificial Sequence: Synthetic oligonucleotide
  Antisense strand to SEQ ID NO: 2474058
agaucagaaagaaugggcc

SEQ ID NO: 2474060 - RNA, 19 nt, Artificial Sequence
  Description of Artificial Sequence: Synthetic oligonucleotide
  Sense strand starting at position 3681 of SEQ ID NO: 1887461
ccugcauaauugcguaauu

SEQ ID NO: 2474061 - RNA, 19 nt, Artificial Sequence
  Description of Artificial Sequence: Synthetic oligonucleotide
  Antisense strand to SEQ ID NO: 2474060
aauuacgcaauuaugcagg

SEQ ID NO: 2474062 - RNA, 19 nt, Artificial Sequence
  Description of Artificial Sequence: Synthetic oligonucleotide
  Sense strand starting at position 3683 of SEQ ID NO: 1887461
ugcauaauugcguaauucu

SEQ ID NO: 2474063 - RNA, 19 nt, Artificial Sequence
  Description of Artificial Sequence: Synthetic oligonucleotide
  Antisense strand to SEQ ID NO: 2474062
agaauuacgcaauuaugca

SEQ ID NO: 2474064 - RNA, 19 nt, Artificial Sequence
  Description of Artificial Sequence: Synthetic oligonucleotide
  Sense strand starting at position 3761 of SEQ ID NO: 1887461
ugcgaagcgccguguucau

SEQ ID NO: 2474065 - RNA, 19 nt, Artificial Sequence
  Description of Artificial Sequence: Synthetic oligonucleotide
  Antisense strand to SEQ ID NO: 2474064
augaacacggcgcuucgca

SEQ ID NO: 2474066 - RNA, 19 nt, Artificial Sequence
  Description of Artificial Sequence: Synthetic oligonucleotide
  Sense strand starting at position 3796 of SEQ ID NO: 1887461
ucagccagugccuaguuau

SEQ ID NO: 2474067 - RNA, 19 nt, Artificial Sequence
  Description of Artificial Sequence: Synthetic oligonucleotide
  Antisense strand to SEQ ID NO: 2474066
auaacuaggcacuggcuga

SEQ ID NO: 2474068 - RNA, 19 nt, Artificial Sequence
  Description of Artificial Sequence: Synthetic oligonucleotide
  Sense strand starting at position 3806 of SEQ ID NO: 1887461
ccuaguuauuaagcgcuua

SEQ ID NO: 2474069 - RNA, 19 nt, Artificial Sequence
  Description of Artificial Sequence: Synthetic oligonucleotide
  Antisense strand to SEQ ID NO: 2474068
uaagcgcuuaauaacuagg

SEQ ID NO: 2474070 - RNA, 19 nt, Artificial Sequence
  Description of Artificial Sequence: Synthetic oligonucleotide
  Sense strand starting at position 47 of SEQ ID NO: 1887462
gagugaggguccuuguaaa

SEQ ID NO: 2474071 - RNA, 19 nt, Artificial Sequence
  Description of Artificial Sequence: Synthetic oligonucleotide
  Antisense strand to SEQ ID NO: 2474070
uuuacaaggacccucacuc

SEQ ID NO: 2474072 - RNA, 19 nt, Artificial Sequence
  Description of Artificial Sequence: Synthetic oligonucleotide
  Sense strand starting at position 62 of SEQ ID NO: 1887462
uaaagcugguucuccagau

SEQ ID NO: 2474073 - RNA, 19 nt, Artificial Sequence
  Description of Artificial Sequence: Synthetic oligonucleotide
  Antisense strand to SEQ ID NO: 2474072
aucuggagaaccagcuuua

SEQ ID NO: 2474074 - RNA, 19 nt, Artificial Sequence
  Description of Artificial Sequence: Synthetic oligonucleotide
  Sense strand starting at position 344 of SEQ ID NO: 1887462
cgcacccagccgugauaau

SEQ ID NO: 2474075 - RNA, 19 nt, Artificial Sequence
  Description of Artificial Sequence: Synthetic oligonucleotide
  Antisense strand to SEQ ID NO: 2474074
auuaucacggcugggugcg

SEQ ID NO: 2474076 - RNA, 19 nt, Artificial Sequence
  Description of Artificial Sequence: Synthetic oligonucleotide
  Sense strand starting at position 398 of SEQ ID NO: 1887462
uggaguuuguaggcaaacu

SEQ ID NO: 2474077 - RNA, 19 nt, Artificial Sequence
  Description of Artificial Sequence: Synthetic oligonucleotide
  Antisense strand to SEQ ID NO: 2474076
aguuugccuacaaacucca

SEQ ID NO: 2474078 - RNA, 19 nt, Artificial Sequence
  Description of Artificial Sequence: Synthetic oligonucleotide
  Sense strand starting at position 460 of SEQ ID NO: 1887462
aagaauugggauugcgaau

SEQ ID NO: 2474079 - RNA, 19 nt, Artificial Sequence
  Description of Artificial Sequence: Synthetic oligonucleotide
  Antisense strand to SEQ ID NO: 2474078
auucgcaaucccaauucuu

SEQ ID NO: 2474080 - RNA, 19 nt, Artificial Sequence
  Description of Artificial Sequence: Synthetic oligonucleotide
  Sense strand starting at position 577 of SEQ ID NO: 1887462
gucgguuguauuggcaaga

SEQ ID NO: 2474081 - RNA, 19 nt, Artificial Sequence
  Description of Artificial Sequence: Synthetic oligonucleotide
  Antisense strand to SEQ ID NO: 2474080
ucuugccaauacaaccgac

SEQ ID NO: 2474082 - RNA, 19 nt, Artificial Sequence
  Description of Artificial Sequence: Synthetic oligonucleotide
  Sense strand starting at position 578 of SEQ ID NO: 1887462
ucgguuguauuggcaagaa

SEQ ID NO: 2474083 - RNA, 19 nt, Artificial Sequence
  Description of Artificial Sequence: Synthetic oligonucleotide
  Antisense strand to SEQ ID NO: 2474082
uucuugccaauacaaccga

SEQ ID NO: 2474084 - RNA, 19 nt, Artificial Sequence
  Description of Artificial Sequence: Synthetic oligonucleotide
  Sense strand starting at position 582 of SEQ ID NO: 1887462
uuguauuggcaagaauauc

SEQ ID NO: 2474085 - RNA, 19 nt, Artificial Sequence
  Description of Artificial Sequence: Synthetic oligonucleotide
  Antisense strand to SEQ ID NO: 2474084
gauauucuugccaauacaa

SEQ ID NO: 2474086 - RNA, 19 nt, Artificial Sequence
  Description of Artificial Sequence: Synthetic oligonucleotide
  Sense strand starting at position 593 of SEQ ID NO: 1887462
agaauaucacgacaggugu

SEQ ID NO: 2474087 - RNA, 19 nt, Artificial Sequence
  Description of Artificial Sequence: Synthetic oligonucleotide
  Antisense strand to SEQ ID NO: 2474086
acaccugucgugauauucu

SEQ ID NO: 2474088 - RNA, 19 nt, Artificial Sequence
  Description of Artificial Sequence: Synthetic oligonucleotide
  Sense strand starting at position 676 of SEQ ID NO: 1887462
gguuguuaugucgggacug

SEQ ID NO: 2474089 - RNA, 19 nt, Artificial Sequence
  Description of Artificial Sequence: Synthetic oligonucleotide
  Antisense strand to SEQ ID NO: 2474088
cagucccgacauaacaacc

SEQ ID NO: 2474090 - RNA, 19 nt, Artificial Sequence
  Description of Artificial Sequence: Synthetic oligonucleotide
  Sense strand starting at position 678 of SEQ ID NO: 1887462
uuguuaugucgggacugcu

SEQ ID NO: 2474091 - RNA, 19 nt, Artificial Sequence
  Description of Artificial Sequence: Synthetic oligonucleotide
  Antisense strand to SEQ ID NO: 2474090
agcagucccgacauaacaa

SEQ ID NO: 2474092 - RNA, 19 nt, Artificial Sequence
  Description of Artificial Sequence: Synthetic oligonucleotide
  Sense strand starting at position 745 of SEQ ID NO: 1887462
aggccugaggccugggaau

SEQ ID NO: 2474093 - RNA, 19 nt, Artificial Sequence
  Description of Artificial Sequence: Synthetic oligonucleotide
  Antisense strand to SEQ ID NO: 2474092
auucccaggccucaggccu

SEQ ID NO: 2474094 - RNA, 19 nt, Artificial Sequence
  Description of Artificial Sequence: Synthetic oligonucleotide
  Sense strand starting at position 891 of SEQ ID NO: 1887462
gcaaacgucucggccaaua

SEQ ID NO: 2474095 - RNA, 19 nt, Artificial Sequence
  Description of Artificial Sequence: Synthetic oligonucleotide
  Antisense strand to SEQ ID NO: 2474094
uauuggccgagacguuugc

SEQ ID NO: 2474096 - RNA, 19 nt, Artificial Sequence
  Description of Artificial Sequence: Synthetic oligonucleotide
  Sense strand starting at position 893 of SEQ ID NO: 1887462
aaacgucucggccaauagu

SEQ ID NO: 2474097 - RNA, 19 nt, Artificial Sequence
  Description of Artificial Sequence: Synthetic oligonucleotide
  Antisense strand to SEQ ID NO: 2474096
acuauuggccgagacguuu

SEQ ID NO: 2474098 - RNA, 19 nt, Artificial Sequence
  Description of Artificial Sequence: Synthetic oligonucleotide
  Sense strand starting at position 1392 of SEQ ID NO: 1887462
ggcugugcccagcgaaaug

SEQ ID NO: 2474099 - RNA, 19 nt, Artificial Sequence
  Description of Artificial Sequence: Synthetic oligonucleotide
  Antisense strand to SEQ ID NO: 2474098
cauuucgcugggcacagcc

SEQ ID NO: 2474100 - RNA, 19 nt, Artificial Sequence
  Description of Artificial Sequence: Synthetic oligonucleotide
  Sense strand starting at position 1418 of SEQ ID NO: 1887462
cgccgaguucccggaugga

SEQ ID NO: 2474101 - RNA, 19 nt, Artificial Sequence
  Description of Artificial Sequence: Synthetic oligonucleotide
  Antisense strand to SEQ ID NO: 2474100
uccauccgggaacucggcg

SEQ ID NO: 2474102 - RNA, 19 nt, Artificial Sequence
  Description of Artificial Sequence: Synthetic oligonucleotide
  Sense strand starting at position 1586 of SEQ ID NO: 1887462
ucccauugcgauugcauga

SEQ ID NO: 2474103 - RNA, 19 nt, Artificial Sequence
  Description of Artificial Sequence: Synthetic oligonucleotide
  Antisense strand to SEQ ID NO: 2474102
ucaugcaaucgcaauggga

SEQ ID NO: 2474104 - RNA, 19 nt, Artificial Sequence
  Description of Artificial Sequence: Synthetic oligonucleotide
  Sense strand starting at position 1591 of SEQ ID NO: 1887462
uugcgauugcaugagggaa

SEQ ID NO: 2474105 - RNA, 19 nt, Artificial Sequence
  Description of Artificial Sequence: Synthetic oligonucleotide
  Antisense strand to SEQ ID NO: 2474104
uucccucaugcaaucgcaa

SEQ ID NO: 2474106 - RNA, 19 nt, Artificial Sequence
  Description of Artificial Sequence: Synthetic oligonucleotide
  Sense strand starting at position 1608 of SEQ ID NO: 1887462
aaaggacggccucguaaau

SEQ ID NO: 2474107 - RNA, 19 nt, Artificial Sequence
  Description of Artificial Sequence: Synthetic oligonucleotide
  Antisense strand to SEQ ID NO: 2474106
auuuacgaggccguccuuu

SEQ ID NO: 2474108 - RNA, 19 nt, Artificial Sequence
  Description of Artificial Sequence: Synthetic oligonucleotide
  Sense strand starting at position 1674 of SEQ ID NO: 1887462
cgugcuuugcgcccaaagu

SEQ ID NO: 2474109 - RNA, 19 nt, Artificial Sequence
  Description of Artificial Sequence: Synthetic oligonucleotide
  Antisense strand to SEQ ID NO: 2474108
acuuugggcgcaaagcacg

SEQ ID NO: 2474110 - RNA, 19 nt, Artificial Sequence
  Description of Artificial Sequence: Synthetic oligonucleotide
  Sense strand starting at position 1685 of SEQ ID NO: 1887462
cccaaaguuugguccaagu

SEQ ID NO: 2474111 - RNA, 19 nt, Artificial Sequence
  Description of Artificial Sequence: Synthetic oligonucleotide
  Antisense strand to SEQ ID NO: 2474110
acuuggaccaaacuuuggg

SEQ ID NO: 2474112 - RNA, 19 nt, Artificial Sequence
  Description of Artificial Sequence: Synthetic oligonucleotide
  Sense strand starting at position 1771 of SEQ ID NO: 1887462
gccagugaaugcuuugucu

SEQ ID NO: 2474113 - RNA, 19 nt, Artificial Sequence
  Description of Artificial Sequence: Synthetic oligonucleotide
  Antisense strand to SEQ ID NO: 2474112
agacaaagcauucacuggc

SEQ ID NO: 2474114 - RNA, 19 nt, Artificial Sequence
  Description of Artificial Sequence: Synthetic oligonucleotide
  Sense strand starting at position 1773 of SEQ ID NO: 1887462
cagugaaugcuuugucugu

SEQ ID NO: 2474115 - RNA, 19 nt, Artificial Sequence
  Description of Artificial Sequence: Synthetic oligonucleotide
  Antisense strand to SEQ ID NO: 2474114
acagacaaagcauucacug

SEQ ID NO: 2474116 - RNA, 19 nt, Artificial Sequence
  Description of Artificial Sequence: Synthetic oligonucleotide
  Sense strand starting at position 1775 of SEQ ID NO: 1887462
gugaaugcuuugucugugu

SEQ ID NO: 2474117 - RNA, 19 nt, Artificial Sequence
  Description of Artificial Sequence: Synthetic oligonucleotide
  Antisense strand to SEQ ID NO: 2474116
acacagacaaagcauucac

SEQ ID NO: 2474118 - RNA, 19 nt, Artificial Sequence
  Description of Artificial Sequence: Synthetic oligonucleotide
  Sense strand starting at position 1777 of SEQ ID NO: 1887462
gaaugcuuugucuguguca

SEQ ID NO: 2474119 - RNA, 19 nt, Artificial Sequence
  Description of Artificial Sequence: Synthetic oligonucleotide
  Antisense strand to SEQ ID NO: 2474118
ugacacagacaaagcauuc

SEQ ID NO: 2474120 - RNA, 19 nt, Artificial Sequence
  Description of Artificial Sequence: Synthetic oligonucleotide
  Sense strand starting at position 1849 of SEQ ID NO: 1887462
uggaaauccugccuuauca

SEQ ID NO: 2474121 - RNA, 19 nt, Artificial Sequence
  Description of Artificial Sequence: Synthetic oligonucleotide
  Antisense strand to SEQ ID NO: 2474120
ugauaaggcaggauuucca

SEQ ID NO: 2474122 - RNA, 19 nt, Artificial Sequence
  Description of Artificial Sequence: Synthetic oligonucleotide
  Sense strand starting at position 2014 of SEQ ID NO: 1887462
gcacguucugguccagcaa

SEQ ID NO: 2474123 - RNA, 19 nt, Artificial Sequence
  Description of Artificial Sequence: Synthetic oligonucleotide
  Antisense strand to SEQ ID NO: 2474122
uugcuggaccagaacgugc

SEQ ID NO: 2474124 - RNA, 19 nt, Artificial Sequence
  Description of Artificial Sequence: Synthetic oligonucleotide
  Sense strand starting at position 2029 of SEQ ID NO: 1887462
gcaacaaguagaugucagu

SEQ ID NO: 2474125 - RNA, 19 nt, Artificial Sequence
  Description of Artificial Sequence: Synthetic oligonucleotide
  Antisense strand to SEQ ID NO: 2474124
acugacaucuacuuguugc

SEQ ID NO: 2474126 - RNA, 19 nt, Artificial Sequence
  Description of Artificial Sequence: Synthetic oligonucleotide
  Sense strand starting at position 2036 of SEQ ID NO: 1887462
guagaugucaguugguuag

SEQ ID NO: 2474127 - RNA, 19 nt, Artificial Sequence
  Description of Artificial Sequence: Synthetic oligonucleotide
  Antisense strand to SEQ ID NO: 2474126
cuaaccaacugacaucuac

SEQ ID NO: 2474128 - RNA, 19 nt, Artificial Sequence
  Description of Artificial Sequence: Synthetic oligonucleotide
  Sense strand starting at position 2512 of SEQ ID NO: 1887462
aaauaaguccuagguauga

SEQ ID NO: 2474129 - RNA, 19 nt, Artificial Sequence
  Description of Artificial Sequence: Synthetic oligonucleotide
  Antisense strand to SEQ ID NO: 2474128
ucauaccuaggacuuauuu

SEQ ID NO: 2474130 - RNA, 19 nt, Artificial Sequence
  Description of Artificial Sequence: Synthetic oligonucleotide
  Sense strand starting at position 2514 of SEQ ID NO: 1887462
auaaguccuagguaugagu

SEQ ID NO: 2474131 - RNA, 19 nt, Artificial Sequence
  Description of Artificial Sequence: Synthetic oligonucleotide
  Antisense strand to SEQ ID NO: 2474130
acucauaccuaggacuuau

SEQ ID NO: 2474132 - RNA, 19 nt, Artificial Sequence
  Description of Artificial Sequence: Synthetic oligonucleotide
  Sense strand starting at position 2516 of SEQ ID NO: 1887462
aaguccuagguaugaguuu

SEQ ID NO: 2474133 - RNA, 19 nt, Artificial Sequence
  Description of Artificial Sequence: Synthetic oligonucleotide
  Antisense strand to SEQ ID NO: 2474132
aaacucauaccuaggacuu

SEQ ID NO: 2474134 - RNA, 19 nt, Artificial Sequence
  Description of Artificial Sequence: Synthetic oligonucleotide
  Sense strand starting at position 2522 of SEQ ID NO: 1887462
uagguaugaguuugagaua

SEQ ID NO: 2474135 - RNA, 19 nt, Artificial Sequence
  Description of Artificial Sequence: Synthetic oligonucleotide
  Antisense strand to SEQ ID NO: 2474134
uaucucaaacucauaccua

SEQ ID NO: 2474136 - RNA, 19 nt, Artificial Sequence
  Description of Artificial Sequence: Synthetic oligonucleotide
  Sense strand starting at position 2523 of SEQ ID NO: 1887462
agguaugaguuugagauaa

SEQ ID NO: 2474137 - RNA, 19 nt, Artificial Sequence
  Description of Artificial Sequence: Synthetic oligonucleotide
  Antisense strand to SEQ ID NO: 2474136
uuaucucaaacucauaccu

SEQ ID NO: 2474138 - RNA, 19 nt, Artificial Sequence
  Description of Artificial Sequence: Synthetic oligonucleotide
  Sense strand starting at position 2525 of SEQ ID NO: 1887462
guaugaguuugagauaaug

SEQ ID NO: 2474139 - RNA, 19 nt, Artificial Sequence
  Description of Artificial Sequence: Synthetic oligonucleotide
  Antisense strand to SEQ ID NO: 2474138
cauuaucucaaacucauac

SEQ ID NO: 2474140 - RNA, 19 nt, Artificial Sequence
  Description of Artificial Sequence: Synthetic oligonucleotide
  Sense strand starting at position 2760 of SEQ ID NO: 1887462
cggacagaucucugaaggu

SEQ ID NO: 2474141 - RNA, 19 nt, Artificial Sequence
  Description of Artificial Sequence: Synthetic oligonucleotide
  Antisense strand to SEQ ID NO: 2474140
accuucagagaucuguccg

SEQ ID NO: 2474142 - RNA, 19 nt, Artificial Sequence
  Description of Artificial Sequence: Synthetic oligonucleotide
  Sense strand starting at position 3193 of SEQ ID NO: 1887462
guggguucucuagagguga

SEQ ID NO: 2474143 - RNA, 19 nt, Artificial Sequence
  Description of Artificial Sequence: Synthetic oligonucleotide
  Antisense strand to SEQ ID NO: 2474142
ucaccucuagagaacccac

SEQ ID NO: 2474144 - RNA, 19 nt, Artificial Sequence
  Description of Artificial Sequence: Synthetic oligonucleotide
  Sense strand starting at position 3195 of SEQ ID NO: 1887462
ggguucucuagaggugagu

SEQ ID NO: 2474145 - RNA, 19 nt, Artificial Sequence
  Description of Artificial Sequence: Synthetic oligonucleotide
  Antisense strand to SEQ ID NO: 2474144
acucaccucuagagaaccc

SEQ ID NO: 2474146 - RNA, 19 nt, Artificial Sequence
  Description of Artificial Sequence: Synthetic oligonucleotide
  Sense strand starting at position 3684 of SEQ ID NO: 1887462
gguaccuuccgguacucaa

SEQ ID NO: 2474147 - RNA, 19 nt, Artificial Sequence
  Description of Artificial Sequence: Synthetic oligonucleotide
  Antisense strand to SEQ ID NO: 2474146
uugaguaccggaagguacc

SEQ ID NO: 2474148 - RNA, 19 nt, Artificial Sequence
  Description of Artificial Sequence: Synthetic oligonucleotide
  Sense strand starting at position 3701 of SEQ ID NO: 1887462
aacguuugucugucuugca

SEQ ID NO: 2474149 - RNA, 19 nt, Artificial Sequence
  Description of Artificial Sequence: Synthetic oligonucleotide
  Antisense strand to SEQ ID NO: 2474148
ugcaagacagacaaacguu

SEQ ID NO: 2474150 - RNA, 19 nt, Artificial Sequence
  Description of Artificial Sequence: Synthetic oligonucleotide
  Sense strand starting at position 294 of SEQ ID NO: 1887463
aggugauccacuugggauu

SEQ ID NO: 2474151 - RNA, 19 nt, Artificial Sequence
  Description of Artificial Sequence: Synthetic oligonucleotide
  Antisense strand to SEQ ID NO: 2474150
aaucccaaguggaucaccu

SEQ ID NO: 2474152 - RNA, 19 nt, Artificial Sequence
  Description of Artificial Sequence: Synthetic oligonucleotide
  Sense strand starting at position 295 of SEQ ID NO: 1887463
ggugauccacuugggauua

SEQ ID NO: 2474153 - RNA, 19 nt, Artificial Sequence
  Description of Artificial Sequence: Synthetic oligonucleotide
  Antisense strand to SEQ ID NO: 2474152
uaaucccaaguggaucacc

SEQ ID NO: 2474154 - RNA, 19 nt, Artificial Sequence
  Description of Artificial Sequence: Synthetic oligonucleotide
  Sense strand starting at position 387 of SEQ ID NO: 1887463
cugagcucuucugggaaug

SEQ ID NO: 2474155 - RNA, 19 nt, Artificial Sequence
  Description of Artificial Sequence: Synthetic oligonucleotide
  Antisense strand to SEQ ID NO: 2474154
cauucccagaagagcucag

SEQ ID NO: 2474156 - RNA, 19 nt, Artificial Sequence
  Description of Artificial Sequence: Synthetic oligonucleotide
  Sense strand starting at position 461 of SEQ ID NO: 1887463
gacugcucugaggguuaca

SEQ ID NO: 2474157 - RNA, 19 nt, Artificial Sequence
  Description of Artificial Sequence: Synthetic oligonucleotide
  Antisense strand to SEQ ID NO: 2474156
uguaacccucagagcaguc

SEQ ID NO: 2474158 - RNA, 19 nt, Artificial Sequence
  Description of Artificial Sequence: Synthetic oligonucleotide
  Sense strand starting at position 568 of SEQ ID NO: 1887463
ggaucccaccaaugauuau

SEQ ID NO: 2474159 - RNA, 19 nt, Artificial Sequence
  Description of Artificial Sequence: Synthetic oligonucleotide
  Antisense strand to SEQ ID NO: 2474158
auaaucauuggugggaucc

SEQ ID NO: 2474160 - RNA, 19 nt, Artificial Sequence
  Description of Artificial Sequence: Synthetic oligonucleotide
  Sense strand starting at position 604 of SEQ ID NO: 1887463
ugaauauacuccugaggaa

SEQ ID NO: 2474161 - RNA, 19 nt, Artificial Sequence
  Description of Artificial Sequence: Synthetic oligonucleotide
  Antisense strand to SEQ ID NO: 2474160
uuccucaggaguauauuca

SEQ ID NO: 2474162 - RNA, 19 nt, Artificial Sequence
  Description of Artificial Sequence: Synthetic oligonucleotide
  Sense strand starting at position 607 of SEQ ID NO: 1887463
auauacuccugaggaaaug

SEQ ID NO: 2474163 - RNA, 19 nt, Artificial Sequence
  Description of Artificial Sequence: Synthetic oligonucleotide
  Antisense strand to SEQ ID NO: 2474162
cauuuccucaggaguauau

SEQ ID NO: 2474164 - RNA, 19 nt, Artificial Sequence
  Description of Artificial Sequence: Synthetic oligonucleotide
  Sense strand starting at position 626 of SEQ ID NO: 1887463
agccucuugucuugacaua

SEQ ID NO: 2474165 - RNA, 19 nt, Artificial Sequence
  Description of Artificial Sequence: Synthetic oligonucleotide
  Antisense strand to SEQ ID NO: 2474164
uaugucaagacaagaggcu

SEQ ID NO: 2474166 - RNA, 19 nt, Artificial Sequence
  Description of Artificial Sequence: Synthetic oligonucleotide
  Sense strand starting at position 717 of SEQ ID NO: 1887463
gccaguuacucacgaucuu

SEQ ID NO: 2474167 - RNA, 19 nt, Artificial Sequence
  Description of Artificial Sequence: Synthetic oligonucleotide
  Antisense strand to SEQ ID NO: 2474166
aagaucgugaguaacuggc

SEQ ID NO: 2474168 - RNA, 19 nt, Artificial Sequence
  Description of Artificial Sequence: Synthetic oligonucleotide
  Sense strand starting at position 718 of SEQ ID NO: 1887463
ccaguuacucacgaucuuu

SEQ ID NO: 2474169 - RNA, 19 nt, Artificial Sequence
  Description of Artificial Sequence: Synthetic oligonucleotide
  Antisense strand to SEQ ID NO: 2474168
aaagaucgugaguaacugg

SEQ ID NO: 2474170 - RNA, 19 nt, Artificial Sequence
  Description of Artificial Sequence: Synthetic oligonucleotide
  Sense strand starting at position 850 of SEQ ID NO: 1887463
gccucaaccugagggauga

SEQ ID NO: 2474171 - RNA, 19 nt, Artificial Sequence
  Description of Artificial Sequence: Synthetic oligonucleotide
  Antisense strand to SEQ ID NO: 2474170
ucaucccucagguugaggc

SEQ ID NO: 2474172 - RNA, 19 nt, Artificial Sequence
  Description of Artificial Sequence: Synthetic oligonucleotide
  Sense strand starting at position 879 of SEQ ID NO: 1887463
aaagucagauggucuguga

SEQ ID NO: 2474173 - RNA, 19 nt, Artificial Sequence
  Description of Artificial Sequence: Synthetic oligonucleotide
  Antisense strand to SEQ ID NO: 2474172
ucacagaccaucugacuuu

SEQ ID NO: 2474174 - RNA, 19 nt, Artificial Sequence
  Description of Artificial Sequence: Synthetic oligonucleotide
  Sense strand starting at position 882 of SEQ ID NO: 1887463
gucagauggucugugaaac

SEQ ID NO: 2474175 - RNA, 19 nt, Artificial Sequence
  Description of Artificial Sequence: Synthetic oligonucleotide
  Antisense strand to SEQ ID NO: 2474174
guuucacagaccaucugac

SEQ ID NO: 2474176 - RNA, 19 nt, Artificial Sequence
  Description of Artificial Sequence: Synthetic oligonucleotide
  Sense strand starting at position 900 of SEQ ID NO: 1887463
cccguaugggcagaaucaa

SEQ ID NO: 2474177 - RNA, 19 nt, Artificial Sequence
  Description of Artificial Sequence: Synthetic oligonucleotide
  Antisense strand to SEQ ID NO: 2474176
uugauucugcccauacggg

SEQ ID NO: 2474178 - RNA, 19 nt, Artificial Sequence
  Description of Artificial Sequence: Synthetic oligonucleotide
  Sense strand starting at position 940 of SEQ ID NO: 1887463
cagagucgaucccaaacaa

SEQ ID NO: 2474179 - RNA, 19 nt, Artificial Sequence
  Description of Artificial Sequence: Synthetic oligonucleotide
  Antisense strand to SEQ ID NO: 2474178
uuguuugggaucgacucug

SEQ ID NO: 2474180 - RNA, 19 nt, Artificial Sequence
  Description of Artificial Sequence: Synthetic oligonucleotide
  Sense strand starting at position 998 of SEQ ID NO: 1887463
aacaguaugccagauguuc

SEQ ID NO: 2474181 - RNA, 19 nt, Artificial Sequence
  Description of Artificial Sequence: Synthetic oligonucleotide
  Antisense strand to SEQ ID NO: 2474180
gaacaucuggcauacuguu

SEQ ID NO: 2474182 - RNA, 19 nt, Artificial Sequence
  Description of Artificial Sequence: Synthetic oligonucleotide
  Sense strand starting at position 1038 of SEQ ID NO: 1887463
gaucuagaagcuugggcau

SEQ ID NO: 2474183 - RNA, 19 nt, Artificial Sequence
  Description of Artificial Sequence: Synthetic oligonucleotide
  Antisense strand to SEQ ID NO: 2474182
augcccaagcuucuagauc

SEQ ID NO: 2474184 - RNA, 19 nt, Artificial Sequence
  Description of Artificial Sequence: Synthetic oligonucleotide
  Sense strand starting at position 1069 of SEQ ID NO: 1887463
ucaggugauucugagguga

SEQ ID NO: 2474185 - RNA, 19 nt, Artificial Sequence
  Description of Artificial Sequence: Synthetic oligonucleotide
  Antisense strand to SEQ ID NO: 2474184
ucaccucagaaucaccuga

SEQ ID NO: 2474186 - RNA, 19 nt, Artificial Sequence
  Description of Artificial Sequence: Synthetic oligonucleotide
  Sense strand starting at position 1073 of SEQ ID NO: 1887463
gugauucugaggugagcau

SEQ ID NO: 2474187 - RNA, 19 nt, Artificial Sequence
  Description of Artificial Sequence: Synthetic oligonucleotide
  Antisense strand to SEQ ID NO: 2474186
augcucaccucagaaucac

SEQ ID NO: 2474188 - RNA, 19 nt, Artificial Sequence
  Description of Artificial Sequence: Synthetic oligonucleotide
  Sense strand starting at position 1122 of SEQ ID NO: 1887463
cgcuggagucgggaaugaa

SEQ ID NO: 2474189 - RNA, 19 nt, Artificial Sequence
  Description of Artificial Sequence: Synthetic oligonucleotide
  Antisense strand to SEQ ID NO: 2474188
uucauucccgacuccagcg

SEQ ID NO: 2474190 - RNA, 19 nt, Artificial Sequence
  Description of Artificial Sequence: Synthetic oligonucleotide
  Sense strand starting at position 1146 of SEQ ID NO: 1887463
uugaaacaucagcaguguu

SEQ ID NO: 2474191 - RNA, 19 nt, Artificial Sequence
  Description of Artificial Sequence: Synthetic oligonucleotide
  Antisense strand to SEQ ID NO: 2474190
aacacugcugauguuucaa

SEQ ID NO: 2474192 - RNA, 19 nt, Artificial Sequence
  Description of Artificial Sequence: Synthetic oligonucleotide
  Sense strand starting at position 1149 of SEQ ID NO: 1887463
aaacaucagcaguguuuga

SEQ ID NO: 2474193 - RNA, 19 nt, Artificial Sequence
  Description of Artificial Sequence: Synthetic oligonucleotide
  Antisense strand to SEQ ID NO: 2474192
ucaaacacugcugauguuu

SEQ ID NO: 2474194 - RNA, 19 nt, Artificial Sequence
  Description of Artificial Sequence: Synthetic oligonucleotide
  Sense strand starting at position 1153 of SEQ ID NO: 1887463
aucagcaguguuugaagua

SEQ ID NO: 2474195 - RNA, 19 nt, Artificial Sequence
  Description of Artificial Sequence: Synthetic oligonucleotide
  Antisense strand to SEQ ID NO: 2474194
uacuucaaacacugcugau

SEQ ID NO: 2474196 - RNA, 19 nt, Artificial Sequence
  Description of Artificial Sequence: Synthetic oligonucleotide
  Sense strand starting at position 1265 of SEQ ID NO: 1887463
gguaugagucuggguggua

SEQ ID NO: 2474197 - RNA, 19 nt, Artificial Sequence
  Description of Artificial Sequence: Synthetic oligonucleotide
  Antisense strand to SEQ ID NO: 2474196
uaccacccagacucauacc

SEQ ID NO: 2474198 - RNA, 19 nt, Artificial Sequence
  Description of Artificial Sequence: Synthetic oligonucleotide
  Sense strand starting at position 1266 of SEQ ID NO: 1887463
guaugagucugggugguag

SEQ ID NO: 2474199 - RNA, 19 nt, Artificial Sequence
  Description of Artificial Sequence: Synthetic oligonucleotide
  Antisense strand to SEQ ID NO: 2474198
cuaccacccagacucauac

SEQ ID NO: 2474200 - RNA, 19 nt, Artificial Sequence
  Description of Artificial Sequence: Synthetic oligonucleotide
  Sense strand starting at position 1347 of SEQ ID NO: 1887463
agugcaguuguaugaaggu

SEQ ID NO: 2474201 - RNA, 19 nt, Artificial Sequence
  Description of Artificial Sequence: Synthetic oligonucleotide
  Antisense strand to SEQ ID NO: 2474200
accuucauacaacugcacu

SEQ ID NO: 2474202 - RNA, 19 nt, Artificial Sequence
  Description of Artificial Sequence: Synthetic oligonucleotide
  Sense strand starting at position 1435 of SEQ ID NO: 1887463
gaguguugcaaggagacca

SEQ ID NO: 2474203 - RNA, 19 nt, Artificial Sequence
  Description of Artificial Sequence: Synthetic oligonucleotide
  Antisense strand to SEQ ID NO: 2474202
uggucuccuugcaacacuc

SEQ ID NO: 2474204 - RNA, 19 nt, Artificial Sequence
  Description of Artificial Sequence: Synthetic oligonucleotide
  Sense strand starting at position 1454 of SEQ ID NO: 1887463
gagugaagcugaggucuaa

SEQ ID NO: 2474205 - RNA, 19 nt, Artificial Sequence
  Description of Artificial Sequence: Synthetic oligonucleotide
  Antisense strand to SEQ ID NO: 2474204
uuagaccucagcuucacuc

SEQ ID NO: 2474206 - RNA, 19 nt, Artificial Sequence
  Description of Artificial Sequence: Synthetic oligonucleotide
  Sense strand starting at position 1518 of SEQ ID NO: 1887463
gagcguagagccugagaga

SEQ ID NO: 2474207 - RNA, 19 nt, Artificial Sequence
  Description of Artificial Sequence: Synthetic oligonucleotide
  Antisense strand to SEQ ID NO: 2474206
ucucucaggcucuacgcuc

SEQ ID NO: 2474208 - RNA, 19 nt, Artificial Sequence
  Description of Artificial Sequence: Synthetic oligonucleotide
  Sense strand starting at position 2086 of SEQ ID NO: 1887463
gcgggaucccgaggaagaa

SEQ ID NO: 2474209 - RNA, 19 nt, Artificial Sequence
  Description of Artificial Sequence: Synthetic oligonucleotide
  Antisense strand to SEQ ID NO: 2474208
uucuuccucgggaucccgc

SEQ ID NO: 2474210 - RNA, 19 nt, Artificial Sequence
  Description of Artificial Sequence: Synthetic oligonucleotide
  Sense strand starting at position 2784 of SEQ ID NO: 1887463
ggaggcuuucuuugcuacu

SEQ ID NO: 2474211 - RNA, 19 nt, Artificial Sequence
  Description of Artificial Sequence: Synthetic oligonucleotide
  Antisense strand to SEQ ID NO: 2474210
aguagcaaagaaagccucc

SEQ ID NO: 2474212 - RNA, 19 nt, Artificial Sequence
  Description of Artificial Sequence: Synthetic oligonucleotide
  Sense strand starting at position 2785 of SEQ ID NO: 1887463
gaggcuuucuuugcuacua

SEQ ID NO: 2474213 - RNA, 19 nt, Artificial Sequence
  Description of Artificial Sequence: Synthetic oligonucleotide
  Antisense strand to SEQ ID NO: 2474212
uaguagcaaagaaagccuc

SEQ ID NO: 2474214 - RNA, 19 nt, Artificial Sequence
  Description of Artificial Sequence: Synthetic oligonucleotide
  Sense strand starting at position 2786 of SEQ ID NO: 1887463
aggcuuucuuugcuacuaa

SEQ ID NO: 2474215 - RNA, 19 nt, Artificial Sequence
  Description of Artificial Sequence: Synthetic oligonucleotide
  Antisense strand to SEQ ID NO: 2474214
uuaguagcaaagaaagccu

SEQ ID NO: 2474216 - RNA, 19 nt, Artificial Sequence
  Description of Artificial Sequence: Synthetic oligonucleotide
  Sense strand starting at position 2787 of SEQ ID NO: 1887463
ggcuuucuuugcuacuaag

SEQ ID NO: 2474217 - RNA, 19 nt, Artificial Sequence
  Description of Artificial Sequence: Synthetic oligonucleotide
  Antisense strand to SEQ ID NO: 2474216
cuuaguagcaaagaaagcc

SEQ ID NO: 2474218 - RNA, 19 nt, Artificial Sequence
  Description of Artificial Sequence: Synthetic oligonucleotide
  Sense strand starting at position 2790 of SEQ ID NO: 1887463
uuucuuugcuacuaaggga

SEQ ID NO: 2474219 - RNA, 19 nt, Artificial Sequence
  Description of Artificial Sequence: Synthetic oligonucleotide
  Antisense strand to SEQ ID NO: 2474218
ucccuuaguagcaaagaaa

SEQ ID NO: 2474220 - RNA, 19 nt, Artificial Sequence
  Description of Artificial Sequence: Synthetic oligonucleotide
  Sense strand starting at position 3654 of SEQ ID NO: 1887463
agagaaguguagugugauu

SEQ ID NO: 2474221 - RNA, 19 nt, Artificial Sequence
  Description of Artificial Sequence: Synthetic oligonucleotide
  Antisense strand to SEQ ID NO: 2474220
aaucacacuacacuucucu

SEQ ID NO: 2474222 - RNA, 19 nt, Artificial Sequence
  Description of Artificial Sequence: Synthetic oligonucleotide
  Sense strand starting at position 3663 of SEQ ID NO: 1887463
uagugugauuuagggcuaa

SEQ ID NO: 2474223 - RNA, 19 nt, Artificial Sequence
  Description of Artificial Sequence: Synthetic oligonucleotide
  Antisense strand to SEQ ID NO: 2474222
uuagcccuaaaucacacua

SEQ ID NO: 2474224 - RNA, 19 nt, Artificial Sequence
  Description of Artificial Sequence: Synthetic oligonucleotide
  Sense strand starting at position 3685 of SEQ ID NO: 1887463
cugaucaggcccuaaauca

SEQ ID NO: 2474225 - RNA, 19 nt, Artificial Sequence
  Description of Artificial Sequence: Synthetic oligonucleotide
  Antisense strand to SEQ ID NO: 2474224
ugauuuagggccugaucag

SEQ ID NO: 2474226 - RNA, 19 nt, Artificial Sequence
  Description of Artificial Sequence: Synthetic oligonucleotide
  Sense strand starting at position 3726 of SEQ ID NO: 1887463
gugauaucaagguggccuu

SEQ ID NO: 2474227 - RNA, 19 nt, Artificial Sequence
  Description of Artificial Sequence: Synthetic oligonucleotide
  Antisense strand to SEQ ID NO: 2474226
aaggccaccuugauaucac

SEQ ID NO: 2474228 - RNA, 19 nt, Artificial Sequence
  Description of Artificial Sequence: Synthetic oligonucleotide
  Sense strand starting at position 140 of SEQ ID NO: 1887464
cagggauggauguggguaa

SEQ ID NO: 2474229 - RNA, 19 nt, Artificial Sequence
  Description of Artificial Sequence: Synthetic oligonucleotide
  Antisense strand to SEQ ID NO: 2474228
uuacccacauccaucccug

SEQ ID NO: 2474230 - RNA, 19 nt, Artificial Sequence
  Description of Artificial Sequence: Synthetic oligonucleotide
  Sense strand starting at position 161 of SEQ ID NO: 1887464
ucaugaugugguuaggaug

SEQ ID NO: 2474231 - RNA, 19 nt, Artificial Sequence
  Description of Artificial Sequence: Synthetic oligonucleotide
  Antisense strand to SEQ ID NO: 2474230
cauccuaaccacaucauga

SEQ ID NO: 2474232 - RNA, 19 nt, Artificial Sequence
  Description of Artificial Sequence: Synthetic oligonucleotide
  Sense strand starting at position 249 of SEQ ID NO: 1887464
ugaaguuggauuggagagu

SEQ ID NO: 2474233 - RNA, 19 nt, Artificial Sequence
  Description of Artificial Sequence: Synthetic oligonucleotide
  Antisense strand to SEQ ID NO: 2474232
acucuccaauccaacuuca

SEQ ID NO: 2474234 - RNA, 19 nt, Artificial Sequence
  Description of Artificial Sequence: Synthetic oligonucleotide
  Sense strand starting at position 339 of SEQ ID NO: 1887464
augggauugguuggucaua

SEQ ID NO: 2474235 - RNA, 19 nt, Artificial Sequence
  Description of Artificial Sequence: Synthetic oligonucleotide
  Antisense strand to SEQ ID NO: 2474234
uaugaccaaccaaucccau

SEQ ID NO: 2474236 - RNA, 19 nt, Artificial Sequence
  Description of Artificial Sequence: Synthetic oligonucleotide
  Sense strand starting at position 340 of SEQ ID NO: 1887464
ugggauugguuggucauau

SEQ ID NO: 2474237 - RNA, 19 nt, Artificial Sequence
  Description of Artificial Sequence: Synthetic oligonucleotide
  Antisense strand to SEQ ID NO: 2474236
auaugaccaaccaauccca

SEQ ID NO: 2474238 - RNA, 19 nt, Artificial Sequence
  Description of Artificial Sequence: Synthetic oligonucleotide
  Sense strand starting at position 341 of SEQ ID NO: 1887464
gggauugguuggucauaua

SEQ ID NO: 2474239 - RNA, 19 nt, Artificial Sequence
  Description of Artificial Sequence: Synthetic oligonucleotide
  Antisense strand to SEQ ID NO: 2474238
uauaugaccaaccaauccc

SEQ ID NO: 2474240 - RNA, 19 nt, Artificial Sequence
  Description of Artificial Sequence: Synthetic oligonucleotide
  Sense strand starting at position 348 of SEQ ID NO: 1887464
guuggucauauauguagac

SEQ ID NO: 2474241 - RNA, 19 nt, Artificial Sequence
  Description of Artificial Sequence: Synthetic oligonucleotide
  Antisense strand to SEQ ID NO: 2474240
gucuacauauaugaccaac

SEQ ID NO: 2474242 - RNA, 19 nt, Artificial Sequence
  Description of Artificial Sequence: Synthetic oligonucleotide
  Sense strand starting at position 370 of SEQ ID NO: 1887464
gggcuugagggucacauua

SEQ ID NO: 2474243 - RNA, 19 nt, Artificial Sequence
  Description of Artificial Sequence: Synthetic oligonucleotide
  Antisense strand to SEQ ID NO: 2474242
uaaugugacccucaagccc

SEQ ID NO: 2474244 - RNA, 19 nt, Artificial Sequence
  Description of Artificial Sequence: Synthetic oligonucleotide
  Sense strand starting at position 567 of SEQ ID NO: 1887464
aucagcauaucucagggau

SEQ ID NO: 2474245 - RNA, 19 nt, Artificial Sequence
  Description of Artificial Sequence: Synthetic oligonucleotide
  Antisense strand to SEQ ID NO: 2474244
aucccugagauaugcugau

SEQ ID NO: 2474246 - RNA, 19 nt, Artificial Sequence
  Description of Artificial Sequence: Synthetic oligonucleotide
  Sense strand starting at position 569 of SEQ ID NO: 1887464
cagcauaucucagggauuu

SEQ ID NO: 2474247 - RNA, 19 nt, Artificial Sequence
  Description of Artificial Sequence: Synthetic oligonucleotide
  Antisense strand to SEQ ID NO: 2474246
aaaucccugagauaugcug

SEQ ID NO: 2474248 - RNA, 19 nt, Artificial Sequence
  Description of Artificial Sequence: Synthetic oligonucleotide
  Sense strand starting at position 1170 of SEQ ID NO: 1887464
cuuguugaacccugugcua

SEQ ID NO: 2474249 - RNA, 19 nt, Artificial Sequence
  Description of Artificial Sequence: Synthetic oligonucleotide
  Antisense strand to SEQ ID NO: 2474248
uagcacaggguucaacaag

SEQ ID NO: 2474250 - RNA, 19 nt, Artificial Sequence
  Description of Artificial Sequence: Synthetic oligonucleotide
  Sense strand starting at position 1172 of SEQ ID NO: 1887464
uguugaacccugugcuaug

SEQ ID NO: 2474251 - RNA, 19 nt, Artificial Sequence
  Description of Artificial Sequence: Synthetic oligonucleotide
  Antisense strand to SEQ ID NO: 2474250
cauagcacaggguucaaca

SEQ ID NO: 2474252 - RNA, 19 nt, Artificial Sequence
  Description of Artificial Sequence: Synthetic oligonucleotide
  Sense strand starting at position 1195 of SEQ ID NO: 1887464
ggguuugagauccaagucu

SEQ ID NO: 2474253 - RNA, 19 nt, Artificial Sequence
  Description of Artificial Sequence: Synthetic oligonucleotide
  Antisense strand to SEQ ID NO: 2474252
agacuuggaucucaaaccc

SEQ ID NO: 2474254 - RNA, 19 nt, Artificial Sequence
  Description of Artificial Sequence: Synthetic oligonucleotide
  Sense strand starting at position 1225 of SEQ ID NO: 1887464
gggcuuuggguagaaaggu

SEQ ID NO: 2474255 - RNA, 19 nt, Artificial Sequence
  Description of Artificial Sequence: Synthetic oligonucleotide
  Antisense strand to SEQ ID NO: 2474254
accuuucuacccaaagccc

SEQ ID NO: 2474256 - RNA, 19 nt, Artificial Sequence
  Description of Artificial Sequence: Synthetic oligonucleotide
  Sense strand starting at position 1300 of SEQ ID NO: 1887464
cucagagacuuugcaccua

SEQ ID NO: 2474257 - RNA, 19 nt, Artificial Sequence
  Description of Artificial Sequence: Synthetic oligonucleotide
  Antisense strand to SEQ ID NO: 2474256
uaggugcaaagucucugag

SEQ ID NO: 2474258 - RNA, 19 nt, Artificial Sequence
  Description of Artificial Sequence: Synthetic oligonucleotide
  Sense strand starting at position 1330 of SEQ ID NO: 1887464
cuggacuucucuucuuaag

SEQ ID NO: 2474259 - RNA, 19 nt, Artificial Sequence
  Description of Artificial Sequence: Synthetic oligonucleotide
  Antisense strand to SEQ ID NO: 2474258
cuuaagaagagaaguccag

SEQ ID NO: 2474260 - RNA, 19 nt, Artificial Sequence
  Description of Artificial Sequence: Synthetic oligonucleotide
  Sense strand starting at position 1332 of SEQ ID NO: 1887464
ggacuucucuucuuaagau

SEQ ID NO: 2474261 - RNA, 19 nt, Artificial Sequence
  Description of Artificial Sequence: Synthetic oligonucleotide
  Antisense strand to SEQ ID NO: 2474260
aucuuaagaagagaagucc

SEQ ID NO: 2474262 - RNA, 19 nt, Artificial Sequence
  Description of Artificial Sequence: Synthetic oligonucleotide
  Sense strand starting at position 1557 of SEQ ID NO: 1887464
gagacugacuaugugucua

SEQ ID NO: 2474263 - RNA, 19 nt, Artificial Sequence
  Description of Artificial Sequence: Synthetic oligonucleotide
  Antisense strand to SEQ ID NO: 2474262
uagacacauagucagucuc

SEQ ID NO: 2474264 - RNA, 19 nt, Artificial Sequence
  Description of Artificial Sequence: Synthetic oligonucleotide
  Sense strand starting at position 1559 of SEQ ID NO: 1887464
gacugacuaugugucuaca

SEQ ID NO: 2474265 - RNA, 19 nt, Artificial Sequence
  Description of Artificial Sequence: Synthetic oligonucleotide
  Antisense strand to SEQ ID NO: 2474264
uguagacacauagucaguc

SEQ ID NO: 2474266 - RNA, 19 nt, Artificial Sequence
  Description of Artificial Sequence: Synthetic oligonucleotide
  Sense strand starting at position 1561 of SEQ ID NO: 1887464
cugacuaugugucuacaau

SEQ ID NO: 2474267 - RNA, 19 nt, Artificial Sequence
  Description of Artificial Sequence: Synthetic oligonucleotide
  Antisense strand to SEQ ID NO: 2474266
auuguagacacauagucag

SEQ ID NO: 2474268 - RNA, 19 nt, Artificial Sequence
  Description of Artificial Sequence: Synthetic oligonucleotide
  Sense strand starting at position 1562 of SEQ ID NO: 1887464
ugacuaugugucuacaaug

SEQ ID NO: 2474269 - RNA, 19 nt, Artificial Sequence
  Description of Artificial Sequence: Synthetic oligonucleotide
  Antisense strand to SEQ ID NO: 2474268
cauuguagacacauaguca

SEQ ID NO: 2474270 - RNA, 19 nt, Artificial Sequence
  Description of Artificial Sequence: Synthetic oligonucleotide
  Sense strand starting at position 2516 of SEQ ID NO: 1887464
ggucuugagauggaugguu

SEQ ID NO: 2474271 - RNA, 19 nt, Artificial Sequence
  Description of Artificial Sequence: Synthetic oligonucleotide
  Antisense strand to SEQ ID NO: 2474270
aaccauccaucucaagacc

SEQ ID NO: 2474272 - RNA, 19 nt, Artificial Sequence
  Description of Artificial Sequence: Synthetic oligonucleotide
  Sense strand starting at position 2518 of SEQ ID NO: 1887464
ucuugagauggaugguuua

SEQ ID NO: 2474273 - RNA, 19 nt, Artificial Sequence
  Description of Artificial Sequence: Synthetic oligonucleotide
  Antisense strand to SEQ ID NO: 2474272
uaaaccauccaucucaaga

SEQ ID NO: 2474274 - RNA, 19 nt, Artificial Sequence
  Description of Artificial Sequence: Synthetic oligonucleotide
  Sense strand starting at position 2555 of SEQ ID NO: 1887464
ggccuuaaauggcuuuaca

SEQ ID NO: 2474275 - RNA, 19 nt, Artificial Sequence
  Description of Artificial Sequence: Synthetic oligonucleotide
  Antisense strand to SEQ ID NO: 2474274
uguaaagccauuuaaggcc

SEQ ID NO: 2474276 - RNA, 19 nt, Artificial Sequence
  Description of Artificial Sequence: Synthetic oligonucleotide
  Sense strand starting at position 2875 of SEQ ID NO: 1887464
uuacaaggguccucguaga

SEQ ID NO: 2474277 - RNA, 19 nt, Artificial Sequence
  Description of Artificial Sequence: Synthetic oligonucleotide
  Antisense strand to SEQ ID NO: 2474276
ucuacgaggacccuuguaa

SEQ ID NO: 2474278 - RNA, 19 nt, Artificial Sequence
  Description of Artificial Sequence: Synthetic oligonucleotide
  Sense strand starting at position 2925 of SEQ ID NO: 1887464
aaggcaauguggucacuaa

SEQ ID NO: 2474279 - RNA, 19 nt, Artificial Sequence
  Description of Artificial Sequence: Synthetic oligonucleotide
  Antisense strand to SEQ ID NO: 2474278
uuagugaccacauugccuu

SEQ ID NO: 2474280 - RNA, 19 nt, Artificial Sequence
  Description of Artificial Sequence: Synthetic oligonucleotide
  Sense strand starting at position 2926 of SEQ ID NO: 1887464
aggcaauguggucacuaaa

SEQ ID NO: 2474281 - RNA, 19 nt, Artificial Sequence
  Description of Artificial Sequence: Synthetic oligonucleotide
  Antisense strand to SEQ ID NO: 2474280
uuuagugaccacauugccu

SEQ ID NO: 2474282 - RNA, 19 nt, Artificial Sequence
  Description of Artificial Sequence: Synthetic oligonucleotide
  Sense strand starting at position 2929 of SEQ ID NO: 1887464
caauguggucacuaaaguu

SEQ ID NO: 2474283 - RNA, 19 nt, Artificial Sequence
  Description of Artificial Sequence: Synthetic oligonucleotide
  Antisense strand to SEQ ID NO: 2474282
aacuuuagugaccacauug

SEQ ID NO: 2474284 - RNA, 19 nt, Artificial Sequence
  Description of Artificial Sequence: Synthetic oligonucleotide
  Sense strand starting at position 2943 of SEQ ID NO: 1887464
aaguuaugcuggcuuugaa

SEQ ID NO: 2474285 - RNA, 19 nt, Artificial Sequence
  Description of Artificial Sequence: Synthetic oligonucleotide
  Antisense strand to SEQ ID NO: 2474284
uucaaagccagcauaacuu

SEQ ID NO: 2474286 - RNA, 19 nt, Artificial Sequence
  Description of Artificial Sequence: Synthetic oligonucleotide
  Sense strand starting at position 2946 of SEQ ID NO: 1887464
uuaugcuggcuuugaagau

SEQ ID NO: 2474287 - RNA, 19 nt, Artificial Sequence
  Description of Artificial Sequence: Synthetic oligonucleotide
  Antisense strand to SEQ ID NO: 2474286
aucuucaaagccagcauaa

SEQ ID NO: 2474288 - RNA, 19 nt, Artificial Sequence
  Description of Artificial Sequence: Synthetic oligonucleotide
  Sense strand starting at position 2952 of SEQ ID NO: 1887464
uggcuuugaagaugcaaga

SEQ ID NO: 2474289 - RNA, 19 nt, Artificial Sequence
  Description of Artificial Sequence: Synthetic oligonucleotide
  Antisense strand to SEQ ID NO: 2474288
ucuugcaucuucaaagcca

SEQ ID NO: 2474290 - RNA, 19 nt, Artificial Sequence
  Description of Artificial Sequence: Synthetic oligonucleotide
  Sense strand starting at position 2972 of SEQ ID NO: 1887464
ggagccauaugcuaaagaa

SEQ ID NO: 2474291 - RNA, 19 nt, Artificial Sequence
  Description of Artificial Sequence: Synthetic oligonucleotide
  Antisense strand to SEQ ID NO: 2474290
uucuuuagcauauggcucc

SEQ ID NO: 2474292 - RNA, 19 nt, Artificial Sequence
  Description of Artificial Sequence: Synthetic oligonucleotide
  Sense strand starting at position 3077 of SEQ ID NO: 1887464
ggguuucagcagugagacu

SEQ ID NO: 2474293 - RNA, 19 nt, Artificial Sequence
  Description of Artificial Sequence: Synthetic oligonucleotide
  Antisense strand to SEQ ID NO: 2474292
agucucacugcugaaaccc

SEQ ID NO: 2474294 - RNA, 19 nt, Artificial Sequence
  Description of Artificial Sequence: Synthetic oligonucleotide
  Sense strand starting at position 3095 of SEQ ID NO: 1887464
ugauguuggucuccugacu

SEQ ID NO: 2474295 - RNA, 19 nt, Artificial Sequence
  Description of Artificial Sequence: Synthetic oligonucleotide
  Antisense strand to SEQ ID NO: 2474294
agucaggagaccaacauca

SEQ ID NO: 2474296 - RNA, 19 nt, Artificial Sequence
  Description of Artificial Sequence: Synthetic oligonucleotide
  Sense strand starting at position 3777 of SEQ ID NO: 1887464
gugguuccgagucacucaa

SEQ ID NO: 2474297 - RNA, 19 nt, Artificial Sequence
  Description of Artificial Sequence: Synthetic oligonucleotide
  Antisense strand to SEQ ID NO: 2474296
uugagugacucggaaccac

SEQ ID NO: 2474298 - RNA, 19 nt, Artificial Sequence
  Description of Artificial Sequence: Synthetic oligonucleotide
  Sense strand starting at position 3779 of SEQ ID NO: 1887464
gguuccgagucacucaauu

SEQ ID NO: 2474299 - RNA, 19 nt, Artificial Sequence
  Description of Artificial Sequence: Synthetic oligonucleotide
  Antisense strand to SEQ ID NO: 2474298
aauugagugacucggaacc

SEQ ID NO: 2474300 - RNA, 19 nt, Artificial Sequence
  Description of Artificial Sequence: Synthetic oligonucleotide
  Sense strand starting at position 3800 of SEQ ID NO: 1887464
ugaguaauuuguuagaguc

SEQ ID NO: 2474301 - RNA, 19 nt, Artificial Sequence
  Description of Artificial Sequence: Synthetic oligonucleotide
  Antisense strand to SEQ ID NO: 2474300
gacucuaacaaauuacuca

SEQ ID NO: 2474302 - RNA, 19 nt, Artificial Sequence
  Description of Artificial Sequence: Synthetic oligonucleotide
  Sense strand starting at position 3802 of SEQ ID NO: 1887464
aguaauuuguuagagucac

SEQ ID NO: 2474303 - RNA, 19 nt, Artificial Sequence
  Description of Artificial Sequence: Synthetic oligonucleotide
  Antisense strand to SEQ ID NO: 2474302
gugacucuaacaaauuacu

SEQ ID NO: 2474304 - RNA, 19 nt, Artificial Sequence
  Description of Artificial Sequence: Synthetic oligonucleotide
  Sense strand starting at position 3814 of SEQ ID NO: 1887464
gagucacuauaggaaacua

SEQ ID NO: 2474305 - RNA, 19 nt, Artificial Sequence
  Description of Artificial Sequence: Synthetic oligonucleotide
  Antisense strand to SEQ ID NO: 2474304
uaguuuccuauagugacuc

SEQ ID NO: 2474306 - RNA, 19 nt, Artificial Sequence
  Description of Artificial Sequence: Synthetic oligonucleotide
  Sense strand starting at position 3949 of SEQ ID NO: 1887464
ggaacauuagguuggguuu

SEQ ID NO: 2474307 - RNA, 19 nt, Artificial Sequence
  Description of Artificial Sequence: Synthetic oligonucleotide
  Antisense strand to SEQ ID NO: 2474306
aaacccaaccuaauguucc

SEQ ID NO: 2474308 - RNA, 19 nt, Artificial Sequence
  Description of Artificial Sequence: Synthetic oligonucleotide
  Sense strand starting at position 16 of SEQ ID NO: 1887465
ucgagugcuuccagggaga

SEQ ID NO: 2474309 - RNA, 19 nt, Artificial Sequence
  Description of Artificial Sequence: Synthetic oligonucleotide
  Antisense strand to SEQ ID NO: 2474308
ucucccuggaagcacucga

SEQ ID NO: 2474310 - RNA, 19 nt, Artificial Sequence
  Description of Artificial Sequence: Synthetic oligonucleotide
  Sense strand starting at position 1498 of SEQ ID NO: 1887465
gucacucacccuuggacaa

SEQ ID NO: 2474311 - RNA, 19 nt, Artificial Sequence
  Description of Artificial Sequence: Synthetic oligonucleotide
  Antisense strand to SEQ ID NO: 2474310
uuguccaagggugagugac

SEQ ID NO: 2474312 - RNA, 19 nt, Artificial Sequence
  Description of Artificial Sequence: Synthetic oligonucleotide
  Sense strand starting at position 1668 of SEQ ID NO: 1887465
cuggguuccucucaggaaa

SEQ ID NO: 2474313 - RNA, 19 nt, Artificial Sequence
  Description of Artificial Sequence: Synthetic oligonucleotide
  Antisense strand to SEQ ID NO: 2474312
uuuccugagaggaacccag

SEQ ID NO: 2474314 - RNA, 19 nt, Artificial Sequence
  Description of Artificial Sequence: Synthetic oligonucleotide
  Sense strand starting at position 1670 of SEQ ID NO: 1887465
ggguuccucucaggaaacu

SEQ ID NO: 2474315 - RNA, 19 nt, Artificial Sequence
  Description of Artificial Sequence: Synthetic oligonucleotide
  Antisense strand to SEQ ID NO: 2474314
aguuuccugagaggaaccc

SEQ ID NO: 2474316 - RNA, 19 nt, Artificial Sequence
  Description of Artificial Sequence: Synthetic oligonucleotide
  Sense strand starting at position 2290 of SEQ ID NO: 1887465
ccugcuggcuccugagaaa

SEQ ID NO: 2474317 - RNA, 19 nt, Artificial Sequence
  Description of Artificial Sequence: Synthetic oligonucleotide
  Antisense strand to SEQ ID NO: 2474316
uuucucaggagccagcagg

SEQ ID NO: 2474318 - RNA, 19 nt, Artificial Sequence
  Description of Artificial Sequence: Synthetic oligonucleotide
  Sense strand starting at position 2361 of SEQ ID NO: 1887465
gucugaaccugaccuugau

SEQ ID NO: 2474319 - RNA, 19 nt, Artificial Sequence
  Description of Artificial Sequence: Synthetic oligonucleotide
  Antisense strand to SEQ ID NO: 2474318
aucaaggucagguucagac

SEQ ID NO: 2474320 - RNA, 19 nt, Artificial Sequence
  Description of Artificial Sequence: Synthetic oligonucleotide
  Sense strand starting at position 2385 of SEQ ID NO: 1887465
cccucugugccagaagaga

SEQ ID NO: 2474321 - RNA, 19 nt, Artificial Sequence
  Description of Artificial Sequence: Synthetic oligonucleotide
  Antisense strand to SEQ ID NO: 2474320
ucucuucuggcacagaggg

SEQ ID NO: 2474322 - RNA, 19 nt, Artificial Sequence
  Description of Artificial Sequence: Synthetic oligonucleotide
  Sense strand starting at position 2732 of SEQ ID NO: 1887465
ucgaauucgugaccucaga

SEQ ID NO: 2474323 - RNA, 19 nt, Artificial Sequence
  Description of Artificial Sequence: Synthetic oligonucleotide
  Antisense strand to SEQ ID NO: 2474322
ucugaggucacgaauucga

SEQ ID NO: 2474324 - RNA, 19 nt, Artificial Sequence
  Description of Artificial Sequence: Synthetic oligonucleotide
  Sense strand starting at position 2893 of SEQ ID NO: 1887465
ugaaguuacgcaugucuac

SEQ ID NO: 2474325 - RNA, 19 nt, Artificial Sequence
  Description of Artificial Sequence: Synthetic oligonucleotide
  Antisense strand to SEQ ID NO: 2474324
guagacaugcguaacuuca

SEQ ID NO: 2474326 - RNA, 19 nt, Artificial Sequence
  Description of Artificial Sequence: Synthetic oligonucleotide
  Sense strand starting at position 2980 of SEQ ID NO: 1887465
ugccaugugccagguauuu

SEQ ID NO: 2474327 - RNA, 19 nt, Artificial Sequence
  Description of Artificial Sequence: Synthetic oligonucleotide
  Antisense strand to SEQ ID NO: 2474326
aaauaccuggcacauggca

SEQ ID NO: 2474328 - RNA, 19 nt, Artificial Sequence
  Description of Artificial Sequence: Synthetic oligonucleotide
  Sense strand starting at position 3362 of SEQ ID NO: 1887465
ugcacagagugauuacauu

SEQ ID NO: 2474329 - RNA, 19 nt, Artificial Sequence
  Description of Artificial Sequence: Synthetic oligonucleotide
  Antisense strand to SEQ ID NO: 2474328
aauguaaucacucugugca

SEQ ID NO: 2474330 - RNA, 19 nt, Artificial Sequence
  Description of Artificial Sequence: Synthetic oligonucleotide
  Sense strand starting at position 3444 of SEQ ID NO: 1887465
cucaaauuaucguguaucu

SEQ ID NO: 2474331 - RNA, 19 nt, Artificial Sequence
  Description of Artificial Sequence: Synthetic oligonucleotide
  Antisense strand to SEQ ID NO: 2474330
agauacacgauaauuugag

SEQ ID NO: 2474332 - RNA, 19 nt, Artificial Sequence
  Description of Artificial Sequence: Synthetic oligonucleotide
  Sense strand starting at position 3449 of SEQ ID NO: 1887465
auuaucguguaucuaagaa

SEQ ID NO: 2474333 - RNA, 19 nt, Artificial Sequence
  Description of Artificial Sequence: Synthetic oligonucleotide
  Antisense strand to SEQ ID NO: 2474332
uucuuagauacacgauaau

SEQ ID NO: 2474334 - RNA, 19 nt, Artificial Sequence
  Description of Artificial Sequence: Synthetic oligonucleotide
  Sense strand starting at position 3453 of SEQ ID NO: 1887465
ucguguaucuaagaaucaa

SEQ ID NO: 2474335 - RNA, 19 nt, Artificial Sequence
  Description of Artificial Sequence: Synthetic oligonucleotide
  Antisense strand to SEQ ID NO: 2474334
uugauucuuagauacacga

SEQ ID NO: 2474336 - RNA, 19 nt, Artificial Sequence
  Description of Artificial Sequence: Synthetic oligonucleotide
  Sense strand starting at position 3740 of SEQ ID NO: 1887465
ugcacucuagcuggguaau

SEQ ID NO: 2474337 - RNA, 19 nt, Artificial Sequence
  Description of Artificial Sequence: Synthetic oligonucleotide
  Antisense strand to SEQ ID NO: 2474336
auuacccagcuagagugca

SEQ ID NO: 2474338 - RNA, 19 nt, Artificial Sequence
  Description of Artificial Sequence: Synthetic oligonucleotide
  Sense strand starting at position 3741 of SEQ ID NO: 1887465
gcacucuagcuggguaaua

SEQ ID NO: 2474339 - RNA, 19 nt, Artificial Sequence
  Description of Artificial Sequence: Synthetic oligonucleotide
  Antisense strand to SEQ ID NO: 2474338
uauuacccagcuagagugc

SEQ ID NO: 2474340 - RNA, 19 nt, Artificial Sequence
  Description of Artificial Sequence: Synthetic oligonucleotide
  Sense strand starting at position 3743 of SEQ ID NO: 1887465
acucuagcuggguaauaga

SEQ ID NO: 2474341 - RNA, 19 nt, Artificial Sequence
  Description of Artificial Sequence: Synthetic oligonucleotide
  Antisense strand to SEQ ID NO: 2474340
ucuauuacccagcuagagu

SEQ ID NO: 2474342 - RNA, 19 nt, Artificial Sequence
  Description of Artificial Sequence: Synthetic oligonucleotide
  Sense strand starting at position 3795 of SEQ ID NO: 1887465
caggacauaucugcagaga

SEQ ID NO: 2474343 - RNA, 19 nt, Artificial Sequence
  Description of Artificial Sequence: Synthetic oligonucleotide
  Antisense strand to SEQ ID NO: 2474342
ucucugcagauauguccug

SEQ ID NO: 2474344 - RNA, 19 nt, Artificial Sequence
  Description of Artificial Sequence: Synthetic oligonucleotide
  Sense strand starting at position 3856 of SEQ ID NO: 1887465
ggauaaagauagcuaaugu

SEQ ID NO: 2474345 - RNA, 19 nt, Artificial Sequence
  Description of Artificial Sequence: Synthetic oligonucleotide
  Antisense strand to SEQ ID NO: 2474344
acauuagcuaucuuuaucc

SEQ ID NO: 2474346 - RNA, 19 nt, Artificial Sequence
  Description of Artificial Sequence: Synthetic oligonucleotide
  Sense strand starting at position 3863 of SEQ ID NO: 1887465
gauagcuaauguuuccaga

SEQ ID NO: 2474347 - RNA, 19 nt, Artificial Sequence
  Description of Artificial Sequence: Synthetic oligonucleotide
  Antisense strand to SEQ ID NO: 2474346
ucuggaaacauuagcuauc

SEQ ID NO: 2474348 - RNA, 19 nt, Artificial Sequence
  Description of Artificial Sequence: Synthetic oligonucleotide
  Sense strand starting at position 3866 of SEQ ID NO: 1887465
agcuaauguuuccagaggu

SEQ ID NO: 2474349 - RNA, 19 nt, Artificial Sequence
  Description of Artificial Sequence: Synthetic oligonucleotide
  Antisense strand to SEQ ID NO: 2474348
accucuggaaacauuagcu

SEQ ID NO: 2474350 - RNA, 19 nt, Artificial Sequence
  Description of Artificial Sequence: Synthetic oligonucleotide
  Sense strand starting at position 167 of SEQ ID NO: 1887466
ccaggaguuuaggucccaa

SEQ ID NO: 2474351 - RNA, 19 nt, Artificial Sequence
  Description of Artificial Sequence: Synthetic oligonucleotide
  Antisense strand to SEQ ID NO: 2474350
uugggaccuaaacuccugg

SEQ ID NO: 2474352 - RNA, 19 nt, Artificial Sequence
  Description of Artificial Sequence: Synthetic oligonucleotide
  Sense strand starting at position 856 of SEQ ID NO: 1887466
cguaaugcaugucucaauu

SEQ ID NO: 2474353 - RNA, 19 nt, Artificial Sequence
  Description of Artificial Sequence: Synthetic oligonucleotide
  Antisense strand to SEQ ID NO: 2474352
aauugagacaugcauuacg

SEQ ID NO: 2474354 - RNA, 19 nt, Artificial Sequence
  Description of Artificial Sequence: Synthetic oligonucleotide
  Sense strand starting at position 1055 of SEQ ID NO: 1887466
ccuugaucucugugauucc

SEQ ID NO: 2474355 - RNA, 19 nt, Artificial Sequence
  Description of Artificial Sequence: Synthetic oligonucleotide
  Antisense strand to SEQ ID NO: 2474354
ggaaucacagagaucaagg

SEQ ID NO: 2474356 - RNA, 19 nt, Artificial Sequence
  Description of Artificial Sequence: Synthetic oligonucleotide
  Sense strand starting at position 1058 of SEQ ID NO: 1887466
ugaucucugugauuccuaa

SEQ ID NO: 2474357 - RNA, 19 nt, Artificial Sequence
  Description of Artificial Sequence: Synthetic oligonucleotide
  Antisense strand to SEQ ID NO: 2474356
uuaggaaucacagagauca

SEQ ID NO: 2474358 - RNA, 19 nt, Artificial Sequence
  Description of Artificial Sequence: Synthetic oligonucleotide
  Sense strand starting at position 1632 of SEQ ID NO: 1887466
gaggcucugucuuccacua

SEQ ID NO: 2474359 - RNA, 19 nt, Artificial Sequence
  Description of Artificial Sequence: Synthetic oligonucleotide
  Antisense strand to SEQ ID NO: 2474358
uaguggaagacagagccuc

SEQ ID NO: 2474360 - RNA, 19 nt, Artificial Sequence
  Description of Artificial Sequence: Synthetic oligonucleotide
  Sense strand starting at position 1745 of SEQ ID NO: 1887466
guuggaucuucuucugaau

SEQ ID NO: 2474361 - RNA, 19 nt, Artificial Sequence
  Description of Artificial Sequence: Synthetic oligonucleotide
  Antisense strand to SEQ ID NO: 2474360
auucagaagaagauccaac

SEQ ID NO: 2474362 - RNA, 19 nt, Artificial Sequence
  Description of Artificial Sequence: Synthetic oligonucleotide
  Sense strand starting at position 1747 of SEQ ID NO: 1887466
uggaucuucuucugaauug

SEQ ID NO: 2474363 - RNA, 19 nt, Artificial Sequence
  Description of Artificial Sequence: Synthetic oligonucleotide
  Antisense strand to SEQ ID NO: 2474362
caauucagaagaagaucca

SEQ ID NO: 2474364 - RNA, 19 nt, Artificial Sequence
  Description of Artificial Sequence: Synthetic oligonucleotide
  Sense strand starting at position 1748 of SEQ ID NO: 1887466
ggaucuucuucugaauuga

SEQ ID NO: 2474365 - RNA, 19 nt, Artificial Sequence
  Description of Artificial Sequence: Synthetic oligonucleotide
  Antisense strand to SEQ ID NO: 2474364
ucaauucagaagaagaucc

SEQ ID NO: 2474366 - RNA, 19 nt, Artificial Sequence
  Description of Artificial Sequence: Synthetic oligonucleotide
  Sense strand starting at position 1988 of SEQ ID NO: 1887466
acaggaagcuggguaagau

SEQ ID NO: 2474367 - RNA, 19 nt, Artificial Sequence
  Description of Artificial Sequence: Synthetic oligonucleotide
  Antisense strand to SEQ ID NO: 2474366
aucuuacccagcuuccugu

SEQ ID NO: 2474368 - RNA, 19 nt, Artificial Sequence
  Description of Artificial Sequence: Synthetic oligonucleotide
  Sense strand starting at position 2043 of SEQ ID NO: 1887466
cugagaucggccugaccuu

SEQ ID NO: 2474369 - RNA, 19 nt, Artificial Sequence
  Description of Artificial Sequence: Synthetic oligonucleotide
  Antisense strand to SEQ ID NO: 2474368
aaggucaggccgaucucag

SEQ ID NO: 2474370 - RNA, 19 nt, Artificial Sequence
  Description of Artificial Sequence: Synthetic oligonucleotide
  Sense strand starting at position 2062 of SEQ ID NO: 1887466
gcaggaauuucagggaggu

SEQ ID NO: 2474371 - RNA, 19 nt, Artificial Sequence
  Description of Artificial Sequence: Synthetic oligonucleotide
  Antisense strand to SEQ ID NO: 2474370
accucccugaaauuccugc

SEQ ID NO: 2474372 - RNA, 19 nt, Artificial Sequence
  Description of Artificial Sequence: Synthetic oligonucleotide
  Sense strand starting at position 2191 of SEQ ID NO: 1887466
uguuaugccucccuacgua

SEQ ID NO: 2474373 - RNA, 19 nt, Artificial Sequence
  Description of Artificial Sequence: Synthetic oligonucleotide
  Antisense strand to SEQ ID NO: 2474372
uacguagggaggcauaaca

SEQ ID NO: 2474374 - RNA, 19 nt, Artificial Sequence
  Description of Artificial Sequence: Synthetic oligonucleotide
  Sense strand starting at position 2331 of SEQ ID NO: 1887466
guuggagaugaacgauagu

SEQ ID NO: 2474375 - RNA, 19 nt, Artificial Sequence
  Description of Artificial Sequence: Synthetic oligonucleotide
  Antisense strand to SEQ ID NO: 2474374
acuaucguucaucuccaac

SEQ ID NO: 2474376 - RNA, 19 nt, Artificial Sequence
  Description of Artificial Sequence: Synthetic oligonucleotide
  Sense strand starting at position 2334 of SEQ ID NO: 1887466
ggagaugaacgauaguugu

SEQ ID NO: 2474377 - RNA, 19 nt, Artificial Sequence
  Description of Artificial Sequence: Synthetic oligonucleotide
  Antisense strand to SEQ ID NO: 2474376
acaacuaucguucaucucc

SEQ ID NO: 2474378 - RNA, 19 nt, Artificial Sequence
  Description of Artificial Sequence: Synthetic oligonucleotide
  Sense strand starting at position 2337 of SEQ ID NO: 1887466
gaugaacgauaguuguuua

SEQ ID NO: 2474379 - RNA, 19 nt, Artificial Sequence
  Description of Artificial Sequence: Synthetic oligonucleotide
  Antisense strand to SEQ ID NO: 2474378
uaaacaacuaucguucauc

SEQ ID NO: 2474380 - RNA, 19 nt, Artificial Sequence
  Description of Artificial Sequence: Synthetic oligonucleotide
  Sense strand starting at position 2338 of SEQ ID NO: 1887466
augaacgauaguuguuuau

SEQ ID NO: 2474381 - RNA, 19 nt, Artificial Sequence
  Description of Artificial Sequence: Synthetic oligonucleotide
  Antisense strand to SEQ ID NO: 2474380
auaaacaacuaucguucau

SEQ ID NO: 2474382 - RNA, 19 nt, Artificial Sequence
  Description of Artificial Sequence: Synthetic oligonucleotide
  Sense strand starting at position 2466 of SEQ ID NO: 1887466
gaggcacugcgagauuaag

SEQ ID NO: 2474383 - RNA, 19 nt, Artificial Sequence
  Description of Artificial Sequence: Synthetic oligonucleotide
  Antisense strand to SEQ ID NO: 2474382
cuuaaucucgcagugccuc

SEQ ID NO: 2474384 - RNA, 19 nt, Artificial Sequence
  Description of Artificial Sequence: Synthetic oligonucleotide
  Sense strand starting at position 2472 of SEQ ID NO: 1887466
cugcgagauuaagaaacua

SEQ ID NO: 2474385 - RNA, 19 nt, Artificial Sequence
  Description of Artificial Sequence: Synthetic oligonucleotide
  Antisense strand to SEQ ID NO: 2474384
uaguuucuuaaucucgcag

SEQ ID NO: 2474386 - RNA, 19 nt, Artificial Sequence
  Description of Artificial Sequence: Synthetic oligonucleotide
  Sense strand starting at position 2696 of SEQ ID NO: 1887466
gcauauucagaggguggaa

SEQ ID NO: 2474387 - RNA, 19 nt, Artificial Sequence
  Description of Artificial Sequence: Synthetic oligonucleotide
  Antisense strand to SEQ ID NO: 2474386
uuccacccucugaauaugc

SEQ ID NO: 2474388 - RNA, 19 nt, Artificial Sequence
  Description of Artificial Sequence: Synthetic oligonucleotide
  Sense strand starting at position 2760 of SEQ ID NO: 1887466
uuggaugaaucucacaaga

SEQ ID NO: 2474389 - RNA, 19 nt, Artificial Sequence
  Description of Artificial Sequence: Synthetic oligonucleotide
  Antisense strand to SEQ ID NO: 2474388
ucuugugagauucauccaa

SEQ ID NO: 2474390 - RNA, 19 nt, Artificial Sequence
  Description of Artificial Sequence: Synthetic oligonucleotide
  Sense strand starting at position 2762 of SEQ ID NO: 1887466
ggaugaaucucacaagagu

SEQ ID NO: 2474391 - RNA, 19 nt, Artificial Sequence
  Description of Artificial Sequence: Synthetic oligonucleotide
  Antisense strand to SEQ ID NO: 2474390
acucuugugagauucaucc

SEQ ID NO: 2474392 - RNA, 19 nt, Artificial Sequence
  Description of Artificial Sequence: Synthetic oligonucleotide
  Sense strand starting at position 2798 of SEQ ID NO: 1887466
augaauacauucuguaaga

SEQ ID NO: 2474393 - RNA, 19 nt, Artificial Sequence
  Description of Artificial Sequence: Synthetic oligonucleotide
  Antisense strand to SEQ ID NO: 2474392
ucuuacagaauguauucau

SEQ ID NO: 2474394 - RNA, 19 nt, Artificial Sequence
  Description of Artificial Sequence: Synthetic oligonucleotide
  Sense strand starting at position 2799 of SEQ ID NO: 1887466
ugaauacauucuguaagau

SEQ ID NO: 2474395 - RNA, 19 nt, Artificial Sequence
  Description of Artificial Sequence: Synthetic oligonucleotide
  Antisense strand to SEQ ID NO: 2474394
aucuuacagaauguauuca

SEQ ID NO: 2474396 - RNA, 19 nt, Artificial Sequence
  Description of Artificial Sequence: Synthetic oligonucleotide
  Sense strand starting at position 2852 of SEQ ID NO: 1887466
gaacuaaccuuugauggga

SEQ ID NO: 2474397 - RNA, 19 nt, Artificial Sequence
  Description of Artificial Sequence: Synthetic oligonucleotide
  Antisense strand to SEQ ID NO: 2474396
ucccaucaaagguuaguuc

SEQ ID NO: 2474398 - RNA, 19 nt, Artificial Sequence
  Description of Artificial Sequence: Synthetic oligonucleotide
  Sense strand starting at position 2900 of SEQ ID NO: 1887466
gguguaaacugaccagaau

SEQ ID NO: 2474399 - RNA, 19 nt, Artificial Sequence
  Description of Artificial Sequence: Synthetic oligonucleotide
  Antisense strand to SEQ ID NO: 2474398
auucuggucaguuuacacc

SEQ ID NO: 2474400 - RNA, 19 nt, Artificial Sequence
  Description of Artificial Sequence: Synthetic oligonucleotide
  Sense strand starting at position 2938 of SEQ ID NO: 1887466
ugcugacaauguuccauau

SEQ ID NO: 2474401 - RNA, 19 nt, Artificial Sequence
  Description of Artificial Sequence: Synthetic oligonucleotide
  Antisense strand to SEQ ID NO: 2474400
auauggaacauugucagca

SEQ ID NO: 2474402 - RNA, 19 nt, Artificial Sequence
  Description of Artificial Sequence: Synthetic oligonucleotide
  Sense strand starting at position 3528 of SEQ ID NO: 1887466
auuuaagacuuguguacug

SEQ ID NO: 2474403 - RNA, 19 nt, Artificial Sequence
  Description of Artificial Sequence: Synthetic oligonucleotide
  Antisense strand to SEQ ID NO: 2474402
caguacacaagucuuaaau

SEQ ID NO: 2474404 - RNA, 19 nt, Artificial Sequence
  Description of Artificial Sequence: Synthetic oligonucleotide
  Sense strand starting at position 3535 of SEQ ID NO: 1887466
acuuguguacuguguugua

SEQ ID NO: 2474405 - RNA, 19 nt, Artificial Sequence
  Description of Artificial Sequence: Synthetic oligonucleotide
  Antisense strand to SEQ ID NO: 2474404
uacaacacaguacacaagu

SEQ ID NO: 2474406 - RNA, 19 nt, Artificial Sequence
  Description of Artificial Sequence: Synthetic oligonucleotide
  Sense strand starting at position 3538 of SEQ ID NO: 1887466
uguguacuguguuguaaau

SEQ ID NO: 2474407 - RNA, 19 nt, Artificial Sequence
  Description of Artificial Sequence: Synthetic oligonucleotide
  Antisense strand to SEQ ID NO: 2474406
auuuacaacacaguacaca

SEQ ID NO: 2474408 - RNA, 19 nt, Artificial Sequence
  Description of Artificial Sequence: Synthetic oligonucleotide
  Sense strand starting at position 3540 of SEQ ID NO: 1887466
uguacuguguuguaaaugu

SEQ ID NO: 2474409 - RNA, 19 nt, Artificial Sequence
  Description of Artificial Sequence: Synthetic oligonucleotide
  Antisense strand to SEQ ID NO: 2474408
acauuuacaacacaguaca

SEQ ID NO: 2474410 - RNA, 19 nt, Artificial Sequence
  Description of Artificial Sequence: Synthetic oligonucleotide
  Sense strand starting at position 3544 of SEQ ID NO: 1887466
cuguguuguaaauguguua

SEQ ID NO: 2474411 - RNA, 19 nt, Artificial Sequence
  Description of Artificial Sequence: Synthetic oligonucleotide
  Antisense strand to SEQ ID NO: 2474410
uaacacauuuacaacacag

SEQ ID NO: 2474412 - RNA, 19 nt, Artificial Sequence
  Description of Artificial Sequence: Synthetic oligonucleotide
  Sense strand starting at position 3648 of SEQ ID NO: 1887466
aauuaaacaguggguagau

SEQ ID NO: 2474413 - RNA, 19 nt, Artificial Sequence
  Description of Artificial Sequence: Synthetic oligonucleotide
  Antisense strand to SEQ ID NO: 2474412
aucuacccacuguuuaauu

SEQ ID NO: 2474414 - RNA, 19 nt, Artificial Sequence
  Description of Artificial Sequence: Synthetic oligonucleotide
  Sense strand starting at position 3649 of SEQ ID NO: 1887466
auuaaacaguggguagaua

SEQ ID NO: 2474415 - RNA, 19 nt, Artificial Sequence
  Description of Artificial Sequence: Synthetic oligonucleotide
  Antisense strand to SEQ ID NO: 2474414
uaucuacccacuguuuaau

SEQ ID NO: 2474416 - RNA, 19 nt, Artificial Sequence
  Description of Artificial Sequence: Synthetic oligonucleotide
  Sense strand starting at position 3728 of SEQ ID NO: 1887466
aaacaucuguggccuggaa

SEQ ID NO: 2474417 - RNA, 19 nt, Artificial Sequence
  Description of Artificial Sequence: Synthetic oligonucleotide
  Antisense strand to SEQ ID NO: 2474416
uuccaggccacagauguuu

SEQ ID NO: 2474418 - RNA, 19 nt, Artificial Sequence
  Description of Artificial Sequence: Synthetic oligonucleotide
  Sense strand starting at position 3869 of SEQ ID NO: 1887466
ugaaauccuagcuguggga

SEQ ID NO: 2474419 - RNA, 19 nt, Artificial Sequence
  Description of Artificial Sequence: Synthetic oligonucleotide
  Antisense strand to SEQ ID NO: 2474418
ucccacagcuaggauuuca

SEQ ID NO: 2474420 - RNA, 19 nt, Artificial Sequence
  Description of Artificial Sequence: Synthetic oligonucleotide
  Sense strand starting at position 3871 of SEQ ID NO: 1887466
aaauccuagcugugggaga

SEQ ID NO: 2474421 - RNA, 19 nt, Artificial Sequence
  Description of Artificial Sequence: Synthetic oligonucleotide
  Antisense strand to SEQ ID NO: 2474420
ucucccacagcuaggauuu

SEQ ID NO: 2474422 - RNA, 19 nt, Artificial Sequence
  Description of Artificial Sequence: Synthetic oligonucleotide
  Sense strand starting at position 52 of SEQ ID NO: 1887467
aaauuagcugggcguauaa

SEQ ID NO: 2474423 - RNA, 19 nt, Artificial Sequence
  Description of Artificial Sequence: Synthetic oligonucleotide
  Antisense strand to SEQ ID NO: 2474422
uuauacgcccagcuaauuu

SEQ ID NO: 2474424 - RNA, 19 nt, Artificial Sequence
  Description of Artificial Sequence: Synthetic oligonucleotide
  Sense strand starting at position 63 of SEQ ID NO: 1887467
gcguauaauccaugccugu

SEQ ID NO: 2474425 - RNA, 19 nt, Artificial Sequence
  Description of Artificial Sequence: Synthetic oligonucleotide
  Antisense strand to SEQ ID NO: 2474424
acaggcauggauuauacgc

SEQ ID NO: 2474426 - RNA, 19 nt, Artificial Sequence
  Description of Artificial Sequence: Synthetic oligonucleotide
  Sense strand starting at position 604 of SEQ ID NO: 1887467
gggugauagucucccagaa

SEQ ID NO: 2474427 - RNA, 19 nt, Artificial Sequence
  Description of Artificial Sequence: Synthetic oligonucleotide
  Antisense strand to SEQ ID NO: 2474426
uucugggagacuaucaccc

SEQ ID NO: 2474428 - RNA, 19 nt, Artificial Sequence
  Description of Artificial Sequence: Synthetic oligonucleotide
  Sense strand starting at position 606 of SEQ ID NO: 1887467
gugauagucucccagaaau

SEQ ID NO: 2474429 - RNA, 19 nt, Artificial Sequence
  Description of Artificial Sequence: Synthetic oligonucleotide
  Antisense strand to SEQ ID NO: 2474428
auuucugggagacuaucac

SEQ ID NO: 2474430 - RNA, 19 nt, Artificial Sequence
  Description of Artificial Sequence: Synthetic oligonucleotide
  Sense strand starting at position 631 of SEQ ID NO: 1887467
gcugaaaugccggaaguga

SEQ ID NO: 2474431 - RNA, 19 nt, Artificial Sequence
  Description of Artificial Sequence: Synthetic oligonucleotide
  Antisense strand to SEQ ID NO: 2474430
ucacuuccggcauuucagc

SEQ ID NO: 2474432 - RNA, 19 nt, Artificial Sequence
  Description of Artificial Sequence: Synthetic oligonucleotide
  Sense strand starting at position 877 of SEQ ID NO: 1887467
cgggcagagucauacuuca

SEQ ID NO: 2474433 - RNA, 19 nt, Artificial Sequence
  Description of Artificial Sequence: Synthetic oligonucleotide
  Antisense strand to SEQ ID NO: 2474432
ugaaguaugacucugcccg

SEQ ID NO: 2474434 - RNA, 19 nt, Artificial Sequence
  Description of Artificial Sequence: Synthetic oligonucleotide
  Sense strand starting at position 1312 of SEQ ID NO: 1887467
agggauagcucgcguuaac

SEQ ID NO: 2474435 - RNA, 19 nt, Artificial Sequence
  Description of Artificial Sequence: Synthetic oligonucleotide
  Antisense strand to SEQ ID NO: 2474434
guuaacgcgagcuaucccu

SEQ ID NO: 2474436 - RNA, 19 nt, Artificial Sequence
  Description of Artificial Sequence: Synthetic oligonucleotide
  Sense strand starting at position 1759 of SEQ ID NO: 1887467
caguacuuaccacguugaa

SEQ ID NO: 2474437 - RNA, 19 nt, Artificial Sequence
  Description of Artificial Sequence: Synthetic oligonucleotide
  Antisense strand to SEQ ID NO: 2474436
uucaacgugguaaguacug

SEQ ID NO: 2474438 - RNA, 19 nt, Artificial Sequence
  Description of Artificial Sequence: Synthetic oligonucleotide
  Sense strand starting at position 2113 of SEQ ID NO: 1887467
cggccagauucuccaccau

SEQ ID NO: 2474439 - RNA, 19 nt, Artificial Sequence
  Description of Artificial Sequence: Synthetic oligonucleotide
  Antisense strand to SEQ ID NO: 2474438
augguggagaaucuggccg

SEQ ID NO: 2474440 - RNA, 19 nt, Artificial Sequence
  Description of Artificial Sequence: Synthetic oligonucleotide
  Sense strand starting at position 32 of SEQ ID NO: 1887468
cccaaaguguacguaucuu

SEQ ID NO: 2474441 - RNA, 19 nt, Artificial Sequence
  Description of Artificial Sequence: Synthetic oligonucleotide
  Antisense strand to SEQ ID NO: 2474440
aagauacguacacuuuggg

SEQ ID NO: 2474442 - RNA, 19 nt, Artificial Sequence
  Description of Artificial Sequence: Synthetic oligonucleotide
  Sense strand starting at position 59 of SEQ ID NO: 1887468
cgauauauuugacgaugau

SEQ ID NO: 2474443 - RNA, 19 nt, Artificial Sequence
  Description of Artificial Sequence: Synthetic oligonucleotide
  Antisense strand to SEQ ID NO: 2474442
aucaucgucaaauauaucg

SEQ ID NO: 2474444 - RNA, 19 nt, Artificial Sequence
  Description of Artificial Sequence: Synthetic oligonucleotide
  Sense strand starting at position 93 of SEQ ID NO: 1887468
cuugaaggcccuugauaga

SEQ ID NO: 2474445 - RNA, 19 nt, Artificial Sequence
  Description of Artificial Sequence: Synthetic oligonucleotide
  Antisense strand to SEQ ID NO: 2474444
ucuaucaagggccuucaag

SEQ ID NO: 2474446 - RNA, 19 nt, Artificial Sequence
  Description of Artificial Sequence: Synthetic oligonucleotide
  Sense strand starting at position 104 of SEQ ID NO: 1887468
uugauagaugcugagguga

SEQ ID NO: 2474447 - RNA, 19 nt, Artificial Sequence
  Description of Artificial Sequence: Synthetic oligonucleotide
  Antisense strand to SEQ ID NO: 2474446
ucaccucagcaucuaucaa

SEQ ID NO: 2474448 - RNA, 19 nt, Artificial Sequence
  Description of Artificial Sequence: Synthetic oligonucleotide
  Sense strand starting at position 106 of SEQ ID NO: 1887468
gauagaugcugaggugagu

SEQ ID NO: 2474449 - RNA, 19 nt, Artificial Sequence
  Description of Artificial Sequence: Synthetic oligonucleotide
  Antisense strand to SEQ ID NO: 2474448
acucaccucagcaucuauc

SEQ ID NO: 2474450 - RNA, 19 nt, Artificial Sequence
  Description of Artificial Sequence: Synthetic oligonucleotide
  Sense strand starting at position 129 of SEQ ID NO: 1887468
gccugacucugagggucau

SEQ ID NO: 2474451 - RNA, 19 nt, Artificial Sequence
  Description of Artificial Sequence: Synthetic oligonucleotide
  Antisense strand to SEQ ID NO: 2474450
augacccucagagucaggc

SEQ ID NO: 2474452 - RNA, 19 nt, Artificial Sequence
  Description of Artificial Sequence: Synthetic oligonucleotide
  Sense strand starting at position 542 of SEQ ID NO: 1887468
ggacccguguccucucaga

SEQ ID NO: 2474453 - RNA, 19 nt, Artificial Sequence
  Description of Artificial Sequence: Synthetic oligonucleotide
  Antisense strand to SEQ ID NO: 2474452
ucugagaggacacgggucc

SEQ ID NO: 2474454 - RNA, 19 nt, Artificial Sequence
  Description of Artificial Sequence: Synthetic oligonucleotide
  Sense strand starting at position 565 of SEQ ID NO: 1887468
gcaggauuccgaugggagc

SEQ ID NO: 2474455 - RNA, 19 nt, Artificial Sequence
  Description of Artificial Sequence: Synthetic oligonucleotide
  Antisense strand to SEQ ID NO: 2474454
gcucccaucggaauccugc

SEQ ID NO: 2474456 - RNA, 19 nt, Artificial Sequence
  Description of Artificial Sequence: Synthetic oligonucleotide
  Sense strand starting at position 855 of SEQ ID NO: 1887468
ggccgucuuugugauggau

SEQ ID NO: 2474457 - RNA, 19 nt, Artificial Sequence
  Description of Artificial Sequence: Synthetic oligonucleotide
  Antisense strand to SEQ ID NO: 2474456
auccaucacaaagacggcc

SEQ ID NO: 2474458 - RNA, 19 nt, Artificial Sequence
  Description of Artificial Sequence: Synthetic oligonucleotide
  Sense strand starting at position 857 of SEQ ID NO: 1887468
ccgucuuugugauggauuu

SEQ ID NO: 2474459 - RNA, 19 nt, Artificial Sequence
  Description of Artificial Sequence: Synthetic oligonucleotide
  Antisense strand to SEQ ID NO: 2474458
aaauccaucacaaagacgg

SEQ ID NO: 2474460 - RNA, 19 nt, Artificial Sequence
  Description of Artificial Sequence: Synthetic oligonucleotide
  Sense strand starting at position 858 of SEQ ID NO: 1887468
cgucuuugugauggauuug

SEQ ID NO: 2474461 - RNA, 19 nt, Artificial Sequence
  Description of Artificial Sequence: Synthetic oligonucleotide
  Antisense strand to SEQ ID NO: 2474460
caaauccaucacaaagacg

SEQ ID NO: 2474462 - RNA, 19 nt, Artificial Sequence
  Description of Artificial Sequence: Synthetic oligonucleotide
  Sense strand starting at position 937 of SEQ ID NO: 1887468
ccuugccuccguuugcaua

SEQ ID NO: 2474463 - RNA, 19 nt, Artificial Sequence
  Description of Artificial Sequence: Synthetic oligonucleotide
  Antisense strand to SEQ ID NO: 2474462
uaugcaaacggaggcaagg

SEQ ID NO: 2474464 - RNA, 19 nt, Artificial Sequence
  Description of Artificial Sequence: Synthetic oligonucleotide
  Sense strand starting at position 938 of SEQ ID NO: 1887468
cuugccuccguuugcauaa

SEQ ID NO: 2474465 - RNA, 19 nt, Artificial Sequence
  Description of Artificial Sequence: Synthetic oligonucleotide
  Antisense strand to SEQ ID NO: 2474464
uuaugcaaacggaggcaag

SEQ ID NO: 2474466 - RNA, 19 nt, Artificial Sequence
  Description of Artificial Sequence: Synthetic oligonucleotide
  Sense strand starting at position 945 of SEQ ID NO: 1887468
ccguuugcauaaucugaau

SEQ ID NO: 2474467 - RNA, 19 nt, Artificial Sequence
  Description of Artificial Sequence: Synthetic oligonucleotide
  Antisense strand to SEQ ID NO: 2474466
auucagauuaugcaaacgg

SEQ ID NO: 2474468 - RNA, 19 nt, Artificial Sequence
  Description of Artificial Sequence: Synthetic oligonucleotide
  Sense strand starting at position 1025 of SEQ ID NO: 1887468
ggugguguuugccuuaugu

SEQ ID NO: 2474469 - RNA, 19 nt, Artificial Sequence
  Description of Artificial Sequence: Synthetic oligonucleotide
  Antisense strand to SEQ ID NO: 2474468
acauaaggcaaacaccacc

SEQ ID NO: 2474470 - RNA, 19 nt, Artificial Sequence
  Description of Artificial Sequence: Synthetic oligonucleotide
  Sense strand starting at position 1027 of SEQ ID NO: 1887468
ugguguuugccuuaugugu

SEQ ID NO: 2474471 - RNA, 19 nt, Artificial Sequence
  Description of Artificial Sequence: Synthetic oligonucleotide
  Antisense strand to SEQ ID NO: 2474470
acacauaaggcaaacacca

SEQ ID NO: 2474472 - RNA, 19 nt, Artificial Sequence
  Description of Artificial Sequence: Synthetic oligonucleotide
  Sense strand starting at position 1285 of SEQ ID NO: 1887468
guucuuuaccuggacucuu

SEQ ID NO: 2474473 - RNA, 19 nt, Artificial Sequence
  Description of Artificial Sequence: Synthetic oligonucleotide
  Antisense strand to SEQ ID NO: 2474472
aagaguccagguaaagaac

SEQ ID NO: 2474474 - RNA, 19 nt, Artificial Sequence
  Description of Artificial Sequence: Synthetic oligonucleotide
  Sense strand starting at position 1297 of SEQ ID NO: 1887468
gacucuugccuuugcugau

SEQ ID NO: 2474475 - RNA, 19 nt, Artificial Sequence
  Description of Artificial Sequence: Synthetic oligonucleotide
  Antisense strand to SEQ ID NO: 2474474
aucagcaaaggcaagaguc

SEQ ID NO: 2474476 - RNA, 19 nt, Artificial Sequence
  Description of Artificial Sequence: Synthetic oligonucleotide
  Sense strand starting at position 1566 of SEQ ID NO: 1887468
uugcaccugaugcguuaaa

SEQ ID NO: 2474477 - RNA, 19 nt, Artificial Sequence
  Description of Artificial Sequence: Synthetic oligonucleotide
  Antisense strand to SEQ ID NO: 2474476
uuuaacgcaucaggugcaa

SEQ ID NO: 2474478 - RNA, 19 nt, Artificial Sequence
  Description of Artificial Sequence: Synthetic oligonucleotide
  Sense strand starting at position 2060 of SEQ ID NO: 1887468
ugacaucacucaguggaga

SEQ ID NO: 2474479 - RNA, 19 nt, Artificial Sequence
  Description of Artificial Sequence: Synthetic oligonucleotide
  Antisense strand to SEQ ID NO: 2474478
ucuccacugagugauguca

SEQ ID NO: 2474480 - RNA, 19 nt, Artificial Sequence
  Description of Artificial Sequence: Synthetic oligonucleotide
  Sense strand starting at position 2550 of SEQ ID NO: 1887468
gcucuuccuccuuggugau

SEQ ID NO: 2474481 - RNA, 19 nt, Artificial Sequence
  Description of Artificial Sequence: Synthetic oligonucleotide
  Antisense strand to SEQ ID NO: 2474480
aucaccaaggaggaagagc

SEQ ID NO: 2474482 - RNA, 19 nt, Artificial Sequence
  Description of Artificial Sequence: Synthetic oligonucleotide
  Sense strand starting at position 3114 of SEQ ID NO: 1887468
gggcugucgugagaugcuu

SEQ ID NO: 2474483 - RNA, 19 nt, Artificial Sequence
  Description of Artificial Sequence: Synthetic oligonucleotide
  Antisense strand to SEQ ID NO: 2474482
aagcaucucacgacagccc

SEQ ID NO: 2474484 - RNA, 19 nt, Artificial Sequence
  Description of Artificial Sequence: Synthetic oligonucleotide
  Sense strand starting at position 3389 of SEQ ID NO: 1887468
accacuguaucagaacaga

SEQ ID NO: 2474485 - RNA, 19 nt, Artificial Sequence
  Description of Artificial Sequence: Synthetic oligonucleotide
  Antisense strand to SEQ ID NO: 2474484
ucuguucugauacaguggu

SEQ ID NO: 2474486 - RNA, 19 nt, Artificial Sequence
  Description of Artificial Sequence: Synthetic oligonucleotide
  Sense strand starting at position 3732 of SEQ ID NO: 1887468
gggcuugucaucugugcag

SEQ ID NO: 2474487 - RNA, 19 nt, Artificial Sequence
  Description of Artificial Sequence: Synthetic oligonucleotide
  Antisense strand to SEQ ID NO: 2474486
cugcacagaugacaagccc

SEQ ID NO: 2474488 - RNA, 19 nt, Artificial Sequence
  Description of Artificial Sequence: Synthetic oligonucleotide
  Sense strand starting at position 3734 of SEQ ID NO: 1887468
gcuugucaucugugcaggu

SEQ ID NO: 2474489 - RNA, 19 nt, Artificial Sequence
  Description of Artificial Sequence: Synthetic oligonucleotide
  Antisense strand to SEQ ID NO: 2474488
accugcacagaugacaagc

SEQ ID NO: 2474490 - RNA, 19 nt, Artificial Sequence
  Description of Artificial Sequence: Synthetic oligonucleotide
  Sense strand starting at position 3950 of SEQ ID NO: 1887468
ggagcuagauccugucuca

SEQ ID NO: 2474491 - RNA, 19 nt, Artificial Sequence
  Description of Artificial Sequence: Synthetic oligonucleotide
  Antisense strand to SEQ ID NO: 2474490
ugagacaggaucuagcucc

SEQ ID NO: 2474492 - RNA, 19 nt, Artificial Sequence
  Description of Artificial Sequence: Synthetic oligonucleotide
  Sense strand starting at position 75 of SEQ ID NO: 1887469
ucuuuauaacugugagaau

SEQ ID NO: 2474493 - RNA, 19 nt, Artificial Sequence
  Description of Artificial Sequence: Synthetic oligonucleotide
  Antisense strand to SEQ ID NO: 2474492
auucucacaguuauaaaga

SEQ ID NO: 2474494 - RNA, 19 nt, Artificial Sequence
  Description of Artificial Sequence: Synthetic oligonucleotide
  Sense strand starting at position 147 of SEQ ID NO: 1887469
gugggucuccaagguacua

SEQ ID NO: 2474495 - RNA, 19 nt, Artificial Sequence
  Description of Artificial Sequence: Synthetic oligonucleotide
  Antisense strand to SEQ ID NO: 2474494
uaguaccuuggagacccac

SEQ ID NO: 2474496 - RNA, 19 nt, Artificial Sequence
  Description of Artificial Sequence: Synthetic oligonucleotide
  Sense strand starting at position 159 of SEQ ID NO: 1887469
gguacuaugacauguguua

SEQ ID NO: 2474497 - RNA, 19 nt, Artificial Sequence
  Description of Artificial Sequence: Synthetic oligonucleotide
  Antisense strand to SEQ ID NO: 2474496
uaacacaugucauaguacc

SEQ ID NO: 2474498 - RNA, 19 nt, Artificial Sequence
  Description of Artificial Sequence: Synthetic oligonucleotide
  Sense strand starting at position 245 of SEQ ID NO: 1887469
ucaccauugugcucugaac

SEQ ID NO: 2474499 - RNA, 19 nt, Artificial Sequence
  Description of Artificial Sequence: Synthetic oligonucleotide
  Antisense strand to SEQ ID NO: 2474498
guucagagcacaaugguga

SEQ ID NO: 2474500 - RNA, 19 nt, Artificial Sequence
  Description of Artificial Sequence: Synthetic oligonucleotide
  Sense strand starting at position 247 of SEQ ID NO: 1887469
accauugugcucugaacaa

SEQ ID NO: 2474501 - RNA, 19 nt, Artificial Sequence
  Description of Artificial Sequence: Synthetic oligonucleotide
  Antisense strand to SEQ ID NO: 2474500
uuguucagagcacaauggu

SEQ ID NO: 2474502 - RNA, 19 nt, Artificial Sequence
  Description of Artificial Sequence: Synthetic oligonucleotide
  Sense strand starting at position 251 of SEQ ID NO: 1887469
uugugcucugaacaaagua

SEQ ID NO: 2474503 - RNA, 19 nt, Artificial Sequence
  Description of Artificial Sequence: Synthetic oligonucleotide
  Antisense strand to SEQ ID NO: 2474502
uacuuuguucagagcacaa

SEQ ID NO: 2474504 - RNA, 19 nt, Artificial Sequence
  Description of Artificial Sequence: Synthetic oligonucleotide
  Sense strand starting at position 303 of SEQ ID NO: 1887469
ucuuuauugccugagcuuu

SEQ ID NO: 2474505 - RNA, 19 nt, Artificial Sequence
  Description of Artificial Sequence: Synthetic oligonucleotide
  Antisense strand to SEQ ID NO: 2474504
aaagcucaggcaauaaaga

SEQ ID NO: 2474506 - RNA, 19 nt, Artificial Sequence
  Description of Artificial Sequence: Synthetic oligonucleotide
  Sense strand starting at position 309 of SEQ ID NO: 1887469
uugccugagcuuugaauua

SEQ ID NO: 2474507 - RNA, 19 nt, Artificial Sequence
  Description of Artificial Sequence: Synthetic oligonucleotide
  Antisense strand to SEQ ID NO: 2474506
uaauucaaagcucaggcaa

SEQ ID NO: 2474508 - RNA, 19 nt, Artificial Sequence
  Description of Artificial Sequence: Synthetic oligonucleotide
  Sense strand starting at position 314 of SEQ ID NO: 1887469
ugagcuuugaauuauucga

SEQ ID NO: 2474509 - RNA, 19 nt, Artificial Sequence
  Description of Artificial Sequence: Synthetic oligonucleotide
  Antisense strand to SEQ ID NO: 2474508
ucgaauaauucaaagcuca

SEQ ID NO: 2474510 - RNA, 19 nt, Artificial Sequence
  Description of Artificial Sequence: Synthetic oligonucleotide
  Sense strand starting at position 316 of SEQ ID NO: 1887469
agcuuugaauuauucgauu

SEQ ID NO: 2474511 - RNA, 19 nt, Artificial Sequence
  Description of Artificial Sequence: Synthetic oligonucleotide
  Antisense strand to SEQ ID NO: 2474510
aaucgaauaauucaaagcu

SEQ ID NO: 2474512 - RNA, 19 nt, Artificial Sequence
  Description of Artificial Sequence: Synthetic oligonucleotide
  Sense strand starting at position 353 of SEQ ID NO: 1887469
ggagacucccgguaaggua

SEQ ID NO: 2474513 - RNA, 19 nt, Artificial Sequence
  Description of Artificial Sequence: Synthetic oligonucleotide
  Antisense strand to SEQ ID NO: 2474512
uaccuuaccgggagucucc

SEQ ID NO: 2474514 - RNA, 19 nt, Artificial Sequence
  Description of Artificial Sequence: Synthetic oligonucleotide
  Sense strand starting at position 857 of SEQ ID NO: 1887469
cuacuuugacauuguccau

SEQ ID NO: 2474515 - RNA, 19 nt, Artificial Sequence
  Description of Artificial Sequence: Synthetic oligonucleotide
  Antisense strand to SEQ ID NO: 2474514
auggacaaugucaaaguag

SEQ ID NO: 2474516 - RNA, 19 nt, Artificial Sequence
  Description of Artificial Sequence: Synthetic oligonucleotide
  Sense strand starting at position 1054 of SEQ ID NO: 1887469
gagggaguauauucuucuu

SEQ ID NO: 2474517 - RNA, 19 nt, Artificial Sequence
  Description of Artificial Sequence: Synthetic oligonucleotide
  Antisense strand to SEQ ID NO: 2474516
aagaagaauauacucccuc

SEQ ID NO: 2474518 - RNA, 19 nt, Artificial Sequence
  Description of Artificial Sequence: Synthetic oligonucleotide
  Sense strand starting at position 1383 of SEQ ID NO: 1887469
agauucuugcgacaaguag

SEQ ID NO: 2474519 - RNA, 19 nt, Artificial Sequence
  Description of Artificial Sequence: Synthetic oligonucleotide
  Antisense strand to SEQ ID NO: 2474518
cuacuugucgcaagaaucu

SEQ ID NO: 2474520 - RNA, 19 nt, Artificial Sequence
  Description of Artificial Sequence: Synthetic oligonucleotide
  Sense strand starting at position 1391 of SEQ ID NO: 1887469
gcgacaaguagccaaaugu

SEQ ID NO: 2474521 - RNA, 19 nt, Artificial Sequence
  Description of Artificial Sequence: Synthetic oligonucleotide
  Antisense strand to SEQ ID NO: 2474520
acauuuggcuacuugucgc

SEQ ID NO: 2474522 - RNA, 19 nt, Artificial Sequence
  Description of Artificial Sequence: Synthetic oligonucleotide
  Sense strand starting at position 1399 of SEQ ID NO: 1887469
uagccaaauguuggcuaau

SEQ ID NO: 2474523 - RNA, 19 nt, Artificial Sequence
  Description of Artificial Sequence: Synthetic oligonucleotide
  Antisense strand to SEQ ID NO: 2474522
auuagccaacauuuggcua

SEQ ID NO: 2474524 - RNA, 19 nt, Artificial Sequence
  Description of Artificial Sequence: Synthetic oligonucleotide
  Sense strand starting at position 1400 of SEQ ID NO: 1887469
agccaaauguuggcuaauc

SEQ ID NO: 2474525 - RNA, 19 nt, Artificial Sequence
  Description of Artificial Sequence: Synthetic oligonucleotide
  Antisense strand to SEQ ID NO: 2474524
gauuagccaacauuuggcu

SEQ ID NO: 2474526 - RNA, 19 nt, Artificial Sequence
  Description of Artificial Sequence: Synthetic oligonucleotide
  Sense strand starting at position 1401 of SEQ ID NO: 1887469
gccaaauguuggcuaauca

SEQ ID NO: 2474527 - RNA, 19 nt, Artificial Sequence
  Description of Artificial Sequence: Synthetic oligonucleotide
  Antisense strand to SEQ ID NO: 2474526
ugauuagccaacauuuggc

SEQ ID NO: 2474528 - RNA, 19 nt, Artificial Sequence
  Description of Artificial Sequence: Synthetic oligonucleotide
  Sense strand starting at position 1580 of SEQ ID NO: 1887469
gguuuagggaguuguccga

SEQ ID NO: 2474529 - RNA, 19 nt, Artificial Sequence
  Description of Artificial Sequence: Synthetic oligonucleotide
  Antisense strand to SEQ ID NO: 2474528
ucggacaacucccuaaacc

SEQ ID NO: 2474530 - RNA, 19 nt, Artificial Sequence
  Description of Artificial Sequence: Synthetic oligonucleotide
  Sense strand starting at position 1584 of SEQ ID NO: 1887469
uagggaguuguccgauuca

SEQ ID NO: 2474531 - RNA, 19 nt, Artificial Sequence
  Description of Artificial Sequence: Synthetic oligonucleotide
  Antisense strand to SEQ ID NO: 2474530
ugaaucggacaacucccua

SEQ ID NO: 2474532 - RNA, 19 nt, Artificial Sequence
  Description of Artificial Sequence: Synthetic oligonucleotide
  Sense strand starting at position 1685 of SEQ ID NO: 1887469
ucacuaugcucuguacuca

SEQ ID NO: 2474533 - RNA, 19 nt, Artificial Sequence
  Description of Artificial Sequence: Synthetic oligonucleotide
  Antisense strand to SEQ ID NO: 2474532
ugaguacagagcauaguga

SEQ ID NO: 2474534 - RNA, 19 nt, Artificial Sequence
  Description of Artificial Sequence: Synthetic oligonucleotide
  Sense strand starting at position 2101 of SEQ ID NO: 1887469
uucucauuaucgucaagga

SEQ ID NO: 2474535 - RNA, 19 nt, Artificial Sequence
  Description of Artificial Sequence: Synthetic oligonucleotide
  Antisense strand to SEQ ID NO: 2474534
uccuugacgauaaugagaa

SEQ ID NO: 2474536 - RNA, 19 nt, Artificial Sequence
  Description of Artificial Sequence: Synthetic oligonucleotide
  Sense strand starting at position 2151 of SEQ ID NO: 1887469
cagacuuccugcuuaggca

SEQ ID NO: 2474537 - RNA, 19 nt, Artificial Sequence
  Description of Artificial Sequence: Synthetic oligonucleotide
  Antisense strand to SEQ ID NO: 2474536
ugccuaagcaggaagucug

SEQ ID NO: 2474538 - RNA, 19 nt, Artificial Sequence
  Description of Artificial Sequence: Synthetic oligonucleotide
  Sense strand starting at position 2152 of SEQ ID NO: 1887469
agacuuccugcuuaggcaa

SEQ ID NO: 2474539 - RNA, 19 nt, Artificial Sequence
  Description of Artificial Sequence: Synthetic oligonucleotide
  Antisense strand to SEQ ID NO: 2474538
uugccuaagcaggaagucu

SEQ ID NO: 2474540 - RNA, 19 nt, Artificial Sequence
  Description of Artificial Sequence: Synthetic oligonucleotide
  Sense strand starting at position 2207 of SEQ ID NO: 1887469
agauguuggcagggauaca

SEQ ID NO: 2474541 - RNA, 19 nt, Artificial Sequence
  Description of Artificial Sequence: Synthetic oligonucleotide
  Antisense strand to SEQ ID NO: 2474540
uguaucccugccaacaucu

SEQ ID NO: 2474542 - RNA, 19 nt, Artificial Sequence
  Description of Artificial Sequence: Synthetic oligonucleotide
  Sense strand starting at position 2330 of SEQ ID NO: 1887469
uagcuuugucuguuuguuu

SEQ ID NO: 2474543 - RNA, 19 nt, Artificial Sequence
  Description of Artificial Sequence: Synthetic oligonucleotide
  Antisense strand to SEQ ID NO: 2474542
aaacaaacagacaaagcua

SEQ ID NO: 2474544 - RNA, 19 nt, Artificial Sequence
  Description of Artificial Sequence: Synthetic oligonucleotide
  Sense strand starting at position 2356 of SEQ ID NO: 1887469
cgugcauuucuccaugcuu

SEQ ID NO: 2474545 - RNA, 19 nt, Artificial Sequence
  Description of Artificial Sequence: Synthetic oligonucleotide
  Antisense strand to SEQ ID NO: 2474544
aagcauggagaaaugcacg

SEQ ID NO: 2474546 - RNA, 19 nt, Artificial Sequence
  Description of Artificial Sequence: Synthetic oligonucleotide
  Sense strand starting at position 2413 of SEQ ID NO: 1887469
uaaagugguguuuguauuu

SEQ ID NO: 2474547 - RNA, 19 nt, Artificial Sequence
  Description of Artificial Sequence: Synthetic oligonucleotide
  Antisense strand to SEQ ID NO: 2474546
aaauacaaacaccacuuua

SEQ ID NO: 2474548 - RNA, 19 nt, Artificial Sequence
  Description of Artificial Sequence: Synthetic oligonucleotide
  Sense strand starting at position 2418 of SEQ ID NO: 1887469
ugguguuuguauuuaugca

SEQ ID NO: 2474549 - RNA, 19 nt, Artificial Sequence
  Description of Artificial Sequence: Synthetic oligonucleotide
  Antisense strand to SEQ ID NO: 2474548
ugcauaaauacaaacacca

SEQ ID NO: 2474550 - RNA, 19 nt, Artificial Sequence
  Description of Artificial Sequence: Synthetic oligonucleotide
  Sense strand starting at position 2419 of SEQ ID NO: 1887469
gguguuuguauuuaugcaa

SEQ ID NO: 2474551 - RNA, 19 nt, Artificial Sequence
  Description of Artificial Sequence: Synthetic oligonucleotide
  Antisense strand to SEQ ID NO: 2474550
uugcauaaauacaaacacc

SEQ ID NO: 2474552 - RNA, 19 nt, Artificial Sequence
  Description of Artificial Sequence: Synthetic oligonucleotide
  Sense strand starting at position 2422 of SEQ ID NO: 1887469
guuuguauuuaugcaaaug

SEQ ID NO: 2474553 - RNA, 19 nt, Artificial Sequence
  Description of Artificial Sequence: Synthetic oligonucleotide
  Antisense strand to SEQ ID NO: 2474552
cauuugcauaaauacaaac

SEQ ID NO: 2474554 - RNA, 19 nt, Artificial Sequence
  Description of Artificial Sequence: Synthetic oligonucleotide
  Sense strand starting at position 2475 of SEQ ID NO: 1887469
ugcuuauguguauauccuu

SEQ ID NO: 2474555 - RNA, 19 nt, Artificial Sequence
  Description of Artificial Sequence: Synthetic oligonucleotide
  Antisense strand to SEQ ID NO: 2474554
aaggauauacacauaagca

SEQ ID NO: 2474556 - RNA, 19 nt, Artificial Sequence
  Description of Artificial Sequence: Synthetic oligonucleotide
  Sense strand starting at position 2966 of SEQ ID NO: 1887469
guaaccuagcaauauguga

SEQ ID NO: 2474557 - RNA, 19 nt, Artificial Sequence
  Description of Artificial Sequence: Synthetic oligonucleotide
  Antisense strand to SEQ ID NO: 2474556
ucacauauugcuagguuac

SEQ ID NO: 2474558 - RNA, 19 nt, Artificial Sequence
  Description of Artificial Sequence: Synthetic oligonucleotide
  Sense strand starting at position 3183 of SEQ ID NO: 1887469
augcguuaagcuguaacuu

SEQ ID NO: 2474559 - RNA, 19 nt, Artificial Sequence
  Description of Artificial Sequence: Synthetic oligonucleotide
  Antisense strand to SEQ ID NO: 2474558
aaguuacagcuuaacgcau

SEQ ID NO: 2474560 - RNA, 19 nt, Artificial Sequence
  Description of Artificial Sequence: Synthetic oligonucleotide
  Sense strand starting at position 3703 of SEQ ID NO: 1887469
aaacuaagauguuugggua

SEQ ID NO: 2474561 - RNA, 19 nt, Artificial Sequence
  Description of Artificial Sequence: Synthetic oligonucleotide
  Antisense strand to SEQ ID NO: 2474560
uacccaaacaucuuaguuu

SEQ ID NO: 2474562 - RNA, 19 nt, Artificial Sequence
  Description of Artificial Sequence: Synthetic oligonucleotide
  Sense strand starting at position 3704 of SEQ ID NO: 1887469
aacuaagauguuuggguaa

SEQ ID NO: 2474563 - RNA, 19 nt, Artificial Sequence
  Description of Artificial Sequence: Synthetic oligonucleotide
  Antisense strand to SEQ ID NO: 2474562
uuacccaaacaucuuaguu

SEQ ID NO: 2474564 - RNA, 19 nt, Artificial Sequence
  Description of Artificial Sequence: Synthetic oligonucleotide
  Sense strand starting at position 3707 of SEQ ID NO: 1887469
uaagauguuuggguaaaga

SEQ ID NO: 2474565 - RNA, 19 nt, Artificial Sequence
  Description of Artificial Sequence: Synthetic oligonucleotide
  Antisense strand to SEQ ID NO: 2474564
ucuuuacccaaacaucuua

SEQ ID NO: 2474566 - RNA, 19 nt, Artificial Sequence
  Description of Artificial Sequence: Synthetic oligonucleotide
  Sense strand starting at position 3729 of SEQ ID NO: 1887469
acauaaaucuagccugugu

SEQ ID NO: 2474567 - RNA, 19 nt, Artificial Sequence
  Description of Artificial Sequence: Synthetic oligonucleotide
  Antisense strand to SEQ ID NO: 2474566
acacaggcuagauuuaugu

SEQ ID NO: 2474568 - RNA, 19 nt, Artificial Sequence
  Description of Artificial Sequence: Synthetic oligonucleotide
  Sense strand starting at position 3759 of SEQ ID NO: 1887469
cacaguacguuuccuugaa

SEQ ID NO: 2474569 - RNA, 19 nt, Artificial Sequence
  Description of Artificial Sequence: Synthetic oligonucleotide
  Antisense strand to SEQ ID NO: 2474568
uucaaggaaacguacugug

SEQ ID NO: 2474570 - RNA, 19 nt, Artificial Sequence
  Description of Artificial Sequence: Synthetic oligonucleotide
  Sense strand starting at position 3763 of SEQ ID NO: 1887469
guacguuuccuugaacuua

SEQ ID NO: 2474571 - RNA, 19 nt, Artificial Sequence
  Description of Artificial Sequence: Synthetic oligonucleotide
  Antisense strand to SEQ ID NO: 2474570
uaaguucaaggaaacguac

SEQ ID NO: 2474572 - RNA, 19 nt, Artificial Sequence
  Description of Artificial Sequence: Synthetic oligonucleotide
  Sense strand starting at position 171 of SEQ ID NO: 1887470
accacuuacugugugacau

SEQ ID NO: 2474573 - RNA, 19 nt, Artificial Sequence
  Description of Artificial Sequence: Synthetic oligonucleotide
  Antisense strand to SEQ ID NO: 2474572
augucacacaguaaguggu

SEQ ID NO: 2474574 - RNA, 19 nt, Artificial Sequence
  Description of Artificial Sequence: Synthetic oligonucleotide
  Sense strand starting at position 181 of SEQ ID NO: 1887470
gugugacauuaucuaaccu

SEQ ID NO: 2474575 - RNA, 19 nt, Artificial Sequence
  Description of Artificial Sequence: Synthetic oligonucleotide
  Antisense strand to SEQ ID NO: 2474574
agguuagauaaugucacac

SEQ ID NO: 2474576 - RNA, 19 nt, Artificial Sequence
  Description of Artificial Sequence: Synthetic oligonucleotide
  Sense strand starting at position 531 of SEQ ID NO: 1887470
ugacaacauuaguauaaug

SEQ ID NO: 2474577 - RNA, 19 nt, Artificial Sequence
  Description of Artificial Sequence: Synthetic oligonucleotide
  Antisense strand to SEQ ID NO: 2474576
cauuauacuaauguuguca

SEQ ID NO: 2474578 - RNA, 19 nt, Artificial Sequence
  Description of Artificial Sequence: Synthetic oligonucleotide
  Sense strand starting at position 568 of SEQ ID NO: 1887470
gagucaauacaguaaguca

SEQ ID NO: 2474579 - RNA, 19 nt, Artificial Sequence
  Description of Artificial Sequence: Synthetic oligonucleotide
  Antisense strand to SEQ ID NO: 2474578
ugacuuacuguauugacuc

SEQ ID NO: 2474580 - RNA, 19 nt, Artificial Sequence
  Description of Artificial Sequence: Synthetic oligonucleotide
  Sense strand starting at position 579 of SEQ ID NO: 1887470
guaagucauguggacuacu

SEQ ID NO: 2474581 - RNA, 19 nt, Artificial Sequence
  Description of Artificial Sequence: Synthetic oligonucleotide
  Antisense strand to SEQ ID NO: 2474580
aguaguccacaugacuuac

SEQ ID NO: 2474582 - RNA, 19 nt, Artificial Sequence
  Description of Artificial Sequence: Synthetic oligonucleotide
  Sense strand starting at position 588 of SEQ ID NO: 1887470
guggacuacuuaccaaaga

SEQ ID NO: 2474583 - RNA, 19 nt, Artificial Sequence
  Description of Artificial Sequence: Synthetic oligonucleotide
  Antisense strand to SEQ ID NO: 2474582
ucuuugguaaguaguccac

SEQ ID NO: 2474584 - RNA, 19 nt, Artificial Sequence
  Description of Artificial Sequence: Synthetic oligonucleotide
  Sense strand starting at position 589 of SEQ ID NO: 1887470
uggacuacuuaccaaagaa

SEQ ID NO: 2474585 - RNA, 19 nt, Artificial Sequence
  Description of Artificial Sequence: Synthetic oligonucleotide
  Antisense strand to SEQ ID NO: 2474584
uucuuugguaaguagucca

SEQ ID NO: 2474586 - RNA, 19 nt, Artificial Sequence
  Description of Artificial Sequence: Synthetic oligonucleotide
  Sense strand starting at position 671 of SEQ ID NO: 1887470
cuaccaugaccuuggaagu

SEQ ID NO: 2474587 - RNA, 19 nt, Artificial Sequence
  Description of Artificial Sequence: Synthetic oligonucleotide
  Antisense strand to SEQ ID NO: 2474586
acuuccaaggucaugguag

SEQ ID NO: 2474588 - RNA, 19 nt, Artificial Sequence
  Description of Artificial Sequence: Synthetic oligonucleotide
  Sense strand starting at position 672 of SEQ ID NO: 1887470
uaccaugaccuuggaaguu

SEQ ID NO: 2474589 - RNA, 19 nt, Artificial Sequence
  Description of Artificial Sequence: Synthetic oligonucleotide
  Antisense strand to SEQ ID NO: 2474588
aacuuccaaggucauggua

SEQ ID NO: 2474590 - RNA, 19 nt, Artificial Sequence
  Description of Artificial Sequence: Synthetic oligonucleotide
  Sense strand starting at position 2004 of SEQ ID NO: 1887470
ucacuuaaccucugggacu

SEQ ID NO: 2474591 - RNA, 19 nt, Artificial Sequence
  Description of Artificial Sequence: Synthetic oligonucleotide
  Antisense strand to SEQ ID NO: 2474590
agucccagagguuaaguga

SEQ ID NO: 2474592 - RNA, 19 nt, Artificial Sequence
  Description of Artificial Sequence: Synthetic oligonucleotide
  Sense strand starting at position 2413 of SEQ ID NO: 1887470
acucuuuguucguuacuua

SEQ ID NO: 2474593 - RNA, 19 nt, Artificial Sequence
  Description of Artificial Sequence: Synthetic oligonucleotide
  Antisense strand to SEQ ID NO: 2474592
uaaguaacgaacaaagagu

SEQ ID NO: 2474594 - RNA, 19 nt, Artificial Sequence
  Description of Artificial Sequence: Synthetic oligonucleotide
  Sense strand starting at position 2414 of SEQ ID NO: 1887470
cucuuuguucguuacuuaa

SEQ ID NO: 2474595 - RNA, 19 nt, Artificial Sequence
  Description of Artificial Sequence: Synthetic oligonucleotide
  Antisense strand to SEQ ID NO: 2474594
uuaaguaacgaacaaagag

SEQ ID NO: 2474596 - RNA, 19 nt, Artificial Sequence
  Description of Artificial Sequence: Synthetic oligonucleotide
  Sense strand starting at position 2416 of SEQ ID NO: 1887470
cuuuguucguuacuuaauu

SEQ ID NO: 2474597 - RNA, 19 nt, Artificial Sequence
  Description of Artificial Sequence: Synthetic oligonucleotide
  Antisense strand to SEQ ID NO: 2474596
aauuaaguaacgaacaaag

SEQ ID NO: 2474598 - RNA, 19 nt, Artificial Sequence
  Description of Artificial Sequence: Synthetic oligonucleotide
  Sense strand starting at position 2523 of SEQ ID NO: 1887470
acauguaugcgauguauaa

SEQ ID NO: 2474599 - RNA, 19 nt, Artificial Sequence
  Description of Artificial Sequence: Synthetic oligonucleotide
  Antisense strand to SEQ ID NO: 2474598
uuauacaucgcauacaugu

SEQ ID NO: 2474600 - RNA, 19 nt, Artificial Sequence
  Description of Artificial Sequence: Synthetic oligonucleotide
  Sense strand starting at position 2525 of SEQ ID NO: 1887470
auguaugcgauguauaaca

SEQ ID NO: 2474601 - RNA, 19 nt, Artificial Sequence
  Description of Artificial Sequence: Synthetic oligonucleotide
  Antisense strand to SEQ ID NO: 2474600
uguuauacaucgcauacau

SEQ ID NO: 2474602 - RNA, 19 nt, Artificial Sequence
  Description of Artificial Sequence: Synthetic oligonucleotide
  Sense strand starting at position 2527 of SEQ ID NO: 1887470
guaugcgauguauaacaau

SEQ ID NO: 2474603 - RNA, 19 nt, Artificial Sequence
  Description of Artificial Sequence: Synthetic oligonucleotide
  Antisense strand to SEQ ID NO: 2474602
auuguuauacaucgcauac

SEQ ID NO: 2474604 - RNA, 19 nt, Artificial Sequence
  Description of Artificial Sequence: Synthetic oligonucleotide
  Sense strand starting at position 2544 of SEQ ID NO: 1887470
aucaaauucggguaauuau

SEQ ID NO: 2474605 - RNA, 19 nt, Artificial Sequence
  Description of Artificial Sequence: Synthetic oligonucleotide
  Antisense strand to SEQ ID NO: 2474604
auaauuacccgaauuugau

SEQ ID NO: 2474606 - RNA, 19 nt, Artificial Sequence
  Description of Artificial Sequence: Synthetic oligonucleotide
  Sense strand starting at position 2641 of SEQ ID NO: 1887470
ugcaauguauuaucguuaa

SEQ ID NO: 2474607 - RNA, 19 nt, Artificial Sequence
  Description of Artificial Sequence: Synthetic oligonucleotide
  Antisense strand to SEQ ID NO: 2474606
uuaacgauaauacauugca

SEQ ID NO: 2474608 - RNA, 19 nt, Artificial Sequence
  Description of Artificial Sequence: Synthetic oligonucleotide
  Sense strand starting at position 2645 of SEQ ID NO: 1887470
auguauuaucguuaacuac

SEQ ID NO: 2474609 - RNA, 19 nt, Artificial Sequence
  Description of Artificial Sequence: Synthetic oligonucleotide
  Antisense strand to SEQ ID NO: 2474608
guaguuaacgauaauacau

SEQ ID NO: 2474610 - RNA, 19 nt, Artificial Sequence
  Description of Artificial Sequence: Synthetic oligonucleotide
  Sense strand starting at position 2667 of SEQ ID NO: 1887470
uacccuacuguguaaugga

SEQ ID NO: 2474611 - RNA, 19 nt, Artificial Sequence
  Description of Artificial Sequence: Synthetic oligonucleotide
  Antisense strand to SEQ ID NO: 2474610
uccauuacacaguagggua

SEQ ID NO: 2474612 - RNA, 19 nt, Artificial Sequence
  Description of Artificial Sequence: Synthetic oligonucleotide
  Sense strand starting at position 2686 of SEQ ID NO: 1887470
acacuagaauguuaauaag

SEQ ID NO: 2474613 - RNA, 19 nt, Artificial Sequence
  Description of Artificial Sequence: Synthetic oligonucleotide
  Antisense strand to SEQ ID NO: 2474612
cuuauuaacauucuagugu

SEQ ID NO: 2474614 - RNA, 19 nt, Artificial Sequence
  Description of Artificial Sequence: Synthetic oligonucleotide
  Sense strand starting at position 2689 of SEQ ID NO: 1887470
cuagaauguuaauaaggaa

SEQ ID NO: 2474615 - RNA, 19 nt, Artificial Sequence
  Description of Artificial Sequence: Synthetic oligonucleotide
  Antisense strand to SEQ ID NO: 2474614
uuccuuauuaacauucuag

SEQ ID NO: 2474616 - RNA, 19 nt, Artificial Sequence
  Description of Artificial Sequence: Synthetic oligonucleotide
  Sense strand starting at position 2805 of SEQ ID NO: 1887470
aucaaagauuacuuguguu

SEQ ID NO: 2474617 - RNA, 19 nt, Artificial Sequence
  Description of Artificial Sequence: Synthetic oligonucleotide
  Antisense strand to SEQ ID NO: 2474616
aacacaaguaaucuuugau

SEQ ID NO: 2474618 - RNA, 19 nt, Artificial Sequence
  Description of Artificial Sequence: Synthetic oligonucleotide
  Sense strand starting at position 2827 of SEQ ID NO: 1887470
guaucagaacuuugcugua

SEQ ID NO: 2474619 - RNA, 19 nt, Artificial Sequence
  Description of Artificial Sequence: Synthetic oligonucleotide
  Antisense strand to SEQ ID NO: 2474618
uacagcaaaguucugauac

SEQ ID NO: 2474620 - RNA, 19 nt, Artificial Sequence
  Description of Artificial Sequence: Synthetic oligonucleotide
  Sense strand starting at position 2978 of SEQ ID NO: 1887470
gcaauuagugauuguguuc

SEQ ID NO: 2474621 - RNA, 19 nt, Artificial Sequence
  Description of Artificial Sequence: Synthetic oligonucleotide
  Antisense strand to SEQ ID NO: 2474620
gaacacaaucacuaauugc

SEQ ID NO: 2474622 - RNA, 19 nt, Artificial Sequence
  Description of Artificial Sequence: Synthetic oligonucleotide
  Sense strand starting at position 2981 of SEQ ID NO: 1887470
auuagugauuguguuccuu

SEQ ID NO: 2474623 - RNA, 19 nt, Artificial Sequence
  Description of Artificial Sequence: Synthetic oligonucleotide
  Antisense strand to SEQ ID NO: 2474622
aaggaacacaaucacuaau

SEQ ID NO: 2474624 - RNA, 19 nt, Artificial Sequence
  Description of Artificial Sequence: Synthetic oligonucleotide
  Sense strand starting at position 2983 of SEQ ID NO: 1887470
uagugauuguguuccuuaa

SEQ ID NO: 2474625 - RNA, 19 nt, Artificial Sequence
  Description of Artificial Sequence: Synthetic oligonucleotide
  Antisense strand to SEQ ID NO: 2474624
uuaaggaacacaaucacua

SEQ ID NO: 2474626 - RNA, 19 nt, Artificial Sequence
  Description of Artificial Sequence: Synthetic oligonucleotide
  Sense strand starting at position 2985 of SEQ ID NO: 1887470
gugauuguguuccuuaaua

SEQ ID NO: 2474627 - RNA, 19 nt, Artificial Sequence
  Description of Artificial Sequence: Synthetic oligonucleotide
  Antisense strand to SEQ ID NO: 2474626
uauuaaggaacacaaucac

SEQ ID NO: 2474628 - RNA, 19 nt, Artificial Sequence
  Description of Artificial Sequence: Synthetic oligonucleotide
  Sense strand starting at position 3050 of SEQ ID NO: 1887470
gccuuauuggccugaaaug

SEQ ID NO: 2474629 - RNA, 19 nt, Artificial Sequence
  Description of Artificial Sequence: Synthetic oligonucleotide
  Antisense strand to SEQ ID NO: 2474628
cauuucaggccaauaaggc

SEQ ID NO: 2474630 - RNA, 19 nt, Artificial Sequence
  Description of Artificial Sequence: Synthetic oligonucleotide
  Sense strand starting at position 3051 of SEQ ID NO: 1887470
ccuuauuggccugaaauga

SEQ ID NO: 2474631 - RNA, 19 nt, Artificial Sequence
  Description of Artificial Sequence: Synthetic oligonucleotide
  Antisense strand to SEQ ID NO: 2474630
ucauuucaggccaauaagg

SEQ ID NO: 2474632 - RNA, 19 nt, Artificial Sequence
  Description of Artificial Sequence: Synthetic oligonucleotide
  Sense strand starting at position 3130 of SEQ ID NO: 1887470
acacgacuguauucucaga

SEQ ID NO: 2474633 - RNA, 19 nt, Artificial Sequence
  Description of Artificial Sequence: Synthetic oligonucleotide
  Antisense strand to SEQ ID NO: 2474632
ucugagaauacagucgugu

SEQ ID NO: 2474634 - RNA, 19 nt, Artificial Sequence
  Description of Artificial Sequence: Synthetic oligonucleotide
  Sense strand starting at position 3132 of SEQ ID NO: 1887470
acgacuguauucucagacu

SEQ ID NO: 2474635 - RNA, 19 nt, Artificial Sequence
  Description of Artificial Sequence: Synthetic oligonucleotide
  Antisense strand to SEQ ID NO: 2474634
agucugagaauacagucgu

SEQ ID NO: 2474636 - RNA, 19 nt, Artificial Sequence
  Description of Artificial Sequence: Synthetic oligonucleotide
  Sense strand starting at position 3212 of SEQ ID NO: 1887470
gaggcauccuguguccaga

SEQ ID NO: 2474637 - RNA, 19 nt, Artificial Sequence
  Description of Artificial Sequence: Synthetic oligonucleotide
  Antisense strand to SEQ ID NO: 2474636
ucuggacacaggaugccuc

SEQ ID NO: 2474638 - RNA, 19 nt, Artificial Sequence
  Description of Artificial Sequence: Synthetic oligonucleotide
  Sense strand starting at position 3225 of SEQ ID NO: 1887470
uccagaagcaguggaaauu

SEQ ID NO: 2474639 - RNA, 19 nt, Artificial Sequence
  Description of Artificial Sequence: Synthetic oligonucleotide
  Antisense strand to SEQ ID NO: 2474638
aauuuccacugcuucugga

SEQ ID NO: 2474640 - RNA, 19 nt, Artificial Sequence
  Description of Artificial Sequence: Synthetic oligonucleotide
  Sense strand starting at position 3275 of SEQ ID NO: 1887470
cacguucugucucuuggau

SEQ ID NO: 2474641 - RNA, 19 nt, Artificial Sequence
  Description of Artificial Sequence: Synthetic oligonucleotide
  Antisense strand to SEQ ID NO: 2474640
auccaagagacagaacgug

SEQ ID NO: 2474642 - RNA, 19 nt, Artificial Sequence
  Description of Artificial Sequence: Synthetic oligonucleotide
  Sense strand starting at position 3297 of SEQ ID NO: 1887470
cugcuagaaugucuuucuu

SEQ ID NO: 2474643 - RNA, 19 nt, Artificial Sequence
  Description of Artificial Sequence: Synthetic oligonucleotide
  Antisense strand to SEQ ID NO: 2474642
aagaaagacauucuagcag

SEQ ID NO: 2474644 - RNA, 19 nt, Artificial Sequence
  Description of Artificial Sequence: Synthetic oligonucleotide
  Sense strand starting at position 3622 of SEQ ID NO: 1887470
cagauuaugccagguauua

SEQ ID NO: 2474645 - RNA, 19 nt, Artificial Sequence
  Description of Artificial Sequence: Synthetic oligonucleotide
  Antisense strand to SEQ ID NO: 2474644
uaauaccuggcauaaucug

SEQ ID NO: 2474646 - RNA, 19 nt, Artificial Sequence
  Description of Artificial Sequence: Synthetic oligonucleotide
  Sense strand starting at position 3631 of SEQ ID NO: 1887470
ccagguauuaugugaugga

SEQ ID NO: 2474647 - RNA, 19 nt, Artificial Sequence
  Description of Artificial Sequence: Synthetic oligonucleotide
  Antisense strand to SEQ ID NO: 2474646
uccaucacauaauaccugg

SEQ ID NO: 2474648 - RNA, 19 nt, Artificial Sequence
  Description of Artificial Sequence: Synthetic oligonucleotide
  Sense strand starting at position 3635 of SEQ ID NO: 1887470
guauuaugugauggagaca

SEQ ID NO: 2474649 - RNA, 19 nt, Artificial Sequence
  Description of Artificial Sequence: Synthetic oligonucleotide
  Antisense strand to SEQ ID NO: 2474648
ugucuccaucacauaauac

SEQ ID NO: 2474650 - RNA, 19 nt, Artificial Sequence
  Description of Artificial Sequence: Synthetic oligonucleotide
  Sense strand starting at position 3693 of SEQ ID NO: 1887470
gaaccagagugagaucaaa

SEQ ID NO: 2474651 - RNA, 19 nt, Artificial Sequence
  Description of Artificial Sequence: Synthetic oligonucleotide
  Antisense strand to SEQ ID NO: 2474650
uuugaucucacucugguuc

SEQ ID NO: 2474652 - RNA, 19 nt, Artificial Sequence
  Description of Artificial Sequence: Synthetic oligonucleotide
  Sense strand starting at position 1 of SEQ ID NO: 1887471
agauaauuccugcgggaaa

SEQ ID NO: 2474653 - RNA, 19 nt, Artificial Sequence
  Description of Artificial Sequence: Synthetic oligonucleotide
  Antisense strand to SEQ ID NO: 2474652
uuucccgcaggaauuaucu

SEQ ID NO: 2474654 - RNA, 19 nt, Artificial Sequence
  Description of Artificial Sequence: Synthetic oligonucleotide
  Sense strand starting at position 245 of SEQ ID NO: 1887471
gugagaaagguuuggcaug

SEQ ID NO: 2474655 - RNA, 19 nt, Artificial Sequence
  Description of Artificial Sequence: Synthetic oligonucleotide
  Antisense strand to SEQ ID NO: 2474654
caugccaaaccuuucucac

SEQ ID NO: 2474656 - RNA, 19 nt, Artificial Sequence
  Description of Artificial Sequence: Synthetic oligonucleotide
  Sense strand starting at position 247 of SEQ ID NO: 1887471
gagaaagguuuggcaugga

SEQ ID NO: 2474657 - RNA, 19 nt, Artificial Sequence
  Description of Artificial Sequence: Synthetic oligonucleotide
  Antisense strand to SEQ ID NO: 2474656
uccaugccaaaccuuucuc

SEQ ID NO: 2474658 - RNA, 19 nt, Artificial Sequence
  Description of Artificial Sequence: Synthetic oligonucleotide
  Sense strand starting at position 250 of SEQ ID NO: 1887471
aaagguuuggcauggaacu

SEQ ID NO: 2474659 - RNA, 19 nt, Artificial Sequence
  Description of Artificial Sequence: Synthetic oligonucleotide
  Antisense strand to SEQ ID NO: 2474658
aguuccaugccaaaccuuu

SEQ ID NO: 2474660 - RNA, 19 nt, Artificial Sequence
  Description of Artificial Sequence: Synthetic oligonucleotide
  Sense strand starting at position 293 of SEQ ID NO: 1887471
aggaaugagucggugggua

SEQ ID NO: 2474661 - RNA, 19 nt, Artificial Sequence
  Description of Artificial Sequence: Synthetic oligonucleotide
  Antisense strand to SEQ ID NO: 2474660
uacccaccgacucauuccu

SEQ ID NO: 2474662 - RNA, 19 nt, Artificial Sequence
  Description of Artificial Sequence: Synthetic oligonucleotide
  Sense strand starting at position 295 of SEQ ID NO: 1887471
gaaugagucgguggguaga

SEQ ID NO: 2474663 - RNA, 19 nt, Artificial Sequence
  Description of Artificial Sequence: Synthetic oligonucleotide
  Antisense strand to SEQ ID NO: 2474662
ucuacccaccgacucauuc

SEQ ID NO: 2474664 - RNA, 19 nt, Artificial Sequence
  Description of Artificial Sequence: Synthetic oligonucleotide
  Sense strand starting at position 381 of SEQ ID NO: 1887471
gugaguggauagaggaaua

SEQ ID NO: 2474665 - RNA, 19 nt, Artificial Sequence
  Description of Artificial Sequence: Synthetic oligonucleotide
  Antisense strand to SEQ ID NO: 2474664
uauuccucuauccacucac

SEQ ID NO: 2474666 - RNA, 19 nt, Artificial Sequence
  Description of Artificial Sequence: Synthetic oligonucleotide
  Sense strand starting at position 578 of SEQ ID NO: 1887471
gagaggaaugcgcgaguga

SEQ ID NO: 2474667 - RNA, 19 nt, Artificial Sequence
  Description of Artificial Sequence: Synthetic oligonucleotide
  Antisense strand to SEQ ID NO: 2474666
ucacucgcgcauuccucuc

SEQ ID NO: 2474668 - RNA, 19 nt, Artificial Sequence
  Description of Artificial Sequence: Synthetic oligonucleotide
  Sense strand starting at position 757 of SEQ ID NO: 1887471
ggcaaugugugagugggua

SEQ ID NO: 2474669 - RNA, 19 nt, Artificial Sequence
  Description of Artificial Sequence: Synthetic oligonucleotide
  Antisense strand to SEQ ID NO: 2474668
uacccacucacacauugcc

SEQ ID NO: 2474670 - RNA, 19 nt, Artificial Sequence
  Description of Artificial Sequence: Synthetic oligonucleotide
  Sense strand starting at position 792 of SEQ ID NO: 1887471
gguagaggauugagugagu

SEQ ID NO: 2474671 - RNA, 19 nt, Artificial Sequence
  Description of Artificial Sequence: Synthetic oligonucleotide
  Antisense strand to SEQ ID NO: 2474670
acucacucaauccucuacc

SEQ ID NO: 2474672 - RNA, 19 nt, Artificial Sequence
  Description of Artificial Sequence: Synthetic oligonucleotide
  Sense strand starting at position 1131 of SEQ ID NO: 1887471
gaaugagugaguuagcaga

SEQ ID NO: 2474673 - RNA, 19 nt, Artificial Sequence
  Description of Artificial Sequence: Synthetic oligonucleotide
  Antisense strand to SEQ ID NO: 2474672
ucugcuaacucacucauuc

SEQ ID NO: 2474674 - RNA, 19 nt, Artificial Sequence
  Description of Artificial Sequence: Synthetic oligonucleotide
  Sense strand starting at position 1138 of SEQ ID NO: 1887471
ugaguuagcagaggaauga

SEQ ID NO: 2474675 - RNA, 19 nt, Artificial Sequence
  Description of Artificial Sequence: Synthetic oligonucleotide
  Antisense strand to SEQ ID NO: 2474674
ucauuccucugcuaacuca

SEQ ID NO: 2474676 - RNA, 19 nt, Artificial Sequence
  Description of Artificial Sequence: Synthetic oligonucleotide
  Sense strand starting at position 1736 of SEQ ID NO: 1887471
accugaauccuugggaguu

SEQ ID NO: 2474677 - RNA, 19 nt, Artificial Sequence
  Description of Artificial Sequence: Synthetic oligonucleotide
  Antisense strand to SEQ ID NO: 2474676
aacucccaaggauucaggu

SEQ ID NO: 2474678 - RNA, 19 nt, Artificial Sequence
  Description of Artificial Sequence: Synthetic oligonucleotide
  Sense strand starting at position 2213 of SEQ ID NO: 1887471
agacaaggguguucagaua

SEQ ID NO: 2474679 - RNA, 19 nt, Artificial Sequence
  Description of Artificial Sequence: Synthetic oligonucleotide
  Antisense strand to SEQ ID NO: 2474678
uaucugaacacccuugucu

SEQ ID NO: 2474680 - RNA, 19 nt, Artificial Sequence
  Description of Artificial Sequence: Synthetic oligonucleotide
  Sense strand starting at position 2284 of SEQ ID NO: 1887471
acccuugucccagaucauc

SEQ ID NO: 2474681 - RNA, 19 nt, Artificial Sequence
  Description of Artificial Sequence: Synthetic oligonucleotide
  Antisense strand to SEQ ID NO: 2474680
gaugaucugggacaagggu

SEQ ID NO: 2474682 - RNA, 19 nt, Artificial Sequence
  Description of Artificial Sequence: Synthetic oligonucleotide
  Sense strand starting at position 2303 of SEQ ID NO: 1887471
ugggcuccucuccaaacau

SEQ ID NO: 2474683 - RNA, 19 nt, Artificial Sequence
  Description of Artificial Sequence: Synthetic oligonucleotide
  Antisense strand to SEQ ID NO: 2474682
auguuuggagaggagccca

SEQ ID NO: 2474684 - RNA, 19 nt, Artificial Sequence
  Description of Artificial Sequence: Synthetic oligonucleotide
  Sense strand starting at position 2503 of SEQ ID NO: 1887471
gaggauuaccuucgucaga

SEQ ID NO: 2474685 - RNA, 19 nt, Artificial Sequence
  Description of Artificial Sequence: Synthetic oligonucleotide
  Antisense strand to SEQ ID NO: 2474684
ucugacgaagguaauccuc

SEQ ID NO: 2474686 - RNA, 19 nt, Artificial Sequence
  Description of Artificial Sequence: Synthetic oligonucleotide
  Sense strand starting at position 2504 of SEQ ID NO: 1887471
aggauuaccuucgucagau

SEQ ID NO: 2474687 - RNA, 19 nt, Artificial Sequence
  Description of Artificial Sequence: Synthetic oligonucleotide
  Antisense strand to SEQ ID NO: 2474686
aucugacgaagguaauccu

SEQ ID NO: 2474688 - RNA, 19 nt, Artificial Sequence
  Description of Artificial Sequence: Synthetic oligonucleotide
  Sense strand starting at position 2505 of SEQ ID NO: 1887471
ggauuaccuucgucagauu

SEQ ID NO: 2474689 - RNA, 19 nt, Artificial Sequence
  Description of Artificial Sequence: Synthetic oligonucleotide
  Antisense strand to SEQ ID NO: 2474688
aaucugacgaagguaaucc

SEQ ID NO: 2474690 - RNA, 19 nt, Artificial Sequence
  Description of Artificial Sequence: Synthetic oligonucleotide
  Sense strand starting at position 2732 of SEQ ID NO: 1887471
aggcuucccaucugggaaa

SEQ ID NO: 2474691 - RNA, 19 nt, Artificial Sequence
  Description of Artificial Sequence: Synthetic oligonucleotide
  Antisense strand to SEQ ID NO: 2474690
uuucccagaugggaagccu

SEQ ID NO: 2474692 - RNA, 19 nt, Artificial Sequence
  Description of Artificial Sequence: Synthetic oligonucleotide
  Sense strand starting at position 2783 of SEQ ID NO: 1887471
gaggaaggcuccuaagaaa

SEQ ID NO: 2474693 - RNA, 19 nt, Artificial Sequence
  Description of Artificial Sequence: Synthetic oligonucleotide
  Antisense strand to SEQ ID NO: 2474692
uuucuuaggagccuuccuc

SEQ ID NO: 2474694 - RNA, 19 nt, Artificial Sequence
  Description of Artificial Sequence: Synthetic oligonucleotide
  Sense strand starting at position 2869 of SEQ ID NO: 1887471
gucucuacuccaugcgaaa

SEQ ID NO: 2474695 - RNA, 19 nt, Artificial Sequence
  Description of Artificial Sequence: Synthetic oligonucleotide
  Antisense strand to SEQ ID NO: 2474694
uuucgcauggaguagagac

SEQ ID NO: 2474696 - RNA, 19 nt, Artificial Sequence
  Description of Artificial Sequence: Synthetic oligonucleotide
  Sense strand starting at position 2947 of SEQ ID NO: 1887471
gcacuuacuguguaucaga

SEQ ID NO: 2474697 - RNA, 19 nt, Artificial Sequence
  Description of Artificial Sequence: Synthetic oligonucleotide
  Antisense strand to SEQ ID NO: 2474696
ucugauacacaguaagugc

SEQ ID NO: 2474698 - RNA, 19 nt, Artificial Sequence
  Description of Artificial Sequence: Synthetic oligonucleotide
  Sense strand starting at position 2954 of SEQ ID NO: 1887471
cuguguaucagauacugua

SEQ ID NO: 2474699 - RNA, 19 nt, Artificial Sequence
  Description of Artificial Sequence: Synthetic oligonucleotide
  Antisense strand to SEQ ID NO: 2474698
uacaguaucugauacacag

SEQ ID NO: 2474700 - RNA, 19 nt, Artificial Sequence
  Description of Artificial Sequence: Synthetic oligonucleotide
  Sense strand starting at position 2995 of SEQ ID NO: 1887471
ccagguaugccacauaaag

SEQ ID NO: 2474701 - RNA, 19 nt, Artificial Sequence
  Description of Artificial Sequence: Synthetic oligonucleotide
  Antisense strand to SEQ ID NO: 2474700
cuuuauguggcauaccugg

SEQ ID NO: 2474702 - RNA, 19 nt, Artificial Sequence
  Description of Artificial Sequence: Synthetic oligonucleotide
  Sense strand starting at position 3027 of SEQ ID NO: 1887471
ugcagcaugcuguacauaa

SEQ ID NO: 2474703 - RNA, 19 nt, Artificial Sequence
  Description of Artificial Sequence: Synthetic oligonucleotide
  Antisense strand to SEQ ID NO: 2474702
uuauguacagcaugcugca

SEQ ID NO: 2474704 - RNA, 19 nt, Artificial Sequence
  Description of Artificial Sequence: Synthetic oligonucleotide
  Sense strand starting at position 3050 of SEQ ID NO: 1887471
agcuuacuuuaugcagagu

SEQ ID NO: 2474705 - RNA, 19 nt, Artificial Sequence
  Description of Artificial Sequence: Synthetic oligonucleotide
  Antisense strand to SEQ ID NO: 2474704
acucugcauaaaguaagcu

SEQ ID NO: 2474706 - RNA, 19 nt, Artificial Sequence
  Description of Artificial Sequence: Synthetic oligonucleotide
  Sense strand starting at position 3053 of SEQ ID NO: 1887471
uuacuuuaugcagaguacu

SEQ ID NO: 2474707 - RNA, 19 nt, Artificial Sequence
  Description of Artificial Sequence: Synthetic oligonucleotide
  Antisense strand to SEQ ID NO: 2474706
aguacucugcauaaaguaa

SEQ ID NO: 2474708 - RNA, 19 nt, Artificial Sequence
  Description of Artificial Sequence: Synthetic oligonucleotide
  Sense strand starting at position 3095 of SEQ ID NO: 1887471
ugccaugugcuguauauaa

SEQ ID NO: 2474709 - RNA, 19 nt, Artificial Sequence
  Description of Artificial Sequence: Synthetic oligonucleotide
  Antisense strand to SEQ ID NO: 2474708
uuauauacagcacauggca

SEQ ID NO: 2474710 - RNA, 19 nt, Artificial Sequence
  Description of Artificial Sequence: Synthetic oligonucleotide
  Sense strand starting at position 3097 of SEQ ID NO: 1887471
ccaugugcuguauauaaag

SEQ ID NO: 2474711 - RNA, 19 nt, Artificial Sequence
  Description of Artificial Sequence: Synthetic oligonucleotide
  Antisense strand to SEQ ID NO: 2474710
cuuuauauacagcacaugg

SEQ ID NO: 2474712 - RNA, 19 nt, Artificial Sequence
  Description of Artificial Sequence: Synthetic oligonucleotide
  Sense strand starting at position 3226 of SEQ ID NO: 1887471
cugugugcuggcuauucua

SEQ ID NO: 2474713 - RNA, 19 nt, Artificial Sequence
  Description of Artificial Sequence: Synthetic oligonucleotide
  Antisense strand to SEQ ID NO: 2474712
uagaauagccagcacacag

SEQ ID NO: 2474714 - RNA, 19 nt, Artificial Sequence
  Description of Artificial Sequence: Synthetic oligonucleotide
  Sense strand starting at position 3280 of SEQ ID NO: 1887471
auaaauacugucuacugua

SEQ ID NO: 2474715 - RNA, 19 nt, Artificial Sequence
  Description of Artificial Sequence: Synthetic oligonucleotide
  Antisense strand to SEQ ID NO: 2474714
uacaguagacaguauuuau

SEQ ID NO: 2474716 - RNA, 19 nt, Artificial Sequence
  Description of Artificial Sequence: Synthetic oligonucleotide
  Sense strand starting at position 3459 of SEQ ID NO: 1887471
aacuacucggugcaacaua

SEQ ID NO: 2474717 - RNA, 19 nt, Artificial Sequence
  Description of Artificial Sequence: Synthetic oligonucleotide
  Antisense strand to SEQ ID NO: 2474716
uauguugcaccgaguaguu

SEQ ID NO: 2474718 - RNA, 19 nt, Artificial Sequence
  Description of Artificial Sequence: Synthetic oligonucleotide
  Sense strand starting at position 3467 of SEQ ID NO: 1887471
ggugcaacauacuugacau

SEQ ID NO: 2474719 - RNA, 19 nt, Artificial Sequence
  Description of Artificial Sequence: Synthetic oligonucleotide
  Antisense strand to SEQ ID NO: 2474718
augucaaguauguugcacc

SEQ ID NO: 2474720 - RNA, 19 nt, Artificial Sequence
  Description of Artificial Sequence: Synthetic oligonucleotide
  Sense strand starting at position 3514 of SEQ ID NO: 1887471
cuauauaaagugugccuua

SEQ ID NO: 2474721 - RNA, 19 nt, Artificial Sequence
  Description of Artificial Sequence: Synthetic oligonucleotide
  Antisense strand to SEQ ID NO: 2474720
uaaggcacacuuuauauag

SEQ ID NO: 2474722 - RNA, 19 nt, Artificial Sequence
  Description of Artificial Sequence: Synthetic oligonucleotide
  Sense strand starting at position 3533 of SEQ ID NO: 1887471
uugugugccagauaugcua

SEQ ID NO: 2474723 - RNA, 19 nt, Artificial Sequence
  Description of Artificial Sequence: Synthetic oligonucleotide
  Antisense strand to SEQ ID NO: 2474722
uagcauaucuggcacacaa

SEQ ID NO: 2474724 - RNA, 19 nt, Artificial Sequence
  Description of Artificial Sequence: Synthetic oligonucleotide
  Sense strand starting at position 3574 of SEQ ID NO: 1887471
ccagguaugccgcauaaag

SEQ ID NO: 2474725 - RNA, 19 nt, Artificial Sequence
  Description of Artificial Sequence: Synthetic oligonucleotide
  Antisense strand to SEQ ID NO: 2474724
cuuuaugcggcauaccugg

SEQ ID NO: 2474726 - RNA, 19 nt, Artificial Sequence
  Description of Artificial Sequence: Synthetic oligonucleotide
  Sense strand starting at position 3781 of SEQ ID NO: 1887471
cugggcauuguugaagaga

SEQ ID NO: 2474727 - RNA, 19 nt, Artificial Sequence
  Description of Artificial Sequence: Synthetic oligonucleotide
  Antisense strand to SEQ ID NO: 2474726
ucucuucaacaaugcccag

SEQ ID NO: 2474728 - RNA, 19 nt, Artificial Sequence
  Description of Artificial Sequence: Synthetic oligonucleotide
  Sense strand starting at position 3790 of SEQ ID NO: 1887471
guugaagagaccugaguga

SEQ ID NO: 2474729 - RNA, 19 nt, Artificial Sequence
  Description of Artificial Sequence: Synthetic oligonucleotide
  Antisense strand to SEQ ID NO: 2474728
ucacucaggucucuucaac

SEQ ID NO: 2474730 - RNA, 19 nt, Artificial Sequence
  Description of Artificial Sequence: Synthetic oligonucleotide
  Sense strand starting at position 3973 of SEQ ID NO: 1887471
gugucaaugccauauuaau

SEQ ID NO: 2474731 - RNA, 19 nt, Artificial Sequence
  Description of Artificial Sequence: Synthetic oligonucleotide
  Antisense strand to SEQ ID NO: 2474730
auuaauauggcauugacac

SEQ ID NO: 2474732 - RNA, 19 nt, Artificial Sequence
  Description of Artificial Sequence: Synthetic oligonucleotide
  Sense strand starting at position 49 of SEQ ID NO: 1887472
ugcacuauuguaggaaaga

SEQ ID NO: 2474733 - RNA, 19 nt, Artificial Sequence
  Description of Artificial Sequence: Synthetic oligonucleotide
  Antisense strand to SEQ ID NO: 2474732
ucuuuccuacaauagugca

SEQ ID NO: 2474734 - RNA, 19 nt, Artificial Sequence
  Description of Artificial Sequence: Synthetic oligonucleotide
  Sense strand starting at position 50 of SEQ ID NO: 1887472
gcacuauuguaggaaagac

SEQ ID NO: 2474735 - RNA, 19 nt, Artificial Sequence
  Description of Artificial Sequence: Synthetic oligonucleotide
  Antisense strand to SEQ ID NO: 2474734
gucuuuccuacaauagugc

SEQ ID NO: 2474736 - RNA, 19 nt, Artificial Sequence
  Description of Artificial Sequence: Synthetic oligonucleotide
  Sense strand starting at position 114 of SEQ ID NO: 1887472
gugagaaaggcuugggaug

SEQ ID NO: 2474737 - RNA, 19 nt, Artificial Sequence
  Description of Artificial Sequence: Synthetic oligonucleotide
  Antisense strand to SEQ ID NO: 2474736
caucccaagccuuucucac

SEQ ID NO: 2474738 - RNA, 19 nt, Artificial Sequence
  Description of Artificial Sequence: Synthetic oligonucleotide
  Sense strand starting at position 1267 of SEQ ID NO: 1887472
gagaggagugcgugaguga

SEQ ID NO: 2474739 - RNA, 19 nt, Artificial Sequence
  Description of Artificial Sequence: Synthetic oligonucleotide
  Antisense strand to SEQ ID NO: 2474738
ucacucacgcacuccucuc

SEQ ID NO: 2474740 - RNA, 19 nt, Artificial Sequence
  Description of Artificial Sequence: Synthetic oligonucleotide
  Sense strand starting at position 1763 of SEQ ID NO: 1887472
gguuguggaaaguacugaa

SEQ ID NO: 2474741 - RNA, 19 nt, Artificial Sequence
  Description of Artificial Sequence: Synthetic oligonucleotide
  Antisense strand to SEQ ID NO: 2474740
uucaguacuuuccacaacc

SEQ ID NO: 2474742 - RNA, 19 nt, Artificial Sequence
  Description of Artificial Sequence: Synthetic oligonucleotide
  Sense strand starting at position 1789 of SEQ ID NO: 1887472
gcaguugucauagaaggca

SEQ ID NO: 2474743 - RNA, 19 nt, Artificial Sequence
  Description of Artificial Sequence: Synthetic oligonucleotide
  Antisense strand to SEQ ID NO: 2474742
ugccuucuaugacaacugc

SEQ ID NO: 2474744 - RNA, 19 nt, Artificial Sequence
  Description of Artificial Sequence: Synthetic oligonucleotide
  Sense strand starting at position 2036 of SEQ ID NO: 1887472
agggcucugggaugaauaa

SEQ ID NO: 2474745 - RNA, 19 nt, Artificial Sequence
  Description of Artificial Sequence: Synthetic oligonucleotide
  Antisense strand to SEQ ID NO: 2474744
uuauucaucccagagcccu

SEQ ID NO: 2474746 - RNA, 19 nt, Artificial Sequence
  Description of Artificial Sequence: Synthetic oligonucleotide
  Sense strand starting at position 2110 of SEQ ID NO: 1887472
gccucuaguugccuaguaa

SEQ ID NO: 2474747 - RNA, 19 nt, Artificial Sequence
  Description of Artificial Sequence: Synthetic oligonucleotide
  Antisense strand to SEQ ID NO: 2474746
uuacuaggcaacuagaggc

SEQ ID NO: 2474748 - RNA, 19 nt, Artificial Sequence
  Description of Artificial Sequence: Synthetic oligonucleotide
  Sense strand starting at position 2111 of SEQ ID NO: 1887472
ccucuaguugccuaguaac

SEQ ID NO: 2474749 - RNA, 19 nt, Artificial Sequence
  Description of Artificial Sequence: Synthetic oligonucleotide
  Antisense strand to SEQ ID NO: 2474748
guuacuaggcaacuagagg

SEQ ID NO: 2474750 - RNA, 19 nt, Artificial Sequence
  Description of Artificial Sequence: Synthetic oligonucleotide
  Sense strand starting at position 2378 of SEQ ID NO: 1887472
cugggaguucuuugccucu

SEQ ID NO: 2474751 - RNA, 19 nt, Artificial Sequence
  Description of Artificial Sequence: Synthetic oligonucleotide
  Antisense strand to SEQ ID NO: 2474750
agaggcaaagaacucccag

SEQ ID NO: 2474752 - RNA, 19 nt, Artificial Sequence
  Description of Artificial Sequence: Synthetic oligonucleotide
  Sense strand starting at position 2734 of SEQ ID NO: 1887472
acccuugucccagaucauc

SEQ ID NO: 2474753 - RNA, 19 nt, Artificial Sequence
  Description of Artificial Sequence: Synthetic oligonucleotide
  Antisense strand to SEQ ID NO: 2474752
gaugaucugggacaagggu

SEQ ID NO: 2474754 - RNA, 19 nt, Artificial Sequence
  Description of Artificial Sequence: Synthetic oligonucleotide
  Sense strand starting at position 2753 of SEQ ID NO: 1887472
ugggcuccucuccaaacau

SEQ ID NO: 2474755 - RNA, 19 nt, Artificial Sequence
  Description of Artificial Sequence: Synthetic oligonucleotide
  Antisense strand to SEQ ID NO: 2474754
auguuuggagaggagccca

SEQ ID NO: 2474756 - RNA, 19 nt, Artificial Sequence
  Description of Artificial Sequence: Synthetic oligonucleotide
  Sense strand starting at position 2791 of SEQ ID NO: 1887472
ugcugcaucuugguacaga

SEQ ID NO: 2474757 - RNA, 19 nt, Artificial Sequence
  Description of Artificial Sequence: Synthetic oligonucleotide
  Antisense strand to SEQ ID NO: 2474756
ucuguaccaagaugcagca

SEQ ID NO: 2474758 - RNA, 19 nt, Artificial Sequence
  Description of Artificial Sequence: Synthetic oligonucleotide
  Sense strand starting at position 2802 of SEQ ID NO: 1887472
gguacagacuuaggagauu

SEQ ID NO: 2474759 - RNA, 19 nt, Artificial Sequence
  Description of Artificial Sequence: Synthetic oligonucleotide
  Antisense strand to SEQ ID NO: 2474758
aaucuccuaagucuguacc

SEQ ID NO: 2474760 - RNA, 19 nt, Artificial Sequence
  Description of Artificial Sequence: Synthetic oligonucleotide
  Sense strand starting at position 2953 of SEQ ID NO: 1887472
gaggauuaccugggucaga

SEQ ID NO: 2474761 - RNA, 19 nt, Artificial Sequence
  Description of Artificial Sequence: Synthetic oligonucleotide
  Antisense strand to SEQ ID NO: 2474760
ucugacccagguaauccuc

SEQ ID NO: 2474762 - RNA, 19 nt, Artificial Sequence
  Description of Artificial Sequence: Synthetic oligonucleotide
  Sense strand starting at position 3117 of SEQ ID NO: 1887472
gaguguaguccuuguucug

SEQ ID NO: 2474763 - RNA, 19 nt, Artificial Sequence
  Description of Artificial Sequence: Synthetic oligonucleotide
  Antisense strand to SEQ ID NO: 2474762
cagaacaaggacuacacuc

SEQ ID NO: 2474764 - RNA, 19 nt, Artificial Sequence
  Description of Artificial Sequence: Synthetic oligonucleotide
  Sense strand starting at position 3232 of SEQ ID NO: 1887472
gaggaaggcuccuaagaag

SEQ ID NO: 2474765 - RNA, 19 nt, Artificial Sequence
  Description of Artificial Sequence: Synthetic oligonucleotide
  Antisense strand to SEQ ID NO: 2474764
cuucuuaggagccuuccuc

SEQ ID NO: 2474766 - RNA, 19 nt, Artificial Sequence
  Description of Artificial Sequence: Synthetic oligonucleotide
  Sense strand starting at position 3235 of SEQ ID NO: 1887472
gaaggcuccuaagaagaga

SEQ ID NO: 2474767 - RNA, 19 nt, Artificial Sequence
  Description of Artificial Sequence: Synthetic oligonucleotide
  Antisense strand to SEQ ID NO: 2474766
ucucuucuuaggagccuuc

SEQ ID NO: 2474768 - RNA, 19 nt, Artificial Sequence
  Description of Artificial Sequence: Synthetic oligonucleotide
  Sense strand starting at position 3318 of SEQ ID NO: 1887472
gucucuacuccaugcgaaa

SEQ ID NO: 2474769 - RNA, 19 nt, Artificial Sequence
  Description of Artificial Sequence: Synthetic oligonucleotide
  Antisense strand to SEQ ID NO: 2474768
uuucgcauggaguagagac

SEQ ID NO: 2474770 - RNA, 19 nt, Artificial Sequence
  Description of Artificial Sequence: Synthetic oligonucleotide
  Sense strand starting at position 3330 of SEQ ID NO: 1887472
ugcgaaagacuguauggaa

SEQ ID NO: 2474771 - RNA, 19 nt, Artificial Sequence
  Description of Artificial Sequence: Synthetic oligonucleotide
  Antisense strand to SEQ ID NO: 2474770
uuccauacagucuuucgca

SEQ ID NO: 2474772 - RNA, 19 nt, Artificial Sequence
  Description of Artificial Sequence: Synthetic oligonucleotide
  Sense strand starting at position 3373 of SEQ ID NO: 1887472
gugccagucucacuauaua

SEQ ID NO: 2474773 - RNA, 19 nt, Artificial Sequence
  Description of Artificial Sequence: Synthetic oligonucleotide
  Antisense strand to SEQ ID NO: 2474772
uauauagugagacuggcac

SEQ ID NO: 2474774 - RNA, 19 nt, Artificial Sequence
  Description of Artificial Sequence: Synthetic oligonucleotide
  Sense strand starting at position 3403 of SEQ ID NO: 1887472
cuguguaucagguacucua

SEQ ID NO: 2474775 - RNA, 19 nt, Artificial Sequence
  Description of Artificial Sequence: Synthetic oligonucleotide
  Antisense strand to SEQ ID NO: 2474774
uagaguaccugauacacag

SEQ ID NO: 2474776 - RNA, 19 nt, Artificial Sequence
  Description of Artificial Sequence: Synthetic oligonucleotide
  Sense strand starting at position 3476 of SEQ ID NO: 1887472
ugcagcaugcucuacauaa

SEQ ID NO: 2474777 - RNA, 19 nt, Artificial Sequence
  Description of Artificial Sequence: Synthetic oligonucleotide
  Antisense strand to SEQ ID NO: 2474776
uuauguagagcaugcugca

SEQ ID NO: 2474778 - RNA, 19 nt, Artificial Sequence
  Description of Artificial Sequence: Synthetic oligonucleotide
  Sense strand starting at position 3497 of SEQ ID NO: 1887472
uaagcuuacuuugugcaga

SEQ ID NO: 2474779 - RNA, 19 nt, Artificial Sequence
  Description of Artificial Sequence: Synthetic oligonucleotide
  Antisense strand to SEQ ID NO: 2474778
ucugcacaaaguaagcuua

SEQ ID NO: 2474780 - RNA, 19 nt, Artificial Sequence
  Description of Artificial Sequence: Synthetic oligonucleotide
  Sense strand starting at position 3499 of SEQ ID NO: 1887472
agcuuacuuugugcagagu

SEQ ID NO: 2474781 - RNA, 19 nt, Artificial Sequence
  Description of Artificial Sequence: Synthetic oligonucleotide
  Antisense strand to SEQ ID NO: 2474780
acucugcacaaaguaagcu

SEQ ID NO: 2474782 - RNA, 19 nt, Artificial Sequence
  Description of Artificial Sequence: Synthetic oligonucleotide
  Sense strand starting at position 3500 of SEQ ID NO: 1887472
gcuuacuuugugcagagua

SEQ ID NO: 2474783 - RNA, 19 nt, Artificial Sequence
  Description of Artificial Sequence: Synthetic oligonucleotide
  Antisense strand to SEQ ID NO: 2474782
uacucugcacaaaguaagc

SEQ ID NO: 2474784 - RNA, 19 nt, Artificial Sequence
  Description of Artificial Sequence: Synthetic oligonucleotide
  Sense strand starting at position 3502 of SEQ ID NO: 1887472
uuacuuugugcagaguacu

SEQ ID NO: 2474785 - RNA, 19 nt, Artificial Sequence
  Description of Artificial Sequence: Synthetic oligonucleotide
  Antisense strand to SEQ ID NO: 2474784
aguacucugcacaaaguaa

SEQ ID NO: 2474786 - RNA, 19 nt, Artificial Sequence
  Description of Artificial Sequence: Synthetic oligonucleotide
  Sense strand starting at position 3505 of SEQ ID NO: 1887472
cuuugugcagaguacuuua

SEQ ID NO: 2474787 - RNA, 19 nt, Artificial Sequence
  Description of Artificial Sequence: Synthetic oligonucleotide
  Antisense strand to SEQ ID NO: 2474786
uaaaguacucugcacaaag

SEQ ID NO: 2474788 - RNA, 19 nt, Artificial Sequence
  Description of Artificial Sequence: Synthetic oligonucleotide
  Sense strand starting at position 3510 of SEQ ID NO: 1887472
ugcagaguacuuuauacaa

SEQ ID NO: 2474789 - RNA, 19 nt, Artificial Sequence
  Description of Artificial Sequence: Synthetic oligonucleotide
  Antisense strand to SEQ ID NO: 2474788
uuguauaaaguacucugca

SEQ ID NO: 2474790 - RNA, 19 nt, Artificial Sequence
  Description of Artificial Sequence: Synthetic oligonucleotide
  Sense strand starting at position 3644 of SEQ ID NO: 1887472
agucccugguccuuuauau

SEQ ID NO: 2474791 - RNA, 19 nt, Artificial Sequence
  Description of Artificial Sequence: Synthetic oligonucleotide
  Antisense strand to SEQ ID NO: 2474790
auauaaaggaccagggacu

SEQ ID NO: 2474792 - RNA, 19 nt, Artificial Sequence
  Description of Artificial Sequence: Synthetic oligonucleotide
  Sense strand starting at position 3678 of SEQ ID NO: 1887472
ugugccagguguucuaaau

SEQ ID NO: 2474793 - RNA, 19 nt, Artificial Sequence
  Description of Artificial Sequence: Synthetic oligonucleotide
  Antisense strand to SEQ ID NO: 2474792
auuuagaacaccuggcaca

SEQ ID NO: 2474794 - RNA, 19 nt, Artificial Sequence
  Description of Artificial Sequence: Synthetic oligonucleotide
  Sense strand starting at position 3709 of SEQ ID NO: 1887472
uugugugccagauguccua

SEQ ID NO: 2474795 - RNA, 19 nt, Artificial Sequence
  Description of Artificial Sequence: Synthetic oligonucleotide
  Antisense strand to SEQ ID NO: 2474794
uaggacaucuggcacacaa

SEQ ID NO: 2474796 - RNA, 19 nt, Artificial Sequence
  Description of Artificial Sequence: Synthetic oligonucleotide
  Sense strand starting at position 3780 of SEQ ID NO: 1887472
ugugcaacauacuugacau

SEQ ID NO: 2474797 - RNA, 19 nt, Artificial Sequence
  Description of Artificial Sequence: Synthetic oligonucleotide
  Antisense strand to SEQ ID NO: 2474796
augucaaguauguugcaca

SEQ ID NO: 2474798 - RNA, 19 nt, Artificial Sequence
  Description of Artificial Sequence: Synthetic oligonucleotide
  Sense strand starting at position 3852 of SEQ ID NO: 1887472
ccagguaugccacauaaag

SEQ ID NO: 2474799 - RNA, 19 nt, Artificial Sequence
  Description of Artificial Sequence: Synthetic oligonucleotide
  Antisense strand to SEQ ID NO: 2474798
cuuuauguggcauaccugg

SEQ ID NO: 2474800 - RNA, 19 nt, Artificial Sequence
  Description of Artificial Sequence: Synthetic oligonucleotide
  Sense strand starting at position 3879 of SEQ ID NO: 1887472
cuauguguuagguacucca

SEQ ID NO: 2474801 - RNA, 19 nt, Artificial Sequence
  Description of Artificial Sequence: Synthetic oligonucleotide
  Antisense strand to SEQ ID NO: 2474800
uggaguaccuaacacauag

SEQ ID NO: 2474802 - RNA, 19 nt, Artificial Sequence
  Description of Artificial Sequence: Synthetic oligonucleotide
  Sense strand starting at position 3886 of SEQ ID NO: 1887472
uuagguacuccacguaaag

SEQ ID NO: 2474803 - RNA, 19 nt, Artificial Sequence
  Description of Artificial Sequence: Synthetic oligonucleotide
  Antisense strand to SEQ ID NO: 2474802
cuuuacguggaguaccuaa

SEQ ID NO: 2474804 - RNA, 19 nt, Artificial Sequence
  Description of Artificial Sequence: Synthetic oligonucleotide
  Sense strand starting at position 3888 of SEQ ID NO: 1887472
agguacuccacguaaagua

SEQ ID NO: 2474805 - RNA, 19 nt, Artificial Sequence
  Description of Artificial Sequence: Synthetic oligonucleotide
  Antisense strand to SEQ ID NO: 2474804
uacuuuacguggaguaccu

SEQ ID NO: 2474806 - RNA, 19 nt, Artificial Sequence
  Description of Artificial Sequence: Synthetic oligonucleotide
  Sense strand starting at position 3920 of SEQ ID NO: 1887472
ccaggugcucuacauaaag

SEQ ID NO: 2474807 - RNA, 19 nt, Artificial Sequence
  Description of Artificial Sequence: Synthetic oligonucleotide
  Antisense strand to SEQ ID NO: 2474806
cuuuauguagagcaccugg

SEQ ID NO: 2474808 - RNA, 19 nt, Artificial Sequence
  Description of Artificial Sequence: Synthetic oligonucleotide
  Sense strand starting at position 3951 of SEQ ID NO: 1887472
gugucaggugcucuacgua

SEQ ID NO: 2474809 - RNA, 19 nt, Artificial Sequence
  Description of Artificial Sequence: Synthetic oligonucleotide
  Antisense strand to SEQ ID NO: 2474808
uacguagagcaccugacac

SEQ ID NO: 2474810 - RNA, 19 nt, Artificial Sequence
  Description of Artificial Sequence: Synthetic oligonucleotide
  Sense strand starting at position 3956 of SEQ ID NO: 1887472
aggugcucuacguaaacca

SEQ ID NO: 2474811 - RNA, 19 nt, Artificial Sequence
  Description of Artificial Sequence: Synthetic oligonucleotide
  Antisense strand to SEQ ID NO: 2474810
ugguuuacguagagcaccu

SEQ ID NO: 2474812 - RNA, 19 nt, Artificial Sequence
  Description of Artificial Sequence: Synthetic oligonucleotide
  Sense strand starting at position 32 of SEQ ID NO: 1887474
aaucaaggucuaugagcuu

SEQ ID NO: 2474813 - RNA, 19 nt, Artificial Sequence
  Description of Artificial Sequence: Synthetic oligonucleotide
  Antisense strand to SEQ ID NO: 2474812
aagcucauagaccuugauu

SEQ ID NO: 2474814 - RNA, 19 nt, Artificial Sequence
  Description of Artificial Sequence: Synthetic oligonucleotide
  Sense strand starting at position 41 of SEQ ID NO: 1887474
cuaugagcuucugcaacuu

SEQ ID NO: 2474815 - RNA, 19 nt, Artificial Sequence
  Description of Artificial Sequence: Synthetic oligonucleotide
  Antisense strand to SEQ ID NO: 2474814
aaguugcagaagcucauag

SEQ ID NO: 2474816 - RNA, 19 nt, Artificial Sequence
  Description of Artificial Sequence: Synthetic oligonucleotide
  Sense strand starting at position 78 of SEQ ID NO: 1887474
gggacucagucucuguaau

SEQ ID NO: 2474817 - RNA, 19 nt, Artificial Sequence
  Description of Artificial Sequence: Synthetic oligonucleotide
  Antisense strand to SEQ ID NO: 2474816
auuacagagacugaguccc

SEQ ID NO: 2474818 - RNA, 19 nt, Artificial Sequence
  Description of Artificial Sequence: Synthetic oligonucleotide
  Sense strand starting at position 79 of SEQ ID NO: 1887474
ggacucagucucuguaauc

SEQ ID NO: 2474819 - RNA, 19 nt, Artificial Sequence
  Description of Artificial Sequence: Synthetic oligonucleotide
  Antisense strand to SEQ ID NO: 2474818
gauuacagagacugagucc

SEQ ID NO: 2474820 - RNA, 19 nt, Artificial Sequence
  Description of Artificial Sequence: Synthetic oligonucleotide
  Sense strand starting at position 261 of SEQ ID NO: 1887474
ccaguuugugugccauguu

SEQ ID NO: 2474821 - RNA, 19 nt, Artificial Sequence
  Description of Artificial Sequence: Synthetic oligonucleotide
  Antisense strand to SEQ ID NO: 2474820
aacauggcacacaaacugg

SEQ ID NO: 2474822 - RNA, 19 nt, Artificial Sequence
  Description of Artificial Sequence: Synthetic oligonucleotide
  Sense strand starting at position 295 of SEQ ID NO: 1887474
cuuguugauucuccagaca

SEQ ID NO: 2474823 - RNA, 19 nt, Artificial Sequence
  Description of Artificial Sequence: Synthetic oligonucleotide
  Antisense strand to SEQ ID NO: 2474822
ugucuggagaaucaacaag

SEQ ID NO: 2474824 - RNA, 19 nt, Artificial Sequence
  Description of Artificial Sequence: Synthetic oligonucleotide
  Sense strand starting at position 298 of SEQ ID NO: 1887474
guugauucuccagacaucu

SEQ ID NO: 2474825 - RNA, 19 nt, Artificial Sequence
  Description of Artificial Sequence: Synthetic oligonucleotide
  Antisense strand to SEQ ID NO: 2474824
agaugucuggagaaucaac

SEQ ID NO: 2474826 - RNA, 19 nt, Artificial Sequence
  Description of Artificial Sequence: Synthetic oligonucleotide
  Sense strand starting at position 600 of SEQ ID NO: 1887474
ccuggcugauucuccagaa

SEQ ID NO: 2474827 - RNA, 19 nt, Artificial Sequence
  Description of Artificial Sequence: Synthetic oligonucleotide
  Antisense strand to SEQ ID NO: 2474826
uucuggagaaucagccagg

SEQ ID NO: 2474828 - RNA, 19 nt, Artificial Sequence
  Description of Artificial Sequence: Synthetic oligonucleotide
  Sense strand starting at position 601 of SEQ ID NO: 1887474
cuggcugauucuccagaaa

SEQ ID NO: 2474829 - RNA, 19 nt, Artificial Sequence
  Description of Artificial Sequence: Synthetic oligonucleotide
  Antisense strand to SEQ ID NO: 2474828
uuucuggagaaucagccag

SEQ ID NO: 2474830 - RNA, 19 nt, Artificial Sequence
  Description of Artificial Sequence: Synthetic oligonucleotide
  Sense strand starting at position 604 of SEQ ID NO: 1887474
gcugauucuccagaaaucu

SEQ ID NO: 2474831 - RNA, 19 nt, Artificial Sequence
  Description of Artificial Sequence: Synthetic oligonucleotide
  Antisense strand to SEQ ID NO: 2474830
agauuucuggagaaucagc

SEQ ID NO: 2474832 - RNA, 19 nt, Artificial Sequence
  Description of Artificial Sequence: Synthetic oligonucleotide
  Sense strand starting at position 771 of SEQ ID NO: 1887474
gaauaaagguugucucuaa

SEQ ID NO: 2474833 - RNA, 19 nt, Artificial Sequence
  Description of Artificial Sequence: Synthetic oligonucleotide
  Antisense strand to SEQ ID NO: 2474832
uuagagacaaccuuuauuc

SEQ ID NO: 2474834 - RNA, 19 nt, Artificial Sequence
  Description of Artificial Sequence: Synthetic oligonucleotide
  Sense strand starting at position 778 of SEQ ID NO: 1887474
gguugucucuaauaaauuu

SEQ ID NO: 2474835 - RNA, 19 nt, Artificial Sequence
  Description of Artificial Sequence: Synthetic oligonucleotide
  Antisense strand to SEQ ID NO: 2474834
aaauuuauuagagacaacc

SEQ ID NO: 2474836 - RNA, 19 nt, Artificial Sequence
  Description of Artificial Sequence: Synthetic oligonucleotide
  Sense strand starting at position 810 of SEQ ID NO: 1887474
cccggaaacuuacuagauu

SEQ ID NO: 2474837 - RNA, 19 nt, Artificial Sequence
  Description of Artificial Sequence: Synthetic oligonucleotide
  Antisense strand to SEQ ID NO: 2474836
aaucuaguaaguuuccggg

SEQ ID NO: 2474838 - RNA, 19 nt, Artificial Sequence
  Description of Artificial Sequence: Synthetic oligonucleotide
  Sense strand starting at position 811 of SEQ ID NO: 1887474
ccggaaacuuacuagauua

SEQ ID NO: 2474839 - RNA, 19 nt, Artificial Sequence
  Description of Artificial Sequence: Synthetic oligonucleotide
  Antisense strand to SEQ ID NO: 2474838
uaaucuaguaaguuuccgg

SEQ ID NO: 2474840 - RNA, 19 nt, Artificial Sequence
  Description of Artificial Sequence: Synthetic oligonucleotide
  Sense strand starting at position 862 of SEQ ID NO: 1887474
gcucuuaauccauggaaga

SEQ ID NO: 2474841 - RNA, 19 nt, Artificial Sequence
  Description of Artificial Sequence: Synthetic oligonucleotide
  Antisense strand to SEQ ID NO: 2474840
ucuuccauggauuaagagc

SEQ ID NO: 2474842 - RNA, 19 nt, Artificial Sequence
  Description of Artificial Sequence: Synthetic oligonucleotide
  Sense strand starting at position 863 of SEQ ID NO: 1887474
cucuuaauccauggaagac

SEQ ID NO: 2474843 - RNA, 19 nt, Artificial Sequence
  Description of Artificial Sequence: Synthetic oligonucleotide
  Antisense strand to SEQ ID NO: 2474842
gucuuccauggauuaagag

SEQ ID NO: 2474844 - RNA, 19 nt, Artificial Sequence
  Description of Artificial Sequence: Synthetic oligonucleotide
  Sense strand starting at position 875 of SEQ ID NO: 1887474
ggaagacacugcuccaagu

SEQ ID NO: 2474845 - RNA, 19 nt, Artificial Sequence
  Description of Artificial Sequence: Synthetic oligonucleotide
  Antisense strand to SEQ ID NO: 2474844
acuuggagcagugucuucc

SEQ ID NO: 2474846 - RNA, 19 nt, Artificial Sequence
  Description of Artificial Sequence: Synthetic oligonucleotide
  Sense strand starting at position 928 of SEQ ID NO: 1887474
guaugaggcagccaguauu

SEQ ID NO: 2474847 - RNA, 19 nt, Artificial Sequence
  Description of Artificial Sequence: Synthetic oligonucleotide
  Antisense strand to SEQ ID NO: 2474846
aauacuggcugccucauac

SEQ ID NO: 2474848 - RNA, 19 nt, Artificial Sequence
  Description of Artificial Sequence: Synthetic oligonucleotide
  Sense strand starting at position 945 of SEQ ID NO: 1887474
uuaugaucccgugaucaga

SEQ ID NO: 2474849 - RNA, 19 nt, Artificial Sequence
  Description of Artificial Sequence: Synthetic oligonucleotide
  Antisense strand to SEQ ID NO: 2474848
ucugaucacgggaucauaa

SEQ ID NO: 2474850 - RNA, 19 nt, Artificial Sequence
  Description of Artificial Sequence: Synthetic oligonucleotide
  Sense strand starting at position 1022 of SEQ ID NO: 1887474
gugacagaucugugacuca

SEQ ID NO: 2474851 - RNA, 19 nt, Artificial Sequence
  Description of Artificial Sequence: Synthetic oligonucleotide
  Antisense strand to SEQ ID NO: 2474850
ugagucacagaucugucac

SEQ ID NO: 2474852 - RNA, 19 nt, Artificial Sequence
  Description of Artificial Sequence: Synthetic oligonucleotide
  Sense strand starting at position 2022 of SEQ ID NO: 1887474
ggcacagaccaauggcauu

SEQ ID NO: 2474853 - RNA, 19 nt, Artificial Sequence
  Description of Artificial Sequence: Synthetic oligonucleotide
  Antisense strand to SEQ ID NO: 2474852
aaugccauuggucugugcc

SEQ ID NO: 2474854 - RNA, 19 nt, Artificial Sequence
  Description of Artificial Sequence: Synthetic oligonucleotide
  Sense strand starting at position 2028 of SEQ ID NO: 1887474
gaccaauggcauugaagca

SEQ ID NO: 2474855 - RNA, 19 nt, Artificial Sequence
  Description of Artificial Sequence: Synthetic oligonucleotide
  Antisense strand to SEQ ID NO: 2474854
ugcuucaaugccauugguc

SEQ ID NO: 2474856 - RNA, 19 nt, Artificial Sequence
  Description of Artificial Sequence: Synthetic oligonucleotide
  Sense strand starting at position 2052 of SEQ ID NO: 1887474
gggcuuguuucauugugac

SEQ ID NO: 2474857 - RNA, 19 nt, Artificial Sequence
  Description of Artificial Sequence: Synthetic oligonucleotide
  Antisense strand to SEQ ID NO: 2474856
gucacaaugaaacaagccc

SEQ ID NO: 2474858 - RNA, 19 nt, Artificial Sequence
  Description of Artificial Sequence: Synthetic oligonucleotide
  Sense strand starting at position 2182 of SEQ ID NO: 1887474
ccgagagucuucgucagga

SEQ ID NO: 2474859 - RNA, 19 nt, Artificial Sequence
  Description of Artificial Sequence: Synthetic oligonucleotide
  Antisense strand to SEQ ID NO: 2474858
uccugacgaagacucucgg

SEQ ID NO: 2474860 - RNA, 19 nt, Artificial Sequence
  Description of Artificial Sequence: Synthetic oligonucleotide
  Sense strand starting at position 2184 of SEQ ID NO: 1887474
gagagucuucgucaggaag

SEQ ID NO: 2474861 - RNA, 19 nt, Artificial Sequence
  Description of Artificial Sequence: Synthetic oligonucleotide
  Antisense strand to SEQ ID NO: 2474860
cuuccugacgaagacucuc

SEQ ID NO: 2474862 - RNA, 19 nt, Artificial Sequence
  Description of Artificial Sequence: Synthetic oligonucleotide
  Sense strand starting at position 2187 of SEQ ID NO: 1887474
agucuucgucaggaagcuu

SEQ ID NO: 2474863 - RNA, 19 nt, Artificial Sequence
  Description of Artificial Sequence: Synthetic oligonucleotide
  Antisense strand to SEQ ID NO: 2474862
aagcuuccugacgaagacu

SEQ ID NO: 2474864 - RNA, 19 nt, Artificial Sequence
  Description of Artificial Sequence: Synthetic oligonucleotide
  Sense strand starting at position 2198 of SEQ ID NO: 1887474
ggaagcuuauucgccaaua

SEQ ID NO: 2474865 - RNA, 19 nt, Artificial Sequence
  Description of Artificial Sequence: Synthetic oligonucleotide
  Antisense strand to SEQ ID NO: 2474864
uauuggcgaauaagcuucc

SEQ ID NO: 2474866 - RNA, 19 nt, Artificial Sequence
  Description of Artificial Sequence: Synthetic oligonucleotide
  Sense strand starting at position 2199 of SEQ ID NO: 1887474
gaagcuuauucgccaauag

SEQ ID NO: 2474867 - RNA, 19 nt, Artificial Sequence
  Description of Artificial Sequence: Synthetic oligonucleotide
  Antisense strand to SEQ ID NO: 2474866
cuauuggcgaauaagcuuc

SEQ ID NO: 2474868 - RNA, 19 nt, Artificial Sequence
  Description of Artificial Sequence: Synthetic oligonucleotide
  Sense strand starting at position 2488 of SEQ ID NO: 1887474
ccgggcucugcgaguuaca

SEQ ID NO: 2474869 - RNA, 19 nt, Artificial Sequence
  Description of Artificial Sequence: Synthetic oligonucleotide
  Antisense strand to SEQ ID NO: 2474868
uguaacucgcagagcccgg

SEQ ID NO: 2474870 - RNA, 19 nt, Artificial Sequence
  Description of Artificial Sequence: Synthetic oligonucleotide
  Sense strand starting at position 2489 of SEQ ID NO: 1887474
cgggcucugcgaguuacau

SEQ ID NO: 2474871 - RNA, 19 nt, Artificial Sequence
  Description of Artificial Sequence: Synthetic oligonucleotide
  Antisense strand to SEQ ID NO: 2474870
auguaacucgcagagcccg

SEQ ID NO: 2474872 - RNA, 19 nt, Artificial Sequence
  Description of Artificial Sequence: Synthetic oligonucleotide
  Sense strand starting at position 2502 of SEQ ID NO: 1887474
uuacauuggcuccgggaga

SEQ ID NO: 2474873 - RNA, 19 nt, Artificial Sequence
  Description of Artificial Sequence: Synthetic oligonucleotide
  Antisense strand to SEQ ID NO: 2474872
ucucccggagccaauguaa

SEQ ID NO: 2474874 - RNA, 19 nt, Artificial Sequence
  Description of Artificial Sequence: Synthetic oligonucleotide
  Sense strand starting at position 2717 of SEQ ID NO: 1887474
ucgguuggaugcucagaca

SEQ ID NO: 2474875 - RNA, 19 nt, Artificial Sequence
  Description of Artificial Sequence: Synthetic oligonucleotide
  Antisense strand to SEQ ID NO: 2474874
ugucugagcauccaaccga

SEQ ID NO: 2474876 - RNA, 19 nt, Artificial Sequence
  Description of Artificial Sequence: Synthetic oligonucleotide
  Sense strand starting at position 2989 of SEQ ID NO: 1887474
cuucuugcggcuugggaaa

SEQ ID NO: 2474877 - RNA, 19 nt, Artificial Sequence
  Description of Artificial Sequence: Synthetic oligonucleotide
  Antisense strand to SEQ ID NO: 2474876
uuucccaagccgcaagaag

SEQ ID NO: 2474878 - RNA, 19 nt, Artificial Sequence
  Description of Artificial Sequence: Synthetic oligonucleotide
  Sense strand starting at position 3370 of SEQ ID NO: 1887474
ggguguucucaugguggaa

SEQ ID NO: 2474879 - RNA, 19 nt, Artificial Sequence
  Description of Artificial Sequence: Synthetic oligonucleotide
  Antisense strand to SEQ ID NO: 2474878
uuccaccaugagaacaccc

SEQ ID NO: 2474880 - RNA, 19 nt, Artificial Sequence
  Description of Artificial Sequence: Synthetic oligonucleotide
  Sense strand starting at position 3373 of SEQ ID NO: 1887474
uguucucaugguggaagau

SEQ ID NO: 2474881 - RNA, 19 nt, Artificial Sequence
  Description of Artificial Sequence: Synthetic oligonucleotide
  Antisense strand to SEQ ID NO: 2474880
aucuuccaccaugagaaca

SEQ ID NO: 2474882 - RNA, 19 nt, Artificial Sequence
  Description of Artificial Sequence: Synthetic oligonucleotide
  Sense strand starting at position 3393 of SEQ ID NO: 1887474
ggcagaggucuccggaaug

SEQ ID NO: 2474883 - RNA, 19 nt, Artificial Sequence
  Description of Artificial Sequence: Synthetic oligonucleotide
  Antisense strand to SEQ ID NO: 2474882
cauuccggagaccucugcc

SEQ ID NO: 2474884 - RNA, 19 nt, Artificial Sequence
  Description of Artificial Sequence: Synthetic oligonucleotide
  Sense strand starting at position 3403 of SEQ ID NO: 1887474
uccggaaugacuugaggac

SEQ ID NO: 2474885 - RNA, 19 nt, Artificial Sequence
  Description of Artificial Sequence: Synthetic oligonucleotide
  Antisense strand to SEQ ID NO: 2474884
guccucaagucauuccgga

SEQ ID NO: 2474886 - RNA, 19 nt, Artificial Sequence
  Description of Artificial Sequence: Synthetic oligonucleotide
  Sense strand starting at position 3442 of SEQ ID NO: 1887474
cuaugucauuccuugaguc

SEQ ID NO: 2474887 - RNA, 19 nt, Artificial Sequence
  Description of Artificial Sequence: Synthetic oligonucleotide
  Antisense strand to SEQ ID NO: 2474886
gacucaaggaaugacauag

SEQ ID NO: 2474888 - RNA, 19 nt, Artificial Sequence
  Description of Artificial Sequence: Synthetic oligonucleotide
  Sense strand starting at position 3500 of SEQ ID NO: 1887474
gccacaucccugugacuuu

SEQ ID NO: 2474889 - RNA, 19 nt, Artificial Sequence
  Description of Artificial Sequence: Synthetic oligonucleotide
  Antisense strand to SEQ ID NO: 2474888
aaagucacagggauguggc

SEQ ID NO: 2474890 - RNA, 19 nt, Artificial Sequence
  Description of Artificial Sequence: Synthetic oligonucleotide
  Sense strand starting at position 3558 of SEQ ID NO: 1887474
cugugaucucugugucccu

SEQ ID NO: 2474891 - RNA, 19 nt, Artificial Sequence
  Description of Artificial Sequence: Synthetic oligonucleotide
  Antisense strand to SEQ ID NO: 2474890
agggacacagagaucacag

SEQ ID NO: 2474892 - RNA, 19 nt, Artificial Sequence
  Description of Artificial Sequence: Synthetic oligonucleotide
  Sense strand starting at position 908 of SEQ ID NO: 1887473
ggcacagaccaauggcauu

SEQ ID NO: 2474893 - RNA, 19 nt, Artificial Sequence
  Description of Artificial Sequence: Synthetic oligonucleotide
  Antisense strand to SEQ ID NO: 2474892
aaugccauuggucugugcc

SEQ ID NO: 2474894 - RNA, 19 nt, Artificial Sequence
  Description of Artificial Sequence: Synthetic oligonucleotide
  Sense strand starting at position 914 of SEQ ID NO: 1887473
gaccaauggcauugaagca

SEQ ID NO: 2474895 - RNA, 19 nt, Artificial Sequence
  Description of Artificial Sequence: Synthetic oligonucleotide
  Antisense strand to SEQ ID NO: 2474894
ugcuucaaugccauugguc

SEQ ID NO: 2474896 - RNA, 19 nt, Artificial Sequence
  Description of Artificial Sequence: Synthetic oligonucleotide
  Sense strand starting at position 938 of SEQ ID NO: 1887473
gggcuuguuucauugugac

SEQ ID NO: 2474897 - RNA, 19 nt, Artificial Sequence
  Description of Artificial Sequence: Synthetic oligonucleotide
  Antisense strand to SEQ ID NO: 2474896
gucacaaugaaacaagccc

SEQ ID NO: 2474898 - RNA, 19 nt, Artificial Sequence
  Description of Artificial Sequence: Synthetic oligonucleotide
  Sense strand starting at position 1066 of SEQ ID NO: 1887473
gcccgagagucuucgucag

SEQ ID NO: 2474899 - RNA, 19 nt, Artificial Sequence
  Description of Artificial Sequence: Synthetic oligonucleotide
  Antisense strand to SEQ ID NO: 2474898
cugacgaagacucucgggc

SEQ ID NO: 2474900 - RNA, 19 nt, Artificial Sequence
  Description of Artificial Sequence: Synthetic oligonucleotide
  Sense strand starting at position 1068 of SEQ ID NO: 1887473
ccgagagucuucgucagga

SEQ ID NO: 2474901 - RNA, 19 nt, Artificial Sequence
  Description of Artificial Sequence: Synthetic oligonucleotide
  Antisense strand to SEQ ID NO: 2474900
uccugacgaagacucucgg

SEQ ID NO: 2474902 - RNA, 19 nt, Artificial Sequence
  Description of Artificial Sequence: Synthetic oligonucleotide
  Sense strand starting at position 1070 of SEQ ID NO: 1887473
gagagucuucgucaggaag

SEQ ID NO: 2474903 - RNA, 19 nt, Artificial Sequence
  Description of Artificial Sequence: Synthetic oligonucleotide
  Antisense strand to SEQ ID NO: 2474902
cuuccugacgaagacucuc

SEQ ID NO: 2474904 - RNA, 19 nt, Artificial Sequence
  Description of Artificial Sequence: Synthetic oligonucleotide
  Sense strand starting at position 1073 of SEQ ID NO: 1887473
agucuucgucaggaagcuu

SEQ ID NO: 2474905 - RNA, 19 nt, Artificial Sequence
  Description of Artificial Sequence: Synthetic oligonucleotide
  Antisense strand to SEQ ID NO: 2474904
aagcuuccugacgaagacu

SEQ ID NO: 2474906 - RNA, 19 nt, Artificial Sequence
  Description of Artificial Sequence: Synthetic oligonucleotide
  Sense strand starting at position 1084 of SEQ ID NO: 1887473
ggaagcuuauucgccaaua

SEQ ID NO: 2474907 - RNA, 19 nt, Artificial Sequence
  Description of Artificial Sequence: Synthetic oligonucleotide
  Antisense strand to SEQ ID NO: 2474906
uauuggcgaauaagcuucc

SEQ ID NO: 2474908 - RNA, 19 nt, Artificial Sequence
  Description of Artificial Sequence: Synthetic oligonucleotide
  Sense strand starting at position 1085 of SEQ ID NO: 1887473
gaagcuuauucgccaauag

SEQ ID NO: 2474909 - RNA, 19 nt, Artificial Sequence
  Description of Artificial Sequence: Synthetic oligonucleotide
  Antisense strand to SEQ ID NO: 2474908
cuauuggcgaauaagcuuc

SEQ ID NO: 2474910 - RNA, 19 nt, Artificial Sequence
  Description of Artificial Sequence: Synthetic oligonucleotide
  Sense strand starting at position 1374 of SEQ ID NO: 1887473
ccgggcucugcgaguuaca

SEQ ID NO: 2474911 - RNA, 19 nt, Artificial Sequence
  Description of Artificial Sequence: Synthetic oligonucleotide
  Antisense strand to SEQ ID NO: 2474910
uguaacucgcagagcccgg

SEQ ID NO: 2474912 - RNA, 19 nt, Artificial Sequence
  Description of Artificial Sequence: Synthetic oligonucleotide
  Sense strand starting at position 1375 of SEQ ID NO: 1887473
cgggcucugcgaguuacau

SEQ ID NO: 2474913 - RNA, 19 nt, Artificial Sequence
  Description of Artificial Sequence: Synthetic oligonucleotide
  Antisense strand to SEQ ID NO: 2474912
auguaacucgcagagcccg

SEQ ID NO: 2474914 - RNA, 19 nt, Artificial Sequence
  Description of Artificial Sequence: Synthetic oligonucleotide
  Sense strand starting at position 1388 of SEQ ID NO: 1887473
uuacauuggcuccgggaga

SEQ ID NO: 2474915 - RNA, 19 nt, Artificial Sequence
  Description of Artificial Sequence: Synthetic oligonucleotide
  Antisense strand to SEQ ID NO: 2474914
ucucccggagccaauguaa

SEQ ID NO: 2474916 - RNA, 19 nt, Artificial Sequence
  Description of Artificial Sequence: Synthetic oligonucleotide
  Sense strand starting at position 1603 of SEQ ID NO: 1887473
ucgguuggaugcucagaca

SEQ ID NO: 2474917 - RNA, 19 nt, Artificial Sequence
  Description of Artificial Sequence: Synthetic oligonucleotide
  Antisense strand to SEQ ID NO: 2474916
ugucugagcauccaaccga

SEQ ID NO: 2474918 - RNA, 19 nt, Artificial Sequence
  Description of Artificial Sequence: Synthetic oligonucleotide
  Sense strand starting at position 1827 of SEQ ID NO: 1887473
gcgccaaguaugugucaaa

SEQ ID NO: 2474919 - RNA, 19 nt, Artificial Sequence
  Description of Artificial Sequence: Synthetic oligonucleotide
  Antisense strand to SEQ ID NO: 2474918
uuugacacauacuuggcgc

SEQ ID NO: 2474920 - RNA, 19 nt, Artificial Sequence
  Description of Artificial Sequence: Synthetic oligonucleotide
  Sense strand starting at position 1875 of SEQ ID NO: 1887473
cuucuugcggcuugggaaa

SEQ ID NO: 2474921 - RNA, 19 nt, Artificial Sequence
  Description of Artificial Sequence: Synthetic oligonucleotide
  Antisense strand to SEQ ID NO: 2474920
uuucccaagccgcaagaag

SEQ ID NO: 2474922 - RNA, 19 nt, Artificial Sequence
  Description of Artificial Sequence: Synthetic oligonucleotide
  Sense strand starting at position 2256 of SEQ ID NO: 1887473
ggguguucucaugguggaa

SEQ ID NO: 2474923 - RNA, 19 nt, Artificial Sequence
  Description of Artificial Sequence: Synthetic oligonucleotide
  Antisense strand to SEQ ID NO: 2474922
uuccaccaugagaacaccc

SEQ ID NO: 2474924 - RNA, 19 nt, Artificial Sequence
  Description of Artificial Sequence: Synthetic oligonucleotide
  Sense strand starting at position 2259 of SEQ ID NO: 1887473
uguucucaugguggaagau

SEQ ID NO: 2474925 - RNA, 19 nt, Artificial Sequence
  Description of Artificial Sequence: Synthetic oligonucleotide
  Antisense strand to SEQ ID NO: 2474924
aucuuccaccaugagaaca

SEQ ID NO: 2474926 - RNA, 19 nt, Artificial Sequence
  Description of Artificial Sequence: Synthetic oligonucleotide
  Sense strand starting at position 2279 of SEQ ID NO: 1887473
ggcagaggucuccggaaug

SEQ ID NO: 2474927 - RNA, 19 nt, Artificial Sequence
  Description of Artificial Sequence: Synthetic oligonucleotide
  Antisense strand to SEQ ID NO: 2474926
cauuccggagaccucugcc

SEQ ID NO: 2474928 - RNA, 19 nt, Artificial Sequence
  Description of Artificial Sequence: Synthetic oligonucleotide
  Sense strand starting at position 2289 of SEQ ID NO: 1887473
uccggaaugacuugaggac

SEQ ID NO: 2474929 - RNA, 19 nt, Artificial Sequence
  Description of Artificial Sequence: Synthetic oligonucleotide
  Antisense strand to SEQ ID NO: 2474928
guccucaagucauuccgga

SEQ ID NO: 2474930 - RNA, 19 nt, Artificial Sequence
  Description of Artificial Sequence: Synthetic oligonucleotide
  Sense strand starting at position 2328 of SEQ ID NO: 1887473
cuaugucauuccuugaguc

SEQ ID NO: 2474931 - RNA, 19 nt, Artificial Sequence
  Description of Artificial Sequence: Synthetic oligonucleotide
  Antisense strand to SEQ ID NO: 2474930
gacucaaggaaugacauag

SEQ ID NO: 2474932 - RNA, 19 nt, Artificial Sequence
  Description of Artificial Sequence: Synthetic oligonucleotide
  Sense strand starting at position 2386 of SEQ ID NO: 1887473
gccacaucccugugacuuu

SEQ ID NO: 2474933 - RNA, 19 nt, Artificial Sequence
  Description of Artificial Sequence: Synthetic oligonucleotide
  Antisense strand to SEQ ID NO: 2474932
aaagucacagggauguggc

SEQ ID NO: 2474934 - RNA, 19 nt, Artificial Sequence
  Description of Artificial Sequence: Synthetic oligonucleotide
  Sense strand starting at position 2444 of SEQ ID NO: 1887473
cugugaucucugugucccu

SEQ ID NO: 2474935 - RNA, 19 nt, Artificial Sequence
  Description of Artificial Sequence: Synthetic oligonucleotide
  Antisense strand to SEQ ID NO: 2474934
agggacacagagaucacag

SEQ ID NO: 2474936 - RNA, 19 nt, Artificial Sequence
  Description of Artificial Sequence: Synthetic oligonucleotide
  Sense strand starting at position 2921 of SEQ ID NO: 1887473
aggagaaugcgaggcauga

SEQ ID NO: 2474937 - RNA, 19 nt, Artificial Sequence
  Description of Artificial Sequence: Synthetic oligonucleotide
  Antisense strand to SEQ ID NO: 2474936
ucaugccucgcauucuccu

SEQ ID NO: 2474938 - RNA, 19 nt, Artificial Sequence
  Description of Artificial Sequence: Synthetic oligonucleotide
  Sense strand starting at position 3238 of SEQ ID NO: 1887473
cugggucccucugaagagu

SEQ ID NO: 2474939 - RNA, 19 nt, Artificial Sequence
  Description of Artificial Sequence: Synthetic oligonucleotide
  Antisense strand to SEQ ID NO: 2474938
acucuucagagggacccag

SEQ ID NO: 2474940 - RNA, 19 nt, Artificial Sequence
  Description of Artificial Sequence: Synthetic oligonucleotide
  Sense strand starting at position 3244 of SEQ ID NO: 1887473
cccucugaagaguggauua

SEQ ID NO: 2474941 - RNA, 19 nt, Artificial Sequence
  Description of Artificial Sequence: Synthetic oligonucleotide
  Antisense strand to SEQ ID NO: 2474940
uaauccacucuucagaggg

SEQ ID NO: 2474942 - RNA, 19 nt, Artificial Sequence
  Description of Artificial Sequence: Synthetic oligonucleotide
  Sense strand starting at position 3283 of SEQ ID NO: 1887473
acccuugucuuaugacuua

SEQ ID NO: 2474943 - RNA, 19 nt, Artificial Sequence
  Description of Artificial Sequence: Synthetic oligonucleotide
  Antisense strand to SEQ ID NO: 2474942
uaagucauaagacaagggu

SEQ ID NO: 2474944 - RNA, 19 nt, Artificial Sequence
  Description of Artificial Sequence: Synthetic oligonucleotide
  Sense strand starting at position 3373 of SEQ ID NO: 1887473
acuuucuaauaggaaugau

SEQ ID NO: 2474945 - RNA, 19 nt, Artificial Sequence
  Description of Artificial Sequence: Synthetic oligonucleotide
  Antisense strand to SEQ ID NO: 2474944
aucauuccuauuagaaagu

SEQ ID NO: 2474946 - RNA, 19 nt, Artificial Sequence
  Description of Artificial Sequence: Synthetic oligonucleotide
  Sense strand starting at position 3470 of SEQ ID NO: 1887473
ccugcuugcucucaagaag

SEQ ID NO: 2474947 - RNA, 19 nt, Artificial Sequence
  Description of Artificial Sequence: Synthetic oligonucleotide
  Antisense strand to SEQ ID NO: 2474946
cuucuugagagcaagcagg

SEQ ID NO: 2474948 - RNA, 19 nt, Artificial Sequence
  Description of Artificial Sequence: Synthetic oligonucleotide
  Sense strand starting at position 3473 of SEQ ID NO: 1887473
gcuugcucucaagaaggaa

SEQ ID NO: 2474949 - RNA, 19 nt, Artificial Sequence
  Description of Artificial Sequence: Synthetic oligonucleotide
  Antisense strand to SEQ ID NO: 2474948
uuccuucuugagagcaagc

SEQ ID NO: 2474950 - RNA, 19 nt, Artificial Sequence
  Description of Artificial Sequence: Synthetic oligonucleotide
  Sense strand starting at position 3519 of SEQ ID NO: 1887473
aaguuagacuugcagaaug

SEQ ID NO: 2474951 - RNA, 19 nt, Artificial Sequence
  Description of Artificial Sequence: Synthetic oligonucleotide
  Antisense strand to SEQ ID NO: 2474950
cauucugcaagucuaacuu

SEQ ID NO: 2474952 - RNA, 19 nt, Artificial Sequence
  Description of Artificial Sequence: Synthetic oligonucleotide
  Sense strand starting at position 3521 of SEQ ID NO: 1887473
guuagacuugcagaaugac

SEQ ID NO: 2474953 - RNA, 19 nt, Artificial Sequence
  Description of Artificial Sequence: Synthetic oligonucleotide
  Antisense strand to SEQ ID NO: 2474952
gucauucugcaagucuaac

SEQ ID NO: 2474954 - RNA, 19 nt, Artificial Sequence
  Description of Artificial Sequence: Synthetic oligonucleotide
  Sense strand starting at position 3535 of SEQ ID NO: 1887473
augacuuccuaauagagau

SEQ ID NO: 2474955 - RNA, 19 nt, Artificial Sequence
  Description of Artificial Sequence: Synthetic oligonucleotide
  Antisense strand to SEQ ID NO: 2474954
aucucuauuaggaagucau

SEQ ID NO: 2474956 - RNA, 19 nt, Artificial Sequence
  Description of Artificial Sequence: Synthetic oligonucleotide
  Sense strand starting at position 3649 of SEQ ID NO: 1887473
uuauuaagccugcagagga

SEQ ID NO: 2474957 - RNA, 19 nt, Artificial Sequence
  Description of Artificial Sequence: Synthetic oligonucleotide
  Antisense strand to SEQ ID NO: 2474956
uccucugcaggcuuaauaa

SEQ ID NO: 2474958 - RNA, 19 nt, Artificial Sequence
  Description of Artificial Sequence: Synthetic oligonucleotide
  Sense strand starting at position 3784 of SEQ ID NO: 1887473
ggguguagacuuggaauau

SEQ ID NO: 2474959 - RNA, 19 nt, Artificial Sequence
  Description of Artificial Sequence: Synthetic oligonucleotide
  Antisense strand to SEQ ID NO: 2474958
auauuccaagucuacaccc

SEQ ID NO: 2474960 - RNA, 19 nt, Artificial Sequence
  Description of Artificial Sequence: Synthetic oligonucleotide
  Sense strand starting at position 3785 of SEQ ID NO: 1887473
gguguagacuuggaauauu

SEQ ID NO: 2474961 - RNA, 19 nt, Artificial Sequence
  Description of Artificial Sequence: Synthetic oligonucleotide
  Antisense strand to SEQ ID NO: 2474960
aauauuccaagucuacacc

SEQ ID NO: 2474962 - RNA, 19 nt, Artificial Sequence
  Description of Artificial Sequence: Synthetic oligonucleotide
  Sense strand starting at position 3844 of SEQ ID NO: 1887473
cugucugucucccuaauuu

SEQ ID NO: 2474963 - RNA, 19 nt, Artificial Sequence
  Description of Artificial Sequence: Synthetic oligonucleotide
  Antisense strand to SEQ ID NO: 2474962
aaauuagggagacagacag

SEQ ID NO: 2474964 - RNA, 19 nt, Artificial Sequence
  Description of Artificial Sequence: Synthetic oligonucleotide
  Sense strand starting at position 3862 of SEQ ID NO: 1887473
ucugcucuuccuuguaaug

SEQ ID NO: 2474965 - RNA, 19 nt, Artificial Sequence
  Description of Artificial Sequence: Synthetic oligonucleotide
  Antisense strand to SEQ ID NO: 2474964
cauuacaaggaagagcaga

SEQ ID NO: 2474966 - RNA, 19 nt, Artificial Sequence
  Description of Artificial Sequence: Synthetic oligonucleotide
  Sense strand starting at position 3864 of SEQ ID NO: 1887473
ugcucuuccuuguaaugga

SEQ ID NO: 2474967 - RNA, 19 nt, Artificial Sequence
  Description of Artificial Sequence: Synthetic oligonucleotide
  Antisense strand to SEQ ID NO: 2474966
uccauuacaaggaagagca

SEQ ID NO: 2474968 - RNA, 19 nt, Artificial Sequence
  Description of Artificial Sequence: Synthetic oligonucleotide
  Sense strand starting at position 3867 of SEQ ID NO: 1887473
ucuuccuuguaauggaaga

SEQ ID NO: 2474969 - RNA, 19 nt, Artificial Sequence
  Description of Artificial Sequence: Synthetic oligonucleotide
  Antisense strand to SEQ ID NO: 2474968
ucuuccauuacaaggaaga

SEQ ID NO: 2474970 - RNA, 19 nt, Artificial Sequence
  Description of Artificial Sequence: Synthetic oligonucleotide
  Sense strand starting at position 3890 of SEQ ID NO: 1887473
gaauuagacuuggcagaac

SEQ ID NO: 2474971 - RNA, 19 nt, Artificial Sequence
  Description of Artificial Sequence: Synthetic oligonucleotide
  Antisense strand to SEQ ID NO: 2474970
guucugccaagucuaauuc

SEQ ID NO: 2474972 - RNA, 19 nt, Artificial Sequence
  Description of Artificial Sequence: Synthetic oligonucleotide
  Sense strand starting at position 55 of SEQ ID NO: 1887475
agucgagaccgcgucuaua

SEQ ID NO: 2474973 - RNA, 19 nt, Artificial Sequence
  Description of Artificial Sequence: Synthetic oligonucleotide
  Antisense strand to SEQ ID NO: 2474972
uauagacgcggucucgacu

SEQ ID NO: 2474974 - RNA, 19 nt, Artificial Sequence
  Description of Artificial Sequence: Synthetic oligonucleotide
  Sense strand starting at position 640 of SEQ ID NO: 1887475
gccggaugugcuugcuuga

SEQ ID NO: 2474975 - RNA, 19 nt, Artificial Sequence
  Description of Artificial Sequence: Synthetic oligonucleotide
  Antisense strand to SEQ ID NO: 2474974
ucaagcaagcacauccggc

SEQ ID NO: 2474976 - RNA, 19 nt, Artificial Sequence
  Description of Artificial Sequence: Synthetic oligonucleotide
  Sense strand starting at position 650 of SEQ ID NO: 1887475
cuugcuugaacccggaaga

SEQ ID NO: 2474977 - RNA, 19 nt, Artificial Sequence
  Description of Artificial Sequence: Synthetic oligonucleotide
  Antisense strand to SEQ ID NO: 2474976
ucuuccggguucaagcaag

SEQ ID NO: 2474978 - RNA, 19 nt, Artificial Sequence
  Description of Artificial Sequence: Synthetic oligonucleotide
  Sense strand starting at position 929 of SEQ ID NO: 1887475
gcgcaugaacuugaaaggu

SEQ ID NO: 2474979 - RNA, 19 nt, Artificial Sequence
  Description of Artificial Sequence: Synthetic oligonucleotide
  Antisense strand to SEQ ID NO: 2474978
accuuucaaguucaugcgc

SEQ ID NO: 2474980 - RNA, 19 nt, Artificial Sequence
  Description of Artificial Sequence: Synthetic oligonucleotide
  Sense strand starting at position 986 of SEQ ID NO: 1887475
cccaguuacccucaagugu

SEQ ID NO: 2474981 - RNA, 19 nt, Artificial Sequence
  Description of Artificial Sequence: Synthetic oligonucleotide
  Antisense strand to SEQ ID NO: 2474980
acacuugaggguaacuggg

SEQ ID NO: 2474982 - RNA, 19 nt, Artificial Sequence
  Description of Artificial Sequence: Synthetic oligonucleotide
  Sense strand starting at position 1328 of SEQ ID NO: 1887475
cuuggucucucccaaagua

SEQ ID NO: 2474983 - RNA, 19 nt, Artificial Sequence
  Description of Artificial Sequence: Synthetic oligonucleotide
  Antisense strand to SEQ ID NO: 2474982
uacuuugggagagaccaag

SEQ ID NO: 2474984 - RNA, 19 nt, Artificial Sequence
  Description of Artificial Sequence: Synthetic oligonucleotide
  Sense strand starting at position 1584 of SEQ ID NO: 1887475
ggucuauucggacgaacug

SEQ ID NO: 2474985 - RNA, 19 nt, Artificial Sequence
  Description of Artificial Sequence: Synthetic oligonucleotide
  Antisense strand to SEQ ID NO: 2474984
caguucguccgaauagacc

SEQ ID NO: 2474986 - RNA, 19 nt, Artificial Sequence
  Description of Artificial Sequence: Synthetic oligonucleotide
  Sense strand starting at position 1585 of SEQ ID NO: 1887475
gucuauucggacgaacuga

SEQ ID NO: 2474987 - RNA, 19 nt, Artificial Sequence
  Description of Artificial Sequence: Synthetic oligonucleotide
  Antisense strand to SEQ ID NO: 2474986
ucaguucguccgaauagac

SEQ ID NO: 2474988 - RNA, 19 nt, Artificial Sequence
  Description of Artificial Sequence: Synthetic oligonucleotide
  Sense strand starting at position 2046 of SEQ ID NO: 1887475
gugauuggguccuguggaa

SEQ ID NO: 2474989 - RNA, 19 nt, Artificial Sequence
  Description of Artificial Sequence: Synthetic oligonucleotide
  Antisense strand to SEQ ID NO: 2474988
uuccacaggacccaaucac

SEQ ID NO: 2474990 - RNA, 19 nt, Artificial Sequence
  Description of Artificial Sequence: Synthetic oligonucleotide
  Sense strand starting at position 2071 of SEQ ID NO: 1887475
gggagauuauuggcggaga

SEQ ID NO: 2474991 - RNA, 19 nt, Artificial Sequence
  Description of Artificial Sequence: Synthetic oligonucleotide
  Antisense strand to SEQ ID NO: 2474990
ucuccgccaauaaucuccc

SEQ ID NO: 2474992 - RNA, 19 nt, Artificial Sequence
  Description of Artificial Sequence: Synthetic oligonucleotide
  Sense strand starting at position 2072 of SEQ ID NO: 1887475
ggagauuauuggcggagac

SEQ ID NO: 2474993 - RNA, 19 nt, Artificial Sequence
  Description of Artificial Sequence: Synthetic oligonucleotide
  Antisense strand to SEQ ID NO: 2474992
gucuccgccaauaaucucc

SEQ ID NO: 2474994 - RNA, 19 nt, Artificial Sequence
  Description of Artificial Sequence: Synthetic oligonucleotide
  Sense strand starting at position 2118 of SEQ ID NO: 1887475
ucgcguuuauuggucaauc

SEQ ID NO: 2474995 - RNA, 19 nt, Artificial Sequence
  Description of Artificial Sequence: Synthetic oligonucleotide
  Antisense strand to SEQ ID NO: 2474994
gauugaccaauaaacgcga

SEQ ID NO: 2474996 - RNA, 19 nt, Artificial Sequence
  Description of Artificial Sequence: Synthetic oligonucleotide
  Sense strand starting at position 2119 of SEQ ID NO: 1887475
cgcguuuauuggucaaucu

SEQ ID NO: 2474997 - RNA, 19 nt, Artificial Sequence
  Description of Artificial Sequence: Synthetic oligonucleotide
  Antisense strand to SEQ ID NO: 2474996
agauugaccaauaaacgcg

SEQ ID NO: 2474998 - RNA, 19 nt, Artificial Sequence
  Description of Artificial Sequence: Synthetic oligonucleotide
  Sense strand starting at position 2120 of SEQ ID NO: 1887475
gcguuuauuggucaaucua

SEQ ID NO: 2474999 - RNA, 19 nt, Artificial Sequence
  Description of Artificial Sequence: Synthetic oligonucleotide
  Antisense strand to SEQ ID NO: 2474998
uagauugaccaauaaacgc

SEQ ID NO: 2475000 - RNA, 19 nt, Artificial Sequence
  Description of Artificial Sequence: Synthetic oligonucleotide
  Sense strand starting at position 2221 of SEQ ID NO: 1887475
ccgccauguuuaguacuga

SEQ ID NO: 2475001 - RNA, 19 nt, Artificial Sequence
  Description of Artificial Sequence: Synthetic oligonucleotide
  Antisense strand to SEQ ID NO: 2475000
ucaguacuaaacauggcgg

SEQ ID NO: 2475002 - RNA, 19 nt, Artificial Sequence
  Description of Artificial Sequence: Synthetic oligonucleotide
  Sense strand starting at position 2222 of SEQ ID NO: 1887475
cgccauguuuaguacugau

SEQ ID NO: 2475003 - RNA, 19 nt, Artificial Sequence
  Description of Artificial Sequence: Synthetic oligonucleotide
  Antisense strand to SEQ ID NO: 2475002
aucaguacuaaacauggcg

SEQ ID NO: 2475004 - RNA, 19 nt, Artificial Sequence
  Description of Artificial Sequence: Synthetic oligonucleotide
  Sense strand starting at position 2324 of SEQ ID NO: 1887475
ugucccaguugcuaucaau

SEQ ID NO: 2475005 - RNA, 19 nt, Artificial Sequence
  Description of Artificial Sequence: Synthetic oligonucleotide
  Antisense strand to SEQ ID NO: 2475004
auugauagcaacugggaca

SEQ ID NO: 2475006 - RNA, 19 nt, Artificial Sequence
  Description of Artificial Sequence: Synthetic oligonucleotide
  Sense strand starting at position 2387 of SEQ ID NO: 1887475
gggagcuuggaaugacuca

SEQ ID NO: 2475007 - RNA, 19 nt, Artificial Sequence
  Description of Artificial Sequence: Synthetic oligonucleotide
  Antisense strand to SEQ ID NO: 2475006
ugagucauuccaagcuccc

SEQ ID NO: 2475008 - RNA, 19 nt, Artificial Sequence
  Description of Artificial Sequence: Synthetic oligonucleotide
  Sense strand starting at position 2435 of SEQ ID NO: 1887475
uuucuaucgcuccacgaua

SEQ ID NO: 2475009 - RNA, 19 nt, Artificial Sequence
  Description of Artificial Sequence: Synthetic oligonucleotide
  Antisense strand to SEQ ID NO: 2475008
uaucguggagcgauagaaa

SEQ ID NO: 2475010 - RNA, 19 nt, Artificial Sequence
  Description of Artificial Sequence: Synthetic oligonucleotide
  Sense strand starting at position 2477 of SEQ ID NO: 1887475
uuaguagaagcaugcaaua

SEQ ID NO: 2475011 - RNA, 19 nt, Artificial Sequence
  Description of Artificial Sequence: Synthetic oligonucleotide
  Antisense strand to SEQ ID NO: 2475010
uauugcaugcuucuacuaa

SEQ ID NO: 2475012 - RNA, 19 nt, Artificial Sequence
  Description of Artificial Sequence: Synthetic oligonucleotide
  Sense strand starting at position 2487 of SEQ ID NO: 1887475
caugcaauagguugucuuu

SEQ ID NO: 2475013 - RNA, 19 nt, Artificial Sequence
  Description of Artificial Sequence: Synthetic oligonucleotide
  Antisense strand to SEQ ID NO: 2475012
aaagacaaccuauugcaug

SEQ ID NO: 2475014 - RNA, 19 nt, Artificial Sequence
  Description of Artificial Sequence: Synthetic oligonucleotide
  Sense strand starting at position 2856 of SEQ ID NO: 1887475
auaucaacagcucguuauu

SEQ ID NO: 2475015 - RNA, 19 nt, Artificial Sequence
  Description of Artificial Sequence: Synthetic oligonucleotide
  Antisense strand to SEQ ID NO: 2475014
aauaacgagcuguugauau

SEQ ID NO: 2475016 - RNA, 19 nt, Artificial Sequence
  Description of Artificial Sequence: Synthetic oligonucleotide
  Sense strand starting at position 2889 of SEQ ID NO: 1887475
gguauuucauuguguggcu

SEQ ID NO: 2475017 - RNA, 19 nt, Artificial Sequence
  Description of Artificial Sequence: Synthetic oligonucleotide
  Antisense strand to SEQ ID NO: 2475016
agccacacaaugaaauacc

SEQ ID NO: 2475018 - RNA, 19 nt, Artificial Sequence
  Description of Artificial Sequence: Synthetic oligonucleotide
  Sense strand starting at position 2902 of SEQ ID NO: 1887475
guggcuauacuauaaugua

SEQ ID NO: 2475019 - RNA, 19 nt, Artificial Sequence
  Description of Artificial Sequence: Synthetic oligonucleotide
  Antisense strand to SEQ ID NO: 2475018
uacauuauaguauagccac

SEQ ID NO: 2475020 - RNA, 19 nt, Artificial Sequence
  Description of Artificial Sequence: Synthetic oligonucleotide
  Sense strand starting at position 2937 of SEQ ID NO: 1887475
ucaccuguucuuggccaau

SEQ ID NO: 2475021 - RNA, 19 nt, Artificial Sequence
  Description of Artificial Sequence: Synthetic oligonucleotide
  Antisense strand to SEQ ID NO: 2475020
auuggccaagaacagguga

SEQ ID NO: 2475022 - RNA, 19 nt, Artificial Sequence
  Description of Artificial Sequence: Synthetic oligonucleotide
  Sense strand starting at position 2940 of SEQ ID NO: 1887475
ccuguucuuggccaauuga

SEQ ID NO: 2475023 - RNA, 19 nt, Artificial Sequence
  Description of Artificial Sequence: Synthetic oligonucleotide
  Antisense strand to SEQ ID NO: 2475022
ucaauuggccaagaacagg

SEQ ID NO: 2475024 - RNA, 19 nt, Artificial Sequence
  Description of Artificial Sequence: Synthetic oligonucleotide
  Sense strand starting at position 2968 of SEQ ID NO: 1887475
gucuuuggccacuguuaau

SEQ ID NO: 2475025 - RNA, 19 nt, Artificial Sequence
  Description of Artificial Sequence: Synthetic oligonucleotide
  Antisense strand to SEQ ID NO: 2475024
auuaacaguggccaaagac

SEQ ID NO: 2475026 - RNA, 19 nt, Artificial Sequence
  Description of Artificial Sequence: Synthetic oligonucleotide
  Sense strand starting at position 2971 of SEQ ID NO: 1887475
uuuggccacuguuaauaga

SEQ ID NO: 2475027 - RNA, 19 nt, Artificial Sequence
  Description of Artificial Sequence: Synthetic oligonucleotide
  Antisense strand to SEQ ID NO: 2475026
ucuauuaacaguggccaaa

SEQ ID NO: 2475028 - RNA, 19 nt, Artificial Sequence
  Description of Artificial Sequence: Synthetic oligonucleotide
  Sense strand starting at position 2981 of SEQ ID NO: 1887475
guuaauagagcuuguacug

SEQ ID NO: 2475029 - RNA, 19 nt, Artificial Sequence
  Description of Artificial Sequence: Synthetic oligonucleotide
  Antisense strand to SEQ ID NO: 2475028
caguacaagcucuauuaac

SEQ ID NO: 2475030 - RNA, 19 nt, Artificial Sequence
  Description of Artificial Sequence: Synthetic oligonucleotide
  Sense strand starting at position 2986 of SEQ ID NO: 1887475
uagagcuuguacuguaaga

SEQ ID NO: 2475031 - RNA, 19 nt, Artificial Sequence
  Description of Artificial Sequence: Synthetic oligonucleotide
  Antisense strand to SEQ ID NO: 2475030
ucuuacaguacaagcucua

SEQ ID NO: 2475032 - RNA, 19 nt, Artificial Sequence
  Description of Artificial Sequence: Synthetic oligonucleotide
  Sense strand starting at position 2988 of SEQ ID NO: 1887475
gagcuuguacuguaagagu

SEQ ID NO: 2475033 - RNA, 19 nt, Artificial Sequence
  Description of Artificial Sequence: Synthetic oligonucleotide
  Antisense strand to SEQ ID NO: 2475032
acucuuacaguacaagcuc

SEQ ID NO: 2475034 - RNA, 19 nt, Artificial Sequence
  Description of Artificial Sequence: Synthetic oligonucleotide
  Sense strand starting at position 2991 of SEQ ID NO: 1887475
cuuguacuguaagaguauu

SEQ ID NO: 2475035 - RNA, 19 nt, Artificial Sequence
  Description of Artificial Sequence: Synthetic oligonucleotide
  Antisense strand to SEQ ID NO: 2475034
aauacucuuacaguacaag

SEQ ID NO: 2475036 - RNA, 19 nt, Artificial Sequence
  Description of Artificial Sequence: Synthetic oligonucleotide
  Sense strand starting at position 3058 of SEQ ID NO: 1887475
guggcauggucacuaagcu

SEQ ID NO: 2475037 - RNA, 19 nt, Artificial Sequence
  Description of Artificial Sequence: Synthetic oligonucleotide
  Antisense strand to SEQ ID NO: 2475036
agcuuagugaccaugccac

SEQ ID NO: 2475038 - RNA, 19 nt, Artificial Sequence
  Description of Artificial Sequence: Synthetic oligonucleotide
  Sense strand starting at position 3059 of SEQ ID NO: 1887475
uggcauggucacuaagcuu

SEQ ID NO: 2475039 - RNA, 19 nt, Artificial Sequence
  Description of Artificial Sequence: Synthetic oligonucleotide
  Antisense strand to SEQ ID NO: 2475038
aagcuuagugaccaugcca

SEQ ID NO: 2475040 - RNA, 19 nt, Artificial Sequence
  Description of Artificial Sequence: Synthetic oligonucleotide
  Sense strand starting at position 3066 of SEQ ID NO: 1887475
gucacuaagcuuuauuaga

SEQ ID NO: 2475041 - RNA, 19 nt, Artificial Sequence
  Description of Artificial Sequence: Synthetic oligonucleotide
  Antisense strand to SEQ ID NO: 2475040
ucuaauaaagcuuagugac

SEQ ID NO: 2475042 - RNA, 19 nt, Artificial Sequence
  Description of Artificial Sequence: Synthetic oligonucleotide
  Sense strand starting at position 3076 of SEQ ID NO: 1887475
uuuauuagauccuggcaga

SEQ ID NO: 2475043 - RNA, 19 nt, Artificial Sequence
  Description of Artificial Sequence: Synthetic oligonucleotide
  Antisense strand to SEQ ID NO: 2475042
ucugccaggaucuaauaaa

SEQ ID NO: 2475044 - RNA, 19 nt, Artificial Sequence
  Description of Artificial Sequence: Synthetic oligonucleotide
  Sense strand starting at position 3077 of SEQ ID NO: 1887475
uuauuagauccuggcagau

SEQ ID NO: 2475045 - RNA, 19 nt, Artificial Sequence
  Description of Artificial Sequence: Synthetic oligonucleotide
  Antisense strand to SEQ ID NO: 2475044
aucugccaggaucuaauaa

SEQ ID NO: 2475046 - RNA, 19 nt, Artificial Sequence
  Description of Artificial Sequence: Synthetic oligonucleotide
  Sense strand starting at position 3079 of SEQ ID NO: 1887475
auuagauccuggcagauuu

SEQ ID NO: 2475047 - RNA, 19 nt, Artificial Sequence
  Description of Artificial Sequence: Synthetic oligonucleotide
  Antisense strand to SEQ ID NO: 2475046
aaaucugccaggaucuaau

SEQ ID NO: 2475048 - RNA, 19 nt, Artificial Sequence
  Description of Artificial Sequence: Synthetic oligonucleotide
  Sense strand starting at position 3924 of SEQ ID NO: 1887475
ggugguugauaccuguacu

SEQ ID NO: 2475049 - RNA, 19 nt, Artificial Sequence
  Description of Artificial Sequence: Synthetic oligonucleotide
  Antisense strand to SEQ ID NO: 2475048
aguacagguaucaaccacc

SEQ ID NO: 2475050 - RNA, 19 nt, Artificial Sequence
  Description of Artificial Sequence: Synthetic oligonucleotide
  Sense strand starting at position 3925 of SEQ ID NO: 1887475
gugguugauaccuguacuc

SEQ ID NO: 2475051 - RNA, 19 nt, Artificial Sequence
  Description of Artificial Sequence: Synthetic oligonucleotide
  Antisense strand to SEQ ID NO: 2475050
gaguacagguaucaaccac

SEQ ID NO: 2475052 - RNA, 19 nt, Artificial Sequence
  Description of Artificial Sequence: Synthetic oligonucleotide
  Sense strand starting at position 320 of SEQ ID NO: 1887476
gccagagggucucaagcau

SEQ ID NO: 2475053 - RNA, 19 nt, Artificial Sequence
  Description of Artificial Sequence: Synthetic oligonucleotide
  Antisense strand to SEQ ID NO: 2475052
augcuugagacccucuggc

SEQ ID NO: 2475054 - RNA, 19 nt, Artificial Sequence
  Description of Artificial Sequence: Synthetic oligonucleotide
  Sense strand starting at position 814 of SEQ ID NO: 1887476
gggccaucuuguuuaauuc

SEQ ID NO: 2475055 - RNA, 19 nt, Artificial Sequence
  Description of Artificial Sequence: Synthetic oligonucleotide
  Antisense strand to SEQ ID NO: 2475054
gaauuaaacaagauggccc

SEQ ID NO: 2475056 - RNA, 19 nt, Artificial Sequence
  Description of Artificial Sequence: Synthetic oligonucleotide
  Sense strand starting at position 815 of SEQ ID NO: 1887476
ggccaucuuguuuaauucu

SEQ ID NO: 2475057 - RNA, 19 nt, Artificial Sequence
  Description of Artificial Sequence: Synthetic oligonucleotide
  Antisense strand to SEQ ID NO: 2475056
agaauuaaacaagauggcc

SEQ ID NO: 2475058 - RNA, 19 nt, Artificial Sequence
  Description of Artificial Sequence: Synthetic oligonucleotide
  Sense strand starting at position 821 of SEQ ID NO: 1887476
cuuguuuaauucugcagga

SEQ ID NO: 2475059 - RNA, 19 nt, Artificial Sequence
  Description of Artificial Sequence: Synthetic oligonucleotide
  Antisense strand to SEQ ID NO: 2475058
uccugcagaauuaaacaag

SEQ ID NO: 2475060 - RNA, 19 nt, Artificial Sequence
  Description of Artificial Sequence: Synthetic oligonucleotide
  Sense strand starting at position 872 of SEQ ID NO: 1887476
ucaucucacacgugggaaa

SEQ ID NO: 2475061 - RNA, 19 nt, Artificial Sequence
  Description of Artificial Sequence: Synthetic oligonucleotide
  Antisense strand to SEQ ID NO: 2475060
uuucccacgugugagauga

SEQ ID NO: 2475062 - RNA, 19 nt, Artificial Sequence
  Description of Artificial Sequence: Synthetic oligonucleotide
  Sense strand starting at position 1385 of SEQ ID NO: 1887476
ucucuuuaauggcgaaacu

SEQ ID NO: 2475063 - RNA, 19 nt, Artificial Sequence
  Description of Artificial Sequence: Synthetic oligonucleotide
  Antisense strand to SEQ ID NO: 2475062
aguuucgccauuaaagaga

SEQ ID NO: 2475064 - RNA, 19 nt, Artificial Sequence
  Description of Artificial Sequence: Synthetic oligonucleotide
  Sense strand starting at position 1526 of SEQ ID NO: 1887476
guaccaggucugcaggauu

SEQ ID NO: 2475065 - RNA, 19 nt, Artificial Sequence
  Description of Artificial Sequence: Synthetic oligonucleotide
  Antisense strand to SEQ ID NO: 2475064
aauccugcagaccugguac

SEQ ID NO: 2475066 - RNA, 19 nt, Artificial Sequence
  Description of Artificial Sequence: Synthetic oligonucleotide
  Sense strand starting at position 1547 of SEQ ID NO: 1887476
gcgauacuaucggacuagu

SEQ ID NO: 2475067 - RNA, 19 nt, Artificial Sequence
  Description of Artificial Sequence: Synthetic oligonucleotide
  Antisense strand to SEQ ID NO: 2475066
acuaguccgauaguaucgc

SEQ ID NO: 2475068 - RNA, 19 nt, Artificial Sequence
  Description of Artificial Sequence: Synthetic oligonucleotide
  Sense strand starting at position 1550 of SEQ ID NO: 1887476
auacuaucggacuagucau

SEQ ID NO: 2475069 - RNA, 19 nt, Artificial Sequence
  Description of Artificial Sequence: Synthetic oligonucleotide
  Antisense strand to SEQ ID NO: 2475068
augacuaguccgauaguau

SEQ ID NO: 2475070 - RNA, 19 nt, Artificial Sequence
  Description of Artificial Sequence: Synthetic oligonucleotide
  Sense strand starting at position 1556 of SEQ ID NO: 1887476
ucggacuagucauccauca

SEQ ID NO: 2475071 - RNA, 19 nt, Artificial Sequence
  Description of Artificial Sequence: Synthetic oligonucleotide
  Antisense strand to SEQ ID NO: 2475070
ugauggaugacuaguccga

SEQ ID NO: 2475072 - RNA, 19 nt, Artificial Sequence
  Description of Artificial Sequence: Synthetic oligonucleotide
  Sense strand starting at position 1583 of SEQ ID NO: 1887476
cugugcugagacuaugaaa

SEQ ID NO: 2475073 - RNA, 19 nt, Artificial Sequence
  Description of Artificial Sequence: Synthetic oligonucleotide
  Antisense strand to SEQ ID NO: 2475072
uuucauagucucagcacag

SEQ ID NO: 2475074 - RNA, 19 nt, Artificial Sequence
  Description of Artificial Sequence: Synthetic oligonucleotide
  Sense strand starting at position 1608 of SEQ ID NO: 1887476
gagauuacaucacuugcgu

SEQ ID NO: 2475075 - RNA, 19 nt, Artificial Sequence
  Description of Artificial Sequence: Synthetic oligonucleotide
  Antisense strand to SEQ ID NO: 2475074
acgcaagugauguaaucuc

SEQ ID NO: 2475076 - RNA, 19 nt, Artificial Sequence
  Description of Artificial Sequence: Synthetic oligonucleotide
  Sense strand starting at position 1726 of SEQ ID NO: 1887476
ccucgugggaccggaauaa

SEQ ID NO: 2475077 - RNA, 19 nt, Artificial Sequence
  Description of Artificial Sequence: Synthetic oligonucleotide
  Antisense strand to SEQ ID NO: 2475076
uuauuccggucccacgagg

SEQ ID NO: 2475078 - RNA, 19 nt, Artificial Sequence
  Description of Artificial Sequence: Synthetic oligonucleotide
  Sense strand starting at position 2091 of SEQ ID NO: 1887476
accgcauccuuaucauguu

SEQ ID NO: 2475079 - RNA, 19 nt, Artificial Sequence
  Description of Artificial Sequence: Synthetic oligonucleotide
  Antisense strand to SEQ ID NO: 2475078
aacaugauaaggaugcggu

SEQ ID NO: 2475080 - RNA, 19 nt, Artificial Sequence
  Description of Artificial Sequence: Synthetic oligonucleotide
  Sense strand starting at position 2117 of SEQ ID NO: 1887476
aucccauuggcuugcagaa

SEQ ID NO: 2475081 - RNA, 19 nt, Artificial Sequence
  Description of Artificial Sequence: Synthetic oligonucleotide
  Antisense strand to SEQ ID NO: 2475080
uucugcaagccaaugggau

SEQ ID NO: 2475082 - RNA, 19 nt, Artificial Sequence
  Description of Artificial Sequence: Synthetic oligonucleotide
  Sense strand starting at position 2138 of SEQ ID NO: 1887476
acacuacaauucccgagau

SEQ ID NO: 2475083 - RNA, 19 nt, Artificial Sequence
  Description of Artificial Sequence: Synthetic oligonucleotide
  Antisense strand to SEQ ID NO: 2475082
aucucgggaauuguagugu

SEQ ID NO: 2475084 - RNA, 19 nt, Artificial Sequence
  Description of Artificial Sequence: Synthetic oligonucleotide
  Sense strand starting at position 2153 of SEQ ID NO: 1887476
agaugcucuccgugacgca

SEQ ID NO: 2475085 - RNA, 19 nt, Artificial Sequence
  Description of Artificial Sequence: Synthetic oligonucleotide
  Antisense strand to SEQ ID NO: 2475084
ugcgucacggagagcaucu

SEQ ID NO: 2475086 - RNA, 19 nt, Artificial Sequence
  Description of Artificial Sequence: Synthetic oligonucleotide
  Sense strand starting at position 2204 of SEQ ID NO: 1887476
ggagcuucccauuggcuua

SEQ ID NO: 2475087 - RNA, 19 nt, Artificial Sequence
  Description of Artificial Sequence: Synthetic oligonucleotide
  Antisense strand to SEQ ID NO: 2475086
uaagccaaugggaagcucc

SEQ ID NO: 2475088 - RNA, 19 nt, Artificial Sequence
  Description of Artificial Sequence: Synthetic oligonucleotide
  Sense strand starting at position 2283 of SEQ ID NO: 1887476
gcugacgugucuuucagga

SEQ ID NO: 2475089 - RNA, 19 nt, Artificial Sequence
  Description of Artificial Sequence: Synthetic oligonucleotide
  Antisense strand to SEQ ID NO: 2475088
uccugaaagacacgucagc

SEQ ID NO: 2475090 - RNA, 19 nt, Artificial Sequence
  Description of Artificial Sequence: Synthetic oligonucleotide
  Sense strand starting at position 2285 of SEQ ID NO: 1887476
ugacgugucuuucaggaag

SEQ ID NO: 2475091 - RNA, 19 nt, Artificial Sequence
  Description of Artificial Sequence: Synthetic oligonucleotide
  Antisense strand to SEQ ID NO: 2475090
cuuccugaaagacacguca

SEQ ID NO: 2475092 - RNA, 19 nt, Artificial Sequence
  Description of Artificial Sequence: Synthetic oligonucleotide
  Sense strand starting at position 2287 of SEQ ID NO: 1887476
acgugucuuucaggaagag

SEQ ID NO: 2475093 - RNA, 19 nt, Artificial Sequence
  Description of Artificial Sequence: Synthetic oligonucleotide
  Antisense strand to SEQ ID NO: 2475092
cucuuccugaaagacacgu

SEQ ID NO: 2475094 - RNA, 19 nt, Artificial Sequence
  Description of Artificial Sequence: Synthetic oligonucleotide
  Sense strand starting at position 2375 of SEQ ID NO: 1887476
agacgagcuguucgacgua

SEQ ID NO: 2475095 - RNA, 19 nt, Artificial Sequence
  Description of Artificial Sequence: Synthetic oligonucleotide
  Antisense strand to SEQ ID NO: 2475094
uacgucgaacagcucgucu

SEQ ID NO: 2475096 - RNA, 19 nt, Artificial Sequence
  Description of Artificial Sequence: Synthetic oligonucleotide
  Sense strand starting at position 2377 of SEQ ID NO: 1887476
acgagcuguucgacguaaa

SEQ ID NO: 2475097 - RNA, 19 nt, Artificial Sequence
  Description of Artificial Sequence: Synthetic oligonucleotide
  Antisense strand to SEQ ID NO: 2475096
uuuacgucgaacagcucgu

SEQ ID NO: 2475098 - RNA, 19 nt, Artificial Sequence
  Description of Artificial Sequence: Synthetic oligonucleotide
  Sense strand starting at position 2378 of SEQ ID NO: 1887476
cgagcuguucgacguaaag

SEQ ID NO: 2475099 - RNA, 19 nt, Artificial Sequence
  Description of Artificial Sequence: Synthetic oligonucleotide
  Antisense strand to SEQ ID NO: 2475098
cuuuacgucgaacagcucg

SEQ ID NO: 2475100 - RNA, 19 nt, Artificial Sequence
  Description of Artificial Sequence: Synthetic oligonucleotide
  Sense strand starting at position 2380 of SEQ ID NO: 1887476
agcuguucgacguaaagaa

SEQ ID NO: 2475101 - RNA, 19 nt, Artificial Sequence
  Description of Artificial Sequence: Synthetic oligonucleotide
  Antisense strand to SEQ ID NO: 2475100
uucuuuacgucgaacagcu

SEQ ID NO: 2475102 - RNA, 19 nt, Artificial Sequence
  Description of Artificial Sequence: Synthetic oligonucleotide
  Sense strand starting at position 2599 of SEQ ID NO: 1887476
gucacugucccgugacaga

SEQ ID NO: 2475103 - RNA, 19 nt, Artificial Sequence
  Description of Artificial Sequence: Synthetic oligonucleotide
  Antisense strand to SEQ ID NO: 2475102
ucugucacgggacagugac

SEQ ID NO: 2475104 - RNA, 19 nt, Artificial Sequence
  Description of Artificial Sequence: Synthetic oligonucleotide
  Sense strand starting at position 2625 of SEQ ID NO: 1887476
gcaguaacaguuuacggua

SEQ ID NO: 2475105 - RNA, 19 nt, Artificial Sequence
  Description of Artificial Sequence: Synthetic oligonucleotide
  Antisense strand to SEQ ID NO: 2475104
uaccguaaacuguuacugc

SEQ ID NO: 2475106 - RNA, 19 nt, Artificial Sequence
  Description of Artificial Sequence: Synthetic oligonucleotide
  Sense strand starting at position 2687 of SEQ ID NO: 1887476
uugaguaagggagguguuu

SEQ ID NO: 2475107 - RNA, 19 nt, Artificial Sequence
  Description of Artificial Sequence: Synthetic oligonucleotide
  Antisense strand to SEQ ID NO: 2475106
aaacaccucccuuacucaa

SEQ ID NO: 2475108 - RNA, 19 nt, Artificial Sequence
  Description of Artificial Sequence: Synthetic oligonucleotide
  Sense strand starting at position 2689 of SEQ ID NO: 1887476
gaguaagggagguguuuau

SEQ ID NO: 2475109 - RNA, 19 nt, Artificial Sequence
  Description of Artificial Sequence: Synthetic oligonucleotide
  Antisense strand to SEQ ID NO: 2475108
auaaacaccucccuuacuc

SEQ ID NO: 2475110 - RNA, 19 nt, Artificial Sequence
  Description of Artificial Sequence: Synthetic oligonucleotide
  Sense strand starting at position 2706 of SEQ ID NO: 1887476
augccacuguagugacaau

SEQ ID NO: 2475111 - RNA, 19 nt, Artificial Sequence
  Description of Artificial Sequence: Synthetic oligonucleotide
  Antisense strand to SEQ ID NO: 2475110
auugucacuacaguggcau

SEQ ID NO: 2475112 - RNA, 19 nt, Artificial Sequence
  Description of Artificial Sequence: Synthetic oligonucleotide
  Sense strand starting at position 2763 of SEQ ID NO: 1887476
gauggagacuguugcuuau

SEQ ID NO: 2475113 - RNA, 19 nt, Artificial Sequence
  Description of Artificial Sequence: Synthetic oligonucleotide
  Antisense strand to SEQ ID NO: 2475112
auaagcaacagucuccauc

SEQ ID NO: 2475114 - RNA, 19 nt, Artificial Sequence
  Description of Artificial Sequence: Synthetic oligonucleotide
  Sense strand starting at position 2844 of SEQ ID NO: 1887476
gguuauuucucccagagcu

SEQ ID NO: 2475115 - RNA, 19 nt, Artificial Sequence
  Description of Artificial Sequence: Synthetic oligonucleotide
  Antisense strand to SEQ ID NO: 2475114
agcucugggagaaauaacc

SEQ ID NO: 2475116 - RNA, 19 nt, Artificial Sequence
  Description of Artificial Sequence: Synthetic oligonucleotide
  Sense strand starting at position 2911 of SEQ ID NO: 1887476
cuguauuccgcuggacuca

SEQ ID NO: 2475117 - RNA, 19 nt, Artificial Sequence
  Description of Artificial Sequence: Synthetic oligonucleotide
  Antisense strand to SEQ ID NO: 2475116
ugaguccagcggaauacag

SEQ ID NO: 2475118 - RNA, 19 nt, Artificial Sequence
  Description of Artificial Sequence: Synthetic oligonucleotide
  Sense strand starting at position 3195 of SEQ ID NO: 1887476
gggugacaaaguuguaaga

SEQ ID NO: 2475119 - RNA, 19 nt, Artificial Sequence
  Description of Artificial Sequence: Synthetic oligonucleotide
  Antisense strand to SEQ ID NO: 2475118
ucuuacaacuuugucaccc

SEQ ID NO: 2475120 - RNA, 19 nt, Artificial Sequence
  Description of Artificial Sequence: Synthetic oligonucleotide
  Sense strand starting at position 3197 of SEQ ID NO: 1887476
gugacaaaguuguaagaau

SEQ ID NO: 2475121 - RNA, 19 nt, Artificial Sequence
  Description of Artificial Sequence: Synthetic oligonucleotide
  Antisense strand to SEQ ID NO: 2475120
auucuuacaacuuugucac

SEQ ID NO: 2475122 - RNA, 19 nt, Artificial Sequence
  Description of Artificial Sequence: Synthetic oligonucleotide
  Sense strand starting at position 3299 of SEQ ID NO: 1887476
gcggaguugggucagagua

SEQ ID NO: 2475123 - RNA, 19 nt, Artificial Sequence
  Description of Artificial Sequence: Synthetic oligonucleotide
  Antisense strand to SEQ ID NO: 2475122
uacucugacccaacuccgc

SEQ ID NO: 2475124 - RNA, 19 nt, Artificial Sequence
  Description of Artificial Sequence: Synthetic oligonucleotide
  Sense strand starting at position 3301 of SEQ ID NO: 1887476
ggaguugggucagaguaac

SEQ ID NO: 2475125 - RNA, 19 nt, Artificial Sequence
  Description of Artificial Sequence: Synthetic oligonucleotide
  Antisense strand to SEQ ID NO: 2475124
guuacucugacccaacucc

SEQ ID NO: 2475126 - RNA, 19 nt, Artificial Sequence
  Description of Artificial Sequence: Synthetic oligonucleotide
  Sense strand starting at position 3348 of SEQ ID NO: 1887476
gauucagggucggagaguu

SEQ ID NO: 2475127 - RNA, 19 nt, Artificial Sequence
  Description of Artificial Sequence: Synthetic oligonucleotide
  Antisense strand to SEQ ID NO: 2475126
aacucuccgacccugaauc

SEQ ID NO: 2475128 - RNA, 19 nt, Artificial Sequence
  Description of Artificial Sequence: Synthetic oligonucleotide
  Sense strand starting at position 3888 of SEQ ID NO: 1887476
guuguaugaaggugaaguu

SEQ ID NO: 2475129 - RNA, 19 nt, Artificial Sequence
  Description of Artificial Sequence: Synthetic oligonucleotide
  Antisense strand to SEQ ID NO: 2475128
aacuucaccuucauacaac

SEQ ID NO: 2475130 - RNA, 19 nt, Artificial Sequence
  Description of Artificial Sequence: Synthetic oligonucleotide
  Sense strand starting at position 3949 of SEQ ID NO: 1887476
cgagcugucuuucuguguu

SEQ ID NO: 2475131 - RNA, 19 nt, Artificial Sequence
  Description of Artificial Sequence: Synthetic oligonucleotide
  Antisense strand to SEQ ID NO: 2475130
aacacagaaagacagcucg

SEQ ID NO: 2475132 - RNA, 19 nt, Artificial Sequence
  Description of Artificial Sequence: Synthetic oligonucleotide
  Sense strand starting at position 92 of SEQ ID NO: 1887477
gggacaaguuggcuagguu

SEQ ID NO: 2475133 - RNA, 19 nt, Artificial Sequence
  Description of Artificial Sequence: Synthetic oligonucleotide
  Antisense strand to SEQ ID NO: 2475132
aaccuagccaacuuguccc

SEQ ID NO: 2475134 - RNA, 19 nt, Artificial Sequence
  Description of Artificial Sequence: Synthetic oligonucleotide
  Sense strand starting at position 93 of SEQ ID NO: 1887477
ggacaaguuggcuagguuu

SEQ ID NO: 2475135 - RNA, 19 nt, Artificial Sequence
  Description of Artificial Sequence: Synthetic oligonucleotide
  Antisense strand to SEQ ID NO: 2475134
aaaccuagccaacuugucc

SEQ ID NO: 2475136 - RNA, 19 nt, Artificial Sequence
  Description of Artificial Sequence: Synthetic oligonucleotide
  Sense strand starting at position 95 of SEQ ID NO: 1887477
acaaguuggcuagguuuga

SEQ ID NO: 2475137 - RNA, 19 nt, Artificial Sequence
  Description of Artificial Sequence: Synthetic oligonucleotide
  Antisense strand to SEQ ID NO: 2475136
ucaaaccuagccaacuugu

SEQ ID NO: 2475138 - RNA, 19 nt, Artificial Sequence
  Description of Artificial Sequence: Synthetic oligonucleotide
  Sense strand starting at position 96 of SEQ ID NO: 1887477
caaguuggcuagguuugaa

SEQ ID NO: 2475139 - RNA, 19 nt, Artificial Sequence
  Description of Artificial Sequence: Synthetic oligonucleotide
  Antisense strand to SEQ ID NO: 2475138
uucaaaccuagccaacuug

SEQ ID NO: 2475140 - RNA, 19 nt, Artificial Sequence
  Description of Artificial Sequence: Synthetic oligonucleotide
  Sense strand starting at position 133 of SEQ ID NO: 1887477
ccagcuacguucucugcaa

SEQ ID NO: 2475141 - RNA, 19 nt, Artificial Sequence
  Description of Artificial Sequence: Synthetic oligonucleotide
  Antisense strand to SEQ ID NO: 2475140
uugcagagaacguagcugg

SEQ ID NO: 2475142 - RNA, 19 nt, Artificial Sequence
  Description of Artificial Sequence: Synthetic oligonucleotide
  Sense strand starting at position 216 of SEQ ID NO: 1887477
cacacuggccucugaugau

SEQ ID NO: 2475143 - RNA, 19 nt, Artificial Sequence
  Description of Artificial Sequence: Synthetic oligonucleotide
  Antisense strand to SEQ ID NO: 2475142
aucaucagaggccagugug

SEQ ID NO: 2475144 - RNA, 19 nt, Artificial Sequence
  Description of Artificial Sequence: Synthetic oligonucleotide
  Sense strand starting at position 406 of SEQ ID NO: 1887477
guucucuuauuaucugauu

SEQ ID NO: 2475145 - RNA, 19 nt, Artificial Sequence
  Description of Artificial Sequence: Synthetic oligonucleotide
  Antisense strand to SEQ ID NO: 2475144
aaucagauaauaagagaac

SEQ ID NO: 2475146 - RNA, 19 nt, Artificial Sequence
  Description of Artificial Sequence: Synthetic oligonucleotide
  Sense strand starting at position 497 of SEQ ID NO: 1887477
agcaaacaggauuguuauu

SEQ ID NO: 2475147 - RNA, 19 nt, Artificial Sequence
  Description of Artificial Sequence: Synthetic oligonucleotide
  Antisense strand to SEQ ID NO: 2475146
aauaacaauccuguuugcu

SEQ ID NO: 2475148 - RNA, 19 nt, Artificial Sequence
  Description of Artificial Sequence: Synthetic oligonucleotide
  Sense strand starting at position 508 of SEQ ID NO: 1887477
uuguuauuauacgugcaaa

SEQ ID NO: 2475149 - RNA, 19 nt, Artificial Sequence
  Description of Artificial Sequence: Synthetic oligonucleotide
  Antisense strand to SEQ ID NO: 2475148
uuugcacguauaauaacaa

SEQ ID NO: 2475150 - RNA, 19 nt, Artificial Sequence
  Description of Artificial Sequence: Synthetic oligonucleotide
  Sense strand starting at position 511 of SEQ ID NO: 1887477
uuauuauacgugcaaacug

SEQ ID NO: 2475151 - RNA, 19 nt, Artificial Sequence
  Description of Artificial Sequence: Synthetic oligonucleotide
  Antisense strand to SEQ ID NO: 2475150
caguuugcacguauaauaa

SEQ ID NO: 2475152 - RNA, 19 nt, Artificial Sequence
  Description of Artificial Sequence: Synthetic oligonucleotide
  Sense strand starting at position 519 of SEQ ID NO: 1887477
cgugcaaacugcuuaacuu

SEQ ID NO: 2475153 - RNA, 19 nt, Artificial Sequence
  Description of Artificial Sequence: Synthetic oligonucleotide
  Antisense strand to SEQ ID NO: 2475152
aaguuaagcaguuugcacg

SEQ ID NO: 2475154 - RNA, 19 nt, Artificial Sequence
  Description of Artificial Sequence: Synthetic oligonucleotide
  Sense strand starting at position 520 of SEQ ID NO: 1887477
gugcaaacugcuuaacuuc

SEQ ID NO: 2475155 - RNA, 19 nt, Artificial Sequence
  Description of Artificial Sequence: Synthetic oligonucleotide
  Antisense strand to SEQ ID NO: 2475154
gaaguuaagcaguuugcac

SEQ ID NO: 2475156 - RNA, 19 nt, Artificial Sequence
  Description of Artificial Sequence: Synthetic oligonucleotide
  Sense strand starting at position 578 of SEQ ID NO: 1887477
acaggacuuccuugugaga

SEQ ID NO: 2475157 - RNA, 19 nt, Artificial Sequence
  Description of Artificial Sequence: Synthetic oligonucleotide
  Antisense strand to SEQ ID NO: 2475156
ucucacaaggaaguccugu

SEQ ID NO: 2475158 - RNA, 19 nt, Artificial Sequence
  Description of Artificial Sequence: Synthetic oligonucleotide
  Sense strand starting at position 591 of SEQ ID NO: 1887477
gugagauuacugggagacu

SEQ ID NO: 2475159 - RNA, 19 nt, Artificial Sequence
  Description of Artificial Sequence: Synthetic oligonucleotide
  Antisense strand to SEQ ID NO: 2475158
agucucccaguaaucucac

SEQ ID NO: 2475160 - RNA, 19 nt, Artificial Sequence
  Description of Artificial Sequence: Synthetic oligonucleotide
  Sense strand starting at position 592 of SEQ ID NO: 1887477
ugagauuacugggagacua

SEQ ID NO: 2475161 - RNA, 19 nt, Artificial Sequence
  Description of Artificial Sequence: Synthetic oligonucleotide
  Antisense strand to SEQ ID NO: 2475160
uagucucccaguaaucuca

SEQ ID NO: 2475162 - RNA, 19 nt, Artificial Sequence
  Description of Artificial Sequence: Synthetic oligonucleotide
  Sense strand starting at position 693 of SEQ ID NO: 1887477
cacugauguggccaaauuc

SEQ ID NO: 2475163 - RNA, 19 nt, Artificial Sequence
  Description of Artificial Sequence: Synthetic oligonucleotide
  Antisense strand to SEQ ID NO: 2475162
gaauuuggccacaucagug

SEQ ID NO: 2475164 - RNA, 19 nt, Artificial Sequence
  Description of Artificial Sequence: Synthetic oligonucleotide
  Sense strand starting at position 731 of SEQ ID NO: 1887477
cucuuauguugcucauuga

SEQ ID NO: 2475165 - RNA, 19 nt, Artificial Sequence
  Description of Artificial Sequence: Synthetic oligonucleotide
  Antisense strand to SEQ ID NO: 2475164
ucaaugagcaacauaagag

SEQ ID NO: 2475166 - RNA, 19 nt, Artificial Sequence
  Description of Artificial Sequence: Synthetic oligonucleotide
  Sense strand starting at position 732 of SEQ ID NO: 1887477
ucuuauguugcucauugau

SEQ ID NO: 2475167 - RNA, 19 nt, Artificial Sequence
  Description of Artificial Sequence: Synthetic oligonucleotide
  Antisense strand to SEQ ID NO: 2475166
aucaaugagcaacauaaga

SEQ ID NO: 2475168 - RNA, 19 nt, Artificial Sequence
  Description of Artificial Sequence: Synthetic oligonucleotide
  Sense strand starting at position 734 of SEQ ID NO: 1887477
uuauguugcucauugauau

SEQ ID NO: 2475169 - RNA, 19 nt, Artificial Sequence
  Description of Artificial Sequence: Synthetic oligonucleotide
  Antisense strand to SEQ ID NO: 2475168
auaucaaugagcaacauaa

SEQ ID NO: 2475170 - RNA, 19 nt, Artificial Sequence
  Description of Artificial Sequence: Synthetic oligonucleotide
  Sense strand starting at position 746 of SEQ ID NO: 1887477
uugauauugugggaagaga

SEQ ID NO: 2475171 - RNA, 19 nt, Artificial Sequence
  Description of Artificial Sequence: Synthetic oligonucleotide
  Antisense strand to SEQ ID NO: 2475170
ucucuucccacaauaucaa

SEQ ID NO: 2475172 - RNA, 19 nt, Artificial Sequence
  Description of Artificial Sequence: Synthetic oligonucleotide
  Sense strand starting at position 780 of SEQ ID NO: 1887477
acauaagcugccugauaug

SEQ ID NO: 2475173 - RNA, 19 nt, Artificial Sequence
  Description of Artificial Sequence: Synthetic oligonucleotide
  Antisense strand to SEQ ID NO: 2475172
cauaucaggcagcuuaugu

SEQ ID NO: 2475174 - RNA, 19 nt, Artificial Sequence
  Description of Artificial Sequence: Synthetic oligonucleotide
  Sense strand starting at position 1142 of SEQ ID NO: 1887477
gacagcaucccguaguagu

SEQ ID NO: 2475175 - RNA, 19 nt, Artificial Sequence
  Description of Artificial Sequence: Synthetic oligonucleotide
  Antisense strand to SEQ ID NO: 2475174
acuacuacgggaugcuguc

SEQ ID NO: 2475176 - RNA, 19 nt, Artificial Sequence
  Description of Artificial Sequence: Synthetic oligonucleotide
  Sense strand starting at position 1635 of SEQ ID NO: 1887477
cggcucuacgcaaguggua

SEQ ID NO: 2475177 - RNA, 19 nt, Artificial Sequence
  Description of Artificial Sequence: Synthetic oligonucleotide
  Antisense strand to SEQ ID NO: 2475176
uaccacuugcguagagccg

SEQ ID NO: 2475178 - RNA, 19 nt, Artificial Sequence
  Description of Artificial Sequence: Synthetic oligonucleotide
  Sense strand starting at position 1827 of SEQ ID NO: 1887477
ucuggauccucaccagauu

SEQ ID NO: 2475179 - RNA, 19 nt, Artificial Sequence
  Description of Artificial Sequence: Synthetic oligonucleotide
  Antisense strand to SEQ ID NO: 2475178
aaucuggugaggauccaga

SEQ ID NO: 2475180 - RNA, 19 nt, Artificial Sequence
  Description of Artificial Sequence: Synthetic oligonucleotide
  Sense strand starting at position 2050 of SEQ ID NO: 1887477
gaagcaucuugguucgcga

SEQ ID NO: 2475181 - RNA, 19 nt, Artificial Sequence
  Description of Artificial Sequence: Synthetic oligonucleotide
  Antisense strand to SEQ ID NO: 2475180
ucgcgaaccaagaugcuuc

SEQ ID NO: 2475182 - RNA, 19 nt, Artificial Sequence
  Description of Artificial Sequence: Synthetic oligonucleotide
  Sense strand starting at position 2312 of SEQ ID NO: 1887477
aguaaacucccaggccuua

SEQ ID NO: 2475183 - RNA, 19 nt, Artificial Sequence
  Description of Artificial Sequence: Synthetic oligonucleotide
  Antisense strand to SEQ ID NO: 2475182
uaaggccugggaguuuacu

SEQ ID NO: 2475184 - RNA, 19 nt, Artificial Sequence
  Description of Artificial Sequence: Synthetic oligonucleotide
  Sense strand starting at position 2344 of SEQ ID NO: 1887477
ugggcacuccuccauuaga

SEQ ID NO: 2475185 - RNA, 19 nt, Artificial Sequence
  Description of Artificial Sequence: Synthetic oligonucleotide
  Antisense strand to SEQ ID NO: 2475184
ucuaauggaggagugccca

SEQ ID NO: 2475186 - RNA, 19 nt, Artificial Sequence
  Description of Artificial Sequence: Synthetic oligonucleotide
  Sense strand starting at position 2347 of SEQ ID NO: 1887477
gcacuccuccauuagauug

SEQ ID NO: 2475187 - RNA, 19 nt, Artificial Sequence
  Description of Artificial Sequence: Synthetic oligonucleotide
  Antisense strand to SEQ ID NO: 2475186
caaucuaauggaggagugc

SEQ ID NO: 2475188 - RNA, 19 nt, Artificial Sequence
  Description of Artificial Sequence: Synthetic oligonucleotide
  Sense strand starting at position 2354 of SEQ ID NO: 1887477
uccauuagauugucccuca

SEQ ID NO: 2475189 - RNA, 19 nt, Artificial Sequence
  Description of Artificial Sequence: Synthetic oligonucleotide
  Antisense strand to SEQ ID NO: 2475188
ugagggacaaucuaaugga

SEQ ID NO: 2475190 - RNA, 19 nt, Artificial Sequence
  Description of Artificial Sequence: Synthetic oligonucleotide
  Sense strand starting at position 2357 of SEQ ID NO: 1887477
auuagauugucccucacuu

SEQ ID NO: 2475191 - RNA, 19 nt, Artificial Sequence
  Description of Artificial Sequence: Synthetic oligonucleotide
  Antisense strand to SEQ ID NO: 2475190
aagugagggacaaucuaau

SEQ ID NO: 2475192 - RNA, 19 nt, Artificial Sequence
  Description of Artificial Sequence: Synthetic oligonucleotide
  Sense strand starting at position 2409 of SEQ ID NO: 1887477
gcucucucgugaucccaaa

SEQ ID NO: 2475193 - RNA, 19 nt, Artificial Sequence
  Description of Artificial Sequence: Synthetic oligonucleotide
  Antisense strand to SEQ ID NO: 2475192
uuugggaucacgagagagc

SEQ ID NO: 2475194 - RNA, 19 nt, Artificial Sequence
  Description of Artificial Sequence: Synthetic oligonucleotide
  Sense strand starting at position 2416 of SEQ ID NO: 1887477
cgugaucccaaauggaaau

SEQ ID NO: 2475195 - RNA, 19 nt, Artificial Sequence
  Description of Artificial Sequence: Synthetic oligonucleotide
  Antisense strand to SEQ ID NO: 2475194
auuuccauuugggaucacg

SEQ ID NO: 2475196 - RNA, 19 nt, Artificial Sequence
  Description of Artificial Sequence: Synthetic oligonucleotide
  Sense strand starting at position 2707 of SEQ ID NO: 1887477
gggucugucagggagucua

SEQ ID NO: 2475197 - RNA, 19 nt, Artificial Sequence
  Description of Artificial Sequence: Synthetic oligonucleotide
  Antisense strand to SEQ ID NO: 2475196
uagacucccugacagaccc

SEQ ID NO: 2475198 - RNA, 19 nt, Artificial Sequence
  Description of Artificial Sequence: Synthetic oligonucleotide
  Sense strand starting at position 2719 of SEQ ID NO: 1887477
gagucuaggcuguggugua

SEQ ID NO: 2475199 - RNA, 19 nt, Artificial Sequence
  Description of Artificial Sequence: Synthetic oligonucleotide
  Antisense strand to SEQ ID NO: 2475198
uacaccacagccuagacuc

SEQ ID NO: 2475200 - RNA, 19 nt, Artificial Sequence
  Description of Artificial Sequence: Synthetic oligonucleotide
  Sense strand starting at position 2813 of SEQ ID NO: 1887477
cugcauguacuugagacaa

SEQ ID NO: 2475201 - RNA, 19 nt, Artificial Sequence
  Description of Artificial Sequence: Synthetic oligonucleotide
  Antisense strand to SEQ ID NO: 2475200
uugucucaaguacaugcag

SEQ ID NO: 2475202 - RNA, 19 nt, Artificial Sequence
  Description of Artificial Sequence: Synthetic oligonucleotide
  Sense strand starting at position 3905 of SEQ ID NO: 1887477
aagcauaguccugggcuaa

SEQ ID NO: 2475203 - RNA, 19 nt, Artificial Sequence
  Description of Artificial Sequence: Synthetic oligonucleotide
  Antisense strand to SEQ ID NO: 2475202
uuagcccaggacuaugcuu

SEQ ID NO: 2475204 - RNA, 19 nt, Artificial Sequence
  Description of Artificial Sequence: Synthetic oligonucleotide
  Sense strand starting at position 3906 of SEQ ID NO: 1887477
agcauaguccugggcuaaa

SEQ ID NO: 2475205 - RNA, 19 nt, Artificial Sequence
  Description of Artificial Sequence: Synthetic oligonucleotide
  Antisense strand to SEQ ID NO: 2475204
uuuagcccaggacuaugcu

SEQ ID NO: 2475206 - RNA, 19 nt, Artificial Sequence
  Description of Artificial Sequence: Synthetic oligonucleotide
  Sense strand starting at position 3937 of SEQ ID NO: 1887477
ccugguaagugacuaucau

SEQ ID NO: 2475207 - RNA, 19 nt, Artificial Sequence
  Description of Artificial Sequence: Synthetic oligonucleotide
  Antisense strand to SEQ ID NO: 2475206
augauagucacuuaccagg

SEQ ID NO: 2475208 - RNA, 19 nt, Artificial Sequence
  Description of Artificial Sequence: Synthetic oligonucleotide
  Sense strand starting at position 3938 of SEQ ID NO: 1887477
cugguaagugacuaucauu

SEQ ID NO: 2475209 - RNA, 19 nt, Artificial Sequence
  Description of Artificial Sequence: Synthetic oligonucleotide
  Antisense strand to SEQ ID NO: 2475208
aaugauagucacuuaccag

SEQ ID NO: 2475210 - RNA, 19 nt, Artificial Sequence
  Description of Artificial Sequence: Synthetic oligonucleotide
  Sense strand starting at position 3941 of SEQ ID NO: 1887477
guaagugacuaucauuaaa

SEQ ID NO: 2475211 - RNA, 19 nt, Artificial Sequence
  Description of Artificial Sequence: Synthetic oligonucleotide
  Antisense strand to SEQ ID NO: 2475210
uuuaaugauagucacuuac

SEQ ID NO: 2475212 - RNA, 19 nt, Artificial Sequence
  Description of Artificial Sequence: Synthetic oligonucleotide
  Sense strand starting at position 49 of SEQ ID NO: 1887478
gcucucucgugaucccaaa

SEQ ID NO: 2475213 - RNA, 19 nt, Artificial Sequence
  Description of Artificial Sequence: Synthetic oligonucleotide
  Antisense strand to SEQ ID NO: 2475212
uuugggaucacgagagagc

SEQ ID NO: 2475214 - RNA, 19 nt, Artificial Sequence
  Description of Artificial Sequence: Synthetic oligonucleotide
  Sense strand starting at position 56 of SEQ ID NO: 1887478
cgugaucccaaauggaaau

SEQ ID NO: 2475215 - RNA, 19 nt, Artificial Sequence
  Description of Artificial Sequence: Synthetic oligonucleotide
  Antisense strand to SEQ ID NO: 2475214
auuuccauuugggaucacg

SEQ ID NO: 2475216 - RNA, 19 nt, Artificial Sequence
  Description of Artificial Sequence: Synthetic oligonucleotide
  Sense strand starting at position 347 of SEQ ID NO: 1887478
gggucugucagggagucua

SEQ ID NO: 2475217 - RNA, 19 nt, Artificial Sequence
  Description of Artificial Sequence: Synthetic oligonucleotide
  Antisense strand to SEQ ID NO: 2475216
uagacucccugacagaccc

SEQ ID NO: 2475218 - RNA, 19 nt, Artificial Sequence
  Description of Artificial Sequence: Synthetic oligonucleotide
  Sense strand starting at position 453 of SEQ ID NO: 1887478
cugcauguacuugagacaa

SEQ ID NO: 2475219 - RNA, 19 nt, Artificial Sequence
  Description of Artificial Sequence: Synthetic oligonucleotide
  Antisense strand to SEQ ID NO: 2475218
uugucucaaguacaugcag

SEQ ID NO: 2475220 - RNA, 19 nt, Artificial Sequence
  Description of Artificial Sequence: Synthetic oligonucleotide
  Sense strand starting at position 1545 of SEQ ID NO: 1887478
aagcauaguccugggcuaa

SEQ ID NO: 2475221 - RNA, 19 nt, Artificial Sequence
  Description of Artificial Sequence: Synthetic oligonucleotide
  Antisense strand to SEQ ID NO: 2475220
uuagcccaggacuaugcuu

SEQ ID NO: 2475222 - RNA, 19 nt, Artificial Sequence
  Description of Artificial Sequence: Synthetic oligonucleotide
  Sense strand starting at position 1546 of SEQ ID NO: 1887478
agcauaguccugggcuaaa

SEQ ID NO: 2475223 - RNA, 19 nt, Artificial Sequence
  Description of Artificial Sequence: Synthetic oligonucleotide
  Antisense strand to SEQ ID NO: 2475222
uuuagcccaggacuaugcu

SEQ ID NO: 2475224 - RNA, 19 nt, Artificial Sequence
  Description of Artificial Sequence: Synthetic oligonucleotide
  Sense strand starting at position 1577 of SEQ ID NO: 1887478
ccugguaagugacuaucau

SEQ ID NO: 2475225 - RNA, 19 nt, Artificial Sequence
  Description of Artificial Sequence: Synthetic oligonucleotide
  Antisense strand to SEQ ID NO: 2475224
augauagucacuuaccagg

SEQ ID NO: 2475226 - RNA, 19 nt, Artificial Sequence
  Description of Artificial Sequence: Synthetic oligonucleotide
  Sense strand starting at position 1578 of SEQ ID NO: 1887478
cugguaagugacuaucauu

SEQ ID NO: 2475227 - RNA, 19 nt, Artificial Sequence
  Description of Artificial Sequence: Synthetic oligonucleotide
  Antisense strand to SEQ ID NO: 2475226
aaugauagucacuuaccag

SEQ ID NO: 2475228 - RNA, 19 nt, Artificial Sequence
  Description of Artificial Sequence: Synthetic oligonucleotide
  Sense strand starting at position 1633 of SEQ ID NO: 1887478
uuaacaaacugugaaggau

SEQ ID NO: 2475229 - RNA, 19 nt, Artificial Sequence
  Description of Artificial Sequence: Synthetic oligonucleotide
  Antisense strand to SEQ ID NO: 2475228
auccuucacaguuuguuaa

SEQ ID NO: 2475230 - RNA, 19 nt, Artificial Sequence
  Description of Artificial Sequence: Synthetic oligonucleotide
  Sense strand starting at position 1645 of SEQ ID NO: 1887478
gaaggauucugucuugcua

SEQ ID NO: 2475231 - RNA, 19 nt, Artificial Sequence
  Description of Artificial Sequence: Synthetic oligonucleotide
  Antisense strand to SEQ ID NO: 2475230
uagcaagacagaauccuuc

SEQ ID NO: 2475232 - RNA, 19 nt, Artificial Sequence
  Description of Artificial Sequence: Synthetic oligonucleotide
  Sense strand starting at position 1834 of SEQ ID NO: 1887478
ucagaaaugcuccgucucu

SEQ ID NO: 2475233 - RNA, 19 nt, Artificial Sequence
  Description of Artificial Sequence: Synthetic oligonucleotide
  Antisense strand to SEQ ID NO: 2475232
agagacggagcauuucuga

SEQ ID NO: 2475234 - RNA, 19 nt, Artificial Sequence
  Description of Artificial Sequence: Synthetic oligonucleotide
  Sense strand starting at position 1835 of SEQ ID NO: 1887478
cagaaaugcuccgucucuu

SEQ ID NO: 2475235 - RNA, 19 nt, Artificial Sequence
  Description of Artificial Sequence: Synthetic oligonucleotide
  Antisense strand to SEQ ID NO: 2475234
aagagacggagcauuucug

SEQ ID NO: 2475236 - RNA, 19 nt, Artificial Sequence
  Description of Artificial Sequence: Synthetic oligonucleotide
  Sense strand starting at position 1930 of SEQ ID NO: 1887478
gcccgaguuucucuacaga

SEQ ID NO: 2475237 - RNA, 19 nt, Artificial Sequence
  Description of Artificial Sequence: Synthetic oligonucleotide
  Antisense strand to SEQ ID NO: 2475236
ucuguagagaaacucgggc

SEQ ID NO: 2475238 - RNA, 19 nt, Artificial Sequence
  Description of Artificial Sequence: Synthetic oligonucleotide
  Sense strand starting at position 1933 of SEQ ID NO: 1887478
cgaguuucucuacagaacu

SEQ ID NO: 2475239 - RNA, 19 nt, Artificial Sequence
  Description of Artificial Sequence: Synthetic oligonucleotide
  Antisense strand to SEQ ID NO: 2475238
aguucuguagagaaacucg

SEQ ID NO: 2475240 - RNA, 19 nt, Artificial Sequence
  Description of Artificial Sequence: Synthetic oligonucleotide
  Sense strand starting at position 2028 of SEQ ID NO: 1887478
gaagaugugugcguggaua

SEQ ID NO: 2475241 - RNA, 19 nt, Artificial Sequence
  Description of Artificial Sequence: Synthetic oligonucleotide
  Antisense strand to SEQ ID NO: 2475240
uauccacgcacacaucuuc

SEQ ID NO: 2475242 - RNA, 19 nt, Artificial Sequence
  Description of Artificial Sequence: Synthetic oligonucleotide
  Sense strand starting at position 2030 of SEQ ID NO: 1887478
agaugugugcguggauaac

SEQ ID NO: 2475243 - RNA, 19 nt, Artificial Sequence
  Description of Artificial Sequence: Synthetic oligonucleotide
  Antisense strand to SEQ ID NO: 2475242
guuauccacgcacacaucu

SEQ ID NO: 2475244 - RNA, 19 nt, Artificial Sequence
  Description of Artificial Sequence: Synthetic oligonucleotide
  Sense strand starting at position 2484 of SEQ ID NO: 1887478
guaggagacaagcguugua

SEQ ID NO: 2475245 - RNA, 19 nt, Artificial Sequence
  Description of Artificial Sequence: Synthetic oligonucleotide
  Antisense strand to SEQ ID NO: 2475244
uacaacgcuugucuccuac

SEQ ID NO: 2475246 - RNA, 19 nt, Artificial Sequence
  Description of Artificial Sequence: Synthetic oligonucleotide
  Sense strand starting at position 2487 of SEQ ID NO: 1887478
ggagacaagcguuguaaag

SEQ ID NO: 2475247 - RNA, 19 nt, Artificial Sequence
  Description of Artificial Sequence: Synthetic oligonucleotide
  Antisense strand to SEQ ID NO: 2475246
cuuuacaacgcuugucucc

SEQ ID NO: 2475248 - RNA, 19 nt, Artificial Sequence
  Description of Artificial Sequence: Synthetic oligonucleotide
  Sense strand starting at position 2494 of SEQ ID NO: 1887478
agcguuguaaagcgggaaa

SEQ ID NO: 2475249 - RNA, 19 nt, Artificial Sequence
  Description of Artificial Sequence: Synthetic oligonucleotide
  Antisense strand to SEQ ID NO: 2475248
uuucccgcuuuacaacgcu

SEQ ID NO: 2475250 - RNA, 19 nt, Artificial Sequence
  Description of Artificial Sequence: Synthetic oligonucleotide
  Sense strand starting at position 2497 of SEQ ID NO: 1887478
guuguaaagcgggaaaguu

SEQ ID NO: 2475251 - RNA, 19 nt, Artificial Sequence
  Description of Artificial Sequence: Synthetic oligonucleotide
  Antisense strand to SEQ ID NO: 2475250
aacuuucccgcuuuacaac

SEQ ID NO: 2475252 - RNA, 19 nt, Artificial Sequence
  Description of Artificial Sequence: Synthetic oligonucleotide
  Sense strand starting at position 2533 of SEQ ID NO: 1887478
guggguuccuuccuggaaa

SEQ ID NO: 2475253 - RNA, 19 nt, Artificial Sequence
  Description of Artificial Sequence: Synthetic oligonucleotide
  Antisense strand to SEQ ID NO: 2475252
uuuccaggaaggaacccac

SEQ ID NO: 2475254 - RNA, 19 nt, Artificial Sequence
  Description of Artificial Sequence: Synthetic oligonucleotide
  Sense strand starting at position 2535 of SEQ ID NO: 1887478
ggguuccuuccuggaaaga

SEQ ID NO: 2475255 - RNA, 19 nt, Artificial Sequence
  Description of Artificial Sequence: Synthetic oligonucleotide
  Antisense strand to SEQ ID NO: 2475254
ucuuuccaggaaggaaccc

SEQ ID NO: 2475256 - RNA, 19 nt, Artificial Sequence
  Description of Artificial Sequence: Synthetic oligonucleotide
  Sense strand starting at position 2557 of SEQ ID NO: 1887478
acugauauacugugugaaa

SEQ ID NO: 2475257 - RNA, 19 nt, Artificial Sequence
  Description of Artificial Sequence: Synthetic oligonucleotide
  Antisense strand to SEQ ID NO: 2475256
uuucacacaguauaucagu

SEQ ID NO: 2475258 - RNA, 19 nt, Artificial Sequence
  Description of Artificial Sequence: Synthetic oligonucleotide
  Sense strand starting at position 2618 of SEQ ID NO: 1887478
gagaaagaaucguagacga

SEQ ID NO: 2475259 - RNA, 19 nt, Artificial Sequence
  Description of Artificial Sequence: Synthetic oligonucleotide
  Antisense strand to SEQ ID NO: 2475258
ucgucuacgauucuuucuc

SEQ ID NO: 2475260 - RNA, 19 nt, Artificial Sequence
  Description of Artificial Sequence: Synthetic oligonucleotide
  Sense strand starting at position 2622 of SEQ ID NO: 1887478
aagaaucguagacgaggaa

SEQ ID NO: 2475261 - RNA, 19 nt, Artificial Sequence
  Description of Artificial Sequence: Synthetic oligonucleotide
  Antisense strand to SEQ ID NO: 2475260
uuccucgucuacgauucuu

SEQ ID NO: 2475262 - RNA, 19 nt, Artificial Sequence
  Description of Artificial Sequence: Synthetic oligonucleotide
  Sense strand starting at position 2737 of SEQ ID NO: 1887478
gaguucucuguuggaaaug

SEQ ID NO: 2475263 - RNA, 19 nt, Artificial Sequence
  Description of Artificial Sequence: Synthetic oligonucleotide
  Antisense strand to SEQ ID NO: 2475262
cauuuccaacagagaacuc

SEQ ID NO: 2475264 - RNA, 19 nt, Artificial Sequence
  Description of Artificial Sequence: Synthetic oligonucleotide
  Sense strand starting at position 2932 of SEQ ID NO: 1887478
ggaguauguauugggcauu

SEQ ID NO: 2475265 - RNA, 19 nt, Artificial Sequence
  Description of Artificial Sequence: Synthetic oligonucleotide
  Antisense strand to SEQ ID NO: 2475264
aaugcccaauacauacucc

SEQ ID NO: 2475266 - RNA, 19 nt, Artificial Sequence
  Description of Artificial Sequence: Synthetic oligonucleotide
  Sense strand starting at position 2935 of SEQ ID NO: 1887478
guauguauugggcauuaac

SEQ ID NO: 2475267 - RNA, 19 nt, Artificial Sequence
  Description of Artificial Sequence: Synthetic oligonucleotide
  Antisense strand to SEQ ID NO: 2475266
guuaaugcccaauacauac

SEQ ID NO: 2475268 - RNA, 19 nt, Artificial Sequence
  Description of Artificial Sequence: Synthetic oligonucleotide
  Sense strand starting at position 2938 of SEQ ID NO: 1887478
uguauugggcauuaacuga

SEQ ID NO: 2475269 - RNA, 19 nt, Artificial Sequence
  Description of Artificial Sequence: Synthetic oligonucleotide
  Antisense strand to SEQ ID NO: 2475268
ucaguuaaugcccaauaca

SEQ ID NO: 2475270 - RNA, 19 nt, Artificial Sequence
  Description of Artificial Sequence: Synthetic oligonucleotide
  Sense strand starting at position 3007 of SEQ ID NO: 1887478
gggaaguuggucugguaga

SEQ ID NO: 2475271 - RNA, 19 nt, Artificial Sequence
  Description of Artificial Sequence: Synthetic oligonucleotide
  Antisense strand to SEQ ID NO: 2475270
ucuaccagaccaacuuccc

SEQ ID NO: 2475272 - RNA, 19 nt, Artificial Sequence
  Description of Artificial Sequence: Synthetic oligonucleotide
  Sense strand starting at position 3021 of SEQ ID NO: 1887478
guagaaauggacugugcau

SEQ ID NO: 2475273 - RNA, 19 nt, Artificial Sequence
  Description of Artificial Sequence: Synthetic oligonucleotide
  Antisense strand to SEQ ID NO: 2475272
augcacaguccauuucuac

SEQ ID NO: 2475274 - RNA, 19 nt, Artificial Sequence
  Description of Artificial Sequence: Synthetic oligonucleotide
  Sense strand starting at position 3833 of SEQ ID NO: 1887478
aaauauguacugugugcua

SEQ ID NO: 2475275 - RNA, 19 nt, Artificial Sequence
  Description of Artificial Sequence: Synthetic oligonucleotide
  Antisense strand to SEQ ID NO: 2475274
uagcacacaguacauauuu

SEQ ID NO: 2475276 - RNA, 19 nt, Artificial Sequence
  Description of Artificial Sequence: Synthetic oligonucleotide
  Sense strand starting at position 3835 of SEQ ID NO: 1887478
auauguacugugugcuaga

SEQ ID NO: 2475277 - RNA, 19 nt, Artificial Sequence
  Description of Artificial Sequence: Synthetic oligonucleotide
  Antisense strand to SEQ ID NO: 2475276
ucuagcacacaguacauau

SEQ ID NO: 2475278 - RNA, 19 nt, Artificial Sequence
  Description of Artificial Sequence: Synthetic oligonucleotide
  Sense strand starting at position 3845 of SEQ ID NO: 1887478
ugugcuagacauuguucuu

SEQ ID NO: 2475279 - RNA, 19 nt, Artificial Sequence
  Description of Artificial Sequence: Synthetic oligonucleotide
  Antisense strand to SEQ ID NO: 2475278
aagaacaaugucuagcaca

SEQ ID NO: 2475280 - RNA, 19 nt, Artificial Sequence
  Description of Artificial Sequence: Synthetic oligonucleotide
  Sense strand starting at position 3880 of SEQ ID NO: 1887478
cagugaugugcaggcuaaa

SEQ ID NO: 2475281 - RNA, 19 nt, Artificial Sequence
  Description of Artificial Sequence: Synthetic oligonucleotide
  Antisense strand to SEQ ID NO: 2475280
uuuagccugcacaucacug

SEQ ID NO: 2475282 - RNA, 19 nt, Artificial Sequence
  Description of Artificial Sequence: Synthetic oligonucleotide
  Sense strand starting at position 3905 of SEQ ID NO: 1887478
ccgucuaggugcuuaauau

SEQ ID NO: 2475283 - RNA, 19 nt, Artificial Sequence
  Description of Artificial Sequence: Synthetic oligonucleotide
  Antisense strand to SEQ ID NO: 2475282
auauuaagcaccuagacgg

SEQ ID NO: 2475284 - RNA, 19 nt, Artificial Sequence
  Description of Artificial Sequence: Synthetic oligonucleotide
  Sense strand starting at position 3906 of SEQ ID NO: 1887478
cgucuaggugcuuaauaug

SEQ ID NO: 2475285 - RNA, 19 nt, Artificial Sequence
  Description of Artificial Sequence: Synthetic oligonucleotide
  Antisense strand to SEQ ID NO: 2475284
cauauuaagcaccuagacg

SEQ ID NO: 2475286 - RNA, 19 nt, Artificial Sequence
  Description of Artificial Sequence: Synthetic oligonucleotide
  Sense strand starting at position 3911 of SEQ ID NO: 1887478
aggugcuuaauaugagcaa

SEQ ID NO: 2475287 - RNA, 19 nt, Artificial Sequence
  Description of Artificial Sequence: Synthetic oligonucleotide
  Antisense strand to SEQ ID NO: 2475286
uugcucauauuaagcaccu

SEQ ID NO: 2475288 - RNA, 19 nt, Artificial Sequence
  Description of Artificial Sequence: Synthetic oligonucleotide
  Sense strand starting at position 3914 of SEQ ID NO: 1887478
ugcuuaauaugagcaacuu

SEQ ID NO: 2475289 - RNA, 19 nt, Artificial Sequence
  Description of Artificial Sequence: Synthetic oligonucleotide
  Antisense strand to SEQ ID NO: 2475288
aaguugcucauauuaagca

SEQ ID NO: 2475290 - RNA, 19 nt, Artificial Sequence
  Description of Artificial Sequence: Synthetic oligonucleotide
  Sense strand starting at position 3915 of SEQ ID NO: 1887478
gcuuaauaugagcaacuuu

SEQ ID NO: 2475291 - RNA, 19 nt, Artificial Sequence
  Description of Artificial Sequence: Synthetic oligonucleotide
  Antisense strand to SEQ ID NO: 2475290
aaaguugcucauauuaagc

SEQ ID NO: 2475292 - RNA, 19 nt, Artificial Sequence
  Description of Artificial Sequence: Synthetic oligonucleotide
  Sense strand starting at position 9 of SEQ ID NO: 1887479
gccagcuguggucaccaau

SEQ ID NO: 2475293 - RNA, 19 nt, Artificial Sequence
  Description of Artificial Sequence: Synthetic oligonucleotide
  Antisense strand to SEQ ID NO: 2475292
auuggugaccacagcuggc

SEQ ID NO: 2475294 - RNA, 19 nt, Artificial Sequence
  Description of Artificial Sequence: Synthetic oligonucleotide
  Sense strand starting at position 81 of SEQ ID NO: 1887479
cccucauucugggcagaac

SEQ ID NO: 2475295 - RNA, 19 nt, Artificial Sequence
  Description of Artificial Sequence: Synthetic oligonucleotide
  Antisense strand to SEQ ID NO: 2475294
guucugcccagaaugaggg

SEQ ID NO: 2475296 - RNA, 19 nt, Artificial Sequence
  Description of Artificial Sequence: Synthetic oligonucleotide
  Sense strand starting at position 82 of SEQ ID NO: 1887479
ccucauucugggcagaacu

SEQ ID NO: 2475297 - RNA, 19 nt, Artificial Sequence
  Description of Artificial Sequence: Synthetic oligonucleotide
  Antisense strand to SEQ ID NO: 2475296
aguucugcccagaaugagg

SEQ ID NO: 2475298 - RNA, 19 nt, Artificial Sequence
  Description of Artificial Sequence: Synthetic oligonucleotide
  Sense strand starting at position 119 of SEQ ID NO: 1887479
cagugacucuuaugaggga

SEQ ID NO: 2475299 - RNA, 19 nt, Artificial Sequence
  Description of Artificial Sequence: Synthetic oligonucleotide
  Antisense strand to SEQ ID NO: 2475298
ucccucauaagagucacug

SEQ ID NO: 2475300 - RNA, 19 nt, Artificial Sequence
  Description of Artificial Sequence: Synthetic oligonucleotide
  Sense strand starting at position 294 of SEQ ID NO: 1887479
agcgaauggucucacggau

SEQ ID NO: 2475301 - RNA, 19 nt, Artificial Sequence
  Description of Artificial Sequence: Synthetic oligonucleotide
  Antisense strand to SEQ ID NO: 2475300
auccgugagaccauucgcu

SEQ ID NO: 2475302 - RNA, 19 nt, Artificial Sequence
  Description of Artificial Sequence: Synthetic oligonucleotide
  Sense strand starting at position 319 of SEQ ID NO: 1887479
acugaugagguuggaugua

SEQ ID NO: 2475303 - RNA, 19 nt, Artificial Sequence
  Description of Artificial Sequence: Synthetic oligonucleotide
  Antisense strand to SEQ ID NO: 2475302
uacauccaaccucaucagu

SEQ ID NO: 2475304 - RNA, 19 nt, Artificial Sequence
  Description of Artificial Sequence: Synthetic oligonucleotide
  Sense strand starting at position 420 of SEQ ID NO: 1887479
guuccagcuucuucucgau

SEQ ID NO: 2475305 - RNA, 19 nt, Artificial Sequence
  Description of Artificial Sequence: Synthetic oligonucleotide
  Antisense strand to SEQ ID NO: 2475304
aucgagaagaagcuggaac

SEQ ID NO: 2475306 - RNA, 19 nt, Artificial Sequence
  Description of Artificial Sequence: Synthetic oligonucleotide
  Sense strand starting at position 428 of SEQ ID NO: 1887479
uucuucucgaucugugagu

SEQ ID NO: 2475307 - RNA, 19 nt, Artificial Sequence
  Description of Artificial Sequence: Synthetic oligonucleotide
  Antisense strand to SEQ ID NO: 2475306
acucacagaucgagaagaa

SEQ ID NO: 2475308 - RNA, 19 nt, Artificial Sequence
  Description of Artificial Sequence: Synthetic oligonucleotide
  Sense strand starting at position 429 of SEQ ID NO: 1887479
ucuucucgaucugugagua

SEQ ID NO: 2475309 - RNA, 19 nt, Artificial Sequence
  Description of Artificial Sequence: Synthetic oligonucleotide
  Antisense strand to SEQ ID NO: 2475308
uacucacagaucgagaaga

SEQ ID NO: 2475310 - RNA, 19 nt, Artificial Sequence
  Description of Artificial Sequence: Synthetic oligonucleotide
  Sense strand starting at position 430 of SEQ ID NO: 1887479
cuucucgaucugugaguaa

SEQ ID NO: 2475311 - RNA, 19 nt, Artificial Sequence
  Description of Artificial Sequence: Synthetic oligonucleotide
  Antisense strand to SEQ ID NO: 2475310
uuacucacagaucgagaag

SEQ ID NO: 2475312 - RNA, 19 nt, Artificial Sequence
  Description of Artificial Sequence: Synthetic oligonucleotide
  Sense strand starting at position 573 of SEQ ID NO: 1887479
aggaacaucuccuguguaa

SEQ ID NO: 2475313 - RNA, 19 nt, Artificial Sequence
  Description of Artificial Sequence: Synthetic oligonucleotide
  Antisense strand to SEQ ID NO: 2475312
uuacacaggagauguuccu

SEQ ID NO: 2475314 - RNA, 19 nt, Artificial Sequence
  Description of Artificial Sequence: Synthetic oligonucleotide
  Sense strand starting at position 1547 of SEQ ID NO: 1887479
ccaacuauugggcaacuca

SEQ ID NO: 2475315 - RNA, 19 nt, Artificial Sequence
  Description of Artificial Sequence: Synthetic oligonucleotide
  Antisense strand to SEQ ID NO: 2475314
ugaguugcccaauaguugg

SEQ ID NO: 2475316 - RNA, 19 nt, Artificial Sequence
  Description of Artificial Sequence: Synthetic oligonucleotide
  Sense strand starting at position 1674 of SEQ ID NO: 1887479
auggcauugacuugcugua

SEQ ID NO: 2475317 - RNA, 19 nt, Artificial Sequence
  Description of Artificial Sequence: Synthetic oligonucleotide
  Antisense strand to SEQ ID NO: 2475316
uacagcaagucaaugccau

SEQ ID NO: 2475318 - RNA, 19 nt, Artificial Sequence
  Description of Artificial Sequence: Synthetic oligonucleotide
  Sense strand starting at position 1676 of SEQ ID NO: 1887479
ggcauugacuugcuguaca

SEQ ID NO: 2475319 - RNA, 19 nt, Artificial Sequence
  Description of Artificial Sequence: Synthetic oligonucleotide
  Antisense strand to SEQ ID NO: 2475318
uguacagcaagucaaugcc

SEQ ID NO: 2475320 - RNA, 19 nt, Artificial Sequence
  Description of Artificial Sequence: Synthetic oligonucleotide
  Sense strand starting at position 1741 of SEQ ID NO: 1887479
ccagcagugcgcgguaauu

SEQ ID NO: 2475321 - RNA, 19 nt, Artificial Sequence
  Description of Artificial Sequence: Synthetic oligonucleotide
  Antisense strand to SEQ ID NO: 2475320
aauuaccgcgcacugcugg

SEQ ID NO: 2475322 - RNA, 19 nt, Artificial Sequence
  Description of Artificial Sequence: Synthetic oligonucleotide
  Sense strand starting at position 1743 of SEQ ID NO: 1887479
agcagugcgcgguaauuca

SEQ ID NO: 2475323 - RNA, 19 nt, Artificial Sequence
  Description of Artificial Sequence: Synthetic oligonucleotide
  Antisense strand to SEQ ID NO: 2475322
ugaauuaccgcgcacugcu

SEQ ID NO: 2475324 - RNA, 19 nt, Artificial Sequence
  Description of Artificial Sequence: Synthetic oligonucleotide
  Sense strand starting at position 1932 of SEQ ID NO: 1887479
ggcccagaaacgcguuaaa

SEQ ID NO: 2475325 - RNA, 19 nt, Artificial Sequence
  Description of Artificial Sequence: Synthetic oligonucleotide
  Antisense strand to SEQ ID NO: 2475324
uuuaacgcguuucugggcc

SEQ ID NO: 2475326 - RNA, 19 nt, Artificial Sequence
  Description of Artificial Sequence: Synthetic oligonucleotide
  Sense strand starting at position 1990 of SEQ ID NO: 1887479
gaacgugcuuugggcgaaa

SEQ ID NO: 2475327 - RNA, 19 nt, Artificial Sequence
  Description of Artificial Sequence: Synthetic oligonucleotide
  Antisense strand to SEQ ID NO: 2475326
uuucgcccaaagcacguuc

SEQ ID NO: 2475328 - RNA, 19 nt, Artificial Sequence
  Description of Artificial Sequence: Synthetic oligonucleotide
  Sense strand starting at position 1992 of SEQ ID NO: 1887479
acgugcuuugggcgaaaga

SEQ ID NO: 2475329 - RNA, 19 nt, Artificial Sequence
  Description of Artificial Sequence: Synthetic oligonucleotide
  Antisense strand to SEQ ID NO: 2475328
ucuuucgcccaaagcacgu

SEQ ID NO: 2475330 - RNA, 19 nt, Artificial Sequence
  Description of Artificial Sequence: Synthetic oligonucleotide
  Sense strand starting at position 2010 of SEQ ID NO: 1887479
accggaaguugguuuauca

SEQ ID NO: 2475331 - RNA, 19 nt, Artificial Sequence
  Description of Artificial Sequence: Synthetic oligonucleotide
  Antisense strand to SEQ ID NO: 2475330
ugauaaaccaacuuccggu

SEQ ID NO: 2475332 - RNA, 19 nt, Artificial Sequence
  Description of Artificial Sequence: Synthetic oligonucleotide
  Sense strand starting at position 2019 of SEQ ID NO: 1887479
ugguuuaucacgugaccau

SEQ ID NO: 2475333 - RNA, 19 nt, Artificial Sequence
  Description of Artificial Sequence: Synthetic oligonucleotide
  Antisense strand to SEQ ID NO: 2475332
auggucacgugauaaacca

SEQ ID NO: 2475334 - RNA, 19 nt, Artificial Sequence
  Description of Artificial Sequence: Synthetic oligonucleotide
  Sense strand starting at position 2020 of SEQ ID NO: 1887479
gguuuaucacgugaccauu

SEQ ID NO: 2475335 - RNA, 19 nt, Artificial Sequence
  Description of Artificial Sequence: Synthetic oligonucleotide
  Antisense strand to SEQ ID NO: 2475334
aauggucacgugauaaacc

SEQ ID NO: 2475336 - RNA, 19 nt, Artificial Sequence
  Description of Artificial Sequence: Synthetic oligonucleotide
  Sense strand starting at position 2071 of SEQ ID NO: 1887479
uugugcguguguuccguaa

SEQ ID NO: 2475337 - RNA, 19 nt, Artificial Sequence
  Description of Artificial Sequence: Synthetic oligonucleotide
  Antisense strand to SEQ ID NO: 2475336
uuacggaacacacgcacaa

SEQ ID NO: 2475338 - RNA, 19 nt, Artificial Sequence
  Description of Artificial Sequence: Synthetic oligonucleotide
  Sense strand starting at position 2072 of SEQ ID NO: 1887479
ugugcguguguuccguaau

SEQ ID NO: 2475339 - RNA, 19 nt, Artificial Sequence
  Description of Artificial Sequence: Synthetic oligonucleotide
  Antisense strand to SEQ ID NO: 2475338
auuacggaacacacgcaca

SEQ ID NO: 2475340 - RNA, 19 nt, Artificial Sequence
  Description of Artificial Sequence: Synthetic oligonucleotide
  Sense strand starting at position 2073 of SEQ ID NO: 1887479
gugcguguguuccguaaua

SEQ ID NO: 2475341 - RNA, 19 nt, Artificial Sequence
  Description of Artificial Sequence: Synthetic oligonucleotide
  Antisense strand to SEQ ID NO: 2475340
uauuacggaacacacgcac

SEQ ID NO: 2475342 - RNA, 19 nt, Artificial Sequence
  Description of Artificial Sequence: Synthetic oligonucleotide
  Sense strand starting at position 2075 of SEQ ID NO: 1887479
gcguguguuccguaauacg

SEQ ID NO: 2475343 - RNA, 19 nt, Artificial Sequence
  Description of Artificial Sequence: Synthetic oligonucleotide
  Antisense strand to SEQ ID NO: 2475342
cguauuacggaacacacgc

SEQ ID NO: 2475344 - RNA, 19 nt, Artificial Sequence
  Description of Artificial Sequence: Synthetic oligonucleotide
  Sense strand starting at position 2078 of SEQ ID NO: 1887479
uguguuccguaauacggaa

SEQ ID NO: 2475345 - RNA, 19 nt, Artificial Sequence
  Description of Artificial Sequence: Synthetic oligonucleotide
  Antisense strand to SEQ ID NO: 2475344
uuccguauuacggaacaca

SEQ ID NO: 2475346 - RNA, 19 nt, Artificial Sequence
  Description of Artificial Sequence: Synthetic oligonucleotide
  Sense strand starting at position 2496 of SEQ ID NO: 1887479
gugcaauugcccgaucuca

SEQ ID NO: 2475347 - RNA, 19 nt, Artificial Sequence
  Description of Artificial Sequence: Synthetic oligonucleotide
  Antisense strand to SEQ ID NO: 2475346
ugagaucgggcaauugcac

SEQ ID NO: 2475348 - RNA, 19 nt, Artificial Sequence
  Description of Artificial Sequence: Synthetic oligonucleotide
  Sense strand starting at position 2765 of SEQ ID NO: 1887479
cucgacuucccaugaauga

SEQ ID NO: 2475349 - RNA, 19 nt, Artificial Sequence
  Description of Artificial Sequence: Synthetic oligonucleotide
  Antisense strand to SEQ ID NO: 2475348
ucauucaugggaagucgag

SEQ ID NO: 2475350 - RNA, 19 nt, Artificial Sequence
  Description of Artificial Sequence: Synthetic oligonucleotide
  Sense strand starting at position 3232 of SEQ ID NO: 1887479
guuuguuugagcuagaguc

SEQ ID NO: 2475351 - RNA, 19 nt, Artificial Sequence
  Description of Artificial Sequence: Synthetic oligonucleotide
  Antisense strand to SEQ ID NO: 2475350
gacucuagcucaaacaaac

SEQ ID NO: 2475352 - RNA, 19 nt, Artificial Sequence
  Description of Artificial Sequence: Synthetic oligonucleotide
  Sense strand starting at position 3234 of SEQ ID NO: 1887479
uuguuugagcuagagucuu

SEQ ID NO: 2475353 - RNA, 19 nt, Artificial Sequence
  Description of Artificial Sequence: Synthetic oligonucleotide
  Antisense strand to SEQ ID NO: 2475352
aagacucuagcucaaacaa

SEQ ID NO: 2475354 - RNA, 19 nt, Artificial Sequence
  Description of Artificial Sequence: Synthetic oligonucleotide
  Sense strand starting at position 275 of SEQ ID NO: 1887480
cacguaaugguagaauauc

SEQ ID NO: 2475355 - RNA, 19 nt, Artificial Sequence
  Description of Artificial Sequence: Synthetic oligonucleotide
  Antisense strand to SEQ ID NO: 2475354
gauauucuaccauuacgug

SEQ ID NO: 2475356 - RNA, 19 nt, Artificial Sequence
  Description of Artificial Sequence: Synthetic oligonucleotide
  Sense strand starting at position 283 of SEQ ID NO: 1887480
gguagaauaucauucuauc

SEQ ID NO: 2475357 - RNA, 19 nt, Artificial Sequence
  Description of Artificial Sequence: Synthetic oligonucleotide
  Antisense strand to SEQ ID NO: 2475356
gauagaaugauauucuacc

SEQ ID NO: 2475358 - RNA, 19 nt, Artificial Sequence
  Description of Artificial Sequence: Synthetic oligonucleotide
  Sense strand starting at position 413 of SEQ ID NO: 1887480
ccgagaaccuggguaucau

SEQ ID NO: 2475359 - RNA, 19 nt, Artificial Sequence
  Description of Artificial Sequence: Synthetic oligonucleotide
  Antisense strand to SEQ ID NO: 2475358
augauacccagguucucgg

SEQ ID NO: 2475360 - RNA, 19 nt, Artificial Sequence
  Description of Artificial Sequence: Synthetic oligonucleotide
  Sense strand starting at position 414 of SEQ ID NO: 1887480
cgagaaccuggguaucauu

SEQ ID NO: 2475361 - RNA, 19 nt, Artificial Sequence
  Description of Artificial Sequence: Synthetic oligonucleotide
  Antisense strand to SEQ ID NO: 2475360
aaugauacccagguucucg

SEQ ID NO: 2475362 - RNA, 19 nt, Artificial Sequence
  Description of Artificial Sequence: Synthetic oligonucleotide
  Sense strand starting at position 432 of SEQ ID NO: 1887480
ucaggagugucugugaaca

SEQ ID NO: 2475363 - RNA, 19 nt, Artificial Sequence
  Description of Artificial Sequence: Synthetic oligonucleotide
  Antisense strand to SEQ ID NO: 2475362
uguucacagacacuccuga

SEQ ID NO: 2475364 - RNA, 19 nt, Artificial Sequence
  Description of Artificial Sequence: Synthetic oligonucleotide
  Sense strand starting at position 456 of SEQ ID NO: 1887480
ugucuuccuuucucagaga

SEQ ID NO: 2475365 - RNA, 19 nt, Artificial Sequence
  Description of Artificial Sequence: Synthetic oligonucleotide
  Antisense strand to SEQ ID NO: 2475364
ucucugagaaaggaagaca

SEQ ID NO: 2475366 - RNA, 19 nt, Artificial Sequence
  Description of Artificial Sequence: Synthetic oligonucleotide
  Sense strand starting at position 837 of SEQ ID NO: 1887480
agguaugucagguauguag

SEQ ID NO: 2475367 - RNA, 19 nt, Artificial Sequence
  Description of Artificial Sequence: Synthetic oligonucleotide
  Antisense strand to SEQ ID NO: 2475366
cuacauaccugacauaccu

SEQ ID NO: 2475368 - RNA, 19 nt, Artificial Sequence
  Description of Artificial Sequence: Synthetic oligonucleotide
  Sense strand starting at position 911 of SEQ ID NO: 1887480
ggagucugugugagucauu

SEQ ID NO: 2475369 - RNA, 19 nt, Artificial Sequence
  Description of Artificial Sequence: Synthetic oligonucleotide
  Antisense strand to SEQ ID NO: 2475368
aaugacucacacagacucc

SEQ ID NO: 2475370 - RNA, 19 nt, Artificial Sequence
  Description of Artificial Sequence: Synthetic oligonucleotide
  Sense strand starting at position 912 of SEQ ID NO: 1887480
gagucugugugagucauuu

SEQ ID NO: 2475371 - RNA, 19 nt, Artificial Sequence
  Description of Artificial Sequence: Synthetic oligonucleotide
  Antisense strand to SEQ ID NO: 2475370
aaaugacucacacagacuc

SEQ ID NO: 2475372 - RNA, 19 nt, Artificial Sequence
  Description of Artificial Sequence: Synthetic oligonucleotide
  Sense strand starting at position 972 of SEQ ID NO: 1887480
guggcuucuguugaccaaa

SEQ ID NO: 2475373 - RNA, 19 nt, Artificial Sequence
  Description of Artificial Sequence: Synthetic oligonucleotide
  Antisense strand to SEQ ID NO: 2475372
uuuggucaacagaagccac

SEQ ID NO: 2475374 - RNA, 19 nt, Artificial Sequence
  Description of Artificial Sequence: Synthetic oligonucleotide
  Sense strand starting at position 1084 of SEQ ID NO: 1887480
ggguuugccaaccaggaau

SEQ ID NO: 2475375 - RNA, 19 nt, Artificial Sequence
  Description of Artificial Sequence: Synthetic oligonucleotide
  Antisense strand to SEQ ID NO: 2475374
auuccugguuggcaaaccc

SEQ ID NO: 2475376 - RNA, 19 nt, Artificial Sequence
  Description of Artificial Sequence: Synthetic oligonucleotide
  Sense strand starting at position 1110 of SEQ ID NO: 1887480
gaacaaucugcugagcuga

SEQ ID NO: 2475377 - RNA, 19 nt, Artificial Sequence
  Description of Artificial Sequence: Synthetic oligonucleotide
  Antisense strand to SEQ ID NO: 2475376
ucagcucagcagauuguuc

SEQ ID NO: 2475378 - RNA, 19 nt, Artificial Sequence
  Description of Artificial Sequence: Synthetic oligonucleotide
  Sense strand starting at position 1144 of SEQ ID NO: 1887480
ugccauuucugugucugga

SEQ ID NO: 2475379 - RNA, 19 nt, Artificial Sequence
  Description of Artificial Sequence: Synthetic oligonucleotide
  Antisense strand to SEQ ID NO: 2475378
uccagacacagaaauggca

SEQ ID NO: 2475380 - RNA, 19 nt, Artificial Sequence
  Description of Artificial Sequence: Synthetic oligonucleotide
  Sense strand starting at position 1192 of SEQ ID NO: 1887480
uuggaugugagauguuacu

SEQ ID NO: 2475381 - RNA, 19 nt, Artificial Sequence
  Description of Artificial Sequence: Synthetic oligonucleotide
  Antisense strand to SEQ ID NO: 2475380
aguaacaucucacauccaa

SEQ ID NO: 2475382 - RNA, 19 nt, Artificial Sequence
  Description of Artificial Sequence: Synthetic oligonucleotide
  Sense strand starting at position 1383 of SEQ ID NO: 1887480
cucugugaugguuaguacu

SEQ ID NO: 2475383 - RNA, 19 nt, Artificial Sequence
  Description of Artificial Sequence: Synthetic oligonucleotide
  Antisense strand to SEQ ID NO: 2475382
aguacuaaccaucacagag

SEQ ID NO: 2475384 - RNA, 19 nt, Artificial Sequence
  Description of Artificial Sequence: Synthetic oligonucleotide
  Sense strand starting at position 1487 of SEQ ID NO: 1887480
gcauuagugggcugggaaa

SEQ ID NO: 2475385 - RNA, 19 nt, Artificial Sequence
  Description of Artificial Sequence: Synthetic oligonucleotide
  Antisense strand to SEQ ID NO: 2475384
uuucccagcccacuaaugc

SEQ ID NO: 2475386 - RNA, 19 nt, Artificial Sequence
  Description of Artificial Sequence: Synthetic oligonucleotide
  Sense strand starting at position 1527 of SEQ ID NO: 1887480
gguggacacugucuaauca

SEQ ID NO: 2475387 - RNA, 19 nt, Artificial Sequence
  Description of Artificial Sequence: Synthetic oligonucleotide
  Antisense strand to SEQ ID NO: 2475386
ugauuagacaguguccacc

SEQ ID NO: 2475388 - RNA, 19 nt, Artificial Sequence
  Description of Artificial Sequence: Synthetic oligonucleotide
  Sense strand starting at position 1550 of SEQ ID NO: 1887480
ccagcagagccagaauaua

SEQ ID NO: 2475389 - RNA, 19 nt, Artificial Sequence
  Description of Artificial Sequence: Synthetic oligonucleotide
  Antisense strand to SEQ ID NO: 2475388
uauauucuggcucugcugg

SEQ ID NO: 2475390 - RNA, 19 nt, Artificial Sequence
  Description of Artificial Sequence: Synthetic oligonucleotide
  Sense strand starting at position 1876 of SEQ ID NO: 1887480
agcacaguuccuuggaaga

SEQ ID NO: 2475391 - RNA, 19 nt, Artificial Sequence
  Description of Artificial Sequence: Synthetic oligonucleotide
  Antisense strand to SEQ ID NO: 2475390
ucuuccaaggaacugugcu

SEQ ID NO: 2475392 - RNA, 19 nt, Artificial Sequence
  Description of Artificial Sequence: Synthetic oligonucleotide
  Sense strand starting at position 2100 of SEQ ID NO: 1887480
gagaauuaguuccugcuaa

SEQ ID NO: 2475393 - RNA, 19 nt, Artificial Sequence
  Description of Artificial Sequence: Synthetic oligonucleotide
  Antisense strand to SEQ ID NO: 2475392
uuagcaggaacuaauucuc

SEQ ID NO: 2475394 - RNA, 19 nt, Artificial Sequence
  Description of Artificial Sequence: Synthetic oligonucleotide
  Sense strand starting at position 2119 of SEQ ID NO: 1887480
gguuucugaucaucaacaa

SEQ ID NO: 2475395 - RNA, 19 nt, Artificial Sequence
  Description of Artificial Sequence: Synthetic oligonucleotide
  Antisense strand to SEQ ID NO: 2475394
uuguugaugaucagaaacc

SEQ ID NO: 2475396 - RNA, 19 nt, Artificial Sequence
  Description of Artificial Sequence: Synthetic oligonucleotide
  Sense strand starting at position 2141 of SEQ ID NO: 1887480
gggaacaaguccuuccagu

SEQ ID NO: 2475397 - RNA, 19 nt, Artificial Sequence
  Description of Artificial Sequence: Synthetic oligonucleotide
  Antisense strand to SEQ ID NO: 2475396
acuggaaggacuuguuccc

SEQ ID NO: 2475398 - RNA, 19 nt, Artificial Sequence
  Description of Artificial Sequence: Synthetic oligonucleotide
  Sense strand starting at position 2214 of SEQ ID NO: 1887480
accagaugucuggauguuu

SEQ ID NO: 2475399 - RNA, 19 nt, Artificial Sequence
  Description of Artificial Sequence: Synthetic oligonucleotide
  Antisense strand to SEQ ID NO: 2475398
aaacauccagacaucuggu

SEQ ID NO: 2475400 - RNA, 19 nt, Artificial Sequence
  Description of Artificial Sequence: Synthetic oligonucleotide
  Sense strand starting at position 2333 of SEQ ID NO: 1887480
ucacaauguuuggcaauca

SEQ ID NO: 2475401 - RNA, 19 nt, Artificial Sequence
  Description of Artificial Sequence: Synthetic oligonucleotide
  Antisense strand to SEQ ID NO: 2475400
ugauugccaaacauuguga

SEQ ID NO: 2475402 - RNA, 19 nt, Artificial Sequence
  Description of Artificial Sequence: Synthetic oligonucleotide
  Sense strand starting at position 2404 of SEQ ID NO: 1887480
cauuauggcccaggauagu

SEQ ID NO: 2475403 - RNA, 19 nt, Artificial Sequence
  Description of Artificial Sequence: Synthetic oligonucleotide
  Antisense strand to SEQ ID NO: 2475402
acuauccugggccauaaug

SEQ ID NO: 2475404 - RNA, 19 nt, Artificial Sequence
  Description of Artificial Sequence: Synthetic oligonucleotide
  Sense strand starting at position 2513 of SEQ ID NO: 1887480
gggagagguuuccucugaa

SEQ ID NO: 2475405 - RNA, 19 nt, Artificial Sequence
  Description of Artificial Sequence: Synthetic oligonucleotide
  Antisense strand to SEQ ID NO: 2475404
uucagaggaaaccucuccc

SEQ ID NO: 2475406 - RNA, 19 nt, Artificial Sequence
  Description of Artificial Sequence: Synthetic oligonucleotide
  Sense strand starting at position 2516 of SEQ ID NO: 1887480
agagguuuccucugaaaua

SEQ ID NO: 2475407 - RNA, 19 nt, Artificial Sequence
  Description of Artificial Sequence: Synthetic oligonucleotide
  Antisense strand to SEQ ID NO: 2475406
uauuucagaggaaaccucu

SEQ ID NO: 2475408 - RNA, 19 nt, Artificial Sequence
  Description of Artificial Sequence: Synthetic oligonucleotide
  Sense strand starting at position 2533 of SEQ ID NO: 1887480
uaagucauuugggaucaaa

SEQ ID NO: 2475409 - RNA, 19 nt, Artificial Sequence
  Description of Artificial Sequence: Synthetic oligonucleotide
  Antisense strand to SEQ ID NO: 2475408
uuugaucccaaaugacuua

SEQ ID NO: 2475410 - RNA, 19 nt, Artificial Sequence
  Description of Artificial Sequence: Synthetic oligonucleotide
  Sense strand starting at position 2579 of SEQ ID NO: 1887480
gcugacauauucuugacaa

SEQ ID NO: 2475411 - RNA, 19 nt, Artificial Sequence
  Description of Artificial Sequence: Synthetic oligonucleotide
  Antisense strand to SEQ ID NO: 2475410
uugucaagaauaugucagc

SEQ ID NO: 2475412 - RNA, 19 nt, Artificial Sequence
  Description of Artificial Sequence: Synthetic oligonucleotide
  Sense strand starting at position 2633 of SEQ ID NO: 1887480
uguguaacccaguaauaau

SEQ ID NO: 2475413 - RNA, 19 nt, Artificial Sequence
  Description of Artificial Sequence: Synthetic oligonucleotide
  Antisense strand to SEQ ID NO: 2475412
auuauuacuggguuacaca

SEQ ID NO: 2475414 - RNA, 19 nt, Artificial Sequence
  Description of Artificial Sequence: Synthetic oligonucleotide
  Sense strand starting at position 2670 of SEQ ID NO: 1887480
aguaguugcagugaaagga

SEQ ID NO: 2475415 - RNA, 19 nt, Artificial Sequence
  Description of Artificial Sequence: Synthetic oligonucleotide
  Antisense strand to SEQ ID NO: 2475414
uccuuucacugcaacuacu

SEQ ID NO: 2475416 - RNA, 19 nt, Artificial Sequence
  Description of Artificial Sequence: Synthetic oligonucleotide
  Sense strand starting at position 2674 of SEQ ID NO: 1887480
guugcagugaaaggauuaa

SEQ ID NO: 2475417 - RNA, 19 nt, Artificial Sequence
  Description of Artificial Sequence: Synthetic oligonucleotide
  Antisense strand to SEQ ID NO: 2475416
uuaauccuuucacugcaac

SEQ ID NO: 2475418 - RNA, 19 nt, Artificial Sequence
  Description of Artificial Sequence: Synthetic oligonucleotide
  Sense strand starting at position 2844 of SEQ ID NO: 1887480
ggagaagagccuuaguucu

SEQ ID NO: 2475419 - RNA, 19 nt, Artificial Sequence
  Description of Artificial Sequence: Synthetic oligonucleotide
  Antisense strand to SEQ ID NO: 2475418
agaacuaaggcucuucucc

SEQ ID NO: 2475420 - RNA, 19 nt, Artificial Sequence
  Description of Artificial Sequence: Synthetic oligonucleotide
  Sense strand starting at position 3093 of SEQ ID NO: 1887480
gggacacgacugugacuua

SEQ ID NO: 2475421 - RNA, 19 nt, Artificial Sequence
  Description of Artificial Sequence: Synthetic oligonucleotide
  Antisense strand to SEQ ID NO: 2475420
uaagucacagucguguccc

SEQ ID NO: 2475422 - RNA, 19 nt, Artificial Sequence
  Description of Artificial Sequence: Synthetic oligonucleotide
  Sense strand starting at position 3321 of SEQ ID NO: 1887480
acaguagaaauguguauua

SEQ ID NO: 2475423 - RNA, 19 nt, Artificial Sequence
  Description of Artificial Sequence: Synthetic oligonucleotide
  Antisense strand to SEQ ID NO: 2475422
uaauacacauuucuacugu

SEQ ID NO: 2475424 - RNA, 19 nt, Artificial Sequence
  Description of Artificial Sequence: Synthetic oligonucleotide
  Sense strand starting at position 3323 of SEQ ID NO: 1887480
aguagaaauguguauuagu

SEQ ID NO: 2475425 - RNA, 19 nt, Artificial Sequence
  Description of Artificial Sequence: Synthetic oligonucleotide
  Antisense strand to SEQ ID NO: 2475424
acuaauacacauuucuacu

SEQ ID NO: 2475426 - RNA, 19 nt, Artificial Sequence
  Description of Artificial Sequence: Synthetic oligonucleotide
  Sense strand starting at position 3519 of SEQ ID NO: 1887480
cgggaacuucuacacacuu

SEQ ID NO: 2475427 - RNA, 19 nt, Artificial Sequence
  Description of Artificial Sequence: Synthetic oligonucleotide
  Antisense strand to SEQ ID NO: 2475426
aaguguguagaaguucccg

SEQ ID NO: 2475428 - RNA, 19 nt, Artificial Sequence
  Description of Artificial Sequence: Synthetic oligonucleotide
  Sense strand starting at position 3701 of SEQ ID NO: 1887480
gcaccauccugaguaagga

SEQ ID NO: 2475429 - RNA, 19 nt, Artificial Sequence
  Description of Artificial Sequence: Synthetic oligonucleotide
  Antisense strand to SEQ ID NO: 2475428
uccuuacucaggauggugc

SEQ ID NO: 2475430 - RNA, 19 nt, Artificial Sequence
  Description of Artificial Sequence: Synthetic oligonucleotide
  Sense strand starting at position 3748 of SEQ ID NO: 1887480
uuucuauuccuccgagaga

SEQ ID NO: 2475431 - RNA, 19 nt, Artificial Sequence
  Description of Artificial Sequence: Synthetic oligonucleotide
  Antisense strand to SEQ ID NO: 2475430
ucucucggaggaauagaaa

SEQ ID NO: 2475432 - RNA, 19 nt, Artificial Sequence
  Description of Artificial Sequence: Synthetic oligonucleotide
  Sense strand starting at position 3971 of SEQ ID NO: 1887480
gggagaccaguuugaaugu

SEQ ID NO: 2475433 - RNA, 19 nt, Artificial Sequence
  Description of Artificial Sequence: Synthetic oligonucleotide
  Antisense strand to SEQ ID NO: 2475432
acauucaaacuggucuccc

SEQ ID NO: 2475434 - RNA, 19 nt, Artificial Sequence
  Description of Artificial Sequence: Synthetic oligonucleotide
  Sense strand starting at position 44 of SEQ ID NO: 1887481
uuaaaucagugguugaagu

SEQ ID NO: 2475435 - RNA, 19 nt, Artificial Sequence
  Description of Artificial Sequence: Synthetic oligonucleotide
  Antisense strand to SEQ ID NO: 2475434
acuucaaccacugauuuaa

SEQ ID NO: 2475436 - RNA, 19 nt, Artificial Sequence
  Description of Artificial Sequence: Synthetic oligonucleotide
  Sense strand starting at position 46 of SEQ ID NO: 1887481
aaaucagugguugaaguga

SEQ ID NO: 2475437 - RNA, 19 nt, Artificial Sequence
  Description of Artificial Sequence: Synthetic oligonucleotide
  Antisense strand to SEQ ID NO: 2475436
ucacuucaaccacugauuu

SEQ ID NO: 2475438 - RNA, 19 nt, Artificial Sequence
  Description of Artificial Sequence: Synthetic oligonucleotide
  Sense strand starting at position 51 of SEQ ID NO: 1887481
agugguugaagugauugaa

SEQ ID NO: 2475439 - RNA, 19 nt, Artificial Sequence
  Description of Artificial Sequence: Synthetic oligonucleotide
  Antisense strand to SEQ ID NO: 2475438
uucaaucacuucaaccacu

SEQ ID NO: 2475440 - RNA, 19 nt, Artificial Sequence
  Description of Artificial Sequence: Synthetic oligonucleotide
  Sense strand starting at position 54 of SEQ ID NO: 1887481
gguugaagugauugaauac

SEQ ID NO: 2475441 - RNA, 19 nt, Artificial Sequence
  Description of Artificial Sequence: Synthetic oligonucleotide
  Antisense strand to SEQ ID NO: 2475440
guauucaaucacuucaacc

SEQ ID NO: 2475442 - RNA, 19 nt, Artificial Sequence
  Description of Artificial Sequence: Synthetic oligonucleotide
  Sense strand starting at position 79 of SEQ ID NO: 1887481
augggaauaucagugaagu

SEQ ID NO: 2475443 - RNA, 19 nt, Artificial Sequence
  Description of Artificial Sequence: Synthetic oligonucleotide
  Antisense strand to SEQ ID NO: 2475442
acuucacugauauucccau

SEQ ID NO: 2475444 - RNA, 19 nt, Artificial Sequence
  Description of Artificial Sequence: Synthetic oligonucleotide
  Sense strand starting at position 80 of SEQ ID NO: 1887481
ugggaauaucagugaagua

SEQ ID NO: 2475445 - RNA, 19 nt, Artificial Sequence
  Description of Artificial Sequence: Synthetic oligonucleotide
  Antisense strand to SEQ ID NO: 2475444
uacuucacugauauuccca

SEQ ID NO: 2475446 - RNA, 19 nt, Artificial Sequence
  Description of Artificial Sequence: Synthetic oligonucleotide
  Sense strand starting at position 200 of SEQ ID NO: 1887481
ggguaagucugguuagaug

SEQ ID NO: 2475447 - RNA, 19 nt, Artificial Sequence
  Description of Artificial Sequence: Synthetic oligonucleotide
  Antisense strand to SEQ ID NO: 2475446
caucuaaccagacuuaccc

SEQ ID NO: 2475448 - RNA, 19 nt, Artificial Sequence
  Description of Artificial Sequence: Synthetic oligonucleotide
  Sense strand starting at position 283 of SEQ ID NO: 1887481
agugaaauugcaggaguau

SEQ ID NO: 2475449 - RNA, 19 nt, Artificial Sequence
  Description of Artificial Sequence: Synthetic oligonucleotide
  Antisense strand to SEQ ID NO: 2475448
auacuccugcaauuucacu

SEQ ID NO: 2475450 - RNA, 19 nt, Artificial Sequence
  Description of Artificial Sequence: Synthetic oligonucleotide
  Sense strand starting at position 284 of SEQ ID NO: 1887481
gugaaauugcaggaguaug

SEQ ID NO: 2475451 - RNA, 19 nt, Artificial Sequence
  Description of Artificial Sequence: Synthetic oligonucleotide
  Antisense strand to SEQ ID NO: 2475450
cauacuccugcaauuucac

SEQ ID NO: 2475452 - RNA, 19 nt, Artificial Sequence
  Description of Artificial Sequence: Synthetic oligonucleotide
  Sense strand starting at position 301 of SEQ ID NO: 1887481
ugcauagugcuagaagaaa

SEQ ID NO: 2475453 - RNA, 19 nt, Artificial Sequence
  Description of Artificial Sequence: Synthetic oligonucleotide
  Antisense strand to SEQ ID NO: 2475452
uuucuucuagcacuaugca

SEQ ID NO: 2475454 - RNA, 19 nt, Artificial Sequence
  Description of Artificial Sequence: Synthetic oligonucleotide
  Sense strand starting at position 642 of SEQ ID NO: 1887481
uggaguuuccagugagcuc

SEQ ID NO: 2475455 - RNA, 19 nt, Artificial Sequence
  Description of Artificial Sequence: Synthetic oligonucleotide
  Antisense strand to SEQ ID NO: 2475454
gagcucacuggaaacucca

SEQ ID NO: 2475456 - RNA, 19 nt, Artificial Sequence
  Description of Artificial Sequence: Synthetic oligonucleotide
  Sense strand starting at position 643 of SEQ ID NO: 1887481
ggaguuuccagugagcuca

SEQ ID NO: 2475457 - RNA, 19 nt, Artificial Sequence
  Description of Artificial Sequence: Synthetic oligonucleotide
  Antisense strand to SEQ ID NO: 2475456
ugagcucacuggaaacucc

SEQ ID NO: 2475458 - RNA, 19 nt, Artificial Sequence
  Description of Artificial Sequence: Synthetic oligonucleotide
  Sense strand starting at position 741 of SEQ ID NO: 1887481
gguuacaaaugggaagaaa

SEQ ID NO: 2475459 - RNA, 19 nt, Artificial Sequence
  Description of Artificial Sequence: Synthetic oligonucleotide
  Antisense strand to SEQ ID NO: 2475458
uuucuucccauuuguaacc

SEQ ID NO: 2475460 - RNA, 19 nt, Artificial Sequence
  Description of Artificial Sequence: Synthetic oligonucleotide
  Sense strand starting at position 775 of SEQ ID NO: 1887481
accaguuuguucccauaaa

SEQ ID NO: 2475461 - RNA, 19 nt, Artificial Sequence
  Description of Artificial Sequence: Synthetic oligonucleotide
  Antisense strand to SEQ ID NO: 2475460
uuuaugggaacaaacuggu

SEQ ID NO: 2475462 - RNA, 19 nt, Artificial Sequence
  Description of Artificial Sequence: Synthetic oligonucleotide
  Sense strand starting at position 794 of SEQ ID NO: 1887481
agguuaguaucccucauag

SEQ ID NO: 2475463 - RNA, 19 nt, Artificial Sequence
  Description of Artificial Sequence: Synthetic oligonucleotide
  Antisense strand to SEQ ID NO: 2475462
cuaugagggauacuaaccu

SEQ ID NO: 2475464 - RNA, 19 nt, Artificial Sequence
  Description of Artificial Sequence: Synthetic oligonucleotide
  Sense strand starting at position 796 of SEQ ID NO: 1887481
guuaguaucccucauagau

SEQ ID NO: 2475465 - RNA, 19 nt, Artificial Sequence
  Description of Artificial Sequence: Synthetic oligonucleotide
  Antisense strand to SEQ ID NO: 2475464
aucuaugagggauacuaac

SEQ ID NO: 2475466 - RNA, 19 nt, Artificial Sequence
  Description of Artificial Sequence: Synthetic oligonucleotide
  Sense strand starting at position 974 of SEQ ID NO: 1887481
ucacaagaucuccgugaca

SEQ ID NO: 2475467 - RNA, 19 nt, Artificial Sequence
  Description of Artificial Sequence: Synthetic oligonucleotide
  Antisense strand to SEQ ID NO: 2475466
ugucacggagaucuuguga

SEQ ID NO: 2475468 - RNA, 19 nt, Artificial Sequence
  Description of Artificial Sequence: Synthetic oligonucleotide
  Sense strand starting at position 976 of SEQ ID NO: 1887481
acaagaucuccgugacacu

SEQ ID NO: 2475469 - RNA, 19 nt, Artificial Sequence
  Description of Artificial Sequence: Synthetic oligonucleotide
  Antisense strand to SEQ ID NO: 2475468
agugucacggagaucuugu

SEQ ID NO: 2475470 - RNA, 19 nt, Artificial Sequence
  Description of Artificial Sequence: Synthetic oligonucleotide
  Sense strand starting at position 977 of SEQ ID NO: 1887481
caagaucuccgugacacua

SEQ ID NO: 2475471 - RNA, 19 nt, Artificial Sequence
  Description of Artificial Sequence: Synthetic oligonucleotide
  Antisense strand to SEQ ID NO: 2475470
uagugucacggagaucuug

SEQ ID NO: 2475472 - RNA, 19 nt, Artificial Sequence
  Description of Artificial Sequence: Synthetic oligonucleotide
  Sense strand starting at position 1126 of SEQ ID NO: 1887481
agacaauugugcuucuaaa

SEQ ID NO: 2475473 - RNA, 19 nt, Artificial Sequence
  Description of Artificial Sequence: Synthetic oligonucleotide
  Antisense strand to SEQ ID NO: 2475472
uuuagaagcacaauugucu

SEQ ID NO: 2475474 - RNA, 19 nt, Artificial Sequence
  Description of Artificial Sequence: Synthetic oligonucleotide
  Sense strand starting at position 1181 of SEQ ID NO: 1887481
ugugguauaaggugaggua

SEQ ID NO: 2475475 - RNA, 19 nt, Artificial Sequence
  Description of Artificial Sequence: Synthetic oligonucleotide
  Antisense strand to SEQ ID NO: 2475474
uaccucaccuuauaccaca

SEQ ID NO: 2475476 - RNA, 19 nt, Artificial Sequence
  Description of Artificial Sequence: Synthetic oligonucleotide
  Sense strand starting at position 1182 of SEQ ID NO: 1887481
gugguauaaggugagguau

SEQ ID NO: 2475477 - RNA, 19 nt, Artificial Sequence
  Description of Artificial Sequence: Synthetic oligonucleotide
  Antisense strand to SEQ ID NO: 2475476
auaccucaccuuauaccac

SEQ ID NO: 2475478 - RNA, 19 nt, Artificial Sequence
  Description of Artificial Sequence: Synthetic oligonucleotide
  Sense strand starting at position 1193 of SEQ ID NO: 1887481
ugagguauaucacagcaag

SEQ ID NO: 2475479 - RNA, 19 nt, Artificial Sequence
  Description of Artificial Sequence: Synthetic oligonucleotide
  Antisense strand to SEQ ID NO: 2475478
cuugcugugauauaccuca

SEQ ID NO: 2475480 - RNA, 19 nt, Artificial Sequence
  Description of Artificial Sequence: Synthetic oligonucleotide
  Sense strand starting at position 1196 of SEQ ID NO: 1887481
gguauaucacagcaagauu

SEQ ID NO: 2475481 - RNA, 19 nt, Artificial Sequence
  Description of Artificial Sequence: Synthetic oligonucleotide
  Antisense strand to SEQ ID NO: 2475480
aaucuugcugugauauacc

SEQ ID NO: 2475482 - RNA, 19 nt, Artificial Sequence
  Description of Artificial Sequence: Synthetic oligonucleotide
  Sense strand starting at position 1231 of SEQ ID NO: 1887481
uuuggaaaucguuagcauu

SEQ ID NO: 2475483 - RNA, 19 nt, Artificial Sequence
  Description of Artificial Sequence: Synthetic oligonucleotide
  Antisense strand to SEQ ID NO: 2475482
aaugcuaacgauuuccaaa

SEQ ID NO: 2475484 - RNA, 19 nt, Artificial Sequence
  Description of Artificial Sequence: Synthetic oligonucleotide
  Sense strand starting at position 1266 of SEQ ID NO: 1887481
guuucuucugccgaaauag

SEQ ID NO: 2475485 - RNA, 19 nt, Artificial Sequence
  Description of Artificial Sequence: Synthetic oligonucleotide
  Antisense strand to SEQ ID NO: 2475484
cuauuucggcagaagaaac

SEQ ID NO: 2475486 - RNA, 19 nt, Artificial Sequence
  Description of Artificial Sequence: Synthetic oligonucleotide
  Sense strand starting at position 1276 of SEQ ID NO: 1887481
ccgaaauagucaguucccu

SEQ ID NO: 2475487 - RNA, 19 nt, Artificial Sequence
  Description of Artificial Sequence: Synthetic oligonucleotide
  Antisense strand to SEQ ID NO: 2475486
agggaacugacuauuucgg

SEQ ID NO: 2475488 - RNA, 19 nt, Artificial Sequence
  Description of Artificial Sequence: Synthetic oligonucleotide
  Sense strand starting at position 1281 of SEQ ID NO: 1887481
auagucaguucccugcaga

SEQ ID NO: 2475489 - RNA, 19 nt, Artificial Sequence
  Description of Artificial Sequence: Synthetic oligonucleotide
  Antisense strand to SEQ ID NO: 2475488
ucugcagggaacugacuau

SEQ ID NO: 2475490 - RNA, 19 nt, Artificial Sequence
  Description of Artificial Sequence: Synthetic oligonucleotide
  Sense strand starting at position 1284 of SEQ ID NO: 1887481
gucaguucccugcagacaa

SEQ ID NO: 2475491 - RNA, 19 nt, Artificial Sequence
  Description of Artificial Sequence: Synthetic oligonucleotide
  Antisense strand to SEQ ID NO: 2475490
uugucugcagggaacugac

SEQ ID NO: 2475492 - RNA, 19 nt, Artificial Sequence
  Description of Artificial Sequence: Synthetic oligonucleotide
  Sense strand starting at position 1469 of SEQ ID NO: 1887481
gggagacuuucccucaguc

SEQ ID NO: 2475493 - RNA, 19 nt, Artificial Sequence
  Description of Artificial Sequence: Synthetic oligonucleotide
  Antisense strand to SEQ ID NO: 2475492
gacugagggaaagucuccc

SEQ ID NO: 2475494 - RNA, 19 nt, Artificial Sequence
  Description of Artificial Sequence: Synthetic oligonucleotide
  Sense strand starting at position 1807 of SEQ ID NO: 1887481
agcgguguuacagauuugu

SEQ ID NO: 2475495 - RNA, 19 nt, Artificial Sequence
  Description of Artificial Sequence: Synthetic oligonucleotide
  Antisense strand to SEQ ID NO: 2475494
acaaaucuguaacaccgcu

SEQ ID NO: 2475496 - RNA, 19 nt, Artificial Sequence
  Description of Artificial Sequence: Synthetic oligonucleotide
  Sense strand starting at position 1945 of SEQ ID NO: 1887481
uucggaacuacgcaaugau

SEQ ID NO: 2475497 - RNA, 19 nt, Artificial Sequence
  Description of Artificial Sequence: Synthetic oligonucleotide
  Antisense strand to SEQ ID NO: 2475496
aucauugcguaguuccgaa

SEQ ID NO: 2475498 - RNA, 19 nt, Artificial Sequence
  Description of Artificial Sequence: Synthetic oligonucleotide
  Sense strand starting at position 1954 of SEQ ID NO: 1887481
acgcaaugauuuggagaac

SEQ ID NO: 2475499 - RNA, 19 nt, Artificial Sequence
  Description of Artificial Sequence: Synthetic oligonucleotide
  Antisense strand to SEQ ID NO: 2475498
guucuccaaaucauugcgu

SEQ ID NO: 2475500 - RNA, 19 nt, Artificial Sequence
  Description of Artificial Sequence: Synthetic oligonucleotide
  Sense strand starting at position 2180 of SEQ ID NO: 1887481
ucagguuauucggcuuauu

SEQ ID NO: 2475501 - RNA, 19 nt, Artificial Sequence
  Description of Artificial Sequence: Synthetic oligonucleotide
  Antisense strand to SEQ ID NO: 2475500
aauaagccgaauaaccuga

SEQ ID NO: 2475502 - RNA, 19 nt, Artificial Sequence
  Description of Artificial Sequence: Synthetic oligonucleotide
  Sense strand starting at position 2486 of SEQ ID NO: 1887481
guaggucucccggaucaca

SEQ ID NO: 2475503 - RNA, 19 nt, Artificial Sequence
  Description of Artificial Sequence: Synthetic oligonucleotide
  Antisense strand to SEQ ID NO: 2475502
ugugauccgggagaccuac

SEQ ID NO: 2475504 - RNA, 19 nt, Artificial Sequence
  Description of Artificial Sequence: Synthetic oligonucleotide
  Sense strand starting at position 2513 of SEQ ID NO: 1887481
cccauucuccugggagcuu

SEQ ID NO: 2475505 - RNA, 19 nt, Artificial Sequence
  Description of Artificial Sequence: Synthetic oligonucleotide
  Antisense strand to SEQ ID NO: 2475504
aagcucccaggagaauggg

SEQ ID NO: 2475506 - RNA, 19 nt, Artificial Sequence
  Description of Artificial Sequence: Synthetic oligonucleotide
  Sense strand starting at position 2524 of SEQ ID NO: 1887481
gggagcuucccagacaagu

SEQ ID NO: 2475507 - RNA, 19 nt, Artificial Sequence
  Description of Artificial Sequence: Synthetic oligonucleotide
  Antisense strand to SEQ ID NO: 2475506
acuugucugggaagcuccc

SEQ ID NO: 2475508 - RNA, 19 nt, Artificial Sequence
  Description of Artificial Sequence: Synthetic oligonucleotide
  Sense strand starting at position 2541 of SEQ ID NO: 1887481
gugucauauucucccaugu

SEQ ID NO: 2475509 - RNA, 19 nt, Artificial Sequence
  Description of Artificial Sequence: Synthetic oligonucleotide
  Antisense strand to SEQ ID NO: 2475508
acaugggagaauaugacac

SEQ ID NO: 2475510 - RNA, 19 nt, Artificial Sequence
  Description of Artificial Sequence: Synthetic oligonucleotide
  Sense strand starting at position 2603 of SEQ ID NO: 1887481
aguggacuugacugcaaga

SEQ ID NO: 2475511 - RNA, 19 nt, Artificial Sequence
  Description of Artificial Sequence: Synthetic oligonucleotide
  Antisense strand to SEQ ID NO: 2475510
ucuugcagucaaguccacu

SEQ ID NO: 2475512 - RNA, 19 nt, Artificial Sequence
  Description of Artificial Sequence: Synthetic oligonucleotide
  Sense strand starting at position 2608 of SEQ ID NO: 1887481
acuugacugcaagagcuua

SEQ ID NO: 2475513 - RNA, 19 nt, Artificial Sequence
  Description of Artificial Sequence: Synthetic oligonucleotide
  Antisense strand to SEQ ID NO: 2475512
uaagcucuugcagucaagu

SEQ ID NO: 2475514 - RNA, 19 nt, Artificial Sequence
  Description of Artificial Sequence: Synthetic oligonucleotide
  Sense strand starting at position 7 of SEQ ID NO: 1887482
uacaacagugucugucaga

SEQ ID NO: 2475515 - RNA, 19 nt, Artificial Sequence
  Description of Artificial Sequence: Synthetic oligonucleotide
  Antisense strand to SEQ ID NO: 2475514
ucugacagacacuguugua

SEQ ID NO: 2475516 - RNA, 19 nt, Artificial Sequence
  Description of Artificial Sequence: Synthetic oligonucleotide
  Sense strand starting at position 8 of SEQ ID NO: 1887482
acaacagugucugucagau

SEQ ID NO: 2475517 - RNA, 19 nt, Artificial Sequence
  Description of Artificial Sequence: Synthetic oligonucleotide
  Antisense strand to SEQ ID NO: 2475516
aucugacagacacuguugu

SEQ ID NO: 2475518 - RNA, 19 nt, Artificial Sequence
  Description of Artificial Sequence: Synthetic oligonucleotide
  Sense strand starting at position 14 of SEQ ID NO: 1887482
gugucugucagauaguaag

SEQ ID NO: 2475519 - RNA, 19 nt, Artificial Sequence
  Description of Artificial Sequence: Synthetic oligonucleotide
  Antisense strand to SEQ ID NO: 2475518
cuuacuaucugacagacac

SEQ ID NO: 2475520 - RNA, 19 nt, Artificial Sequence
  Description of Artificial Sequence: Synthetic oligonucleotide
  Sense strand starting at position 21 of SEQ ID NO: 1887482
ucagauaguaagugcuuga

SEQ ID NO: 2475521 - RNA, 19 nt, Artificial Sequence
  Description of Artificial Sequence: Synthetic oligonucleotide
  Antisense strand to SEQ ID NO: 2475520
ucaagcacuuacuaucuga

SEQ ID NO: 2475522 - RNA, 19 nt, Artificial Sequence
  Description of Artificial Sequence: Synthetic oligonucleotide
  Sense strand starting at position 24 of SEQ ID NO: 1887482
gauaguaagugcuugaguu

SEQ ID NO: 2475523 - RNA, 19 nt, Artificial Sequence
  Description of Artificial Sequence: Synthetic oligonucleotide
  Antisense strand to SEQ ID NO: 2475522
aacucaagcacuuacuauc

SEQ ID NO: 2475524 - RNA, 19 nt, Artificial Sequence
  Description of Artificial Sequence: Synthetic oligonucleotide
  Sense strand starting at position 25 of SEQ ID NO: 1887482
auaguaagugcuugaguua

SEQ ID NO: 2475525 - RNA, 19 nt, Artificial Sequence
  Description of Artificial Sequence: Synthetic oligonucleotide
  Antisense strand to SEQ ID NO: 2475524
uaacucaagcacuuacuau

SEQ ID NO: 2475526 - RNA, 19 nt, Artificial Sequence
  Description of Artificial Sequence: Synthetic oligonucleotide
  Sense strand starting at position 26 of SEQ ID NO: 1887482
uaguaagugcuugaguuau

SEQ ID NO: 2475527 - RNA, 19 nt, Artificial Sequence
  Description of Artificial Sequence: Synthetic oligonucleotide
  Antisense strand to SEQ ID NO: 2475526
auaacucaagcacuuacua

SEQ ID NO: 2475528 - RNA, 19 nt, Artificial Sequence
  Description of Artificial Sequence: Synthetic oligonucleotide
  Sense strand starting at position 702 of SEQ ID NO: 1887482
cuaugagcucaguaccuuu

SEQ ID NO: 2475529 - RNA, 19 nt, Artificial Sequence
  Description of Artificial Sequence: Synthetic oligonucleotide
  Antisense strand to SEQ ID NO: 2475528
aaagguacugagcucauag

SEQ ID NO: 2475530 - RNA, 19 nt, Artificial Sequence
  Description of Artificial Sequence: Synthetic oligonucleotide
  Sense strand starting at position 736 of SEQ ID NO: 1887482
ggucuauggaccugagauc

SEQ ID NO: 2475531 - RNA, 19 nt, Artificial Sequence
  Description of Artificial Sequence: Synthetic oligonucleotide
  Antisense strand to SEQ ID NO: 2475530
gaucucagguccauagacc

SEQ ID NO: 2475532 - RNA, 19 nt, Artificial Sequence
  Description of Artificial Sequence: Synthetic oligonucleotide
  Sense strand starting at position 827 of SEQ ID NO: 1887482
ugaacccaucucugucaga

SEQ ID NO: 2475533 - RNA, 19 nt, Artificial Sequence
  Description of Artificial Sequence: Synthetic oligonucleotide
  Antisense strand to SEQ ID NO: 2475532
ucugacagagauggguuca

SEQ ID NO: 2475534 - RNA, 19 nt, Artificial Sequence
  Description of Artificial Sequence: Synthetic oligonucleotide
  Sense strand starting at position 1435 of SEQ ID NO: 1887482
gaagauaacuucuuugguu

SEQ ID NO: 2475535 - RNA, 19 nt, Artificial Sequence
  Description of Artificial Sequence: Synthetic oligonucleotide
  Antisense strand to SEQ ID NO: 2475534
aaccaaagaaguuaucuuc

SEQ ID NO: 2475536 - RNA, 19 nt, Artificial Sequence
  Description of Artificial Sequence: Synthetic oligonucleotide
  Sense strand starting at position 1542 of SEQ ID NO: 1887482
cccggaggucuccgaugaa

SEQ ID NO: 2475537 - RNA, 19 nt, Artificial Sequence
  Description of Artificial Sequence: Synthetic oligonucleotide
  Antisense strand to SEQ ID NO: 2475536
uucaucggagaccuccggg

SEQ ID NO: 2475538 - RNA, 19 nt, Artificial Sequence
  Description of Artificial Sequence: Synthetic oligonucleotide
  Sense strand starting at position 1618 of SEQ ID NO: 1887482
guugaucuugcagagccua

SEQ ID NO: 2475539 - RNA, 19 nt, Artificial Sequence
  Description of Artificial Sequence: Synthetic oligonucleotide
  Antisense strand to SEQ ID NO: 2475538
uaggcucugcaagaucaac

SEQ ID NO: 2475540 - RNA, 19 nt, Artificial Sequence
  Description of Artificial Sequence: Synthetic oligonucleotide
  Sense strand starting at position 1651 of SEQ ID NO: 1887482
agaggcagugaucgccaaa

SEQ ID NO: 2475541 - RNA, 19 nt, Artificial Sequence
  Description of Artificial Sequence: Synthetic oligonucleotide
  Antisense strand to SEQ ID NO: 2475540
uuuggcgaucacugccucu

SEQ ID NO: 2475542 - RNA, 19 nt, Artificial Sequence
  Description of Artificial Sequence: Synthetic oligonucleotide
  Sense strand starting at position 1693 of SEQ ID NO: 1887482
ggacgcgauccuggaagaa

SEQ ID NO: 2475543 - RNA, 19 nt, Artificial Sequence
  Description of Artificial Sequence: Synthetic oligonucleotide
  Antisense strand to SEQ ID NO: 2475542
uucuuccaggaucgcgucc

SEQ ID NO: 2475544 - RNA, 19 nt, Artificial Sequence
  Description of Artificial Sequence: Synthetic oligonucleotide
  Sense strand starting at position 1867 of SEQ ID NO: 1887482
uugggugaaaccugagauc

SEQ ID NO: 2475545 - RNA, 19 nt, Artificial Sequence
  Description of Artificial Sequence: Synthetic oligonucleotide
  Antisense strand to SEQ ID NO: 2475544
gaucucagguuucacccaa

SEQ ID NO: 2475546 - RNA, 19 nt, Artificial Sequence
  Description of Artificial Sequence: Synthetic oligonucleotide
  Sense strand starting at position 2616 of SEQ ID NO: 1887482
ggguaguugcgagggugaa

SEQ ID NO: 2475547 - RNA, 19 nt, Artificial Sequence
  Description of Artificial Sequence: Synthetic oligonucleotide
  Antisense strand to SEQ ID NO: 2475546
uucacccucgcaacuaccc

SEQ ID NO: 2475548 - RNA, 19 nt, Artificial Sequence
  Description of Artificial Sequence: Synthetic oligonucleotide
  Sense strand starting at position 2617 of SEQ ID NO: 1887482
gguaguugcgagggugaaa

SEQ ID NO: 2475549 - RNA, 19 nt, Artificial Sequence
  Description of Artificial Sequence: Synthetic oligonucleotide
  Antisense strand to SEQ ID NO: 2475548
uuucacccucgcaacuacc

SEQ ID NO: 2475550 - RNA, 19 nt, Artificial Sequence
  Description of Artificial Sequence: Synthetic oligonucleotide
  Sense strand starting at position 2626 of SEQ ID NO: 1887482
gagggugaaauugguuaau

SEQ ID NO: 2475551 - RNA, 19 nt, Artificial Sequence
  Description of Artificial Sequence: Synthetic oligonucleotide
  Antisense strand to SEQ ID NO: 2475550
auuaaccaauuucacccuc

SEQ ID NO: 2475552 - RNA, 19 nt, Artificial Sequence
  Description of Artificial Sequence: Synthetic oligonucleotide
  Sense strand starting at position 2628 of SEQ ID NO: 1887482
gggugaaauugguuaauua

SEQ ID NO: 2475553 - RNA, 19 nt, Artificial Sequence
  Description of Artificial Sequence: Synthetic oligonucleotide
  Antisense strand to SEQ ID NO: 2475552
uaauuaaccaauuucaccc

SEQ ID NO: 2475554 - RNA, 19 nt, Artificial Sequence
  Description of Artificial Sequence: Synthetic oligonucleotide
  Sense strand starting at position 2635 of SEQ ID NO: 1887482
auugguuaauuauugggaa

SEQ ID NO: 2475555 - RNA, 19 nt, Artificial Sequence
  Description of Artificial Sequence: Synthetic oligonucleotide
  Antisense strand to SEQ ID NO: 2475554
uucccaauaauuaaccaau

SEQ ID NO: 2475556 - RNA, 19 nt, Artificial Sequence
  Description of Artificial Sequence: Synthetic oligonucleotide
  Sense strand starting at position 2637 of SEQ ID NO: 1887482
ugguuaauuauugggaagu

SEQ ID NO: 2475557 - RNA, 19 nt, Artificial Sequence
  Description of Artificial Sequence: Synthetic oligonucleotide
  Antisense strand to SEQ ID NO: 2475556
acuucccaauaauuaacca

SEQ ID NO: 2475558 - RNA, 19 nt, Artificial Sequence
  Description of Artificial Sequence: Synthetic oligonucleotide
  Sense strand starting at position 2647 of SEQ ID NO: 1887482
uugggaagugccuggagua

SEQ ID NO: 2475559 - RNA, 19 nt, Artificial Sequence
  Description of Artificial Sequence: Synthetic oligonucleotide
  Antisense strand to SEQ ID NO: 2475558
uacuccaggcacuucccaa

SEQ ID NO: 2475560 - RNA, 19 nt, Artificial Sequence
  Description of Artificial Sequence: Synthetic oligonucleotide
  Sense strand starting at position 2648 of SEQ ID NO: 1887482
ugggaagugccuggaguau

SEQ ID NO: 2475561 - RNA, 19 nt, Artificial Sequence
  Description of Artificial Sequence: Synthetic oligonucleotide
  Antisense strand to SEQ ID NO: 2475560
auacuccaggcacuuccca

SEQ ID NO: 2475562 - RNA, 19 nt, Artificial Sequence
  Description of Artificial Sequence: Synthetic oligonucleotide
  Sense strand starting at position 2675 of SEQ ID NO: 1887482
cuguauuuguguuugcuau

SEQ ID NO: 2475563 - RNA, 19 nt, Artificial Sequence
  Description of Artificial Sequence: Synthetic oligonucleotide
  Antisense strand to SEQ ID NO: 2475562
auagcaaacacaaauacag

SEQ ID NO: 2475564 - RNA, 19 nt, Artificial Sequence
  Description of Artificial Sequence: Synthetic oligonucleotide
  Sense strand starting at position 2676 of SEQ ID NO: 1887482
uguauuuguguuugcuaug

SEQ ID NO: 2475565 - RNA, 19 nt, Artificial Sequence
  Description of Artificial Sequence: Synthetic oligonucleotide
  Antisense strand to SEQ ID NO: 2475564
cauagcaaacacaaauaca

SEQ ID NO: 2475566 - RNA, 19 nt, Artificial Sequence
  Description of Artificial Sequence: Synthetic oligonucleotide
  Sense strand starting at position 2677 of SEQ ID NO: 1887482
guauuuguguuugcuaugu

SEQ ID NO: 2475567 - RNA, 19 nt, Artificial Sequence
  Description of Artificial Sequence: Synthetic oligonucleotide
  Antisense strand to SEQ ID NO: 2475566
acauagcaaacacaaauac

SEQ ID NO: 2475568 - RNA, 19 nt, Artificial Sequence
  Description of Artificial Sequence: Synthetic oligonucleotide
  Sense strand starting at position 2691 of SEQ ID NO: 1887482
uauguuugagcagaguuga

SEQ ID NO: 2475569 - RNA, 19 nt, Artificial Sequence
  Description of Artificial Sequence: Synthetic oligonucleotide
  Antisense strand to SEQ ID NO: 2475568
ucaacucugcucaaacaua

SEQ ID NO: 2475570 - RNA, 19 nt, Artificial Sequence
  Description of Artificial Sequence: Synthetic oligonucleotide
  Sense strand starting at position 2704 of SEQ ID NO: 1887482
aguugaaaugugcagcuuu

SEQ ID NO: 2475571 - RNA, 19 nt, Artificial Sequence
  Description of Artificial Sequence: Synthetic oligonucleotide
  Antisense strand to SEQ ID NO: 2475570
aaagcugcacauuucaacu

SEQ ID NO: 2475572 - RNA, 19 nt, Artificial Sequence
  Description of Artificial Sequence: Synthetic oligonucleotide
  Sense strand starting at position 3020 of SEQ ID NO: 1887482
guuuguuuaacggagucuu

SEQ ID NO: 2475573 - RNA, 19 nt, Artificial Sequence
  Description of Artificial Sequence: Synthetic oligonucleotide
  Antisense strand to SEQ ID NO: 2475572
aagacuccguuaaacaaac

SEQ ID NO: 2475574 - RNA, 19 nt, Artificial Sequence
  Description of Artificial Sequence: Synthetic oligonucleotide
  Sense strand starting at position 3364 of SEQ ID NO: 1887482
cugagcucaagcgaugauu

SEQ ID NO: 2475575 - RNA, 19 nt, Artificial Sequence
  Description of Artificial Sequence: Synthetic oligonucleotide
  Antisense strand to SEQ ID NO: 2475574
aaucaucgcuugagcucag

SEQ ID NO: 2475576 - RNA, 19 nt, Artificial Sequence
  Description of Artificial Sequence: Synthetic oligonucleotide
  Sense strand starting at position 3407 of SEQ ID NO: 1887482
agaauuauauagccuuagu

SEQ ID NO: 2475577 - RNA, 19 nt, Artificial Sequence
  Description of Artificial Sequence: Synthetic oligonucleotide
  Antisense strand to SEQ ID NO: 2475576
acuaaggcuauauaauucu

SEQ ID NO: 2475578 - RNA, 19 nt, Artificial Sequence
  Description of Artificial Sequence: Synthetic oligonucleotide
  Sense strand starting at position 3517 of SEQ ID NO: 1887482
uugacucaguugcuugaga

SEQ ID NO: 2475579 - RNA, 19 nt, Artificial Sequence
  Description of Artificial Sequence: Synthetic oligonucleotide
  Antisense strand to SEQ ID NO: 2475578
ucucaagcaacugagucaa

SEQ ID NO: 2475580 - RNA, 19 nt, Artificial Sequence
  Description of Artificial Sequence: Synthetic oligonucleotide
  Sense strand starting at position 3518 of SEQ ID NO: 1887482
ugacucaguugcuugagaa

SEQ ID NO: 2475581 - RNA, 19 nt, Artificial Sequence
  Description of Artificial Sequence: Synthetic oligonucleotide
  Antisense strand to SEQ ID NO: 2475580
uucucaagcaacugaguca

SEQ ID NO: 2475582 - RNA, 19 nt, Artificial Sequence
  Description of Artificial Sequence: Synthetic oligonucleotide
  Sense strand starting at position 3519 of SEQ ID NO: 1887482
gacucaguugcuugagaau

SEQ ID NO: 2475583 - RNA, 19 nt, Artificial Sequence
  Description of Artificial Sequence: Synthetic oligonucleotide
  Antisense strand to SEQ ID NO: 2475582
auucucaagcaacugaguc

SEQ ID NO: 2475584 - RNA, 19 nt, Artificial Sequence
  Description of Artificial Sequence: Synthetic oligonucleotide
  Sense strand starting at position 3601 of SEQ ID NO: 1887482
ucacguauuccuuauguga

SEQ ID NO: 2475585 - RNA, 19 nt, Artificial Sequence
  Description of Artificial Sequence: Synthetic oligonucleotide
  Antisense strand to SEQ ID NO: 2475584
ucacauaaggaauacguga

SEQ ID NO: 2475586 - RNA, 19 nt, Artificial Sequence
  Description of Artificial Sequence: Synthetic oligonucleotide
  Sense strand starting at position 3604 of SEQ ID NO: 1887482
cguauuccuuaugugaaua

SEQ ID NO: 2475587 - RNA, 19 nt, Artificial Sequence
  Description of Artificial Sequence: Synthetic oligonucleotide
  Antisense strand to SEQ ID NO: 2475586
uauucacauaaggaauacg

SEQ ID NO: 2475588 - RNA, 19 nt, Artificial Sequence
  Description of Artificial Sequence: Synthetic oligonucleotide
  Sense strand starting at position 3802 of SEQ ID NO: 1887482
uuuaauuucgcccaggcga

SEQ ID NO: 2475589 - RNA, 19 nt, Artificial Sequence
  Description of Artificial Sequence: Synthetic oligonucleotide
  Antisense strand to SEQ ID NO: 2475588
ucgccugggcgaaauuaaa

SEQ ID NO: 2475590 - RNA, 19 nt, Artificial Sequence
  Description of Artificial Sequence: Synthetic oligonucleotide
  Sense strand starting at position 3852 of SEQ ID NO: 1887482
cucccucuuuccuuguaga

SEQ ID NO: 2475591 - RNA, 19 nt, Artificial Sequence
  Description of Artificial Sequence: Synthetic oligonucleotide
  Antisense strand to SEQ ID NO: 2475590
ucuacaaggaaagagggag

SEQ ID NO: 2475592 - RNA, 19 nt, Artificial Sequence
  Description of Artificial Sequence: Synthetic oligonucleotide
  Sense strand starting at position 3962 of SEQ ID NO: 1887482
cugacuuccucacccagua

SEQ ID NO: 2475593 - RNA, 19 nt, Artificial Sequence
  Description of Artificial Sequence: Synthetic oligonucleotide
  Antisense strand to SEQ ID NO: 2475592
uacugggugaggaagucag

SEQ ID NO: 2475594 - RNA, 19 nt, Artificial Sequence
  Description of Artificial Sequence: Synthetic oligonucleotide
  Sense strand starting at position 46 of SEQ ID NO: 1887483
ggcugaagacuaggugagu

SEQ ID NO: 2475595 - RNA, 19 nt, Artificial Sequence
  Description of Artificial Sequence: Synthetic oligonucleotide
  Antisense strand to SEQ ID NO: 2475594
acucaccuagucuucagcc

SEQ ID NO: 2475596 - RNA, 19 nt, Artificial Sequence
  Description of Artificial Sequence: Synthetic oligonucleotide
  Sense strand starting at position 47 of SEQ ID NO: 1887483
gcugaagacuaggugaguu

SEQ ID NO: 2475597 - RNA, 19 nt, Artificial Sequence
  Description of Artificial Sequence: Synthetic oligonucleotide
  Antisense strand to SEQ ID NO: 2475596
aacucaccuagucuucagc

SEQ ID NO: 2475598 - RNA, 19 nt, Artificial Sequence
  Description of Artificial Sequence: Synthetic oligonucleotide
  Sense strand starting at position 119 of SEQ ID NO: 1887483
gcaucuuccaggcagguua

SEQ ID NO: 2475599 - RNA, 19 nt, Artificial Sequence
  Description of Artificial Sequence: Synthetic oligonucleotide
  Antisense strand to SEQ ID NO: 2475598
uaaccugccuggaagaugc

SEQ ID NO: 2475600 - RNA, 19 nt, Artificial Sequence
  Description of Artificial Sequence: Synthetic oligonucleotide
  Sense strand starting at position 141 of SEQ ID NO: 1887483
acacaagagucacagauuu

SEQ ID NO: 2475601 - RNA, 19 nt, Artificial Sequence
  Description of Artificial Sequence: Synthetic oligonucleotide
  Antisense strand to SEQ ID NO: 2475600
aaaucugugacucuugugu

SEQ ID NO: 2475602 - RNA, 19 nt, Artificial Sequence
  Description of Artificial Sequence: Synthetic oligonucleotide
  Sense strand starting at position 149 of SEQ ID NO: 1887483
gucacagauuuggacauca

SEQ ID NO: 2475603 - RNA, 19 nt, Artificial Sequence
  Description of Artificial Sequence: Synthetic oligonucleotide
  Antisense strand to SEQ ID NO: 2475602
ugauguccaaaucugugac

SEQ ID NO: 2475604 - RNA, 19 nt, Artificial Sequence
  Description of Artificial Sequence: Synthetic oligonucleotide
  Sense strand starting at position 171 of SEQ ID NO: 1887483
ccuucugaaguaugagaag

SEQ ID NO: 2475605 - RNA, 19 nt, Artificial Sequence
  Description of Artificial Sequence: Synthetic oligonucleotide
  Antisense strand to SEQ ID NO: 2475604
cuucucauacuucagaagg

SEQ ID NO: 2475606 - RNA, 19 nt, Artificial Sequence
  Description of Artificial Sequence: Synthetic oligonucleotide
  Sense strand starting at position 180 of SEQ ID NO: 1887483
guaugagaagugcaucuga

SEQ ID NO: 2475607 - RNA, 19 nt, Artificial Sequence
  Description of Artificial Sequence: Synthetic oligonucleotide
  Antisense strand to SEQ ID NO: 2475606
ucagaugcacuucucauac

SEQ ID NO: 2475608 - RNA, 19 nt, Artificial Sequence
  Description of Artificial Sequence: Synthetic oligonucleotide
  Sense strand starting at position 200 of SEQ ID NO: 1887483
ugcagcuguguuucccaau

SEQ ID NO: 2475609 - RNA, 19 nt, Artificial Sequence
  Description of Artificial Sequence: Synthetic oligonucleotide
  Antisense strand to SEQ ID NO: 2475608
auugggaaacacagcugca

SEQ ID NO: 2475610 - RNA, 19 nt, Artificial Sequence
  Description of Artificial Sequence: Synthetic oligonucleotide
  Sense strand starting at position 336 of SEQ ID NO: 1887483
ccacacacuguccgagaaa

SEQ ID NO: 2475611 - RNA, 19 nt, Artificial Sequence
  Description of Artificial Sequence: Synthetic oligonucleotide
  Antisense strand to SEQ ID NO: 2475610
uuucucggacagugugugg

SEQ ID NO: 2475612 - RNA, 19 nt, Artificial Sequence
  Description of Artificial Sequence: Synthetic oligonucleotide
  Sense strand starting at position 799 of SEQ ID NO: 1887483
gcaaacuggacuuaugagu

SEQ ID NO: 2475613 - RNA, 19 nt, Artificial Sequence
  Description of Artificial Sequence: Synthetic oligonucleotide
  Antisense strand to SEQ ID NO: 2475612
acucauaaguccaguuugc

SEQ ID NO: 2475614 - RNA, 19 nt, Artificial Sequence
  Description of Artificial Sequence: Synthetic oligonucleotide
  Sense strand starting at position 806 of SEQ ID NO: 1887483
ggacuuaugaguugaggug

SEQ ID NO: 2475615 - RNA, 19 nt, Artificial Sequence
  Description of Artificial Sequence: Synthetic oligonucleotide
  Antisense strand to SEQ ID NO: 2475614
caccucaacucauaagucc

SEQ ID NO: 2475616 - RNA, 19 nt, Artificial Sequence
  Description of Artificial Sequence: Synthetic oligonucleotide
  Sense strand starting at position 920 of SEQ ID NO: 1887483
ugccuaugucuguaaauaa

SEQ ID NO: 2475617 - RNA, 19 nt, Artificial Sequence
  Description of Artificial Sequence: Synthetic oligonucleotide
  Antisense strand to SEQ ID NO: 2475616
uuauuuacagacauaggca

SEQ ID NO: 2475618 - RNA, 19 nt, Artificial Sequence
  Description of Artificial Sequence: Synthetic oligonucleotide
  Sense strand starting at position 977 of SEQ ID NO: 1887483
gaggucuauggaugcuuua

SEQ ID NO: 2475619 - RNA, 19 nt, Artificial Sequence
  Description of Artificial Sequence: Synthetic oligonucleotide
  Antisense strand to SEQ ID NO: 2475618
uaaagcauccauagaccuc

SEQ ID NO: 2475620 - RNA, 19 nt, Artificial Sequence
  Description of Artificial Sequence: Synthetic oligonucleotide
  Sense strand starting at position 988 of SEQ ID NO: 1887483
augcuuuagggcuggaaua

SEQ ID NO: 2475621 - RNA, 19 nt, Artificial Sequence
  Description of Artificial Sequence: Synthetic oligonucleotide
  Antisense strand to SEQ ID NO: 2475620
uauuccagcccuaaagcau

SEQ ID NO: 2475622 - RNA, 19 nt, Artificial Sequence
  Description of Artificial Sequence: Synthetic oligonucleotide
  Sense strand starting at position 998 of SEQ ID NO: 1887483
gcuggaauagcugaguuga

SEQ ID NO: 2475623 - RNA, 19 nt, Artificial Sequence
  Description of Artificial Sequence: Synthetic oligonucleotide
  Antisense strand to SEQ ID NO: 2475622
ucaacucagcuauuccagc

SEQ ID NO: 2475624 - RNA, 19 nt, Artificial Sequence
  Description of Artificial Sequence: Synthetic oligonucleotide
  Sense strand starting at position 1000 of SEQ ID NO: 1887483
uggaauagcugaguugagu

SEQ ID NO: 2475625 - RNA, 19 nt, Artificial Sequence
  Description of Artificial Sequence: Synthetic oligonucleotide
  Antisense strand to SEQ ID NO: 2475624
acucaacucagcuauucca

SEQ ID NO: 2475626 - RNA, 19 nt, Artificial Sequence
  Description of Artificial Sequence: Synthetic oligonucleotide
  Sense strand starting at position 1006 of SEQ ID NO: 1887483
agcugaguugaguaguuaa

SEQ ID NO: 2475627 - RNA, 19 nt, Artificial Sequence
  Description of Artificial Sequence: Synthetic oligonucleotide
  Antisense strand to SEQ ID NO: 2475626
uuaacuacucaacucagcu

SEQ ID NO: 2475628 - RNA, 19 nt, Artificial Sequence
  Description of Artificial Sequence: Synthetic oligonucleotide
  Sense strand starting at position 1009 of SEQ ID NO: 1887483
ugaguugaguaguuaagac

SEQ ID NO: 2475629 - RNA, 19 nt, Artificial Sequence
  Description of Artificial Sequence: Synthetic oligonucleotide
  Antisense strand to SEQ ID NO: 2475628
gucuuaacuacucaacuca

SEQ ID NO: 2475630 - RNA, 19 nt, Artificial Sequence
  Description of Artificial Sequence: Synthetic oligonucleotide
  Sense strand starting at position 1125 of SEQ ID NO: 1887483
ccuguaaggucucuuaaca

SEQ ID NO: 2475631 - RNA, 19 nt, Artificial Sequence
  Description of Artificial Sequence: Synthetic oligonucleotide
  Antisense strand to SEQ ID NO: 2475630
uguuaagagaccuuacagg

SEQ ID NO: 2475632 - RNA, 19 nt, Artificial Sequence
  Description of Artificial Sequence: Synthetic oligonucleotide
  Sense strand starting at position 1168 of SEQ ID NO: 1887483
ugaugccuccuauggagau

SEQ ID NO: 2475633 - RNA, 19 nt, Artificial Sequence
  Description of Artificial Sequence: Synthetic oligonucleotide
  Antisense strand to SEQ ID NO: 2475632
aucuccauaggaggcauca

SEQ ID NO: 2475634 - RNA, 19 nt, Artificial Sequence
  Description of Artificial Sequence: Synthetic oligonucleotide
  Sense strand starting at position 1230 of SEQ ID NO: 1887483
ugggaaggucuagguugua

SEQ ID NO: 2475635 - RNA, 19 nt, Artificial Sequence
  Description of Artificial Sequence: Synthetic oligonucleotide
  Antisense strand to SEQ ID NO: 2475634
uacaaccuagaccuuccca

SEQ ID NO: 2475636 - RNA, 19 nt, Artificial Sequence
  Description of Artificial Sequence: Synthetic oligonucleotide
  Sense strand starting at position 1233 of SEQ ID NO: 1887483
gaaggucuagguuguaacu

SEQ ID NO: 2475637 - RNA, 19 nt, Artificial Sequence
  Description of Artificial Sequence: Synthetic oligonucleotide
  Antisense strand to SEQ ID NO: 2475636
aguuacaaccuagaccuuc

SEQ ID NO: 2475638 - RNA, 19 nt, Artificial Sequence
  Description of Artificial Sequence: Synthetic oligonucleotide
  Sense strand starting at position 1246 of SEQ ID NO: 1887483
guaacuuacugagcuauga

SEQ ID NO: 2475639 - RNA, 19 nt, Artificial Sequence
  Description of Artificial Sequence: Synthetic oligonucleotide
  Antisense strand to SEQ ID NO: 2475638
ucauagcucaguaaguuac

SEQ ID NO: 2475640 - RNA, 19 nt, Artificial Sequence
  Description of Artificial Sequence: Synthetic oligonucleotide
  Sense strand starting at position 1820 of SEQ ID NO: 1887483
gcaguuauugcuggagaaa

SEQ ID NO: 2475641 - RNA, 19 nt, Artificial Sequence
  Description of Artificial Sequence: Synthetic oligonucleotide
  Antisense strand to SEQ ID NO: 2475640
uuucuccagcaauaacugc

SEQ ID NO: 2475642 - RNA, 19 nt, Artificial Sequence
  Description of Artificial Sequence: Synthetic oligonucleotide
  Sense strand starting at position 1957 of SEQ ID NO: 1887483
cugagacgccgggaacaau

SEQ ID NO: 2475643 - RNA, 19 nt, Artificial Sequence
  Description of Artificial Sequence: Synthetic oligonucleotide
  Antisense strand to SEQ ID NO: 2475642
auuguucccggcgucucag

SEQ ID NO: 2475644 - RNA, 19 nt, Artificial Sequence
  Description of Artificial Sequence: Synthetic oligonucleotide
  Sense strand starting at position 1966 of SEQ ID NO: 1887483
cgggaacaaucucucugaa

SEQ ID NO: 2475645 - RNA, 19 nt, Artificial Sequence
  Description of Artificial Sequence: Synthetic oligonucleotide
  Antisense strand to SEQ ID NO: 2475644
uucagagagauuguucccg

SEQ ID NO: 2475646 - RNA, 19 nt, Artificial Sequence
  Description of Artificial Sequence: Synthetic oligonucleotide
  Sense strand starting at position 1968 of SEQ ID NO: 1887483
ggaacaaucucucugaagc

SEQ ID NO: 2475647 - RNA, 19 nt, Artificial Sequence
  Description of Artificial Sequence: Synthetic oligonucleotide
  Antisense strand to SEQ ID NO: 2475646
gcuucagagagauuguucc

SEQ ID NO: 2475648 - RNA, 19 nt, Artificial Sequence
  Description of Artificial Sequence: Synthetic oligonucleotide
  Sense strand starting at position 1995 of SEQ ID NO: 1887483
gucagaaugccuggaacaa

SEQ ID NO: 2475649 - RNA, 19 nt, Artificial Sequence
  Description of Artificial Sequence: Synthetic oligonucleotide
  Antisense strand to SEQ ID NO: 2475648
uuguuccaggcauucugac

SEQ ID NO: 2475650 - RNA, 19 nt, Artificial Sequence
  Description of Artificial Sequence: Synthetic oligonucleotide
  Sense strand starting at position 2263 of SEQ ID NO: 1887483
uaauucugccucuggguaa

SEQ ID NO: 2475651 - RNA, 19 nt, Artificial Sequence
  Description of Artificial Sequence: Synthetic oligonucleotide
  Antisense strand to SEQ ID NO: 2475650
uuacccagaggcagaauua

SEQ ID NO: 2475652 - RNA, 19 nt, Artificial Sequence
  Description of Artificial Sequence: Synthetic oligonucleotide
  Sense strand starting at position 2312 of SEQ ID NO: 1887483
aucuuagcguauuugguua

SEQ ID NO: 2475653 - RNA, 19 nt, Artificial Sequence
  Description of Artificial Sequence: Synthetic oligonucleotide
  Antisense strand to SEQ ID NO: 2475652
uaaccaaauacgcuaagau

SEQ ID NO: 2475654 - RNA, 19 nt, Artificial Sequence
  Description of Artificial Sequence: Synthetic oligonucleotide
  Sense strand starting at position 2334 of SEQ ID NO: 1887483
ggaacaaguuuaucaccca

SEQ ID NO: 2475655 - RNA, 19 nt, Artificial Sequence
  Description of Artificial Sequence: Synthetic oligonucleotide
  Antisense strand to SEQ ID NO: 2475654
ugggugauaaacuuguucc

SEQ ID NO: 2475656 - RNA, 19 nt, Artificial Sequence
  Description of Artificial Sequence: Synthetic oligonucleotide
  Sense strand starting at position 2368 of SEQ ID NO: 1887483
aacggaugcaucugaggaa

SEQ ID NO: 2475657 - RNA, 19 nt, Artificial Sequence
  Description of Artificial Sequence: Synthetic oligonucleotide
  Antisense strand to SEQ ID NO: 2475656
uuccucagaugcauccguu

SEQ ID NO: 2475658 - RNA, 19 nt, Artificial Sequence
  Description of Artificial Sequence: Synthetic oligonucleotide
  Sense strand starting at position 2412 of SEQ ID NO: 1887483
guucuaucgcagucggcaa

SEQ ID NO: 2475659 - RNA, 19 nt, Artificial Sequence
  Description of Artificial Sequence: Synthetic oligonucleotide
  Antisense strand to SEQ ID NO: 2475658
uugccgacugcgauagaac

SEQ ID NO: 2475660 - RNA, 19 nt, Artificial Sequence
  Description of Artificial Sequence: Synthetic oligonucleotide
  Sense strand starting at position 2503 of SEQ ID NO: 1887483
ugcugucauugauuuguuu

SEQ ID NO: 2475661 - RNA, 19 nt, Artificial Sequence
  Description of Artificial Sequence: Synthetic oligonucleotide
  Antisense strand to SEQ ID NO: 2475660
aaacaaaucaaugacagca

SEQ ID NO: 2475662 - RNA, 19 nt, Artificial Sequence
  Description of Artificial Sequence: Synthetic oligonucleotide
  Sense strand starting at position 2553 of SEQ ID NO: 1887483
auaugcuuaugggcuauaa

SEQ ID NO: 2475663 - RNA, 19 nt, Artificial Sequence
  Description of Artificial Sequence: Synthetic oligonucleotide
  Antisense strand to SEQ ID NO: 2475662
uuauagcccauaagcauau

SEQ ID NO: 2475664 - RNA, 19 nt, Artificial Sequence
  Description of Artificial Sequence: Synthetic oligonucleotide
  Sense strand starting at position 2555 of SEQ ID NO: 1887483
augcuuaugggcuauaaua

SEQ ID NO: 2475665 - RNA, 19 nt, Artificial Sequence
  Description of Artificial Sequence: Synthetic oligonucleotide
  Antisense strand to SEQ ID NO: 2475664
uauuauagcccauaagcau

SEQ ID NO: 2475666 - RNA, 19 nt, Artificial Sequence
  Description of Artificial Sequence: Synthetic oligonucleotide
  Sense strand starting at position 2557 of SEQ ID NO: 1887483
gcuuaugggcuauaauaug

SEQ ID NO: 2475667 - RNA, 19 nt, Artificial Sequence
  Description of Artificial Sequence: Synthetic oligonucleotide
  Antisense strand to SEQ ID NO: 2475666
cauauuauagcccauaagc

SEQ ID NO: 2475668 - RNA, 19 nt, Artificial Sequence
  Description of Artificial Sequence: Synthetic oligonucleotide
  Sense strand starting at position 2889 of SEQ ID NO: 1887483
gcugacauuguggaaugau

SEQ ID NO: 2475669 - RNA, 19 nt, Artificial Sequence
  Description of Artificial Sequence: Synthetic oligonucleotide
  Antisense strand to SEQ ID NO: 2475668
aucauuccacaaugucagc

SEQ ID NO: 2475670 - RNA, 19 nt, Artificial Sequence
  Description of Artificial Sequence: Synthetic oligonucleotide
  Sense strand starting at position 2917 of SEQ ID NO: 1887483
acaauuaacguauguauca

SEQ ID NO: 2475671 - RNA, 19 nt, Artificial Sequence
  Description of Artificial Sequence: Synthetic oligonucleotide
  Antisense strand to SEQ ID NO: 2475670
ugauacauacguuaauugu

SEQ ID NO: 2475672 - RNA, 19 nt, Artificial Sequence
  Description of Artificial Sequence: Synthetic oligonucleotide
  Sense strand starting at position 3568 of SEQ ID NO: 1887483
gcauguauauauguaugau

SEQ ID NO: 2475673 - RNA, 19 nt, Artificial Sequence
  Description of Artificial Sequence: Synthetic oligonucleotide
  Antisense strand to SEQ ID NO: 2475672
aucauacauauauacaugc

SEQ ID NO: 2475674 - RNA, 19 nt, Artificial Sequence
  Description of Artificial Sequence: Synthetic oligonucleotide
  Sense strand starting at position 453 of SEQ ID NO: 1887484
uuuggauacuaccucgaga

SEQ ID NO: 2475675 - RNA, 19 nt, Artificial Sequence
  Description of Artificial Sequence: Synthetic oligonucleotide
  Antisense strand to SEQ ID NO: 2475674
ucucgagguaguauccaaa

SEQ ID NO: 2475676 - RNA, 19 nt, Artificial Sequence
  Description of Artificial Sequence: Synthetic oligonucleotide
  Sense strand starting at position 455 of SEQ ID NO: 1887484
uggauacuaccucgagaag

SEQ ID NO: 2475677 - RNA, 19 nt, Artificial Sequence
  Description of Artificial Sequence: Synthetic oligonucleotide
  Antisense strand to SEQ ID NO: 2475676
cuucucgagguaguaucca

SEQ ID NO: 2475678 - RNA, 19 nt, Artificial Sequence
  Description of Artificial Sequence: Synthetic oligonucleotide
  Sense strand starting at position 558 of SEQ ID NO: 1887484
cggugaucgcgggaguguu

SEQ ID NO: 2475679 - RNA, 19 nt, Artificial Sequence
  Description of Artificial Sequence: Synthetic oligonucleotide
  Antisense strand to SEQ ID NO: 2475678
aacacucccgcgaucaccg

SEQ ID NO: 2475680 - RNA, 19 nt, Artificial Sequence
  Description of Artificial Sequence: Synthetic oligonucleotide
  Sense strand starting at position 927 of SEQ ID NO: 1887484
gagcucuauccucgggaga

SEQ ID NO: 2475681 - RNA, 19 nt, Artificial Sequence
  Description of Artificial Sequence: Synthetic oligonucleotide
  Antisense strand to SEQ ID NO: 2475680
ucucccgaggauagagcuc

SEQ ID NO: 2475682 - RNA, 19 nt, Artificial Sequence
  Description of Artificial Sequence: Synthetic oligonucleotide
  Sense strand starting at position 929 of SEQ ID NO: 1887484
gcucuauccucgggagaca

SEQ ID NO: 2475683 - RNA, 19 nt, Artificial Sequence
  Description of Artificial Sequence: Synthetic oligonucleotide
  Antisense strand to SEQ ID NO: 2475682
ugucucccgaggauagagc

SEQ ID NO: 2475684 - RNA, 19 nt, Artificial Sequence
  Description of Artificial Sequence: Synthetic oligonucleotide
  Sense strand starting at position 1069 of SEQ ID NO: 1887484
gggcaaguuucucgccuua

SEQ ID NO: 2475685 - RNA, 19 nt, Artificial Sequence
  Description of Artificial Sequence: Synthetic oligonucleotide
  Antisense strand to SEQ ID NO: 2475684
uaaggcgagaaacuugccc

SEQ ID NO: 2475686 - RNA, 19 nt, Artificial Sequence
  Description of Artificial Sequence: Synthetic oligonucleotide
  Sense strand starting at position 1071 of SEQ ID NO: 1887484
gcaaguuucucgccuuacu

SEQ ID NO: 2475687 - RNA, 19 nt, Artificial Sequence
  Description of Artificial Sequence: Synthetic oligonucleotide
  Antisense strand to SEQ ID NO: 2475686
aguaaggcgagaaacuugc

SEQ ID NO: 2475688 - RNA, 19 nt, Artificial Sequence
  Description of Artificial Sequence: Synthetic oligonucleotide
  Sense strand starting at position 1546 of SEQ ID NO: 1887484
ucaggagucuuggauccua

SEQ ID NO: 2475689 - RNA, 19 nt, Artificial Sequence
  Description of Artificial Sequence: Synthetic oligonucleotide
  Antisense strand to SEQ ID NO: 2475688
uaggauccaagacuccuga

SEQ ID NO: 2475690 - RNA, 19 nt, Artificial Sequence
  Description of Artificial Sequence: Synthetic oligonucleotide
  Sense strand starting at position 1551 of SEQ ID NO: 1887484
agucuuggauccuaacaua

SEQ ID NO: 2475691 - RNA, 19 nt, Artificial Sequence
  Description of Artificial Sequence: Synthetic oligonucleotide
  Antisense strand to SEQ ID NO: 2475690
uauguuaggauccaagacu

SEQ ID NO: 2475692 - RNA, 19 nt, Artificial Sequence
  Description of Artificial Sequence: Synthetic oligonucleotide
  Sense strand starting at position 1853 of SEQ ID NO: 1887484
cgaggugguccaugauaca

SEQ ID NO: 2475693 - RNA, 19 nt, Artificial Sequence
  Description of Artificial Sequence: Synthetic oligonucleotide
  Antisense strand to SEQ ID NO: 2475692
uguaucauggaccaccucg

SEQ ID NO: 2475694 - RNA, 19 nt, Artificial Sequence
  Description of Artificial Sequence: Synthetic oligonucleotide
  Sense strand starting at position 2183 of SEQ ID NO: 1887484
ggugacuuaccuuaccuga

SEQ ID NO: 2475695 - RNA, 19 nt, Artificial Sequence
  Description of Artificial Sequence: Synthetic oligonucleotide
  Antisense strand to SEQ ID NO: 2475694
ucagguaagguaagucacc

SEQ ID NO: 2475696 - RNA, 19 nt, Artificial Sequence
  Description of Artificial Sequence: Synthetic oligonucleotide
  Sense strand starting at position 2277 of SEQ ID NO: 1887484
cgcagaaaucagcaucucu

SEQ ID NO: 2475697 - RNA, 19 nt, Artificial Sequence
  Description of Artificial Sequence: Synthetic oligonucleotide
  Antisense strand to SEQ ID NO: 2475696
agagaugcugauuucugcg

SEQ ID NO: 2475698 - RNA, 19 nt, Artificial Sequence
  Description of Artificial Sequence: Synthetic oligonucleotide
  Sense strand starting at position 2293 of SEQ ID NO: 1887484
ucuucccagccuggaaaua

SEQ ID NO: 2475699 - RNA, 19 nt, Artificial Sequence
  Description of Artificial Sequence: Synthetic oligonucleotide
  Antisense strand to SEQ ID NO: 2475698
uauuuccaggcugggaaga

SEQ ID NO: 2475700 - RNA, 19 nt, Artificial Sequence
  Description of Artificial Sequence: Synthetic oligonucleotide
  Sense strand starting at position 2598 of SEQ ID NO: 1887484
ucuugaaaucccggacuua

SEQ ID NO: 2475701 - RNA, 19 nt, Artificial Sequence
  Description of Artificial Sequence: Synthetic oligonucleotide
  Antisense strand to SEQ ID NO: 2475700
uaaguccgggauuucaaga

SEQ ID NO: 2475702 - RNA, 19 nt, Artificial Sequence
  Description of Artificial Sequence: Synthetic oligonucleotide
  Sense strand starting at position 2705 of SEQ ID NO: 1887484
gcaguugaguguuugcaca

SEQ ID NO: 2475703 - RNA, 19 nt, Artificial Sequence
  Description of Artificial Sequence: Synthetic oligonucleotide
  Antisense strand to SEQ ID NO: 2475702
ugugcaaacacucaacugc

SEQ ID NO: 2475704 - RNA, 19 nt, Artificial Sequence
  Description of Artificial Sequence: Synthetic oligonucleotide
  Sense strand starting at position 2707 of SEQ ID NO: 1887484
aguugaguguuugcacagu

SEQ ID NO: 2475705 - RNA, 19 nt, Artificial Sequence
  Description of Artificial Sequence: Synthetic oligonucleotide
  Antisense strand to SEQ ID NO: 2475704
acugugcaaacacucaacu

SEQ ID NO: 2475706 - RNA, 19 nt, Artificial Sequence
  Description of Artificial Sequence: Synthetic oligonucleotide
  Sense strand starting at position 2740 of SEQ ID NO: 1887484
cugggcaguaugcauaaua

SEQ ID NO: 2475707 - RNA, 19 nt, Artificial Sequence
  Description of Artificial Sequence: Synthetic oligonucleotide
  Antisense strand to SEQ ID NO: 2475706
uauuaugcauacugcccag

SEQ ID NO: 2475708 - RNA, 19 nt, Artificial Sequence
  Description of Artificial Sequence: Synthetic oligonucleotide
  Sense strand starting at position 2747 of SEQ ID NO: 1887484
guaugcauaauaugugaga

SEQ ID NO: 2475709 - RNA, 19 nt, Artificial Sequence
  Description of Artificial Sequence: Synthetic oligonucleotide
  Antisense strand to SEQ ID NO: 2475708
ucucacauauuaugcauac

SEQ ID NO: 2475710 - RNA, 19 nt, Artificial Sequence
  Description of Artificial Sequence: Synthetic oligonucleotide
  Sense strand starting at position 2748 of SEQ ID NO: 1887484
uaugcauaauaugugagau

SEQ ID NO: 2475711 - RNA, 19 nt, Artificial Sequence
  Description of Artificial Sequence: Synthetic oligonucleotide
  Antisense strand to SEQ ID NO: 2475710
aucucacauauuaugcaua

SEQ ID NO: 2475712 - RNA, 19 nt, Artificial Sequence
  Description of Artificial Sequence: Synthetic oligonucleotide
  Sense strand starting at position 2750 of SEQ ID NO: 1887484
ugcauaauaugugagauuu

SEQ ID NO: 2475713 - RNA, 19 nt, Artificial Sequence
  Description of Artificial Sequence: Synthetic oligonucleotide
  Antisense strand to SEQ ID NO: 2475712
aaaucucacauauuaugca

SEQ ID NO: 2475714 - RNA, 19 nt, Artificial Sequence
  Description of Artificial Sequence: Synthetic oligonucleotide
  Sense strand starting at position 3018 of SEQ ID NO: 1887484
acugcuucagucugggaga

SEQ ID NO: 2475715 - RNA, 19 nt, Artificial Sequence
  Description of Artificial Sequence: Synthetic oligonucleotide
  Antisense strand to SEQ ID NO: 2475714
ucucccagacugaagcagu

SEQ ID NO: 2475716 - RNA, 19 nt, Artificial Sequence
  Description of Artificial Sequence: Synthetic oligonucleotide
  Sense strand starting at position 3019 of SEQ ID NO: 1887484
cugcuucagucugggagau

SEQ ID NO: 2475717 - RNA, 19 nt, Artificial Sequence
  Description of Artificial Sequence: Synthetic oligonucleotide
  Antisense strand to SEQ ID NO: 2475716
aucucccagacugaagcag

SEQ ID NO: 2475718 - RNA, 19 nt, Artificial Sequence
  Description of Artificial Sequence: Synthetic oligonucleotide
  Sense strand starting at position 3021 of SEQ ID NO: 1887484
gcuucagucugggagauga

SEQ ID NO: 2475719 - RNA, 19 nt, Artificial Sequence
  Description of Artificial Sequence: Synthetic oligonucleotide
  Antisense strand to SEQ ID NO: 2475718
ucaucucccagacugaagc

SEQ ID NO: 2475720 - RNA, 19 nt, Artificial Sequence
  Description of Artificial Sequence: Synthetic oligonucleotide
  Sense strand starting at position 3556 of SEQ ID NO: 1887484
uauauauucgagcguggug

SEQ ID NO: 2475721 - RNA, 19 nt, Artificial Sequence
  Description of Artificial Sequence: Synthetic oligonucleotide
  Antisense strand to SEQ ID NO: 2475720
caccacgcucgaauauaua

SEQ ID NO: 2475722 - RNA, 19 nt, Artificial Sequence
  Description of Artificial Sequence: Synthetic oligonucleotide
  Sense strand starting at position 3677 of SEQ ID NO: 1887484
caggcugugcaacaagauu

SEQ ID NO: 2475723 - RNA, 19 nt, Artificial Sequence
  Description of Artificial Sequence: Synthetic oligonucleotide
  Antisense strand to SEQ ID NO: 2475722
aaucuuguugcacagccug

SEQ ID NO: 2475724 - RNA, 19 nt, Artificial Sequence
  Description of Artificial Sequence: Synthetic oligonucleotide
  Sense strand starting at position 431 of SEQ ID NO: 1887485
agugcuuagugcuuucuca

SEQ ID NO: 2475725 - RNA, 19 nt, Artificial Sequence
  Description of Artificial Sequence: Synthetic oligonucleotide
  Antisense strand to SEQ ID NO: 2475724
ugagaaagcacuaagcacu

SEQ ID NO: 2475726 - RNA, 19 nt, Artificial Sequence
  Description of Artificial Sequence: Synthetic oligonucleotide
  Sense strand starting at position 432 of SEQ ID NO: 1887485
gugcuuagugcuuucucau

SEQ ID NO: 2475727 - RNA, 19 nt, Artificial Sequence
  Description of Artificial Sequence: Synthetic oligonucleotide
  Antisense strand to SEQ ID NO: 2475726
augagaaagcacuaagcac

SEQ ID NO: 2475728 - RNA, 19 nt, Artificial Sequence
  Description of Artificial Sequence: Synthetic oligonucleotide
  Sense strand starting at position 435 of SEQ ID NO: 1887485
cuuagugcuuucucaugaa

SEQ ID NO: 2475729 - RNA, 19 nt, Artificial Sequence
  Description of Artificial Sequence: Synthetic oligonucleotide
  Antisense strand to SEQ ID NO: 2475728
uucaugagaaagcacuaag

SEQ ID NO: 2475730 - RNA, 19 nt, Artificial Sequence
  Description of Artificial Sequence: Synthetic oligonucleotide
  Sense strand starting at position 439 of SEQ ID NO: 1887485
gugcuuucucaugaaauga

SEQ ID NO: 2475731 - RNA, 19 nt, Artificial Sequence
  Description of Artificial Sequence: Synthetic oligonucleotide
  Antisense strand to SEQ ID NO: 2475730
ucauuucaugagaaagcac

SEQ ID NO: 2475732 - RNA, 19 nt, Artificial Sequence
  Description of Artificial Sequence: Synthetic oligonucleotide
  Sense strand starting at position 449 of SEQ ID NO: 1887485
augaaaugaucuuagguga

SEQ ID NO: 2475733 - RNA, 19 nt, Artificial Sequence
  Description of Artificial Sequence: Synthetic oligonucleotide
  Antisense strand to SEQ ID NO: 2475732
ucaccuaagaucauuucau

SEQ ID NO: 2475734 - RNA, 19 nt, Artificial Sequence
  Description of Artificial Sequence: Synthetic oligonucleotide
  Sense strand starting at position 524 of SEQ ID NO: 1887485
uguagcacuuagcuauuaa

SEQ ID NO: 2475735 - RNA, 19 nt, Artificial Sequence
  Description of Artificial Sequence: Synthetic oligonucleotide
  Antisense strand to SEQ ID NO: 2475734
uuaauagcuaagugcuaca

SEQ ID NO: 2475736 - RNA, 19 nt, Artificial Sequence
  Description of Artificial Sequence: Synthetic oligonucleotide
  Sense strand starting at position 542 of SEQ ID NO: 1887485
acaccuauuaucgguagga

SEQ ID NO: 2475737 - RNA, 19 nt, Artificial Sequence
  Description of Artificial Sequence: Synthetic oligonucleotide
  Antisense strand to SEQ ID NO: 2475736
uccuaccgauaauaggugu

SEQ ID NO: 2475738 - RNA, 19 nt, Artificial Sequence
  Description of Artificial Sequence: Synthetic oligonucleotide
  Sense strand starting at position 543 of SEQ ID NO: 1887485
caccuauuaucgguaggac

SEQ ID NO: 2475739 - RNA, 19 nt, Artificial Sequence
  Description of Artificial Sequence: Synthetic oligonucleotide
  Antisense strand to SEQ ID NO: 2475738
guccuaccgauaauaggug

SEQ ID NO: 2475740 - RNA, 19 nt, Artificial Sequence
  Description of Artificial Sequence: Synthetic oligonucleotide
  Sense strand starting at position 544 of SEQ ID NO: 1887485
accuauuaucgguaggaca

SEQ ID NO: 2475741 - RNA, 19 nt, Artificial Sequence
  Description of Artificial Sequence: Synthetic oligonucleotide
  Antisense strand to SEQ ID NO: 2475740
uguccuaccgauaauaggu

SEQ ID NO: 2475742 - RNA, 19 nt, Artificial Sequence
  Description of Artificial Sequence: Synthetic oligonucleotide
  Sense strand starting at position 546 of SEQ ID NO: 1887485
cuauuaucgguaggacacu

SEQ ID NO: 2475743 - RNA, 19 nt, Artificial Sequence
  Description of Artificial Sequence: Synthetic oligonucleotide
  Antisense strand to SEQ ID NO: 2475742
aguguccuaccgauaauag

SEQ ID NO: 2475744 - RNA, 19 nt, Artificial Sequence
  Description of Artificial Sequence: Synthetic oligonucleotide
  Sense strand starting at position 610 of SEQ ID NO: 1887485
auuaauaaucaccggguuu

SEQ ID NO: 2475745 - RNA, 19 nt, Artificial Sequence
  Description of Artificial Sequence: Synthetic oligonucleotide
  Antisense strand to SEQ ID NO: 2475744
aaacccggugauuauuaau

SEQ ID NO: 2475746 - RNA, 19 nt, Artificial Sequence
  Description of Artificial Sequence: Synthetic oligonucleotide
  Sense strand starting at position 733 of SEQ ID NO: 1887485
ucucuuuggguuuggaauu

SEQ ID NO: 2475747 - RNA, 19 nt, Artificial Sequence
  Description of Artificial Sequence: Synthetic oligonucleotide
  Antisense strand to SEQ ID NO: 2475746
aauuccaaacccaaagaga

SEQ ID NO: 2475748 - RNA, 19 nt, Artificial Sequence
  Description of Artificial Sequence: Synthetic oligonucleotide
  Sense strand starting at position 761 of SEQ ID NO: 1887485
ugcggucucuacucccaaa

SEQ ID NO: 2475749 - RNA, 19 nt, Artificial Sequence
  Description of Artificial Sequence: Synthetic oligonucleotide
  Antisense strand to SEQ ID NO: 2475748
uuugggaguagagaccgca

SEQ ID NO: 2475750 - RNA, 19 nt, Artificial Sequence
  Description of Artificial Sequence: Synthetic oligonucleotide
  Sense strand starting at position 795 of SEQ ID NO: 1887485
gagauuaaaugaugacagu

SEQ ID NO: 2475751 - RNA, 19 nt, Artificial Sequence
  Description of Artificial Sequence: Synthetic oligonucleotide
  Antisense strand to SEQ ID NO: 2475750
acugucaucauuuaaucuc

SEQ ID NO: 2475752 - RNA, 19 nt, Artificial Sequence
  Description of Artificial Sequence: Synthetic oligonucleotide
  Sense strand starting at position 1035 of SEQ ID NO: 1887485
ucaccaugcugugcuagau

SEQ ID NO: 2475753 - RNA, 19 nt, Artificial Sequence
  Description of Artificial Sequence: Synthetic oligonucleotide
  Antisense strand to SEQ ID NO: 2475752
aucuagcacagcaugguga

SEQ ID NO: 2475754 - RNA, 19 nt, Artificial Sequence
  Description of Artificial Sequence: Synthetic oligonucleotide
  Sense strand starting at position 1039 of SEQ ID NO: 1887485
caugcugugcuagaucauu

SEQ ID NO: 2475755 - RNA, 19 nt, Artificial Sequence
  Description of Artificial Sequence: Synthetic oligonucleotide
  Antisense strand to SEQ ID NO: 2475754
aaugaucuagcacagcaug

SEQ ID NO: 2475756 - RNA, 19 nt, Artificial Sequence
  Description of Artificial Sequence: Synthetic oligonucleotide
  Sense strand starting at position 1068 of SEQ ID NO: 1887485
gcuuauauggugcuuugca

SEQ ID NO: 2475757 - RNA, 19 nt, Artificial Sequence
  Description of Artificial Sequence: Synthetic oligonucleotide
  Antisense strand to SEQ ID NO: 2475756
ugcaaagcaccauauaagc

SEQ ID NO: 2475758 - RNA, 19 nt, Artificial Sequence
  Description of Artificial Sequence: Synthetic oligonucleotide
  Sense strand starting at position 1075 of SEQ ID NO: 1887485
uggugcuuugcacaacaca

SEQ ID NO: 2475759 - RNA, 19 nt, Artificial Sequence
  Description of Artificial Sequence: Synthetic oligonucleotide
  Antisense strand to SEQ ID NO: 2475758
uguguugugcaaagcacca

SEQ ID NO: 2475760 - RNA, 19 nt, Artificial Sequence
  Description of Artificial Sequence: Synthetic oligonucleotide
  Sense strand starting at position 1111 of SEQ ID NO: 1887485
ggcagcugugauuagcaua

SEQ ID NO: 2475761 - RNA, 19 nt, Artificial Sequence
  Description of Artificial Sequence: Synthetic oligonucleotide
  Antisense strand to SEQ ID NO: 2475760
uaugcuaaucacagcugcc

SEQ ID NO: 2475762 - RNA, 19 nt, Artificial Sequence
  Description of Artificial Sequence: Synthetic oligonucleotide
  Sense strand starting at position 1116 of SEQ ID NO: 1887485
cugugauuagcauaacaca

SEQ ID NO: 2475763 - RNA, 19 nt, Artificial Sequence
  Description of Artificial Sequence: Synthetic oligonucleotide
  Antisense strand to SEQ ID NO: 2475762
uguguuaugcuaaucacag

SEQ ID NO: 2475764 - RNA, 19 nt, Artificial Sequence
  Description of Artificial Sequence: Synthetic oligonucleotide
  Sense strand starting at position 1181 of SEQ ID NO: 1887485
cuugucugucuggaagaau

SEQ ID NO: 2475765 - RNA, 19 nt, Artificial Sequence
  Description of Artificial Sequence: Synthetic oligonucleotide
  Antisense strand to SEQ ID NO: 2475764
auucuuccagacagacaag

SEQ ID NO: 2475766 - RNA, 19 nt, Artificial Sequence
  Description of Artificial Sequence: Synthetic oligonucleotide
  Sense strand starting at position 1184 of SEQ ID NO: 1887485
gucugucuggaagaaugca

SEQ ID NO: 2475767 - RNA, 19 nt, Artificial Sequence
  Description of Artificial Sequence: Synthetic oligonucleotide
  Antisense strand to SEQ ID NO: 2475766
ugcauucuuccagacagac

SEQ ID NO: 2475768 - RNA, 19 nt, Artificial Sequence
  Description of Artificial Sequence: Synthetic oligonucleotide
  Sense strand starting at position 1353 of SEQ ID NO: 1887485
aggcgaauuugaggacaca

SEQ ID NO: 2475769 - RNA, 19 nt, Artificial Sequence
  Description of Artificial Sequence: Synthetic oligonucleotide
  Antisense strand to SEQ ID NO: 2475768
uguguccucaaauucgccu

SEQ ID NO: 2475770 - RNA, 19 nt, Artificial Sequence
  Description of Artificial Sequence: Synthetic oligonucleotide
  Sense strand starting at position 2268 of SEQ ID NO: 1887485
gaggccugguucucuguua

SEQ ID NO: 2475771 - RNA, 19 nt, Artificial Sequence
  Description of Artificial Sequence: Synthetic oligonucleotide
  Antisense strand to SEQ ID NO: 2475770
uaacagagaaccaggccuc

SEQ ID NO: 2475772 - RNA, 19 nt, Artificial Sequence
  Description of Artificial Sequence: Synthetic oligonucleotide
  Sense strand starting at position 3111 of SEQ ID NO: 1887485
uuguuacaucaauagagua

SEQ ID NO: 2475773 - RNA, 19 nt, Artificial Sequence
  Description of Artificial Sequence: Synthetic oligonucleotide
  Antisense strand to SEQ ID NO: 2475772
uacucuauugauguaacaa

SEQ ID NO: 2475774 - RNA, 19 nt, Artificial Sequence
  Description of Artificial Sequence: Synthetic oligonucleotide
  Sense strand starting at position 3142 of SEQ ID NO: 1887485
aacagucuugagugcuuua

SEQ ID NO: 2475775 - RNA, 19 nt, Artificial Sequence
  Description of Artificial Sequence: Synthetic oligonucleotide
  Antisense strand to SEQ ID NO: 2475774
uaaagcacucaagacuguu

SEQ ID NO: 2475776 - RNA, 19 nt, Artificial Sequence
  Description of Artificial Sequence: Synthetic oligonucleotide
  Sense strand starting at position 3145 of SEQ ID NO: 1887485
agucuugagugcuuuauca

SEQ ID NO: 2475777 - RNA, 19 nt, Artificial Sequence
  Description of Artificial Sequence: Synthetic oligonucleotide
  Antisense strand to SEQ ID NO: 2475776
ugauaaagcacucaagacu

SEQ ID NO: 2475778 - RNA, 19 nt, Artificial Sequence
  Description of Artificial Sequence: Synthetic oligonucleotide
  Sense strand starting at position 3147 of SEQ ID NO: 1887485
ucuugagugcuuuaucagu

SEQ ID NO: 2475779 - RNA, 19 nt, Artificial Sequence
  Description of Artificial Sequence: Synthetic oligonucleotide
  Antisense strand to SEQ ID NO: 2475778
acugauaaagcacucaaga

SEQ ID NO: 2475780 - RNA, 19 nt, Artificial Sequence
  Description of Artificial Sequence: Synthetic oligonucleotide
  Sense strand starting at position 3149 of SEQ ID NO: 1887485
uugagugcuuuaucaguac

SEQ ID NO: 2475781 - RNA, 19 nt, Artificial Sequence
  Description of Artificial Sequence: Synthetic oligonucleotide
  Antisense strand to SEQ ID NO: 2475780
guacugauaaagcacucaa

SEQ ID NO: 2475782 - RNA, 19 nt, Artificial Sequence
  Description of Artificial Sequence: Synthetic oligonucleotide
  Sense strand starting at position 3152 of SEQ ID NO: 1887485
agugcuuuaucaguacgua

SEQ ID NO: 2475783 - RNA, 19 nt, Artificial Sequence
  Description of Artificial Sequence: Synthetic oligonucleotide
  Antisense strand to SEQ ID NO: 2475782
uacguacugauaaagcacu

SEQ ID NO: 2475784 - RNA, 19 nt, Artificial Sequence
  Description of Artificial Sequence: Synthetic oligonucleotide
  Sense strand starting at position 3153 of SEQ ID NO: 1887485
gugcuuuaucaguacguau

SEQ ID NO: 2475785 - RNA, 19 nt, Artificial Sequence
  Description of Artificial Sequence: Synthetic oligonucleotide
  Antisense strand to SEQ ID NO: 2475784
auacguacugauaaagcac

SEQ ID NO: 2475786 - RNA, 19 nt, Artificial Sequence
  Description of Artificial Sequence: Synthetic oligonucleotide
  Sense strand starting at position 3155 of SEQ ID NO: 1887485
gcuuuaucaguacguauuc

SEQ ID NO: 2475787 - RNA, 19 nt, Artificial Sequence
  Description of Artificial Sequence: Synthetic oligonucleotide
  Antisense strand to SEQ ID NO: 2475786
gaauacguacugauaaagc

SEQ ID NO: 2475788 - RNA, 19 nt, Artificial Sequence
  Description of Artificial Sequence: Synthetic oligonucleotide
  Sense strand starting at position 3160 of SEQ ID NO: 1887485
aucaguacguauuccauaa

SEQ ID NO: 2475789 - RNA, 19 nt, Artificial Sequence
  Description of Artificial Sequence: Synthetic oligonucleotide
  Antisense strand to SEQ ID NO: 2475788
uuauggaauacguacugau

SEQ ID NO: 2475790 - RNA, 19 nt, Artificial Sequence
  Description of Artificial Sequence: Synthetic oligonucleotide
  Sense strand starting at position 3164 of SEQ ID NO: 1887485
guacguauuccauaaggaa

SEQ ID NO: 2475791 - RNA, 19 nt, Artificial Sequence
  Description of Artificial Sequence: Synthetic oligonucleotide
  Antisense strand to SEQ ID NO: 2475790
uuccuuauggaauacguac

SEQ ID NO: 2475792 - RNA, 19 nt, Artificial Sequence
  Description of Artificial Sequence: Synthetic oligonucleotide
  Sense strand starting at position 3274 of SEQ ID NO: 1887485
ccaguugagacagguagau

SEQ ID NO: 2475793 - RNA, 19 nt, Artificial Sequence
  Description of Artificial Sequence: Synthetic oligonucleotide
  Antisense strand to SEQ ID NO: 2475792
aucuaccugucucaacugg

SEQ ID NO: 2475794 - RNA, 19 nt, Artificial Sequence
  Description of Artificial Sequence: Synthetic oligonucleotide
  Sense strand starting at position 3432 of SEQ ID NO: 1887485
guugcaauaagcugagaac

SEQ ID NO: 2475795 - RNA, 19 nt, Artificial Sequence
  Description of Artificial Sequence: Synthetic oligonucleotide
  Antisense strand to SEQ ID NO: 2475794
guucucagcuuauugcaac

SEQ ID NO: 2475796 - RNA, 19 nt, Artificial Sequence
  Description of Artificial Sequence: Synthetic oligonucleotide
  Sense strand starting at position 3433 of SEQ ID NO: 1887485
uugcaauaagcugagaacu

SEQ ID NO: 2475797 - RNA, 19 nt, Artificial Sequence
  Description of Artificial Sequence: Synthetic oligonucleotide
  Antisense strand to SEQ ID NO: 2475796
aguucucagcuuauugcaa

SEQ ID NO: 2475798 - RNA, 19 nt, Artificial Sequence
  Description of Artificial Sequence: Synthetic oligonucleotide
  Sense strand starting at position 3558 of SEQ ID NO: 1887485
guuggaaguacuggaagaa

SEQ ID NO: 2475799 - RNA, 19 nt, Artificial Sequence
  Description of Artificial Sequence: Synthetic oligonucleotide
  Antisense strand to SEQ ID NO: 2475798
uucuuccaguacuuccaac

SEQ ID NO: 2475800 - RNA, 19 nt, Artificial Sequence
  Description of Artificial Sequence: Synthetic oligonucleotide
  Sense strand starting at position 3586 of SEQ ID NO: 1887485
aagguaaguuuaccuaaag

SEQ ID NO: 2475801 - RNA, 19 nt, Artificial Sequence
  Description of Artificial Sequence: Synthetic oligonucleotide
  Antisense strand to SEQ ID NO: 2475800
cuuuagguaaacuuaccuu

SEQ ID NO: 2475802 - RNA, 19 nt, Artificial Sequence
  Description of Artificial Sequence: Synthetic oligonucleotide
  Sense strand starting at position 3587 of SEQ ID NO: 1887485
agguaaguuuaccuaaaga

SEQ ID NO: 2475803 - RNA, 19 nt, Artificial Sequence
  Description of Artificial Sequence: Synthetic oligonucleotide
  Antisense strand to SEQ ID NO: 2475802
ucuuuagguaaacuuaccu

SEQ ID NO: 2475804 - RNA, 19 nt, Artificial Sequence
  Description of Artificial Sequence: Synthetic oligonucleotide
  Sense strand starting at position 285 of SEQ ID NO: 1887489
uaggaugcuacgggagaaa

SEQ ID NO: 2475805 - RNA, 19 nt, Artificial Sequence
  Description of Artificial Sequence: Synthetic oligonucleotide
  Antisense strand to SEQ ID NO: 2475804
uuucucccguagcauccua

SEQ ID NO: 2475806 - RNA, 19 nt, Artificial Sequence
  Description of Artificial Sequence: Synthetic oligonucleotide
  Sense strand starting at position 318 of SEQ ID NO: 1887489
acagcucagcaguagaauu

SEQ ID NO: 2475807 - RNA, 19 nt, Artificial Sequence
  Description of Artificial Sequence: Synthetic oligonucleotide
  Antisense strand to SEQ ID NO: 2475806
aauucuacugcugagcugu

SEQ ID NO: 2475808 - RNA, 19 nt, Artificial Sequence
  Description of Artificial Sequence: Synthetic oligonucleotide
  Sense strand starting at position 381 of SEQ ID NO: 1887489
acagacacugugugaagau

SEQ ID NO: 2475809 - RNA, 19 nt, Artificial Sequence
  Description of Artificial Sequence: Synthetic oligonucleotide
  Antisense strand to SEQ ID NO: 2475808
aucuucacacagugucugu

SEQ ID NO: 2475810 - RNA, 19 nt, Artificial Sequence
  Description of Artificial Sequence: Synthetic oligonucleotide
  Sense strand starting at position 464 of SEQ ID NO: 1887489
ugggacugcgucuaaauca

SEQ ID NO: 2475811 - RNA, 19 nt, Artificial Sequence
  Description of Artificial Sequence: Synthetic oligonucleotide
  Antisense strand to SEQ ID NO: 2475810
ugauuuagacgcaguccca

SEQ ID NO: 2475812 - RNA, 19 nt, Artificial Sequence
  Description of Artificial Sequence: Synthetic oligonucleotide
  Sense strand starting at position 553 of SEQ ID NO: 1887489
acacauggucacugaauau

SEQ ID NO: 2475813 - RNA, 19 nt, Artificial Sequence
  Description of Artificial Sequence: Synthetic oligonucleotide
  Antisense strand to SEQ ID NO: 2475812
auauucagugaccaugugu

SEQ ID NO: 2475814 - RNA, 19 nt, Artificial Sequence
  Description of Artificial Sequence: Synthetic oligonucleotide
  Sense strand starting at position 565 of SEQ ID NO: 1887489
ugaauauaugcagaauugu

SEQ ID NO: 2475815 - RNA, 19 nt, Artificial Sequence
  Description of Artificial Sequence: Synthetic oligonucleotide
  Antisense strand to SEQ ID NO: 2475814
acaauucugcauauauuca

SEQ ID NO: 2475816 - RNA, 19 nt, Artificial Sequence
  Description of Artificial Sequence: Synthetic oligonucleotide
  Sense strand starting at position 625 of SEQ ID NO: 1887489
guuugcugcgacuaucaca

SEQ ID NO: 2475817 - RNA, 19 nt, Artificial Sequence
  Description of Artificial Sequence: Synthetic oligonucleotide
  Antisense strand to SEQ ID NO: 2475816
ugugauagucgcagcaaac

SEQ ID NO: 2475818 - RNA, 19 nt, Artificial Sequence
  Description of Artificial Sequence: Synthetic oligonucleotide
  Sense strand starting at position 659 of SEQ ID NO: 1887489
ucuuuauguucucuauugu

SEQ ID NO: 2475819 - RNA, 19 nt, Artificial Sequence
  Description of Artificial Sequence: Synthetic oligonucleotide
  Antisense strand to SEQ ID NO: 2475818
acaauagagaacauaaaga

SEQ ID NO: 2475820 - RNA, 19 nt, Artificial Sequence
  Description of Artificial Sequence: Synthetic oligonucleotide
  Sense strand starting at position 660 of SEQ ID NO: 1887489
cuuuauguucucuauuguu

SEQ ID NO: 2475821 - RNA, 19 nt, Artificial Sequence
  Description of Artificial Sequence: Synthetic oligonucleotide
  Antisense strand to SEQ ID NO: 2475820
aacaauagagaacauaaag

SEQ ID NO: 2475822 - RNA, 19 nt, Artificial Sequence
  Description of Artificial Sequence: Synthetic oligonucleotide
  Sense strand starting at position 672 of SEQ ID NO: 1887489
uauuguuaauaucaaggga

SEQ ID NO: 2475823 - RNA, 19 nt, Artificial Sequence
  Description of Artificial Sequence: Synthetic oligonucleotide
  Antisense strand to SEQ ID NO: 2475822
ucccuugauauuaacaaua

SEQ ID NO: 2475824 - RNA, 19 nt, Artificial Sequence
  Description of Artificial Sequence: Synthetic oligonucleotide
  Sense strand starting at position 738 of SEQ ID NO: 1887489
uuugaaagcagauguaaga

SEQ ID NO: 2475825 - RNA, 19 nt, Artificial Sequence
  Description of Artificial Sequence: Synthetic oligonucleotide
  Antisense strand to SEQ ID NO: 2475824
ucuuacaucugcuuucaaa

SEQ ID NO: 2475826 - RNA, 19 nt, Artificial Sequence
  Description of Artificial Sequence: Synthetic oligonucleotide
  Sense strand starting at position 803 of SEQ ID NO: 1887489
gaaggcaucugaucaguca

SEQ ID NO: 2475827 - RNA, 19 nt, Artificial Sequence
  Description of Artificial Sequence: Synthetic oligonucleotide
  Antisense strand to SEQ ID NO: 2475826
ugacugaucagaugccuuc

SEQ ID NO: 2475828 - RNA, 19 nt, Artificial Sequence
  Description of Artificial Sequence: Synthetic oligonucleotide
  Sense strand starting at position 1600 of SEQ ID NO: 1887489
gcguucaggccucugugaa

SEQ ID NO: 2475829 - RNA, 19 nt, Artificial Sequence
  Description of Artificial Sequence: Synthetic oligonucleotide
  Antisense strand to SEQ ID NO: 2475828
uucacagaggccugaacgc

SEQ ID NO: 2475830 - RNA, 19 nt, Artificial Sequence
  Description of Artificial Sequence: Synthetic oligonucleotide
  Sense strand starting at position 1788 of SEQ ID NO: 1887489
gacucucagcgcuggaaua

SEQ ID NO: 2475831 - RNA, 19 nt, Artificial Sequence
  Description of Artificial Sequence: Synthetic oligonucleotide
  Antisense strand to SEQ ID NO: 2475830
uauuccagcgcugagaguc

SEQ ID NO: 2475832 - RNA, 19 nt, Artificial Sequence
  Description of Artificial Sequence: Synthetic oligonucleotide
  Sense strand starting at position 1789 of SEQ ID NO: 1887489
acucucagcgcuggaauaa

SEQ ID NO: 2475833 - RNA, 19 nt, Artificial Sequence
  Description of Artificial Sequence: Synthetic oligonucleotide
  Antisense strand to SEQ ID NO: 2475832
uuauuccagcgcugagagu

SEQ ID NO: 2475834 - RNA, 19 nt, Artificial Sequence
  Description of Artificial Sequence: Synthetic oligonucleotide
  Sense strand starting at position 1863 of SEQ ID NO: 1887489
uuccuugugugcuuagaga

SEQ ID NO: 2475835 - RNA, 19 nt, Artificial Sequence
  Description of Artificial Sequence: Synthetic oligonucleotide
  Antisense strand to SEQ ID NO: 2475834
ucucuaagcacacaaggaa

SEQ ID NO: 2475836 - RNA, 19 nt, Artificial Sequence
  Description of Artificial Sequence: Synthetic oligonucleotide
  Sense strand starting at position 2050 of SEQ ID NO: 1887489
ucuccuucuccuuguguga

SEQ ID NO: 2475837 - RNA, 19 nt, Artificial Sequence
  Description of Artificial Sequence: Synthetic oligonucleotide
  Antisense strand to SEQ ID NO: 2475836
ucacacaaggagaaggaga

SEQ ID NO: 2475838 - RNA, 19 nt, Artificial Sequence
  Description of Artificial Sequence: Synthetic oligonucleotide
  Sense strand starting at position 2290 of SEQ ID NO: 1887489
guugguugccaggaaauuc

SEQ ID NO: 2475839 - RNA, 19 nt, Artificial Sequence
  Description of Artificial Sequence: Synthetic oligonucleotide
  Antisense strand to SEQ ID NO: 2475838
gaauuuccuggcaaccaac

SEQ ID NO: 2475840 - RNA, 19 nt, Artificial Sequence
  Description of Artificial Sequence: Synthetic oligonucleotide
  Sense strand starting at position 2367 of SEQ ID NO: 1887489
ugugucugagagugaagau

SEQ ID NO: 2475841 - RNA, 19 nt, Artificial Sequence
  Description of Artificial Sequence: Synthetic oligonucleotide
  Antisense strand to SEQ ID NO: 2475840
aucuucacucucagacaca

SEQ ID NO: 2475842 - RNA, 19 nt, Artificial Sequence
  Description of Artificial Sequence: Synthetic oligonucleotide
  Sense strand starting at position 2368 of SEQ ID NO: 1887489
gugucugagagugaagaua

SEQ ID NO: 2475843 - RNA, 19 nt, Artificial Sequence
  Description of Artificial Sequence: Synthetic oligonucleotide
  Antisense strand to SEQ ID NO: 2475842
uaucuucacucucagacac

SEQ ID NO: 2475844 - RNA, 19 nt, Artificial Sequence
  Description of Artificial Sequence: Synthetic oligonucleotide
  Sense strand starting at position 2445 of SEQ ID NO: 1887489
ugaggcugcuccucagaga

SEQ ID NO: 2475845 - RNA, 19 nt, Artificial Sequence
  Description of Artificial Sequence: Synthetic oligonucleotide
  Antisense strand to SEQ ID NO: 2475844
ucucugaggagcagccuca

SEQ ID NO: 2475846 - RNA, 19 nt, Artificial Sequence
  Description of Artificial Sequence: Synthetic oligonucleotide
  Sense strand starting at position 2577 of SEQ ID NO: 1887489
guccauagguuaccaacau

SEQ ID NO: 2475847 - RNA, 19 nt, Artificial Sequence
  Description of Artificial Sequence: Synthetic oligonucleotide
  Antisense strand to SEQ ID NO: 2475846
auguugguaaccuauggac

SEQ ID NO: 2475848 - RNA, 19 nt, Artificial Sequence
  Description of Artificial Sequence: Synthetic oligonucleotide
  Sense strand starting at position 2696 of SEQ ID NO: 1887489
ggccucugagccugaugau

SEQ ID NO: 2475849 - RNA, 19 nt, Artificial Sequence
  Description of Artificial Sequence: Synthetic oligonucleotide
  Antisense strand to SEQ ID NO: 2475848
aucaucaggcucagaggcc

SEQ ID NO: 2475850 - RNA, 19 nt, Artificial Sequence
  Description of Artificial Sequence: Synthetic oligonucleotide
  Sense strand starting at position 2736 of SEQ ID NO: 1887489
guggcagguccuugaacuu

SEQ ID NO: 2475851 - RNA, 19 nt, Artificial Sequence
  Description of Artificial Sequence: Synthetic oligonucleotide
  Antisense strand to SEQ ID NO: 2475850
aaguucaaggaccugccac

SEQ ID NO: 2475852 - RNA, 19 nt, Artificial Sequence
  Description of Artificial Sequence: Synthetic oligonucleotide
  Sense strand starting at position 2748 of SEQ ID NO: 1887489
ugaacuuccgaucauucuu

SEQ ID NO: 2475853 - RNA, 19 nt, Artificial Sequence
  Description of Artificial Sequence: Synthetic oligonucleotide
  Antisense strand to SEQ ID NO: 2475852
aagaaugaucggaaguuca

SEQ ID NO: 2475854 - RNA, 19 nt, Artificial Sequence
  Description of Artificial Sequence: Synthetic oligonucleotide
  Sense strand starting at position 2769 of SEQ ID NO: 1887489
ucauuaaaugaugguugga

SEQ ID NO: 2475855 - RNA, 19 nt, Artificial Sequence
  Description of Artificial Sequence: Synthetic oligonucleotide
  Antisense strand to SEQ ID NO: 2475854
uccaaccaucauuuaauga

SEQ ID NO: 2475856 - RNA, 19 nt, Artificial Sequence
  Description of Artificial Sequence: Synthetic oligonucleotide
  Sense strand starting at position 2771 of SEQ ID NO: 1887489
auuaaaugaugguuggauu

SEQ ID NO: 2475857 - RNA, 19 nt, Artificial Sequence
  Description of Artificial Sequence: Synthetic oligonucleotide
  Antisense strand to SEQ ID NO: 2475856
aauccaaccaucauuuaau

SEQ ID NO: 2475858 - RNA, 19 nt, Artificial Sequence
  Description of Artificial Sequence: Synthetic oligonucleotide
  Sense strand starting at position 2905 of SEQ ID NO: 1887489
guaacuugguccucucuga

SEQ ID NO: 2475859 - RNA, 19 nt, Artificial Sequence
  Description of Artificial Sequence: Synthetic oligonucleotide
  Antisense strand to SEQ ID NO: 2475858
ucagagaggaccaaguuac

SEQ ID NO: 2475860 - RNA, 19 nt, Artificial Sequence
  Description of Artificial Sequence: Synthetic oligonucleotide
  Sense strand starting at position 3030 of SEQ ID NO: 1887489
aagugagauuugcagccuu

SEQ ID NO: 2475861 - RNA, 19 nt, Artificial Sequence
  Description of Artificial Sequence: Synthetic oligonucleotide
  Antisense strand to SEQ ID NO: 2475860
aaggcugcaaaucucacuu

SEQ ID NO: 2475862 - RNA, 19 nt, Artificial Sequence
  Description of Artificial Sequence: Synthetic oligonucleotide
  Sense strand starting at position 3110 of SEQ ID NO: 1887489
ugacaauacuugucaaagc

SEQ ID NO: 2475863 - RNA, 19 nt, Artificial Sequence
  Description of Artificial Sequence: Synthetic oligonucleotide
  Antisense strand to SEQ ID NO: 2475862
gcuuugacaaguauuguca

SEQ ID NO: 2475864 - RNA, 19 nt, Artificial Sequence
  Description of Artificial Sequence: Synthetic oligonucleotide
  Sense strand starting at position 3229 of SEQ ID NO: 1887489
gcucaaagcuuugcaaagu

SEQ ID NO: 2475865 - RNA, 19 nt, Artificial Sequence
  Description of Artificial Sequence: Synthetic oligonucleotide
  Antisense strand to SEQ ID NO: 2475864
acuuugcaaagcuuugagc

SEQ ID NO: 2475866 - RNA, 19 nt, Artificial Sequence
  Description of Artificial Sequence: Synthetic oligonucleotide
  Sense strand starting at position 3344 of SEQ ID NO: 1887489
ggaccagcccucugaggau

SEQ ID NO: 2475867 - RNA, 19 nt, Artificial Sequence
  Description of Artificial Sequence: Synthetic oligonucleotide
  Antisense strand to SEQ ID NO: 2475866
auccucagagggcuggucc

SEQ ID NO: 2475868 - RNA, 19 nt, Artificial Sequence
  Description of Artificial Sequence: Synthetic oligonucleotide
  Sense strand starting at position 3455 of SEQ ID NO: 1887489
aggcguguucagcagaaac

SEQ ID NO: 2475869 - RNA, 19 nt, Artificial Sequence
  Description of Artificial Sequence: Synthetic oligonucleotide
  Antisense strand to SEQ ID NO: 2475868
guuucugcugaacacgccu

SEQ ID NO: 2475870 - RNA, 19 nt, Artificial Sequence
  Description of Artificial Sequence: Synthetic oligonucleotide
  Sense strand starting at position 3457 of SEQ ID NO: 1887489
gcguguucagcagaaaccu

SEQ ID NO: 2475871 - RNA, 19 nt, Artificial Sequence
  Description of Artificial Sequence: Synthetic oligonucleotide
  Antisense strand to SEQ ID NO: 2475870
agguuucugcugaacacgc

SEQ ID NO: 2475872 - RNA, 19 nt, Artificial Sequence
  Description of Artificial Sequence: Synthetic oligonucleotide
  Sense strand starting at position 3562 of SEQ ID NO: 1887489
ccacuucucuugguaucca

SEQ ID NO: 2475873 - RNA, 19 nt, Artificial Sequence
  Description of Artificial Sequence: Synthetic oligonucleotide
  Antisense strand to SEQ ID NO: 2475872
uggauaccaagagaagugg

SEQ ID NO: 2475874 - RNA, 19 nt, Artificial Sequence
  Description of Artificial Sequence: Synthetic oligonucleotide
  Sense strand starting at position 3574 of SEQ ID NO: 1887489
guauccacgucucugugaa

SEQ ID NO: 2475875 - RNA, 19 nt, Artificial Sequence
  Description of Artificial Sequence: Synthetic oligonucleotide
  Antisense strand to SEQ ID NO: 2475874
uucacagagacguggauac

SEQ ID NO: 2475876 - RNA, 19 nt, Artificial Sequence
  Description of Artificial Sequence: Synthetic oligonucleotide
  Sense strand starting at position 3575 of SEQ ID NO: 1887489
uauccacgucucugugaaa

SEQ ID NO: 2475877 - RNA, 19 nt, Artificial Sequence
  Description of Artificial Sequence: Synthetic oligonucleotide
  Antisense strand to SEQ ID NO: 2475876
uuucacagagacguggaua

SEQ ID NO: 2475878 - RNA, 19 nt, Artificial Sequence
  Description of Artificial Sequence: Synthetic oligonucleotide
  Sense strand starting at position 3576 of SEQ ID NO: 1887489
auccacgucucugugaaau

SEQ ID NO: 2475879 - RNA, 19 nt, Artificial Sequence
  Description of Artificial Sequence: Synthetic oligonucleotide
  Antisense strand to SEQ ID NO: 2475878
auuucacagagacguggau

SEQ ID NO: 2475880 - RNA, 19 nt, Artificial Sequence
  Description of Artificial Sequence: Synthetic oligonucleotide
  Sense strand starting at position 3768 of SEQ ID NO: 1887489
cugaguucugcaggcagga

SEQ ID NO: 2475881 - RNA, 19 nt, Artificial Sequence
  Description of Artificial Sequence: Synthetic oligonucleotide
  Antisense strand to SEQ ID NO: 2475880
uccugccugcagaacucag

SEQ ID NO: 2475882 - RNA, 19 nt, Artificial Sequence
  Description of Artificial Sequence: Synthetic oligonucleotide
  Sense strand starting at position 3923 of SEQ ID NO: 1887489
acuuguacacgcguguuua

SEQ ID NO: 2475883 - RNA, 19 nt, Artificial Sequence
  Description of Artificial Sequence: Synthetic oligonucleotide
  Antisense strand to SEQ ID NO: 2475882
uaaacacgcguguacaagu

SEQ ID NO: 2475884 - RNA, 19 nt, Artificial Sequence
  Description of Artificial Sequence: Synthetic oligonucleotide
  Sense strand starting at position 117 of SEQ ID NO: 1887490
ccaugauuacgacacugua

SEQ ID NO: 2475885 - RNA, 19 nt, Artificial Sequence
  Description of Artificial Sequence: Synthetic oligonucleotide
  Antisense strand to SEQ ID NO: 2475884
uacagugucguaaucaugg

SEQ ID NO: 2475886 - RNA, 19 nt, Artificial Sequence
  Description of Artificial Sequence: Synthetic oligonucleotide
  Sense strand starting at position 635 of SEQ ID NO: 1887490
agguauauuuaauggaaca

SEQ ID NO: 2475887 - RNA, 19 nt, Artificial Sequence
  Description of Artificial Sequence: Synthetic oligonucleotide
  Antisense strand to SEQ ID NO: 2475886
uguuccauuaaauauaccu

SEQ ID NO: 2475888 - RNA, 19 nt, Artificial Sequence
  Description of Artificial Sequence: Synthetic oligonucleotide
  Sense strand starting at position 771 of SEQ ID NO: 1887490
ugaucaaaguugucuccua

SEQ ID NO: 2475889 - RNA, 19 nt, Artificial Sequence
  Description of Artificial Sequence: Synthetic oligonucleotide
  Antisense strand to SEQ ID NO: 2475888
uaggagacaacuuugauca

SEQ ID NO: 2475890 - RNA, 19 nt, Artificial Sequence
  Description of Artificial Sequence: Synthetic oligonucleotide
  Sense strand starting at position 861 of SEQ ID NO: 1887490
cuguaaagauuuggaaaua

SEQ ID NO: 2475891 - RNA, 19 nt, Artificial Sequence
  Description of Artificial Sequence: Synthetic oligonucleotide
  Antisense strand to SEQ ID NO: 2475890
uauuuccaaaucuuuacag

SEQ ID NO: 2475892 - RNA, 19 nt, Artificial Sequence
  Description of Artificial Sequence: Synthetic oligonucleotide
  Sense strand starting at position 862 of SEQ ID NO: 1887490
uguaaagauuuggaaauag

SEQ ID NO: 2475893 - RNA, 19 nt, Artificial Sequence
  Description of Artificial Sequence: Synthetic oligonucleotide
  Antisense strand to SEQ ID NO: 2475892
cuauuuccaaaucuuuaca

SEQ ID NO: 2475894 - RNA, 19 nt, Artificial Sequence
  Description of Artificial Sequence: Synthetic oligonucleotide
  Sense strand starting at position 873 of SEQ ID NO: 1887490
ggaaauagauaccagagga

SEQ ID NO: 2475895 - RNA, 19 nt, Artificial Sequence
  Description of Artificial Sequence: Synthetic oligonucleotide
  Antisense strand to SEQ ID NO: 2475894
uccucugguaucuauuucc

SEQ ID NO: 2475896 - RNA, 19 nt, Artificial Sequence
  Description of Artificial Sequence: Synthetic oligonucleotide
  Sense strand starting at position 1029 of SEQ ID NO: 1887490
guuuaaaggcguguuguuu

SEQ ID NO: 2475897 - RNA, 19 nt, Artificial Sequence
  Description of Artificial Sequence: Synthetic oligonucleotide
  Antisense strand to SEQ ID NO: 2475896
aaacaacacgccuuuaaac

SEQ ID NO: 2475898 - RNA, 19 nt, Artificial Sequence
  Description of Artificial Sequence: Synthetic oligonucleotide
  Sense strand starting at position 1086 of SEQ ID NO: 1887490
ucguguauuacuggaacau

SEQ ID NO: 2475899 - RNA, 19 nt, Artificial Sequence
  Description of Artificial Sequence: Synthetic oligonucleotide
  Antisense strand to SEQ ID NO: 2475898
auguuccaguaauacacga

SEQ ID NO: 2475900 - RNA, 19 nt, Artificial Sequence
  Description of Artificial Sequence: Synthetic oligonucleotide
  Sense strand starting at position 1087 of SEQ ID NO: 1887490
cguguauuacuggaacauu

SEQ ID NO: 2475901 - RNA, 19 nt, Artificial Sequence
  Description of Artificial Sequence: Synthetic oligonucleotide
  Antisense strand to SEQ ID NO: 2475900
aauguuccaguaauacacg

SEQ ID NO: 2475902 - RNA, 19 nt, Artificial Sequence
  Description of Artificial Sequence: Synthetic oligonucleotide
  Sense strand starting at position 1169 of SEQ ID NO: 1887490
guaaauagacgcugucuaa

SEQ ID NO: 2475903 - RNA, 19 nt, Artificial Sequence
  Description of Artificial Sequence: Synthetic oligonucleotide
  Antisense strand to SEQ ID NO: 2475902
uuagacagcgucuauuuac

SEQ ID NO: 2475904 - RNA, 19 nt, Artificial Sequence
  Description of Artificial Sequence: Synthetic oligonucleotide
  Sense strand starting at position 1172 of SEQ ID NO: 1887490
aauagacgcugucuaaagu

SEQ ID NO: 2475905 - RNA, 19 nt, Artificial Sequence
  Description of Artificial Sequence: Synthetic oligonucleotide
  Antisense strand to SEQ ID NO: 2475904
acuuuagacagcgucuauu

SEQ ID NO: 2475906 - RNA, 19 nt, Artificial Sequence
  Description of Artificial Sequence: Synthetic oligonucleotide
  Sense strand starting at position 1173 of SEQ ID NO: 1887490
auagacgcugucuaaaguu

SEQ ID NO: 2475907 - RNA, 19 nt, Artificial Sequence
  Description of Artificial Sequence: Synthetic oligonucleotide
  Antisense strand to SEQ ID NO: 2475906
aacuuuagacagcgucuau

SEQ ID NO: 2475908 - RNA, 19 nt, Artificial Sequence
  Description of Artificial Sequence: Synthetic oligonucleotide
  Sense strand starting at position 1207 of SEQ ID NO: 1887490
agagcuuucgaacauauca

SEQ ID NO: 2475909 - RNA, 19 nt, Artificial Sequence
  Description of Artificial Sequence: Synthetic oligonucleotide
  Antisense strand to SEQ ID NO: 2475908
ugauauguucgaaagcucu

SEQ ID NO: 2475910 - RNA, 19 nt, Artificial Sequence
  Description of Artificial Sequence: Synthetic oligonucleotide
  Sense strand starting at position 1214 of SEQ ID NO: 1887490
ucgaacauaucacugaaca

SEQ ID NO: 2475911 - RNA, 19 nt, Artificial Sequence
  Description of Artificial Sequence: Synthetic oligonucleotide
  Antisense strand to SEQ ID NO: 2475910
uguucagugauauguucga

SEQ ID NO: 2475912 - RNA, 19 nt, Artificial Sequence
  Description of Artificial Sequence: Synthetic oligonucleotide
  Sense strand starting at position 1215 of SEQ ID NO: 1887490
cgaacauaucacugaacau

SEQ ID NO: 2475913 - RNA, 19 nt, Artificial Sequence
  Description of Artificial Sequence: Synthetic oligonucleotide
  Antisense strand to SEQ ID NO: 2475912
auguucagugauauguucg

SEQ ID NO: 2475914 - RNA, 19 nt, Artificial Sequence
  Description of Artificial Sequence: Synthetic oligonucleotide
  Sense strand starting at position 1555 of SEQ ID NO: 1887490
ggcuuucuaacgugcauuu

SEQ ID NO: 2475915 - RNA, 19 nt, Artificial Sequence
  Description of Artificial Sequence: Synthetic oligonucleotide
  Antisense strand to SEQ ID NO: 2475914
aaaugcacguuagaaagcc

SEQ ID NO: 2475916 - RNA, 19 nt, Artificial Sequence
  Description of Artificial Sequence: Synthetic oligonucleotide
  Sense strand starting at position 1565 of SEQ ID NO: 1887490
cgugcauuuguauaacuuu

SEQ ID NO: 2475917 - RNA, 19 nt, Artificial Sequence
  Description of Artificial Sequence: Synthetic oligonucleotide
  Antisense strand to SEQ ID NO: 2475916
aaaguuauacaaaugcacg

SEQ ID NO: 2475918 - RNA, 19 nt, Artificial Sequence
  Description of Artificial Sequence: Synthetic oligonucleotide
  Sense strand starting at position 1571 of SEQ ID NO: 1887490
uuuguauaacuuuggguuu

SEQ ID NO: 2475919 - RNA, 19 nt, Artificial Sequence
  Description of Artificial Sequence: Synthetic oligonucleotide
  Antisense strand to SEQ ID NO: 2475918
aaacccaaaguuauacaaa

SEQ ID NO: 2475920 - RNA, 19 nt, Artificial Sequence
  Description of Artificial Sequence: Synthetic oligonucleotide
  Sense strand starting at position 1574 of SEQ ID NO: 1887490
guauaacuuuggguuuaaa

SEQ ID NO: 2475921 - RNA, 19 nt, Artificial Sequence
  Description of Artificial Sequence: Synthetic oligonucleotide
  Antisense strand to SEQ ID NO: 2475920
uuuaaacccaaaguuauac

SEQ ID NO: 2475922 - RNA, 19 nt, Artificial Sequence
  Description of Artificial Sequence: Synthetic oligonucleotide
  Sense strand starting at position 1821 of SEQ ID NO: 1887490
cacuuuguucugggaggca

SEQ ID NO: 2475923 - RNA, 19 nt, Artificial Sequence
  Description of Artificial Sequence: Synthetic oligonucleotide
  Antisense strand to SEQ ID NO: 2475922
ugccucccagaacaaagug

SEQ ID NO: 2475924 - RNA, 19 nt, Artificial Sequence
  Description of Artificial Sequence: Synthetic oligonucleotide
  Sense strand starting at position 2347 of SEQ ID NO: 1887490
uucgaaacacuuggaucaa

SEQ ID NO: 2475925 - RNA, 19 nt, Artificial Sequence
  Description of Artificial Sequence: Synthetic oligonucleotide
  Antisense strand to SEQ ID NO: 2475924
uugauccaaguguuucgaa

SEQ ID NO: 2475926 - RNA, 19 nt, Artificial Sequence
  Description of Artificial Sequence: Synthetic oligonucleotide
  Sense strand starting at position 2545 of SEQ ID NO: 1887490
acugaauuaauccggaggu

SEQ ID NO: 2475927 - RNA, 19 nt, Artificial Sequence
  Description of Artificial Sequence: Synthetic oligonucleotide
  Antisense strand to SEQ ID NO: 2475926
accuccggauuaauucagu

SEQ ID NO: 2475928 - RNA, 19 nt, Artificial Sequence
  Description of Artificial Sequence: Synthetic oligonucleotide
  Sense strand starting at position 2547 of SEQ ID NO: 1887490
ugaauuaauccggagguuc

SEQ ID NO: 2475929 - RNA, 19 nt, Artificial Sequence
  Description of Artificial Sequence: Synthetic oligonucleotide
  Antisense strand to SEQ ID NO: 2475928
gaaccuccggauuaauuca

SEQ ID NO: 2475930 - RNA, 19 nt, Artificial Sequence
  Description of Artificial Sequence: Synthetic oligonucleotide
  Sense strand starting at position 2635 of SEQ ID NO: 1887490
uucugauggcccuagauug

SEQ ID NO: 2475931 - RNA, 19 nt, Artificial Sequence
  Description of Artificial Sequence: Synthetic oligonucleotide
  Antisense strand to SEQ ID NO: 2475930
caaucuagggccaucagaa

SEQ ID NO: 2475932 - RNA, 19 nt, Artificial Sequence
  Description of Artificial Sequence: Synthetic oligonucleotide
  Sense strand starting at position 2666 of SEQ ID NO: 1887490
caaggugacugaucucaga

SEQ ID NO: 2475933 - RNA, 19 nt, Artificial Sequence
  Description of Artificial Sequence: Synthetic oligonucleotide
  Antisense strand to SEQ ID NO: 2475932
ucugagaucagucaccuug

SEQ ID NO: 2475934 - RNA, 19 nt, Artificial Sequence
  Description of Artificial Sequence: Synthetic oligonucleotide
  Sense strand starting at position 2725 of SEQ ID NO: 1887490
gcugguaaaucauucucca

SEQ ID NO: 2475935 - RNA, 19 nt, Artificial Sequence
  Description of Artificial Sequence: Synthetic oligonucleotide
  Antisense strand to SEQ ID NO: 2475934
uggagaaugauuuaccagc

SEQ ID NO: 2475936 - RNA, 19 nt, Artificial Sequence
  Description of Artificial Sequence: Synthetic oligonucleotide
  Sense strand starting at position 2830 of SEQ ID NO: 1887490
agagauaccuggucuguug

SEQ ID NO: 2475937 - RNA, 19 nt, Artificial Sequence
  Description of Artificial Sequence: Synthetic oligonucleotide
  Antisense strand to SEQ ID NO: 2475936
caacagaccagguaucucu

SEQ ID NO: 2475938 - RNA, 19 nt, Artificial Sequence
  Description of Artificial Sequence: Synthetic oligonucleotide
  Sense strand starting at position 3086 of SEQ ID NO: 1887490
acuguauuauugguagagu

SEQ ID NO: 2475939 - RNA, 19 nt, Artificial Sequence
  Description of Artificial Sequence: Synthetic oligonucleotide
  Antisense strand to SEQ ID NO: 2475938
acucuaccaauaauacagu

SEQ ID NO: 2475940 - RNA, 19 nt, Artificial Sequence
  Description of Artificial Sequence: Synthetic oligonucleotide
  Sense strand starting at position 3121 of SEQ ID NO: 1887490
cacgcaguuccuuauguga

SEQ ID NO: 2475941 - RNA, 19 nt, Artificial Sequence
  Description of Artificial Sequence: Synthetic oligonucleotide
  Antisense strand to SEQ ID NO: 2475940
ucacauaaggaacugcgug

SEQ ID NO: 2475942 - RNA, 19 nt, Artificial Sequence
  Description of Artificial Sequence: Synthetic oligonucleotide
  Sense strand starting at position 3124 of SEQ ID NO: 1887490
gcaguuccuuaugugaaag

SEQ ID NO: 2475943 - RNA, 19 nt, Artificial Sequence
  Description of Artificial Sequence: Synthetic oligonucleotide
  Antisense strand to SEQ ID NO: 2475942
cuuucacauaaggaacugc

SEQ ID NO: 2475944 - RNA, 19 nt, Artificial Sequence
  Description of Artificial Sequence: Synthetic oligonucleotide
  Sense strand starting at position 3511 of SEQ ID NO: 1887490
gcugcucaauucucugaca

SEQ ID NO: 2475945 - RNA, 19 nt, Artificial Sequence
  Description of Artificial Sequence: Synthetic oligonucleotide
  Antisense strand to SEQ ID NO: 2475944
ugucagagaauugagcagc

SEQ ID NO: 2475946 - RNA, 19 nt, Artificial Sequence
  Description of Artificial Sequence: Synthetic oligonucleotide
  Sense strand starting at position 3551 of SEQ ID NO: 1887490
ggacaagaauacuaacuaa

SEQ ID NO: 2475947 - RNA, 19 nt, Artificial Sequence
  Description of Artificial Sequence: Synthetic oligonucleotide
  Antisense strand to SEQ ID NO: 2475946
uuaguuaguauucuugucc

SEQ ID NO: 2475948 - RNA, 19 nt, Artificial Sequence
  Description of Artificial Sequence: Synthetic oligonucleotide
  Sense strand starting at position 3603 of SEQ ID NO: 1887490
uccucuaagucuuccucga

SEQ ID NO: 2475949 - RNA, 19 nt, Artificial Sequence
  Description of Artificial Sequence: Synthetic oligonucleotide
  Antisense strand to SEQ ID NO: 2475948
ucgaggaagacuuagagga

SEQ ID NO: 2475950 - RNA, 19 nt, Artificial Sequence
  Description of Artificial Sequence: Synthetic oligonucleotide
  Sense strand starting at position 3605 of SEQ ID NO: 1887490
cucuaagucuuccucgaaa

SEQ ID NO: 2475951 - RNA, 19 nt, Artificial Sequence
  Description of Artificial Sequence: Synthetic oligonucleotide
  Antisense strand to SEQ ID NO: 2475950
uuucgaggaagacuuagag

SEQ ID NO: 2475952 - RNA, 19 nt, Artificial Sequence
  Description of Artificial Sequence: Synthetic oligonucleotide
  Sense strand starting at position 3707 of SEQ ID NO: 1887490
uguuguaaauaccuuaaca

SEQ ID NO: 2475953 - RNA, 19 nt, Artificial Sequence
  Description of Artificial Sequence: Synthetic oligonucleotide
  Antisense strand to SEQ ID NO: 2475952
uguuaagguauuuacaaca

SEQ ID NO: 2475954 - RNA, 19 nt, Artificial Sequence
  Description of Artificial Sequence: Synthetic oligonucleotide
  Sense strand starting at position 3729 of SEQ ID NO: 1887490
agacaaagcaauugugugu

SEQ ID NO: 2475955 - RNA, 19 nt, Artificial Sequence
  Description of Artificial Sequence: Synthetic oligonucleotide
  Antisense strand to SEQ ID NO: 2475954
acacacaauugcuuugucu

SEQ ID NO: 2475956 - RNA, 19 nt, Artificial Sequence
  Description of Artificial Sequence: Synthetic oligonucleotide
  Sense strand starting at position 3732 of SEQ ID NO: 1887490
caaagcaauuguguguuau

SEQ ID NO: 2475957 - RNA, 19 nt, Artificial Sequence
  Description of Artificial Sequence: Synthetic oligonucleotide
  Antisense strand to SEQ ID NO: 2475956
auaacacacaauugcuuug

SEQ ID NO: 2475958 - RNA, 19 nt, Artificial Sequence
  Description of Artificial Sequence: Synthetic oligonucleotide
  Sense strand starting at position 3770 of SEQ ID NO: 1887490
augcauacuugugcugaca

SEQ ID NO: 2475959 - RNA, 19 nt, Artificial Sequence
  Description of Artificial Sequence: Synthetic oligonucleotide
  Antisense strand to SEQ ID NO: 2475958
ugucagcacaaguaugcau

SEQ ID NO: 2475960 - RNA, 19 nt, Artificial Sequence
  Description of Artificial Sequence: Synthetic oligonucleotide
  Sense strand starting at position 3802 of SEQ ID NO: 1887490
ugcugauacccauggacuu

SEQ ID NO: 2475961 - RNA, 19 nt, Artificial Sequence
  Description of Artificial Sequence: Synthetic oligonucleotide
  Antisense strand to SEQ ID NO: 2475960
aaguccauggguaucagca

SEQ ID NO: 2475962 - RNA, 19 nt, Artificial Sequence
  Description of Artificial Sequence: Synthetic oligonucleotide
  Sense strand starting at position 3817 of SEQ ID NO: 1887490
acuugagcuuguuucuuua

SEQ ID NO: 2475963 - RNA, 19 nt, Artificial Sequence
  Description of Artificial Sequence: Synthetic oligonucleotide
  Antisense strand to SEQ ID NO: 2475962
uaaagaaacaagcucaagu

SEQ ID NO: 2475964 - RNA, 19 nt, Artificial Sequence
  Description of Artificial Sequence: Synthetic oligonucleotide
  Sense strand starting at position 132 of SEQ ID NO: 1887491
gggcuuucauuggguguga

SEQ ID NO: 2475965 - RNA, 19 nt, Artificial Sequence
  Description of Artificial Sequence: Synthetic oligonucleotide
  Antisense strand to SEQ ID NO: 2475964
ucacacccaaugaaagccc

SEQ ID NO: 2475966 - RNA, 19 nt, Artificial Sequence
  Description of Artificial Sequence: Synthetic oligonucleotide
  Sense strand starting at position 133 of SEQ ID NO: 1887491
ggcuuucauugggugugaa

SEQ ID NO: 2475967 - RNA, 19 nt, Artificial Sequence
  Description of Artificial Sequence: Synthetic oligonucleotide
  Antisense strand to SEQ ID NO: 2475966
uucacacccaaugaaagcc

SEQ ID NO: 2475968 - RNA, 19 nt, Artificial Sequence
  Description of Artificial Sequence: Synthetic oligonucleotide
  Sense strand starting at position 134 of SEQ ID NO: 1887491
gcuuucauugggugugaag

SEQ ID NO: 2475969 - RNA, 19 nt, Artificial Sequence
  Description of Artificial Sequence: Synthetic oligonucleotide
  Antisense strand to SEQ ID NO: 2475968
cuucacacccaaugaaagc

SEQ ID NO: 2475970 - RNA, 19 nt, Artificial Sequence
  Description of Artificial Sequence: Synthetic oligonucleotide
  Sense strand starting at position 143 of SEQ ID NO: 1887491
gggugugaagucuacaaac

SEQ ID NO: 2475971 - RNA, 19 nt, Artificial Sequence
  Description of Artificial Sequence: Synthetic oligonucleotide
  Antisense strand to SEQ ID NO: 2475970
guuuguagacuucacaccc

SEQ ID NO: 2475972 - RNA, 19 nt, Artificial Sequence
  Description of Artificial Sequence: Synthetic oligonucleotide
  Sense strand starting at position 145 of SEQ ID NO: 1887491
gugugaagucuacaaacag

SEQ ID NO: 2475973 - RNA, 19 nt, Artificial Sequence
  Description of Artificial Sequence: Synthetic oligonucleotide
  Antisense strand to SEQ ID NO: 2475972
cuguuuguagacuucacac

SEQ ID NO: 2475974 - RNA, 19 nt, Artificial Sequence
  Description of Artificial Sequence: Synthetic oligonucleotide
  Sense strand starting at position 193 of SEQ ID NO: 1887491
ucuuaagauuuaggaaaug

SEQ ID NO: 2475975 - RNA, 19 nt, Artificial Sequence
  Description of Artificial Sequence: Synthetic oligonucleotide
  Antisense strand to SEQ ID NO: 2475974
cauuuccuaaaucuuaaga

SEQ ID NO: 2475976 - RNA, 19 nt, Artificial Sequence
  Description of Artificial Sequence: Synthetic oligonucleotide
  Sense strand starting at position 328 of SEQ ID NO: 1887491
gagagauaccugcaguguc

SEQ ID NO: 2475977 - RNA, 19 nt, Artificial Sequence
  Description of Artificial Sequence: Synthetic oligonucleotide
  Antisense strand to SEQ ID NO: 2475976
gacacugcagguaucucuc

SEQ ID NO: 2475978 - RNA, 19 nt, Artificial Sequence
  Description of Artificial Sequence: Synthetic oligonucleotide
  Sense strand starting at position 345 of SEQ ID NO: 1887491
uccagcaucucagugaaca

SEQ ID NO: 2475979 - RNA, 19 nt, Artificial Sequence
  Description of Artificial Sequence: Synthetic oligonucleotide
  Antisense strand to SEQ ID NO: 2475978
uguucacugagaugcugga

SEQ ID NO: 2475980 - RNA, 19 nt, Artificial Sequence
  Description of Artificial Sequence: Synthetic oligonucleotide
  Sense strand starting at position 346 of SEQ ID NO: 1887491
ccagcaucucagugaacau

SEQ ID NO: 2475981 - RNA, 19 nt, Artificial Sequence
  Description of Artificial Sequence: Synthetic oligonucleotide
  Antisense strand to SEQ ID NO: 2475980
auguucacugagaugcugg

SEQ ID NO: 2475982 - RNA, 19 nt, Artificial Sequence
  Description of Artificial Sequence: Synthetic oligonucleotide
  Sense strand starting at position 650 of SEQ ID NO: 1887491
uaucacuugugcuguugau

SEQ ID NO: 2475983 - RNA, 19 nt, Artificial Sequence
  Description of Artificial Sequence: Synthetic oligonucleotide
  Antisense strand to SEQ ID NO: 2475982
aucaacagcacaagugaua

SEQ ID NO: 2475984 - RNA, 19 nt, Artificial Sequence
  Description of Artificial Sequence: Synthetic oligonucleotide
  Sense strand starting at position 656 of SEQ ID NO: 1887491
uugugcuguugauacuuga

SEQ ID NO: 2475985 - RNA, 19 nt, Artificial Sequence
  Description of Artificial Sequence: Synthetic oligonucleotide
  Antisense strand to SEQ ID NO: 2475984
ucaaguaucaacagcacaa

SEQ ID NO: 2475986 - RNA, 19 nt, Artificial Sequence
  Description of Artificial Sequence: Synthetic oligonucleotide
  Sense strand starting at position 663 of SEQ ID NO: 1887491
guugauacuugaccaugua

SEQ ID NO: 2475987 - RNA, 19 nt, Artificial Sequence
  Description of Artificial Sequence: Synthetic oligonucleotide
  Antisense strand to SEQ ID NO: 2475986
uacauggucaaguaucaac

SEQ ID NO: 2475988 - RNA, 19 nt, Artificial Sequence
  Description of Artificial Sequence: Synthetic oligonucleotide
  Sense strand starting at position 750 of SEQ ID NO: 1887491
ugaguaacuugagguuuau

SEQ ID NO: 2475989 - RNA, 19 nt, Artificial Sequence
  Description of Artificial Sequence: Synthetic oligonucleotide
  Antisense strand to SEQ ID NO: 2475988
auaaaccucaaguuacuca

SEQ ID NO: 2475990 - RNA, 19 nt, Artificial Sequence
  Description of Artificial Sequence: Synthetic oligonucleotide
  Sense strand starting at position 1010 of SEQ ID NO: 1887491
uuaggagcuccacaucgaa

SEQ ID NO: 2475991 - RNA, 19 nt, Artificial Sequence
  Description of Artificial Sequence: Synthetic oligonucleotide
  Antisense strand to SEQ ID NO: 2475990
uucgauguggagcuccuaa

SEQ ID NO: 2475992 - RNA, 19 nt, Artificial Sequence
  Description of Artificial Sequence: Synthetic oligonucleotide
  Sense strand starting at position 1078 of SEQ ID NO: 1887491
uaggcagaaucuggagaua

SEQ ID NO: 2475993 - RNA, 19 nt, Artificial Sequence
  Description of Artificial Sequence: Synthetic oligonucleotide
  Antisense strand to SEQ ID NO: 2475992
uaucuccagauucugccua

SEQ ID NO: 2475994 - RNA, 19 nt, Artificial Sequence
  Description of Artificial Sequence: Synthetic oligonucleotide
  Sense strand starting at position 1153 of SEQ ID NO: 1887491
cggaucaccuccugcuaaa

SEQ ID NO: 2475995 - RNA, 19 nt, Artificial Sequence
  Description of Artificial Sequence: Synthetic oligonucleotide
  Antisense strand to SEQ ID NO: 2475994
uuuagcaggaggugauccg

SEQ ID NO: 2475996 - RNA, 19 nt, Artificial Sequence
  Description of Artificial Sequence: Synthetic oligonucleotide
  Sense strand starting at position 1622 of SEQ ID NO: 1887491
gauagucuguagcucuuaa

SEQ ID NO: 2475997 - RNA, 19 nt, Artificial Sequence
  Description of Artificial Sequence: Synthetic oligonucleotide
  Antisense strand to SEQ ID NO: 2475996
uuaagagcuacagacuauc

SEQ ID NO: 2475998 - RNA, 19 nt, Artificial Sequence
  Description of Artificial Sequence: Synthetic oligonucleotide
  Sense strand starting at position 2022 of SEQ ID NO: 1887491
cugaccuaaucaguaaugu

SEQ ID NO: 2475999 - RNA, 19 nt, Artificial Sequence
  Description of Artificial Sequence: Synthetic oligonucleotide
  Antisense strand to SEQ ID NO: 2475998
acauuacugauuaggucag

SEQ ID NO: 2476000 - RNA, 19 nt, Artificial Sequence
  Description of Artificial Sequence: Synthetic oligonucleotide
  Sense strand starting at position 2023 of SEQ ID NO: 1887491
ugaccuaaucaguaauguu

SEQ ID NO: 2476001 - RNA, 19 nt, Artificial Sequence
  Description of Artificial Sequence: Synthetic oligonucleotide
  Antisense strand to SEQ ID NO: 2476000
aacauuacugauuagguca

SEQ ID NO: 2476002 - RNA, 19 nt, Artificial Sequence
  Description of Artificial Sequence: Synthetic oligonucleotide
  Sense strand starting at position 2026 of SEQ ID NO: 1887491
ccuaaucaguaauguuaua

SEQ ID NO: 2476003 - RNA, 19 nt, Artificial Sequence
  Description of Artificial Sequence: Synthetic oligonucleotide
  Antisense strand to SEQ ID NO: 2476002
uauaacauuacugauuagg

SEQ ID NO: 2476004 - RNA, 19 nt, Artificial Sequence
  Description of Artificial Sequence: Synthetic oligonucleotide
  Sense strand starting at position 2031 of SEQ ID NO: 1887491
ucaguaauguuauacagau

SEQ ID NO: 2476005 - RNA, 19 nt, Artificial Sequence
  Description of Artificial Sequence: Synthetic oligonucleotide
  Antisense strand to SEQ ID NO: 2476004
aucuguauaacauuacuga

SEQ ID NO: 2476006 - RNA, 19 nt, Artificial Sequence
  Description of Artificial Sequence: Synthetic oligonucleotide
  Sense strand starting at position 2330 of SEQ ID NO: 1887491
cugcuauaccuacgauuuc

SEQ ID NO: 2476007 - RNA, 19 nt, Artificial Sequence
  Description of Artificial Sequence: Synthetic oligonucleotide
  Antisense strand to SEQ ID NO: 2476006
gaaaucguagguauagcag

SEQ ID NO: 2476008 - RNA, 19 nt, Artificial Sequence
  Description of Artificial Sequence: Synthetic oligonucleotide
  Sense strand starting at position 2605 of SEQ ID NO: 1887491
auccaacucugugugaauc

SEQ ID NO: 2476009 - RNA, 19 nt, Artificial Sequence
  Description of Artificial Sequence: Synthetic oligonucleotide
  Antisense strand to SEQ ID NO: 2476008
gauucacacagaguuggau

SEQ ID NO: 2476010 - RNA, 19 nt, Artificial Sequence
  Description of Artificial Sequence: Synthetic oligonucleotide
  Sense strand starting at position 2606 of SEQ ID NO: 1887491
uccaacucugugugaauca

SEQ ID NO: 2476011 - RNA, 19 nt, Artificial Sequence
  Description of Artificial Sequence: Synthetic oligonucleotide
  Antisense strand to SEQ ID NO: 2476010
ugauucacacagaguugga

SEQ ID NO: 2476012 - RNA, 19 nt, Artificial Sequence
  Description of Artificial Sequence: Synthetic oligonucleotide
  Sense strand starting at position 2607 of SEQ ID NO: 1887491
ccaacucugugugaaucaa

SEQ ID NO: 2476013 - RNA, 19 nt, Artificial Sequence
  Description of Artificial Sequence: Synthetic oligonucleotide
  Antisense strand to SEQ ID NO: 2476012
uugauucacacagaguugg

SEQ ID NO: 2476014 - RNA, 19 nt, Artificial Sequence
  Description of Artificial Sequence: Synthetic oligonucleotide
  Sense strand starting at position 2651 of SEQ ID NO: 1887491
ccugauaaauuggcucuau

SEQ ID NO: 2476015 - RNA, 19 nt, Artificial Sequence
  Description of Artificial Sequence: Synthetic oligonucleotide
  Antisense strand to SEQ ID NO: 2476014
auagagccaauuuaucagg

SEQ ID NO: 2476016 - RNA, 19 nt, Artificial Sequence
  Description of Artificial Sequence: Synthetic oligonucleotide
  Sense strand starting at position 2652 of SEQ ID NO: 1887491
cugauaaauuggcucuauc

SEQ ID NO: 2476017 - RNA, 19 nt, Artificial Sequence
  Description of Artificial Sequence: Synthetic oligonucleotide
  Antisense strand to SEQ ID NO: 2476016
gauagagccaauuuaucag

SEQ ID NO: 2476018 - RNA, 19 nt, Artificial Sequence
  Description of Artificial Sequence: Synthetic oligonucleotide
  Sense strand starting at position 2754 of SEQ ID NO: 1887491
cucugcuuccaguggaaga

SEQ ID NO: 2476019 - RNA, 19 nt, Artificial Sequence
  Description of Artificial Sequence: Synthetic oligonucleotide
  Antisense strand to SEQ ID NO: 2476018
ucuuccacuggaagcagag

SEQ ID NO: 2476020 - RNA, 19 nt, Artificial Sequence
  Description of Artificial Sequence: Synthetic oligonucleotide
  Sense strand starting at position 2755 of SEQ ID NO: 1887491
ucugcuuccaguggaagaa

SEQ ID NO: 2476021 - RNA, 19 nt, Artificial Sequence
  Description of Artificial Sequence: Synthetic oligonucleotide
  Antisense strand to SEQ ID NO: 2476020
uucuuccacuggaagcaga

SEQ ID NO: 2476022 - RNA, 19 nt, Artificial Sequence
  Description of Artificial Sequence: Synthetic oligonucleotide
  Sense strand starting at position 2756 of SEQ ID NO: 1887491
cugcuuccaguggaagaau

SEQ ID NO: 2476023 - RNA, 19 nt, Artificial Sequence
  Description of Artificial Sequence: Synthetic oligonucleotide
  Antisense strand to SEQ ID NO: 2476022
auucuuccacuggaagcag

SEQ ID NO: 2476024 - RNA, 19 nt, Artificial Sequence
  Description of Artificial Sequence: Synthetic oligonucleotide
  Sense strand starting at position 2861 of SEQ ID NO: 1887491
uuccauacacuaggguaau

SEQ ID NO: 2476025 - RNA, 19 nt, Artificial Sequence
  Description of Artificial Sequence: Synthetic oligonucleotide
  Antisense strand to SEQ ID NO: 2476024
auuacccuaguguauggaa

SEQ ID NO: 2476026 - RNA, 19 nt, Artificial Sequence
  Description of Artificial Sequence: Synthetic oligonucleotide
  Sense strand starting at position 2872 of SEQ ID NO: 1887491
aggguaaucagcuacagcu

SEQ ID NO: 2476027 - RNA, 19 nt, Artificial Sequence
  Description of Artificial Sequence: Synthetic oligonucleotide
  Antisense strand to SEQ ID NO: 2476026
agcuguagcugauuacccu

SEQ ID NO: 2476028 - RNA, 19 nt, Artificial Sequence
  Description of Artificial Sequence: Synthetic oligonucleotide
  Sense strand starting at position 2874 of SEQ ID NO: 1887491
gguaaucagcuacagcuaa

SEQ ID NO: 2476029 - RNA, 19 nt, Artificial Sequence
  Description of Artificial Sequence: Synthetic oligonucleotide
  Antisense strand to SEQ ID NO: 2476028
uuagcuguagcugauuacc

SEQ ID NO: 2476030 - RNA, 19 nt, Artificial Sequence
  Description of Artificial Sequence: Synthetic oligonucleotide
  Sense strand starting at position 2887 of SEQ ID NO: 1887491
agcuaauaauugcaagaaa

SEQ ID NO: 2476031 - RNA, 19 nt, Artificial Sequence
  Description of Artificial Sequence: Synthetic oligonucleotide
  Antisense strand to SEQ ID NO: 2476030
uuucuugcaauuauuagcu

SEQ ID NO: 2476032 - RNA, 19 nt, Artificial Sequence
  Description of Artificial Sequence: Synthetic oligonucleotide
  Sense strand starting at position 2933 of SEQ ID NO: 1887491
ggaugauccucugcccagu

SEQ ID NO: 2476033 - RNA, 19 nt, Artificial Sequence
  Description of Artificial Sequence: Synthetic oligonucleotide
  Antisense strand to SEQ ID NO: 2476032
acugggcagaggaucaucc

SEQ ID NO: 2476034 - RNA, 19 nt, Artificial Sequence
  Description of Artificial Sequence: Synthetic oligonucleotide
  Sense strand starting at position 2950 of SEQ ID NO: 1887491
guagaaagaucugcaaucu

SEQ ID NO: 2476035 - RNA, 19 nt, Artificial Sequence
  Description of Artificial Sequence: Synthetic oligonucleotide
  Antisense strand to SEQ ID NO: 2476034
agauugcagaucuuucuac

SEQ ID NO: 2476036 - RNA, 19 nt, Artificial Sequence
  Description of Artificial Sequence: Synthetic oligonucleotide
  Sense strand starting at position 3117 of SEQ ID NO: 1887491
cugggauuauaugcauaug

SEQ ID NO: 2476037 - RNA, 19 nt, Artificial Sequence
  Description of Artificial Sequence: Synthetic oligonucleotide
  Antisense strand to SEQ ID NO: 2476036
cauaugcauauaaucccag

SEQ ID NO: 2476038 - RNA, 19 nt, Artificial Sequence
  Description of Artificial Sequence: Synthetic oligonucleotide
  Sense strand starting at position 3643 of SEQ ID NO: 1887491
agaaacguacuguauugaa

SEQ ID NO: 2476039 - RNA, 19 nt, Artificial Sequence
  Description of Artificial Sequence: Synthetic oligonucleotide
  Antisense strand to SEQ ID NO: 2476038
uucaauacaguacguuucu

SEQ ID NO: 2476040 - RNA, 19 nt, Artificial Sequence
  Description of Artificial Sequence: Synthetic oligonucleotide
  Sense strand starting at position 3646 of SEQ ID NO: 1887491
aacguacuguauugaauca

SEQ ID NO: 2476041 - RNA, 19 nt, Artificial Sequence
  Description of Artificial Sequence: Synthetic oligonucleotide
  Antisense strand to SEQ ID NO: 2476040
ugauucaauacaguacguu

SEQ ID NO: 2476042 - RNA, 19 nt, Artificial Sequence
  Description of Artificial Sequence: Synthetic oligonucleotide
  Sense strand starting at position 3 of SEQ ID NO: 1887492
accauaaauuauucggauu

SEQ ID NO: 2476043 - RNA, 19 nt, Artificial Sequence
  Description of Artificial Sequence: Synthetic oligonucleotide
  Antisense strand to SEQ ID NO: 2476042
aauccgaauaauuuauggu

SEQ ID NO: 2476044 - RNA, 19 nt, Artificial Sequence
  Description of Artificial Sequence: Synthetic oligonucleotide
  Sense strand starting at position 573 of SEQ ID NO: 1887492
ccaguacaaguuuaauauu

SEQ ID NO: 2476045 - RNA, 19 nt, Artificial Sequence
  Description of Artificial Sequence: Synthetic oligonucleotide
  Antisense strand to SEQ ID NO: 2476044
aauauuaaacuuguacugg

SEQ ID NO: 2476046 - RNA, 19 nt, Artificial Sequence
  Description of Artificial Sequence: Synthetic oligonucleotide
  Sense strand starting at position 639 of SEQ ID NO: 1887492
guaggaucugcugaaggca

SEQ ID NO: 2476047 - RNA, 19 nt, Artificial Sequence
  Description of Artificial Sequence: Synthetic oligonucleotide
  Antisense strand to SEQ ID NO: 2476046
ugccuucagcagauccuac

SEQ ID NO: 2476048 - RNA, 19 nt, Artificial Sequence
  Description of Artificial Sequence: Synthetic oligonucleotide
  Sense strand starting at position 831 of SEQ ID NO: 1887492
ccaguauggccuuaguuag

SEQ ID NO: 2476049 - RNA, 19 nt, Artificial Sequence
  Description of Artificial Sequence: Synthetic oligonucleotide
  Antisense strand to SEQ ID NO: 2476048
cuaacuaaggccauacugg

SEQ ID NO: 2476050 - RNA, 19 nt, Artificial Sequence
  Description of Artificial Sequence: Synthetic oligonucleotide
  Sense strand starting at position 916 of SEQ ID NO: 1887492
ggagucaacggccagaauu

SEQ ID NO: 2476051 - RNA, 19 nt, Artificial Sequence
  Description of Artificial Sequence: Synthetic oligonucleotide
  Antisense strand to SEQ ID NO: 2476050
aauucuggccguugacucc

SEQ ID NO: 2476052 - RNA, 19 nt, Artificial Sequence
  Description of Artificial Sequence: Synthetic oligonucleotide
  Sense strand starting at position 927 of SEQ ID NO: 1887492
ccagaauuguguuuaugag

SEQ ID NO: 2476053 - RNA, 19 nt, Artificial Sequence
  Description of Artificial Sequence: Synthetic oligonucleotide
  Antisense strand to SEQ ID NO: 2476052
cucauaaacacaauucugg

SEQ ID NO: 2476054 - RNA, 19 nt, Artificial Sequence
  Description of Artificial Sequence: Synthetic oligonucleotide
  Sense strand starting at position 928 of SEQ ID NO: 1887492
cagaauuguguuuaugagg

SEQ ID NO: 2476055 - RNA, 19 nt, Artificial Sequence
  Description of Artificial Sequence: Synthetic oligonucleotide
  Antisense strand to SEQ ID NO: 2476054
ccucauaaacacaauucug

SEQ ID NO: 2476056 - RNA, 19 nt, Artificial Sequence
  Description of Artificial Sequence: Synthetic oligonucleotide
  Sense strand starting at position 1241 of SEQ ID NO: 1887492
cagggaaguucucugacuu

SEQ ID NO: 2476057 - RNA, 19 nt, Artificial Sequence
  Description of Artificial Sequence: Synthetic oligonucleotide
  Antisense strand to SEQ ID NO: 2476056
aagucagagaacuucccug

SEQ ID NO: 2476058 - RNA, 19 nt, Artificial Sequence
  Description of Artificial Sequence: Synthetic oligonucleotide
  Sense strand starting at position 1242 of SEQ ID NO: 1887492
agggaaguucucugacuuc

SEQ ID NO: 2476059 - RNA, 19 nt, Artificial Sequence
  Description of Artificial Sequence: Synthetic oligonucleotide
  Antisense strand to SEQ ID NO: 2476058
gaagucagagaacuucccu

SEQ ID NO: 2476060 - RNA, 19 nt, Artificial Sequence
  Description of Artificial Sequence: Synthetic oligonucleotide
  Sense strand starting at position 1443 of SEQ ID NO: 1887492
augaucuucgggugauuaa

SEQ ID NO: 2476061 - RNA, 19 nt, Artificial Sequence
  Description of Artificial Sequence: Synthetic oligonucleotide
  Antisense strand to SEQ ID NO: 2476060
uuaaucacccgaagaucau

SEQ ID NO: 2476062 - RNA, 19 nt, Artificial Sequence
  Description of Artificial Sequence: Synthetic oligonucleotide
  Sense strand starting at position 1444 of SEQ ID NO: 1887492
ugaucuucgggugauuaag

SEQ ID NO: 2476063 - RNA, 19 nt, Artificial Sequence
  Description of Artificial Sequence: Synthetic oligonucleotide
  Antisense strand to SEQ ID NO: 2476062
cuuaaucacccgaagauca

SEQ ID NO: 2476064 - RNA, 19 nt, Artificial Sequence
  Description of Artificial Sequence: Synthetic oligonucleotide
  Sense strand starting at position 1547 of SEQ ID NO: 1887492
cuuggucccagugagaaug

SEQ ID NO: 2476065 - RNA, 19 nt, Artificial Sequence
  Description of Artificial Sequence: Synthetic oligonucleotide
  Antisense strand to SEQ ID NO: 2476064
cauucucacugggaccaag

SEQ ID NO: 2476066 - RNA, 19 nt, Artificial Sequence
  Description of Artificial Sequence: Synthetic oligonucleotide
  Sense strand starting at position 1604 of SEQ ID NO: 1887492
ggcugaugaccuugaggag

SEQ ID NO: 2476067 - RNA, 19 nt, Artificial Sequence
  Description of Artificial Sequence: Synthetic oligonucleotide
  Antisense strand to SEQ ID NO: 2476066
cuccucaaggucaucagcc

SEQ ID NO: 2476068 - RNA, 19 nt, Artificial Sequence
  Description of Artificial Sequence: Synthetic oligonucleotide
  Sense strand starting at position 1613 of SEQ ID NO: 1887492
ccuugaggagccuaugauc

SEQ ID NO: 2476069 - RNA, 19 nt, Artificial Sequence
  Description of Artificial Sequence: Synthetic oligonucleotide
  Antisense strand to SEQ ID NO: 2476068
gaucauaggcuccucaagg

SEQ ID NO: 2476070 - RNA, 19 nt, Artificial Sequence
  Description of Artificial Sequence: Synthetic oligonucleotide
  Sense strand starting at position 1621 of SEQ ID NO: 1887492
agccuaugaucaucaguaa

SEQ ID NO: 2476071 - RNA, 19 nt, Artificial Sequence
  Description of Artificial Sequence: Synthetic oligonucleotide
  Antisense strand to SEQ ID NO: 2476070
uuacugaugaucauaggcu

SEQ ID NO: 2476072 - RNA, 19 nt, Artificial Sequence
  Description of Artificial Sequence: Synthetic oligonucleotide
  Sense strand starting at position 1622 of SEQ ID NO: 1887492
gccuaugaucaucaguaag

SEQ ID NO: 2476073 - RNA, 19 nt, Artificial Sequence
  Description of Artificial Sequence: Synthetic oligonucleotide
  Antisense strand to SEQ ID NO: 2476072
cuuacugaugaucauaggc

SEQ ID NO: 2476074 - RNA, 19 nt, Artificial Sequence
  Description of Artificial Sequence: Synthetic oligonucleotide
  Sense strand starting at position 2082 of SEQ ID NO: 1887492
agccaaucacuguggacaa

SEQ ID NO: 2476075 - RNA, 19 nt, Artificial Sequence
  Description of Artificial Sequence: Synthetic oligonucleotide
  Antisense strand to SEQ ID NO: 2476074
uuguccacagugauuggcu

SEQ ID NO: 2476076 - RNA, 19 nt, Artificial Sequence
  Description of Artificial Sequence: Synthetic oligonucleotide
  Sense strand starting at position 2141 of SEQ ID NO: 1887492
ggccacugucucuauggaa

SEQ ID NO: 2476077 - RNA, 19 nt, Artificial Sequence
  Description of Artificial Sequence: Synthetic oligonucleotide
  Antisense strand to SEQ ID NO: 2476076
uuccauagagacaguggcc

SEQ ID NO: 2476078 - RNA, 19 nt, Artificial Sequence
  Description of Artificial Sequence: Synthetic oligonucleotide
  Sense strand starting at position 2162 of SEQ ID NO: 1887492
uugggagaugcuuaacugu

SEQ ID NO: 2476079 - RNA, 19 nt, Artificial Sequence
  Description of Artificial Sequence: Synthetic oligonucleotide
  Antisense strand to SEQ ID NO: 2476078
acaguuaagcaucucccaa

SEQ ID NO: 2476080 - RNA, 19 nt, Artificial Sequence
  Description of Artificial Sequence: Synthetic oligonucleotide
  Sense strand starting at position 2225 of SEQ ID NO: 1887492
cucgaaaggucacuacaac

SEQ ID NO: 2476081 - RNA, 19 nt, Artificial Sequence
  Description of Artificial Sequence: Synthetic oligonucleotide
  Antisense strand to SEQ ID NO: 2476080
guuguagugaccuuucgag

SEQ ID NO: 2476082 - RNA, 19 nt, Artificial Sequence
  Description of Artificial Sequence: Synthetic oligonucleotide
  Sense strand starting at position 2226 of SEQ ID NO: 1887492
ucgaaaggucacuacaacu

SEQ ID NO: 2476083 - RNA, 19 nt, Artificial Sequence
  Description of Artificial Sequence: Synthetic oligonucleotide
  Antisense strand to SEQ ID NO: 2476082
aguuguagugaccuuucga

SEQ ID NO: 2476084 - RNA, 19 nt, Artificial Sequence
  Description of Artificial Sequence: Synthetic oligonucleotide
  Sense strand starting at position 2343 of SEQ ID NO: 1887492
ucuccuggaguguaugaua

SEQ ID NO: 2476085 - RNA, 19 nt, Artificial Sequence
  Description of Artificial Sequence: Synthetic oligonucleotide
  Antisense strand to SEQ ID NO: 2476084
uaucauacacuccaggaga

SEQ ID NO: 2476086 - RNA, 19 nt, Artificial Sequence
  Description of Artificial Sequence: Synthetic oligonucleotide
  Sense strand starting at position 2388 of SEQ ID NO: 1887492
guguuauaaauggaaacgu

SEQ ID NO: 2476087 - RNA, 19 nt, Artificial Sequence
  Description of Artificial Sequence: Synthetic oligonucleotide
  Antisense strand to SEQ ID NO: 2476086
acguuuccauuuauaacac

SEQ ID NO: 2476088 - RNA, 19 nt, Artificial Sequence
  Description of Artificial Sequence: Synthetic oligonucleotide
  Sense strand starting at position 2577 of SEQ ID NO: 1887492
uguaauaaccuguacccau

SEQ ID NO: 2476089 - RNA, 19 nt, Artificial Sequence
  Description of Artificial Sequence: Synthetic oligonucleotide
  Antisense strand to SEQ ID NO: 2476088
auggguacagguuauuaca

SEQ ID NO: 2476090 - RNA, 19 nt, Artificial Sequence
  Description of Artificial Sequence: Synthetic oligonucleotide
  Sense strand starting at position 2600 of SEQ ID NO: 1887492
augugucauacagaauggu

SEQ ID NO: 2476091 - RNA, 19 nt, Artificial Sequence
  Description of Artificial Sequence: Synthetic oligonucleotide
  Antisense strand to SEQ ID NO: 2476090
accauucuguaugacacau

SEQ ID NO: 2476092 - RNA, 19 nt, Artificial Sequence
  Description of Artificial Sequence: Synthetic oligonucleotide
  Sense strand starting at position 2823 of SEQ ID NO: 1887492
agaaaugaaucgucaggau

SEQ ID NO: 2476093 - RNA, 19 nt, Artificial Sequence
  Description of Artificial Sequence: Synthetic oligonucleotide
  Antisense strand to SEQ ID NO: 2476092
auccugacgauucauuucu

SEQ ID NO: 2476094 - RNA, 19 nt, Artificial Sequence
  Description of Artificial Sequence: Synthetic oligonucleotide
  Sense strand starting at position 2839 of SEQ ID NO: 1887492
gauauauugauccguggga

SEQ ID NO: 2476095 - RNA, 19 nt, Artificial Sequence
  Description of Artificial Sequence: Synthetic oligonucleotide
  Antisense strand to SEQ ID NO: 2476094
ucccacggaucaauauauc

SEQ ID NO: 2476096 - RNA, 19 nt, Artificial Sequence
  Description of Artificial Sequence: Synthetic oligonucleotide
  Sense strand starting at position 2840 of SEQ ID NO: 1887492
auauauugauccgugggau

SEQ ID NO: 2476097 - RNA, 19 nt, Artificial Sequence
  Description of Artificial Sequence: Synthetic oligonucleotide
  Antisense strand to SEQ ID NO: 2476096
aucccacggaucaauauau

SEQ ID NO: 2476098 - RNA, 19 nt, Artificial Sequence
  Description of Artificial Sequence: Synthetic oligonucleotide
  Sense strand starting at position 2841 of SEQ ID NO: 1887492
uauauugauccgugggauu

SEQ ID NO: 2476099 - RNA, 19 nt, Artificial Sequence
  Description of Artificial Sequence: Synthetic oligonucleotide
  Antisense strand to SEQ ID NO: 2476098
aaucccacggaucaauaua

SEQ ID NO: 2476100 - RNA, 19 nt, Artificial Sequence
  Description of Artificial Sequence: Synthetic oligonucleotide
  Sense strand starting at position 2843 of SEQ ID NO: 1887492
uauugauccgugggauuau

SEQ ID NO: 2476101 - RNA, 19 nt, Artificial Sequence
  Description of Artificial Sequence: Synthetic oligonucleotide
  Antisense strand to SEQ ID NO: 2476100
auaaucccacggaucaaua

SEQ ID NO: 2476102 - RNA, 19 nt, Artificial Sequence
  Description of Artificial Sequence: Synthetic oligonucleotide
  Sense strand starting at position 2921 of SEQ ID NO: 1887492
gcuugaauucugcauggau

SEQ ID NO: 2476103 - RNA, 19 nt, Artificial Sequence
  Description of Artificial Sequence: Synthetic oligonucleotide
  Antisense strand to SEQ ID NO: 2476102
auccaugcagaauucaagc

SEQ ID NO: 2476104 - RNA, 19 nt, Artificial Sequence
  Description of Artificial Sequence: Synthetic oligonucleotide
  Sense strand starting at position 2923 of SEQ ID NO: 1887492
uugaauucugcauggaucu

SEQ ID NO: 2476105 - RNA, 19 nt, Artificial Sequence
  Description of Artificial Sequence: Synthetic oligonucleotide
  Antisense strand to SEQ ID NO: 2476104
agauccaugcagaauucaa

SEQ ID NO: 2476106 - RNA, 19 nt, Artificial Sequence
  Description of Artificial Sequence: Synthetic oligonucleotide
  Sense strand starting at position 2924 of SEQ ID NO: 1887492
ugaauucugcauggaucuu

SEQ ID NO: 2476107 - RNA, 19 nt, Artificial Sequence
  Description of Artificial Sequence: Synthetic oligonucleotide
  Antisense strand to SEQ ID NO: 2476106
aagauccaugcagaauuca

SEQ ID NO: 2476108 - RNA, 19 nt, Artificial Sequence
  Description of Artificial Sequence: Synthetic oligonucleotide
  Sense strand starting at position 3234 of SEQ ID NO: 1887492
gugcaaauggcuuauugac

SEQ ID NO: 2476109 - RNA, 19 nt, Artificial Sequence
  Description of Artificial Sequence: Synthetic oligonucleotide
  Antisense strand to SEQ ID NO: 2476108
gucaauaagccauuugcac

SEQ ID NO: 2476110 - RNA, 19 nt, Artificial Sequence
  Description of Artificial Sequence: Synthetic oligonucleotide
  Sense strand starting at position 3305 of SEQ ID NO: 1887492
aucuguggacuuggaugaa

SEQ ID NO: 2476111 - RNA, 19 nt, Artificial Sequence
  Description of Artificial Sequence: Synthetic oligonucleotide
  Antisense strand to SEQ ID NO: 2476110
uucauccaaguccacagau

SEQ ID NO: 2476112 - RNA, 19 nt, Artificial Sequence
  Description of Artificial Sequence: Synthetic oligonucleotide
  Sense strand starting at position 3308 of SEQ ID NO: 1887492
uguggacuuggaugaaauc

SEQ ID NO: 2476113 - RNA, 19 nt, Artificial Sequence
  Description of Artificial Sequence: Synthetic oligonucleotide
  Antisense strand to SEQ ID NO: 2476112
gauuucauccaaguccaca

SEQ ID NO: 2476114 - RNA, 19 nt, Artificial Sequence
  Description of Artificial Sequence: Synthetic oligonucleotide
  Sense strand starting at position 3452 of SEQ ID NO: 1887492
ggaggaggcucggcugaaa

SEQ ID NO: 2476115 - RNA, 19 nt, Artificial Sequence
  Description of Artificial Sequence: Synthetic oligonucleotide
  Antisense strand to SEQ ID NO: 2476114
uuucagccgagccuccucc

SEQ ID NO: 2476116 - RNA, 19 nt, Artificial Sequence
  Description of Artificial Sequence: Synthetic oligonucleotide
  Sense strand starting at position 3495 of SEQ ID NO: 1887492
gacagauucgaguaguuuc

SEQ ID NO: 2476117 - RNA, 19 nt, Artificial Sequence
  Description of Artificial Sequence: Synthetic oligonucleotide
  Antisense strand to SEQ ID NO: 2476116
gaaacuacucgaaucuguc

SEQ ID NO: 2476118 - RNA, 19 nt, Artificial Sequence
  Description of Artificial Sequence: Synthetic oligonucleotide
  Sense strand starting at position 3502 of SEQ ID NO: 1887492
ucgaguaguuucuccauuu

SEQ ID NO: 2476119 - RNA, 19 nt, Artificial Sequence
  Description of Artificial Sequence: Synthetic oligonucleotide
  Antisense strand to SEQ ID NO: 2476118
aaauggagaaacuacucga

SEQ ID NO: 2476120 - RNA, 19 nt, Artificial Sequence
  Description of Artificial Sequence: Synthetic oligonucleotide
  Sense strand starting at position 3503 of SEQ ID NO: 1887492
cgaguaguuucuccauuuc

SEQ ID NO: 2476121 - RNA, 19 nt, Artificial Sequence
  Description of Artificial Sequence: Synthetic oligonucleotide
  Antisense strand to SEQ ID NO: 2476120
gaaauggagaaacuacucg

SEQ ID NO: 2476122 - RNA, 19 nt, Artificial Sequence
  Description of Artificial Sequence: Synthetic oligonucleotide
  Sense strand starting at position 296 of SEQ ID NO: 1887493
cccaguauacaguaagguu

SEQ ID NO: 2476123 - RNA, 19 nt, Artificial Sequence
  Description of Artificial Sequence: Synthetic oligonucleotide
  Antisense strand to SEQ ID NO: 2476122
aaccuuacuguauacuggg

SEQ ID NO: 2476124 - RNA, 19 nt, Artificial Sequence
  Description of Artificial Sequence: Synthetic oligonucleotide
  Sense strand starting at position 304 of SEQ ID NO: 1887493
acaguaagguucucagcaa

SEQ ID NO: 2476125 - RNA, 19 nt, Artificial Sequence
  Description of Artificial Sequence: Synthetic oligonucleotide
  Antisense strand to SEQ ID NO: 2476124
uugcugagaaccuuacugu

SEQ ID NO: 2476126 - RNA, 19 nt, Artificial Sequence
  Description of Artificial Sequence: Synthetic oligonucleotide
  Sense strand starting at position 725 of SEQ ID NO: 1887493
gagcuuuacuuccugcaga

SEQ ID NO: 2476127 - RNA, 19 nt, Artificial Sequence
  Description of Artificial Sequence: Synthetic oligonucleotide
  Antisense strand to SEQ ID NO: 2476126
ucugcaggaaguaaagcuc

SEQ ID NO: 2476128 - RNA, 19 nt, Artificial Sequence
  Description of Artificial Sequence: Synthetic oligonucleotide
  Sense strand starting at position 799 of SEQ ID NO: 1887493
gaguuauuauaaccugaug

SEQ ID NO: 2476129 - RNA, 19 nt, Artificial Sequence
  Description of Artificial Sequence: Synthetic oligonucleotide
  Antisense strand to SEQ ID NO: 2476128
caucagguuauaauaacuc

SEQ ID NO: 2476130 - RNA, 19 nt, Artificial Sequence
  Description of Artificial Sequence: Synthetic oligonucleotide
  Sense strand starting at position 802 of SEQ ID NO: 1887493
uuauuauaaccugaugugu

SEQ ID NO: 2476131 - RNA, 19 nt, Artificial Sequence
  Description of Artificial Sequence: Synthetic oligonucleotide
  Antisense strand to SEQ ID NO: 2476130
acacaucagguuauaauaa

SEQ ID NO: 2476132 - RNA, 19 nt, Artificial Sequence
  Description of Artificial Sequence: Synthetic oligonucleotide
  Sense strand starting at position 955 of SEQ ID NO: 1887493
gggauaguuaaggaugcuu

SEQ ID NO: 2476133 - RNA, 19 nt, Artificial Sequence
  Description of Artificial Sequence: Synthetic oligonucleotide
  Antisense strand to SEQ ID NO: 2476132
aagcauccuuaacuauccc

SEQ ID NO: 2476134 - RNA, 19 nt, Artificial Sequence
  Description of Artificial Sequence: Synthetic oligonucleotide
  Sense strand starting at position 960 of SEQ ID NO: 1887493
aguuaaggaugcuuccuua

SEQ ID NO: 2476135 - RNA, 19 nt, Artificial Sequence
  Description of Artificial Sequence: Synthetic oligonucleotide
  Antisense strand to SEQ ID NO: 2476134
uaaggaagcauccuuaacu

SEQ ID NO: 2476136 - RNA, 19 nt, Artificial Sequence
  Description of Artificial Sequence: Synthetic oligonucleotide
  Sense strand starting at position 1342 of SEQ ID NO: 1887493
auagucucccuuugagaaa

SEQ ID NO: 2476137 - RNA, 19 nt, Artificial Sequence
  Description of Artificial Sequence: Synthetic oligonucleotide
  Antisense strand to SEQ ID NO: 2476136
uuucucaaagggagacuau

SEQ ID NO: 2476138 - RNA, 19 nt, Artificial Sequence
  Description of Artificial Sequence: Synthetic oligonucleotide
  Sense strand starting at position 2167 of SEQ ID NO: 1887493
caaggauuggcuggaguag

SEQ ID NO: 2476139 - RNA, 19 nt, Artificial Sequence
  Description of Artificial Sequence: Synthetic oligonucleotide
  Antisense strand to SEQ ID NO: 2476138
cuacuccagccaauccuug

SEQ ID NO: 2476140 - RNA, 19 nt, Artificial Sequence
  Description of Artificial Sequence: Synthetic oligonucleotide
  Sense strand starting at position 2194 of SEQ ID NO: 1887493
gggaggugguuauuagaga

SEQ ID NO: 2476141 - RNA, 19 nt, Artificial Sequence
  Description of Artificial Sequence: Synthetic oligonucleotide
  Antisense strand to SEQ ID NO: 2476140
ucucuaauaaccaccuccc

SEQ ID NO: 2476142 - RNA, 19 nt, Artificial Sequence
  Description of Artificial Sequence: Synthetic oligonucleotide
  Sense strand starting at position 2260 of SEQ ID NO: 1887493
ugagaauccuuacacugag

SEQ ID NO: 2476143 - RNA, 19 nt, Artificial Sequence
  Description of Artificial Sequence: Synthetic oligonucleotide
  Antisense strand to SEQ ID NO: 2476142
cucaguguaaggauucuca

SEQ ID NO: 2476144 - RNA, 19 nt, Artificial Sequence
  Description of Artificial Sequence: Synthetic oligonucleotide
  Sense strand starting at position 2266 of SEQ ID NO: 1887493
uccuuacacugaguaucau

SEQ ID NO: 2476145 - RNA, 19 nt, Artificial Sequence
  Description of Artificial Sequence: Synthetic oligonucleotide
  Antisense strand to SEQ ID NO: 2476144
augauacucaguguaagga

SEQ ID NO: 2476146 - RNA, 19 nt, Artificial Sequence
  Description of Artificial Sequence: Synthetic oligonucleotide
  Sense strand starting at position 2267 of SEQ ID NO: 1887493
ccuuacacugaguaucauu

SEQ ID NO: 2476147 - RNA, 19 nt, Artificial Sequence
  Description of Artificial Sequence: Synthetic oligonucleotide
  Antisense strand to SEQ ID NO: 2476146
aaugauacucaguguaagg

SEQ ID NO: 2476148 - RNA, 19 nt, Artificial Sequence
  Description of Artificial Sequence: Synthetic oligonucleotide
  Sense strand starting at position 2275 of SEQ ID NO: 1887493
ugaguaucauucuugaguc

SEQ ID NO: 2476149 - RNA, 19 nt, Artificial Sequence
  Description of Artificial Sequence: Synthetic oligonucleotide
  Antisense strand to SEQ ID NO: 2476148
gacucaagaaugauacuca

SEQ ID NO: 2476150 - RNA, 19 nt, Artificial Sequence
  Description of Artificial Sequence: Synthetic oligonucleotide
  Sense strand starting at position 2277 of SEQ ID NO: 1887493
aguaucauucuugagucca

SEQ ID NO: 2476151 - RNA, 19 nt, Artificial Sequence
  Description of Artificial Sequence: Synthetic oligonucleotide
  Antisense strand to SEQ ID NO: 2476150
uggacucaagaaugauacu

SEQ ID NO: 2476152 - RNA, 19 nt, Artificial Sequence
  Description of Artificial Sequence: Synthetic oligonucleotide
  Sense strand starting at position 2285 of SEQ ID NO: 1887493
ucuugaguccacugaagaa

SEQ ID NO: 2476153 - RNA, 19 nt, Artificial Sequence
  Description of Artificial Sequence: Synthetic oligonucleotide
  Antisense strand to SEQ ID NO: 2476152
uucuucaguggacucaaga

SEQ ID NO: 2476154 - RNA, 19 nt, Artificial Sequence
  Description of Artificial Sequence: Synthetic oligonucleotide
  Sense strand starting at position 2376 of SEQ ID NO: 1887493
gcuguuauacuugauugca

SEQ ID NO: 2476155 - RNA, 19 nt, Artificial Sequence
  Description of Artificial Sequence: Synthetic oligonucleotide
  Antisense strand to SEQ ID NO: 2476154
ugcaaucaaguauaacagc

SEQ ID NO: 2476156 - RNA, 19 nt, Artificial Sequence
  Description of Artificial Sequence: Synthetic oligonucleotide
  Sense strand starting at position 2378 of SEQ ID NO: 1887493
uguuauacuugauugcauu

SEQ ID NO: 2476157 - RNA, 19 nt, Artificial Sequence
  Description of Artificial Sequence: Synthetic oligonucleotide
  Antisense strand to SEQ ID NO: 2476156
aaugcaaucaaguauaaca

SEQ ID NO: 2476158 - RNA, 19 nt, Artificial Sequence
  Description of Artificial Sequence: Synthetic oligonucleotide
  Sense strand starting at position 2379 of SEQ ID NO: 1887493
guuauacuugauugcauuu

SEQ ID NO: 2476159 - RNA, 19 nt, Artificial Sequence
  Description of Artificial Sequence: Synthetic oligonucleotide
  Antisense strand to SEQ ID NO: 2476158
aaaugcaaucaaguauaac

SEQ ID NO: 2476160 - RNA, 19 nt, Artificial Sequence
  Description of Artificial Sequence: Synthetic oligonucleotide
  Sense strand starting at position 2487 of SEQ ID NO: 1887493
guccucugccaguaaaguc

SEQ ID NO: 2476161 - RNA, 19 nt, Artificial Sequence
  Description of Artificial Sequence: Synthetic oligonucleotide
  Antisense strand to SEQ ID NO: 2476160
gacuuuacuggcagaggac

SEQ ID NO: 2476162 - RNA, 19 nt, Artificial Sequence
  Description of Artificial Sequence: Synthetic oligonucleotide
  Sense strand starting at position 2550 of SEQ ID NO: 1887493
cacaaaguguugccagaga

SEQ ID NO: 2476163 - RNA, 19 nt, Artificial Sequence
  Description of Artificial Sequence: Synthetic oligonucleotide
  Antisense strand to SEQ ID NO: 2476162
ucucuggcaacacuuugug

SEQ ID NO: 2476164 - RNA, 19 nt, Artificial Sequence
  Description of Artificial Sequence: Synthetic oligonucleotide
  Sense strand starting at position 2620 of SEQ ID NO: 1887493
ggcugaucacccugacuga

SEQ ID NO: 2476165 - RNA, 19 nt, Artificial Sequence
  Description of Artificial Sequence: Synthetic oligonucleotide
  Antisense strand to SEQ ID NO: 2476164
ucagucagggugaucagcc

SEQ ID NO: 2476166 - RNA, 19 nt, Artificial Sequence
  Description of Artificial Sequence: Synthetic oligonucleotide
  Sense strand starting at position 2765 of SEQ ID NO: 1887493
auaccuugaccucguuuga

SEQ ID NO: 2476167 - RNA, 19 nt, Artificial Sequence
  Description of Artificial Sequence: Synthetic oligonucleotide
  Antisense strand to SEQ ID NO: 2476166
ucaaacgaggucaagguau

SEQ ID NO: 2476168 - RNA, 19 nt, Artificial Sequence
  Description of Artificial Sequence: Synthetic oligonucleotide
  Sense strand starting at position 2774 of SEQ ID NO: 1887493
ccucguuugagcuugucuu

SEQ ID NO: 2476169 - RNA, 19 nt, Artificial Sequence
  Description of Artificial Sequence: Synthetic oligonucleotide
  Antisense strand to SEQ ID NO: 2476168
aagacaagcucaaacgagg

SEQ ID NO: 2476170 - RNA, 19 nt, Artificial Sequence
  Description of Artificial Sequence: Synthetic oligonucleotide
  Sense strand starting at position 3036 of SEQ ID NO: 1887493
gcuguuuguauucuuugua

SEQ ID NO: 2476171 - RNA, 19 nt, Artificial Sequence
  Description of Artificial Sequence: Synthetic oligonucleotide
  Antisense strand to SEQ ID NO: 2476170
uacaaagaauacaaacagc

SEQ ID NO: 2476172 - RNA, 19 nt, Artificial Sequence
  Description of Artificial Sequence: Synthetic oligonucleotide
  Sense strand starting at position 3319 of SEQ ID NO: 1887493
uuugcauauuucuuucgua

SEQ ID NO: 2476173 - RNA, 19 nt, Artificial Sequence
  Description of Artificial Sequence: Synthetic oligonucleotide
  Antisense strand to SEQ ID NO: 2476172
uacgaaagaaauaugcaaa

SEQ ID NO: 2476174 - RNA, 19 nt, Artificial Sequence
  Description of Artificial Sequence: Synthetic oligonucleotide
  Sense strand starting at position 3324 of SEQ ID NO: 1887493
auauuucuuucguagagac

SEQ ID NO: 2476175 - RNA, 19 nt, Artificial Sequence
  Description of Artificial Sequence: Synthetic oligonucleotide
  Antisense strand to SEQ ID NO: 2476174
gucucuacgaaagaaauau

SEQ ID NO: 2476176 - RNA, 19 nt, Artificial Sequence
  Description of Artificial Sequence: Synthetic oligonucleotide
  Sense strand starting at position 3451 of SEQ ID NO: 1887493
gcccuaucagcucaguuua

SEQ ID NO: 2476177 - RNA, 19 nt, Artificial Sequence
  Description of Artificial Sequence: Synthetic oligonucleotide
  Antisense strand to SEQ ID NO: 2476176
uaaacugagcugauagggc

SEQ ID NO: 2476178 - RNA, 19 nt, Artificial Sequence
  Description of Artificial Sequence: Synthetic oligonucleotide
  Sense strand starting at position 3453 of SEQ ID NO: 1887493
ccuaucagcucaguuuaua

SEQ ID NO: 2476179 - RNA, 19 nt, Artificial Sequence
  Description of Artificial Sequence: Synthetic oligonucleotide
  Antisense strand to SEQ ID NO: 2476178
uauaaacugagcugauagg

SEQ ID NO: 2476180 - RNA, 19 nt, Artificial Sequence
  Description of Artificial Sequence: Synthetic oligonucleotide
  Sense strand starting at position 3517 of SEQ ID NO: 1887493
ucuugucacuugucacuaa

SEQ ID NO: 2476181 - RNA, 19 nt, Artificial Sequence
  Description of Artificial Sequence: Synthetic oligonucleotide
  Antisense strand to SEQ ID NO: 2476180
uuagugacaagugacaaga

SEQ ID NO: 2476182 - RNA, 19 nt, Artificial Sequence
  Description of Artificial Sequence: Synthetic oligonucleotide
  Sense strand starting at position 3521 of SEQ ID NO: 1887493
gucacuugucacuaaagga

SEQ ID NO: 2476183 - RNA, 19 nt, Artificial Sequence
  Description of Artificial Sequence: Synthetic oligonucleotide
  Antisense strand to SEQ ID NO: 2476182
uccuuuagugacaagugac

SEQ ID NO: 2476184 - RNA, 19 nt, Artificial Sequence
  Description of Artificial Sequence: Synthetic oligonucleotide
  Sense strand starting at position 3578 of SEQ ID NO: 1887493
uauguauuacuggaugcua

SEQ ID NO: 2476185 - RNA, 19 nt, Artificial Sequence
  Description of Artificial Sequence: Synthetic oligonucleotide
  Antisense strand to SEQ ID NO: 2476184
uagcauccaguaauacaua

SEQ ID NO: 2476186 - RNA, 19 nt, Artificial Sequence
  Description of Artificial Sequence: Synthetic oligonucleotide
  Sense strand starting at position 3580 of SEQ ID NO: 1887493
uguauuacuggaugcuaau

SEQ ID NO: 2476187 - RNA, 19 nt, Artificial Sequence
  Description of Artificial Sequence: Synthetic oligonucleotide
  Antisense strand to SEQ ID NO: 2476186
auuagcauccaguaauaca

SEQ ID NO: 2476188 - RNA, 19 nt, Artificial Sequence
  Description of Artificial Sequence: Synthetic oligonucleotide
  Sense strand starting at position 3622 of SEQ ID NO: 1887493
gccugacaugucugugaag

SEQ ID NO: 2476189 - RNA, 19 nt, Artificial Sequence
  Description of Artificial Sequence: Synthetic oligonucleotide
  Antisense strand to SEQ ID NO: 2476188
cuucacagacaugucaggc

SEQ ID NO: 2476190 - RNA, 19 nt, Artificial Sequence
  Description of Artificial Sequence: Synthetic oligonucleotide
  Sense strand starting at position 3623 of SEQ ID NO: 1887493
ccugacaugucugugaaga

SEQ ID NO: 2476191 - RNA, 19 nt, Artificial Sequence
  Description of Artificial Sequence: Synthetic oligonucleotide
  Antisense strand to SEQ ID NO: 2476190
ucuucacagacaugucagg

SEQ ID NO: 2476192 - RNA, 19 nt, Artificial Sequence
  Description of Artificial Sequence: Synthetic oligonucleotide
  Sense strand starting at position 3624 of SEQ ID NO: 1887493
cugacaugucugugaagag

SEQ ID NO: 2476193 - RNA, 19 nt, Artificial Sequence
  Description of Artificial Sequence: Synthetic oligonucleotide
  Antisense strand to SEQ ID NO: 2476192
cucuucacagacaugucag

SEQ ID NO: 2476194 - RNA, 19 nt, Artificial Sequence
  Description of Artificial Sequence: Synthetic oligonucleotide
  Sense strand starting at position 3628 of SEQ ID NO: 1887493
caugucugugaagagugaa

SEQ ID NO: 2476195 - RNA, 19 nt, Artificial Sequence
  Description of Artificial Sequence: Synthetic oligonucleotide
  Antisense strand to SEQ ID NO: 2476194
uucacucuucacagacaug

SEQ ID NO: 2476196 - RNA, 19 nt, Artificial Sequence
  Description of Artificial Sequence: Synthetic oligonucleotide
  Sense strand starting at position 3711 of SEQ ID NO: 1887493
ugaugaugcaucugaggac

SEQ ID NO: 2476197 - RNA, 19 nt, Artificial Sequence
  Description of Artificial Sequence: Synthetic oligonucleotide
  Antisense strand to SEQ ID NO: 2476196
guccucagaugcaucauca

SEQ ID NO: 2476198 - RNA, 19 nt, Artificial Sequence
  Description of Artificial Sequence: Synthetic oligonucleotide
  Sense strand starting at position 3800 of SEQ ID NO: 1887493
cuuacugaucgccaccaga

SEQ ID NO: 2476199 - RNA, 19 nt, Artificial Sequence
  Description of Artificial Sequence: Synthetic oligonucleotide
  Antisense strand to SEQ ID NO: 2476198
ucugguggcgaucaguaag

SEQ ID NO: 2476200 - RNA, 19 nt, Artificial Sequence
  Description of Artificial Sequence: Synthetic oligonucleotide
  Sense strand starting at position 3857 of SEQ ID NO: 1887493
gacugaugcguggcugcau

SEQ ID NO: 2476201 - RNA, 19 nt, Artificial Sequence
  Description of Artificial Sequence: Synthetic oligonucleotide
  Antisense strand to SEQ ID NO: 2476200
augcagccacgcaucaguc

SEQ ID NO: 2476202 - RNA, 19 nt, Artificial Sequence
  Description of Artificial Sequence: Synthetic oligonucleotide
  Sense strand starting at position 14 of SEQ ID NO: 1887494
gcagaacagguguaagagu

SEQ ID NO: 2476203 - RNA, 19 nt, Artificial Sequence
  Description of Artificial Sequence: Synthetic oligonucleotide
  Antisense strand to SEQ ID NO: 2476202
acucuuacaccuguucugc

SEQ ID NO: 2476204 - RNA, 19 nt, Artificial Sequence
  Description of Artificial Sequence: Synthetic oligonucleotide
  Sense strand starting at position 72 of SEQ ID NO: 1887494
ggaggaaucacgcagucca

SEQ ID NO: 2476205 - RNA, 19 nt, Artificial Sequence
  Description of Artificial Sequence: Synthetic oligonucleotide
  Antisense strand to SEQ ID NO: 2476204
uggacugcgugauuccucc

SEQ ID NO: 2476206 - RNA, 19 nt, Artificial Sequence
  Description of Artificial Sequence: Synthetic oligonucleotide
  Sense strand starting at position 130 of SEQ ID NO: 1887494
ggaagcugucgaugaggca

SEQ ID NO: 2476207 - RNA, 19 nt, Artificial Sequence
  Description of Artificial Sequence: Synthetic oligonucleotide
  Antisense strand to SEQ ID NO: 2476206
ugccucaucgacagcuucc

SEQ ID NO: 2476208 - RNA, 19 nt, Artificial Sequence
  Description of Artificial Sequence: Synthetic oligonucleotide
  Sense strand starting at position 131 of SEQ ID NO: 1887494
gaagcugucgaugaggcaa

SEQ ID NO: 2476209 - RNA, 19 nt, Artificial Sequence
  Description of Artificial Sequence: Synthetic oligonucleotide
  Antisense strand to SEQ ID NO: 2476208
uugccucaucgacagcuuc

SEQ ID NO: 2476210 - RNA, 19 nt, Artificial Sequence
  Description of Artificial Sequence: Synthetic oligonucleotide
  Sense strand starting at position 145 of SEQ ID NO: 1887494
ggcaauaacuggccuagga

SEQ ID NO: 2476211 - RNA, 19 nt, Artificial Sequence
  Description of Artificial Sequence: Synthetic oligonucleotide
  Antisense strand to SEQ ID NO: 2476210
uccuaggccaguuauugcc

SEQ ID NO: 2476212 - RNA, 19 nt, Artificial Sequence
  Description of Artificial Sequence: Synthetic oligonucleotide
  Sense strand starting at position 351 of SEQ ID NO: 1887494
gcggauauuggucaguucu

SEQ ID NO: 2476213 - RNA, 19 nt, Artificial Sequence
  Description of Artificial Sequence: Synthetic oligonucleotide
  Antisense strand to SEQ ID NO: 2476212
agaacugaccaauauccgc

SEQ ID NO: 2476214 - RNA, 19 nt, Artificial Sequence
  Description of Artificial Sequence: Synthetic oligonucleotide
  Sense strand starting at position 353 of SEQ ID NO: 1887494
ggauauuggucaguucuuc

SEQ ID NO: 2476215 - RNA, 19 nt, Artificial Sequence
  Description of Artificial Sequence: Synthetic oligonucleotide
  Antisense strand to SEQ ID NO: 2476214
gaagaacugaccaauaucc

SEQ ID NO: 2476216 - RNA, 19 nt, Artificial Sequence
  Description of Artificial Sequence: Synthetic oligonucleotide
  Sense strand starting at position 390 of SEQ ID NO: 1887494
cuagaagaaucauauagga

SEQ ID NO: 2476217 - RNA, 19 nt, Artificial Sequence
  Description of Artificial Sequence: Synthetic oligonucleotide
  Antisense strand to SEQ ID NO: 2476216
uccuauaugauucuucuag

SEQ ID NO: 2476218 - RNA, 19 nt, Artificial Sequence
  Description of Artificial Sequence: Synthetic oligonucleotide
  Sense strand starting at position 495 of SEQ ID NO: 1887494
gagucaagauuccuggguu

SEQ ID NO: 2476219 - RNA, 19 nt, Artificial Sequence
  Description of Artificial Sequence: Synthetic oligonucleotide
  Antisense strand to SEQ ID NO: 2476218
aacccaggaaucuugacuc

SEQ ID NO: 2476220 - RNA, 19 nt, Artificial Sequence
  Description of Artificial Sequence: Synthetic oligonucleotide
  Sense strand starting at position 498 of SEQ ID NO: 1887494
ucaagauuccuggguucug

SEQ ID NO: 2476221 - RNA, 19 nt, Artificial Sequence
  Description of Artificial Sequence: Synthetic oligonucleotide
  Antisense strand to SEQ ID NO: 2476220
cagaacccaggaaucuuga

SEQ ID NO: 2476222 - RNA, 19 nt, Artificial Sequence
  Description of Artificial Sequence: Synthetic oligonucleotide
  Sense strand starting at position 821 of SEQ ID NO: 1887494
aaagauuccuggguucuga

SEQ ID NO: 2476223 - RNA, 19 nt, Artificial Sequence
  Description of Artificial Sequence: Synthetic oligonucleotide
  Antisense strand to SEQ ID NO: 2476222
ucagaacccaggaaucuuu

SEQ ID NO: 2476224 - RNA, 19 nt, Artificial Sequence
  Description of Artificial Sequence: Synthetic oligonucleotide
  Sense strand starting at position 1170 of SEQ ID NO: 1887494
gaggguaacuggcuugcua

SEQ ID NO: 2476225 - RNA, 19 nt, Artificial Sequence
  Description of Artificial Sequence: Synthetic oligonucleotide
  Antisense strand to SEQ ID NO: 2476224
uagcaagccaguuacccuc

SEQ ID NO: 2476226 - RNA, 19 nt, Artificial Sequence
  Description of Artificial Sequence: Synthetic oligonucleotide
  Sense strand starting at position 1172 of SEQ ID NO: 1887494
ggguaacuggcuugcuaaa

SEQ ID NO: 2476227 - RNA, 19 nt, Artificial Sequence
  Description of Artificial Sequence: Synthetic oligonucleotide
  Antisense strand to SEQ ID NO: 2476226
uuuagcaagccaguuaccc

SEQ ID NO: 2476228 - RNA, 19 nt, Artificial Sequence
  Description of Artificial Sequence: Synthetic oligonucleotide
  Sense strand starting at position 1174 of SEQ ID NO: 1887494
guaacuggcuugcuaaaga

SEQ ID NO: 2476229 - RNA, 19 nt, Artificial Sequence
  Description of Artificial Sequence: Synthetic oligonucleotide
  Antisense strand to SEQ ID NO: 2476228
ucuuuagcaagccaguuac

SEQ ID NO: 2476230 - RNA, 19 nt, Artificial Sequence
  Description of Artificial Sequence: Synthetic oligonucleotide
  Sense strand starting at position 1301 of SEQ ID NO: 1887494
ggaccugucauggaagcuu

SEQ ID NO: 2476231 - RNA, 19 nt, Artificial Sequence
  Description of Artificial Sequence: Synthetic oligonucleotide
  Antisense strand to SEQ ID NO: 2476230
aagcuuccaugacaggucc

SEQ ID NO: 2476232 - RNA, 19 nt, Artificial Sequence
  Description of Artificial Sequence: Synthetic oligonucleotide
  Sense strand starting at position 2073 of SEQ ID NO: 1887494
uuucuaguuucuccgagga

SEQ ID NO: 2476233 - RNA, 19 nt, Artificial Sequence
  Description of Artificial Sequence: Synthetic oligonucleotide
  Antisense strand to SEQ ID NO: 2476232
uccucggagaaacuagaaa

SEQ ID NO: 2476234 - RNA, 19 nt, Artificial Sequence
  Description of Artificial Sequence: Synthetic oligonucleotide
  Sense strand starting at position 2077 of SEQ ID NO: 1887494
uaguuucuccgaggaggua

SEQ ID NO: 2476235 - RNA, 19 nt, Artificial Sequence
  Description of Artificial Sequence: Synthetic oligonucleotide
  Antisense strand to SEQ ID NO: 2476234
uaccuccucggagaaacua

SEQ ID NO: 2476236 - RNA, 19 nt, Artificial Sequence
  Description of Artificial Sequence: Synthetic oligonucleotide
  Sense strand starting at position 2078 of SEQ ID NO: 1887494
aguuucuccgaggagguaa

SEQ ID NO: 2476237 - RNA, 19 nt, Artificial Sequence
  Description of Artificial Sequence: Synthetic oligonucleotide
  Antisense strand to SEQ ID NO: 2476236
uuaccuccucggagaaacu

SEQ ID NO: 2476238 - RNA, 19 nt, Artificial Sequence
  Description of Artificial Sequence: Synthetic oligonucleotide
  Sense strand starting at position 2156 of SEQ ID NO: 1887494
uccuguaggcuuugaugau

SEQ ID NO: 2476239 - RNA, 19 nt, Artificial Sequence
  Description of Artificial Sequence: Synthetic oligonucleotide
  Antisense strand to SEQ ID NO: 2476238
aucaucaaagccuacagga

SEQ ID NO: 2476240 - RNA, 19 nt, Artificial Sequence
  Description of Artificial Sequence: Synthetic oligonucleotide
  Sense strand starting at position 2247 of SEQ ID NO: 1887494
ccacauucccuguagguuu

SEQ ID NO: 2476241 - RNA, 19 nt, Artificial Sequence
  Description of Artificial Sequence: Synthetic oligonucleotide
  Antisense strand to SEQ ID NO: 2476240
aaaccuacagggaaugugg

SEQ ID NO: 2476242 - RNA, 19 nt, Artificial Sequence
  Description of Artificial Sequence: Synthetic oligonucleotide
  Sense strand starting at position 2254 of SEQ ID NO: 1887494
cccuguagguuuccaguau

SEQ ID NO: 2476243 - RNA, 19 nt, Artificial Sequence
  Description of Artificial Sequence: Synthetic oligonucleotide
  Antisense strand to SEQ ID NO: 2476242
auacuggaaaccuacaggg

SEQ ID NO: 2476244 - RNA, 19 nt, Artificial Sequence
  Description of Artificial Sequence: Synthetic oligonucleotide
  Sense strand starting at position 2258 of SEQ ID NO: 1887494
guagguuuccaguauauag

SEQ ID NO: 2476245 - RNA, 19 nt, Artificial Sequence
  Description of Artificial Sequence: Synthetic oligonucleotide
  Antisense strand to SEQ ID NO: 2476244
cuauauacuggaaaccuac

SEQ ID NO: 2476246 - RNA, 19 nt, Artificial Sequence
  Description of Artificial Sequence: Synthetic oligonucleotide
  Sense strand starting at position 2260 of SEQ ID NO: 1887494
agguuuccaguauauagua

SEQ ID NO: 2476247 - RNA, 19 nt, Artificial Sequence
  Description of Artificial Sequence: Synthetic oligonucleotide
  Antisense strand to SEQ ID NO: 2476246
uacuauauacuggaaaccu

SEQ ID NO: 2476248 - RNA, 19 nt, Artificial Sequence
  Description of Artificial Sequence: Synthetic oligonucleotide
  Sense strand starting at position 2374 of SEQ ID NO: 1887494
cugugcccugcucaaagau

SEQ ID NO: 2476249 - RNA, 19 nt, Artificial Sequence
  Description of Artificial Sequence: Synthetic oligonucleotide
  Antisense strand to SEQ ID NO: 2476248
aucuuugagcagggcacag

SEQ ID NO: 2476250 - RNA, 19 nt, Artificial Sequence
  Description of Artificial Sequence: Synthetic oligonucleotide
  Sense strand starting at position 2468 of SEQ ID NO: 1887494
ggugguugaguccagcgau

SEQ ID NO: 2476251 - RNA, 19 nt, Artificial Sequence
  Description of Artificial Sequence: Synthetic oligonucleotide
  Antisense strand to SEQ ID NO: 2476250
aucgcuggacucaaccacc

SEQ ID NO: 2476252 - RNA, 19 nt, Artificial Sequence
  Description of Artificial Sequence: Synthetic oligonucleotide
  Sense strand starting at position 2662 of SEQ ID NO: 1887494
caguuuaacguagacuauu

SEQ ID NO: 2476253 - RNA, 19 nt, Artificial Sequence
  Description of Artificial Sequence: Synthetic oligonucleotide
  Antisense strand to SEQ ID NO: 2476252
aauagucuacguuaaacug

SEQ ID NO: 2476254 - RNA, 19 nt, Artificial Sequence
  Description of Artificial Sequence: Synthetic oligonucleotide
  Sense strand starting at position 2828 of SEQ ID NO: 1887494
uguacauuagguuguugaa

SEQ ID NO: 2476255 - RNA, 19 nt, Artificial Sequence
  Description of Artificial Sequence: Synthetic oligonucleotide
  Antisense strand to SEQ ID NO: 2476254
uucaacaaccuaauguaca

SEQ ID NO: 2476256 - RNA, 19 nt, Artificial Sequence
  Description of Artificial Sequence: Synthetic oligonucleotide
  Sense strand starting at position 2841 of SEQ ID NO: 1887494
guugaacuccuccagacua

SEQ ID NO: 2476257 - RNA, 19 nt, Artificial Sequence
  Description of Artificial Sequence: Synthetic oligonucleotide
  Antisense strand to SEQ ID NO: 2476256
uagucuggaggaguucaac

SEQ ID NO: 2476258 - RNA, 19 nt, Artificial Sequence
  Description of Artificial Sequence: Synthetic oligonucleotide
  Sense strand starting at position 2933 of SEQ ID NO: 1887494
ggcagcauuuacuuguaau

SEQ ID NO: 2476259 - RNA, 19 nt, Artificial Sequence
  Description of Artificial Sequence: Synthetic oligonucleotide
  Antisense strand to SEQ ID NO: 2476258
auuacaaguaaaugcugcc

SEQ ID NO: 2476260 - RNA, 19 nt, Artificial Sequence
  Description of Artificial Sequence: Synthetic oligonucleotide
  Sense strand starting at position 2936 of SEQ ID NO: 1887494
agcauuuacuuguaaugac

SEQ ID NO: 2476261 - RNA, 19 nt, Artificial Sequence
  Description of Artificial Sequence: Synthetic oligonucleotide
  Antisense strand to SEQ ID NO: 2476260
gucauuacaaguaaaugcu

SEQ ID NO: 2476262 - RNA, 19 nt, Artificial Sequence
  Description of Artificial Sequence: Synthetic oligonucleotide
  Sense strand starting at position 3123 of SEQ ID NO: 1887494
ggaaccaucucggcuaacu

SEQ ID NO: 2476263 - RNA, 19 nt, Artificial Sequence
  Description of Artificial Sequence: Synthetic oligonucleotide
  Antisense strand to SEQ ID NO: 2476262
aguuagccgagaugguucc

SEQ ID NO: 2476264 - RNA, 19 nt, Artificial Sequence
  Description of Artificial Sequence: Synthetic oligonucleotide
  Sense strand starting at position 3585 of SEQ ID NO: 1887494
agacaauuggaacguuuga

SEQ ID NO: 2476265 - RNA, 19 nt, Artificial Sequence
  Description of Artificial Sequence: Synthetic oligonucleotide
  Antisense strand to SEQ ID NO: 2476264
ucaaacguuccaauugucu

SEQ ID NO: 2476266 - RNA, 19 nt, Artificial Sequence
  Description of Artificial Sequence: Synthetic oligonucleotide
  Sense strand starting at position 3592 of SEQ ID NO: 1887494
uggaacguuugauuacaca

SEQ ID NO: 2476267 - RNA, 19 nt, Artificial Sequence
  Description of Artificial Sequence: Synthetic oligonucleotide
  Antisense strand to SEQ ID NO: 2476266
uguguaaucaaacguucca

SEQ ID NO: 2476268 - RNA, 19 nt, Artificial Sequence
  Description of Artificial Sequence: Synthetic oligonucleotide
  Sense strand starting at position 3608 of SEQ ID NO: 1887494
acacuuacuguuggaugau

SEQ ID NO: 2476269 - RNA, 19 nt, Artificial Sequence
  Description of Artificial Sequence: Synthetic oligonucleotide
  Antisense strand to SEQ ID NO: 2476268
aucauccaacaguaagugu

SEQ ID NO: 2476270 - RNA, 19 nt, Artificial Sequence
  Description of Artificial Sequence: Synthetic oligonucleotide
  Sense strand starting at position 3611 of SEQ ID NO: 1887494
cuuacuguuggaugauacu

SEQ ID NO: 2476271 - RNA, 19 nt, Artificial Sequence
  Description of Artificial Sequence: Synthetic oligonucleotide
  Antisense strand to SEQ ID NO: 2476270
aguaucauccaacaguaag

SEQ ID NO: 2476272 - RNA, 19 nt, Artificial Sequence
  Description of Artificial Sequence: Synthetic oligonucleotide
  Sense strand starting at position 3617 of SEQ ID NO: 1887494
guuggaugauacuaagaag

SEQ ID NO: 2476273 - RNA, 19 nt, Artificial Sequence
  Description of Artificial Sequence: Synthetic oligonucleotide
  Antisense strand to SEQ ID NO: 2476272
cuucuuaguaucauccaac

SEQ ID NO: 2476274 - RNA, 19 nt, Artificial Sequence
  Description of Artificial Sequence: Synthetic oligonucleotide
  Sense strand starting at position 3620 of SEQ ID NO: 1887494
ggaugauacuaagaaguua

SEQ ID NO: 2476275 - RNA, 19 nt, Artificial Sequence
  Description of Artificial Sequence: Synthetic oligonucleotide
  Antisense strand to SEQ ID NO: 2476274
uaacuucuuaguaucaucc

SEQ ID NO: 2476276 - RNA, 19 nt, Artificial Sequence
  Description of Artificial Sequence: Synthetic oligonucleotide
  Sense strand starting at position 3651 of SEQ ID NO: 1887494
guaacaauggcauacuagu

SEQ ID NO: 2476277 - RNA, 19 nt, Artificial Sequence
  Description of Artificial Sequence: Synthetic oligonucleotide
  Antisense strand to SEQ ID NO: 2476276
acuaguaugccauuguuac

SEQ ID NO: 2476278 - RNA, 19 nt, Artificial Sequence
  Description of Artificial Sequence: Synthetic oligonucleotide
  Sense strand starting at position 3694 of SEQ ID NO: 1887494
uggaaagaugccugccaag

SEQ ID NO: 2476279 - RNA, 19 nt, Artificial Sequence
  Description of Artificial Sequence: Synthetic oligonucleotide
  Antisense strand to SEQ ID NO: 2476278
cuuggcaggcaucuuucca

SEQ ID NO: 2476280 - RNA, 19 nt, Artificial Sequence
  Description of Artificial Sequence: Synthetic oligonucleotide
  Sense strand starting at position 3730 of SEQ ID NO: 1887494
auaugauuguauggauuug
